United States Patent Application Publication US 2012/0017292 A1 - sequence listing, part 15

SEQ ID NO: 67176 - protein, 344 aa, Zea mays
  Coding DNA Sequence Number=SeqID_23801
  Gene Ontology: Mol. function=DNA binding; Biological process =regulation of transcription, DNA-dependent
  Homolog annotation: Hit_ID=Q2R9D2; Match level="QueryCoverage=38%, HitCoverage=31%, E-value=2e-17, Identity=43%"; Hit description=B3 DNA binding domain containing protein, expressed
  Pfam annotation: Domain name=B3; Domain location=99-197; Score=57.2; E_value=5.6e-14; Accession=PF02362.12; Description=B3 DNA binding domain
MRGRKRQQVSASSAAALVKGRESTKQKEKEARKEKEAREAGREPAAKERQMRRKAGKEKETETGGEGKEPAKEKEVREEGKENDKHKEKAKTKANVCPQFFKVFFPEQSTERLRIPPMFNQHLKEQQPTGAVSLRGPSGNRWQAALASESESEAAWCFDQGWKEFVTDHSLRLGHFLVFTRDGPAQFSVAVFSSSGVIDPAALDARPTANGGAAVKLEDGEGVGVRGDVDAGGDTSSEVSLLPAEEGDGGATGRRTGATSGGAGGASEMSLVLREEGRGVTGKRARATTSDLPADASAPKKHSALAKKADPTFSLLDESKTFNKTQIRDKNVPRSGKFPLDCIV

SEQ ID NO: 67177 - protein, 278 aa, Zea mays
  Coding DNA Sequence Number=SeqID_23802
  Gene Ontology: Mol. function=alpha-1,4-glucan-protein synthase (UDP -forming) activity; Cellular component=cellulose and pectin -containing cell wall; Biological process=cellulose biosynthetic process
  Homolog annotation: Hit_ID=A2YNI1; Match level="QueryCoverage=99%, HitCoverage=64%, E-value=1e-119, Identity=78%"; Hit description =Putative uncharacterized protein
  Pfam annotation: Domain name=RGP; Domain location=1-265; Score=371.9; E_value=1e-108; Accession=PF03214.4; Description=Reversibly glycosylated polypeptide
MVAKDPSGNDINALEQHIKNLPSPSTPFFFNTLYDPYRVGTDFVRGYPFSLREDVPTAVSHGLWLNIPDYDAPTQLVKPLERNTRYVDAILTIPKGALFPMCGMNLAFDRELIGPAMYFGLMGDGQPIGRYDDMWAGWCTKASDYYQYMLIDCTLLGDFSLVLVQYLCTDKTMPNVSSAATNSKASNPFVNLKKEYNGIFWQEELIPFFQSVSLPKDATTVQKCYLELAKQVRARLGKVDGYFNKLADSMVTWIEAWDELNPAKGGVRVPTANGPHKK

SEQ ID NO: 67178 - protein, 271 aa, Zea mays
  Coding DNA Sequence Number=SeqID_23803
  Homolog annotation: Hit_ID=Q4UHE7; Match level="QueryCoverage=45%, HitCoverage=34%, E-value=6e-07, Identity=33%"; Hit description=Tash1- or TashAT-like protein, putative
MDLTCSERESILHIYRPTETSGIIAHRLPIAAGGKKESQKRKTKRLYLVELLDKIRQMLMVKFELRQRIALERFDGHMIIPAVMKMLHEKTRDPAFGEDQPQEPQLQLHTALGDDESIEPQVPLHTALGDDESIEPQVPLHTALGDDQPQEPLDTAFGDDQPQEPLDTTFEDDQPQEQQLALDLANGDDESLEQQLTLDPSFGDDESIEPQVPSSVASMVPSSVVPSSIASVVPSSVASVVPSSAVSVVPSSAASVEPSNLALVLPSSRLY

SEQ ID NO: 67179 - protein, 156 aa, Zea mays
  Coding DNA Sequence Number=SeqID_23804
MAFPGTPARKIVPGGFTAARTAVASGGALSFDLDGADDFFWGLWQLVKAKAAEAAAYLAALFAALAEKADEIFPPETRSETLRQWMRVAVSVVIPALVVALVLCCCCCACRRARGGRRARFMAAPGRGGARMPRGAFENNPRLYFRDLRAGKPLLY

SEQ ID NO: 67180 - protein, 97 aa, Zea mays
  Coding DNA Sequence Number=SeqID_23805
MHASLHLLLLEFPLPCRLAGRVSVSSSGSWSGEDNAYIALPDLFTSGSFISSLTGGRVYSQGRLPLRVSSSGSGGDGQQLMQLYASSSSSRRLGYYK

SEQ ID NO: 67181 - protein, 148 aa, Zea mays
  Coding DNA Sequence Number=SeqID_23806
  Subcellular localization annotation: CTP_CleavageSite=102; ConfidenceScore=5.01e-01
MLSTAACLAARHLLSLTSASKAISLSLASFPVEPLLCPTHTPTIPPNSIPGLAAFDALNMVHHSSVSRLLVIPRHKSLCKLSDVRLYMLRMLNNRLSDLLILCRLGRTQIVPYVKVVNVPKHRKQLDRGQEVKMSKFQNCKSLISSKA

SEQ ID NO: 67182 - protein, 80 aa, Zea mays
  Coding DNA Sequence Number=SeqID_23807
MGRRLDGHLGGDWGEAEGVVAAVVEEQVAGATSVTEQVANTGDLDVSKRVVGDEGGGGGRLCPTASGAGGASRARATSAR

SEQ ID NO: 67183 - protein, 279 aa, Zea mays
  Coding DNA Sequence Number=SeqID_23808
  Gene Ontology: Mol. function=metal ion binding; Biological process =metal ion transport
  Homolog annotation: Hit_ID=A3BM08; Match level="QueryCoverage=25%, HitCoverage=22%, E-value=3e-24, Identity=70%"; Hit description =Putative uncharacterized protein
MDFAELSTIVLKVDLECETCYKKIRKVLRTIQDKMNIETISFDEKSNAVTISGPFDSDMVCNRLCCKAGRVIKEMDVKGNEKDAKAKGGGGGDKPKDAAKPAAEEEGGNSEMKAEKAEKKEGKGRQGGYQVRQGREKETKDGKAEAETVEFDLDVDGVASAADAKPGKAMAMPPGMTKADLGPLLEKMMAPGATQSVVVPSIWPASAGFVSGYYGCNPGYEAPPSYYGAGAGAVYGGYYGVPVYDSQGWYYGGGARQQPYYPHQQQHCCEDPNAGCSVM

SEQ ID NO: 67184 - protein, 88 aa, Zea mays
  Coding DNA Sequence Number=SeqID_23809
MPARISSDGDFSLSLKAHGGGVIGGANREEKGETTASGVIGAGWRRGYGTQLTRETASSSGGSVTIAGRSGKKVALLTCRATMSATEH

SEQ ID NO: 67185 - protein, 358 aa, Zea mays
  Coding DNA Sequence Number=SeqID_23810
  Pfam annotation: Domain name=AT_hook; Domain location=180-192; Score =8.1; E_value=0.97; Accession=PF02178.10; Description=AT hook motif
  Pfam annotation: Domain name=AT_hook; Domain location=255-267; Score =8.2; E_value=0.91; Accession=PF02178.10; Description=AT hook motif
  Pfam module annotation: Pfam domain module=AT_hook::AT_hook; Domain location=180-192::255-267
MTASKKVRHVIRFRILFLFLFLSLTTGIEKGDTPKGILPREGNRPRAPLLIRGSKAGPSEGFNSRLRALGLCGHYWSEVQRPAPRKGSTTASGHSGSAPTTDQGGNDLVTESHQREASSPQTPSKGDRLTGDTMFDALQGQHGAFPPSSLRKGDAEAVRLTAAKSGLRRHRKLRLARPRARTRARPRKMTNSASPNPGLGLGLGPGRRRTPHRSTPGLGLGLGPGRRRTPPRPTQGSESGLAPEDDKLRLARPRARTRARPRKTTNSASPDPGLGLDLGLGRQTRPRPRRSLRLAQPRARTDHVTGGAIITLPQANSGYGEQDRRPIWLAPINKLQRSSDGHDTTRTGCQNLSGCHDG

SEQ ID NO: 67186 - protein, 77 aa, Zea mays
  Coding DNA Sequence Number=SeqID_23811
  Subcellular localization annotation: CTP_CleavageSite=49; ConfidenceScore=5.04e-01
MEGSGVDPTSARLTKPPRNPSATRQTNCFASYQSTHAGQRHDGCPLLVLLSQLKEWFRDVFSTPSSFVTPSVIFHHA

SEQ ID NO: 67187 - protein, 156 aa, Zea mays
  Coding DNA Sequence Number=SeqID_23812
MQAACNRAKWAHPFDSNAPSMEVQAHASCNRHAGCYVRATAPLLTPLPRLLDCGVNTATRGNPAVPAMRDGQMRTGGASGGRSKRRFAFAIMTASKKAPSLPTDQRFEGRPLGGVQRSPQIDWVLRPLLVRGSMAGPSKGSTAASGHSGSTPTTDQ

SEQ ID NO: 67188 - protein, 69 aa, Zea mays
  Coding DNA Sequence Number=SeqID_23813
MSSRSPHASCLSTFRAPGWGTLAILPGSDDGVRDPKAMDDVAPGCLLQGANEIQAHTANGQVMGMVCRA

SEQ ID NO: 67189 - protein, 512 aa, Zea mays
  Coding DNA Sequence Number=SeqID_23814
  Gene Ontology: Mol. function=structural molecule activity; Cellular component=protein complex; Biological process=microtubule-based movement
  Homolog annotation: Hit_ID=P29512; Match level="QueryCoverage=43%, HitCoverage=48%, E-value=9e-77, Identity=70%"; Hit description =Tubulin beta-2/beta-3 chain
  Pfam annotation: Domain name=Tubulin; Domain location=276-438; Score =114.9; E_value=2.4e-31; Accession=PF00091.16; Description =TubulinFtsZ family, GTPase domain
  Pfam annotation: Domain name=Tubulin_C; Domain location=440-512; Score=-2.0; E_value=0.0034; Accession=PF03953.8; Description =TubulinFtsZ family, C-terminal domain
  Pfam module annotation: Pfam domain module=Tubulin::Tubulin_C; Domain location=276-438::440-512
MPPLPSLPRPSTLPSTHRDIAPFSCDHRRANPTVVLLLACPFHQLERSLPYFSLPDIVPSALASCYLSLLDTVPAALASPTIPSISPPTPVLPLSLPDTVVVALTSHTIPLHPHEDVELFVRSLLSGIFLRGTSTLLGPTDVLLHDFKFELEQVLSREILCNENCVTVVANLMGTKFDFLAYSSTLKHLVLGQVEKAHSGDVHCVDWNPLDVNYILTGYDGIKAQFSIIVETNLISTSSLYVQVMNVSIDISGLPITLSECGIVGIWVQEELWSPDRASVFGSSAEDGFLNVWDHEKIWRMSDLIYRPEDEVLAELENFKAHLASCFQVCHSLGGGTGSGMGMLLISKIGEEYPDRMMLTFFVFPSPEVSDTVVEPYNATMSVHRLVENADECMVLCNEALYDICFRTLKLTTPSFGDLNHLISATMSGVTCCLCFLGQLNYDMHKLAVNLISFPRLYFFMIGFAPLTSRGSQQYRALTVSELTQQMWDAKNMMCVANPRLCHVPQPLPCSV

SEQ ID NO: 67190 - protein, 569 aa, Zea mays
  Coding DNA Sequence Number=SeqID_23815
  Gene Ontology: Mol. function=protein binding; Cellular component =nucleus; Biological process=apoptosis
  Homolog annotation: Hit_ID=A7NUQ8; Match level="QueryCoverage=96%, HitCoverage=95%, E-value=1e-160, Identity=51%"; Hit description =Chromosome chr18 scaffold_1, whole genome shotgun sequence
MSEEDEDQPPAKRPSPSPPADQVLDNVLETVLQFLDAPRDRSAASLVCRSWHSAESATRESVAVRNLLAVSATRTARRFPNARSLLLKGRPRFADFNLLPHGWDASAFRPWAAAVAAGAFPALTSLYLKRIPVTDADLDLLSRSLPASFRDLTLHLCDGFTSRGLASIASHCRGLRVLDVVECDMAEEQEVVDWVAAFPQEPSNLESLSFECYEPPVAFAALEALVERSPRLRRLGVNLHVSLGQLCRLMAHAPRLSHLGTGSFRPADGGEEGTGFGEVVSAFVAAGRARTLVSLSGFRDLAQEYLPTIAVVCAHLKSLDLSYSAVTPNQILMFIGQCYNLETLWVLDSVRDEGLDAVGISCKKLQSLRVLPLNAHEDADELVSEVGLTAISRGCPALRSILYFCQTMTNAAVVDMSRNCPELKNCSKLTRLSTSGQLTDRAFEYIGRHGKSLRTLSVAFAGNSDVALQYILQGCPKLEKLEIRDCPFGDAGLFAGMHHFYNMRFVWMSGCNLTLQGCKEVAQVLPRMVVELINGQSDENERNESVDILYMYRSLDGPREDVPPFVKIL

SEQ ID NO: 67191 - protein, 22 aa, Zea mays
  Coding DNA Sequence Number=SeqID_23816
MGRARARARGSPSPCHVSQPVA

SEQ ID NO: 67192 - protein, 489 aa, Zea mays
  Coding DNA Sequence Number=SeqID_23817
  Gene Ontology: Mol. function=binding; Cellular component=chloroplast; Biological process=metabolic process
  Homolog annotation: Hit_ID=Q8L5Y6; Match level="QueryCoverage=33%, HitCoverage=15%, E-value=2e-60, Identity=64%"; Hit description =Putative uncharacterized protein At2g02560
MGKLSSVGSNFMASAGSRSTSGGFDEGAKYFDGQILKAPNLHTFTFIELKTATKNFRPDSVLGEGGFGRVYKGWVDEKTMAPTRNGTDMVVAVKKLNSESMQGFEEWQMQYMIVDGVSSSWYIKFDTFTPAAERGLPVTRVISRMTLQQILARAVGYDAILNGSHVVNFTDDGSKVTAILEDDRIFELPYWRTVEYLKVRKTLFGHSDATYSGYTCYTGIADFVPPDIDTVGESANEYTDDEDASWKVRRASSKCLSAIIVSRPEMLVKMFLEACPKLIERFREREENVKPSLVAEARGPKVVKSINRQLREKSIKTKVGTFSVLKELVVVLPDCLADHFGSLVPGIEKALNDKSSTSNLKIEALVLTRLVMASHSPSVFHPYIKWMNMPDLLEVIDFKDTFLDANHVQQSFPDYQVTFINSDGTKNLHPSPPFKIRLSKKMRESSHALPGNMNSNLTVKSRNNMDDGEPQKEKLIVETYIPADPGPYP

SEQ ID NO: 67193 - protein, 165 aa, Zea mays
  Coding DNA Sequence Number=SeqID_23818
MEGHKSFQCKAMIGDKQRRKLKQKPSSKISNTYIKKVNKKDATPYLIKKKKNGKVIAIKANKQANKGKGAKRIWVPKEIISTMKSTKKVWIPKGNLLPSGLVKILDPNFPPMTKICVSIYLLSSLPFLPSFTFFMYFCSKSCILVHKMRRELDQGNEDATPQKKT

SEQ ID NO: 67194 - protein, 496 aa, Zea mays
  Coding DNA Sequence Number=SeqID_23819
  Homolog annotation: Hit_ID=A2Z4Z7; Match level="QueryCoverage=36%, HitCoverage=60%, E-value=3e-61, Identity=61%"; Hit description =Putative uncharacterized protein
MHGVHTAVEQGSIIFGRCSSDVKDPSEESQLLDADTDTEEDADADDSGVDKNVGHGGRWAVLSASVTISPCPNDMGVGARVSSRRPRRGPSSPGKSCGENRMQTETEGTARRCIERRARGSRREVHRGRRHQEDDIIESSSCELEVGSRPATVEQIVVAFEWALAVAAEVEAEGSSLLEARPRWWRCSQWTWSGMGRGPKLRRDVRVGDSEGVVRRVRGSRHKCAREMRLQTTLALYHSGRVAPQQATTIAHPPATASTFANLCLKRSAHSFNREVHYYPAHVPFPPFVVARTLGVRPIAGTSSAVFCAIERAMRFVVTKVCSGGGKARAGALHIAGAGIGIETPALLLSTRKGLPAFLSCDLLASLPLPDSLLLHVCPTHFIEGPPVKTISAIRGLHGMLGLPDHILVAAASDSIESLPSCEATNKFGASFETPSGRRLVKPSDYMELISCMKPNIWASLADEASGTNSFGVIVGGSSLEQRKLCATEVSKRNVS

SEQ ID NO: 67195 - protein, 140 aa, Zea mays
  Coding DNA Sequence Number=SeqID_23820
MSRLDPLPPTSSPPTHVDQPTPTTTTDDPHLDVIARDPRTSPDPSPEQPRRRKMIKVLENNEQWMQIFFLLHLSNEEPRKNKRNPSPEQIQDCNLADGEYMLIPEQGVVHEEDQEQAPETAIEDLEREMCLWAISKYFGD

SEQ ID NO: 67196 - protein, 87 aa, Zea mays
  Coding DNA Sequence Number=SeqID_23821
MGSGEAELPIAPKAGLSLCHPHSVEWHSSRSREGGAVFLSGAFGLGSEPHSMKSTNDTKIDAASKLRARELRHNGKKGNRLKREKAI

SEQ ID NO: 67197 - protein, 150 aa, Zea mays
  Coding DNA Sequence Number=SeqID_23822
  Homolog annotation: Hit_ID=Q6J9V9; Match level="QueryCoverage=57%, HitCoverage=31%, E-value=8e-10, Identity=42%"; Hit description =Putative uncharacterized protein
  Subcellular localization annotation: CTP_CleavageSite=47; ConfidenceScore=5.41e-01
MEAQAHASCNQLAGCYVRATAPPLAPLPRLLNCGTSTAGRSSGHVVSQAYVPSRGSERTLSHGVKTGPGKEDTPKRILLCEGNRPRASLLIRGSKAGPSEGFNSRLRARGLHTHYWSEAGPRRVHSRLRHRTRDDPGYVRYITKAQATLP

SEQ ID NO: 67198 - protein, 196 aa, Zea mays
  Coding DNA Sequence Number=SeqID_23823
MGPGTVLALPRLSVEYFLSEEMACLRHTARKSVIPFLPSRLAERRLRRTVSGQSSHLERLHHRLREEQERQRQHREQQGSSSPPEQEVESVRRRSTVPQLEAPPAPPRDAPAVGGATGGGPGGDPDDDDDSDHSTESSEPQEAEGWVARPITRDAARGCHFHDASDTLLRQAFSVIEAQFSTGLNRLNELEIGFII

SEQ ID NO: 67199 - protein, 258 aa, Zea mays
  Coding DNA Sequence Number=SeqID_23824
MAHVRHTARKSLIPFLPSRLAERPLRRTAPPAPPRDAPAVGGATGGGPGGDPDDDDDSDHSIESSKPQEAEGWVARPITRDAARGCHFHDALDTLLRQAFDRHTWSIEYRCVVYQHSHGRYPDRWEATCLVRRPEDDLRGAEAVSEHYSISERDTAEAAMHDAARQSVVVSPVGEDNPRLSSTVNLVAVLNTELDHSLDELSRAQTEIAELRAELAERRHQEGGSPAPVGTQHPYRSPPHGHHTYGSPACKTRIDLDP

SEQ ID NO: 67200 - protein, 153 aa, Zea mays
  Coding DNA Sequence Number=SeqID_23825
  Subcellular localization annotation: CTP_CleavageSite=17; ConfidenceScore=5.15e-01
MGLTSGPQMSELAVCVRARSRGLVRGSRMTVAGFLSTGPCGVGKGEWAKMSSGRPSGYYTKCKECIVLATPPAKSQMEQFKKVHAQFLQATSQVVARLQQVDLAEFIAHEQTTDNHMTSTTTSPSIVDLEKLLHAQTLIIQKASQLTSSNESS

SEQ ID NO: 67201 - protein, 185 aa, Zea mays
  Coding DNA Sequence Number=SeqID_23826
MGIRKKPEYVWKEYRENGIGNNKNTPTWRKRLQALSGRDPTEHDPTIVYMAGYLHTLDNHYNDLFSHSTHLNSRVESLEQQVKELKKEKASLQECLDIAEGEEANTREAYRTLKMDYDKKLKKLAPTKKIQKKTKKPGGQAGQKKKAPLAPPPARIENLSDVEDMSLASLDDLLKEFRDTLEKEF

SEQ ID NO: 67202 - protein, 89 aa, Zea mays
  Coding DNA Sequence Number=SeqID_23827
MAVLQGIPALELPINCSGFSEASQEQVLQDEAHGGCSGEFVRGVEILCPHDPDGADHEEAKHGEACIGRAIGIKDDDTRHDEAAYGGGK

SEQ ID NO: 67203 - protein, 74 aa, Zea mays
  Coding DNA Sequence Number=SeqID_23828
  Homolog annotation: Hit_ID=Q6YUA9; Match level="QueryCoverage=48%, HitCoverage=9%, E-value=7e-07, Identity=69%"; Hit description =Putative uncharacterized protein B1116H04.21
MRTRENFPVGHPSQIAPSQARLTWRFFRDRLPKKKMHLVGTLQDMVDGVTWPTTLPPGWTVEWDAAPVGEEQEE

SEQ ID NO: 67204 - protein, 180 aa, Zea mays
  Coding DNA Sequence Number=SeqID_23829
  Homolog annotation: Hit_ID=A2XDL9; Match level="QueryCoverage=32%, HitCoverage=9%, E-value=2e-07, Identity=55%"; Hit description =Peptidyl-prolyl cis-trans isomerase
MDNLGIEAKEAAAREIGHHAWDGADPPHGALHGEESGVPQAAQVKPAPKTRSVCKLSLEKSDPMDGDLDKINNNNHTVLFRQLSVHGTCFGIHKDSFFYQEQTAINKLIRALDKVGSWYINLETDVVGSTITSGRVGKYLKALTAGSVDVTGNVVATDDSSENRQADCINSYLQKSFIVL

SEQ ID NO: 67205 - protein, 120 aa, Zea mays
  Coding DNA Sequence Number=SeqID_23830
MAGCTEGDATEVGGDGGGAVGGAVGGDAAAVDRKDRRDVDTRLSRAVFGRDAGPLLRSSYSRSVITPAGLCPRAADTLTGLCPLAHASSFLLNVGQLFGALLRTAHVPGSATPSIPKEHL

SEQ ID NO: 67206 - protein, 198 aa, Zea mays
  Coding DNA Sequence Number=SeqID_23831
  Homolog annotation: Hit_ID=Q2R3H9; Match level="QueryCoverage=69%, HitCoverage=34%, E-value=9e-56, Identity=82%"; Hit description =Fructose-2,6-bisphosphatase, putative
  Pfam annotation: Domain name=PGAM; Domain location=118-198; Score =2.3; E_value=0.0012; Accession=PF00300.13; Description =Phosphoglycerate mutase family
MGSAHSSVSTTGGEDEEDDEDPSASAVSSAGAQAPPPALSPSPVRVPPASASKVLEQEPEVLPCLAADSPLSPQPSAAGTPRLLAGPGIKVWDPCHVLLPPPPPSPHAGRQVDAAAIEVVVVSHGECAAAMRPDLVGGRWPATALTARGERQARALAVFLRSRGARLAAAYASPLDRARATAALVCRLVDIGTSVING

SEQ ID NO: 67207 - protein, 58 aa, Zea mays
  Coding DNA Sequence Number=SeqID_23832
MTVVTSPTSLDTSPELNRRRKIKKGIENRNQRVTIFFLVCLSDIDHRKNIWNPGLVLI

SEQ ID NO: 67208 - protein, 381 aa, Zea mays
  Coding DNA Sequence Number=SeqID_23833
  Gene Ontology: Mol. function=ribonuclease H activity; Biological process=DNA integration
  Homolog annotation: Hit_ID=O48967; Match level="QueryCoverage=92%, HitCoverage=99%, E-value=2e-89, Identity=46%"; Hit description =Putative uncharacterized protein
  Pfam annotation: Domain name=Retrotrans_gag; Domain location=174-273; Score=15.4; E_value=0.0017; Accession=PF03732.8; Description =Retrotransposon gag protein
  Subcellular localization annotation: CTP_CleavageSite=80; ConfidenceScore=5.01e-01
MVQIVEHCAKTSVDFLVEEEAASSTPQVPNRPVSGTAAVHTAQQRTTAQTSRTLSRAAPGALSAARELLCHPPSSTASPGAMKQWRDDVDRLLVMAHSGSTRLRPRTSRCQHEASASVRSPSVRGAQTNNLRAELNRRRAGEDARVSLERARERRQNIEGRNLDQDFAAVTPQTLVGAPFQAVVPLAGVGCAPHSWIIFVPRLGHPNSGRTCRKSNFVSAYQQHGVEAHLHAVRQEPGETLRTFISRFTKVRGTIPRIYDASIITVFRQGMGGSGAVPRDGKKKKKGCDHEKPWSSALVIAAATRGRGDHNKRPRPQRGNSVSCPVHPNSRHSATECREIIELAKRVSGRHEQSSRSSRRCFCLEDLRRRRRPPTVAPSRC

SEQ ID NO: 67209 - protein, 1217 aa, Zea mays
  Coding DNA Sequence Number=SeqID_23834
  Gene Ontology: Mol. function=phosphoprotein phosphatase activity; Cellular component=intracellular; Biological process=embryonic development ending in birth or egg hatching
  Homolog annotation: Hit_ID=Q2R3H8; Match level="QueryCoverage=97%, HitCoverage=94%, E-value=0.0, Identity=59%"; Hit description=NLI interacting factor-like phosphatase family protein, expressed
  Pfam annotation: Domain name=BRCT; Domain location=1142-1217; Score =24.1; E_value=0.00052; Accession=PF00533.17; Description=BRCA1 C Terminus (BRCT) domain
  Pfam annotation: Domain name=NIF; Domain location=915-1141; Score =15.2; E_value=1.5e-09; Accession=PF03031.9; Description=NLI interacting factor-like phosphatase
  Pfam module annotation: Pfam domain module=BRCT::NIF; Domain location= 1142-1217::915-1141
MAREQPRSAVVAAGGDLVTAAGGGGEGSDRDSSGSIEEITADDFKKDSSSALGGAAAAAGPRSRSWVAPPAVGYMARNFRYAFNSFAWSQAVRNKPLGLQPPAPDDDEVEHAVDVSDGEKEEGEIEEGEAVEALASPAPAQPETIDLDSDAPEKSESVAIDGSASVVPVPAAEEEEVNLDQRVGSILEELEMVSIEEAEKYMGICFMFFLEQRLCFRSFEGACARLHTCFENLKPLFQELENGSPMAILEPLMQQAFIGIDTLTTVANLYNLPRREQNKTTLLKLLFHIKNRYSDMLTPEQREEMDSRVRKLVFGEKDNVSDPSTSCGTSAINVSAPSGQVSNTGGLPFESGAANLFSSLPRLEVPAKRNSPLLNLHADYDENSLPSPTRDNAPPFPALKPIGFGAFPMVPEKLSFLDRVEPTKNSLYPPLNDPLKAVSSYQQKYGQKSVYPSDDLPSPTPSGDEGKPADKGGDIFSDVSSFPVPKSIVLPSTSQMPASQPSTVSSSSISYASSTSQMAASQPITVSSSGISYASGPPGFAKQIEQSTAGPNHAIKAASKSRDPRLRFLNRDSAGATDVNWRANFSELKDGNLGGVSVGNRKQKAVDDPQVDDNALKRFRGGIANQRDMQPTGNPNQLMNIRAPTHSSSINMKTLQPPQTTAPHVSAAPAVPLPPMLLKDIAVNPALLMHLIQMEHQKKSASESQGGMSSGMTNNGIAGMVFTPGNAPKITEAAQVPSVRPQVPVQTPPLNSQNDGGIVRMKPRDPRRILHNNIAQKSDAMSLEQVKNNGTTQPDSQGTKDQTTPVPSQPALPSSIARPFSSAKHVDPVSNSQLAATAIMAPTQALSSVNKVDPRLAVEQNGQNADATTNGASATTLEATQPVSPWGDVDHLLDGYDDQQKALIQKERARRITEQHKMFSARKLCLVLDLDHTLLNSAKFIEVEPIHEEMLRKKEEQDRTLPERHLYRFHHMNMWTKLRPGIWNFLQKASNLFELHLYTMGNKLYATEMAKVLDPTGTLFAGRVISRGDDGDPFDSDERVPKSKDLDGVLGMESAVVIIDDSVRVWPHNRHNLIVVERYTYFPCSRRQFGLPGPSLLEIDRDERPEDGTLASSLAVIERIHHNFFSHPNLNEADVRSILASEQRRILTGCRIVFSRVFPVGDASPHLHPLWQTAEQFGAVCTNLVDDRVTHIVANSPGTDKVNWALSKGKFVVHPGW

SEQ ID NO: 67210 - protein, 140 aa, Zea mays
  Coding DNA Sequence Number=SeqID_23835
MEKPSRSTSATGETKDRGVWECSPQLVDHLRHDEVDKGVAFTSLFVGLHCGSLPETSSEVDGEPLDTSILYHAPNIDRFTTIELTDGPNLYNSFVYRRAHVGTIESRSAMPPSQKHYVGYPVAPGILLPRLIGTQAQALV

SEQ ID NO: 67211 - protein, 208 aa, Zea mays
  Coding DNA Sequence Number=SeqID_23836
  Homolog annotation: Hit_ID=Q6JAD6; Match level="QueryCoverage=19%, HitCoverage=5%, E-value=2e-11, Identity=85%"; Hit description =Putative uncharacterized protein
MVRMKNVSALGGGDDEDPPRPFRQVKGKTVYLEQQEGHKKRRLDRAARGALAAAAATEQAERAHFQERDETEVRPIAADPRMIDLQRATVARILLDALTAESLQPLLTSRPCSDRLSQMGRGAHQLISPLQQTPEDPVAVLDPVPDTQAEDAVFHQFETQGTAIPDDDDFGIPPPPLVPPRSHDHEAGSSSAAPAAPPVIDPTLAAIV

SEQ ID NO: 67212 - protein, 426 aa, Zea mays
  Coding DNA Sequence Number=SeqID_23837
MEAEKTDLRRQLAEERREANKAIADAQAAQAEAKVARTEGSLARQRAEELEARFNALRSRVDKTEASTRVEVERTHAQFVDAYRELGGATGAPDHCDRFHVLRLPRHLRGGRECFVPRGCRHYEVFDQADKNFEREIFKVEDPMLKQSAGALFDRMWGPHDREAVRERSDRAIDQMAHAEDVEDLGGLDGALLEATEVDPALPSDAGEGPSTTPAPTAAGEDPAPAPAPTCEDASKAVAELATEDPVTAAEPSQVLTFGLAQATTTDNTNFAVETSISVPANDEVPGSVSECFESDGESGSSFLWTEESSDEGLDYFVVLDVAAAETSPRVVGAEDLPGASTGYRRRRAVAKRRVSELSRSGRRHRSEMESGRLCVDGTGKRELLSLPARASVGEGELRNLFEDEELRIMLFNYREMGIIPKVEPM

SEQ ID NO: 67213 - protein, 232 aa, Zea mays
  Coding DNA Sequence Number=SeqID_23838
  Homolog annotation: Hit_ID=O48967; Match level="QueryCoverage=69%, HitCoverage=34%, E-value=2e-28, Identity=45%"; Hit description =Putative uncharacterized protein
  Subcellular localization annotation: CTP_CleavageSite=85; ConfidenceScore=5.50e-01
TSTYARRTFGMGSRPFYAGSGPLTARQGPNAVTWPTAVTRRPSHPVGGVPIQSIAKQYSRAARCMLGMMVRIVEHPTDASEDFVVEEEAASSAPRVSSHPMSGAAAVHAARQHAPTQASRTLSRAAPRALSAARELLRHPPSSTTSSGAMKQWRDNVDRLLGMAHSGSAMPRPRSSRRQHEALASVRLPSVRAAPTKDLRTELIRRRAGEGAITSLEEPDDMRTELNRRRAG

SEQ ID NO: 67214 - protein, 329 aa, Zea mays
  Coding DNA Sequence Number=SeqID_23839
  Gene Ontology: Mol. function=protein dimerization activity
  Subcellular localization annotation: CTP_CleavageSite=76; ConfidenceScore=5.33e-01
MAQPSPIWSSPQGGPQETGHGPHGHTPKCSAPQPLTVSLLVTSGYRPIGSPPPVSLPHPLGLSLSLPKMETLAPPRSVEAWSRVGCRRRRTGLQQSAVSVAETPEVQHSDPPAPSPCSAVRSSPSSRRRPRPVRLSDTHLPITGRRLATMEAEEPDGHEGHLRPPIPRSSGSMSKCTRKLVPAAKKMSAAARTTPSSSTSHCSDVSVSVEKQLDVVMEEGQGEELELEVMLSELDDSEFDHHDEFPPSTDGDELSKTKKTKRGGKRSRAGIELSPSKCKANRVKRAGCWKYFKVVTVASRKELGVMETKAKCKFCHRSYLYHQGAALQH

SEQ ID NO: 67215 - protein, 96 aa, Zea mays
  Coding DNA Sequence Number=SeqID_23840
MVSTSSCKNFRFFGHPSEKLCPVYGRKKTLDKLTDQPGNLIPIDEAEVPDLSASRDNSDLAEDDPCDPTTTSKPEAPMQSLNQLPVVTDLADARSA

SEQ ID NO: 67216 - protein, 96 aa, Zea mays
  Coding DNA Sequence Number=SeqID_23841
MTRHVASKKVLDQQAYIDSVLKRLRRRHYTETLFSCKSPVWSYLYHLQPQVCYLTEATRNGNQFPRKGMKQLFSTELLSPNASSQMIKSLKQQGKG

SEQ ID NO: 67217 - protein, 87 aa, Zea mays
  Coding DNA Sequence Number=SeqID_23842
  Homolog annotation: Hit_ID=A2X255; Match level="QueryCoverage=93%, HitCoverage=4%, E-value=6e-32, Identity=85%"; Hit description =Putative uncharacterized protein
MAPLPPRELLSVIEAALLGSTAPSPAQRVELLHAVRDAAPAFRTLLSYPVPKASDRTQVESKEVRLPGMPPITLDDTDVRTGLFVYR

SEQ ID NO: 67218 - protein, 183 aa, Zea mays
  Coding DNA Sequence Number=SeqID_23843
MQQVQQQPQPLPQVQMPQLPRDKRAEFMRVEWELHIAQCNVKEKVLYGPRLLRGAAHSWEEFRENFHLYHVPEGLMIVKKEEFLALKQSYNDREEAQGNGRSEAQDKWTPAWEQRLSPFLRQLISTVQAWPPTWVSAAESAPESAADPETVLAAATVPLEQSTRRKPISEAEQSCTSPSCPNN

SEQ ID NO: 67219 - protein, 253 aa, Zea mays
  Coding DNA Sequence Number=SeqID_23844
MGQVNVVEIKEAAEKGGDGKAEAAEKKRSVDYRLVGILCQDSSPVANPPRTKFPRRKNPDGYEVEKFSFGNNGHMWRLATGPAAAATAAAPGAALAAAASGAARAAAASGAALAPVAAAAAPAAAAAVTVVVATVVVAAVVVVVILAAVRVLLIQGELRLIRALEPGALDGPDVRPDFRGNPPGESSESSDDAGGETGAEDPSDSEENSSSEYSESSKSSDGGVGSRLRLLLLPMAEADRREEKDVVKNSEEM

SEQ ID NO: 67220 - protein, 193 aa, Zea mays
  Coding DNA Sequence Number=SeqID_23845
MACTKTTQRKATRPRSVPRHHLAPRHEGSSSGSNDPIGDLEAKVERLMPELRHGNREHARDSRRIAELSAEVNRLQQEIVERDTAIDWVVNSRSFALDYEANALARVAELSASLENLQAYCNTLHEEVHVLYDRLRLNVAPEVAAMGARPSGAASGGPDGELDLFGAPLSMNLADERSPDAGSGAGAAKDKDN

SEQ ID NO: 67221 - protein, 67 aa, Zea mays
  Coding DNA Sequence Number=SeqID_23846
  Subcellular localization annotation: CTP_CleavageSite=40; ConfidenceScore=5.38e-01
MSKNQRPKISSMKTVSSPYRPSTNIRLKPRPGRDNPVIPREFNKGDLILARTTRTESRGKLTNQADS

SEQ ID NO: 67222 - protein, 88 aa, Zea mays
  Coding DNA Sequence Number=SeqID_23847
MAPKRASSKAAPSVDEAAKAALLAEKKGKALVYTTHQEACEDDALSKRQRNEQPTPEGSLRTCSSGGQPQPPPGFTPPEGADTTKDGE

SEQ ID NO: 67223 - protein, 111 aa, Zea mays
  Coding DNA Sequence Number=SeqID_23848
MWNNSSDRARRHVRTTRTVRANGTHDFNALCPDINEDRLLRLAIDKATGLTACAGHAGLAAQAASRARTLRLWWGCAGPQWGTAHRAGLHRGSPRAQGTPGWLRAALGRCA

SEQ ID NO: 67224 - protein, 118 aa, Zea mays
  Coding DNA Sequence Number=SeqID_23849
  Subcellular localization annotation: CTP_CleavageSite=88; ConfidenceScore=5.18e-01
MDKDRQDARKHRVFTRVRDPSHKVKKARGISRSTAFGSSKPPPAAKPAIPGPSKPSSGAKVVAPGSSKTPSAEPTLERGSSSLLRTAEAAAGGAELSMDICVGDYSGGEVLMFAARRF

SEQ ID NO: 67225 - protein, 32 aa, Zea mays
  Coding DNA Sequence Number=SeqID_23850
MGRLEPRAEWESWLVGKVCNLYRVLETGSASG

SEQ ID NO: 67226 - protein, 341 aa, Zea mays
  Coding DNA Sequence Number=SeqID_23851
MGLCVSLGGTAGAEAARAAAPSCKCGTALVLMPSGDMREYPFPATTAARVLEDASAAADGGDGWLLCDADGMGFEGPAPPAVPHAEPLRAGQLYFVLPAAARRRGLRREEVAALAVRASAALSSRASASASAAPGRRRRGAVVAPLVFAPPPEDEEEEREQQKSTALAAPPVRRPARPGRRLVRFASDLTAIPDLERNRKLRLARPHAPASGGGLRLARPQAPASGGGLRLARPPDSASTPVSEGIASSPDPDVGLKRSLRLGRPWARNDRANMGCIISLFLACSGYKEQDRRPIWLTPATGLRRSSGGHAITCTGPKLSPNGHVGMYTGLRHSTVGHVSA

SEQ ID NO: 67227 - protein, 299 aa, Zea mays
  Coding DNA Sequence Number=SeqID_23852
  Homolog annotation: Hit_ID=A2YHQ7; Match level="QueryCoverage=94%, HitCoverage=99%, E-value=3e-56, Identity=46%"; Hit description =Putative uncharacterized protein
MDGEEIGLVLARASDLRTRISACAAAAAGAPGPRRDDEEAAKRLDAAEGDEEGAEEEEDEEEEVESLVGISDALESLERQLAALQDLQHQQRYERETILSQIDRSRRSLLAKLREYKGQDCEVIHEAAAFAGERIERDDSLVLPPYSDHVTNSFALDDLYPLSYMSKPKRLHTQPDSEDDGTAQDDARRNGRESRDTRASKRGSGGGGGGGGGGGIGAFMGWVAKTAVMVVGAVCVMKAAGYESVTWRNGGARLDIAGLFGGGGGKGEVPFDAVLAPPSSRYGLRLKPTLPPLRPSPNV

SEQ ID NO: 67228 - protein, 387 aa, Zea mays
  Coding DNA Sequence Number=SeqID_23853
  Homolog annotation: Hit_ID=A5BJA4; Match level="QueryCoverage=71%, HitCoverage=36%, E-value=2e-57, Identity=45%"; Hit description =Putative uncharacterized protein
  Pfam annotation: Domain name=DUF547; Domain location=147-296; Score =162.6; E_value=1e-45; Accession=PF04784.5; Description=Protein of unknown function, DUF547
MTSSETTRRQKNVSCDYSHELADSSEDPSNRRGDGGAWPGCTAGWRPAAAGAPPPVGVVGVGVAVSRRARSPNTVPRRRRQQHVSPTSSSSYHCGRRDAARLVINPFRVEGVKELFSGPYSAMVEVPAISRDRPRLREAEDLLQTYKLILYRLETVDLRRMTGGEKLAFWINVHNALVMHQNQLKTTTSLLVKAECKIAGRAINAAAIQGLVLGCTAHCSSGHWLRALLRYPRTTTKASRRASRAGGEEWRAFAVRQPEPLLRFALCSGSHSDPAVRVYFPKRLAQQLEAAREEYVRATAGVRKDDRRVLLPRLLDAYARDAGLTADRLLDAVQRCLPETLRTAVQRCRRRGDGPGAAKAVVEWVPHRRSFRYLLARDLAFPHLSLS

SEQ ID NO: 67229 - protein, 280 aa, Zea mays
  Coding DNA Sequence Number=SeqID_23854
MSESQQQQQGRLPVVQFPQGFDIVFVTSFDEGVFSLDLKSLQRRVVDEDKEGAAVFPCVAFYNPAYKAQDEAMAPAVFFSHNASGCRCGRHNREELNPLLEAAIWEQVKDAAPGIASVILDAIVFTISSMAGLGAAWSRDKWKDRTTACHARVISVRPDTRDLRRLGALGEASRIRDEYSAPRSTGTLFRQQTGHVRRLQGGPGAVCQRNGQDAINAVGAHHLSEGGPAPSGPDGVVSENATLTAYETPLGLFSARLRVAAQPSCFHTVVRGTPNPGYRQ

SEQ ID NO: 67230 - protein, 265 aa, Zea mays
  Coding DNA Sequence Number=SeqID_23855
MTTSLVVERSESGCGLLPALSFKDVHHPRWGGRRAELGSCLPHGLVTRFFLQYLEEKDVHQPCGGGEPRLRGAGRLQAPSAAACLAPWLGWLWCRLQRCLPPPRGAWLSVHRTGDGRAVRRSTASVASLAPPATLLQRRPGGRTRRRTPWRWRPHSWMVLSSPPQEGGGEDLSARAEASAVAGKPLVQRWPLSSILRWSPPLAGLPVAEVVAAASEAAQCRGGCLHWRDHQRHLPPSLQLFGFNGLIVAPRRRTGARTSSQWRMH

SEQ ID NO: 67231 - protein, 200 aa, Zea mays
  Coding DNA Sequence Number=SeqID_23856
  Subcellular localization annotation: CTP_CleavageSite=86; ConfidenceScore=5.39e-01
MGGSTLRNSHKERATALLLYALPSSPQPAVKKANRRTRNVQPPCGYMPFHLRRNQRSRRRTAAQGACTRPAVARPLSFAATGGSTSGMGAPGPHAIHPARRFLGTGKSHCRSRQYRASLRPSQKTKKINFQKPTQRLEAPRAWPNKGIKYGGHGPVSHRGRHGSRRDHRRAGSNCINGRAGAASRSPVKLWPRLQARILP

SEQ ID NO: 67232 - protein, 233 aa, Zea mays
  Coding DNA Sequence Number=SeqID_23857
MTKVDACRRWSKRVHRSFGSVPSSVSLVLLRIVILAHVRRFEGCRGAVPRQRFGQVAIDLLPLHASGQATFRAIQRPQGCQRYSYGQPLLILKGLWDDGWRVGYFALQMKVHSFHNQLLKVQTDQAYAIFSDMDAVALVHNDCVQLRPIPWPSFRLCSEGHIKVLKMLLADQGAEQFFVMIWDPGGTSRSLRRAKEMLPVCLCRKSSNCLRTMRCREEVCCPNSHWAGPEWAK

SEQ ID NO: 67233 - protein, 575 aa, Zea mays
  Coding DNA Sequence Number=SeqID_23858
  Gene Ontology: Mol. function=transferase activity, transferring glycosyl groups; Cellular component=membrane; Biological process =cell wall biogenesis
  Homolog annotation: Hit_ID=A2YU28; Match level="QueryCoverage=99%, HitCoverage=99%, E-value=0.0, Identity=61%"; Hit description =Putative uncharacterized protein
  Pfam annotation: Domain name=XG_FTase; Domain location=58-549; Score =540.4; E_value=2e-159; Accession=PF03254.4; Description=Xyloglucan fucosyltransferase
MAVMSGAADSMLPKLVDDPEAVALAVEPWAQPGRKNKKTCRRALLVGSLMTLLLLACFVLGRESASSAAWLQIDLLAKLTAMNNGTAGLTTTTHAPHGRDELLGGLLPAGMNRRTCRSRYESWRYYKYFPYAASPHLQDKLRAYEARHRRCAPGTPLYAKSVEQLRSGRSADGMECTYVVWLPFDGLGNRMLSMVSGFLYALLTDRVFLAALPADSADLFCEPFPDTTWRLPLEDFPVADLLPRGQSIERSYTSLLDAKEVGPDANATAGVPPYVYVSLGWQLKDPLFFCGEHQLVLGKVNWLLLYSDLYFSPSLYAVAEFQDELRRLFPAKESVGHLLSRYLFHPTNPVWSLTTRYYRSYLATAKRRIGVQVRMFSYGSISADDMYSQILACSQQEHILPETEDGDEDEVVAATRNGDNADGSNSTAILVASLYADYYERLRSRYYDHGAKGGERVAVFQPSHEERQATDNMAHNQRALAEIYLLSFSEELLTSGRSTFGYVSSNLAGVRPTIMLTAYDHKIPEPPCRRAVSMEPCNLTPPLGVECRGKPVDKEDLARHLRVCEDSKDSVKLFD

SEQ ID NO: 67234 - protein, 395 aa, Zea mays
  Coding DNA Sequence Number=SeqID_23859
  Gene Ontology: Mol. function=G-protein coupled photoreceptor activity; Cellular component=membrane; Biological process=regulation of transcription, DNA-dependent
  Homolog annotation: Hit_ID=P93528; Match level="QueryCoverage=65%, HitCoverage=22%, E-value=1e-131, Identity=91%"; Hit description =Phytochrome C
  Pfam annotation: Domain name=PAS; Domain location=219-324; Score =52.1; E_value=2e-12; Accession=PF00989.15; Description=PAS domain
  Pfam annotation: Domain name=Phytochrome; Domain location=12-189; Score=248.2; E_value=1.8e-71; Accession=PF00360.11; Description =Phytochrome region
  Pfam module annotation: Pfam domain module=PAS::Phytochrome; Domain location=219-324::12-189
MERKRWASGRWTDGLASPGLPCPGPGLSAGQAGHRWRHLVGAKTKGSSNNKVLVLGSTPSESEIKSIATWLQENHDGSTGLSTDSLVEAGYPGAAALREVVCGMVAIKISSKNFIFWFRSHTTKEIKWSGAKHEPFDADDNGRKMHPRSSFKAFLEVVKWRSVPWEDVEMDAIHSLQLILRDSLQDEDANRNNIRSIVKAPSDNMKKIQGLLELRTVTNEMVRLIETATARVLAVDIPGNINGWNKKATELPGLPVMEAIGRPLIDLVVADSVEVVKQILDSALQGIEEQNLEIKLKTFHEQECCGPKCEEGGQPSFGAVGLPAFRRGGMTLTVGSLDDHGAIMDRLCVFPSPPTAIKARATIMDSNHVPVLDSSYMSIIILGSGSQSNPTFGTR

SEQ ID NO: 67235 - protein, 239 aa, Zea mays
  Coding DNA Sequence Number=SeqID_23860
  Homolog annotation: Hit_ID=Q3E7Q5; Match level="QueryCoverage=87%, HitCoverage=30%, E-value=2e-52, Identity=46%"; Hit description =Uncharacterized protein At3g18860.2
  Pfam annotation: Domain name=PUL; Domain location=1-202; Score=108.7; E_value=1.8e-29; Accession=PF08324.2; Description=PUL domain
MSRLPAIVNVLKETSFYHTSKLADADMTLLVKILKSWPPQMMFPVIDFLRMFVLHPDGASLLLKTIETGNDILLETFRKAVASPVQPANLLTVLKAVTNLFGNSCLHQWLRTHCAEIIDSVSNCKSSFSKNAHLAYATLLLNYAVLSIESKEEQSQAQILSAALEMLKGLVKSLALDLDVKSVASSAKSSMDQKIAEVGDTVQYFSRRDADQTRNEYFDIICISIRHATTHKGPPKRVT

SEQ ID NO: 67236 - protein, 59 aa, Zea mays
  Coding DNA Sequence Number=SeqID_23861
MESHTKKPVGDVFLKIGLLEGQTSCSHSLVHGVGAESSIPMAGPHLSWALVQIRRGSVS

SEQ ID NO: 67237 - protein, 313 aa, Zea mays
  Coding DNA Sequence Number=SeqID_23862
  Gene Ontology: Mol. function=nucleoside-triphosphatase activity; Cellular component=plasma membrane; Biological process=protein amino acid phosphorylation
  Homolog annotation: Hit_ID=A2XMQ5; Match level="QueryCoverage=28%, HitCoverage=15%, E-value=2e-35, Identity=83%"; Hit description =Putative uncharacterized protein
MDEDFGYVSPLLAFNLGLHVSCLKLFIQREGHPFKFCSRAEEIDATARSGSDLYLHLDLLPCPQEPKYALHLRVSVVRIPDCLNSSFGGSEYQDMVTDMEPILRVNCNETTLVLGGAASAAIPPYSFFASSGNSVPLHSEVVEHLASVIAPALCPSDILPKIKFFTFLYGPPENEQGIFEEVLHGRLDFDVEPWPSVSEGAKDLVRRMLIRDPSCVCYPLLGHPWVQVGGLAPDKPLDSAVLSRMKQFSAMNKLKNMALRDEVEMDGRVVEQKVQMTAVVVEIRKKESGELVAIGRQWMTASRPKVAAAHSKI

SEQ ID NO: 67238 - protein, 448 aa, Zea mays
  Coding DNA Sequence Number=SeqID_23863
  Gene Ontology: Mol. function=phospholipase A2 activator activity; Cellular component=cytoplasm; Biological process=phospholipid metabolic process
  Homolog annotation: Hit_ID=A7P953; Match level="QueryCoverage=93%, HitCoverage=61%, E-value=1e-151, Identity=57%"; Hit description =Chromosome chr3 scaffold_8, whole genome shotgun sequence
  Pfam annotation: Domain name=PFU; Domain location=286-395; Score =193.9; E_value=4.1e-55; Accession=PF09070.2; Description=PFU (PLAA family ubiquitin binding)
  Pfam annotation: Domain name=WD40; Domain location=206-242; Score =18.4; E_value=0.028; Accession=PF00400.23; Description=WD domain, G -beta repeat
  Pfam annotation: Domain name=WD40; Domain location=4-41; Score=28.7; E_value=2.2e-05; Accession=PF00400.23; Description=WD domain, G-beta repeat
  Pfam annotation: Domain name=WD40; Domain location=50-93; Score=24.3; E_value=0.00045; Accession=PF00400.23; Description=WD domain, G-beta repeat
  Pfam annotation: Domain name=WD40; Domain location=97-134; Score =26.4; E_value=0.00011; Accession=PF00400.23; Description=WD domain, G-beta repeat
  Pfam module annotation: Pfam domain module=PFU::WD40::WD40::WD40::WD40 ; Domain location=286-395::206-242::4-41::50-93::97-134
MAEYRLGLQLHGHTDDVRGICVCGDAGIATSSRDRTVKFWTRNPEKESEYVLSKTLAGHSSFVGPLAWIPPSDRFPEGGIVSGGMDTFVFLWDLQKGEVAETMKGHSSQVTGLAVDTNGDIISSSMDCTVRRWRNGNAIEVWEAHKVAVQTVLKLPTGELFTDTVRFFSLNARSRNSFRLTRQHCQVMGVVRSAPAGHDRTFFSYGVCVQSIEHPGCIWDAKFLGNGDIVTACSDGTTRIWTADSNRFCSDEEIAAYTDLISQYTLSRKTVGGLKLMDLPGVEALQVPGNSDGQTLIVREGDNGVAYSWNSAELKWDKIGEVVDGPGEAAQGQVHDGVRYDFVFNVDIGDGEPIRKLPYNRSVADKWLLKENLPLTYRQQVVEFILQNSGQNNFVPDPSFRDPYTGANAYVPGQPSSSSNGNTPEPIFKHIPKIWCWRLPHEWGLGKE

SEQ ID NO: 67239 - protein, 170 aa, Zea mays
  Coding DNA Sequence Number=SeqID_23864
  Homolog annotation: Hit_ID=Q2QLN9; Match level="QueryCoverage=31%, HitCoverage=37%, E-value=4e-09, Identity=48%"; Hit description =Expressed protein
  Pfam annotation: Domain name=GRP; Domain location=35-158; Score=-8.9; E_value=0.0006; Accession=PF07172.2; Description=Glycine rich protein family
MTNAFDSGAAAELQEAGFALAPPHPLPQPFPLFPMATKPGRAAAAVLLLTLLAALHAAARNNNNNENRNPGGGGGDPGAFFAGMPRFSGGGVPGGGGFFGGWGEGGLGYRRGAVVPPSTVCPQDGPCRGKRLTCPPRCFRTFSYGGKNGGGGGGGGGCSFDCTERCAATC

SEQ ID NO: 67240 - protein, 239 aa, Zea mays
  Coding DNA Sequence Number=SeqID_23865
MDGQRWFRCRWWSVDSPLHPRRHQHRCLTRDRLHRPPWTSIWRHHCHHHPLQRQLLVVRHLHQCLWSSGPLLPVVGSPRVSSMLHVDASSSLAIAQVASPAWALDEGPTWALGAASHGPLGVASRWRSARPAQDARREPPRGVLGAASCGARRGPPRGARLRREPRRMARLPAPGGARAGHHKARARPPRSARRAGQAASGPATAGACFLAAAGIASVPTAASTLASGIGALKLCSITE

SEQ ID NO: 67241 - protein, 184 aa, Zea mays
  Coding DNA Sequence Number=SeqID_23866
MASEDDASTWSIDDTRGLPTTGSNGPDDHRHWWRWRTTSNCRCSGWWWQWCLQIDVHGGRCRRSRVKHRCWWRRGCSGESTLHHRQRNHRCPSMENAEVHILHLHTAFRDLVHRWECSGLPNGERFQHCIINNMKNFAHTAYAHGNVLSGKWKTTETNDRGSFLYCRDRCIYSVVHRVPKGCDP

SEQ ID NO: 67242 - protein, 346 aa, Zea mays
  Coding DNA Sequence Number=SeqID_23867
MEKQKSLKSWLSNCLPLSTVSSDAAFVRDAEDLAVRLVGRYVPRTEGQRSFDIRGSNDRLNRVFELNQLSYDGYPGQDEADRRGKKAVVETRDDPAPAAAPSSKKRKLGTAMGGLGVSDSFARELMRTCAAPGERMSSPELQESSARMLRVTGGCWPRNVPIPCAAEEDCFTSRRSGSGGLRRLWPPGGGKPPLAAKAGAAAPSKAPGGDGGAPEAPRPDEGQLAIAAPGAAIATATIVPKARGEALGAGGEVSALALVRDEAGAATRRLKGVTEALSQVADFASRTASGALTAAVSRPQRWRGHASDSREVLHERGVFCCIVFLDLAGNYLGVCLDDTCGDSEGP

SEQ ID NO: 67243 - protein, 28 aa, Zea mays
  Coding DNA Sequence Number=SeqID_23868
MGCLVALTLVLISSLLVVLTVGKVWFIN

SEQ ID NO: 67244 - protein, 394 aa, Zea mays
  Coding DNA Sequence Number=SeqID_23869
MSSRSLMHRVFPPFEPPDGEHPQSFRLAVGGTQLRGSWYLSAIVRLQGFSSCSPAASPHRWSPKTVTSSLMVERSEPGCDFGPALSFKDVHHPGWGGGRAEPDLFPPVRAGWPPPLPASSGGNHPPALWRRRPPAMPGRANCCCPARMQHSVLLLAFVARTGVRTCRCTLPTVGVGREADAAVCADVVESLGSVGLAVRGFSCLVKGTPRPLFDEPKPEVAVLARTEAKLARKEDLVSQSLAGSSTGGTDTGVELPRQQAGVMSSGNSWPRPRGGRPSRLLEPDSWRRPWRRWHGCGADVALQSGDPPTASPSEARSDFAEGVVDAEGAAAPLQLSTSEPAGSVEKARKIVSAEELSSVKTCSVRGVTYPSASYLSQKVMSEENFDAEEGVPPF

SEQ ID NO: 67245 - protein, 320 aa, Zea mays
  Coding DNA Sequence Number=SeqID_23870
MESACNRAKWARPFDSNVPSMEAQAHKSCNRRAGCYVRATAPPLTPLPRLLDCGTNGQEQQSRRQPSLRPIQGQRENPLSRREDGAPVFRSLNGSHTRNGRLANHSPRRINSTALSLPTDKRFKRLAPRRGFNGRLRALGFCAHYWSDVRWPAPRKGLTAASGHSGSTPTTDQGFVGWPSKGSQSPQTQSEGMTLGTFRYITKARATLPSAACAAPTAEPLDRARLTAAKSGLRHHRKLRFARPQGSDSGSAPEDDELRSARPQGSDSGSAPEDDELRFARPQGSDSGSALEDDELRSARPQGLDSGSAPEDDELRFARP

SEQ ID NO: 67246 - protein, 150 aa, Zea mays
  Coding DNA Sequence Number=SeqID_23871
MTSESVTLGSSVRCFENRRMRQMLQLGSSGVGEQKGRGSETGRERCSSYGPAEDSRTGWFGRRTAILLTVAASPMPRMVASVHLLIEAGSMVEMVVPVAEAFPGGGRLVPCTLGMDRGFPNASGGHRVMLREVSSPAGGGAIGSSNRGAF

SEQ ID NO: 67247 - protein, 366 aa, Zea mays
  Coding DNA Sequence Number=SeqID_23872
MHRALPPFEPPDGVLQRRLDLAVVGGARPRGDRHLSAIARLQGFSSCSSAAFLHQWAVWWGEASQAAASAPPSASRIFVILAEAEGELSRGSTSHMGRQAVSSFSIQGRRRSPTLRRGELRQRRTGRPQASSAPACLARWLSWVCRGLQRCLLPLDPGSGVCCAVRTGGPSKTPYAAWAAFVFLDCLILSPARCLRAEVEACPSVRTRVGICRCRLGRPPFVNVALACRWPLSSVLRWWQPKKALWYGGCSYLRERNRSPVYKEIYRVFAGAKCNRFNFWNPPLLCDEPEPEAAVLARTDAESARKETSSAREMMVLLAGSPSEAGPSSAEGGNNTEGAATPPADARTYRNSLSVACACFFTATEA

SEQ ID NO: 67248 - protein, 153 aa, Zea mays
  Coding DNA Sequence Number=SeqID_23873
MALPVDVAPESEPWGRAERSFVVFRVLARVRALGSGGAEFAVFRVLARVRALGSGGAEFAVFRVLARVRALGSGGAEFAVFRVLARVRALGSGGAEFAVAALSFCQTGQWSGGVTAVTLALPGARVRMKLYADGGYQLRIRRLEGTPNYGPRQ

SEQ ID NO: 67249 - protein, 139 aa, Zea mays
  Coding DNA Sequence Number=SeqID_23874
MGCTGVALLLLSSDKRGLVEIGALQPPLGFKDFRHAARLHSLTNAFHPSSGRRSCRGPAMSRSYLHRQLHRGSLNTSYAARAVLVFWDGLGEDESEDPPVRFGAAAVRRRGVGGFDPTDGALRLFGKKGLSSPLVWGRG

SEQ ID NO: 67250 - protein, 166 aa, Zea mays
  Coding DNA Sequence Number=SeqID_23875
MGALARRFHAWGGAKLACAPPRACWPRLGAHRALGCWQQHAGNGRAVVHGERGGLSNSTPTMAELLCVGREEGWAPRGTAGHEPLAAHCRGKLDSQENSTCTGLAAMGGKREGRDSPRQGLERAAQGHAGHGGKGSRAWGRRSPWPEIVRRVRVGEEGDGGDSLMP

SEQ ID NO: 67251 - protein, 31 aa, Zea mays
  Coding DNA Sequence Number=SeqID_23876
MGSGHSTCSAEAGCRGGDKDDGYDYGNALNE

SEQ ID NO: 67252 - protein, 40 aa, Zea mays
  Coding DNA Sequence Number=SeqID_23877
MGNSQLSNWVERKGRLLKDQFKATTGKDMREKMKALKSQW

SEQ ID NO: 67253 - protein, 90 aa, Zea mays
  Coding DNA Sequence Number=SeqID_23878
MQDRGMSIIKDGAKARIVSRQGENATKVRIGKTPFSNRDGKDDISKDKTCKVSKDWGAVNDGIDDALSPNRDGNGEASKGRFNVIRKARE

SEQ ID NO: 67254 - protein, 93 aa, Zea mays
  Coding DNA Sequence Number=SeqID_23879
MALSRIPALTLASLDYRASPPAQSMDWSPGWDTPFTGEHISVNGLGTALLGLDRMVEEGLRTIGFGMDERDWSGGVGWFRRSRTVDLAGYGPD

SEQ ID NO: 67255 - protein, 567 aa, Zea mays
  Coding DNA Sequence Number=SeqID_23880
  Gene Ontology: Mol. function=cysteine-type peptidase activity; Biological process=proteolysis
  Homolog annotation: Hit_ID=Q8S456; Match level="QueryCoverage=49%, HitCoverage=33%, E-value=1e-137, Identity=84%"; Hit description =Putative uncharacterized protein 163K15.6
MSCVPRLPHFSVSKTVFAQSIERNPRESRILASAYAEQEGNPLTPAAEATFPAAEATCQAISAAPIQLCSFNLRTLEPRLKSHCFPDKFQKLNIRCIPYDVIVSTWIMSDRQWDVVARLGFQSIFDLRTDALESRSLIRWLMDKLDPNDMTIRPGAGKELKITKETVRLILELPSDGGGREFTDWYGEVDAASKLRRDLKICKEEFDVVKLQDKLVLGNDDELSIRCFFLILFNRLLFPSASWGITNNEVLMTSNMDRMAEIDWCQLVYTDLCDAASRWHKRNRTNITTTVYGCSLIVLIYYLDHLHHPASPENKYGTPRIKYFDNETIRDLARCDRRAPRQTGEPFGHAEKSLPLPQCPRQIIMYPLLLFEPLIISNTIRKYMFLLMITKYRNRKDKILLNMILPHLATPELAARDISTKSAIAEPPHVSREECAHQLFKFICLGQLDPSMSIIDFGGYGGSVLDVVQSFGPNKCLENFFMQGFIVCIRDDDLLYNPDTISNTLILNVNAGTVLNIDELKQHSINQQPFSTSVLKDLLVSTLPPDEDLNQIKLIMVPFLRRSHWTL

SEQ ID NO: 67256 - protein, 34 aa, Zea mays
  Coding DNA Sequence Number=SeqID_23881
MGGGLLAATSTLRSVLPLFGPREQKSSLSLLPEQ

SEQ ID NO: 67257 - protein, 189 aa, Zea mays
  Coding DNA Sequence Number=SeqID_23882
MVSPVSCKRVIRVDVRAPFVGGRLGAQRHAQKYLRQLARRPLDAWAWASKLACQKSEKRVHLARLHAACMAARPFRPLVWAKVGGRLGGPWSVLEKTQPVASRSARPRMGGIRRLSASSLEERNSMGVGTFQPSFGFKDFHQPARPHPYAGDHPGCVSESSAGLPAAPPAGGRPPCRVHGRTTHDAARR

SEQ ID NO: 67258 - protein, 1216 aa, Zea mays
  Coding DNA Sequence Number=SeqID_23883
  Homolog annotation: Hit_ID=Q6H7R5; Match level="QueryCoverage=87%, HitCoverage=63%, E-value=0.0, Identity=61%"; Hit description =Putative uncharacterized protein OJ1112_G03.16
MGMVMVDMGGSKAEVDDGRVVEVDGSGAMVVALVVMGKEVVLGVVGAGGGGGVGDLLDMRSMAAIAANVLTAEMVGGVDPGGDFFGTWHHRYQIVGIRVTNVVRVVGLGSRARTWTLGSRPDAGGEGADFIDIDTETRIPYAAEFAESIYQVEVPVKHDDDDNCPYAKDSYCMEIIGLENGQIIPQLEVSMNSWELDECPAKTMISNFFHSIIEHLFDGAQVCLPSFGSNEFLRPCDIDIFALVCKDAPLVEYQADKPITANDVAVMDFVRINDGILLDKKSALYPLKPDGTCSHFPCFILFEEVKIIDFPSKDAFKSLVLIQSEKAEMNTSEEIFKDDFDQAKHFYESVVSSELALVDDTFKSLPTPILHDDKAMRSMLPPIEEVLCSLKPLPLSAADGIYLDWHLLSEGPCNRESCSTYESMVEEVKPCSLNSELQISGQQMPALDIGFLEDFPRSAKPQHEDKQNEVYVPGPISHDPSANLEATQKNMLENVVRGHTHMDKLSSEKESSLFESTSQSNGLSFYLNVRNGTNKVRKAEDISTLDIPSSKQAASISTRPKVNKLIEIHPVNLSDIIQGLINDIHVAYYLCFFGLHAAYLYVGNLTGTFEIIPERLRHLQRCIGEARLKAEKQLQESHPSLSVIETILRSNTQIDQKILIVSDRAFWLPLGQKLTAMKITSVEFGTYHSTTYSDAVIETNSKRCMLQELWKSDCILLDNKNIPASFPFSEFCMIVEYGGPNKSSILLSLAPKLDGLPPLHFLYVTVDGEGLPNALVEDNHTDPDLKSTLDAALHTLQKDLQEKMNKMRIVDSLNFIPATNQQQHLQTNHLTVDSSKKIPADVQLHNAGNLNEKNIVDSHNLVTATEQPNGLNQITIANLQNFVPVVEKSSSTVVSANVIKAPQVNQSAGVLPLSEKMDSTKAGRLPGPEVAIVVNTGNHGKNMLFSRRSSYQQILALERGGMQVVERDVDLPVDLILTAAVCLLWYDTRTSGSSELTISAGTSGITNFLEDIATNVLMALSFCFCGCIMVFEGENHLLSAVMEASDSLYASAVNLDMNLQLFFSEMPKSTDQIILNCIRNAVRINQALCPQITESESLVESFLTAFPSVSPLSAHMILSSGSLMDFLRWSHEQRTQAVEKYHLPPQSISLFSALCKFGELGESKSVMTECSSVDSDISSTLLQSPRKKKRRAAQDFSVAVSNPASLIHVLNCMVTV

SEQ ID NO: 67259 - protein, 180 aa, Zea mays
  Coding DNA Sequence Number=SeqID_23884
  Homolog annotation: Hit_ID=Q6H7R5; Match level="QueryCoverage=65%, HitCoverage=8%, E-value=7e-13, Identity=38%"; Hit description =Putative uncharacterized protein OJ1112_G03.16
  Subcellular localization annotation: CTP_CleavageSite=57; ConfidenceScore=5.12e-01
MRTRFLTADYFAPSPSAAASSDLAIALASLPFPSLPVPTLPPEPHLTPFPFSADFLPAVSVAGDDLDSLPFDSAVTELLTAVIPQPLPVPDIPVADEGLEDSHTNGDKEEGLNLEGSAVTKRGDLLEALFEVPELDFLSVLQKKIASFDDEEPDACAGTYSFGVRDMKIIPVLYTISSKF

SEQ ID NO: 67260 - protein, 289 aa, Zea mays
  Coding DNA Sequence Number=SeqID_23885
  Gene Ontology: Mol. function=ferric-chelate reductase activity; Cellular component=integral to membrane; Biological process=electron transport
  Homolog annotation: Hit_ID=Q6I681; Match level="QueryCoverage=78%, HitCoverage=96%, E-value=1e-102, Identity=82%"; Hit description =Cytochrome b561
  Pfam annotation: Domain name=Cytochrom_B561; Domain location=13-230; Score=265.1; E_value=1.5e-76; Accession=PF03188.7; Description =Cytochrome b561
MGLGLGVRAAPFTYAAHALAVAAAAMVLVWAIYFRGGLAIEATNKNLIFNVHPVLMLIGYIIIGGEAIMVYRVLPTSNHETNKLIHLVLHGIALVLGAVGIYFAFKNHNESGIANLYSLHSWIGIGTITLYGIQWIVGFVTFFFPGAAPNVKKGVLPWHILFGLFVYILALANAELGFLEKLTFLESSGLDKYGTEAFLVNFTALVVVLFGASVVVAAIAPVRLEEPQARPRVVAPSAARPADAVRQPTPRRPHGRALLASSVDAEDRNDEGYQSCLSALERAVGNDAV

SEQ ID NO: 67261 - protein, 436 aa, Zea mays
  Coding DNA Sequence Number=SeqID_23886
  Subcellular localization annotation: CTP_CleavageSite=68; ConfidenceScore=5.69e-01
MSLRSLMHRVFPPSKPPNGGYPPSFRLVVGGKQLRGSWYLSAVVRLQGFSSCSPVAPLRRRSPKMVTSSSMAGESEPDCGLCPSLSLKDFHHQGWGGDCRVPGSRTRVASEPLSALASAMAAGRGSSADEIARAAHRPTSNSTAFCPSLPHEFGHGGGLLAAASALRSSLPLFGPPGQKSSSPPLLERATARRSSVFRCSAGPPPVEWGTPRPPFDEPRPGVAVSVRTEAELARKEDLAGRSLAGSSVSGTDAGIDQPRPRVGLTSSEDSWPRPRGDRPSRLLGPDSRRSPRLRWPGGGDDVVLQSGDLRTASPSEARSGLAEGVVDGEGAAAPFSRQDLSLQDRIILYESCFSRKVMSEVSVSRRRRSPSSRSALPLTRTLTRPWGSVTDAVEKAQRIAPAEELPNVKTCSVCGITYPNASYLSQKVMSEDPLSK

SEQ ID NO: 67262 - protein, 32 aa, Zea mays
  Coding DNA Sequence Number=SeqID_23887
MASSSSRIVPARTIRQGWRFLGKDRELPSSNA

SEQ ID NO: 67263 - protein, 139 aa, Zea mays
  Coding DNA Sequence Number=SeqID_23888
MGKNNKRKREPTPPSEEFGDSEYSEEEFSSESEGSPAPIPLRESSDDSDDSQGLAAEVWTYIRAVERSGLEGSDESEYSSDEEDSDGGGEDEDDDDDDDDGGDGDGDGSGGGSKGSNRGGSSRGSTRGGSGGGSNMASG

SEQ ID NO: 67264 - protein, 124 aa, Zea mays
  Coding DNA Sequence Number=SeqID_23889
  Subcellular localization annotation: CTP_CleavageSite=55; ConfidenceScore=5.12e-01
MQFFGGSLSTSIAQERPQPLAAPPSIVAPTAAALPPPGSRLVTTHARRLRASDIVATAEGGTIFTDLSADVKERELHNLLCWLLGFEVSYWMRTVPELREVIRRSMPEVEKTRVINREEKNTSL

SEQ ID NO: 67265 - protein, 87 aa, Zea mays
  Coding DNA Sequence Number=SeqID_23890
MKKSKRDLEMKHKKLQLSKLTQRFLSKDLKWERQEMCDREWEVFFKLEMGFGSCTSMGERVVADPFALALTSPPLALSTKTGPFLAL

SEQ ID NO: 67266 - protein, 102 aa, Zea mays
  Coding DNA Sequence Number=SeqID_23891
  Gene Ontology: Mol. function=carboxyl- or carbamoyltransferase activity; Cellular component=ornithine carbamoyltransferase complex; Biological process=amino acid metabolic process
  Homolog annotation: Hit_ID=Q8SA97; Match level="QueryCoverage=99%, HitCoverage=24%, E-value=4e-16, Identity=43%"; Hit description =Ornithine carbamoyltransferase
MALPVDMAGLRPRLGDVEAPPKPRSKARAESEPWGRAKRSSSSSGAEPESEPWVGRSGVRRLPGLSPSPSPGSGGAEFAVFRDLARVRALGRAERSSPSFGT

SEQ ID NO: 67267 - protein, 76 aa, Zea mays
  Coding DNA Sequence Number=SeqID_23892
  Subcellular localization annotation: CTP_CleavageSite=55; ConfidenceScore=5.59e-01
MPARARLAARPAGPLAARPAAPPPAQAGSTAPRPVAMRLMVLIMVMVLVVSIATTAQAKMKAVEGDFQEFQDYDEF

SEQ ID NO: 67268 - protein, 295 aa, Zea mays
  Coding DNA Sequence Number=SeqID_23893
MVHERMKQDLARNKSWNIGKSDESSLEKTYTVQNSCDKINVTDTNSYRVSWDVHEWFQHNFLRLFKSAHQTNKIAHTFLNLKLMGEQANHTFSEKHLYIPTDTAKSYAKGAEIQDLEGGRLLGTAGGSGRSGDGIAGSGSVALRKGGGMIGAGTPGGTESLAKVLTDFAAKAMVAPVLMEMASLETEETALASREKAAMARVVLEEWVLVVPEPREEGTTSLVLAPLGMAAVMASVVAHASLEAMEAQMVQAPAAVMAQAALEAPESWGAGVDGARGLRGMAEVAARGSTTLCHR

SEQ ID NO: 67269 - protein, 79 aa, Zea mays
  Coding DNA Sequence Number=SeqID_23894
MASDSDNVMNMRCILLKNQSSCMAVDGTLSHPSWVWRPKGARPSTPPATLERVLYEVLIQILRAHVYLAVQLLKTSIIK

SEQ ID NO: 67270 - protein, 104 aa, Zea mays
  Coding DNA Sequence Number=SeqID_23895
  Subcellular localization annotation: CTP_CleavageSite=47; ConfidenceScore=5.16e-01
MPFTFGSNSIVIHQAQAPPPPPVVEIMLAPVDLAPSRSTRPGDPRPCCSEPSSAPAVPSRAASDAEHPAAPTVPRPAVQTAPPYAGRPRSVQEHPPGGPVPLLC

SEQ ID NO: 67271 - protein, 99 aa, Zea mays
  Coding DNA Sequence Number=SeqID_23896
MAMMGSTSEKMYLCQLCNRFRISLSPMVCNVCKTGETFLVRLCLRGHLRPNFGFRLNYYNFNFCLLCSSFDFCLLCSNFDFCLLCFSFGLRFRSFNKFS

SEQ ID NO: 67272 - protein, 69 aa, Zea mays
  Coding DNA Sequence Number=SeqID_23897
MATTEPWEELTTDRASSVAATTWMLVTGGPPNAAMKDIFKAYIVLGKKEWGKKRLHPRLWILTHLGDLT

SEQ ID NO: 67273 - protein, 103 aa, Zea mays
  Coding DNA Sequence Number=SeqID_23898
MAQGHISLSLLSSNTYIRAVERSGLEGSDESEYSSDEEDSDGGGEDEDGDDDDDDEGGGDGDGDGSSSKDGDGGGSRGGSGGGGSSRGSNRGGRGGGSNRASG

SEQ ID NO: 67274 - protein, 187 aa, Zea mays
  Coding DNA Sequence Number=SeqID_23899
MGAIQVKAPSKGHDLASPEPSLGQEQQTQENSAACTAPTAVPPARVRLTAAESNLRRHRKLRLARPQDSDSTSTSEDGLRLARPRARTPPRPRKTVSASPDPRARTPPRRRKTVSASPDPSARIHLPSRETEKIDQDLTAPKVVLIKGISVPPKSHNILEKGSNSSPITSSGSWGIKGLWYLLVEKL

SEQ ID NO: 67275 - protein, 197 aa, Zea mays
  Coding DNA Sequence Number=SeqID_23900
  Gene Ontology: Mol. function=translation elongation factor activity; Cellular component=eukaryotic translation elongation factor 1 complex; Biological process=translational elongation
  Homolog annotation: Hit_ID=Q40680; Match level="QueryCoverage=96%, HitCoverage=100%, E-value=9e-34, Identity=81%"; Hit description =Elongation factor 1-delta 1
  Pfam annotation: Domain name=EF1_GNE; Domain location=107-191; Score =48.1; E_value=3.2e-11; Accession=PF00736.10; Description=EF-1 guanine nucleotide exchange domai
MAVSFANVNAEAGLKKLDEYLLTRSYITGYQASKDDLAVYSSFLADPSSKYINVARWFNHIDALLRLSGVTAEGLGVKVEPSAVPSASILDVADGQAPAADEDDDDDVDLFGEETEEEKKAAEERAAAAKASGKKKESKLVPVGYGIKKLQIMMTIVDDLVSVDTLIEDHLCAEPVSEYVQSCDIVAFNKICKSFIT

SEQ ID NO: 67276 - protein, 38 aa, Zea mays
  Coding DNA Sequence Number=SeqID_23901
MASPFLVCSFCHRYDRVSLLDLASRNRSMHMADDTWAL

SEQ ID NO: 67277 - protein, 151 aa, Zea mays
  Coding DNA Sequence Number=SeqID_23902
  Gene Ontology: Mol. function=catalytic activity
  Homolog annotation: Hit_ID=Q2HW33; Match level="QueryCoverage=61%, HitCoverage=25%, E-value=1e-10, Identity=43%"; Hit description =Protein phosphatase 2C-like
MGTTSLMSWVHFVWQPNQESSVLIMSRAFDDYYIEDCGIILSPEVTQRRIDNSDQFVILATVRGHFCPWMKIAAHISSGIYGDASPRCSVGPQLPPAASEPWPLSAVPELPSASTDAGRLTISLPPGRGEMEGESDLRLDAGWDDCLMMRV

SEQ ID NO: 67278 - protein, 92 aa, Zea mays
  Coding DNA Sequence Number=SeqID_23903
MKGMADSLRDLSEPVADRTLVLNILRGLSPRYGHLNALIKRTPSTTDGGRRSRKGGRGSGGSSRGGPSGRGGGQAWPSFYNPWTGTIAMWLG

SEQ ID NO: 67279 - protein, 84 aa, Zea mays
  Coding DNA Sequence Number=SeqID_23904
MAALGPLTEARGRQQGLDSSDSCPSTRLQHSSDGHDTTRTGCQDLSGCHDGIKAITDEARNMLVHAGPVTVGRIPRGPPSEMRT

SEQ ID NO: 67280 - protein, 414 aa, Zea mays
  Coding DNA Sequence Number=SeqID_23905
  Subcellular localization annotation: CTP_CleavageSite=83; ConfidenceScore=5.03e-01
MVALQGGCPPFKGDSPHLRPQPLRVESSPTRSKILPPRRGGWVPHVMQTDLGEKKPNRHARGACNHPAVTSTPPLSPRPAGERADSHAGGHATVPSGARPFDSNEPSIEAGRCSGHVVSPAYVPSRGSQGALSHGVKTDRRRLKREKQATLRLRHNDCVKKKAPSLPTDQRFEGWPLGGVQWPPQIDWVLRPLLVRGSMAGPSKGSTAASGHSGSAPTTDQGVACAAPTAEPPDRVRLTAAKAGLGRHRKLRLARPKGSDSGSAPEDGELRSARPRARTRAQPRKTVNSAPPDPGLGLGLSPERRRTPLRPTQGSDSGSAPEDALEDNELRLARPQGSDMGSTPGDAGLRFARPQGSDSALASADSLRLARPKGSDSTTATEDRLDLDLGGASTSPNLGHGPTTSTGGAIITLP

SEQ ID NO: 67281 - protein, 18 aa, Zea mays
  Coding DNA Sequence Number=SeqID_23906
MANASFSAQTQGRTASVP

SEQ ID NO: 67282 - protein, 62 aa, Zea mays
  Coding DNA Sequence Number=SeqID_23907
MEIGKKATSHGKAPSKESGIKAKEGINVGSKTLNMVGGGGINSPHPPTSRYQHCSAHGRTGQ

SEQ ID NO: 67283 - protein, 161 aa, Zea mays
  Coding DNA Sequence Number=SeqID_23908
  Homolog annotation: Hit_ID=Q8H8K3; Match level="QueryCoverage=68%, HitCoverage=8%, E-value=4e-07, Identity=37%"; Hit description =Putative retroelement
MRVAYWTEASDRFDREAFSENEFVRDMYYSLNFIINELNSIGINKLGDVNIVRKIISLLPQQKYGSIITILHHLEDLNQMTLTLLIEKIMAFEMSQKMCQEESTPLKPCLFTYDEHKMMKGKKKVERLSSSSEEEEYEEEDEEDDEEEEEDDDDDDGQAST

SEQ ID NO: 67284 - protein, 169 aa, Zea mays
  Coding DNA Sequence Number=SeqID_23909
  Homolog annotation: Hit_ID=Q6J9V9; Match level="QueryCoverage=60%, HitCoverage=36%, E-value=4e-46, Identity=86%"; Hit description =Putative uncharacterized protein
MSRLLDCETSTATRGSPACDPTVPIECNDHRGSKVAPSGVRQPPQNTRAPSPLLIRGSKAGPSEGFDSRPRARRVRDDPGYVCYMAEARATLLRYPRIFPRPAGTICNGIPPERGIEPSDPIEWVRVRQITCRGSGAALALGYGRTVDHVKTSVKTRNLTVHPGYGQAA

SEQ ID NO: 67285 - protein, 77 aa, Zea mays
  Coding DNA Sequence Number=SeqID_23910
  Subcellular localization annotation: CTP_CleavageSite=60; ConfidenceScore=5.66e-01
MVSCPGSKKGQGAGGVMSCSMAMRGRRGRAPDAARTRRSCSSASWFNFALLGVLVGRYASRSMRGYCVEIFMTRKLI

SEQ ID NO: 67286 - protein, 514 aa, Zea mays
  Coding DNA Sequence Number=SeqID_23911
  Homolog annotation: Hit_ID=Q6JAD6; Match level="QueryCoverage=100%, HitCoverage=78%, E-value=1e-135, Identity=63%"; Hit description =Putative uncharacterized protein
MPRTKNVSAPGGGDDEDPRRPFRQVKGKTVHLEQQEGRKKRRMDRAARAVAAAAAQAELGDQPQTPSDQIAYRVRRLASRPRSSTHTTASTPPPTMPAPVTPVAPSTTTAIPATSTTPASTAPPPAPASAPPIPPPRFRERDETEVRPLAADPILFDLQRATAARVRRFRYVLVESWLPAQRDPAAVDLFSTRIQESFFRAQLSAQIALRVHRLLDLPAFLLAAGADSEAHLTYLSGLLTLLTTSGSQIRQLFGFPESTTRLHSLCYGTSDPPRRPHGGVAPGTAHVVALFRPPFSDGSRRSPADFTTAAKYLFELIRLTLLPRMGYREATTHIQLWLLGALVSHSEFDVVDFLICEIEDTVLDGIRARRQLPYAHYLCHIFAQLIRPPQFQGTLEASRLVFGSYRPAPEAPVPASAPVFNSQAEDAALRQFDTQDTTVVDDDDDFGVPPPPPPPMPPPSHDHEAGSSSAAPAAPPAIDPAIASILQSLTQQQAHLAAEQTRLSERMLSMFQTI

SEQ ID NO: 67287 - protein, 72 aa, Zea mays
  Coding DNA Sequence Number=SeqID_23912
  Subcellular localization annotation: CTP_CleavageSite=59; ConfidenceScore=5.31e-01
MAKLSFSAQLNFNCVELSQLQLNFSFNWGLGKFNRCPGRFNRGPGQVQPGSREVQPGPRESSTGVQRGSTGV

SEQ ID NO: 67288 - protein, 43 aa, Zea mays
  Coding DNA Sequence Number=SeqID_23913
MTTDRPLELLHMDLFGLIAYISIGGRKISNPRNFKGILETGSK

SEQ ID NO: 67289 - protein, 450 aa, Zea mays
  Coding DNA Sequence Number=SeqID_23914
  Gene Ontology: Mol. function=protein serine/threonine phosphatase activity; Cellular component=protein serine/threonine phosphatase complex; Biological process=protein amino acid dephosphorylation
  Homolog annotation: Hit_ID=A2Y5D5; Match level="QueryCoverage=69%, HitCoverage=78%, E-value=1e-104, Identity=61%"; Hit description =Putative uncharacterized protein
  Pfam annotation: Domain name=PP2C; Domain location=102-379; Score =264.9; E_value=1.7e-76; Accession=PF00481.12; Description=Protein phosphatase 2C
MAEICCEEAKSTPATAVAAASVSATAAAAAAVAVASSALERRRRRLEMRRFRVAGDPEAPVAEDVRAAKRQRLARTLSSTCPDAGSGSGSDSDRPALPERLPRYGVTSVCGRRREMEDTVSVRPDFVPGTSKQHFFGVFDGHGCSHVATMCQNMMHEVVADEHRKADCSGEETAWKAVMERSFARLDEQAASWATSRSRDEPSCRCEQQKPLRCDHVGSTAVVAVVSPTHVVVANAGDSRAVLSRAGVPVPLSVDHKPDRPDELARIKAAGGRVIYWDGARVLGVLAMSRAIGDGYLKPFVSSEPEVTVTERTDDDECLILASDGLWDVVTNEMACEVVRACFHSNGPPAPAARANGAALRAAENGSAAAKGVSVEDSDKACSDAAMLLAKLALARRSADNALLKPLSRPAPRLLVLLWSLECYGGARRSHMARLVDRSWVFRGVGDPVA

SEQ ID NO: 67290 - protein, 146 aa, Zea mays
  Coding DNA Sequence Number=SeqID_23915
MGKNKKGGSSSHHSGDKRKREPSPPSEDFGDSEYSERSFPLSLRGRRSTPLPPVSSDDSDDSQGIAAEVWTYIQAVERSGLEGLDESEVSSDEENSSDSSEEESGGDGNDEGDGGDGGDDGDDGKGDGDGKGTGGSSKASGKAPLV

SEQ ID NO: 67291 - protein, 484 aa, Zea mays
  Coding DNA Sequence Number=SeqID_23916
  Homolog annotation: Hit_ID=Q65XG5; Match level="QueryCoverage=96%, HitCoverage=95%, E-value=1e-109, Identity=49%"; Hit description =Putative uncharacterized protein OJ1362_D02.2
  Pfam annotation: Domain name=DUF668; Domain location=330-423; Score =56.6; E_value=8.3e-14; Accession=PF05003.3; Description=Protein of unknown function (DUF668)
MVVLVQKPWLPIDLRLPAGPQASLGILAFEAAAAMSRLLSLHRSLSDQEVSRLRSDVMRSPAVAYLNSTDQALLLKLACAELVVSLDAAAAAVARLGLRCGLDFGGVYACLKAGAPDARLDPLVAKGLRVKAKKMERLVAATAKLCSEMEALDELESAERKMSVQGWSRLSGPIPQQPQAAAQQQQLLAKDSPGAESLRQELKTQQLKVKRLKEESLWNESYKKAVGLMARAACAVFVRICSIFGPFVPGLPPPLPSATTDSVQTRLSKLLHPRLGKTKASSGPITRRDGPSHRVHPPMSSNSCPIIGRHLPGHNPHTNWRKLLDAPPSTVGSAGLDQQYANVIASAEELLRMEAEGRQEEAAAERAEMYEMLPAKLRVAVRSKLREWWRDPGPLDEALARGWKDAVDRIMAWLGPMARDTLQWQAERNMDRTRRFDGAPRVYALQTLLWADKEKAEAAIVEVLVALSCICWYEERRRGSVRVG

SEQ ID NO: 67292 - protein, 122 aa, Zea mays
  Coding DNA Sequence Number=SeqID_23917
MVCRLLGWDAPSFGKRIGASAILLGEHAAREFVPFVLPSGLVLPILSFLYWSIRRKRMITSLVKEANFGYVVPARPQAPPSVVLLAPWLGWSCPHPRRRAGARASSPWVRAEVATVAGKPPV

SEQ ID NO: 67293 - protein, 108 aa, Zea mays
  Coding DNA Sequence Number=SeqID_23918
MSFCLGVSFKNTLKFTKLVVHLKEKDFGSHQVTPPPHVDFEDRCLNSSGGATNNNPMVKNVGTHVLKVKNVGTHVLKVKNVGIVELNGQPSPTHARPICSTATWPRRT

SEQ ID NO: 67294 - protein, 133 aa, Zea mays
  Coding DNA Sequence Number=SeqID_23919
  Gene Ontology: Mol. function=hydrolase activity, hydrolyzing O -glycosyl compounds; Biological process=carbohydrate metabolic process
  Homolog annotation: Hit_ID=O81638; Match level="QueryCoverage=33%, HitCoverage=4%, E-value=1e-13, Identity=88%"; Hit description =Pullulanase-type starch debranching enzyme
MEFFTMNFSLYEAYVKSVLGLGVVLFIHNSKQGFEISLKVFKINYASAHDNETLFDIISVKTLMNLSIDERCRKNNLSTSMIALSQISHGFPQLQLTAKGLNLEDGPTHSASTSSSPEQTTDVDGSTTGDVTF

SEQ ID NO: 67295 - protein, 187 aa, Zea mays
  Coding DNA Sequence Number=SeqID_23920
MGIAVFSGEVIPLCRRLGSRLCPPVLLDPKERAELRTSRWMKGGLHTQISTSAGGSKSIDETWWLGAQAASWCSDELISKCSFRTARLTRKPHTAACRRTTACSCDDGHGVALEATARVVEGGWEGVAAADDAAAGGGEGWAAGGGEDNLELIPGVMDLRSMGIAVFSGEVIPLCRRLGSRVAALGA

SEQ ID NO: 67296 - protein, 98 aa, Zea mays
  Coding DNA Sequence Number=SeqID_23921
MREIGTGDKFTSSGRTHSRESAHKHKEESSSSIKSQRKGDKKKKMTNRSTTRPTLRHPPPPAQNRHPPLLSAMSARSIVKMPLRYPHIHNTLHYFPSH

SEQ ID NO: 67297 - protein, 66 aa, Zea mays
  Coding DNA Sequence Number=SeqID_23922
MGKPVPSLLMLLLSRVTALVPTITGMGGHVSGRVRRYVCGQVHLGTRLTDLPYFSDLITFMLREER

SEQ ID NO: 67298 - protein, 509 aa, Zea mays
  Coding DNA Sequence Number=SeqID_23923
MNKTPALKVPLQTEPRFHLRSSDDDDFCSGGSNSSSDDLRADAASIRPSPMPSLERQGRAEGRRVGGQSVGSTGYLVGRRNLFRLSWRKAAPEAAPKPLGSESRARGSCQRHERRTPFPPITEGRSGPPPAGWWSPSWVTTGEGMQPGCLMKILEAERWLKEQKKPNRHAQCMQLPSGYEHSSTIAQTSGPTHHATGAPVATCEQLHRHSHHYHASSTAEPAGGSSGHVVSQAYVPSRDSKGTLSHGVNTAHPGGTFGRRSERRFTFAIMTASKRDWERGIPRKGILLREGNRPRASLLIRGSKAGPSEGFNSRLRALGLRAHYWSEVRRLAPRKGSTAASGHSGSAPTTDQGFIGWPSKAKLDPRRHRKLRFARPQGSDSGSAPEDDELCFDRPQGSDSGSTPEDDELRFARPQGSDSGSAPEDDELRFARPQGSDLGSAPKDDELRFARPQGSDSGSALEDDELRFVQPQGSDSGSAPEDDELRFARPQGSDSGSAPEDDEFRFARP

SEQ ID NO: 67299 - protein, 183 aa, Zea mays
  Coding DNA Sequence Number=SeqID_23924
  Pfam annotation: Domain name=Transposase_28; Domain location=1-158; Score=-50.9; E_value=0.0072; Accession=PF04195.3; Description =Putative gypsy type transposon
MALLDPPECLQPEVALNLVRNLLGWGVPTFAGRIRVGASPHGDLAAGEFMLFVSNLPSGLALPFSSFFVLLLEELGLQPHHFMPCFILQAAIIAYLCKMSVGATLLPPAFGFKDVHQPCGGGKRVELWLHLSRELHQCLMAWDLQDLVWEVKLCARTPWTMVLDTRTPVAEWWIVQAYGTGPG

SEQ ID NO: 67300 - protein, 74 aa, Zea mays
  Coding DNA Sequence Number=SeqID_23925
MAALVLPTWWGQALFATWLEEPAPREDDSWARAPESETGLLVSAEAKRRTTAGGGLLLRDDSPPPHSKADTQVV

SEQ ID NO: 67301 - protein, 409 aa, Zea mays
  Coding DNA Sequence Number=SeqID_23926
  Gene Ontology: Mol. function=oxidoreductase activity; Cellular component=peroxisome; Biological process=metabolic process
  Homolog annotation: Hit_ID=Q8W518; Match level="QueryCoverage=36%, HitCoverage=80%, E-value=2e-49, Identity=70%"; Hit description =Betaine aldehyde dehydrogenase
  Pfam annotation: Domain name=Aldedh; Domain location=22-368; Score= -228.0; E_value=7.3e-05; Accession=PF00171.13; Description=Aldehyde dehydrogenase family
  Pfam annotation: Domain name=IGPS; Domain location=50-211; Score= -55.8; E_value=1.7e-07; Accession=PF00218.12; Description=Indole-3 -glycerol phosphate synthase
  Pfam annotation: Domain name=PPR; Domain location=11-45; Score=41.8; E_value=2.5e-09; Accession=PF01535.11; Description=PPR repeat
  Pfam module annotation: Pfam domain module=Aldedh::IGPS::PPR; Domain location=22-368::50-211::11-45
MEKKRIFLDDVTHNMLMRGFCWLGQLDETRRLIDEMKRMGIHPDFVIHNMLINGYSMKGGWSNVIVDSAVTHFYGALEVAYKRNGVPALLAEVKKATPSRGVLMEDFNTVEIVQPYEKNGAACLSILTDKRYFQGSFENLEKICEELGITALIEVHDGREMERVLNINGVKLTSLFTLEDVAYVQNASQVCNTTSCLLLHKEIAKQFLDRLVGWAKNMKVSDPVENDCTLDSVVSEEQCEKIKKLILVVRSEGATFLYGDGRPHHLIRGLFLAHTIITAVSTSMQIGQEEVFGLVIHVKEYKTESEVVELANGTYFGLADDVIFHDQERCDGIGVLDLQWDPGGNNAMYRLDGEPIFKGGMLGMLAQMGPYGPRLLKAAGHVAASGLRLRGIRDMVRTPVGSGPPPGLD

SEQ ID NO: 67302 - protein, 102 aa, Zea mays
  Coding DNA Sequence Number=SeqID_23927
  Homolog annotation: Hit_ID=Q6JAD6; Match level="QueryCoverage=57%, HitCoverage=8%, E-value=2e-18, Identity=74%"; Hit description =Putative uncharacterized protein
MRLRSVLWLRILVCLIFSALLQHGYVGSAFLLAAGVESEAHLTYLPGLLTLLTISGRYVEEWVRVFYASVWIDPDHHWMRFRFEREECHDHCQSDPTAIWIP

SEQ ID NO: 67303 - protein, 134 aa, Zea mays
  Coding DNA Sequence Number=SeqID_23928
MAHRRARSTRGGGRPKSREGDLGLPVKFCRVRGLGNLHKLMAKLTEVTGVGWPRWPRLWQQWQAEKSSPELRRGVWPAKRFGARKSGLSLCSNPRQIQGFVVSRACVPMPSSGTRQGGFELGIKVNTLDLWLKV

SEQ ID NO: 67304 - protein, 58 aa, Zea mays
  Coding DNA Sequence Number=SeqID_23929
  Subcellular localization annotation: CTP_CleavageSite=33; ConfidenceScore=5.27e-01
MDRPAQPFPTPSNPRTSVHNSMKLPERGIEACFAGEASPCSRSSSPRRRTWTRNFKNS

SEQ ID NO: 67305 - protein, 224 aa, Zea mays
  Coding DNA Sequence Number=SeqID_23930
MESHDLRAERESRLVGGNESDGFGYDYGDGKWYSFRLERVASIATTAQEKMKLWKETSRSSKTTTSSRRGWLVLDTLHERPLSPSYPPALLSVRFAVPWPEIESVRSCSPVLPLEAPPAPPLGAPASGVAAGGDPDDGGGDDSSSHDTDFSADQEPEGWVARPITRDVARGCHFHDALDTLLRRALNRRTWSIEYRCVVYQHSRGVYPDRWEATCLVRRPENSL

SEQ ID NO: 67306 - protein, 188 aa, Zea mays
  Coding DNA Sequence Number=SeqID_23931
MAGRQRRGQNERVPPPPPPPPTLQELMAQQNEILRQLAQRQPPPQHYGGGDHQRHPAAATYQEFLSTQPLLFTRAEDPLDADYAGYHADTDEKKRDRFRRGLSIKLRDRLNTVRANSYNELVNMAISQEDCITARQTEKKRKTPVAGPSAQPQRFRIVSDTQNRGPQQQQGRWVIRPQHQQQQAPNRT

SEQ ID NO: 67307 - protein, 315 aa, Zea mays
  Coding DNA Sequence Number=SeqID_23932
MTSHGSSGDGNALSHTDGLAREGFPRILWEVLQGAGYVTPFQYAVQQFKKHRVPRCRVRMTLEPHPLQPGWRSLDSESFGYRAEDTIEAIALHGLTTFCGFHPLELATHPIGLFPAEREDDPMWKDRVEHAKDIWAIYPGQTAHLTVRCMNALYRLQVMRGEAMSHLMALLEATKITLDNREELMVDLSQEMVEKDLQVEQLSTDIQELEELVGTRENTIEVLEDQLINTQQQLAEANEHLDMHHQEIQDLEANEDVDIEGGDEPASSVDTAGSGRPPSPRVECCFVRSLGVQDRIRSWIVGLLAASLAFAPLGY

SEQ ID NO: 67308 - protein, 249 aa, Zea mays
  Coding DNA Sequence Number=SeqID_23933
  Subcellular localization annotation: CTP_CleavageSite=35; ConfidenceScore=5.28e-01
MAHARAYKALPGFDCTLPRTLKPHQSLAHRRLPVRSVSAAAQSLCHRRPANRAIPNPIQPSEKTVHTSVKLPERGIGVCFAGEASPRSPELSTPPEYVDRVIHSTILRFLVHTVTTLPREAHRALGLNQFAVVWPVHSPPTRTPACARGPGDSGHPQRQAVPRHDRRSLPEPTPPFARPPSPPDTRAIQIPYVYPQQKPKPKDCNLADGEYILVPEQGAAQEVAPDPAPEPAPEDLPATALEGKPRFYA

SEQ ID NO: 67309 - protein, 198 aa, Zea mays
  Coding DNA Sequence Number=SeqID_23934
MARAAVWAYCPLSDWIGTLPVEWPGRRLPTEWTGLIKCRGDTSPVSRADRRHVVSAINVEIAWPRGLTSGSVRWLTSRAICHVAASGLCLSGERKRSGQSPDKCLRWTPVRATYAGVRHFPMGSGSTNDIAGTDRVYRLLRPRGGLGAAHVVGSDVVCYVARGRVWQGSSSTKSTLELLLHHRAAPRMELDSQFDAEE

SEQ ID NO: 67310 - protein, 179 aa, Zea mays
  Coding DNA Sequence Number=SeqID_23935
GYPLLQYDGTVPVRMQSVGPDLHEEAPDPCTHSPNPQIWSGTSKLYPVRLRSPLRRRPDAATWLVARDAMCRLSIYCDLSTQLAGGIQAILQAACLSSPLPNRCKKIAPPTPNITSIIFLGPHVGAQHPSLKLSQQSNIQWSRVLSSGGPNHSKSSRVPEFIVHLPTGKTLKPPPHLRI

SEQ ID NO: 67311 - protein, 78 aa, Zea mays
  Coding DNA Sequence Number=SeqID_23936
  Gene Ontology: Mol. function=carboxyl- or carbamoyltransferase activity; Cellular component=ornithine carbamoyltransferase complex; Biological process=amino acid biosynthetic process
  Homolog annotation: Hit_ID=A6N096; Match level="QueryCoverage=69%, HitCoverage=24%, E-value=7e-17, Identity=75%"; Hit description =Chloroplast ornithine carbamoyltransferase
MDDESPDEITDPRAYLTHSLPAKRGAEVYEALMEITSPRAYLIHCLPAERGLEVTDGAIEAPKSIVFPQAENRMHAQK

SEQ ID NO: 67312 - protein, 103 aa, Zea mays
  Coding DNA Sequence Number=SeqID_23937
MAAGSGAFSPESRAGGEGWVRGEAAGSGGLSPQSRTSEEGWVPSEKPLKAGPRVLSDLHYEKVGFLEKATFWIHPFGWLLAFRGAKAKAKSQTKHTLRLSPRD

SEQ ID NO: 67313 - protein, 673 aa, Zea mays
  Coding DNA Sequence Number=SeqID_23938
  Gene Ontology: Mol. function=serine-type endopeptidase inhibitor activity; Cellular component=cell surface; Biological process =hyaluronan metabolic process
  Homolog annotation: Hit_ID=A2YNN6; Match level="QueryCoverage=99%, HitCoverage=77%, E-value=0.0, Identity=70%"; Hit description =Putative uncharacterized protein
  Pfam annotation: Domain name=VWA; Domain location=331-505; Score =50.0; E_value=8.3e-12; Accession=PF00092.19; Description=von Willebrand factor type A domain
MEDFARAVEDGLKLSKRLVLPGGVPPPRPPAGMERTMSSASASGPDPRLLPTAPMAYAVVTDPAAIDTPDVPSYQPYVYGHLDPPALIPLQMKEVDLAVDCALDAAHVTLRARWWLHCITRSRDCDVRLVVPLGEQEQGSILGAEVTVGRRSYNTQVIEVEETLENHAKIESGGLLKPHLFFLTISQVEGGADICATFRWSQKLLYDSGCFSVDIPFHFPYFVNPLPKVFMKREKVQLTANTGFSKEVFLQGTSHPLKEKSRQGDKLFFLHEAIVENWSSKVFNFSYSVYSGDLSGGVFVQPSILCDYDDRDSFCIFLLPGSGNRKVFRKAVVFVVDTSGSMQGKPLENVKHAVSTALSELVQGDYFNIITFNDELHSFSSCLEQVNDKAIASATDWMNANLVAEGGTDIMHPLSEAMALLSSVHDTLPQIYLITDGSVDDEHNICQTTKTEVTNRGSKSPRISTFGLGSYCNHYFLRMLASVGKGHYNAALETASIENQIVKWFRRASSTIVENISIDAMTHLDEFEVDSEYIPDLSANSPLCVSGKYRGKFPDTVKAKGYLADMKEVLIELKVQQLKEVTLDKVLVTQHIDLMTAKAWLSAAKQLERKVGYLVIKLSIQNGVPSEYTDMVLLQTNLDNTGTQKVKQKLKGQKGRDEQQIPLHGLKLGFGNN

SEQ ID NO: 67314 - protein, 269 aa, Zea mays
  Coding DNA Sequence Number=SeqID_23939
  Homolog annotation: Hit_ID=Q8GRK6; Match level="QueryCoverage=17%, HitCoverage=38%, E-value=3e-07, Identity=63%"; Hit description =Putative uncharacterized protein P0418E08.140
  Subcellular localization annotation: CTP_CleavageSite=44; ConfidenceScore=5.51e-01
MISSSSNAVAVLELQQSGFVTVVPTMAWSLARTTSVGRRARCLSTAHVPTTGKREQKGLFDTIFGALYREEQMLETNPILNKVGSKSKPPAVIAAPAPKKAAEESGSGGLSLGRGDANGDIKGFTARSNGLYLKIQVTLAGFQAKQHGFALYIRLFTQDQALKLVICILWNSRQMHILPEYRVSIGEGRVVVHPDGLINWIRCVDQVRFSPLVEIGNTTQAGHQGMERKDHHTIHPEFPTKAFKAHKVYYLNEVIIFLSETSKLFIKSN

SEQ ID NO: 67315 - protein, 138 aa, Zea mays
  Coding DNA Sequence Number=SeqID_23940
MMLPTKIDTIQKHKGQINLIVQLDCYICPNVKYLREGAFINVDIEKGIQDGQKAVGDEATVVKKRPHGGRTSGRSLHGRAREQVSPVCVSHGRAGVAAWEQVVARPRLFPFRELFIFRYCVSFKATVSTFNQGYATIC

SEQ ID NO: 67316 - protein, 239 aa, Zea mays
  Coding DNA Sequence Number=SeqID_23941
  Gene Ontology: Mol. function=protein dimerization activity; Cellular component=nucleus; Biological process=regulation of transcription, DNA-dependent
  Homolog annotation: Hit_ID=A2WTQ5; Match level="QueryCoverage=40%, HitCoverage=35%, E-value=1e-25, Identity=63%"; Hit description=Auxin- responsive protein IAA5
  Pfam annotation: Domain name=AUX_IAA; Domain location=1-92; Score= -55.4; E_value=1.8e-05; Accession=PF02309.7; Description=AUXIAA family
  Pfam annotation: Domain name=PP2C; Domain location=57-238; Score= -56.7; E_value=0.012; Accession=PF00481.12; Description=Protein phosphatase 2C
  Pfam module annotation: Pfam domain module=AUX_IAA::PP2C; Domain location=1-92::57-238
AQVVGWPPVQNYRKNTLAASSSRRKAPAEDAASTAQTMYVKVSMDDVPYLKMVDIKMYSSYEDLSMALEKMFSCFITGESFALSRHNLSPMVLGSTAQFSSKWMGRRGEGHLTVDGAHGAHKEWRAFSGSLLRSNGVDVHVPRHGTDATQLARDDGSTASTAILVGDRLYVANVGDSCAVIPKAGKAMALSEDHKPNRIDEQKRIENACGIVIWADKICTMHSYFNAPSLVGSLKLDVR

SEQ ID NO: 67317 - protein, 164 aa, Zea mays
  Coding DNA Sequence Number=SeqID_23942
  Homolog annotation: Hit_ID=Q8LQY2; Match level="QueryCoverage=71%, HitCoverage=14%, E-value=4e-22, Identity=47%"; Hit description =Fertility restorer homologue-like
  Pfam annotation: Domain name=PPR; Domain location=53-87; Score=12.8; E_value=0.23; Accession=PF01535.11; Description=PPR repeat
  Pfam annotation: Domain name=PPR; Domain location=88-122; Score=26.5; E_value=9.6e-05; Accession=PF01535.11; Description=PPR repeat
  Pfam module annotation: Pfam domain module=PPR::PPR; Domain location =53-87::88-122
MEARSANKKEQTLKDSVNLESIQLPLALTCYVLRDVVRVFDEMAGAWVKPDEYVYATTITGLGRLHDADRALQVLGKMREAWVELWELTYNSMVGVLVKVGRMDEVLQLKDQMMLATGKMDVALARMLMHVYYLSGEVGKTLELFDVVASDTVQCGIWVDEQRL

SEQ ID NO: 67318 - protein, 227 aa, Zea mays
  Coding DNA Sequence Number=SeqID_23943
  Homolog annotation: Hit_ID=Q337A8; Match level="QueryCoverage=51%, HitCoverage=25%, E-value=1e-07, Identity=28%"; Hit description =Expressed protein
MDVSALPDGLSYDSKVEEPFARHQRAYVEYSNEFRRTYSFRWFDRQRQKKVMDFETHHRDYIDEWEQQGDLNYENDQAHTNYNFRRCKLKGQWTAANYAEQESLDDEDTTFDIAARHGSQIEAAPILDRVQDVQPPICAVGPSTAGLSSSRSTRETFEDVAHDDEDDDDDDTSAGAAGQEEIGPSQLQDAPTTQPPQLTPRRRRPRDPYTPGTDALGAKGKGKTRRK

SEQ ID NO: 67319 - protein, 294 aa, Zea mays
  Coding DNA Sequence Number=SeqID_23944
MAMGKYPPGMTTPYPYPQHKNNLIGSPIYTGGPIDTQYLLGIENITAQQPTVKGQQDKQHTPNTDGTGRRIRPPSRNALSAVFQQEDEGSRAAQAASSWAEQTGESKRMDQELEPQVQRLTSASTVLRRVLDNPALQDYQENNGFGDLNCPAACTASPSPTGSTGPQARCREADTDRRETVPPQFCNGTSLLKYPEGNELPSDLIDTLLKWIPSNDEELRLRLSSRSTATPHASVAVCMEAITESRMLYLFRSQPFWRTNEHRGESRRRQILLGHVQASGDAVEMEINIGMEKL

SEQ ID NO: 67320 - protein, 164 aa, Zea mays
  Coding DNA Sequence Number=SeqID_23945
MSILPPAGGLSAAIVVVARRGKEYHVVAAVEGHEPKTPETEHRSGLERSLETAHLELDGKLFVNTQQAPTWRANCRRFEPGGSLDRRVNCRRVPQPRWVGARRSAKGGRSRRETGVKGETRGLRVCPAPRSGALAVGGYKRPRGREREAYTSAVSSFPARPNPL

SEQ ID NO: 67321 - protein, 108 aa, Zea mays
  Coding DNA Sequence Number=SeqID_23946
MAIWPRLLLGEDWASGEPKEIDSNSTRIFRVPHGFYCLAVSYFPLHDCTSAHLRSAHGPGWAPAVLLLLPGPDVIQTYTRHSGIKQPSTKQAPRHHAVTHQHQAAAQH

SEQ ID NO: 67322 - protein, 92 aa, Zea mays
  Coding DNA Sequence Number=SeqID_23947
MNSRPGSLEGASIKGDGGERGEDGRGNRGSCTWGVDTDGRTRQLRMWSGDGGVLMEGDGGRQLLNKNQRRYSLVRRGWSAAQGRTVHDLARG

SEQ ID NO: 67323 - protein, 331 aa, Zea mays
  Coding DNA Sequence Number=SeqID_23948
  Gene Ontology: Mol. function=strictosidine synthase activity; Cellular component=endoplasmic reticulum; Biological process =biosynthetic process
  Homolog annotation: Hit_ID=Q8H3A4; Match level="QueryCoverage=82%, HitCoverage=74%, E-value=1e-120, Identity=79%"; Hit description=ABC transporter permease protein-like protein
  Pfam annotation: Domain name=SGL; Domain location=8-298; Score=-68.5; E_value=8.3e-06; Accession=PF08450.3; Description=SMP-30Gluconolaconas eLRE-like region
  Pfam annotation: Domain name=Str_synth; Domain location=112-200; Score=90.1; E_value=7e-24; Accession=PF03088.7; Description =Strictosidine synthase
  Pfam module annotation: Pfam domain module=SGL::Str_synth; Domain location=8-298::112-200
  Subcellular localization annotation: CTP_CleavageSite=32; ConfidenceScore=5.26e-01
MAPGLLAAAAVLAAVAASLAAHVALNCPVQPVPSHRPPPTPPPNNLLQRMMHPNNGSWERWRFVGGTGLLGVAPSADGTMLVCDADKGLLRVGDEGVTLLASEVEGSPIRFADAAIEASDGTVYFSDASTRFGFDRWFHDFLEFSSTGRLLRYDPRSGETSVVLDRLGFANGVALPRDEAFVVVCETMRFRCIKVWLKGDKAGEAETFVDLPGWPDNIRLGSDGHFWIAVLQLRSPWLDFITRWTFTKRVVASFPALSEWSKGAAKGAMVAQVSEDGTILRVLDDSQGKVINFVTSVTEFNGDIFLGSLATNFVGKLSLARVAQKQGAVSS

SEQ ID NO: 67324 - protein, 199 aa, Zea mays
  Coding DNA Sequence Number=SeqID_23949
  Subcellular localization annotation: CTP_CleavageSite=17; ConfidenceScore=5.20e-01
MTVEKGHGSRGATMVTRSAITKQRRRSGWRFAFAIMTTSKKGPGKGDTPKGILLREGNGPRAPLLIRGSKASPSEGFNSHLRELGLRAHYWLALGGFTAASDAERRMTLGAIGSSASPDPGLGLGLSPGRRRTPPRPTQGSDSGSAPEDDELRLARPRARTRPQPRKTDSTLDLGGASASPYPGLGPTTPQEEPSLPYP

SEQ ID NO: 67325 - protein, 176 aa, Zea mays
  Coding DNA Sequence Number=SeqID_23950
  Subcellular localization annotation: CTP_CleavageSite=12; ConfidenceScore=5.32e-01
MTPLAKEKRKVRVGTYKGGAGMKTSLSVFGDGSLGSPSLSCRRWSLSKASRARIRSRAQAFFMSFFSFLFSAATLHAARSTASSGTVGREGLCHPTSWGQTESLGCENQGQSNARRKKERTLTRDTHPRSGRIKGWERAPKSGFPNVTATRLWRASTGRGSKDIRKPSKSASGVIS

SEQ ID NO: 67326 - protein, 394 aa, Zea mays
  Coding DNA Sequence Number=SeqID_23951
LRILHPSCWDEGRAEPEAPTFPPRVCGTTSPSSNSGEKGAHRPSEGANFDNAGPSGRKRRQLQHAWFAGSAGSSTASSASSHRWAKCGYLPAIQAAVALRAPGDRPRRRALLGWRSCSWAVLPLLRHDAFARRSVLARPGGPEWGSVGGQMAAVVGAEVVAAEEVLVTDEIAAAIRAPGLRLFGFDGLSSPLEWGRGQGPYRSSVCPEVIAAAVWSPGAEVVVAAAKVGGGEPPEILSSRRPSNVGGCSYLRFTPVSKGQSRGQIFLAMMTVFGVAMARRQQQARRRTNPRPLCDEPEPEATVSAWTKADLARKEDFVGLGAGDFPGRGGVAAAARTWLGRPLVGPTLESGYRGHEPGGVLGGQLVEATERPVQPSAWAGFLEETQAAMAQARC

SEQ ID NO: 67327 - protein, 151 aa, Zea mays
  Coding DNA Sequence Number=SeqID_23952
  Homolog annotation: Hit_ID=Q6QP51; Match level="QueryCoverage=56%, HitCoverage=42%, E-value=1e-34, Identity=82%"; Hit description =Putative growth-regulating factor 1
MAAPRIACPVALTPQQGKRHLWQAKRASFRLRHDDRVKKGTEKGDILKRILPGEGNGPPSPPTDQGGSKAGPSEGFDSRPRAHRVRDDSGYVCYMAEARATLPSHVALSLTDLTGKQRRSTRSDCCASHPGKADNSKFSLGRNRKLRLARP

SEQ ID NO: 67328 - protein, 388 aa, Zea mays
  Coding DNA Sequence Number=SeqID_23953
  Homolog annotation: Hit_ID=Q93FQ9; Match level="QueryCoverage=33%, HitCoverage=56%, E-value=2e-15, Identity=36%"; Hit description=Cell surface mucin-like protein
MTSKLNSQACSLGPLCESRRARQPGAGSKEREPVPWGATWSLELENGHLSPGMVRSRVAAQPGPVPWAYTLHHSMTGPGPSRDYLLGDIANSLLGMNYLHTSRVTWVASSERLASGGDHLCTDGLPAAAATSAPSGSPAVATTFAPGSLPSGGDHLSVRAMAKRPSPPPSYGGEDKTIQAMELGARRQAVLAENSAAYATPTVVPPVRVRLIAAKSGLRRHRKLRLARPQGSDSTSTPEDGLRLARPQGSDSTLTPEDGLRLARPQGSDSTSTPEDGLCLARHQGSDSTSTPEDGLRLARPQGSDSTSTSEDGLRLDRPQGSDSTSTPEDGLRLARPQGSDSTSTSEDGLRLARPQGSDSASTSEESPPRPTSGSDRPRHRGASLPYP

SEQ ID NO: 67329 - protein, 281 aa, Zea mays
  Coding DNA Sequence Number=SeqID_23954
  Gene Ontology: Mol. function=protein-tyrosine kinase activity; Biological process=protein amino acid phosphorylation
  Homolog annotation: Hit_ID=A3A7I4; Match level="QueryCoverage=28%, HitCoverage=18%, E-value=5e-15, Identity=54%"; Hit description =Putative uncharacterized protein
AQKLNRAELEVACEDFSNINTFPTCTVFKGILSGGVEISIVSTVISSSKDWSRSAETCFKKKCLFLFDYFDSRTVILVRLLRFWDYQNTDRGYTVYFDSRTAKSYVHNSSSLHMTASFFSLLDSFHFCPLGYKDFPDFGNTTSSLLSTCCHVVLELWYNWSWVKATWSLEVIFPDGIFPADGKSEIEGKNKYFELFQFNKRVPDKLDASRKALLRALKLFCLGLGLVLQGGFFHGVRSLSFGVDLQEIRLMGVLQRIAIAYLLTALCEIWIRGDEDVDYGY

SEQ ID NO: 67330 - protein, 134 aa, Zea mays
  Coding DNA Sequence Number=SeqID_23955
  Subcellular localization annotation: CTP_CleavageSite=45; ConfidenceScore=5.23e-01
MKPMPCAHVTNKLIDASWTAFPAFSSSSGHVRWFINPLPLGFGLSGTTEMDVFLIELHLAWRVLSEELKKKLLFGILRGPNILPLLQLPFQVSCRDLGVSSVVNLIREGCWLVKFRLWGQFAKYIAFSDDDNSV

SEQ ID NO: 67331 - protein, 47 aa, Zea mays
  Coding DNA Sequence Number=SeqID_23956
MGTNGHLDLDTGGKSVDQKGENSKKQKDFVFGGEMSPKQKDRTSSLV

SEQ ID NO: 67332 - protein, 125 aa, Zea mays
  Coding DNA Sequence Number=SeqID_23957
MAARRAVRLGAAAGDPYRRFIGIARSRALASLLGVLSDDQEPFRVDYSHNRGFLAVELLAGASILPSGRTTSWAGLFTTRPPHRSGWLSGYWAVNGCSPVSTPWSSTPGRSDDRGEKTVFGPLDP

SEQ ID NO: 67333 - protein, 151 aa, Zea mays
  Coding DNA Sequence Number=SeqID_23958
MRPASSPELSIRLARALISYAGGAPESRAEEVRQELQAEVVRWSLIANQLPGRTGNDEHQGRDPLGGTNVGRPLKPTALESTRPKTIIIYGDIVEGPSPRNTIKIQSLGDIGANSPMTKVRPFEMSSLPLDVSLAQAQETDKEVCAIMTVE

SEQ ID NO: 67334 - protein, 169 aa, Zea mays
  Coding DNA Sequence Number=SeqID_23959
  Gene Ontology: Mol. function=inositol trisphosphate 3-kinase activity
  Homolog annotation: Hit_ID=A2X5H5; Match level="QueryCoverage=97%, HitCoverage=74%, E-value=9e-38, Identity=43%"; Hit description =Putative uncharacterized protein
  Pfam annotation: Domain name=IPK; Domain location=1-167; Score=-36.2; E_value=4.3e-07; Accession=PF03770.7; Description=Inositol polyphosphate kinase
MSDLHPPEHQVVGHRTSASKLGPLIDGSSLFYKPLQAGDRGEHEAPCVADIKIGAITWPPSSPEPYIAKCLAKDRGTTSVLLGFRVSGVRVVGPEGAVWRMERPEVKAMDTVGVRRVLRRYVSSVADEGMDCALAAALYGGKGGVLSQLRELKAWFEEQTLFHFYLDLI

SEQ ID NO: 67335 - protein, 476 aa, Zea mays
  Coding DNA Sequence Number=SeqID_23960
  Gene Ontology: Mol. function=actin binding; Cellular component =cytoskeleton; Biological process=sensory perception of sound
  Homolog annotation: Hit_ID=A2WK63; Match level="QueryCoverage=54%, HitCoverage=42%, E-value=1e-139, Identity=90%"; Hit description =Putative uncharacterized protein
  Pfam annotation: Domain name=CRAL_TRIO; Domain location=242-427; Score=25.8; E_value=3.2e-06; Accession=PF00650.11; Description =CRALTRIO domain
  Pfam annotation: Domain name=WD40; Domain location=127-165; Score =40.3; E_value=7.1e-09; Accession=PF00400.23; Description=WD domain, G-beta repeat
  Pfam annotation: Domain name=WD40; Domain location=218-258; Score =20.8; E_value=0.0051; Accession=PF00400.23; Description=WD domain, G- beta repeat
  Pfam annotation: Domain name=WD40; Domain location=39-78; Score=20.0; E_value=0.0086; Accession=PF00400.23; Description=WD domain, G-beta repeat
  Pfam annotation: Domain name=WD40; Domain location=82-120; Score =32.2; E_value=1.9e-06; Accession=PF00400.23; Description=WD domain, G-beta repeat
  Pfam module annotation: Pfam domain module=CRAL_TRIO::WD40::WD40::WD40 ::WD40; Domain location=242-427::127-165::218-258::39-78::82-120
MDEVFVEIGTILVGALNDQPAPGPRHASELFALCRWDSDSTVGEFDGHSKRVLSCDFKPTRPFHIVTCGEDFLANFYEGPPFKFKHSIRDHSNFVNCIRYAPDGSKFITVSSDKKGLIYDGKTGEKIGELSTEGGHTGSIYAVSWNPDSKQVLTVSADKYAKVWDIFEDASGKLNRTLVCPGIGGVDDMLVGCLWQNDHLVIVSLGGTFNVFSASNPDQEPVTFAGHLKTVRSLVFFPQSSPRTILSTSYDGVIMRWILGVGFGGRLMRKNNTQIKCFAAVEEELVTSGYDNKVGQKRGRLLADLEEDEQPKKKGFKNFSKTARELVHRMQKIDSDYYPETLHQMFVVNADSGFKWIWNSVKGFLDPKTSSKIHVLGSNYQSRLLEVIDSSELPEFLGVYEEVKGTDRVTYLSYDDQSHPDMAPESYHGVRRATGMEHHKPMADFSQYSANRRPGIFFSYHFGQMSLNLQLLVNIS

SEQ ID NO: 67336 - protein, 414 aa, Zea mays
  Coding DNA Sequence Number=SeqID_23961
  Gene Ontology: Mol. function=Rab GTPase activator activity; Cellular component=soluble fraction; Biological process=regulation of GTPase activity
  Homolog annotation: Hit_ID=Q10MT9; Match level="QueryCoverage=97%, HitCoverage=49%, E-value=1e-180, Identity=73%"; Hit description =Expressed protein
MASTSSSRYAKHRRIGEDDELEEVEEEAEEELPCLVGYHLPHCFDWEHQKGAEGVPPFENLYMIKRELKHGKRVYSMEYHFMKSAKGQNSYWDDDTHSMQLSFGVDEFLIIAPLSASGVILDDPESTKLLSSVAIALSNCGSNWPAFVPVHDPSRKAYIGIQNLGTVFTRRFEADRIGSQVPIRLMHLEGLHELFLSKFVLSSSDFPARVKVHFSMKLSYKTPEYDHDNETLDSEATEPLTENEVVNHPRKLWDDDCPWAEWYSAEDPVKGFELTAIWGERTFEETLEMAEVENASSFDADSWFLHPVVSRYMVDDSIGKFVGFASQLHLLVADTSGQDNAKSTATVPPPSVIDRVMKDLFSDETGNYMEAENKYSRAMRGAPADSLFGQFCLHALWFGNCNICGMSSRSLNSE

SEQ ID NO: 67337 - protein, 125 aa, Zea mays
  Coding DNA Sequence Number=SeqID_23962
MAARRAVRLGAAAGDPYLRFIGIARSRALASLLGVLSDDQEPFQVDYSHNRGFLAVELLAGASILPSGRTTSWAGLFTTRPPHRSGWLSGYWAVNGCSPVSTPWSSAPGRSDDRGEKTVFGPLDP

SEQ ID NO: 67338 - protein, 177 aa, Zea mays
  Coding DNA Sequence Number=SeqID_23963
  Gene Ontology: Mol. function=kinase activity; Cellular component =ornithine carbamoyltransferase complex; Biological process=amino acid metabolic process
  Homolog annotation: Hit_ID=Q6QP54; Match level="QueryCoverage=64%, HitCoverage=33%, E-value=2e-23, Identity=58%"; Hit description =Putative kinase
MKMFLTLILTDLEELEVAKMTGARGKNNEKRRKERIQVYNGGVAECYVSSGGRASALGLAGRHHCLSGGAGQTGHRSCSLRPESARGRVMMALPVDVAGLCPRSGDVVAPPKPRSSLSSVAEAEPEPLGRARRRLFGRGQGGVRALGSGEAEFVVFWGLAQVRDLGRAERSSPSSGA

SEQ ID NO: 67339 - protein, 35 aa, Zea mays
  Coding DNA Sequence Number=SeqID_23964
MGSRHSACSAEAECQGKQGVEADLQEFQDVDEFED

SEQ ID NO: 67340 - protein, 91 aa, Zea mays
  Coding DNA Sequence Number=SeqID_23965
  Subcellular localization annotation: CTP_CleavageSite=84; ConfidenceScore=5.17e-01
MSKNTRNTRFIPRFGHTTKVPYFLVEAPTKSRVSFNPNPPFADHKGQAHTLIFAQTSGRENPSSTARRQVQLVYGQRGSQLKLSSAEVQPS

SEQ ID NO: 67341 - protein, 77 aa, Zea mays
  Coding DNA Sequence Number=SeqID_23966
  Homolog annotation: Hit_ID=A2Y5T2; Match level="QueryCoverage=48%, HitCoverage=6%, E-value=2e-07, Identity=74%"; Hit description =Putative uncharacterized protein
MELIGKVCQHQNTVPLRAYYYSKDEKLLVYVPLGSLCAALHGNAGGNRRNNTRQAPETRTVISSQAPETRMDSWGYK

SEQ ID NO: 67342 - protein, 347 aa, Zea mays
  Coding DNA Sequence Number=SeqID_23967
  Gene Ontology: Mol. function=2 iron, 2 sulfur cluster binding; Biological process=electron transport
  Homolog annotation: Hit_ID=O23887; Match level="QueryCoverage=66%, HitCoverage=20%, E-value=5e-80, Identity=60%"; Hit description =Aldehyde oxidase
  Pfam annotation: Domain name=CO_deh_flav_C; Domain location=91-200; Score=121.1; E_value=3.3e-33; Accession=PF03450.8; Description=CO dehydrogenase flavoprotein C-terminal domain
  Pfam annotation: Domain name=FAD_binding_5; Domain location=1-109; Score=-56.0; E_value=0.0069; Accession=PF00941.12; Description=FAD binding domain in molybdopterin dehydrogenase
  Pfam module annotation: Pfam domain module=CO_deh_flav_C::FAD_binding_ 5; Domain location=91-200::1-109
MTSTLTSKEYQSYQSSTAALRELSLDRLCPSLQATTIEVLSDGNLVFRKIANHLSKVASPFVRNTATIGGNIIMAQRLPFESDIATVLLAAAPRPFGNAASYVNAALLARTSTDAASGKNIMEDICLVFGAYGADHAIRASKVEDFLKGKSLSSSVILKAVQLLKETVSPPEGTTHPEYRVSLAVSFLFTFLSSLTNSMNETAKVNVINGSLTNRTTNISGRYSLKENLEVDRNYLPIHSRQEMVFGDEYKPVGKPIKKVRAELQASGISPPMYCLAKKNILTASAYNLSSAYSAKYCIVMLLFIFSTSSVPNYRRFSTKQQEDGYFPFRKNERGVAVIIIVLRVQS

SEQ ID NO: 67343 - protein, 884 aa, Zea mays
  Coding DNA Sequence Number=SeqID_23968
  Gene Ontology: Mol. function=nucleoside-triphosphatase activity; Cellular component=intracellular; Biological process=regulation of transcription, DNA-dependent
  Homolog annotation: Hit_ID=A2Z847; Match level="QueryCoverage=92%, HitCoverage=16%, E-value=0.0, Identity=68%"; Hit description =Putative uncharacterized protein
EDADELQQDAVGSGTGMGEGDGQKSVSSDIDDESQLGDSKDLTCKADPAPKNDDKAVEMQDGFNAQLSDVSEDLEGKDSGGEDEDTLDNQMGDTGDASEVVGKKSWDKDEDDDPKTSIEKYESGSSAKGTQQDDREMRDKDDGSIEEEDPMEMDSEEGKNNNLEHDPSTHDETELNTDEVMDKADAYDDRTGPELPEPENDSIDVDMVEQEQTDEINADNEDIGTEEAEQADQRLDASDDMEEGDMAQHSDGVVDNEGEHVEDANTDAGEMDSHQLDKADSLMPLSQGLQPDNMQINSNGESEANLANSSDMHGAVAPSVNFSGNEVPNMEISMPNTGNDSILSSNSKPDMQNDAQQHIKQTNPFRSIGDALEDWKERARVSADTQDHQPETGKDSSENTTEFRYVPEGEESTSQALGAATADQINYDNQINQSFLEDESCIRNLEHSDERTPDNPEVPYLQTSQALPNKSENANELDGREIQTDASVQNLVERTDHTFQDLVSFKQPPADDKIALIDLTTDRELPSQMDLDITDAETKRSNAVWKNLELATMKLSQELAEQLRLVMEPTLASKLQGDYRTGKRINMKKVIPYIASHFRRDKIWLRRTKPNKRNYQVVIAVDDSRSMSEGKCGKFAIEALVTVCRAMSQLEVGQFAVASFGKKGNVSVLHDFDQIFNSEAGVNVISSLSFEQDNKIEDEPVSDLLTHLNVMLDTAVARARTPSGQNPLQQLILIISDGKFHEKENLRRHVRDVLNRKRMVAYVLLDSPEDSIINLKEACFRVGEKVELKKYMDSFPFPYYVMLQNIEALPRTLADLLRQSETDRQSGPAEGTIGNSAPPDPGLGHGAKSQKTADSAPPDPGLGHGLSPRRRRTPLRPTQGSDTG

SEQ ID NO: 67344 - protein, 48 aa, Zea mays
  Coding DNA Sequence Number=SeqID_23969
WTNLQLMGRFILGLLRMHFSCFSCWSSPKDREGVIAIIADGEMRMIFK

SEQ ID NO: 67345 - protein, 64 aa, Zea mays
  Coding DNA Sequence Number=SeqID_23970
MVRPSTSCSTKCTINRVALGLRYFQGKVKDHGVGSALQIADASFALVRYSQQLVSMTWTMHGKD

SEQ ID NO: 67346 - protein, 389 aa, Zea mays
  Coding DNA Sequence Number=SeqID_23971
  Homolog annotation: Hit_ID=A2Y5S9; Match level="QueryCoverage=89%, HitCoverage=94%, E-value=4e-46, Identity=37%"; Hit description =Putative uncharacterized protein
MRFGRCPYCRTMVYQNPQAVVFFCSKCRTPIRGKNPSSTEGIDQALSRLEILSVDNASVFSDELDACQDIVAPPRSSSPAPHGGFGSMWRGHPATNGAPASAGCDDSVVDSDEQDRIRLFSRRTRRTSGSDSSVLRYGMLMAADSETEEGFSSPRNACERQRHRRRRSLLGSQAFETSTGHDPYGVAPSLLRDPSFHNELVNALDNLRGLVAAIEPSSSSSGRRASAPPDARLFRRLESQLARALHVDGRGGHRRNASSAVSSSSSCSYRSERRKNHCRPVLGGAPFLVCGSCSELLQAPAATGLPRGKVVRLRCGGCEEVIEMTEVPAGVGGSAPHKKTWALSPPPVLDPSSCNSGAVGDGAQHLPPQPLHRALGYSSPSPLLQSRRY

SEQ ID NO: 67347 - protein, 183 aa, Zea mays
  Coding DNA Sequence Number=SeqID_23972
  Homolog annotation: Hit_ID=Q8SA97; Match level="QueryCoverage=71%, HitCoverage=23%, E-value=7e-08, Identity=41%"; Hit description =Ornithine carbamoyltransferase
MALPVDVAGPRPRPGDVGAPPKLRSSLSSVAEAEPEPPGRARRRSFGRGQGGVRALGSGEAEFVVFWGLSPSPSPGVGAERIGVAQAALSFCQTGQWSGGVTAVTSALPGTRVRIELYADGGYQLRIRHLEAPEPLHRARGRSGTDSAFYIRPYVAFPQGGGGECAMLPSMGTEHGVSGELQA

SEQ ID NO: 67348 - protein, 93 aa, Zea mays
  Coding DNA Sequence Number=SeqID_23973
  Subcellular localization annotation: CTP_CleavageSite=62; ConfidenceScore=5.06e-01
MRPAGRSFVVAGAGAGWSAFPLPHASHLQALRWPCADRRSTCRPNNHRVPYSESKLIGRCCCCNHRDQSVAPNPMAMASCTKVRKRYLERPMS

SEQ ID NO: 67349 - protein, 46 aa, Zea mays
  Coding DNA Sequence Number=SeqID_23974
MAPEAGPGCLLASLCRVAQQSERRRRRCPLVRPAIHFSRAQNVLQN

SEQ ID NO: 67350 - protein, 313 aa, Zea mays
  Coding DNA Sequence Number=SeqID_23975
MEVRCQTSFCQNEDAFPKLLRACTVRLGIRSQPEYDGREFVEHGTEKCIVTVYIGSSPHHVEWSVTAAGHRFKDTCQVIACKALRALCQIYEEEVADTPLRFFPPFQRNCPVWMARMRALAGQQLLEDDPSVVYLTAYLLTLDAHPEASQDEHVQKLMEAYLVTHNQRRALRIQEPASSNPVQPMRAEDPQILEGHPVSNKGEKKAWELPKGAIVLEGIPVFPQAMDKQEHPESSQDPLPELFEPLTMKKIPAPSLEVKEEAASTPPAPPPSEDLQEPVLLEEEFNPMLPPQSPPEEVINISSLLTHPGDVSD

SEQ ID NO: 67351 - protein, 153 aa, Zea mays
  Coding DNA Sequence Number=SeqID_23976
MAVATAAPPWASLGPDKNNKSFWVELVGACNLIWYQSQRSRERGPTCFSVIMNISDDALVGPYIIVHNEGQHDMDIDVKEPSSNTNNDKKASTSCQRCLWTVLEKYITSTSSNMTSSLMEVALLSVPGRGCSTRKLSFKPLDSVMVIGLPYSV

SEQ ID NO: 67352 - protein, 202 aa, Zea mays
  Coding DNA Sequence Number=SeqID_23977
  Pfam annotation: Domain name=IQ; Domain location=48-68; Score=24.5; E_ value=0.0004; Accession=PF00612.18; Description=IQ calmodulin-binding motif
MGDLWTNIKIDLAKMQATLQKVEQGLMQIKVAVQHEQHQLALSARLQTSASVGIQAAARGFLARQRVREMRRQMLEAALVTVDLGTRGRDLALSDGHQQRHQAAISKCEHGTCPAGDELQLYGSGGKEGTPLIIGKGALFSATTFRYRPPRGRLRWLLLQPIPGARPCAPLSSRWRPWDPGGCTRASPMRRGCPPYLMGSKK

SEQ ID NO: 67353 - protein, 167 aa, Zea mays
  Coding DNA Sequence Number=SeqID_23978
  Homolog annotation: Hit_ID=A2Y5S0; Match level="QueryCoverage=85%, HitCoverage=87%, E-value=5e-26, Identity=46%"; Hit description =Putative uncharacterized protein
MDMDEQGKLPAGGAAVVAVDVVMSRFSLDVSAGCGGRHSTLLDEYERLAFEAQLNRAIVLRRCYSEPSPVRYAEAEHQRPPAGADDARAPPPPRGAPDLQGGAARRDGGGGGDGDGGCRFWRLHEVLARWIEALRPVLRWLRSPWECRRRKQPPPPPPRVQLMDYLR

SEQ ID NO: 67354 - protein, 116 aa, Zea mays
  Coding DNA Sequence Number=SeqID_23979
MAGAGGAGDGELGAGAAGGGVVGDGRDRGRRARGERGWGTARSGAGAAGGQRAEAGVAEAARPGTGAHGRGRAGERGHAAGRAPAGGGRRREGKEEERGREGLTAGGGGRRRRWFR

SEQ ID NO: 67355 - protein, 369 aa, Zea mays
  Coding DNA Sequence Number=SeqID_23980
MRLMVLGFDSGNASPLQPNRILAEYVDVYSPLLYTPNPPHPQVVSITTPAQEKAKSWKETSRSSKTTTSSRRGWLVLDTPHGSLSSPSYPLVSWSVRFAVPWPQEIESVRSCSPVLPLEAPPAPPLGAPASGVAAGGDPDDGGGDDSLSHDTDFSADQEPEGWVARPITRDAACGCHFHDALDTLLRWALNRRTWSIEYRYVVYQHSRGVYPDRWEATLLGAPSGEQSPGVRRPAQSTILSLSGTQLRRPCKMPHGVRFRTTAQCSYYPRRPSGSTGGVIVSSVGEDNPRLSSTVNLAAVLNTELNHALDELSKARAEIALLRAERAERCHLDDGSPAPVGTQHPYRSPWRGHQSYGNPDCKTKINLEP

SEQ ID NO: 67356 - protein, 19 aa, Zea mays
  Coding DNA Sequence Number=SeqID_23981
MEEGRIDPREGKGRSRQEV

SEQ ID NO: 67357 - protein, 159 aa, Zea mays
  Coding DNA Sequence Number=SeqID_23982
MEIARSPLRHVLKGSTSRLASPSLSPTFATYLPLFQFAIDTERKGERDLHRPHHGSWPSFHNQDLEWCRGVAPLVPHVCDTSGGTNPGRVALNSSLELAPRLCSALRHGLLLPVVRTLGKSPHRVRLCLLFVLRQLIELRVLVGPEITVPSMAPPLGAG

SEQ ID NO: 67358 - protein, 179 aa, Zea mays
  Coding DNA Sequence Number=SeqID_23983
  Homolog annotation: Hit_ID=O48967; Match level="QueryCoverage=24%, HitCoverage=9%, E-value=1e-14, Identity=90%"; Hit description =Putative uncharacterized protein
MTWDICVPLDGTRTPLSEVRTIQDKISGRRIPWPKSRTYRGPTQTLVRVLPGAPRGLRPGAATWPMTRDVNRRADSDVRPLGHAISAFIAEIARLSALEIGDAPTRHLMCPVHSDGRRRPDHPTGGVPVQSDNGHMMVQIVEHRAETSTDFLVEEEAVSSTPQVPNRPVPGTAAVHAAR

SEQ ID NO: 67359 - protein, 480 aa, Zea mays
  Coding DNA Sequence Number=SeqID_23984
  Gene Ontology: Mol. function=DNA-3-methyladenine glycosylase I activity; Cellular component=cytoplasm; Biological process=base -excision repair
  Homolog annotation: Hit_ID=A3BE41; Match level="QueryCoverage=68%, HitCoverage=90%, E-value=1e-71, Identity=55%"; Hit description =Putative uncharacterized protein
  Pfam annotation: Domain name=Adenine_glyco; Domain location=298-435; Score=144.2; E_value=3.6e-40; Accession=PF03352.4; Description =Methyladenine glycosylase
  Subcellular localization annotation: CTP_CleavageSite=8; ConfidenceScore=5.23e-01
MPEKYAVRQREAVGPTRRGPGVPHSPVPLNLSANRFVPSFLSLDSTTPSSSEQLLQLQPPCASLLPVPPAPPPPRASKSPQLPRIPLSPVAARFREVLISFERRLPAVAVSREEKESGFRGVSGCVLVSAEVNLKCPCGKPEARPVLVPGGNKARSGPANARKPSPKPVRKAEPAPAGTPAETVPAATKAEEGAKRNAVGGGGGGAPKSASPVPSPRRTPPGPPSRRNDAPLSHPGLPLSASCSSDASAESVRARRAFTGKVEKGRSVPTAQPKQGKAVGKAVESKPIRVEVVAPMTVTPEAVQGKRREIFMEFDPAAVSEINEKKLVAPGCVAHSLLSEQKLRAVLENARQILKIADEFGSFDRYCWGFLNHKPIVSKFRYPRQVPVKSPKADIISKDMMRRGFRGVGPTVIYSFMQAAGLTNDHLVSCFRFEHCSAVPTLCACDIDRANTKADLKKDEVTAKIYREEAVEDDALNIWS

SEQ ID NO: 67360 - protein, 868 aa, Zea mays
  Coding DNA Sequence Number=SeqID_23985
  Gene Ontology: Mol. function=dopamine beta-monooxygenase activity; Cellular component=integral to membrane; Biological process =histidine catabolic process
  Homolog annotation: Hit_ID=Q67UR7; Match level="QueryCoverage=100%, HitCoverage=100%, E-value=0.0, Identity=73%"; Hit description =Dopamine beta-monooxygenase N-terminal domain-containing protein-like
  Pfam annotation: Domain name=DOMON; Domain location=144-288; Score =0.2; E_value=0.05; Accession=PF03351.8; Description=DOMON domain
  Pfam annotation: Domain name=DOMON; Domain location=486-603; Score =45.0; E_value=2.7e-10; Accession=PF03351.8; Description=DOMON domain
  Pfam module annotation: Pfam domain module=DOMON::DOMON; Domain location=144-288::486-603
MAPAALHFLLAILCLASRLVWTHQLRGRVEILDGCSFRVAALDLLPGSSSARWWRADGTDLESLSRGEPAAADPLDRTFLSESLVFRLLPGLSWPLVPVLAAFDPLTSSLFGFVRLSGANASDSSSSSAAAVPTMLDSCVQLSPRFRVRWTLHEANNSIDIALEAAVGSEYYMALGWAKPGTAKPSVIGADLAVAGFTEDGLPFAEDFYVTNYSECLLRKDGLVEGVCPDTIYDRDNSTGLVNNTRLVYGHRRDGVSFVRFSRPLVSADNKYDVPVNATRNMTVIWAIGLLRPPDSLRPYYLPLMSHRGGSPGTAFTFARLNLSDASSGCVGPLDAEDKEDQARITTERNTPLAVTVGPALHYPNPPNPDKVFYINKKEAPLLKVERGVPVTFSIEAGHDAPVYITSDPVGGNATLRNSSEIIYAGGSMAEGVPATPTELVWLPDRNTPDLVYYQSLYDPKMGWKIQVVDGGLSDMYNNSVLLDDQQVTFFWTLSGDSINIAARGEKKSGYLAIGFGSVMVNSYAYVGWVDGNGKGHVKSYWIDGKDGMSVHETHENVTHKRCRLENGAIVFEFTRPLTPSCSGKVECKNIIDPTTPMKVIWAMGAQWSPGPLSLKNMHSDTSNRPIRILLLSGLAEAVEDLRPVLAVHGFMMFVAWAILLPGGIMAARYLKHLKGEAWFQAHTYLQYSSIAVMFLGVVFAVAELRGFSFKSRHARIGAVALTFASMQPVNAYLRPHKTENGETPPGNRVVWEYLHVLTGRSAALAGTLALFTGLQHLGHRYGSKTIKGLTCGLILWVISVTLLTAYFEYMAIKRRTAGVDGLSGNWVLGNTEEDDTVELLQSNRVVSKMESNLSPEPMEVQLEPLKG

SEQ ID NO: 67361 - protein, 230 aa, Zea mays
  Coding DNA Sequence Number=SeqID_23986
  Subcellular localization annotation: CTP_CleavageSite=25; ConfidenceScore=5.11e-01
MAHQPSFGPTYRLVTSPEAGPGATVGTLEQAQARALLALLAPLTRGTHLTVSRSRSRSASHGMRGPTDQLLNRAPSLSLPLRHFHGVPPVISLGYNQPRAPAGLLELRSAFSSPLCAPQNHRRYQCRARRRHLEPSASPMLREGVQGLRLALLKLTGHRTRQLINCTVGNCSSECANCRGFNRAVDLPRRPSIAEEPVIEDPGEQQIEVAEQELIEGKLCLDHFLPNNVL

SEQ ID NO: 67362 - protein, 442 aa, Zea mays
  Coding DNA Sequence Number=SeqID_23987
  Homolog annotation: Hit_ID=Q6Z247; Match level="QueryCoverage=44%, HitCoverage=20%, E-value=2e-11, Identity=29%"; Hit description =Erythrocyte binding protein-like
MASLVHPERYQTERRLDTMRRLLGWRARSPAPAPHTPLHPLGDHLRSPERDVRGGGSVHLSLPPLFCAGEVWEGQGPSRSVLLPDKGDSAGAYISSLSGARWENWRVEWVIASTEASDRLVLPTDGLRLDGKQWRAKPPLAPEFEPVLGRIESLATGGLTSMHVVGDILQRRIVPLLARARPELLGITGESFVAKSLIPPEGILPLCDDQGLRTTILDSLPTLDESGIAVRQTGGRDPHRGIQIPGVLAGGSRPADAGSRAPLTTLSPSGKGKGAASSSSAPGGSGRSEVERQHRLRRVDGSFVTDLPLDSGLPQKHQRTTSGVGEAGSPAQGSQKRVSPPPAPPSVLPPPPPSSSSLPPPQGQQHQQQQQQASYPSVSKVAPTGESGSQQQVSAGLDADDLPPPATAEVAPSGPQVLAAAAAAPSSPQVLAGTAEAVSSGP

SEQ ID NO: 67363 - protein, 145 aa, Zea mays
  Coding DNA Sequence Number=SeqID_23988
  Subcellular localization annotation: CTP_CleavageSite=67; ConfidenceScore=5.30e-01
MAVGRLLSHGAPDSPVRHWTLSGSPATSRSRWILTVGAEVFWTTGQSGGAPDRSCRLSGDRWRGRSRCSAGTPDSPVRHRTLSGATPDSPVNYSGLASRIPEGEQFGVGDPGAPDSLSGVSILNFCVCGKVPPSNDILSRGKLLN

SEQ ID NO: 67364 - protein, 168 aa, Zea mays
  Coding DNA Sequence Number=SeqID_23989
MSSNIPSATAEAAGGVPDSIPPPIPEELEEALETEHQCLGDWRTQLEERTKAASCQFASERSDLEQGRKDLKEDLEKVLKLERKATREGKRLVKKKEHLDQRDAEKDLAWREEMWERRDKLLADHELKVEEKEKKLEEKERTLEERVRRFQAAQAAQVAQTAQAAPGS

SEQ ID NO: 67365 - protein, 41 aa, Zea mays
  Coding DNA Sequence Number=SeqID_23990
MAASRVLIPGLSPIFGEDRLTEHAGEFCGTVPTVSIIKKST

SEQ ID NO: 67366 - protein, 180 aa, Zea mays
  Coding DNA Sequence Number=SeqID_23991
  Gene Ontology: Mol. function=binding
  Homolog annotation: Hit_ID=Q69QZ3; Match level="QueryCoverage=26%, HitCoverage=7%, E-value=5e-11, Identity=68%"; Hit description =Neurochondrin protein-like
MGYVKNVGTDVLKLSSWALDKTVEFNELETTDPAITEECFELLSLIAIASEDGAYEFCEPRVIDMIFLQILSLTDGHIAKNLPHYVCLSLQYFLAYRRFLEIDTLHSSRKLYLCEKISLTGEMYFAITLDRKTTGPVRPAGEKTKEEQYLICVGDIDLKSTLLCNMEIIIVKALKLDDVE

SEQ ID NO: 67367 - protein, 159 aa, Zea mays
  Coding DNA Sequence Number=SeqID_23992
MAGSKDHTDISPDNILKPAVESLTADEQQQYEDYMRQAREKFLSQYTVDRHQKVVKHGETDVASLLSSLQVPNYVDQQQDQMKQQIVGLEESIRKLTRTLEKSVAPSLPSYETSNKISMSNTSATIGGFAAPAIIWYADELLYRTSTTTAHPCLVDQHP

SEQ ID NO: 67368 - protein, 116 aa, Zea mays
  Coding DNA Sequence Number=SeqID_23993
MSSFALGPRCYTPTLLTTLGDFWKLGVSIDVIELSLEDSGAAHPEGWQSYGLSPPPEPIKFLDRWSSKSLALSNLLVIIENAKNNGSPELAMPRKNDTTAAVLVIIENAKKTKAHP

SEQ ID NO: 67369 - protein, 348 aa, Zea mays
  Coding DNA Sequence Number=SeqID_23994
  Subcellular localization annotation: CTP_CleavageSite=21; ConfidenceScore=5.44e-01
HASRAKGRARRSRSPRQGGVRAWGRAERSRRLPGLARVRALGSSGAEFTVFRVLARVRALGSGGAEFAVFRVFARVRALGSGGAEVAVFRVLARVRALGSGGAEFAVFRVLARVRALGSGGAEFTVFRVLARVRALGSGGAEFTVFRVLARVRALGSGGAEFAVFRVFARVRALGSGGAEVAVFRVLARVRALGSGGAEFVVAPLARPDCLSDSLCRVALQSEWRRPLQLYADGGYQLRIRRLEAPEPLHRARGRSGTDSAFYIRPYVAFPQGGGGECAMLPSMGTEHGVSGELQAATGVPVARRVGLGSKLACQKSEKRVHLARLHAACMAARPFCPLVWAEMGGRL

SEQ ID NO: 67370 - protein, 27 aa, Zea mays
  Coding DNA Sequence Number=SeqID_23995
MTRALASRSRSNCILPVLIRVKECSAC

SEQ ID NO: 67371 - protein, 357 aa, Zea mays
  Coding DNA Sequence Number=SeqID_23996
  Gene Ontology: Mol. function=isomerase activity; Cellular component =endoplasmic reticulum; Biological process=cell redox homeostasis
  Homolog annotation: Hit_ID=Q5EUD8; Match level="QueryCoverage=86%, HitCoverage=82%, E-value=1e-166, Identity=78%"; Hit description =Protein disulfide isomerase
  Pfam annotation: Domain name=Thioredoxin; Domain location=225-331; Score=104.7; E_value=2.9e-28; Accession=PF00085.11; Description =Thioredoxin
MPPAPIGDGGVGSARDLSSGNGGDCLLHGEGEVQRGGHTTRGEDESAHGAHSDELAAASRLEDSINFYQTSIPDVAKLFHIDPAAKRPSIVLLKKEEEKLTFYDGKFKASAIADFVSANKLPLVTTLTQETSPSIFGNAIKKQARDVAYNERDNDEVGEPVANYFGLTGQETTVLAYTGNEDARKFFLDGEVSLEAIKDFAEGFLEDKLTPFYKSEPVPESNDGDVKIVVGKSLDVIVLDESKDVLLEIYAPWCGHCQSLEPTYNKLAKHLSGVDSLVIAKMDGTTNEHPRAKSDGYPTILFYPAGKKSFEPVTFEGERTVVDMYRFIKKHASIPFKLKRQESRRESIQTDGVKDEL

SEQ ID NO: 67372 - protein, 133 aa, Zea mays
  Coding DNA Sequence Number=SeqID_23997
MGVGKGRFDGWECLLNALRLFSDRGWKRLQGIAAEVWTYIRAVERSGLEGSDESEFSSDEKDSDGGEDEDDDDDDGDDDDGGDGDGDGSNGGGGSGGKGSTRGGSSTGSTRGGSSKGSTRGGGGKGSSSKASG

SEQ ID NO: 67373 - protein, 265 aa, Zea mays
  Coding DNA Sequence Number=SeqID_23998
MAHRTVSGAPGPSISEHVTLGFLRGALHYNSPDCPVCTGHVRTRVPTVVHSKTPTGVLTWRTPDNEQCCPGRAKRSSSSFGVEPEFEPWGRARRSSSSSGAEPESEPWGRAKRSSSSSGAEPESEPWGRAKWSSSSSGAEPESEPWGRAKRSSSSSGAEPESEPWGWAKRSSSSSEAELESEPWGQAERSLSSSGAEPESEPWGRAERSFPWRLGPDLAAVNLTLSSGSTVGAAQAAQSSCQTGQWSDEVTAVTSALSSGGRASG

SEQ ID NO: 67374 - protein, 118 aa, Zea mays
  Coding DNA Sequence Number=SeqID_23999
  Homolog annotation: Hit_ID=Q2QTB3; Match level="QueryCoverage=27%, HitCoverage=1%, E-value=1e-07, Identity=81%"; Hit description =Retrotransposon protein, putative, unclassified
MAGSRDSSEVSPSNIIEPTWETLPANEQLQFEEHKEQLIQEAKAKFLANFKVDRNNKVVQQWATDPASLRPTPDIPNICMAEEDASKMTFICPGFIGLFEWVVMTFGLKMSVLLIRGI

SEQ ID NO: 67375 - protein, 237 aa, Zea mays
  Coding DNA Sequence Number=SeqID_24000
MTLEPHQHRVPRCRVRMTLELHPLQPGWRSLDSESFGFRAEDTIESTALHVLTTFCGFHPLELSTHPIGLFPAEKEDDPMWKDRVEHAKEVWALYPGHTAHLMVRCMNALYRLQALRGEAMSQLMGLVESTKITLDNREDLVVNLSTELVEKDLQVEARENTIEILEDQLQTSQQQLEEANQHLDLHHQEIQDMEAEGADEDVHIEGGEESEPASSLDTAGSGRPPSPEPSVALFAH

SEQ ID NO: 67376 - protein, 313 aa, Zea mays
  Coding DNA Sequence Number=SeqID_24001
  Homolog annotation: Hit_ID=Q7XBE0; Match level="QueryCoverage=85%, HitCoverage=29%, E-value=1e-16, Identity=27%"; Hit description =Putative gypsy-type retrotransposon
MPANIDDAEIDVVLSLLAGESSDSTHTEPMAITAGQELGEEVETRKPEGARPKHPCRVSRPTAPVEEKRKKRQLRRLSCLDQGACPSAPVPDDVPEEALPEVDAKSCDRAQAAVCLFDEDEEEEQEEVPLIHKNNRHYRGSEGVVIFLLQLYRILLVFRGFQYQTLIKYWRKSSSKTCYQSHLPMISRPSVQRSQMVGFPCLIPLGKSPESGAGSYPAPESGAGSDPALMGNASYNPAPEGVQVGSLSHASMDVHVGLSPPRFDGATMAFVDGISAQLRSCGAAVPEQALSLMQWNPMLLQKQIDDLKASNTG

SEQ ID NO: 67377 - protein, 143 aa, Zea mays
  Coding DNA Sequence Number=SeqID_24002
MGKNNKRKREPTPPSEEFGDSEYSEEEFSSESEGSPAPIPLRESSDDSDDSPGACGGGLDGSDESEYSSDEEDSDGGGEDEDDDDDDGDDDDDGDGGGSGSGRGSGGGSKDGDGGGSRGSNRGGNSRGSTRGGSGGGSNRASG

SEQ ID NO: 67378 - protein, 463 aa, Zea mays
  Coding DNA Sequence Number=SeqID_24003
  Gene Ontology: Mol. function=GTPase activity; Cellular component =plasma membrane; Biological process=immune response
  Homolog annotation: Hit_ID=A3B6T9; Match level="QueryCoverage=97%, HitCoverage=39%, E-value=0.0, Identity=76%"; Hit description =Putative uncharacterized protein
  Pfam annotation: Domain name=GBP; Domain location=40-323; Score =187.2; E_value=4.2e-53; Accession=PF02263.10; Description=Guanylate -binding protein, N-terminal domain
MLQMLGFRGGSPSTGDASPAISGDGGAAARPLRLVYCDDKGKFVMDPEAVAALQLVKGPVGVVSVCGRARQGKSFILNQLLGRSGGFQVASTHRPCTKGLWMWSAPLKRTGLDGTEYSLVLLDTEGIDAYDQTGTYSIQIFSLAVLLSSMFIYNQMGGIDESALDRLSLVTEMTKHIRVRASGGSCTSSYKPSNINLRPCYASDTFGVRRADDTVLPLLQDFYLDLAEDNRKITPRDYLELALRPVQGGGRDISAKNAIRDSIRALFPDRECFTLVRPVNNEKDLQRLDQLPIALETYLHFKQFDGIYKLCLSLHDLSNFRPEFRSGLDAFTKFVLDRTRPKQLGATTMTGPILAGLTQSFLDAINNGAVPTISSSWQSVEEAECQRAFDSAVGTYNSSFDHKKHIEEDSLREAHEDAMRKAISAFNVSAVGAGSARSKFEKLLHSSLKKAFEVILSLLISCF

SEQ ID NO: 67379 - protein, 184 aa, Zea mays
  Coding DNA Sequence Number=SeqID_24004
  Homolog annotation: Hit_ID=A7P1T1; Match level="QueryCoverage=86%, HitCoverage=89%, E-value=4e-37, Identity=40%"; Hit description =Chromosome chr19 scaffold_4, whole genome shotgun sequence
  Pfam annotation: Domain name=zf-MIZ; Domain location=88-138; Score= -9.7; E_value=0.024; Accession=PF02891.11; Description=MIZ zinc finger
MSSMATKLFNTAEVESSDAQALVAVKKLEETVLELVASYEDCAAMAQAIKAVPGVYQSSDQNVHHAGQPMPGEEQEDIVMTSTQMSILNVTCPLTGKPVIELMNPVRCVDCKHIYEKDPVMQYIRTKKPPQCPIAGCPRVLERGKVICDPFLLIEIEELRSSETAAPNATNIDDWTDLNDEDEE

SEQ ID NO: 67380 - protein, 103 aa, Zea mays
  Coding DNA Sequence Number=SeqID_24005
  Gene Ontology: Mol. function=DNA-dependent ATPase activity; Cellular component=nucleus; Biological process=DNA replication initiation
  Homolog annotation: Hit_ID=Q5I285; Match level="QueryCoverage=61%, HitCoverage=7%, E-value=2e-21, Identity=74%"; Hit description =Minichromosome maintenance protein
  Pfam annotation: Domain name=MCM; Domain location=3-103; Score= -206.9; E_value=0.00048; Accession=PF00493.14; Description=MCM235 family
MWNKRKMRLLGTDSICPTALGHQEIKWPVLLMFWGGVHKIAHEGTNLRADINVCIVGNPSCAKSKFLKYIVAVIPIFVCTSGKSSTVGVTTTVAKELEAVSGF

SEQ ID NO: 67381 - protein, 242 aa, Zea mays
  Coding DNA Sequence Number=SeqID_24006
MAHSGSARSRPRSSRRQNEASASVRSPSVRAAPTEDLRAELNHRRAGEDAPASLEKSNDLWAELNRRRAGEDACVSLERAPRSPLVGCGGSGLGRSPPPVHVLSPFGLVWRRGRGTGEQAQRSRSLGALRLPVARLDANAIRSLLTVYSSAEQELVRQAGGSNRGDDGDAWSAPQAEGLVGHECDADQRDTHAMSEGGPTLYCDLSPSATPSRPDLGLGVSEFIRGWVLSGRRLPYLLTDEP

SEQ ID NO: 67382 - protein, 634 aa, Zea mays
  Coding DNA Sequence Number=SeqID_24007
  Gene Ontology: Mol. function=DNA binding; Cellular component=nucleus; Biological process=regulation of transcription, DNA-dependent
  Homolog annotation: Hit_ID=Q8S985; Match level="QueryCoverage=90%, HitCoverage=92%, E-value=0.0, Identity=57%"; Hit description=Auxin response factor 15
  Pfam annotation: Domain name=Auxin_resp; Domain location=238-279; Score=25.4; E_value=4.8e-07; Accession=PF06507.4; Description=Auxin response factor
  Pfam annotation: Domain name=B3; Domain location=165-259; Score=27.0; E_value=6.3e-05; Accession=PF02362.12; Description=B3 DNA binding domain
  Pfam module annotation: Pfam domain module=Auxin_resp::B3; Domain location=238-279::165-259
MAGIDLNDTVEEDEEEAEPGNACSQQSRTSSAATFPPPPPNQPRPSAAVCLELWHACAGPVAPLPRKGSVVVYLPQGHIEHLGDAAAAGGGAPPPVALPPHVFCRVVDVTLHADASTDEVYAQLALVAENEDVARRLRGRSEDGSAEDGDEGETVKQRFSRMPHMFCKTLTASDTSTHGGFSVPRRAAEDCFPPLDYSQQRPSQELVAKDLHGTEWRFRHIYRALYNQCLNLGSLPNVAHAVATKSVFHIYYNPRCTGIIAGIGDADPMWRGSKWKCLMVRWDDDVDFRQPNRISPWEIELTSSVSGSHMSAPNAKRLKPCLPHVNPDYLVPNGSGRPDFAESAQFHKVLQGQELLGYRTHDNAAVATSQPCEATNMQYIDERSCSNDASNIIPGVPRIGVRTPLGSPRFSYRCSGFGESPRFQKVLQGQEVFHPYRGTLVDASLSNSGFHQQDGSHVPTQASKWHAQLHGCAFRGQQAPAVPSQSSSPPSVLMFQRGDPKMSPFEFGHFHVNKKEDRRAMFVHAGGIGGTEQTTMLQAHHVSGGTGNRDVTVEKSHPAVAAASDNREVSKNSCKIFGISLTEKVPAMKEKGCGDINTNYPSPFLSLKQQVPKSLGNSCATVSVLHHVAALMSF

SEQ ID NO: 67383 - protein, 106 aa, Zea mays
  Coding DNA Sequence Number=SeqID_24008
MAPPVDVAGLRPRLGDVEAPPRSRSSPSSMAEAESEPLGRARRSSSSSRAEPKSEPWVGRSGVRRLPGLSPSPSPGSGGAEFAVFRGLARVRALGRAERSSPSSGA

SEQ ID NO: 67384 - protein, 549 aa, Zea mays
  Coding DNA Sequence Number=SeqID_24009
  Homolog annotation: Hit_ID=A2WV63; Match level="QueryCoverage=93%, HitCoverage=88%, E-value=3e-30, Identity=34%"; Hit description =Putative uncharacterized protein
  Pfam annotation: Domain name=DUF1421; Domain location=150-547; Score=- 56.7; E_value=8.4e-05; Accession=PF07223.2; Description=Protein of unknown function (DUF1421)
MASPARPAAASVSAAFGLSPDPKRCSFDQALRHKENRLLMSFVNYHDQEKVSKEIVTDAIESCMKKQADNLLNSLEVISGRLSQLELYCYKLERSIGELRSDVMDYHNEANLNFQCLDKQLKELCPTCGLINFLMTFLRLTHNWTYFYGQVQKSVQVVQERQELAETQKEMTKLQIVHEDSAQKSERSAPSVFINRENEIALVPLHQVNSVQSPAVQFQSCSGLILQQLVPVQDQQRSNQTAMYCMRGQSHLEHRQAQMFQAAAQPVQTHTTRKTQAHTVLEVPQVTTQTDTRVLRSTAASMATSNRSAASVPGKATTTTGGFNNSSSTTISSKVQHRWSSRKTSSPHAHSTPQITLVYPPYGAHQSACGNAEARTGSIVVPPSHSTISSSQRKHHEAAPIYVQSNTVSVPLTEQHQQLHSLGNGSFVPQPSKVSPCGVASYTVQGNAQAYSPAYGSPSSNPATIVAVLNQQAHCSAPMVLHHLGPSQSVQNHPIGIADKVARMGYPKDQVVDGLALRMVDAGQPAECNTLHDRLSSVTHAVAPQAWSG

SEQ ID NO: 67385 - protein, 105 aa, Zea mays
  Coding DNA Sequence Number=SeqID_24010
MGDSDFCARRARIKCAAESRWRGDDRCFRVAPDSPHNDIARIARNFIIKMNLFVRQITIKDGDQFSRHASNMGNKSKDCICIARGGQHVEPGCRREQVANSAEGG

SEQ ID NO: 67386 - protein, 54 aa, Zea mays
  Coding DNA Sequence Number=SeqID_24011
MQTACNRAKWAHPFDSNASSMEAQAHTSHNRDRERGIPRKGSFSVKETCPEPPY

SEQ ID NO: 67387 - protein, 43 aa, Zea mays
  Coding DNA Sequence Number=SeqID_24012
MASLSLSPPGAPDMSGGTPDSPSQTRTETPKSKKEEINLDMEE

SEQ ID NO: 67388 - protein, 69 aa, Zea mays
  Coding DNA Sequence Number=SeqID_24013
MAPDCPVCTGHVRCANGSLAANGRLRHLRKEIGHRTLSAAIHRGKNTVEAAAAAGLQPQQAAANKLIVF

SEQ ID NO: 67389 - protein, 87 aa, Zea mays
  Coding DNA Sequence Number=SeqID_24014
MPSHRLTSNARAGSRELCRPSLRHQLVIVTDTTMSPHKQQVPPRHRAGELSPPEVPTQALSRASMHTEQPTSPPHGRAHGSRHRHTS

SEQ ID NO: 67390 - protein, 229 aa, Zea mays
  Coding DNA Sequence Number=SeqID_24015
MSFVLFDYFESGIPKTTEYTDSADRTSLHARKLFCRNDFLGLLDYIDSRILRTSSDLVRGGAAAPSASTTPSAKSDQASDGNAVGGSPLRRTIAAPRPGHRRQGLLQEFDLSRRLGWPPRSLSQLSPEDISPVCGLGDSTPVLAPPVDGPDRLRPTKSSFRANSASVHADTAASGFGSSKSSRGFSLTKQEKASGGKADRAEGLLRLWDTDTSLVTFARGNSHLVKRSS

SEQ ID NO: 67391 - protein, 144 aa, Zea mays
  Coding DNA Sequence Number=SeqID_24016
MTGRLLTQSVSKLRTRREVREFVPKEANLTLEPTWSVTERSRRACTCAPRQTRGREQWAHRGEELGGVLGRFSRFWPTQGFTKAAPSEGFNSRLKALGLRAHYWSEVRRPAPRKGSTAASGHSGSAPTTDQGFVGWPSKGSQPP

SEQ ID NO: 67392 - protein, 129 aa, Zea mays
  Coding DNA Sequence Number=SeqID_24017
  Subcellular localization annotation: CTP_CleavageSite=27; ConfidenceScore=5.02e-01
MMENFGSKTVQIAMNAVVTSQLLVSLYSAAVDRKDQTVTLQGGTDTRSEVGSFLRNELREGVFWTFGFPKLKRLFSRVKLVTKNDLAPRKGLLLGSCFGAPKVSHEEAASAEVVSKRWPKVPFHGTSAF

SEQ ID NO: 67393 - protein, 113 aa, Zea mays
  Coding DNA Sequence Number=SeqID_24018
RPAVPRQHLGSLLPDGVPPGSEIQAPPATFATPAHSQTVRPSGREPLPLLQVADRPRLCREHRRRFLLSVWRPKKVMELPLDAQSSGRRLDVDERVEQCRAVAGVLHVLARFA

SEQ ID NO: 67394 - protein, 117 aa, Zea mays
  Coding DNA Sequence Number=SeqID_24019
  Subcellular localization annotation: CTP_CleavageSite=49; ConfidenceScore=5.29e-01
MAAERLRARQPAASARPPAPARVARQHGSAAWPRHPQRRPSSPPAQPPMAIERRTGLERFLECLSVRTCSLDDCPRKQCNHEDDDEEDGYDYAYGNGKEEGVEVDLQEFQDVDEFED

SEQ ID NO: 67395 - protein, 438 aa, Zea mays
  Coding DNA Sequence Number=SeqID_24020
MGSARVAFVLLLEERNLTEVGTLQPLLGFKDFHQAARLHSLTDASRIFIILDGEEGEASRSLPSRGLASRFFLQHLGVETILQLCGGGVLQPCGGRRAAAAWPGCSIPSSVRATVAGRTGGSHNTSYAARAVAAVVGVEVVVAREGFSADEIVGATCGGTSGSSALAACPRPSCGDVGEGLVAAASALRSSLLLFSRLERRSLSLLLQWSTASQLEFVVPQALRCGGCSYPREWNRSSICNGTLSAGNPRLLYDEPEPEAAVSAWTEAESAREEASLAWEHVASLAEEVQQRQLELGQVVRWRGQPRSQAAEAMSRADVLGGQLAEATERPVEVSAWAGTLAETLAMMVRAWCWRPPSRWRSFRPRRRPRPGQIPPKEETTPRDLFVGSRIVYPSESYFSRKVTSEDPAIEAVKKRERCSGRKTFSEENFDAEGVPPF

SEQ ID NO: 67396 - protein, 165 aa, Zea mays
  Coding DNA Sequence Number=SeqID_24021
MEFLTKVELRLLALSSTASVLRRLFAELVPIESLQLTSGLRRMENSATRPSPTTVPPARVRLTAAKSSLRRHRKLRLARPWASASGEVSASPDPRARPSPQPRKVVSASPDPKAQPQPRPRKVVSASLDPKARPRKVVSASPDQGPALNLDLGRNHVLARPRPRP

SEQ ID NO: 67397 - protein, 254 aa, Zea mays
  Coding DNA Sequence Number=SeqID_24022
  Homolog annotation: Hit_ID=Q6J9V9; Match level="QueryCoverage=26%, HitCoverage=23%, E-value=1e-13, Identity=65%"; Hit description =Putative uncharacterized protein
MQVACNCTTETHPFNFDASSMEAQAHTSCNRRAGYYVRKTAPPLAPMPLLLDCGTGAVTRGNPAHGPTVPTEHIGHGSVSRGRRRDGRYDQKWADSNGDSRRAEAAVKSSTGSRPLLVQQGNPLPRREDDAPVFHPSNGSRNDRPARPPVPRINFAARQATPLAGEAASFHLRHDDSIKKGTGKGDISKGILLHEGSGPRALLLIRGSKSGPSKGFDSRPRALGLQALLIRGSKAGPSEGFDSRLRELGLRAHY

SEQ ID NO: 67398 - protein, 45 aa, Zea mays
  Coding DNA Sequence Number=SeqID_24023
MAGYDFVKDINLLFNTFECPGIADASYNFFVHPTKKTWILAGNRG

SEQ ID NO: 67399 - protein, 245 aa, Zea mays
  Coding DNA Sequence Number=SeqID_24024
  Gene Ontology: Mol. function=transcription regulator activity; Cellular component=nucleus; Biological process=regulation of transcription
  Homolog annotation: Hit_ID=Q941Z7; Match level="QueryCoverage=93%, HitCoverage=93%, E-value=2e-65, Identity=61%"; Hit description=BHLH transcription factor-like
  Pfam annotation: Domain name=HLH; Domain location=72-124; Score=60.1; E_value=7.4e-15; Accession=PF00010.17; Description=Helix-loop-helix DNA-binding domain
MDHQMFDDPFGSSGISSLEADIFSAAAGSQLPSPPWPDFDDDYDIPDLSALPANAATSSGGGYGSGGSGGHRKLSHNAYERDRRKQLNDLYSSLRSLLPDADHTKKLSIPTTVSRVLKYIPELQKQVDNLERRKRELTNANCKPGVLNTSEIVTTPIVSATCLNDTEIMVQVSLHSNVAATALPLSKCIKVLEDAGLHLISSSTYSTFGNKTFYSLHLQGTDQPTGVNCANQNIVGGGRVYLKIY

SEQ ID NO: 67400 - protein, 30 aa, Zea mays
  Coding DNA Sequence Number=SeqID_24025
MKRSQRTMNEECPAFCDELEKIVRKKAGGA

SEQ ID NO: 67401 - protein, 136 aa, Zea mays
  Coding DNA Sequence Number=SeqID_24026
MRLPAPLRLPEPPPQPHPLPETLDKDFVECNTRQRRLGKQYIGKDFFAEYFFSGTRQKCLSSAREHSAKKSDRYGAGTRQSAFFAECQWDHWAIFPPREGPHVRLFAECPKWHSAKPTSLPSASDITLGKEPKPVP

SEQ ID NO: 67402 - protein, 320 aa, Zea mays
  Coding DNA Sequence Number=SeqID_24027
  Homolog annotation: Hit_ID=Q6QP51; Match level="QueryCoverage=49%, HitCoverage=64%, E-value=3e-13, Identity=38%"; Hit description =Putative growth-regulating factor 1
  Subcellular localization annotation: CTP_CleavageSite=64; ConfidenceScore=5.58e-01
MGAIQVKASSTQGTQSRLARAQPRARTVVPGRSDRSHFVLPLTDLTGKQCHSPSPTVVPPARVRLTAAKSSLRRHRKLRLARPWASASGEVSASPDPRARPPPQLRKVVSTSPDPKARPQPRPRKVVSASPDPRARPQPRPREESRPRPTPASALGGVSALPDLWLGPTMPQGEGPGPSYGRVVARDSLCPSRTLVTPTASAPTLAQDNTSHGFPPFVFRLAPTHLGWGTQRQFYSSVQGPPGVETPTVCYFSDNTGTQKPFVTSFRAPSALSSDIFLSLCFLGLKVRNFNKVFSCSSDNWDPNSTFCSAMSSHKSMGFG

SEQ ID NO: 67403 - protein, 355 aa, Zea mays
  Coding DNA Sequence Number=SeqID_24028
  Homolog annotation: Hit_ID=A2Y5S9; Match level="QueryCoverage=15%, HitCoverage=16%, E-value=2e-16, Identity=73%"; Hit description =Putative uncharacterized protein
MDQKPLDDTRYDHCITVRIILELKVFLGEEVEPPMIGSTNFVAEGATAWLPCEAIVAIVKVSSPEVGANVGHLFSNAEAIELRHSATLLTHKAFVLRNRAEVDDSFGKLLYYLVEGGFLGMVLGLWAEQQILVSFLEIQLVNRWRRNPREFLELGGSRYAVRRTPAGPGRTVMQTELEEKSRFGRCPYCRAMIYQDLSATIFYCSRCRTPIRGKNPQPTDETDASTERNSDSDEGVGRLCFVDRCFEARGNDNGRGTRNPPTKKRSTNANGKRTSSLMRPPSASSRRSSMPSCKSSTTSTTVLSRGTSTVSTRTITSGFRYSGCCKGTRRSGTIPGLSGRAMHRNEPFGGKSRHV

SEQ ID NO: 67404 - protein, 565 aa, Zea mays
  Coding DNA Sequence Number=SeqID_24029
  Gene Ontology: Mol. function=hydrolase activity, acting on carbon -nitrogen (but not peptide) bonds
  Homolog annotation: Hit_ID=Q5JKZ8; Match level="QueryCoverage=93%, HitCoverage=93%, E-value=0.0, Identity=74%"; Hit description =Putative LAF3 isoform 2
  Pfam annotation: Domain name=Amidohydro_1; Domain location=92-538; Score=-15.3; E_value=8.4e-05; Accession=PF01979.11; Description =Amidohydrolase family
  Pfam annotation: Domain name=Amidohydro_3; Domain location=92-536; Score=303.7; E_value=3.4e-88; Accession=PF07969.2; Description =Amidohydrolase family
  Pfam module annotation: Pfam domain module=Amidohydro_1::Amidohydro _3; Domain location=92-538::92-536
  Subcellular localization annotation: CTP_CleavageSite=57; ConfidenceScore=5.35e-01
MPLPSAAQSALVVAAVAIATATVLLPFPRTPPRDRFADMVLANGTIYTADPARPFADAMSVRGGRVLRVGTYESVKELKGPRTRELNLSGNVVLPGFIDSHVHFIDGGLQLARVPLRGVRSKDDLVARVKEAVRDKQPGQWILGGGWNDDFGGDGLPAAVWLDDISPDNPVWLSRMDGHMGVANSLAMKIAGIDKNTNDPIGGTIIRTTEGEPTGLLVNTAMKPIFDVIQNVSNHERREALLRASRHALMRGVTTVVDVGSYFPGASAEKTWQDFAELEGFTCLVFIYDLICTPGILTQDLISEHGRSLSQWIHLGGVKAFLDGSLGSSSALFHEPYEGDPDNYGLQMTDLDSLLNRTLESDKSGLQVAIHAIGDKANDILLDMVDKIVDLNGAKDRRFRIEHAQHLAPGAANRFGKHGTIASVQPDHLLDDADHAWSKIGVERSERSSYTFRSLLDGGAQLAFGSDWPISDINPLQAIRSAVFRKPPGWEVPWIPAERLTLDESLKAHTMSAAYACFLDHAVGSLSEGKYADFVVVPSTSWDEFSSDLPGHVLATYVSGRQAYP

SEQ ID NO: 67405 - protein, 45 aa, Zea mays
  Coding DNA Sequence Number=SeqID_24030
MGSRHSACSAEAECRGCLWCNLCSGKEEGVEADLQEFQDFDEFDD

SEQ ID NO: 67406 - protein, 38 aa, Zea mays
  Coding DNA Sequence Number=SeqID_24031
MASHLTSSVPRLPDSTLAHHKPRDILQQQSRTPLALER

SEQ ID NO: 67407 - protein, 240 aa, Zea mays
  Coding DNA Sequence Number=SeqID_24032
MSWLLEVRRSLMEGQLLERPSQGVGRGGSRSAEARAESEPWGRARRSFVVFRVLARVRALGSGGAEFAVFRVLARVRALGSGGAEFAVFRVLARVRALGSGGAEFAVFRVLARVRALGSGGAEFAVFRVLARVRALGSGGAEFAVFRVLARVRALGSGGAEFAVFRVLARVRALGLGGAEFAVFRVLARVRALGSGGAEFAVAPLSRPDCLSDLLCRVALQSEWCRRRCPSVRLASGAVE

SEQ ID NO: 67408 - protein, 165 aa, Zea mays
  Coding DNA Sequence Number=SeqID_24033
MMVTRSAITERNKWRRKGQGGRFPLLWLSLSGCENLRGRQEAERRTVTRPSPRRSRQRFAFAVITAPKKGSGKGDTPKRILPCEGTRLRATLLIRGSKAGPPKGFDSRLRSRGPYTHYWSEVRRSAPRKGSTAASGYSGSAPITDQGFEGWPPKGSQPPQTPSEG

SEQ ID NO: 67409 - protein, 71 aa, Zea mays
  Coding DNA Sequence Number=SeqID_24034
  Subcellular localization annotation: CTP_CleavageSite=38; ConfidenceScore=5.35e-01
MHTLGASGAGGGPCCWASGPWPVGTLATSSSLAQARLMCSSKPAILVQARARELAHGGSGPLEQREGAGLR

SEQ ID NO: 67410 - protein, 122 aa, Zea mays
  Coding DNA Sequence Number=SeqID_24035
MAFLDPPKRLQPEVALNLVRDLLRWGVPAFAGKIHVGASPHDNLTTGEFVFFVSNLPGGLALPISSFFVLLLEELGLQPQHFTPCFILQAAIIAYLHRMSVGATLLSASSSSIRREGCSPAL

SEQ ID NO: 67411 - protein, 197 aa, Zea mays
  Coding DNA Sequence Number=SeqID_24036
  Subcellular localization annotation: CTP_CleavageSite=63; ConfidenceScore=5.70e-01
MAHVAHLSRPPALMPSLLPPRCQPSPTRQSCPPFPPRVRPLSGKRAPLVSSLSRPSSAIDTITAAHRSATSPHHYSPTSRIGTLRLPRAIPSPPSARAIPSPPLCAIIVAAASVAASATSLTLPRAQSSQRAALFLRSAHPFLSPITPVGFAGNLTAAGPPKDPGTNEKPPQAPGEKPTGKASRGRFPSRAKPPVTP

SEQ ID NO: 67412 - protein, 35 aa, Zea mays
  Coding DNA Sequence Number=SeqID_24037
MERRKKRKRCAAAVMSKIKNRTARPYSYRLALCFN

SEQ ID NO: 67413 - protein, 584 aa, Zea mays
  Coding DNA Sequence Number=SeqID_24038
MQVVELVPCARNKWGNWNEFWFYVAEGTVEGHEGLPVFEMCSHFYSAYPPFEVVEEDVDEGALRCAAGLSSGHDLVEEFVAYGVWPLAYGWALGEVCPRQMPFHGGRVVRSPAFALNLQNRDPTAFVREAEDGAVRLVGRYVPRTEGQRSFDIRGSNDRLNRVFELNQLPYDGYPGQDDVDRRGKKPVVETGDDPAPAAAPSSKKRKLGTAMGGLGVSDSFARELMRTCAAPGGRMSSPELRESSARMLRVTGGCWPRNVPIPCVAGEDFFTSRMVREWRVFPYGRNIAAVVSAVMDKDRQGAAQKRQAVVRLVEARPKRQRGSAKAAAPGGGKPPLAAKSGAPMSSKAPEATAGAGGSKSTKAVPPSSRVPEVAKAARALPSAGKRVADFATDISVEDYLGGSDEGQLAIVVPAAATTTAAVAPKAKGGALSAGGEVAALAAVRDEAGAASRRLKEVVESLSQVADFANRTASGALTAVVSVEVERLRTQHADAVREKSAADSKCRKLADKVAALEGEKADLRRQLAGERRETNEALAKAQAEANLARAEGNLARERAEQLQERLIALGEPRGAGRGRDTRGG

SEQ ID NO: 67414 - protein, 113 aa, Zea mays
  Coding DNA Sequence Number=SeqID_24039
  Gene Ontology: Mol. function=cation transmembrane transporter activity; Cellular component=integral to membrane; Biological process=potassium ion transport
  Homolog annotation: Hit_ID=A6TFY7; Match level="QueryCoverage=62%, HitCoverage=22%, E-value=7e-22, Identity=51%"; Hit description =Putative transport protein KPN78578_40470
  Pfam annotation: Domain name=Asp-Al_Ex; Domain location=1-83; Score= -49.8; E_value=0.0056; Accession=PF06826.3; Description=Predicted Permease Membrane Region
MALILGRIGSIGKLYWFMPPSANLALRELGIVLFLSVVGSMTDPPALAFANNLHPTSGAAALSYATVYPLVSGTTVAADHQPPRYQQVNGFTDGHPRYRKLFRQLFFTGKKAV

SEQ ID NO: 67415 - protein, 37 aa, Zea mays
  Coding DNA Sequence Number=SeqID_24040
MSKQRNYLSIYLYEFGHGGITEKKSTLGHGSLNKNMA

SEQ ID NO: 67416 - protein, 338 aa, Zea mays
  Coding DNA Sequence Number=SeqID_24041
  Subcellular localization annotation: CTP_CleavageSite=43; ConfidenceScore=5.58e-01
SDVDGGGAAAPSASTPPSAKSDRASDGNTVGGSPLQRTTSAPRPDHRRQGLLQEPGPSRRLGRPPRSLSQLSPEDTSPAHGLGNPTPALVLPVDGPARLRSTKSSFRANSASVHADTTASGSGSSQSRRGASPSARNEEKTWLYAKIHKCSGPDSHNEQTPTLKVPLQMELRFHSRGYEQPPHWRACGTTNSRRPANDLCSSSNGPRMDAAAGRLSFASPLKGHELDIKAKEPEVSPLVALTGLSAEKLSPAATTSAPTAASTNTAPTSAGRPKAHRQVLTPVLATKARTEDGMLHPGCAATVRLPRHGWRTPHPQSWRMVSTPRSWKKRWPADPCGR

SEQ ID NO: 67417 - protein, 109 aa, Zea mays
  Coding DNA Sequence Number=SeqID_24042
  Subcellular localization annotation: CTP_CleavageSite=52; ConfidenceScore=5.34e-01
MQAACNRTKGAQPFDFDASSMEAQAHTSCNRRAGCYVAGGTFGRQSRRRFTSAMMTASKKGLGKGILRKGSFSMKEAGPKPPLLIRGSKAGPSEGFNGRLRPLGLRAHY

SEQ ID NO: 67418 - protein, 95 aa, Zea mays
  Coding DNA Sequence Number=SeqID_24043
PRFARRLEQTTSHANSQRKKKATAAAAAASSKRERERERERNKEANEVTVELRTVGFGKEVVLKQRRRMRRRRRLGEEERAAILLMALSSGVVYA

SEQ ID NO: 67419 - protein, 209 aa, Zea mays
  Coding DNA Sequence Number=SeqID_24044
MVRERRTQTNTVSKNTRDTRFIPRFGHTTKVPYFLVEAPTKSRVSFNPNPPFADHKGQAHTIIFAQTSGFLSKDLKCERKEVCEREWEVFLRLGMKFSVCSTVGKSVGGVYKGAPKAGGRWGNLTEIRLNRFQNRLNRIPPVGFRFTGGLSQRLNQTQIRLNRFQIRFNRFQIRLNRFSKKLHMTFSDRTDWHTGSDRGEQCRNRLNRF

SEQ ID NO: 67420 - protein, 101 aa, Zea mays
  Coding DNA Sequence Number=SeqID_24045
  Gene Ontology: Mol. function=DNA-directed DNA polymerase activity; Cellular component=nucleus; Biological process=nucleobase, nucleoside, nucleotide and nucleic acid metabolic process
  Homolog annotation: Hit_ID=Q9LRE6; Match level="QueryCoverage=48%, HitCoverage=4%, E-value=6e-11, Identity=67%"; Hit description=DNA polymerase delta catalytic subunit
APMVPCQISLVNPSPDTPHVPPPASVVAAVEKDMMDEDVFLDESILEEDEAALLMLQCDEALASHLARWKPTTIPTNLARQMFLRCRYDPISLLSQHCRQE

SEQ ID NO: 67421 - protein, 198 aa, Zea mays
  Coding DNA Sequence Number=SeqID_24046
MGKPVPSLLMLLLCRVTALVPTITGMGDHVSGRVRGKVCGQVHSEDSTACAAPTAVPLDRVRLTAAKSGLGRHRKLRLARPQGSDSASAPEDDELRLARPQGSDSASALEDDELRLARPQGSDSASAPEDDELRLARPQGSDSALASADGLRLARPKGSDSTSTSEDRLDLDLGGASASPYPGLGPTTTQEGPSLPYP

SEQ ID NO: 67422 - protein, 403 aa, Zea mays
  Coding DNA Sequence Number=SeqID_24047
  Subcellular localization annotation: CTP_CleavageSite=45; ConfidenceScore=5.51e-01
MGSCAHRARRFGFFCPAPACMTPIVRLQGFSSASPAASPRRWSPKTVTTSSWVGRSKPGCGLCPSLSFKDVHHQCWGGECAELGSVSARAAARSFPQRSGRRVFAVRGAGSYRASGSPVRVASALLPVPPSAAAAGRGFSADEIVGAARGLTSNSTAFCSSSPLGWGRGRGPYGSSIHPEVIAAVVWPLGAEVVVAAAGAGGCEPSVGLLLLRRPSNRGGLFVPAQPLFHESKPEAAVLAWTEAELARKEDFVGRSLAGSSTGGIDAGIELPRLRAGPVSSGDSWLRLRGSRPSRLLGPDSWRRPWRRWPGRGADVVLRTGDPPTALPSEARSDFAEGVVDAEGAAAPPPSRSEPAGSVYLVKVMSEKVMSEVSVSRRRRSPSARSALAAYVYSVVFGIPLSK

SEQ ID NO: 67423 - protein, 26 aa, Zea mays
  Coding DNA Sequence Number=SeqID_24048
MPKLGATALGPYKLSVPSALLDLGNS

SEQ ID NO: 67424 - protein, 57 aa, Zea mays; identical to SEQ ID NO: 44635
  Coding DNA Sequence Number=SeqID_24049

SEQ ID NO: 67425 - protein, 175 aa, Zea mays
  Coding DNA Sequence Number=SeqID_24050
MQDVARRALSHYCSVLGGVADGLNLKYYPRRPSGSTGGVIVSPVGEDNPTLSSIVNLAAMLNTELDHALDELSRARAKIAQLHAERAERRHLDDGSPAPVGTQHTCQKTGAEEERRAQQEQAAQQDEVPQQQQLPPPPPMSIKQMFLMQTQVVQAIGQTLAAIQQQQQQQPPPQP

SEQ ID NO: 67426 - protein, 41 aa, Zea mays
  Coding DNA Sequence Number=SeqID_24051
MVVASDGWWHGRFGYTGAAEKKGHNATRTSADGEPIKNKWC

SEQ ID NO: 67427 - protein, 225 aa, Zea mays
  Coding DNA Sequence Number=SeqID_24052
  Subcellular localization annotation: CTP_CleavageSite=61; ConfidenceScore=5.35e-01
MTTVPIDSPFASRPHRLGIQCSTDPGCRRAVTALVPTVASMGDPVSGRMRDKVRARLHSVAAAKKRAEGLTGDETVPVKWSRMKGGRGDHNGQGGPRDAREDMSKRNRAETHWMAWSTRGGGRPKSGEVDLGPPVKSGWVRGLGKLHGLLAELAEALAGLEGGWSGLATAAEALAAMAGGIKLAGAKERWLAGEGECGAKREIWSQEIWFVSLPKPEANPRFCRV

SEQ ID NO: 67428 - protein, 61 aa, Zea mays
  Coding DNA Sequence Number=SeqID_24053
MTSGQMLLRQGPRPRPHSRGEDKLSKPKSWRVLRLRHGGWVPHVMQAGPEQKKPNRRARSV

SEQ ID NO: 67429 - protein, 366 aa, Zea mays
  Coding DNA Sequence Number=SeqID_24054
MVTTSSMVGRSKPGYGLCPALCFKDLHHPCGLAEGADFDNAGPAGRKRRRCPPIREDLSGDLPVHFGAAGARWCGAGGQVAAVVGAEVVAAGEGFSADETVGATRGLTSSSLALIACPRPSSGDVGEGLVAAASALRPSDVENPRLLYDEPEPEAAVSAWTEAESAREEASLAREHVASLAEEVQQRRLELGQDPCGDLGYDGPSLVLASSFEVEILPLASPSEAGPDSAEGGDDAEGATAPSIDDLFVGSRIVYPSESYFSRKVMSEESLGSVGLAAYVYSVVFRIPLSKQSKSAKDVLAERLFLRKILTQRGFPPSSPRGRVGLRRGKADPSLTPKHQVSHLEVSGPNPSGVVASQRLLISRRV

SEQ ID NO: 67430 - protein, 311 aa, Zea mays
  Coding DNA Sequence Number=SeqID_24055
  Gene Ontology: Cellular component=integral to membrane
  Homolog annotation: Hit_ID=A3BIV7; Match level="QueryCoverage=79%, HitCoverage=49%, E-value=1e-108, Identity=75%"; Hit description =Putative uncharacterized protein
  Pfam annotation: Domain name=C2; Domain location=194-272; Score=64.1; E_value=4.7e-16; Accession=PF00168.21; Description=C2 domain
  Subcellular localization annotation: CTP_CleavageSite=49; ConfidenceScore=5.02e-01
MLHKNSSSCSGQKVKWLNKHLSKLWPFVVEFHQAVSAVCISIFVKTCLAAATVVVKESVEPLLDDYRPPGIKSLKFSKFSLGNVSPKIEGIRIQNLQPGQIIMDIDFRWGGNPSIILAVDAVVASLPIQPEPKIQYTLKAIGGSLTAVPGLSDMIDDTVDSIVSDMLLWPHRHVVKLGVNVDTSDLELKPQGRLSVTVVKATSLRNKEMIGKSDPYVKLYVRPMFKVKTKVIDDDLNPEWNETFDLIVEDKETQSVIFEDNHCSEDSRAKLVWRETTLLGDMGLVLHRLLPWHITSLYIERIPDYYLRKAQ

SEQ ID NO: 67431 - protein, 590 aa, Zea mays
  Coding DNA Sequence Number=SeqID_24056
MAERYQLPRSCVPPNDKAERTASVPPSGGSEGGKTRCIKGTVKTWLPFKGVTLLLKATLPTCVLSHRGLSLLQHAPRSSPYDTGAGPHASCKLARDRRSQTATRAVRATAQQLRAILHFRRDQRVKGQTTMQAACNRTKGAHPFDFDASSMEAQAHTSYNRRAGCYVQETAPPLAPLPCLLDCGTSTATRGNPANDPTVPTRHISHGSVSRGRRRDGRYGQKWADSNGGGRQAEAAVKSSAKLTDRERGYAERDPSPQRKRAPSPLLIRGSKAGPSEGFNSRLRALGLHAHYWLALEGFTAASDAEQEMTLGLGLGLGPGRRRTPPRPTLGLGLGLGPGRRRTPPRPTPGLGLGLGPGRRRTPPRPIQGSDSDSAPEDDELRLARPQGSDTGSAPEDDELRLARPQGSDSALASADGLRLARPRGSDSTSASEDRLDLNLGGASASPNPGLGPTTTQEAPSLPYPKLTQAKGNKIGVPSGSPCVPLTATTPHEQGAKTSPAATTAWTPWGRNADNIEGKNGKNLNNVVAACKRYNLYDHGFSLWLEHRDDCRHYMLDFATFARVLGFDSVDRGFGEIHDERNMIEREISF

SEQ ID NO: 67432 - protein, 345 aa, Zea mays
  Coding DNA Sequence Number=SeqID_24057
  Homolog annotation: Hit_ID=Q6QP51; Match level="QueryCoverage=44%, HitCoverage=46%, E-value=7e-33, Identity=55%"; Hit description =Putative growth-regulating factor 1
MQEACNRTTVVYPFGFIASGMEAQAHTSWTGKGDISKRILLSEGNGPRALLLIRGSKAGPSEGLALGRVRQPPQSTRAPCPLLTRGSKAGPSEGFDSRPRARRVRDDPGCVCYMAEARATLPSSGQGLVYQGTQSRLARAPPRAGTVVPDEFTLRPRASSGSGHAFGSLEAQLGRQGRSDRSHFAPSLTDLTGKQRRSPCSDCCANHLGKADNSRVQPRAQQEALPRPTLGLGLGRRSPPRPTPGHGPGLGLERNRVLARPWPRPQEKSLPRLTLGSDRPRHKGYIITLPLASSGYEGTRPASHLAHPGLRHFSDDHVIAYTGLKHFSDSHVGMYTGLRHFSARH

SEQ ID NO: 67433 - protein, 399 aa, Zea mays
  Coding DNA Sequence Number=SeqID_24058
MKTTRGTLSGKADRAEGLLRLRDTDTSLITFREKHRQREQQHPRRRFHPQRILARPQTVTRAERSPPRRRTPTPRLGPHVQALRKGPGPSGRLGWPLHSLSQLSPEDLDPAHDLSSVTPGMVPLADDLDKLQPPLLHLGLGSHLLLGRRSLYSSRHRLRPRRHRCLRLQLIAERPKHDNDLRLGRLDSCSDGLRASAAAGRPSPTRDVDQLLKPKSRRSGAQVALTVSSAEAVACAKGKPHLWRPPPQHRRQRPLNHQHCTGVRRPSQSTPASPHSCPHSRPHSRPHRRTRTGPSQNTNAALTAYDMLCDPPVQPAAQGGPGRCWPVCGATDTRAADEQPRSAPAVGGGTGSSARAAQAREPDTRQVPAPRMANALLEREMCPWAISKYFGDLVSNTSA

SEQ ID NO: 67434 - protein, 362 aa, Zea mays
  Coding DNA Sequence Number=SeqID_24059
MAYQLSLPESLSVVHDVFHRARFVNTVALSLARALSLCLLGPACRHLPSRVHAPASDSARSLPKPSPRLARTLRRPNPRHSPARNRRPDPFEVYAHVHSLLASQPSSQPHPPELVGAPTTKPLAPRIPHGEVAPPSLTMVCHHRSEFCPDRASLKGRIYDRGCLGCSPDRGHIFLTLNQPPPPANRGGATQAPTAYGPPPQHVALLAWRPEPDRRTVEALEPARRHSTQRCSPGGQSQTAEPPEPRRTAAATRNAARLEAGARPPDSRSPEAQSTAATMAKLPNIIIILHLHCELKDLQKEKAPNTGHGTYAMHVREVDGDPEIQGALSASQRRPPYPLLGSLIGGPRLSTRPCASQQPHVS

SEQ ID NO: 67435 - protein, 398 aa, Zea mays
  Coding DNA Sequence Number=SeqID_24060
  Gene Ontology: Cellular component=extracellular region; Biological process=sexual reproduction
  Homolog annotation: Hit_ID=Q94KS6; Match level="QueryCoverage=66%, HitCoverage=98%, E-value=1e-136, Identity=84%"; Hit description=Beta- expansin 8 precursor
  Pfam annotation: Domain name=DPBB_1; Domain location=91-190; Score =80.3; E_value=6.4e-21; Accession=PF03330.9; Description=Rare lipoprotein A (RlpA)-like double
  Pfam annotation: Domain name=Pollen_allerg_1; Domain location=202 -289; Score=131.3; E_value=2.8e-36; Accession=PF01357.12; Description= Pollen allergen
  Pfam module annotation: Pfam domain module=DPBB_1::Pollen_allerg_1; Domain location=91-190::202-289
  Subcellular localization annotation: CTP_CleavageSite=34; ConfidenceScore=5.59e-01
MARSPSLLCVHTETSPPSPLAASVPACRLQRKPRGPMRQGMSSPSAAAALVLLLALLAGGQCREAQLDAADAGTGTENYTASDAAVYWGPWQRARATWYGQPNGAGPDDNAPRPLLGAQHRPLICGALLHIRCRKDPSCSGRTETVIITDMNYYPVSKYHFDLSGTAFGRLAKPGLNDKLRHSGIIDIEFTRVPCEFPGLKIGFHVEEYSNPVYFAVLVEYEDGDGDVVQVDLMESKTARGPPTGRWTPMRESWGSVWRMDTNHRMQPPFSIRIRNESGKTLVANNVIPANWRPNTFYRSFVHLAVLKPNASNVLKPNASIEKAPNRRTATVKQKGTESTDEEEERPEPVGDLIYLSRRLPRCCVPARVIAGRVILDPDLQQLLSNVYGTAQGRMVCP

SEQ ID NO: 67436 - protein, 227 aa, Zea mays
  Coding DNA Sequence Number=SeqID_24061
  Subcellular localization annotation: CTP_CleavageSite=23; ConfidenceScore=5.34e-01
MQTYSERTTWGRIHSNTAATQLRFTRRATLRLVVTPDEQFTPPKGLSGTNPSFRLDPRTWRKVTEHPRPHPEVVFRASQRETPRQHPLSVPLFSISLSVVSTRGLKDCRDISNNVPEARVPISPKIISERPRRSPVGDSVTVGTFFVYCSVLLLASQLVRYASSIDSTRMAKITAPAVISFKYVLKHLAKGLGVALRSIEAPQEEESNEQLQDAEDGPQGFDIKCRS

SEQ ID NO: 67437 - protein, 141 aa, Zea mays
  Coding DNA Sequence Number=SeqID_24062
  Subcellular localization annotation: CTP_CleavageSite=15; ConfidenceScore=5.63e-01
MALMLQHSGVSIPPVQSASPPPLQAPVVPAIQSGPPLPSVGPSSSPLRLVTLAFTSPVLSSVCPQPPVPPASAVTTTAVAVSMTTSVPTASAARPQFESVPAPASTADPGSESDSNPQPTFALLPRPRPDAPPPPPPVSDV

SEQ ID NO: 67438 - protein, 306 aa, Zea mays
  Coding DNA Sequence Number=SeqID_24063
  Homolog annotation: Hit_ID=Q6JAD6; Match level="QueryCoverage=89%, HitCoverage=45%, E-value=1e-88, Identity=80%"; Hit description =Putative uncharacterized protein
MRLRCDLWLEIPGCLTFSVLQRHGDPAAVDLFSTRIQESFFRAQMSAHIALRVHRLLDLPAFLLAVGADSEVHLSYMPGLLTLLTTSGSLCYGTSDPPRRPHGGVAPGTAHVAALFRPPFSDGSRRSPADFTTAAKFLFQLMRRTLLSRMGYREATTHVQLWLLGALVSHSEFDVVNFLICEIEDTVLDGMRARRQLPYAHYLCHIFAQLIRPPQFQGTLEASRLVFGSYRPVLEDPVPASAPVFDTQAEDAALHQFEAQDAAVDDDDFGIPPPPPPPMPPRSHDHEAGSSSATPAPLRLLTLLLL

SEQ ID NO: 67439 - protein, 70 aa, Zea mays
  Coding DNA Sequence Number=SeqID_24064
  Homolog annotation: Hit_ID=Q6JAD6; Match level="QueryCoverage=62%, HitCoverage=6%, E-value=4e-11, Identity=77%"; Hit description =Putative uncharacterized protein
MPRTKNVSALGGGDDGDPRRPFRQVKGKTVYLEQQEGRKKRRMDRAARAAAAAVAAVGDLRRPKVLKNRI

SEQ ID NO: 67440 - protein, 104 aa, Zea mays
  Coding DNA Sequence Number=SeqID_24065
MATWKAHTRGENPGRTGDGTRAGKVTKMTEEGFGEKTMWGGKTLPKELVTCKDTQEAHRDTSYQKDSQEFTRIGKWHLRGGRVFTAQRNGEREREDRGGRCSPE

SEQ ID NO: 67441 - protein, 261 aa, Zea mays
  Coding DNA Sequence Number=SeqID_24066
  Subcellular localization annotation: CTP_CleavageSite=34; ConfidenceScore=5.00e-01
MYYTKCMVHSCRLGIFDSTIDSRELRRCGRQSTSSSSQSSRSRSSAHDMEMAVLRQQAEYHQSVLREQLEYQRQQSEYQRQQAEYQKKRDEYYANLQAQNQALLSQLAQQAGVPMPTYGMPPPEFALPMPMLAPPPPPPPPSQFPMIFLQILKNVMSDGFRVNRRTYAIGKALETASMGERDAASFFFMRRGRGSLVHRQTEATSTKQHPENVQQKPSLTPEHACASHIVVDNVEPIDVQKARNMKSPIGSTFFWSGTSLI

SEQ ID NO: 67442 - protein, 311 aa, Zea mays
  Coding DNA Sequence Number=SeqID_24067
  Gene Ontology: Mol. function=hydrolase activity, hydrolyzing O -glycosyl compounds; Cellular component=extracellular region; Biological process=sexual reproduction
  Homolog annotation: Hit_ID=Q94KS7; Match level="QueryCoverage=72%, HitCoverage=84%, E-value=1e-117, Identity=88%"; Hit description=Beta- expansin 7 precursor
  Pfam annotation: Domain name=DPBB_1; Domain location=83-162; Score =125.3; E_value=1.8e-34; Accession=PF03330.9; Description=Rare lipoprotein A (RlpA)-like double
  Pfam annotation: Domain name=Pollen_allerg_1; Domain location=174 -255; Score=118.9; E_value=1.5e-32; Accession=PF01357.12; Description= Pollen allergen
  Pfam module annotation: Pfam domain module=DPBB_1::Pollen_allerg_1; Domain location=83-162::174-255
  Subcellular localization annotation: CTP_CleavageSite=50; ConfidenceScore=5.27e-01
MAATSSSSSSTVVALAALLFLLLVTCGSCARPASFNASDFTADPNWEAARATWYGAPTGAGPDDDGGACGFKNVNLPPFSAMTSCGNEPLFKDGKGCGSCYQIRCQNHPACSGNPETVIITDMNYYPVAKYHFDLSGTAFGAMAKPGRTDELRHAGIIDIQFKRVPCNYPGQKVTFHIEEGSNPVYLAVLVEFEDGDGDVVQVDLMEANSGSWTPMRESWGSIWRLDSGHRLAAPFSLRITNESGKTLVANQHGTDEHCARCLSRLLLVDGGGVRAAFTAELETGNEMEEGQVNLQMLSRPLSMHVMYQGD

SEQ ID NO: 67443 - protein, 307 aa, Zea mays
  Coding DNA Sequence Number=SeqID_24068
  Pfam annotation: Domain name=zf-CCHC; Domain location=116-133; Score =13.0; E_value=0.016; Accession=PF00098.14; Description=Zinc knuckle
MEILSIHNDELSTKLENFGRTPVASLVKIPKIIKKDASTSCFDLIDDSNTCNQVLVENIIVETCSDEVAKENEQLRQEVARLGKALYDKKGKAKQIRPPQDNTTAGVNKPMEGETVICRLCHMEGHKSFQCKAMIGDKQRQKLKQKPSSKISNTYIKKVDKKTATPCLIKKKKNGKVIAIKANKQAKGKGAKRIWVPKEIISTMKSTKKVWIPKGNSQNARITWTRELRKATPQKKTLRRYKKSPRNGGVLPSNCPCVEHRTVRCPHAGMSGAPGNSSPTATSRWHPERRPPDCPVWKAYGANGHLL

SEQ ID NO: 67444 - protein, 250 aa, Zea mays
  Coding DNA Sequence Number=SeqID_24069
  Subcellular localization annotation: CTP_CleavageSite=60; ConfidenceScore=5.71e-01
MVAFQGGHPPFKGDSPYLRPQPSRAESSPTRSKVLPCGAGAGSHTSCKPAQNRRSQTAVRGAYNRPAVTSDSPLLPRPAGERGGQPCRRHATAPSGRTSPTPNTPSMEAQAHASCNRRAECFVHATAPPLAPLPRLLDCGTNTATRGDPAAPAWDRERGIPLVRILPREGTRLRASLLIRGSKAGPSEGFNSRLRSRGLHTHYWSEVRRSAPRKGSTAASGYSGSAPTTDQGFEGWTPKGSQPPQTQSEG

SEQ ID NO: 67445 - protein, 149 aa, Zea mays
  Coding DNA Sequence Number=SeqID_24070
MGKNNKRKREPTPPSEDFGDSEYSEEEFSSESEGSPAPVSPPASSDDSDDSQVIAAEVWTYIRAVERSGLEGSDESEYSSDEEDSDDGGEDEDDDGDDDDDGDGDSGGGGRGSNSGSGGGNGGSRSGNGGSSRGSGGGGSSKGSNKASG

SEQ ID NO: 67446 - protein, 142 aa, Zea mays
  Coding DNA Sequence Number=SeqID_24071
  Gene Ontology: Mol. function=carboxyl- or carbamoyltransferase activity; Cellular component=ornithine carbamoyltransferase complex; Biological process=amino acid metabolic process
  Homolog annotation: Hit_ID=Q8SA97; Match level="QueryCoverage=94%, HitCoverage=24%, E-value=3e-24, Identity=50%"; Hit description =Ornithine carbamoyltransferase
MAPPVDVACLRPRLGNVEAPPKPRSSLSSVAEVESEPLVRARWRPSAETRAESEPWGRAKRSSSSSGAEPESEPWSGPESEPWVGQSGVRRLSGLSPSPSPRSGEAELPMLYADGGYQLRIRSLEGTPNYGPRQRASEYQSA

SEQ ID NO: 67447 - protein, 141 aa, Zea mays
  Coding DNA Sequence Number=SeqID_24072
MRNKLKMMRMKIKKMSHLKRRAMIKGDMKLMKTRKMIKKFRVKDRHTQESTKQFNEITPSTPSLVTFIRGVEDTLRDPDWVLAMQEEFNNFTRNEVMELPLDAQGSGRRLDVDERVEQCRVVAGVLHVLVWFVLVLQMQHL

SEQ ID NO: 67448 - protein, 142 aa, Zea mays
  Coding DNA Sequence Number=SeqID_24073
MGKNNKRKREPTPPSEDFGDSEYSEEEFSSESKGSPAPVSPPASSDDSDDSQGIAVEVWTYIRAVERSGLEGSDESEYSSDEEDSDDDGDDDDDGDGDSGGGGRGSNSGSGGGNGGSRSGNGGSSRGSGGGGSSKGSNKASG

SEQ ID NO: 67449 - protein, 57 aa, Zea mays
  Coding DNA Sequence Number=SeqID_24074
  Subcellular localization annotation: CTP_CleavageSite=20; ConfidenceScore=5.03e-01
MDGPTAKPTTPLVPLINQLRASLSTLMVALLSRVVTPQTGPYGEFKKHKLTMINPKR

SEQ ID NO: 67450 - protein, 277 aa, Zea mays
  Coding DNA Sequence Number=SeqID_24075
  Gene Ontology: Mol. function=hydrolase activity
  Homolog annotation: Hit_ID=O80629; Match level="QueryCoverage=68%, HitCoverage=44%, E-value=8e-37, Identity=44%"; Hit description =Putative phospholipase
MPLQLLLDAALSIPESIAAPWFQPSNPSVDLPVLLPVVIINIIVIEDFLRFLESPSLLFLDAYFYQYKDDIKYEEDFFVNSRGSKLFTCRWTPRKSECKALIFICHGSDISLHSLPPLAMVCLRTNEPIFLPWLNFARIQSRVQHIHGSDELMASIAYSQTSIKNTDTTTRLVHHGYVVHGIDHEGHDKSSGSKGYLSSFGDVVRDCSDHFKSVCEKQENRLKKRFLYGFSMGGTVVLQLHRKDPLYWDGAVLLAPMCKGYCILTANNSVEGAQDEV

SEQ ID NO: 67451 - protein, 149 aa, Zea mays
  Coding DNA Sequence Number=SeqID_24076
MGKNNKRKREPTPPSEDFGDSEYSEEEFSSESEGSPAPIPLRESSDDSDDSQGLATEVWNYIRAIERSGLEGSDESEYSSDEEDSSEGGGGDGDDDDDDEGGGGNDGDGGDDGEGGGRGGSGGSKDGDGGSSRGSNRGGSGRGSNRASG

SEQ ID NO: 67452 - protein, 203 aa, Zea mays
  Coding DNA Sequence Number=SeqID_24077
MSWARGPLTSKCRTREPGLCCLEWIQEELLALPAIVEGFMSYASLVTCEGAMNALSREGCRHYEVFDQADEDFERNIYKVEDPVVKESAGALYDRMWGPHDREVVREQAETARGQAARGERVDDFGALNSAQPDSESNPQVAVSETAPELPPETVEGVPDAPATTAAGGGPSPTAAPRAEDPVKMAAEPAAEAPTTAGSSQVA

SEQ ID NO: 67453 - protein, 327 aa, Zea mays
  Coding DNA Sequence Number=SeqID_24078
MAPPVDVVSPCPGLGDVEAPPRSRSSLSSEAEVECEPRVRRGGDRRLRPGLSPSPGVGRSGARRLPGLSPSPSPGVGRSGVRRLSGLSPSPSPGVGRSGVRRLPGLSPSPSPGVGQSGVRRLPGLSPSPSPGVGRSGVHRLPGLIPESEPWGRAKRSSSSSGAEPESEPWGRAKRSFLWCLWPDLVAVSLTLSSGTAVGAAQAALSSCQTGQWSGEASFALNAPAIWSVGMAIWPRLLLGEDWASGEPKLCADGGYQLRIRSLEDTPNYGPRQVGLAPGSPCGHVEALRGHRSGLARRGAHGAERQGASNTWLCYSAQVVAPAEHPN

SEQ ID NO: 67454 - protein, 79 aa, Zea mays
  Coding DNA Sequence Number=SeqID_24079
MDGLAREGFPCIFLEVLQGAGYMTPPQYEVQLFEEHWVPRLRGEAMSQLMGLVEATKITLDNREDLVVDLSTELVEKDL

SEQ ID NO: 67455 - protein, 89 aa, Zea mays
  Coding DNA Sequence Number=SeqID_24080
MIVQKCLIRSTIGRKRGILGELDIVHLKPSKNLMKPKDVIKDYCNLADGEYILISEQGVAQEVVQEPAPEPAIEDLPAPALEGKPRFYA

SEQ ID NO: 67456 - protein, 222 aa, Zea mays
  Coding DNA Sequence Number=SeqID_24081
  Subcellular localization annotation: CTP_CleavageSite=88; ConfidenceScore=5.89e-01
MQPSRPNSAQPGRTPALPDRRTPPVSGSPLSRAVSLSRSLPNGADLSAPVSSPARPSSLSVSRARPPETALGLPELRPKRALSPFPVTGMPRWSSSGPPETFSPLFSPLCSWIHGLFPAIEFVVAFSPSLPNSSDPGATLARANLNSGDPTAVERNSATLSRSPLLGLIPSVRSSSHDSDREIPLRARAPDALARLSAPKSPTAGPARSVRPPPLPLTPLAR

SEQ ID NO: 67457 - protein, 190 aa, Zea mays
  Coding DNA Sequence Number=SeqID_24082
MASPTPADGGDTRISFDYLSREGFPSILWELYEEHRVPRCMVWLTMEPHPLQPGWRSLDSETVGFRADDTSEVVALKALTTFCGYHPLEMMMHPLGLFPAEKREDLMWCDRMRHAKDVWTMHPDQVGRITIQCMRAMYRLQASQSDDMTHLTGLAQTAKTTLDDREAFMVDLSSELVEKDLQIEQMGNRT

SEQ ID NO: 67458 - protein, 72 aa, Zea mays
  Coding DNA Sequence Number=SeqID_24083
MAEVKLLLLGFKESHVRDSKISRVQICEASIKICGGQAMVVRWRYFMEVLQADYINEVDCGSRTHSIRYPFS

SEQ ID NO: 67459 - protein, 200 aa, Zea mays
  Coding DNA Sequence Number=SeqID_24084
  Homolog annotation: Hit_ID=Q6QP51; Match level="QueryCoverage=76%, HitCoverage=89%, E-value=1e-14, Identity=39%"; Hit description =Putative growth-regulating factor 1
MTASKKAPSLTTDQRFEGWPLGGVQQPPQSAWAPHPLLAGPQRVHSRLRHGARDDPGYVRYITKARATLPSAACAAPTAVPLDRVRLTATKSGLRRHRKLRFARPQGSDSGSAPEDDELRFARPEGSDSGSAPEDDELRFARPQGLDSSSAPEDDELRFARPQGSDSGSAPEDDELHFARPQGSDSGSAPEDDELRFARP

SEQ ID NO: 67460 - protein, 36 aa, Zea mays
  Coding DNA Sequence Number=SeqID_24085
MAIWPRLLLREACLSWASGESKPLMQSVSLTLLPYD

SEQ ID NO: 67461 - protein, 215 aa, Zea mays
  Coding DNA Sequence Number=SeqID_24086
  Subcellular localization annotation: CTP_CleavageSite=56; ConfidenceScore=5.23e-01
MGAIKVKAQSTQGTRSCLARAQPRAKAADPEGFTSRPRENSVACPAPTAVPLDRVRLTAAKSSLGRNGKLRLTRPRAQTQPQPQKTVFASPDPGLGLSLDPGRRTPPRPTLGLGLSLGLGRRSPPHPTQGLDSASNLEDRLRLARPQGSDSASASEDGLCLARPRDRTQPRPRKMNSASPDPRAQTRPRRSLCLARPQARTRHVTGKGHHYPTPS

SEQ ID NO: 67462 - protein, 131 aa, Zea mays
  Coding DNA Sequence Number=SeqID_24087
MGKTKKGGSSSHHSDDKRKREPTPPSEDFGDSEYSEEEFSSESEGLPGIAAEVWTYIRAVERSGLEGSDESEVSSDEENSSDSSEEGSGGDDDDKGDGDDGGGDDGGGDGGKGDDKGDGKGDGKGGSKATG

SEQ ID NO: 67463 - protein, 100 aa, Zea mays
  Coding DNA Sequence Number=SeqID_24088
MDPNAEIEECVTLIQFNELKQSIEDKQDRLAQDLQTLMAEIRGRRRARNHDEDGEEGEGNYSRRESEHGRRNQGAARGRGRGGNQRNDDNEESEFGDDEE

SEQ ID NO: 67464 - protein, 162 aa, Zea mays
  Coding DNA Sequence Number=SeqID_24089
  Subcellular localization annotation: CTP_CleavageSite=9; ConfidenceScore=5.20e-01
MAAPPPPPSAGNVTGQTRMLLFRHVGKTSSIPPPTGGLTAAIVVVARWRKEYHVVAAVEGHELKTPETEQRPGLERLLETTHLDLDGKLFVNTQQAPTWRANCRRFDPRGPWTDEADALAVGGYKRSRGGERESLCVSPSSRVATFSYEGPGPSFYRCKEKA

SEQ ID NO: 67465 - protein, 81 aa, Zea mays
  Coding DNA Sequence Number=SeqID_24090
MEEDDLQEEDLVNYGATPEHLENQEKQGDELVRISMTLDGVGIDSSIKAKGVTSVESTIETKATAYHPKESKSAYPSLDNS

SEQ ID NO: 67466 - protein, 472 aa, Zea mays
  Coding DNA Sequence Number=SeqID_24091
  Gene Ontology: Mol. function=protein serine/threonine kinase activity; Cellular component=plasma membrane; Biological process =protein amino acid phosphorylation
  Homolog annotation: Hit_ID=P93520; Match level="QueryCoverage=100%, HitCoverage=100%, E-value=1e-118, Identity=78%"; Hit description =Calcium/calmodulin-dependent protein kinase homolog|CaM kinase homolog|MCK1 protein
  Pfam annotation: Domain name=Pkinase; Domain location=157-321; Score=- 86.1; E_value=0.0019; Accession=PF00069.16; Description=Protein kinase domain
  Pfam annotation: Domain name=Pkinase_Tyr; Domain location=157-321; Score=-120.5; E_value=5e-05; Accession=PF07714.8; Description =Protein tyrosine kinase
  Pfam module annotation: Pfam domain module=Pkinase::Pkinase_Tyr; Domain location=157-321::157-321
MGQCYGKAGGASSRRADHDDHAHAVAPPSPLPANGAPPPQPATPGRRKSGSATPVHHQAATTAWPSPYPAGGASPLPAGVSPSPARSTPRRFFKRPFPPPSPAKHIKATLAKRLGGGKPKEGTIPEEGGAGVAADSAEAERPLDKTFGFANNFGAKYDLGKEVGRGHFGHTCSALVKKGEYKGHAVAVKIISKAKMTTAISIEDVRREVKILKALSGHNNLVKFYDACEDALNVYIVMEADPNFDDSPWPSVSAEAKDFVKRFLNKDYRKRMTAVQALTHPWLRDEQRQIPLDILVFRLVKQYLRATPLKRLALKALSKALREDELLYLRLQFKLLEPRDGLVSLDNFRTALTRYVTDAMRESRVLEFLHALDPLAYRKMDLEEFCAAAISPYQLEALESWEEIAGTAFQHFEQEGNRVISVEELAQELSLAPTHYSIVQDWIRKSDGKLNFLGFTKFLHGVTIRGSNTRRH

SEQ ID NO: 67467 - protein, 29 aa, Zea mays
  Coding DNA Sequence Number=SeqID_24092
MGVLHLLLIPMGVLHLLLIPMGTKKMRSL

SEQ ID NO: 67468 - protein, 128 aa, Zea mays
  Coding DNA Sequence Number=SeqID_24093
MGKKRKREPTPPSEDFGDSEYSEEEFSSESEGSPAPIPLRESTTPRGSRRRSGLTSGPSSAPGSRARMSRRTPRTRRTHPRRTTATVARATTTTTTTTTTEAVAAATTVTAAAGRQQRQGQQQRQGRK

SEQ ID NO: 67469 - protein, 181 aa, Zea mays
  Coding DNA Sequence Number=SeqID_24094
  Gene Ontology: Mol. function=kinase activity; Cellular component =nucleus; Biological process=cell division
  Homolog annotation: Hit_ID=Q43693; Match level="QueryCoverage=49%, HitCoverage=17%, E-value=1e-35, Identity=82%"; Hit description=Type A-like cyclin
  Pfam annotation: Domain name=Cyclin_N; Domain location=16-164; Score =98.6; E_value=1.9e-26; Accession=PF00134.14; Description=Cyclin, N -terminal domain
MGVAQCWLRCSDGRMNICVYQRTETLKTKKRPSTDFMETIQKDVNPSMRAILIDWLVKVAEEYRLAPDTLYLIVNYIDCYLSGNEINRQRLQLLGVACMLIAAAYDKVFLEVLFCSATALWTCTDVAHVLLQFSLAWCGKLIRYARAVAAHYVRFVKGLCFDLFIIRGGNRAFNACWRCAM

SEQ ID NO: 67470 - protein, 346 aa, Zea mays
  Coding DNA Sequence Number=SeqID_24095
  Subcellular localization annotation: CTP_CleavageSite=65; ConfidenceScore=5.36e-01
MNPRLPKRSTVPGWRGCWRLPIWSLTGNCSSTRSVPPTWRANCRRLETGGSLRPTSECAACPSPDGSSAWASAKGGSEVAGDGRERGGNPAAFVFVPRPGRVGRRGGSSEAEVESVFHGRGRARAPGSGEAEVVRQRPGRSPSPGVGRSGVRRLLGLSPSPSPGSGGAEFAVFRGLSLSPSPGSSGAEFAVFRGLSPCPSPGSGGAEFAVFRGLSPSPSPGSGGAEFAVFWGLSPSPSPGSGGAEFAVFRGFSPSPSPGSGGTEFAVFRGFSPSPSPGSGGAEFAVFRGFSPSPSPGSGGAEFAVFRGFSPSPSPGSGGADFAVFQGFSPSPSPGSGGAEFAVFRG

SEQ ID NO: 67471 - protein, 51 aa, Zea mays
  Coding DNA Sequence Number=SeqID_24096
  Homolog annotation: Hit_ID=Q96SA0; Match level="QueryCoverage=58%, HitCoverage=26%, E-value=5e-07, Identity=90%"; Hit description =Putative uncharacterized protein
MASTAGYLARRAAQKERVRLLYRRALKDTLKCSTGPSTATSSTRTNEQQQF

SEQ ID NO: 67472 - protein, 79 aa, Zea mays
  Coding DNA Sequence Number=SeqID_24097
MARAGISRVNDVEAAKSAESTRSEDHEQSREDASQKPYSPSPGAGSRRQRVSETCSPDRRCTSAAATPDLIRPQNLAFS

SEQ ID NO: 67473 - protein, 44 aa, Zea mays
  Coding DNA Sequence Number=SeqID_24098
MKDVVIVGAFTDTYRLLSWGRAESGKAIGLLKVVLPNRRFCNHY

SEQ ID NO: 67474 - protein, 67 aa, Zea mays
  Coding DNA Sequence Number=SeqID_24099
  Subcellular localization annotation: CTP_CleavageSite=53; ConfidenceScore=5.41e-01
MNKPSSAAKALAAVLLLAACVAATAQYGGSSSSSSSAPGTGPADGAGYLLGVSAAAAALAVAAFVWT

SEQ ID NO: 67475 - protein, 412 aa, Zea mays
  Coding DNA Sequence Number=SeqID_24100
  Gene Ontology: Mol. function=nucleic acid binding; Cellular component= ribonucleoprotein complex; Biological process=mRNA processing
  Homolog annotation: Hit_ID=A2ZHW4; Match level="QueryCoverage=83%, HitCoverage=43%, E-value=1e-124, Identity=64%"; Hit description =Putative uncharacterized protein
  Pfam annotation: Domain name=RRM_1; Domain location=161-235; Score =40.8; E_value=5e-09; Accession=PF00076.13; Description=RNA recognition motif. (a.k.a. RRM, RBD,
  Pfam annotation: Domain name=RRM_1; Domain location=255-305; Score =18.3; E_value=0.003; Accession=PF00076.13; Description=RNA recognition motif. (a.k.a. RRM, RBD,
  Pfam annotation: Domain name=RRM_1; Domain location=84-152; Score =81.0; E_value=3.9e-21; Accession=PF00076.13; Description=RNA recognition motif. (a.k.a. RRM, RBD,
  Pfam module annotation: Pfam domain module=RRM_1::RRM_1::RRM_1; Domain location=161-235::255-305::84-152
MEFDHPDEVDEEEEVEYEEIEEEVEYEEVEVEEEEEEEEEDEIEGVREVDANHDSKIVDDDPKDGNEKEKHAELLALPPHGAEVYVGGLSSDVSSEDLKQLFESVGEVAEVRMRGKGDNKTYAFINFRTKEMALKAIQKLSNKDLKGKKIKVSSSQAKNRLFIGNVPHDWTPDDFKTAVEEVGPGVLKVDLMKAPGSGRNKGYGFIEYYNQACAEYAKQKMSTPEFKLDTNAPTVSWADHKNASEATSTSQVKSLYVKNLPKTVTQEQLKKLFEHVGEITKERSMVMKALKNTERYELDGQLLDCSPAKPPADKKDDTGSSPTAKGRPLPPSYAPLGYGLAGAYNPLGKGLAGAYNSPGNGLAGAYGVLSAHAAQPMLYAPGASPGSTMIPMVLPDGRLVYVIKTLMKKRKR

SEQ ID NO: 67476 - protein, 153 aa, Zea mays
  Coding DNA Sequence Number=SeqID_24101
  Gene Ontology: Mol. function=structural constituent of ribosome; Cellular component=ribonucleoprotein complex; Biological process =translation
  Homolog annotation: Hit_ID=Q2QY18; Match level="QueryCoverage=86%, HitCoverage=83%, E-value=5e-69, Identity=95%"; Hit description =Ribosomal protein L24 containing protein, expressed
  Pfam annotation: Domain name=KOW; Domain location=17-48; Score=44.3; E_value=4.3e-10; Accession=PF00467.20; Description=KOW motif
MGWKAAEKLIRHWKVLRGDNVMIIRGKDKGESGLIKRVIRSQNRVIVEGKNLVKKHIKQGEGHTGGIFSVEAPLHVSNVQVVDPVTGKPCKIGYKYLEDGTKVRYARGMYASGVVIPRPEILKERRKPRPTSLFFLMLFDGISLEHLEDSSRF

SEQ ID NO: 67477 - protein, 153 aa, Zea mays
  Coding DNA Sequence Number=SeqID_24102
MPSWELRTCTYRGPVSLCGGPDPSIHPGMYYLSLPRGALRPAHVVGSGAILRVARKCCAGAASSCCRRGYPRFRVPTVAPEPASGEDTSLQVGPEFDLWLACCSCAPVGAITAGPPMVMPTATPIPMADWPVTIVLNVTVGPRAGCLESLHWF

SEQ ID NO: 67478 - protein, 379 aa, Zea mays
  Coding DNA Sequence Number=SeqID_24103
MPLVRRFAFLTVGCPEDGGVHNCGAVARSFFGSVCVTCGAWPPCHKVGTLVHVGEDFARDASGARVGRSAFKKGSISRVVAMSRSSSDHRALPPSGPPDGRSATLWGLAFFRHRSASRIFITQPGRNLRPVVIHKDDYQPCGGEKRAGLRPPPCPQLQGCSSSALGRRASRVGAPPFARAGGPLLPPAFGEEGRSPALRRRRTSATRGRPSEVSYRVSGSSAWVALVLPPAAWTGRGCPSTAWATVAPCAGRPHPRLLLRRQPHRRVVQDVVRRGAAAAAFLDGLVLTPAVRTGARTSSRALGRPPFARYGTGAQVAAVVGAEVVAAAGEAPHCRGGCLRWRDRQCHLPPNLWLIGFNGLVVAPRRKTGARTLSQRCTC

SEQ ID NO: 67479 - protein, 221 aa, Zea mays
  Coding DNA Sequence Number=SeqID_24104
MESGMSAQSCATERRAQQQCLARGGWELVAWRKHPTRMYYLSLPRGALRPAHVVGSGAILRVARKCCAGAASSCCRRGYPRFRLPVLLAEVWGGSNSDDNSGEQLLPIRASSAESEGTAAFVSSRASSQRVRFVDWIPESPAIDGFPLGSGKGLLPRGLERFLECLSGGDKDDVYDYGNGKWYSFRLERVAFGAIYAQIKKKENGVEADLQEFQDIDEFKD

SEQ ID NO: 67480 - protein, 97 aa, Zea mays
  Coding DNA Sequence Number=SeqID_24105
MTQFFEFHEIEDPEHLFGEGKNWGVVRFAVVPLMGLGVCGSLCQGGDKDDVYDYGNGKWYSFRLERVAFGEIYAQIKKENGVEADLQEFQDIDEFKD

SEQ ID NO: 67481 - protein, 456 aa, Zea mays
  Coding DNA Sequence Number=SeqID_24106
  Gene Ontology: Mol. function=transferase activity
  Homolog annotation: Hit_ID=Q2QY26; Match level="QueryCoverage=100%, HitCoverage=100%, E-value=1e-105, Identity=50%"; Hit description =Transferase family protein, expressed
  Pfam annotation: Domain name=Transferase; Domain location=1-455; Score=62.3; E_value=1.7e-15; Accession=PF02458.6; Description =Transferase family
MDVQVQRSFVIPAPQSEPSAEVPLTVFDLVAPAYHVTVLFAYAAPNPTDAALLDALAATLPRFPLLTARLVVADADERRRPFFVTGRGGAGALVVEATVASALSDHLPLAPAPELARLHVPVGGDLAPPPPHMLMLLINRFACGGLVIASSSYHQAADGYSMSTFFHAWADAVRANNKHDTLLPAAPPAPAPYGPGAITPRRPPRCEFEHRGTEFLRAEDAAAGRPAPARVDPSEIANVLLHLPSDFVAALKASAAPPQGQGRWYTTFEAVSAHLWRKITLARGRADDASRTALNAAVNGRARLGADALARGFFGNAVLTASAATCARDLARGALADAAALIRAAVRARDRQYFQSFVDFGELHLHGGEELLEPTVGDEDNVLLPDVASDSWLHLELHRLDFGCGGRLAGILPAKVPLDGVVVLIPSLRKGGGVDAFVALWDKHAKELMDIAYTMD

SEQ ID NO: 67482 - protein, 138 aa, Zea mays
  Coding DNA Sequence Number=SeqID_24107
MGKNNKRKREPTPPSEDFGDSEYSEEEFSSESEGSPVPVSPPASSDDSDDSQGIAAEVWTYIRAVERSGLEGSDESEFSSDEEDSDGGEDEDDDDDDDDDDDGDGDGSNGGGGSGGKGGTRGGSSTGSTRGGSSKASG

SEQ ID NO: 67483 - protein, 143 aa, Zea mays
  Coding DNA Sequence Number=SeqID_24108
  Gene Ontology: Mol. function=metal ion binding
  Homolog annotation: Hit_ID=A3AJ35; Match level="QueryCoverage=55%, HitCoverage=24%, E-value=6e-16, Identity=58%"; Hit description =Putative uncharacterized protein
  Pfam annotation: Domain name=F-box; Domain location=49-96; Score =36.0; E_value=1.3e-07; Accession=PF00646.24; Description=F-box domain
MAAESCHPRGLSWFARSCIPADPARHTAVPVPVPVPFSVPDAEDPEPEPPIAGLPDELLLEILARVPRASLPPLPAVCRRFASLLASQAFLQLRRASGRLRPCLLAVSSSSARALLLHLHASASASASVSSLEVSEMPMPQRC

SEQ ID NO: 67484 - protein, 209 aa, Zea mays
  Coding DNA Sequence Number=SeqID_24109
  Gene Ontology: Mol. function=nucleic acid binding; Biological process= metabolic process
  Homolog annotation: Hit_ID=Q2QY23; Match level="QueryCoverage=77%, HitCoverage=12%, E-value=5e-55, Identity=55%"; Hit description =Cytochrome P450 family protein
  Pfam annotation: Domain name=PGAM; Domain location=19-145; Score =67.7; E_value=3.9e-17; Accession=PF00300.13; Description =Phosphoglycerate mutase family
MSPTPAPAARAGEELPSTEVVVVRHGETAWNASRVVQGQMDPELNEAGRRQAVVVVLTEALRERHMGYLQGLRWDAAVDKSPDSLHIVKVIEGSDPDSRNQELPGGGESLNQLNERCVCFLNKIAQEHAGERVVVVSHGAAILELCRHTDPPGSCVRRHVPNTSLSVFRVSAATGQWALERCGDVGHLKGDGDGDSFLEGSFGGDGASA

SEQ ID NO: 67485 - protein, 38 aa, Zea mays
  Coding DNA Sequence Number=SeqID_24110
  Subcellular localization annotation: CTP_CleavageSite=26; ConfidenceScore=5.06e-01
MSYTSTSPSTAPPAAAWPLTAVTLTTAATRSAPTPAFS

SEQ ID NO: 67486 - protein, 163 aa, Zea mays
  Coding DNA Sequence Number=SeqID_24111
MAAGEIRAGARDNKEQDAQASGQVQASGVKDSTLPRPWKILEQGVRQHDDVDEASTEDGQREQRPRRRRAAAGEITVRAPSREESAARRDAANWRSREGAVRAEPRQRGPGRSVGEQKLEGTCGRANRPGAMEAVRVWEIRLGLKLGRREVHRGGGWAQGEPW

SEQ ID NO: 67487 - protein, 397 aa, Zea mays
  Coding DNA Sequence Number=SeqID_24112
  Subcellular localization annotation: CTP_CleavageSite=39; ConfidenceScore=5.35e-01
MAVHPFTRWPGRKWRNARNRWAVARAARGGFGSFCPGPVCMTRGTQPPCRRGKTLERVGEDSARVSLGRKWGELPLKGGNATSRKLVPFSHRSASRIFIRQPGRIPSPVVTQDGDHQLLGGEKQAGLRPSPLPQLQGSSSSVLGRGVRRVGACLRLGSGPLLPLVIGRRAFAVRGTGSCRVSGSLARAASAPLPVPPPAAAARRGFSADEIVGAARGLTSNSMAFYLSSSLEWGRERGPCDSSIRPEVIAAAVRPLGAEVVVAAALRAAASHPSAFCCSAGPPIVGGCSYLWRWNRSSVCNGTLSVGVCSLWLSGPEHGNPRPLFDEPKPEAAVLAWTEAESARKENFVGRSLAGPSTGGTSAGVELPKPRAGLVSSEDSWLRLRGGRPSRLLGPDS

SEQ ID NO: 67488 - protein, 217 aa, Zea mays
  Coding DNA Sequence Number=SeqID_24113
MAVDGRHLWRAKQATLRFRHNDRVKKGTGKGDTPKGILLREGNGPRAPLLIRGSKAVPSEGFNSRLRALGLRAHYWSEVRRPAPRKGSTAASGHSGSAPTTDQGFVGWPPKGSTAASDAERGMTLALASADSLCLARPRGSDSASAPEDDELRLAQPQGSDSALASADGLRLARPWGSDSTSTSEDRLDLDLGGASASPNPGLGPTTPQEGPSLPYP

SEQ ID NO: 67489 - protein, 343 aa, Zea mays
  Coding DNA Sequence Number=SeqID_24114
MAHRTVRCTPDMSGAPATSSVPLESDRWSSDFWARLDVRWRTGHTLFIVRCASMGDSDFCARCARIKCIAGTRCKPNSLSRRLSLRWLRTQVGRVAFKRRVTPLKGNHVFALPSCVTSFHPPSPRMGNTRSPFALSLEERNFAEVGTFQPLFGFKDFHQAARPHPLAGWVTTGSSVGRSKPGCGLCPSLSFKDVHHQCWGGECAELGSVSARAAARSFPQRSGGRAFAVRGAGSYRVSGSPARAASAPLPVPSSATTAGRGFSADEIVGATRGLTFNSTAFCSSSPLEWGRGHGPHGSSIRPEVIAAAVRPLGAEVVGLLLLRRPSNHGGLFVPAGTEPEFCL

SEQ ID NO: 67490 - protein, 233 aa, Zea mays
  Coding DNA Sequence Number=SeqID_24115
  Subcellular localization annotation: CTP_CleavageSite=36; ConfidenceScore=5.45e-01
MRQGVPFIAPRQLGAVGNKSGRPSLPSVSWRTGQSVAGEKPESGLFSRGSLAHRDTVRTSFVLFDYFESGILKTTEYTPTEPRDSYASGIRIPHSSPSVKSSDLDGGGAAAPSASTTPSAKSDLASDDNTVGGSPLRRTTSAPRPGHRRQGLLQESGSSRQLGRPPRSLSQLSPEDISPARGLGNSTPASVPPVDSPARLRPTKSSFRANSTSVHTDTAAFGFGSSKSDRGII

SEQ ID NO: 67491 - protein, 508 aa, Zea mays
  Coding DNA Sequence Number=SeqID_24116
  Gene Ontology: Mol. function=transferase activity; Cellular component= chloroplast; Biological process=biosynthetic process
  Homolog annotation: Hit_ID=Q40028; Match level="QueryCoverage=99%, HitCoverage=99%, E-value=0.0, Identity=69%"; Hit description=Beta -ketoacyl-ACP synthase
  Pfam annotation: Domain name=Ketoacyl-synt_C; Domain location=336 -464; Score=149.7; E_value=7.9e-42; Accession=PF02801.13; Description= Beta-ketoacyl synthase, C-terminal do
  Pfam annotation: Domain name=ketoacyl-synt; Domain location=83-328; Score=305.9; E_value=7.7e-89; Accession=PF00109.17; Description=Beta- ketoacyl synthase, N-terminal domain
  Pfam module annotation: Pfam domain module=Ketoacyl-synt_C::ketoacyl -synt; Domain location=336-464::83-328
MAAAVAPPLCTWLVAACLSAACGDGEKENERRHRGGGVGGFFGSRRRLGSGRRGVGRSGMAMSVALHPERTAVENKKPDMKQRRVVVTGMGVVTPLGHDPDEFYNNLLRGISGISEIEAFDCSHYPTRIAGEIKSFSTDGWVAPKLAKRMDKFMQYLITAGKKALENAGITEEVMNELEKSRCGVLIGSAMGGMKVFSDAIEALRVSYKKMNPFCVPFATTNMGSAILAMDLGWMGPNYSISTACATSNFCILNAANHIRKGEADVMLCGGSDAPIIPIGLGGFVACRALSQRNSDPAKASRPWDVDRDGFVMGEGSGVLVLEELEHAKQRGAEIYAEFLGGSFTCDAYHMTEPHPEGKGVILCIENALADSGVTKEDINYINAHATSTQMGDLKEFEALNRCFGQNPQLRVNSTKSMTGHLLGAAGGIEAVAAIQFKNELAGDKYSRTEAIRTGWVHPNLNLDNPEKTVDVRMLVGPQKERCDVKVALSNSFGFGGHNSSILFAPFK

SEQ ID NO: 67492 - protein, 117 aa, Zea mays
  Coding DNA Sequence Number=SeqID_24117
MSRPPTRPGPRHGVLDGDFELLEKVVAIFDCHSSVMRTSTQVHYRGRGATRVADHRRGGGPRDRRRGGQALSHRDAARQFIGRRRRARAAAGWTSASTSEEDNSAAAEDAGTTAHWG

SEQ ID NO: 67493 - protein, 822 aa, Zea mays
  Coding DNA Sequence Number=SeqID_24118
  Gene Ontology: Mol. function=protein serine/threonine kinase activity; Cellular component=nuclear pore; Biological process =protein amino acid phosphorylation
  Homolog annotation: Hit_ID=Q7XYY6; Match level="QueryCoverage=65%, HitCoverage=54%, E-value=1e-145, Identity=54%"; Hit description=EDR1
  Pfam annotation: Domain name=IBN_N; Domain location=710-776; Score =66.7; E_value=7.7e-17; Accession=PF03810.10; Description=Importin -beta N-terminal domain
MHVRDGRLDVGLDGALVRPRRLDASVALSAGGWRATGWTGCSCSLGDGQWGGVPQPPLVPRQEQPPLEQPPLVPRQGLRTAGQGRQDSGVRVGWIGRFRFRSRLPTGPWAVELALGLAPGGLLVEWISGRMGYFGYRGTATPSPIFGAAVSRSPGTHSGLMSSWCHADLAATKRATHVLTDLAKILSSAPRAAAAQAPPRPLAAKHKDEPDPDDGRQRVTVFFGTQTGTAEGFAKILAYSVGIPCKLVKGSNYTGGDDDDAINIIKMDNEREFLVDLMAAPGALIPADILSWKGNSLNSNRKLGLNRTAGSSSTVDANVDPTVLPLEPKGGQLPLFSSGDWMSDIDSGYEAAEIAASTQTSSGVTPYLCSAGSVFGSSWMLVNHDQSDGPSTSAGTSSQQKVVPQSEHQRNLNRLPDLQEIPESKNLFADLVPSGDNKSKKTSVPFKGPDHRNNELQKRRENIVPNAGRPHQRLVMKNWSPYNDVSNNKQYNYVEDSFARRNVGNNAAPSSSQMPRPAARSNLNSRLHNDASYHNYDSIMAGTSAMNITSTAETGKVPERVMRGDLDKGQTNYRLEDQHVIVQPPQGRLPWGIPAEGSVPMNRVQSQAKQHLENMDAKQDHKKLLPDPKKSPLDKFMDTSLPSRNMDMRSQRLDFDDVSECEIPWEDLVIGERIGLGGDQNMHQAGGMGRSLELLLIQFLMPDNDTRRQAEEQIRRLARDPQVVPALVHHLRTAKTPNVRQLAAVLLRKKITSHWPKLPPDSKASLKQALIDSITLDHRFFAKYLSPILLRMSALESARFQFTQIVHLAICLRNTLSVFSTY

SEQ ID NO: 67494 - protein, 211 aa, Zea mays
  Coding DNA Sequence Number=SeqID_24119
  Subcellular localization annotation: CTP_CleavageSite=8; ConfidenceScore=5.22e-01
MSSRSLMYCVSPPSKPSDGGYPPSFRLIVGGTQLRGSWYLPAIVRLQGFSSCSPAAPLHQRSPKTVTTSSWVGRSKPGCDLGPTLSFKDVHHPRWGGGRAEPALYLPRGFVGHPLPRRSRERALTGPAGGPDFDNAGLVDGGRRHLQRVGLVGLAPGGPSCRRAAAAPCAREGHPRCRALLGRRSCSGVVLPLHRRDIFTRGPVPHSSGRI

SEQ ID NO: 67495 - protein, 458 aa, Zea mays
  Coding DNA Sequence Number=SeqID_24120
MESHDLRAEWESRLVGGYEIDGSGYDYGAASPLQPNRILAEYVDVYSPLLYTPNPPQVVSIATTAQAKMKLWKETSRSSKITTSSRCGLAATPSRLPVKAALSTFLFRTLIYCKNYMDVSDMARLRHTARKSVIPFLPSRLAERPLRRPVAGQSSHLERLHHRLREEQERRRQEQRSSSLSLHQEIESVRSCSPVLSLEPPPAPPLGAPASGVAAGGDPDDGGGDDSSSHDTDFSANPEPEGWVARPITRDAARGCHFHDALDTLLRRAFDRHTWSVEYRCVVYQHSRGVYPDRWEATCLVRCPEDSLQGAEACSEHYSISERDSAEAAMQDAARRALSHYCSVFGGAADGLDLKYYPRRSSGSTGGVIVSPVGEGNPRLSSTVNLAAVLNTELDHALDELSRARAEIALLRAERAERRFLDGGSPAPVGTQHPYRSPQRGHQSYGNPACKTKITLEP

SEQ ID NO: 67496 - protein, 146 aa, Zea mays
  Coding DNA Sequence Number=SeqID_24121
MGGGLLAAASALRSVLPLFGPPEQKASSSLPPEQPGLSVSGTDAGFDLPRPRVGLAPLEDGWPEVESVFRGRGRVRAPGSGEAEVVRQRPGRSLSPEVGRSGVRRLLGLSPSPSPGSGGAEFAVFRDLARVRALGWAERSSPSSGT

SEQ ID NO: 67497 - protein, 206 aa, Zea mays
  Coding DNA Sequence Number=SeqID_24122
  Gene Ontology: Mol. function=hydrogen ion transporting ATP synthase activity, rotational mechanism; Cellular component=proton -transporting ATP synthase complex, catalytic core F(1); Biological process=ATP synthesis coupled proton transport
  Homolog annotation: Hit_ID=Q69MD6; Match level="QueryCoverage=39%, HitCoverage=14%, E-value=2e-14, Identity=50%"; Hit description =Ternary complex factor MIP1-like protein
  Pfam annotation: Domain name=DUF547; Domain location=58-196; Score= -37.0; E_value=0.0036; Accession=PF04784.5; Description=Protein of unknown function, DUF547
MRCRVSPPSVSGSCGSSSADPYGVPEFGWRDIRRYKQFRSVDTNISAGDDSALGQIVKALLRKLSLVDLAGLSHQHNRLAFWINTYYSCMMNESLANELATRMSAMSSVTDNAIELGKNLSIAYNLQFQAKITREVLRIVAPMDTVLSVQWIRLLCDIPFHNDRNVGLMDEGLVAAMLHGKGHHPVIQMQMKVKTIWILSPMKDYK

SEQ ID NO: 67498 - protein, 249 aa, Zea mays
  Coding DNA Sequence Number=SeqID_24123
  Gene Ontology: Mol. function=enzyme activator activity; Cellular component=centrosome; Biological process=positive regulation of exit from mitosis
  Homolog annotation: Hit_ID=A3ADM2; Match level="QueryCoverage=70%, HitCoverage=35%, E-value=8e-45, Identity=56%"; Hit description =Putative uncharacterized protein
MDLKHDAVAQSVPSLQCSAPQLESKMAPGANGEAVPLCQAGQKEESEPPATPPHASVATSAPTPASRTVYSDRFIPSHTGSNLALFDLAPSPSSAASSSHDGGPAASSGSAQPAASPYCTLLRAALFGPDTPDCVASSAAACSSSSSPGPSPVGTPAIGNIFRFKDGAGTPRGRFFSGDQEEDALFPGIFTTTGAGARKVPRSPYKVLDAPALQDDFYLNLVDWSSHNVLAVGLGNCVYLWNDQMCPVQ

SEQ ID NO: 67499 - protein, 418 aa, Zea mays
  Coding DNA Sequence Number=SeqID_24124
  Gene Ontology: Mol. function=transporter activity; Cellular component= membrane; Biological process=transport
  Homolog annotation: Hit_ID=A7PQI8; Match level="QueryCoverage=95%, HitCoverage=70%, E-value=1e-138, Identity=57%"; Hit description =Chromosome chr6 scaffold_25, whole genome shotgun sequence
  Pfam annotation: Domain name=Xan_ur_permease; Domain location=2-318; Score=54.0; E_value=5.3e-13; Accession=PF00860.11; Description =Permease family
MAAVVSTVLLVTGVTTLLHMFVGTRLPLVQGPSFVYLAPALAIINSPELFGINDNNFKHIMKHLQGAIIIGGAFQVFLGYTGLMSLFLRLINPVVVSPTVAAVGLSFFSYGFTKIGTCIEMGILQLLMVVIFALYLRKIKLFGYRVFLIYAWGTPVFSWKMGLVMCVVSVIASVDSVGSYHASSLFVATRPPTSGVVSRGIGVEGVSTVLAGLWGTGVGSATITENVHTIAVTKMGSRRAVGFGAILLILLSIVGKVGAFIASIPDVMVAALLCFMWAMLCALGLSNLRYSATGSSRNSIIVGLALFLSLSVPSYFQQYGVHPSANSSVPTYFQPYVVASHGPVHTGSGGVNYVLNTILSLNMAIAFLVALVLDNTVPGGRQERGLYVWSEAEAAMRESTFMKDYELPFKIGRPFRYV

SEQ ID NO: 67500 - protein, 260 aa, Zea mays
  Coding DNA Sequence Number=SeqID_24125
  Gene Ontology: Mol. function=CDP-diacylglycerol-serine O -phosphatidyltransferase activity; Cellular component=integral to membrane; Biological process=phosphatidylserine biosynthetic process
  Homolog annotation: Hit_ID=A2Y796; Match level="QueryCoverage=39%, HitCoverage=31%, E-value=1e-40, Identity=80%"; Hit description =Putative uncharacterized protein
  Subcellular localization annotation: CTP_CleavageSite=58; ConfidenceScore=5.80e-01
MAEPPPSTSTSDPALPTTATTTSSVPKSSSRPSPPPPGPPRSARSLRRSLPRRDASVSATAGRAGSPPYQPRPRPSSCTHPATTAKRPLIRASGGSSSRPGRLGSGPARPLSPSMFMAQLPQMPSRQLRRKEIDQPTLIPHIAEAKSQKYSYEVLFRSLQKLLIDTATSDWASGALDPEGAAAHNSLTSIKRGVWAMIAAFLAYCTLQAPSTILIRPHPAVWHLVHGLAVVYLVALIFLLFQNRDDARQFMKLLHPDLGV

SEQ ID NO: 67501 - protein, 139 aa, Zea mays
  Coding DNA Sequence Number=SeqID_24126
MAIGAASGGKGRVADLWQPGNGENSMSSSLLQHRSSKINRGSAATGYTQCAEPNDLETSEYDDTINKSLLLTSLSEVYTHAIGRVSTKRQSPGISTLHRQNSKDDKGYIKGVPIRSNLENWFVAHMTTPHIIEEWEYVI

SEQ ID NO: 67502 - protein, 77 aa, Zea mays
  Coding DNA Sequence Number=SeqID_24127
  Gene Ontology: Cellular component=cytoplasm
  Homolog annotation: Hit_ID=A3AXW9; Match level="QueryCoverage=70%, HitCoverage=22%, E-value=6e-15, Identity=58%"; Hit description =Putative uncharacterized protein
MDAANDEEERWEGEKYFYGGKLLLATTKLQDPGTCRLCGSPRQYELQLMSSLSTFSMKLETTPQIMYPAAGLGWLSS

SEQ ID NO: 67503 - protein, 45 aa, Zea mays
  Coding DNA Sequence Number=SeqID_24128
MAGIAEQMGRRRGLRDEWAGAAVAERSRAGFAVVNIKTIPQQFSK

SEQ ID NO: 67504 - protein, 528 aa, Zea mays
  Coding DNA Sequence Number=SeqID_24129
  Gene Ontology: Mol. function=membrane alanyl aminopeptidase activity; Cellular component=cytoplasm; Biological process=proteolysis
  Homolog annotation: Hit_ID=A2X2G9; Match level="QueryCoverage=15%, HitCoverage=9%, E-value=1e-37, Identity=87%"; Hit description =Putative uncharacterized protein
  Pfam annotation: Domain name=Peptidase_M1; Domain location=152-492; Score=-101.9; E_value=9.6e-07; Accession=PF01433.11; Description =Peptidase family M1
  Subcellular localization annotation: CTP_CleavageSite=45; ConfidenceScore=5.22e-01
MGIWVFQGVFGSPPLAPRHTTLRAPQLWRPNRPRHLRRGVALDVSVQTGPQSVIDVHHFDAITKFELMMIQTTLVELEMMSDAIDETLDKDEAEEETEELTNQALLYRLSGDYNPLHLDPDIAQLAGYASSECYSIIVFIVIFDIEEVKGPLGLDFAIATLNYWVHKGIAFICEIRCCFQVLPHKEVSEYKKSITDCSKLAVYAHLFLPHRDPSRGDFEDLRHRRRAKPHRQLCLKLTRVHSRCLLKDDGKGVREPLDEVVCMMVPHYSAWPIFFRCFSLLIPTTLYVPIVGVHNLHHASANPTRGASIPPSPANYARRLHPTIIGLPQAPTLHQDVRSTKFNNSADNNYNHHRSCSNHMFWSLIHAISKTETALPVQSSPTFSLTKSRTKFSHLLGNSRWMHTGALDKVAVVVAHELAHQWFGNFVTMEWWTHMWLNEGFATWVSYLAADQFFPEWNVWTQFLEESTIGFKLDALAGSHPIEAANIITLYDVSNIWRIPLLLHEQKAHEAILKVLNLERTDKRLMRL

SEQ ID NO: 67505 - protein, 333 aa, Zea mays
  Coding DNA Sequence Number=SeqID_24130
  Gene Ontology: Mol. function=transferase activity; Cellular component= endoplasmic reticulum membrane; Biological process=metabolic process
  Homolog annotation: Hit_ID=Q94DE7; Match level="QueryCoverage=67%, HitCoverage=76%, E-value=1e-104, Identity=85%"; Hit description =Putative undecaprenyl pyrophosphate synthetase
  Pfam annotation: Domain name=Prenyltransf; Domain location=1-226; Score=347.9; E_value=1.7e-101; Accession=PF01255.10; Description =Putative undecaprenyl diphosphate synt
MDGNSRWARARGLPSAAGHEAGRRALEEVVRLSRAWGVRTLTAFAFSHENWSRPKVEVEFLMGQFERAIRESVAEFLREGIRLRVIGDSSRLPVSLQRTAREAEEATRNNSQLDLTLAISYSGRRDIVQACRTLAQKVRDKLLEPEDIDESLFAGELETSHANGNELPYPDLVIRTSGELRLSNFLLWQSAYAELFFTDTLWPDFGEADYLQALVSFQSRDRRFGVGLPEPRQLLGSLLPDGVPPGSEIQAPPAIFRRPCARADRPALCRRPSASDQRAPPPHARSRTVRPCAADRPRLTREHLRLTPGRGPSGSVPRTVRTWPESTAAGSFE

SEQ ID NO: 67506 - protein, 150 aa, Zea mays
  Coding DNA Sequence Number=SeqID_24131
  Gene Ontology: Mol. function=hydrolase activity, acting on acid anhydrides, catalyzing transmembrane movement of substances; Cellular component=proton-transporting two-sector ATPase complex; Biological process=proton transport
  Homolog annotation: Hit_ID=Q84PC1; Match level="QueryCoverage=46%, HitCoverage=20%, E-value=2e-12, Identity=50%"; Hit description =Putative vacuolar ATP synthase subunit C
MEIPNARAVLRVRCPRCHCVLEEAGAPVYQCGGCGASLQVTRRRHHSSLWSHLQDSIFHHSFDTPLYRFNVPELRVDTLDSLLALSDDLVKIKDLKHAEGVESRTLTVDGVPADTVKHNEMQGAQSMRNNTERHNSAFQFVILIGLDRLA

SEQ ID NO: 67507 - protein, 131 aa, Zea mays
  Coding DNA Sequence Number=SeqID_24132
  Subcellular localization annotation: CTP_CleavageSite=35; ConfidenceScore=5.39e-01
MGMGLHDGNGFSLAATGKKRQRLSRGPTCAGRVLSVQMGMGFHERNSWKDVEGSLFVVRRNSESRFQSIVMNTHNTVFYRFTQQKLPAWKPAMTPGFIEKEIKELKLWHDFIGGVPHGHRQERRDGAHRHR

SEQ ID NO: 67508 - protein, 62 aa, Zea mays
  Coding DNA Sequence Number=SeqID_24133
MATLMSRCLLDHLEGHQRLDPLARPQRWRRRGSGEHRKETHNSIDHHLKAGVPQDYVPLWIK

SEQ ID NO: 67509 - protein, 224 aa, Zea mays
  Coding DNA Sequence Number=SeqID_24134
MAKVNLLPSWDPVPTLKVLHSDETGEVKPDVNQECLQPLSKRKERPYLQQLKRYLINLQVGYILLFVRGYKHSGLQLAAPNFFLICSTALSHTQQHGPETGQAAPHGPDAWERPVLVLGANHSTRLALTTVRARGCRARIAVRTVRPDTASETPRSGRCSAVLYSYQRTAMLHVWTVPVNPLGRSSVSRWSGLVWSLDYRLIRGCHLTDATESALLHTVKNSWK

SEQ ID NO: 67510 - protein, 147 aa, Zea mays
  Coding DNA Sequence Number=SeqID_24135
MASQQCSPCFFENECSMFSGSASSQLLVSVVIIADMVLLQHLTPIEEERSGHRVQPCREQRQKAGRGAVGRRPRSRRRSRWRCLWWLRRRVEEVDAVGAAPESPILLRRRRSCAVYSRKIFGFDPGRARTATTVRYRYRVLGGGDGW

SEQ ID NO: 67511 - protein, 138 aa, Zea mays
  Coding DNA Sequence Number=SeqID_24136
  Homolog annotation: Hit_ID=Q2HTS9; Match level="QueryCoverage=27%, HitCoverage=14%, E-value=2e-07, Identity=71%"; Hit description=DNA -binding WRKY; VQ
  Pfam annotation: Domain name=VQ; Domain location=19-49; Score=41.2; E_ value=3.8e-09; Accession=PF05678.5; Description=VQ motif
  Subcellular localization annotation: CTP_CleavageSite=37; ConfidenceScore=5.32e-01
ATFNLPQSPRPIPRTIDATLFPTTFVQADTTSFKQVVQMLTGAEQPANNDATTTEVAATANGAGAQAACDDPNEDGSAVAASRCESGEERDRGREFGAARAEDRRGKEESRSSQGRRQRGGSSSGLCAAAVPVVSSRL

SEQ ID NO: 67512 - protein, 54 aa, Zea mays
  Coding DNA Sequence Number=SeqID_24137
MAHRTVRCATGAPPVRQRSFPTASSERKPLDSWAYGTVNIPLSGAPGKIRCGCP

SEQ ID NO: 67513 - protein, 344 aa, Zea mays
  Coding DNA Sequence Number=SeqID_24138
MHRVLPPSEPPDGEHSRHFPLAVVGGTQLRGSWYLSAIARLQGFSSGSPAASPRQWSPKTVTTSLMVGRSKSGCDLCPALSFKDLHHPGWGGGRTEPELYLPRGFVGHLLPQHSRERALIDLAGALDFDNVGPVGGERRQLQCVGLTGSAGSAPGAPSRRESGCRAACTGGPPKTSRAARAAFVFLGCPAFAPMASVAGAEVVAAEEVLVADGIPATIRAPGLRLFGFDSLSSPLEWGRGRGAHCSSVRPEVIAVAVWPPRAEVVVTAAGAGVGEPPGISSPRRPSNVGGCSYLRGRNRSSVCNGTLSAGVCSLWLSGPEHLGIFGVIPYFFLISSTRTRLSAN

SEQ ID NO: 67514 - protein, 179 aa, Zea mays
  Coding DNA Sequence Number=SeqID_24139
  Gene Ontology: Biological process=response to biotic stimulus
  Homolog annotation: Hit_ID=Q53NP4; Match level="QueryCoverage=85%, HitCoverage=84%, E-value=2e-50, Identity=68%"; Hit description =Disease resistance response protein/dirigent protein, putative
  Pfam annotation: Domain name=Dirigent; Domain location=12-178; Score =195.2; E_value=1.7e-55; Accession=PF03018.5; Description=Dirigent -like protein
MAAAGSYAALSSCLLALALLAATASAQEKETHLRVFWHDVVTGGPNVSTIVQVAEAPSSNASATGFGTVIVIDDPLTEGPNLTTSRLVGRAQGMYVSAGRDSLSLMMAMNFVFVDGAYNGSSLAILGANPAERTVREMPVVGGTGVFRFARGYCQARTQWIDNRTGDAIVEYNLHVRHD

SEQ ID NO: 67515 - protein, 180 aa, Zea mays
  Coding DNA Sequence Number=SeqID_24140
  Subcellular localization annotation: CTP_CleavageSite=64; ConfidenceScore=5.10e-01
MAYQPPGYSRAWAAPGSCGDYSTRSRLGIRPLPCYLAPTYSSRHRRWRTSIHFIHRVRSVPPPRSQATVEPSSTVGHPGMSSRAEESIDRAGKHQAGLTDVQFFAGLGLSPPSRHSPWPATTRHQSTVRSTPSSSPWFPMHAALVGVGFGARITLRPSLAGSAVAALVIVVVGAAVLNPW

SEQ ID NO: 67516 - protein, 77 aa, Zea mays
  Coding DNA Sequence Number=SeqID_24141
MPRNMVNCGHIPSRDLRRGLPFWLWWVQVRSMHDGQSGSVRHCSLEEMVAGVTWLSILPPGWTVEWDPASAEEEHEE

SEQ ID NO: 67517 - protein, 211 aa, Zea mays
  Coding DNA Sequence Number=SeqID_24142
  Subcellular localization annotation: CTP_CleavageSite=51; ConfidenceScore=5.66e-01
MSSRSLMHRVLPPSKPPDGGFPPSFRFVVGGTQLRGSWYLSAIVRLQGFSSASPAVPLRRRSPETVTTSPWVGRSKPGCDLGPTLSFKDVHHPRWGGGRAEPELYLPRGSVGRPLLRRSRERAPTGSAGGSDFDNAGLVDGGRRQPQRVGCVSLAPGAPSCRKAAAASCAREDRPRCRALLGRRSCSGAILPLHWYGASARRSVPHSSGRI

SEQ ID NO: 67518 - protein, 250 aa, Zea mays
  Coding DNA Sequence Number=SeqID_24143
  Homolog annotation: Hit_ID=Q6QP51; Match level="QueryCoverage=31%, HitCoverage=42%, E-value=2e-21, Identity=61%"; Hit description =Putative growth-regulating factor 1
MHRQRQLQSLSTAVVNFDPISWGASLEIGDAAGARNQAAVYWVALAMFTGGRVKSGEWWYAPGGEYRVRGLVRELHRDLGKWAHPRLARSPARAGFAGSNLGQIASPTDRIAGAFNAKIALTPYPDTRTAVGKVKVTAVTSPPFTDRSDRKTAPLAPAPTAVPTTRVRLTTSEFSLGRNRKAPPRSTFRARPREKVSASPDPRTRPKSWPREESRPRSTPASALGEVFASPNLGLGPTAPQGIHHYSNPS

SEQ ID NO: 67519 - protein, 208 aa, Zea mays
  Coding DNA Sequence Number=SeqID_24144
  Subcellular localization annotation: CTP_CleavageSite=55; ConfidenceScore=5.35e-01
MQGHSVPTHINCPHRFPVSRSGLTALAYNASLTPTGRRAVTALVPTITGMGDHVSGRVRGYVHCQVLWWRLWCWVRGYLLSSSLLRHEDVLSVSKGDSGGHSEVRLDGGDGRNRPVHERRRVFSSAASVPAKPRRSGSIRGHGELYGRVGLGWGKLDWPVYGGSGSGGRGHAAHGQTAVNWTPVRLERARKSDIGGFDASFEVNTTDL

SEQ ID NO: 67520 - protein, 107 aa, Zea mays
  Coding DNA Sequence Number=SeqID_24145
MSYTKNVAYHPRHPLEKAEPETWTFDMPWHGFCREVGSVTHPIWLPEISLPRPYLPWRLTDCNLADGKYVLVPEQGAAQEVAPDPAPEPAPEDLPATALEGKPRFYA

SEQ ID NO: 67521 - protein, 221 aa, Zea mays
  Coding DNA Sequence Number=SeqID_24146
MGSGEAEVVRPRPGRSPSPGVGRGGSRSAEARAESEPWGRARRSSFGRGQGGVEFAVFRVLARVRALGSGGAEFAIFRVLARVRALGSGGAEFAVFRVLARVRALGSGGAEFAVFRVLARVRALGSGGAEFAVFRVLARVRALGSGGAEFAVAPLARPDCLSDSLCRVAPQSEWRRRRCPSVRLLYADGGYQLRIRRLEGTPNYGPRQLSNGIKIRKFLSN

SEQ ID NO: 67522 - protein, 54 aa, Zea mays
  Coding DNA Sequence Number=SeqID_24147
MAAGLACRYDSARRRRRVGPIIPGGPGRPPRAPPLRAVAGCTGGQEESPPPALP

SEQ ID NO: 67523 - protein, 73 aa, Zea mays
  Coding DNA Sequence Number=SeqID_24148
MARVACTLRGKRLEGGVLYSRKHGGYHGESNVYQPGQRLEGGVLYSRKHGGHHGYNFVLLWMVLSAGGLGLLI

SEQ ID NO: 67524 - protein, 189 aa, Zea mays
  Coding DNA Sequence Number=SeqID_24149
  Gene Ontology: Mol. function=sequence-specific DNA binding; Cellular component=intracellular; Biological process=regulation of transcription, DNA-dependent
  Homolog annotation: Hit_ID=A2YFZ9; Match level="QueryCoverage=78%, HitCoverage=78%, E-value=4e-34, Identity=46%"; Hit description =Putative uncharacterized protein
  Pfam annotation: Domain name=CBFD_NFYB_HMF; Domain location=43-97; Score=15.9; E_value=0.0055; Accession=PF00808.14; Description =Histone-like transcription factor (CBFNF-Y) and archaeal histone
  Subcellular localization annotation: CTP_CleavageSite=40; ConfidenceScore=5.53e-01
MGVGSQPYPAAAPYVPVPGSLAVPPGSHPAAAFPNPTQLSAQPRMGSHRVQQFIQQLKKQRTTACEVFILELTLRSWMHTEENKRRTLQKNDIAAAITRTDIYDFLVDIIPRDEMKEEGLGHNPIVGLPPAMGAPADHGSHPYYYVPAQQVQGAGMMYGGQQGHPVTYMWQTPQGQAAEPPEEEQQQSA

SEQ ID NO: 67525 - protein, 163 aa, Zea mays
  Coding DNA Sequence Number=SeqID_24150
MDYPAKGDKHSKPRQGSAADCRLDCSVLKREREGAHRCTHTFLPRHPLHSRETGIVTYLRRRTNCAGEEPPSAMHDDGETGVKMYDDTTRLESEIWLSPSLGTKLRKWGRPLTKERIDNDATPTAAIVAKLKSASGCKQNKTPVSGERTRSSPRTYTLTLLGH

SEQ ID NO: 67526 - protein, 186 aa, Zea mays
  Coding DNA Sequence Number=SeqID_24151
MSGKKGVGAAVRSFSFSLEDGAIETAVRSASLPRFGVFVSFCWVIHVHSLVDEVDNGVHRVGEAMIDRPSTLWGILSLASRGTMLRRAIGGVFVGAVHGFAAAPFGDPKGDFLSGEVAMRCRVPSTSAMQEMVPKQKTTPGLKVIMLLKTTAMEPALIDDAPPTWRASCRCFVFDSTRGYPRDAFG

SEQ ID NO: 67527 - protein, 94 aa, Zea mays
  Coding DNA Sequence Number=SeqID_24152
MAINSIDIIKFASGKIIHFGSISFTAISVDWLRNVGDTAVACESRAKGATCCACEIKPDRDKQVVTRRSRLAIEIRDYKDRGQRHKIFPSTARV

SEQ ID NO: 67528 - protein, 151 aa, Zea mays
  Coding DNA Sequence Number=SeqID_24153
MGKSKKGSGSSHRSGDKRKREPTPPSEDFGDSEYSEEEFSSKSEGSPAPASPPASSDDSDDSQGIAAEVWTYIRAVERSGLEGSDESEYSSDEEDSSDSSEEGSGDGGDSDDDEGDGDGGDDSGRGGDGGDEGGSGGSSKGSSKGSNKASG

SEQ ID NO: 67529 - protein, 87 aa, Zea mays
  Coding DNA Sequence Number=SeqID_24154
MQYKESSSLISYEKQTIRIEFLNLARPHRLGIQCSTDPDCRRAVVALVPTIASMGDPVSGRMRDKVHARLHSGQKGYFELQLLFNSG

SEQ ID NO: 67530 - protein, 105 aa, Zea mays
  Coding DNA Sequence Number=SeqID_24155
MSKSQLDAHQTPGSTAHWLAVLALVLASDDLLRLPAAPWPAADVEAGGSIRRIFYVAEPPKLLGPHAPILVLRISGYACAPNNLTGSVRMSQGPRINHLPPRSQD

SEQ ID NO: 67531 - protein, 168 aa, Zea mays
  Coding DNA Sequence Number=SeqID_24156
MALHELYDDGGPQLSYGSRTTLRRTTDSHDITPAGCPDLSGCHIGMAFSEKVGRAGPRTGQALSWGRSLPSPAWTLVTPLLQAHLTWARDEHEGRGTSTSLTLGSGRLASPPSALAHALDPSGLGHAAHSLVGLGTPLSRNADKSSLGLASRSPNSPPLLDTTSIRGV

SEQ ID NO: 67532 - protein, 169 aa, Zea mays
  Coding DNA Sequence Number=SeqID_24157
  Homolog annotation: Hit_ID=Q8SA97; Match level="QueryCoverage=26%, HitCoverage=8%, E-value=2e-07, Identity=62%"; Hit description =Ornithine carbamoyltransferase
MACSVRAQGRARRRLLLRSRPGSGEDAIPSEVEVEAEPWGRAMRRPSSEAEVEAEPWGWARRRPPSEAEAGAEPWGRARRRPPPETEAQGRARRSFLLRLRLNLAVVRLTLAGGIAVGEGRATLFSCQISLVICENEVVIMLVIYKYAYVVFTMFFMVEFYYNNIIIYA

SEQ ID NO: 67533 - protein, 100 aa, Zea mays
  Coding DNA Sequence Number=SeqID_24158
MDPYLGVVIIGAEVTRLDANINGAEVPAHRADVALTWPELGAMSIGADLVFMPTQRPTCIQAIKRIKQGSTFFAPMVAYADMRASICIYRLRRARIIKVQ

SEQ ID NO: 67534 - protein, 152 aa, Zea mays
  Coding DNA Sequence Number=SeqID_24159
METSDGRSTPLRRLRTHGEKCGLNLEPKDFPNTPSSIGATSASSSATTRYLRPTSRHPILHQCGSSTPSSIGAAASSSSATTRRLRPTTPYYKWCQSISDKWNVVGIEKHIHSGLRCMYSCKSGGNSRAEEDGQDEFEKDDFIVDDEEEVEE

SEQ ID NO: 67535 - protein, 196 aa, Zea mays
  Coding DNA Sequence Number=SeqID_24160
  Gene Ontology: Mol. function=selenium binding; Cellular component =cytoplasm; Biological process=protein transport
  Homolog annotation: Hit_ID=Q5NKQ4; Match level="QueryCoverage=56%, HitCoverage=51%, E-value=4e-37, Identity=90%"; Hit description =Putative selenium binding protein
  Pfam annotation: Domain name=SBP56; Domain location=1-193; Score= -217.3; E_value=6.3e-07; Accession=PF05694.2; Description=56kDa selenium binding protein (SBP56)
MAICRSGRVYVVDTATDPRAPSLHKVVESEDIAENTGLGFPHTSHCLASGDIMISCLGDKEGNAAGNGFLLLDSEFNVKGRGGSDPDAYAVVLKRKLDLYYAVVAKFGSVVTSAEAQKRLRLSYPFPELASFGRLEGQQQENEEIGTLVWGDTDLSDPQMFVSLITPPFPTMCHLFLTGGHELQKCTSMYNFILEP

SEQ ID NO: 67536 - protein, 147 aa, Zea mays
  Coding DNA Sequence Number=SeqID_24161
  Subcellular localization annotation: CTP_CleavageSite=79; ConfidenceScore=5.09e-01
MARARAYKTLPDLDCTLPRTLKPHRSLARRRLPVRSESAAAQSLCHRRPASGAILNSGQPSEKTVHTSVRLPERGIGVCFAGEASPRSPELSTPAGVRGPDCNLADGECILVPEQGAAQEVAPDPAPEPAPEDLPATALEGKPRFYA

SEQ ID NO: 67537 - protein, 170 aa, Zea mays
  Coding DNA Sequence Number=SeqID_24162
MEETHLHVFDAFCPRQSTLTRAPACPAPRPSQASAMARARAYKTLPDLDCTLPRTLKPHRSLARRRLPVRSESAAAQSLCHRRPASGAIPNSGQPSEKTVHTSVRLPERGIGVCFAGEASPRSPELSTPAGVRGPGSLEEMVAGITWSSTLPPGWTVEWDPASAEEEHEE

SEQ ID NO: 67538 - protein, 49 aa, Zea mays
  Coding DNA Sequence Number=SeqID_24163
MGDHVSGRVRGKVCGQVHSDNQSPWIVAHNQHQYDMKVGTINVLTSREC

SEQ ID NO: 67539 - protein, 136 aa, Zea mays
  Coding DNA Sequence Number=SeqID_24164
  Gene Ontology: Mol. function=kinase activity; Cellular component =ornithine carbamoyltransferase complex; Biological process=amino acid metabolic process
  Homolog annotation: Hit_ID=Q6QP54; Match level="QueryCoverage=86%, HitCoverage=37%, E-value=2e-26, Identity=57%"; Hit description =Putative kinase
MTAPPVDVTGLRPRLGDVEAPPKPRSNLSSVAEVESEPLVRARRSPSPGVRRSGVRRLLGAEPEFEPWGRAKRSSSSSGAELESEPWVGRSGVRRLPGLSPSPSPGSGGVEFAVFWGLARVRALGRAERSSPSSGA

SEQ ID NO: 67540 - protein, 116 aa, Zea mays
  Coding DNA Sequence Number=SeqID_24165
MERSRAGGGTTQARAEGELGLELGGINGEETHAHSCGRAEEGRWLLASRAEASGPGRSLATGWEEQGEAVAVQMRLAMGNGELTARARGRSGHGRAPAGNPAHKQRKPRPRGVKEN

SEQ ID NO: 67541 - protein, 104 aa, Zea mays
  Coding DNA Sequence Number=SeqID_24166
  Homolog annotation: Hit_ID=Q8W1D4; Match level="QueryCoverage=35%, HitCoverage=9%, E-value=2e-07, Identity=78%"; Hit description =Cinful1 polyprotein
  Subcellular localization annotation: CTP_CleavageSite=45; ConfidenceScore=5.10e-01
MVDARHPCSIPPACVLRRSAPWCCWVLDKMRSKPRATAASIRFVCAFENKSPTLAPTSGELTSTVELMASFNNQAEVASATMLVILITCGSCSEQANKKQKKEA

SEQ ID NO: 67542 - protein, 241 aa, Zea mays
  Coding DNA Sequence Number=SeqID_24167
  Gene Ontology: Mol. function=oxidoreductase activity; Cellular component=membrane; Biological process=electron transport
  Homolog annotation: Hit_ID=Q9ATU7; Match level="QueryCoverage=98%, HitCoverage=45%, E-value=5e-54, Identity=50%"; Hit description =Putative cytochrome P450
MSLVREICCRSCGARGEPAAAVNLDSMLVSCANYITGLATFGDHFSSEHKAKFLSAMAVVLSSGSGFCVSNLFPSMRFLDVATEMRRRLQVAHEQLDQVLDHIIEACEARQKVKNAEAAEDDDILSTMLRIKDEEEFDFPLNITHIKAVIIDLFIGGTETTSSVAEWVMSEFMRNPEAMAKPQAEVQRALDSKNPGDYESLMGCLSYTGMVIKETMRLHPSLPLLLPRLCSYSHVGGMIVK

SEQ ID NO: 67543 - protein, 78 aa, Zea mays
  Coding DNA Sequence Number=SeqID_24168
  Subcellular localization annotation: CTP_CleavageSite=53; ConfidenceScore=5.13e-01
MAHRSYSGSPEAFSPPFFPLCPWIRGLFPAIEFAVAPSSSLPNSGDPGATLARASLNSGDFTAVERSGAARSRLFPMV

SEQ ID NO: 67544 - protein, 98 aa, Zea mays
  Coding DNA Sequence Number=SeqID_24169
  Subcellular localization annotation: CTP_CleavageSite=48; ConfidenceScore=5.42e-01
MAHRSYSGPPNAFSSPFSPLCLWIRGLFPAIEFAMAPSSSLPNSGDPRATLAHVSLNSGDFTTAERSGAARSRLFPMCSGGDAGNMDNFEEFQEYDEF

SEQ ID NO: 67545 - protein, 231 aa, Zea mays
  Coding DNA Sequence Number=SeqID_24170
MSVVHTVLISCAASSAARLIHNKCKDRAAQRPYVRLHPLAYITGSVPHVSIGAPPERGAEAYAVWLEHMSAPDPRLALIKAWVFFVPESRDLLRVAWTPHTERSGTRPGGPVSTRGGPGPCPEVWSVYAGVWHFPMGLWTPADTLECIIFFGHVAAPEPSAWWGRVLFAMRLETATWTPRLHAVNYEYGAQPGRSLNQTKVECSRSCAQESFGAMAEGGTDLKMKRLRGPQ

SEQ ID NO: 67546 - protein, 175 aa, Zea mays
  Coding DNA Sequence Number=SeqID_24171
  Homolog annotation: Hit_ID=Q6J9V9; Match level="QueryCoverage=36%, HitCoverage=21%, E-value=8e-08, Identity=55%"; Hit description =Putative uncharacterized protein
MAERYQLPWSCVPPTTRRKDGGYPPSGGLEGGKTRCIGEREDMVAFQEGHPPFKGDSPYLRPQLSWAESSPTRSKVLPYGAGAGSHTSCKPAQSRRSQTAGPGKGDTPKRILPREGTRLRASLLIRGSKAGPSEGSNSRLRACGLTHPLLVRGSKAGPSEGFNGRLRLLGLRAHY

SEQ ID NO: 67547 - protein, 86 aa, Zea mays
  Coding DNA Sequence Number=SeqID_24172
MAMMGSTSGKDVPLPEESLGVVSLSESIKDHVDIGLLIEDPLTGHMPRHGIKVSLCNRFRIFVSPMICNVCVTGETLLGKVLVHGS

SEQ ID NO: 67548 - protein, 80 aa, Zea mays
  Coding DNA Sequence Number=SeqID_24173
MADTLSMQMILSFVSNITWKELHLKLSLYLYELLSGLKINFMRSDIFVINGTCDTAAQYADLFDCRIGVFPMKYLSSCET

SEQ ID NO: 67549 - protein, 938 aa, Zea mays
  Coding DNA Sequence Number=SeqID_24174
  Gene Ontology: Mol. function=sequence-specific DNA binding; Cellular component=nucleus; Biological process=regulation of transcription, DNA-dependent
  Homolog annotation: Hit_ID=Q60D94; Match level="QueryCoverage=54%, HitCoverage=96%, E-value=0.0, Identity=66%"; Hit description=Unknow protein
  Pfam annotation: Domain name=Homeobox; Domain location=710-773; Score= -0.4; E_value=0.012; Accession=PF00046.20; Description=Homeobox domain
MGPPLVIFFGLMIDMVSAVEELSGLSSKELNEMLKESDNFVLQSKAEGGGPKQTLVDMEKLVSSLPLHLIAVCLELRQGPDLTYVLRGMRFLHSLSDLASRHTRLEQVLLDDVKLSEQVMDLIFFLLSILAEQKKENNVGASPLVHASLVAASLHLLTSYFSSQWHELVHILLAHPKVDIFVDVAFDSLHEDVRLLNIRLSSMDFGIFPVGSLESRLAHFICQQCEASLQFLLLLCQQKLFRDRILRNKELSRNGGILSLSHTILKLAVPECLKQSTDLVASISRLKAKILSILLQLCEAESVSYLDEVATNSNSMRLGQTLALEVLNLLKIAFGKKKYITSDSHDKVKIYPMGSMLISALRLVDVFSDDSNFRSSFLTNTVPFLTQILATPHGEFVSSWCSVNLPAIEEDASLDYDPFVASEVALLASNNVLTEAKADYSCPFRPSLPSVAYAQTRTSCVVKIIANLHVFIPNICEEQERDLFLQNFQKYLVSGSSKLSADQPASSDFDATKVCRNLGSLSDYAKTLVPNLLNGEDLLLLSDFSDKLQSWCKSQVAVKVVQNDIPPESMEDMHPMQQPLPTRASTPDSKMNNFPKDVQNMEVSAPIPPINREGNDKDETPKNTVSRNGGFLQNAVGQDLVHLGVARTASGGSSAVTSVVSTGHQRSKMDLDPASGSVDNFKTPELTKENGLQGDDKGESSVYDERQPKRRKRNIMNSEQIDELEKALVDEPEMHRNPVLLQGWSEKLSLQGPEITSSQLKNWLNNRKAKLARIAKERGTFEGDNADKPSTPHPGESSESAGEDNYIPPARVMTAPSKGRLVSPDGNEKTSQAELSPNTMLIRPFTRSFSLEPGRLVSLVDSDGKEVGRGKIFQAPGKSPAPVESRICTVDVTELRTEKWRELPHPSEASGRTFQEAEARNGGIMRVSWDSGRLLPVV

SEQ ID NO: 67550 - protein, 510 aa, Zea mays
  Coding DNA Sequence Number=SeqID_24175
  Gene Ontology: Mol. function=sodium:hydrogen antiporter activity; Cellular component=integral to membrane; Biological process=sodium ion transport
  Homolog annotation: Hit_ID=Q2V8Y1; Match level="QueryCoverage=96%, HitCoverage=97%, E-value=0.0, Identity=74%"; Hit description =Sodium/hydrogen exchanger
  Pfam annotation: Domain name=Na_H_Exchanger; Domain location=22-408; Score=154.5; E_value=3e-43; Accession=PF00999.12; Description =Sodiumhydrogen exchanger family
MGLGAAMALALGDPPADYASIAAVGLFVALMCVCIVVGHLLEENRWMNESITALFIGLGTGAVILFASSGKHSRVLVFSEDLFFIYLLPPIIFNAGFQVKKKQFFRNFITITLFGAVGTLISFTVISLGALGLISRLNIGALELGDYLALGAIFSATDSVCTLQVLSQDETPFLYSLVFGEGVVNDATSVVLFNAIQNFDPGNISSAKLLNFIGSFLYLFGSSTILGVASGLLSAYTIKKLYFGRHSTDREVSIMMLMAYLSYMLAELLDLSGILTVFFCGIVMSHYTWHNVTESSRVTTNPVKSIALSSTILALVLVSRAAFVFPLSFVSNLTKKTPNGKISFRQQVIVWWAGLMRGAVSIALAYNKFTRSGHTQQPSNAIMITSTISVVLFSTIVFGLLTKPLIRLLIPSRHLSREPSALSEPSSPKSFFEQLAANSPGHPDLENGISLRRPASLRFLLVSPARSVHHYWRKFDDSFMRPVFGGRGFVPFVPGSPTESSLPLLPGNEN

SEQ ID NO: 67551 - protein, 638 aa, Zea mays
  Coding DNA Sequence Number=SeqID_24176
  Gene Ontology: Mol. function=microtubule motor activity; Cellular component=microtubule associated complex; Biological process =microtubule-based movement
  Homolog annotation: Hit_ID=A3BXJ1; Match level="QueryCoverage=86%, HitCoverage=41%, E-value=1e-152, Identity=59%"; Hit description =Putative uncharacterized protein
  Pfam annotation: Domain name=Kinesin; Domain location=67-393; Score =412.0; E_value=9e-121; Accession=PF00225.14; Description=Kinesin motor domain
MEGHVPLPLPLLPDGETAVGYSKDDASSPLQEEISSLRSRQRRVDRRRREALDRLVELKGSVRVFCRVRPLAHTNSLHAQSSPVTVEQERITVKAAGIKREFGADRVFGQESTQEDVFEEVKPILRSALDGHNVCILAYGQTGTGKTYTMEGTGGNKLGVVPRAIQELFSRASEDGSCAYSFSMSMLEVYLGSLRDLLAAPRQPLFRRTECKAAACSSSLSILATKGGAVEVEGLTDVSTPDLKNASQWYRRGRRARSTAWTNVNDASSRSHCLTRITIRRRMRHGGGGGVSKLWLVDLGGSERLLKTGASGLTMDEGKAINLSLSALGDVIAALRRKRPHVPYRNSKLTQILSDSLGDGSKVVMVVHVSLSEDDVGETVCSLNLAKRARSIEPNREIPQDLKTLKQKRVAELDREIRAAEEELKRLDEQIRRAEEKEISLEEEEEEEEEKKLFASSVCQALSDDEKGSPRSTLVVVGHTDAAESPRATTEKAKGRRPPPARGHGGSAAPHFMSSTVCSRQRRCAGGYHSVGNGKPRLTAVSVNRYPPPAAELSGSQNAAARASRSASVALSSGVHKLRCLRVNKSDQVNVISNSSVDSTAASAPPPRRRESCFGSRPVLQRAAAPLHLHRRRMSSLT

SEQ ID NO: 67552 - protein, 203 aa, Zea mays
  Coding DNA Sequence Number=SeqID_24177
MANPPRAELPRGKDPDGHEVEKFGLRDDRHVVTCERQLTVGVDLEEITAADELEAFLLGAISILPASRVRRRIVERIRKQEKQELGHGKAEAAKKRSTLWDIPEPDTVSKKRPVSTRRLFPKHRRDTSSPGSYFQKHRRATSSPGSYFQKHWCATSSLGYYPQSGPRSTLSLGVTSKTPTSPSSRSAVDSKTPTSCSVTRRHL

SEQ ID NO: 67553 - protein, 234 aa, Zea mays
  Coding DNA Sequence Number=SeqID_24178
MAPLYGGSSAGKSDLCCGRLLNVVGRPGLHQSGLMSTCFADCPSPGPRKNDLTIYWALGPFVRSFTLPVDPGDICPPQAPNLWVDFEVISPKIPGPACRTLNFIGCTGGIHCMPCTDVTVFKNILIIPGRPPQWVWARDGLGLAAEVWTYIRAVERSGLEGSDESEYSSDEEDSSEEDGGGDGEDDDDDDEGGGGGDGDGGGRGGSSGGKDGDGGSSRSGSGGGSGRGSNRASG

SEQ ID NO: 67554 - protein, 28 aa, Zea mays
  Coding DNA Sequence Number=SeqID_24179
MARRCADFEESLTLKRKKNISSLLPATI

SEQ ID NO: 67555 - protein, 892 aa, Zea mays
  Coding DNA Sequence Number=SeqID_24180
  Gene Ontology: Mol. function=RNA-directed DNA polymerase activity; Biological process=RNA-dependent DNA replication
  Homolog annotation: Hit_ID=Q8LJX1; Match level="QueryCoverage=13%, HitCoverage=6%, E-value=3e-09, Identity=33%"; Hit description =Putative reverse transcriptase
  Subcellular localization annotation: CTP_CleavageSite=35; ConfidenceScore=5.09e-01
MAGDERHQAAPWPASLDAGGFKVLSLANRVFRFTVSSKDVGFHIYNSRCIVRPEFKAFFNLWNSGGPNWNYDLRLFLQEENANWWFVKGRKKISFADMVRRPPLTGANAVPIRRHNPPSRFAGNLNAPRISVFNRLGSSSGARGSRFLVTTPALGVSSHALHRRLFPSVGLPRLNRCMIGRGRQGRDDCSSSISNSAAGLPRIRRLHWRPILRNGPLRPGPGPSAHPNLGRTDLSGSVSSAFLCQFCKARGHLELFCNRKKSEFGFPLSSFPSFESNCLLEGSSRLLDFGSWFRPSPGSLTGGTPPTFACFGEFARAVLLKIYEQAPETSLELSLGVTSPKPQTAPLLLALRRPSKNLSMAYRRVDPEPFLPPGFSAAVVQHRGIMVRSVSQRLPPMHEDWAIINIHPLPEHEVLFPAVKDVVREYLVEHRRVGVRAIQRSHLGQVIVQFRSVLEWDNLVLLGPQQYLDATFTAAEGFAGDSWTVQCEIIQQLMLGGQAQDEDPIPPAPEDGHQLPLVFFGLGQPVPPAGFDLNFPPEPAGRELPAQQDDFGQGDWDQWIVNDQPNQQAPLPILPEEQHIQQDEIQLSNQHSGLSSDSSIGAGQLAPLPNGHFVENGHVLLGDAPLFGPQEVDGPVHQVDHVHDLEDLPHQAHVGEPNNNHPQNLEMNFMFSQEWLPDPVFHMFEERKRAAQFSRLWAKYFAPAGSADHSVDIPKKWAPFFLSNLLQPDAFNWSKTFLLSDIPSTLQEQGMKSIPFVVPKECPNDSSLADVISGISKDSGGCGGPSPIIVESELRRSKRLKESRVGLRQGACPKRDCIMCQHNFDAPPPLSSKVLRNLGSRFCNLSEDDLSEHRLKQKKSDVGPVGQRRVGRKDLEDDKTDDSSDEDMQDKQ

SEQ ID NO: 67556 - protein, 216 aa, Zea mays
  Coding DNA Sequence Number=SeqID_24181
MESHRREASSPSDPVEKGPGPANHLQRQQTSSKTRNLIKRPGYGQAAWGNNRTGRGIMKSVKTSEESHHSSEASGATPGGCARAHPSEQSITKKGRSPHQECGRASKRASPLPSRLEGYCRVPKLGENSVARPAPAAMPTTRAKPTTVKLSLGRNRKLRLARPRGSASASTSASGRVTSSPDPGPRPQPRPRRSRRLVRPQARINHATGDASLPYS

SEQ ID NO: 67557 - protein, 221 aa, Zea mays
  Coding DNA Sequence Number=SeqID_24182
MATSRSYSHRQLHRGSLNTSYAARAVLVFWDGLGEDGSEETCRRALGRPLFAGAVSVGSIPWTTPSDSSALTTCARPSCGDVGEGPFTAASVLRSSLLLFSRPRWRSLSLLPQRSSASRLKFVIPRGPSVEVVHTRGNGTGVPFNLWPLCDEPKPKVAVAWTEAMSARTEAFSMRGQMASQAEEDQSRSQATKAVSQFEIFGGQLAGASERPAEAPARFTV

SEQ ID NO: 67558 - protein, 337 aa, Zea mays
  Coding DNA Sequence Number=SeqID_24183
  Gene Ontology: Mol. function=catalytic activity; Cellular component =membrane; Biological process=plant-type hypersensitive response
  Homolog annotation: Hit_ID=Q5N7Q9; Match level="QueryCoverage=86%, HitCoverage=84%, E-value=8e-98, Identity=61%"; Hit description =Phosphatidic acid phosphatase beta-like
  Pfam annotation: Domain name=PAP2; Domain location=116-273; Score =112.2; E_value=1.6e-30; Accession=PF01569.12; Description=PAP2 superfamily
MADQPEEMPAAPAIRLGPPHPYLKTHGGKVARLHRLDWAVLLLIAAADVGLNLVEPFHRFVGEDMLADLRYPLKSNTVPVWAVPVYAVIGPIVVFVGLYLKRRNVYDMHHAILGKLPVCLLFSVLITGVLTDAIKDGVGRPRPNFFWRCFPDGVPKYDNITRGVLCDGVASVIKEGHKSFPSGHSSWSFAGLGFLSWYLAGKVKAFDRRGHVAKLCVVLLPLLLAAMVAVSRVDDYWHHWQDVFAGGILGRHFPDTSSFNCLTCTPSAYRLSSLLQGWWLRLSATFSFSHRHLVNKDSGPMRTPSTFSTLSARAKRSQQRAPTTTDACPAEATWQWR

SEQ ID NO: 67559 - protein, 396 aa, Zea mays
  Coding DNA Sequence Number=SeqID_24184
  Gene Ontology: Mol. function=metal ion binding; Cellular component =nucleus; Biological process=regulation of transcription, DNA -dependent
  Homolog annotation: Hit_ID=Q5N7R4; Match level="QueryCoverage=50%, HitCoverage=64%, E-value=5e-56, Identity=52%"; Hit description=RING -H2 finger protein RHG1a-like
  Pfam annotation: Domain name=zf-C3HC4; Domain location=356-389; Score= 21.3; E_value=0.00034; Accession=PF00097.16; Description=Zinc finger, C3HC4 type (RING finger)
MWRRLDRGTALTLTDSTVGYENKQHSENLKGRHGFGQLTPSHVKTGSCDLIAKGSPGAERRRVALRALLASGGAEAEAARTSSKGLLRGLRCTSAAASQAIAPEIPRPPADWRGLGCAAAAQAHAPAAAVEAARPTADWRRLGCAAGAAPAVQAQAPRRSEEWRVRRRRNERERRKARAGGVSGGGGASAGMGVGGDVWCTPGIPFAAEASSVDCVVAPHHTVAARRRAEADRPRRERPGAPPARRVTMREHMSSSPLSSPPHHVMPFVDVDRAPSGRIRHVSGRRHSHARVEEEMMFQTRMLLGRMGIYDQYQDWRLDVDNMTYEELLDLEDRIGYVSTGLREDEIIQSLRMEEFEVHEETGKLSCGHSYHVHCIKQWLSRKNACPVCKTTVSKT

SEQ ID NO: 67560 - protein, 310 aa, Zea mays
  Coding DNA Sequence Number=SeqID_24185
MGLGVCGSLCQVWGSPLGEECGGNEIDGSGYDYGIGKCHLERLHHRLREEQERRRQEQQSSSFSLHQEIESVRSCSPVLPLEAPPAPPLGVPASGVAAGGDPDDGGGDDSSSHDTDFSANPEPEGWVARPITRDAARGCHFHDALDTLLRRAFDRHTWSVEGWRLAQSTILSLSGTQLRQPCKMLHGVRFSHYCSVFGGAADGLDLKYYPRRSSGSTGGVIVSPVGEGNPRLSSTVNLAAVLNTELDHALDELSRARAEIALLRAERAERRHLDGGSPAPVGTQHPYRSPQRGHQSYGNPACKTKINLEP

SEQ ID NO: 67561 - protein, 311 aa, Zea mays
  Coding DNA Sequence Number=SeqID_24186
  Gene Ontology: Cellular component=endoplasmic reticulum
  Homolog annotation: Hit_ID=A2Y765; Match level="QueryCoverage=71%, HitCoverage=98%, E-value=6e-73, Identity=63%"; Hit description =Putative uncharacterized protein
  Pfam annotation: Domain name=Reticulon; Domain location=125-309; Score=174.3; E_value=3.2e-49; Accession=PF02453.8; Description =Reticulon
MAPIEHGTRRGCVRRWPKVRFGGSAKISHAVATALASQLYRITLTGLQAQEASGPTDEYNPWAVGTPSAEAILAPHIRSSLCTMSKAKLPHVETDSSGDDDGPKPRLVFRRRMRTPVKLLGGRKVSDVLLWRNRNLSAGILAGATLVWFLFDVAEYNVVTLLCHVALLGMVLLFVWSNAAPLLDRPPPQIPEVIVSEHAFREAARTTHYRLAHFVSVLYDVACGKDLKKFLMDAENPWTVCTRIFLTVCHGFPGWLGLLCALTLPALYERYEAEVDHLVAKGREDLKKFYRKVDSNVLNKIPRGPVKTKAL

SEQ ID NO: 67562 - protein, 282 aa, Zea mays
  Coding DNA Sequence Number=SeqID_24187
  Gene Ontology: Mol. function=aminoacyl-tRNA hydrolase activity; Cellular component=mitochondrion; Biological process=translation
  Homolog annotation: Hit_ID=Q5N9Q7; Match level="QueryCoverage=80%, HitCoverage=80%, E-value=8e-74, Identity=65%"; Hit description =Peptidyl-tRNA hydrolase, mitochondrial precursor
  Pfam annotation: Domain name=Pept_tRNA_hydro; Domain location=63-272; Score=183.3; E_value=6e-52; Accession=PF01195.10; Description =Peptidyl-tRNA hydrolase
  Subcellular localization annotation: CTP_CleavageSite=47; ConfidenceScore=5.62e-01
MRLFSGVLDSSSALASAVLGSVSDRLGFSRIVFGRASPSNMPALACSAASSSSAATGAQKPWLFVGLGNPGRMYKGTRHNVGFEMIDAIAEAEGISVSSKQFKAIVGKESSLIGDVPVMLAKPQTFMNASGESVGQLVSYFKIPLNQLVVVIVVLELIYDDLDLPFAKLRLLPKGGHGGHNGMRSIVDHLNQSRDFGRLRIGIGVKYEICPPPQKCFVGIGRPPEELGAINFVLRSFTKQEKEELEVTFQRSLQAVRIMVREGFNKSAQFVNTPQPPEMLNR

SEQ ID NO: 67563 - protein, 123 aa, Zea mays
  Coding DNA Sequence Number=SeqID_24188
  Subcellular localization annotation: CTP_CleavageSite=15; ConfidenceScore=5.11e-01
MAGTCLGAWRRWCSRCAAYSPAVGGRGRGRKRRSHSKAVWWQRLQRKRRDFSAGLSSSRGNAAVLAQALDLGLNWEGFGIEDDMFCGVFDRAPADAGKWPASWRRDYSSLHDPRASGLGVPTR

SEQ ID NO: 67564 - protein, 828 aa, Zea mays
  Coding DNA Sequence Number=SeqID_24189
  Gene Ontology: Mol. function=transferase activity; Cellular component= membrane; Biological process=metabolic process
  Homolog annotation: Hit_ID=Q33AH8; Match level="QueryCoverage=97%, HitCoverage=93%, E-value=0.0, Identity=80%"; Hit description =Exostosin family protein, putative, expressed
  Pfam annotation: Domain name=Exostosin; Domain location=464-768; Score=189.4; E_value=9e-54; Accession=PF03016.6; Description =Exostosin family
  Pfam annotation: Domain name=Exostosin; Domain location=51-335; Score= 170.3; E_value=5e-48; Accession=PF03016.6; Description=Exostosin family
  Pfam module annotation: Pfam domain module=Exostosin::Exostosin; Domain location=464-768::51-335
MGKGSARALALALAVILACSDVAVVTAQETERIEGSAGDVLEDDPVGRLKVYVYDLPSKYNKKLLKKDPRCLNHMFAAEIFMHRFLLSSAVRTFNPEEADWFYTPVYTTCDLTPKGLPLPFKSPRMMRSAIQLIATNWPYWNRSEGADHFFVTPHDFGACFHYQTFGQKNHVCLKDGSITIPPYAPPQKMQTHLIPPDTPRSIFVYFRGLFYDTGNDPEGGYYARGARASVWENFKNNPLFDISTDHPPTYYEDMQRSVFCLCPLGWAPWSPRLVEAVVFGCIPVIIADDIVLPFADAIPWEEIGVFVAEDDVPQLDSILTSIPTDVVLRKQRLLANPSMKQAMLFPQPAQPGDAFHQILNGLARKLPHGSNVFLKPGRNHCRSADSAFLLTPEQLPPAREWRGRQAPRPMGGTGSATAAQALALAALLLACSGVAVVTAQDIERIQGSAGDVLEDDPVGRLKVYVYELPPKYNKNVVAKDSRCLSHMFATEIFMHRFLLASAVRTLNPDEADWFYTPVYTTCDLTPWGHPLTVKSPRMMRSAIQYVSKRWPYWNRTEGADHFFVTPHDFGACFYFQEEKAIQRGVLPVLRRATLVQTFGQKNHVCLREGSITIPPYAPPHKIRAHIVPPETPRSIFVYFRGLFYDTANDPEGGYYARGARASVWENFKNNALFDISTEHPPTYYEDMQRAIFCLCPLGWAPWSPRLVEAVVFGCIPVIIADDIVLPFADAIPWEEIAVFVPEDDVLRLDTILTSIPMDEILRKQRLLANPSMKQAMLFPQPAEPRDAFHQVLNGLARKLPHPKDVFLKPGQKVLNWTEGAQDDLKPW

SEQ ID NO: 67565 - protein, 72 aa, Zea mays
  Coding DNA Sequence Number=SeqID_24190
MACVYSREVLPPTDLDLAFPGAQATLARRLVWWLSKPDGVQCKRGTHWHVWQLCRADWQGMMDGDEGAAPIE

SEQ ID NO: 67566 - protein, 406 aa, Zea mays
  Coding DNA Sequence Number=SeqID_24191
  Gene Ontology: Mol. function=transcription factor activity; Cellular component=nucleus; Biological process=regulation of transcription, DNA-dependent
  Homolog annotation: Hit_ID=A2Y761; Match level="QueryCoverage=99%, HitCoverage=99%, E-value=1e-114, Identity=58%"; Hit description =Putative uncharacterized protein
  Pfam annotation: Domain name=AP2; Domain location=72-121; Score=52.1; E_value=1.9e-12; Accession=PF00847.11; Description=AP2 domain
  Pfam annotation: Domain name=B3; Domain location=205-321; Score =104.3; E_value=3.8e-28; Accession=PF02362.12; Description=B3 DNA binding domain
  Pfam module annotation: Pfam domain module=AP2::B3; Domain location =72-121::205-321
  Subcellular localization annotation: CTP_CleavageSite=41; ConfidenceScore=5.37e-01
MDSTSCLVDDASSGASTGKKPAPAPAAATGKPLQRVGSGTSAVMDAAEPGAEADSGGAGRAPGGVSGKLPSSKYKGVVPQPNGRWGAQIYERHQRVWLGTFTGEAEAARAYDVAAQRFRGRDAVTNFRPLAESEPEAAVELRFLASRSKAEVVDMLRKHTYGEELAHNRRAFAAASPAASPPPENNRRPPAASSSSSPAAAREHLFDKTVTPSDVGKLNRLVIPKQHAEKHFPLQLPAAAAAGVGSGGECKGVLLNFEDAAGKAWRFRYSYWNSSQSYVLTKGWSRFVKEKGLHAGDAVGFYRSAGGKQQLFIDCKLRPNKTTTTAAAFVNVNAMTTTAAPPLAAVKAVRLFGVDLLTTPRPAAVAPEQEEVTVANKRARDAMATAASTPAPVHMVFKKQCIDFAR

SEQ ID NO: 67567 - protein, 177 aa, Zea mays
  Coding DNA Sequence Number=SeqID_24192
  Gene Ontology: Mol. function=nucleic acid binding; Cellular component= ribonucleoprotein complex; Biological process=lipid transport
  Homolog annotation: Hit_ID=A2Y769; Match level="QueryCoverage=35%, HitCoverage=65%, E-value=1e-26, Identity=79%"; Hit description =Putative uncharacterized protein
  Pfam annotation: Domain name=LSM; Domain location=98-148; Score=27.6; E_value=4.4e-05; Accession=PF01423.13; Description=LSM domain
  Pfam annotation: Domain name=Tryp_alpha_amyl; Domain location=32-96; Score=18.3; E_value=0.0055; Accession=PF00234.13; Description =Protease inhibitorseed storageLTP f
  Pfam module annotation: Pfam domain module=LSM::Tryp_alpha_amyl; Domain location=98-148::32-96
MAESKARVALFLAALAAASLLALAPAGAATTCAPTQLTPCAPAIVGNAAPTAACCARLKAHPATCFCQYKRNPSMQRYVNSPNGKKVFAACKMASGGPALEPLVDQVISVITNDGRNIVGTLRGFDQATNIILDESHERVYSRKFYVKSEKTDQRLNAKKVVHNGLTFYRFNNHALN

SEQ ID NO: 67568 - protein, 989 aa, Zea mays
  Coding DNA Sequence Number=SeqID_24193
  Gene Ontology: Mol. function=metal ion binding; Cellular component =cytoplasm
  Homolog annotation: Hit_ID=A2Y772; Match level="QueryCoverage=93%, HitCoverage=92%, E-value=0.0, Identity=66%"; Hit description =Putative uncharacterized protein
  Pfam annotation: Domain name=Hemerythrin; Domain location=105-166; Score=30.8; E_value=4.8e-06; Accession=PF01814.14; Description =Hemerythrin
  Pfam annotation: Domain name=Hemerythrin; Domain location=277-339; Score=20.5; E_value=0.0061; Accession=PF01814.14; Description =Hemerythrin
  Pfam annotation: Domain name=Hemerythrin; Domain location=342-408; Score=11.5; E_value=1.6; Accession=PF01814.14; Description =Hemerythrin
  Pfam annotation: Domain name=Hemerythrin; Domain location=35-97; Score=31.0; E_value=4.4e-06; Accession=PF01814.14; Description =Hemerythrin
  Pfam annotation: Domain name=Hemerythrin; Domain location=502-563; Score=32.4; E_value=1.6e-06; Accession=PF01814.14; Description =Hemerythrin
  Pfam annotation: Domain name=Hemerythrin; Domain location=573-661; Score=26.8; E_value=7.8e-05; Accession=PF01814.14; Description =Hemerythrin
  Pfam annotation: Domain name=zf-CHY; Domain location=843-920; Score =148.1; E_value=2.5e-41; Accession=PF05495.3; Description=CHY zinc finger
  Pfam module annotation: Pfam domain module=Hemerythrin::Hemerythrin::H emerythrin::Hemerythrin::Hemerythrin::Hemerythrin::zf-CHY; Domain location=105-166::277-339::342-408::35-97::502-563::573-661::843-920
MATPLAGKGPIAAAIPRSPPPLAEGGAGGSAAEAPVLIFVYFHKAIRAELERMHAAAVRLAMGRAGGDVATLEARCRFLFTVYRHHCDAEDAVIFPALDIRVKNVAGTYSLEHKGENDLFAHLFTLLQLDVQNDNAIRRELASCTGAIRTFVSQHMSKEEEQVFPLLIKKFSHEEQADLVWQFLCSIPVNMMAKFLPWISASVSTDENQDILDCLSKIVPEEKLLQEVVFTWFGGKSESSSTCESSSGQTDKHAHSLEHTKIGKRKSIESSQLVTHPIDEILYWHNAVLRELSDIAEETKRIHQSGDFSDIAGFNMRLQFIADVCIFHSIAEDQVIFPAVDGELSFVQEHAEEERRLNKFRSLIEQIQLAGAKSTVVDFHSELCSQADQIMQKIESHFNDEEIKVVWRTHPTLESSYAWHQERSLVRQMGMVSKHASHSVHVIACYIPRLRVESSYLGVHSSTPTKSFRPLSFNYVAPSLYSSLFSWDTDTLVSGPDNISKPIDTIFKFHKAIRKDLEFLDLESGKLIDGNESCLSQFIGRFRLLWGLYRAHSNAEDEIVFPALESKEALHNVSHSYTLDHKQEEKLFQDISTVLSELSQLHDGLSYPLDVEAGTNDISSNEIDWARKRNELLTKLQGLCKSIRVTLSNHVHREELELWPLFDKHFSVDEQDKIIGHIIGTTGAEVLQSMLPWVTSALSLEEQNMMLDTWKQATKNTMFDEWLNEWWKGPSTSSDPSDKASTPSEESHFQENLEQNDQMFRPGWKDIFRMNQSELEAEIRKVSRDSTLDPRRKAYLIQNLMTSRWIAAQQKSPQPSVEGHNGCTRRPGCVASYRDPGKQIFGCEHYKRNCKLVAACCDKLFTCRFCHDKVSDHTMDRKSVMEMMCMQCLNVQPVGPNCQSPSCNGLSMAKYYCSICKFFDDERYGSLVAFWFAIMDGVYFGMLDGLLAAEQLPEEYQDRCQLFPGNISVCISDTVGDLLNTVPNSSRLS

SEQ ID NO: 67569 - protein, 17 aa, Zea mays
  Coding DNA Sequence Number=SeqID_24194
MWFLKEKGDQVAELVLF

SEQ ID NO: 67570 - protein, 122 aa, Zea mays
  Coding DNA Sequence Number=SeqID_24195
MAHRTLSGVHRTVRVYMAVIRKLQTVGYSSHTTSDQIWSDVLEAQFMICADLPASSCGLERAPGVDVQALASRIALATNQRAELEGLSYRPSCVRVTERKEVAILCEFVHHNQNAVHMLRPG

SEQ ID NO: 67571 - protein, 349 aa, Zea mays
  Coding DNA Sequence Number=SeqID_24196
MGGLGARLLRGEGSLSGYPLSRSLLQEIEKEENGKGVNATGRVVGEAVVAIRSRNGSRVHRLHAVRGGSLAVSRWDQLTHRLLDAWAWVPKLACQKSEKRVHLARLHAASGLHDMRDPAPESQGRALERVGEDSARGVWGPRMGGIRRLSASSLEERNSMGVGTFQPSFGFKDFHHAARLLPSAGGLGRGVRRDGVGPCVGGGPLLHSVMGGEAGIARGVRQLQRAWSSAASGFGATCGAGVCHGSWKRFFRRRGGRDRPRADLQLLRPSARPCLTSFGMGGGFLAAASTLRSALPLFGPPEQKSSSSPLLEQESLGPFGLVVWGSSSLVDETPRPPFGGPRPGVAISV

SEQ ID NO: 67572 - protein, 65 aa, Zea mays
  Coding DNA Sequence Number=SeqID_24197
  Subcellular localization annotation: CTP_CleavageSite=45; ConfidenceScore=5.11e-01
MAVMGSTSEKMYLCQVRKQQTFVVSIQRWYPRMSPSSEVRRGRMLASHIENNTLLCGRVFCLPGL

SEQ ID NO: 67573 - protein, 193 aa, Zea mays
  Coding DNA Sequence Number=SeqID_24198
  Homolog annotation: Hit_ID=A2YTJ5; Match level="QueryCoverage=39%, HitCoverage=39%, E-value=1e-18, Identity=59%"; Hit description =Putative uncharacterized protein
MERMLNERLPTTGGRRLRHHDPEGFNPEESRDENSGFSHEFDPFGDGRRGYGDGRRADFDNPCGRCRAHGRQVRFEDEEYEDRNRDEGSDENPFANEGMFGRRRHHRHADFENRDHYHGRRHRNDLDHIGRVKLDIPKFTGKESADEYLNWAEQRDQFFRVHNFSDQHRVNLASVEFFWLCSYLVESTARTST

SEQ ID NO: 67574 - protein, 78 aa, Zea mays
  Coding DNA Sequence Number=SeqID_24199
METPVTAALRPCAACLPFPPHRHNLPLLTVDRRSKCHASGHNVKKKWKSPKKGHHHPRILRQATASTLIFVDPSQTHL

SEQ ID NO: 67575 - protein, 361 aa, Zea mays
  Coding DNA Sequence Number=SeqID_24200
MNENGDLQDRIGIQMGQVKMVEIKEAAEKGRNGKTEAAEKERSINHGLMGILSWDSNPMANPPRTEFPRRKNPDGHEVEKFRLRDDGHVESPRQTNSRPSSWAPSRFYRRAEWEANCREDLEARKQELGHGKQRRLKAQHLWDIPEPDTVSKSAQSAPDGYFQNTGVPRDHPAVISRTPDQWHLATGPVVAAAAAAPVAAPAAAATAAAAPTAAAVTVTAATAFVVVVVVVVAVLVLTATVQVHLIRGVLRLIRALEPGALDGPDVRPDLRREPGAGDPSDSEENSSSEYSESPKSSDGGVGSRLRLLFLPMVEAKGREEKQATENSKRCEKAGETTTLFIEGEGNRSPPTTVTEQSQSIQ

SEQ ID NO: 67576 - protein, 147 aa, Zea mays
  Coding DNA Sequence Number=SeqID_24201
  Subcellular localization annotation: CTP_CleavageSite=35; ConfidenceScore=5.30e-01
MARARAYKTLPDFDCTLPRTLKPHRSSARRRLPVRSESAAAQSLCHRRPARRAIPNPIQPSEKTVHTSVKLPEQGIGVCFAREASPRSPELSTPPEYVDRDCNLADGEYILVPEQGAAQEVAPDPAPEPAPEDLPATALEGKPRFYA

SEQ ID NO: 67577 - protein, 221 aa, Zea mays
  Coding DNA Sequence Number=SeqID_24202
MRLILRYLFLTCGGCETARVSPHTFIAQQVVGNNVHELAKGHQWVKDVIKGTTCLGLEIPAEEVSEKISRWIRNHWHRLDLHFIEPGRRSGFISSPARIESRGPRVPWQGGRQEAVVLHQARRVVTSSGHILDCGEEKSDAWAPHVIVVDFGWVVGKVTARWDPAGLLERPVTSTRIPGFSSCEREGEGTIPTAGPHAAVAEPVRGSGARPWRLRKQVVVD

SEQ ID NO: 67578 - protein, 68 aa, Zea mays
  Coding DNA Sequence Number=SeqID_24203
MELLSKSYPTKEKTLKGMLVIWESRAILSIVKPFCKNRVSRKQASEKDFKNIKGGGKCTGVCLRSQGK

SEQ ID NO: 67579 - protein, 265 aa, Zea mays
  Coding DNA Sequence Number=SeqID_24204
  Subcellular localization annotation: CTP_CleavageSite=70; ConfidenceScore=5.16e-01
MEETHLHVFDAFCPRQSTLARAPTCPAPRPSQASAVARTRAYKTRPDFDCTLPRTLKPHRSSARRRLPVRSESAAAQSLCHRRPARRAIPNPIQPSEKTVHTSVKLPEQGIGVCFAGEASPRSPELSTPPEYVDRVNHSTILRFLVHTVATLPREAHHALGLNQFAVVWPVYSPPTRTPACTRGPGDSGHPRRQAVPRRDRQSLLEPTPPFAGPPSPPDCNLADGEYILVPEQGAAQEVAPDLAPEPAPEDLPATALEGKPRFYA

SEQ ID NO: 67580 - protein, 207 aa, Zea mays
  Coding DNA Sequence Number=SeqID_24205
MAERYQLPWELRSSNEEAKRRRIPPHPGGLEDGKTRRLREEEDMVALRKEPPPFKGNSPYVRPQAPRAESSPTRSKALPCDSGAGSRMSCKPAQGRRSQTAAHGTGKGGYPERDPSPRRNRAPSPPLLIRGSKAGPPRVQQSPQIAWARHPLLVRGSKASPPKGSMAASGYSGSAPITDQGFEGWPPKGFTVASDTERGMTRGTFDT

SEQ ID NO: 67581 - protein, 62 aa, Zea mays
  Coding DNA Sequence Number=SeqID_24206
MAASKIEVAGYDIDDKNLKSTARKKVTAGSELSAADATVAVVNLRLTWYRFTPTVILKGNFH

SEQ ID NO: 67582 - protein, 85 aa, Zea mays
  Coding DNA Sequence Number=SeqID_24207
  Gene Ontology: Cellular component=membrane
  Homolog annotation: Hit_ID=Q2QPU1; Match level="QueryCoverage=69%, HitCoverage=15%, E-value=6e-16, Identity=76%"; Hit description =Nodulin, putative, expressed
MERVKLRSASGIAKVAGVALCLAGVFTIALYTGPSVSPINHHRAFASQDPAPKPVVVPRGYGSNGRCSWWSMMLLETSMLLCSDT

SEQ ID NO: 67583 - protein, 239 aa, Zea mays
  Coding DNA Sequence Number=SeqID_24208
  Subcellular localization annotation: CTP_CleavageSite=42; ConfidenceScore=5.51e-01
MAFLSPSAHGARFSLAPGQNFLRREACSLRPSHMALGRPAVSSSLRSDFLYSLANSPQPQLEFLLCRARSSALTARLAHGRRSPSSPYARTSARISSGLRAPLRALLLQLRAAVILLAPRRLLASAQRSAFWCSPCLLKRELSRVPLSRALVVLHFAHRGALAPALSTRLGFNSQSCPLYTSPSCVVVVPRVAKKFQESSEDGASNMVFTKCATKSSDILCDSSSIRQTYSVEEKIFSN

SEQ ID NO: 67584 - protein, 39 aa, Zea mays
  Coding DNA Sequence Number=SeqID_24209
MVGLQVVMRMMVFDYDYGNGKQGVEADLLEFQDVDEFED

SEQ ID NO: 67585 - protein, 86 aa, Zea mays
  Coding DNA Sequence Number=SeqID_24210
MEVLTLIGLNSPRSVLLVVIATFLSYCLLAAKSSVTYLLLPARLQERVGSFSVVSNGEKGASALTATELNAAVYRYLQESGFRTII

SEQ ID NO: 67586 - protein, 262 aa, Zea mays
  Coding DNA Sequence Number=SeqID_24211
MDLERMDETSSVNDQSAERRPTVAGGGGGAMPWLDLTLAVTAPRDEFPATTTGTPRPPPQTASRAPSPCPCRPLLLLLLPPRPRRTRCSRATSACASSSARRRWAGTRTRTSGSAARPSAPPRRRPPTSTSTTTSTRRSGWSWPACRSRRTPPWCAPRCGSAPASAVIQKGRRQPGARRPRRGRLPVPGPPGAHEHGPPGSTTATAPPATSWAPALLYEIEEPVSSTWPGSFRMRTQPEPPSSEEQASASEQSKKIDLDLRL

SEQ ID NO: 67587 - protein, 70 aa, Zea mays
  Coding DNA Sequence Number=SeqID_24212
  Subcellular localization annotation: CTP_CleavageSite=35; ConfidenceScore=5.02e-01
MAWPTSLSGGLRYVTDPSALASTLNRNLASPPGISQQQVQDPCSKPYRLLGFGFAYSPYVASSGTHSSPI

SEQ ID NO: 67588 - protein, 382 aa, Zea mays
  Coding DNA Sequence Number=SeqID_24213
  Gene Ontology: Mol. function=kinase activity; Cellular component =nucleus; Biological process=cell division
  Homolog annotation: Hit_ID=Q75I54; Match level="QueryCoverage=100%, HitCoverage=100%, E-value=1e-121, Identity=63%"; Hit description =Cyclin-A3-1
  Pfam annotation: Domain name=Cyclin_C; Domain location=235-373; Score= 115.4; E_value=1.7e-31; Accession=PF02984.10; Description=Cyclin, C -terminal domain
  Pfam annotation: Domain name=Cyclin_N; Domain location=104-233; Score= 228.3; E_value=1.7e-65; Accession=PF00134.14; Description=Cyclin, N -terminal domain
  Pfam annotation: Domain name=DUF1610; Domain location=335-355; Score =11.4; E_value=0.093; Accession=PF07754.2; Description=Domain of unknown function (DUF1610)
  Pfam module annotation: Pfam domain module=Cyclin_C::Cyclin _N::DUF1610; Domain location=235-373::104-233::335-355
MENSAAAAAERPRLTRAAAKRSAVVTAVAVAAKRKRVALSQLPTLPNAVLGAHDDDDDKPVRKQRLLPAAKPKPKPKAAPAPAAPAAADDTDDDIQLCKPYASDIYSYLRSMESQAKRRLAVDYIAAVQIDVTPNMRGILIDWLVEVAEEYKLVSDTLYLTVSYIDRFLSAKVLNRQKLQLLGVSAMLIASKYEEISPPNVEDFCYITDNTYTKQEVVKMESDILNVLKFEVGSPTAKTFLRMFIRSAQEDNKKYPSLQLEFLGSYLSELSLLDYGLIRSLPSLVAASAVFVARLTLDPHTHPWSKKVQTLTGYKPSELKDCVAAIHNLQLNRTCQSMVAIREKYRQHRCTNCGKIFEQFKGVSALLPPVEIPASYFNTLKE

SEQ ID NO: 67589 - protein, 24 aa, Zea mays
  Coding DNA Sequence Number=SeqID_24214
KNQVEIKDGRCANGSKVPTVGFAK

SEQ ID NO: 67590 - protein, 431 aa, Zea mays
  Coding DNA Sequence Number=SeqID_24215
  Homolog annotation: Hit_ID=Q6QP51; Match level="QueryCoverage=39%, HitCoverage=72%, E-value=7e-10, Identity=34%"; Hit description =Putative growth-regulating factor 1
MQAGPGQKEPKLPRAVRATSQQLQAFLHYCPDQRVKGRTAMQAACNRTKGAHPLDFDAFNMEAQAHTSCNRHAGYYVQETAPPLAPVPRLLDCGTGAATRGGRKQQSSRQQAHAPSWDSERTLSHGVKTTRPCSVPRTARARTTAAPRTTRPVALTLRQDMRHLWQAKQATLHLRHNDLVKKGTGKGDTPKGILLREGSGPRAPLLIRGSKAGPSEGFNSRLRALRLRAHYWSEVRRLAPRKGSTAASGHSGSAPTTDQGFVGWPPKGSDSRLRAHRARDDPGYVRYITKARATLPSLGRHRKLRLARPQGSDSTSTLDDGLRLARPQGSDTTSTLDDGLRLARPQGSDTTSTLDDRLRLARPRARTQPRPRKTVSASPDLGLRLNLDLGRRSPPRPTQGSDSASTSEDRLDLDLGGASASPDLGLGPTTS

SEQ ID NO: 67591 - protein, 294 aa, Zea mays
  Coding DNA Sequence Number=SeqID_24216
MGSTRVAFILLSLEERNFAEVGTFQPSFGFKDFHQAARLHPLRRWSPKTVTTSLMGGGSKPGCDLCPALSFKDVHHPGWGEGRTESELYLPRGFVGHLLPQHSGERALTGLAGGSDFDNVGLVGGERRQLQRIGLAGSAGSAGSGSAPGAPSRRESGCRAACTGGPPKTSRAARVAFVFLGYPAFAPMASVVGAEVVAAEEVLVADGITATIRAPSLRLLGFDSLSSPLEWGPASALRPSLLLFGHLERRSLSLLPEQVAESLGSVGLAARGFSCLVKGTLGRSAVSRGRGQRC

SEQ ID NO: 67592 - protein, 52 aa, Zea mays
  Coding DNA Sequence Number=SeqID_24217
  Subcellular localization annotation: CTP_CleavageSite=38; ConfidenceScore=5.06e-01
MAPSHRPAHHHMKLNLARRHRPSKPLSPLAAASPTVPLASAHGTVAGRACLA

SEQ ID NO: 67593 - protein, 568 aa, Zea mays
  Coding DNA Sequence Number=SeqID_24218
  Subcellular localization annotation: CTP_CleavageSite=44; ConfidenceScore=5.48e-01
MAAAGGRKQRSSRLQAHVHSWDSERTLSHGVKTTRPCSVPRTARARTTAAPQTTRPVALTLRQGRRHLWQAKQATLHLRHDDRVKKGTGKGDTPKGILLREGSGPRALLLIRGSKAGPSEGFDSRLRALGLHAHYWSEVRRLAPRKGSIAASGHSGFAPTTDQGFVGWPPKGSTAASEHAERGMTLGTSNTWPRLGLRSRGSRAALANPAPAKPLTASTYQPENSEPDYAPGLRPLVTPISTKLQRPDGHDSGQGSVHTRDTISSHPSPTSGRNSRPRQIHASPEGLLKQRTHLRLARGLAQAGFTEKQPWPDRHTNRPYRRSIQCKDRLTPYPDARSSVDKAAENNTACAAPTAVPPVRVRLTAAKTGLRRHRKLRLARPQGSDSTSTSEDGLRLARPQGSDSTSTSEDGLRLARPLSSDSALTSKGGLHLARPQGSDSTSTSDDGLCLARPLGLGLNLDLGRRTPPRPTPGTRTQPRPRTTVSASPDLWGSDSTSTSDDGLRLARPLGPDSASISEEPPPRPTSGSDRPRHREPLTEARRHQQGSDSPDSCASTGLKRSSDGHDIT

SEQ ID NO: 67594 - protein, 190 aa, Zea mays
  Coding DNA Sequence Number=SeqID_24219
MPEDGLRLARPQGSDSTSTSEDGLRLARPQDSDSTSTSEDGLRLARPQGSDSTSTSEDGLRLARPLSSDSASTSEGGLHLARPQGSDSTSTSDDGLRLARPLGLGLNLDLGRRTPPRPTPGTRTQPRPRMTVSASPDLWGLGLNLDLGRRSPPRSTPGPGLSLDLGGSSASPDLGLGPTTSQGGPLLPYP

SEQ ID NO: 67595 - protein, 87 aa, Zea mays
  Coding DNA Sequence Number=SeqID_24220
MTQKFEMSMMGELNYFPWVPSEATQGRHLHLPNKVHARSAKAVWDEGRQARKDSDGNRRTHRPQQRSLEGGLKGKDFGEAMGLKGQD

SEQ ID NO: 67596 - protein, 124 aa, Zea mays
  Coding DNA Sequence Number=SeqID_24221
MEQYTKHSLSILRLPDFASTHLIDYDHLFTPSRCSHLSPETGSGEMDLAALRRGSLGRGEDGGPESCQAHARRRPARVYDYFGIELGRFGDFEGPSGRRLGRNGAFMGKTPEVDLGRGGDLVPL

SEQ ID NO: 67597 - protein, 554 aa, Zea mays
  Coding DNA Sequence Number=SeqID_24222
  Gene Ontology: Mol. function=unfolded protein binding; Cellular component=cytoplasm; Biological process=cellular protein metabolic process
  Homolog annotation: Hit_ID=Q75HJ3; Match level="QueryCoverage=93%, HitCoverage=95%, E-value=0.0, Identity=94%"; Hit description =Putative TCP-1/cpn60 chaperonin family protein
  Pfam annotation: Domain name=Cpn60_TCP1; Domain location=34-524; Score=532.8; E_value=3.7e-157; Accession=PF00118.15; Description=TCP- 1cpn60 chaperonin family
MAGYGIQSMLKEGHRHLSGLEEAVLKNIDACRELSAITRTSLGPNGMNKMVINHLDKLFVTNDAATIVNELEVQHPAAKILVLAAKAQQEEIGDGANLTISFAGELLEKAEELIRMGLHPSEIIIGYTKAINKTIEILEDLVEKGSENMDVRNKEDVVLRMRSAVASKQFGQEDMLCPLVADACIQVCPKNPANFNVDNVRVAKLLGGGLHNSSVVRGMVLKNDAVGSIKRAEKAKIVVFAGGVDTSATETKGTVLIHSAEQLENYAKTEEAKVEELIKAVADSGAKVIVSGAAVGDMALHFCERYKLMVLKISSKFELRRFCRTTGAVAILKLSQPNADELGYADSVSVEEIGGTRVTVVKNEDGGNSVATVVLRGSTDSILDDLERAVDDGVNTYRSMCRDSRIIPGAAATEVELAKRLKEFSLKETGLDQYAIAKFAESFEMVPRTLAENAGLSAMEIISSLYAEHASGNAKVGIDLEEGACKDISTLKIWDLYVTKFFALKYSADAACTVLRVDQVSEQRSYFILAFGSVEGLGAWSSLLEGLHGCADIT

SEQ ID NO: 67598 - protein, 241 aa, Zea mays
  Coding DNA Sequence Number=SeqID_24223
  Homolog annotation: Hit_ID=A5AHJ7; Match level="QueryCoverage=93%, HitCoverage=60%, E-value=5e-13, Identity=27%"; Hit description =Putative uncharacterized protein
  Pfam annotation: Domain name=zf-C2HC_plant; Domain location=26-81; Score=36.4; E_value=1.1e-07; Accession=PF07567.3; Description =Protein of unknown function, DUF1544
MASPSSGNNGNYDPKTEKTRKASSNDSGWKYGYWANLKNRDQVTCNLCDTTVSRGIKRLKQHLEGGYEDTKICSKTTTAIIKEMRDYWKSNRRKRAIFLDDNEQQEEEEDVMVVDATAESVQVQQDAPIESQGSKVQPSPGTAANQRRATYLYKTPTSIKTKANQASKQNSIVEMLRKSPKDVVDERRKGCSQPTIPAKMKSKEEKDYVDMQWALWFYECGVPFNAAAATQFHVAVEAERE

SEQ ID NO: 67599 - protein, 448 aa, Zea mays
  Coding DNA Sequence Number=SeqID_24224
MQSACDRAKWAHPFDSNAPSMEAQAHTSCNRRSERRLAFAIMTASKKGPGKGDTPKGILPREGNRPRASLLIRGSKTGPSEGFNSRLRALGLRAHYWSEVRRPAPRKDSTAASGHSGSAPTTDQGFVGWPSKGSQPPQTQSEGWPWVRSIHNQGSGYAPEGTSRRTPQPREFSESARYNSPDCPVYTGQCPVLQEDAALELGSLGNSQRLLHYNSPDMSGVHRTVRCNCGATATSRQRSPATAFNARQSAQKSDTRVVAHRTLYMKSASQTGKQVARSCQGRFNRPLGGSTGVGQLDQSADVDPRAIDLAMRIAERIFLKMKEDEAKNKIEEENDRWRPNDESTSSQGSSFKSTSHMCFIANGSDSESESEDEEEQESDSEDEDDLQQFFAQLSKKNRMSLLKLMERAEEQKETLHKQEDFLIRKIEDLEKLTKEHEKLKCSHDDLVQ

SEQ ID NO: 67600 - protein, 194 aa, Zea mays
  Coding DNA Sequence Number=SeqID_24225
  Gene Ontology: Mol. function=kinase activity; Cellular component =ornithine carbamoyltransferase complex; Biological process=amino acid metabolic process
  Homolog annotation: Hit_ID=Q6QP54; Match level="QueryCoverage=37%, HitCoverage=25%, E-value=7e-25, Identity=80%"; Hit description =Putative kinase
MAPPVDVVDPCPGLGEVEAPPRSRSSLSSKAEVESEPLDRARRRPSADTRAESEPWGRAKRSSSSFGADPESEPWGRAKRSSSSSGAEPESEPWGRAKRSSSSSGAEPESEPWGRAKRSSSSSGAELESEPWGRAKRSFPWRLGPDLAAISLTLSSGTAVRAAQAALSSCQAGQWSGEVTTVTSALSPGGRASG

SEQ ID NO: 67601 - protein, 114 aa, Zea mays
  Coding DNA Sequence Number=SeqID_24226
MDPVLVALGNWAHVNFGPSFYRAQAEVGPVEYSGQLEIKTAQPHHCLVRWCLHWNSGTGSFRSTAPLKSLDTCPLGVISLTRGLVATTGRPTPMPIAKCPGLDRSLRQVFASRP

SEQ ID NO: 67602 - protein, 1069 aa, Zea mays
  Coding DNA Sequence Number=SeqID_24227
  Gene Ontology: Mol. function=heat shock protein binding; Cellular component=integral to membrane; Biological process=protein folding
  Homolog annotation: Hit_ID=Q2R254; Match level="QueryCoverage=99%, HitCoverage=99%, E-value=0.0, Identity=50%"; Hit description=DnaJ domain containing protein, expressed
  Pfam annotation: Domain name=DnaJ; Domain location=67-128; Score =101.1; E_value=3.5e-27; Accession=PF00226.22; Description=DnaJ domain
MISCNREQALRAREIALKKIESKDFFGAQKTVLKAQKLFPELENVSQLLTICSVHCAAELRVNGEMDFYGVLQVEEGADEALIKKQYRKLAVSLHPDKNCFVGAEAAFKLIAEAYSVLCDPAKRNDYDLKRSNVFRNVPKLAKQQPSKWTNSHRQSMPGFRETFWTVCPNCRIQYQYYSSILNIMVHCLNCKRSFIAYRLNQQPMATSSSVPNNSQVPANMFVNKQRDTPNQQGHSVKPSCVGRGTNVKPNGYQDLVHMFRNQQHRVHSQNGHPVKPSAGRDTDAKLRMNVAHRDEYMKGKGNDPEMSRGKFQFSTLNEDKFSVPMGNGDMQGRSSISALADPNIIDTQKSVQEDASAVPDAMDLLGSARPSAGWKTYGDSRINVAGKKLMLDHVDLSIIGRRNLQRQDASTVPSSAGSSGTQQSVKRKTYADGNICLNTDTNKRPMKNKCPSDVNMSCKQVCDDGVTNAGIQLDPLHLSSNVDTHHKPKVTDHHANIKEKATETDSDKDNIMEEAPQTVSEKKPSYSECVTLPDLDFFNFEKVKDINVFEVGQIWALYDNLDGMPRYYARIKHFDASNFEIHSTWLEYVAMDEDEKWTDEELPTACGNFRLGKGTDILEKEMFSHIATWTKGKKRKSYVIYPNKGEVWALYKGWSMEWCSDADNHRSYEYEVVEVVSSMSANGGATVVPLVRINGFVSLFATAKDKPSFVIPSSELLRFSHSIPFYRTKGNEKVGVPRGFLELDNACLPADLDAAFPSLTLDSYMSLGKNESSTFVDVTTDNTSCRMDLGDDQIAQKENDHPISTDNPKDMCPEQNTPLKETTNYAKESGDCSLQSSLSPIIYTYPDSDFHRFEENRSCEKFERGQVWALYNNIDKLPKFYAWVRKVREEPFRVEVIWLEACPEQDQEKQWLEQDIPISCGTFKIRKWRAEYGTNDTFSHQVNARETGAKWALEILPQVGDIWAVYMNWAPDWVPCGADACEFAICEVVERTAEASTKLAFLAQVGGYRSVFRPDEQRGVLEVPATERTRFSHQIPYFRLAGEGGGGLRGFYELDPASVPDAFLYGDT

SEQ ID NO: 67603 - protein, 233 aa, Zea mays
  Coding DNA Sequence Number=SeqID_24228
  Gene Ontology: Mol. function=ribonuclease activity; Cellular component=nucleus; Biological process=tRNA processing
  Homolog annotation: Hit_ID=A2Y2L1; Match level="QueryCoverage=38%, HitCoverage=46%, E-value=2e-34, Identity=77%"; Hit description =Putative uncharacterized protein
  Pfam annotation: Domain name=RNase_P_Rpp14; Domain location=118-197; Score=12.3; E_value=0.00037; Accession=PF01900.10; Description=Rpp14 family
MLTGEPWTLGQLCWPTKEGVVGLTAGECVPAGGHTAVGCPAQLQVEVQSQHMLGQPATQLAMTFFVIVSLAELFCTYYMDVHYPCCSISHINIELSVMTDDNYQLLFLELATTWSCLLYYVYRWLFNIKALIRSAKIPVKYVNPVTKLCIVRVSREDHQKVWAAMTMVRCIGKIPVSFNLLDMSGSIRACKKAALECDEAKFEQYKLVAGDCITAEITQSVEKCFEKIRGLES

SEQ ID NO: 67604 - protein, 210 aa, Zea mays
  Coding DNA Sequence Number=SeqID_24229
  Homolog annotation: Hit_ID=Q8H6I2; Match level="QueryCoverage=100%, HitCoverage=100%, E-value=3e-99, Identity=78%"; Hit description =Putative MURBZC
  Pfam annotation: Domain name=Zea_mays_MuDR; Domain location=9-210; Score=-34.9; E_value=0.0039; Accession=PF05928.2; Description=Zea mays MURB-like protein (MuDR)
MESAAAICAQKLSLAVVAAHDTLNASAAASIVAGDYCATFSIGNDVVSTLDVLESAVAAEKSAMHSYKQASAAVDCAKETVAKYSEVNQKLAQALKYAMSQMSDTAKKLQDTASLCYTDEDVVDGFKLTQVARSMDELAEMLEGTAIDCQVSMMDPTTMLEAGYASEDSAVWEDVFRDREIMNQPVEAETLAEHCAKWGLNYNEIWDRSV

SEQ ID NO: 67605 - protein, 67 aa, Zea mays
  Coding DNA Sequence Number=SeqID_24230
MAGRLVVCFIEGWRRNGQTAGQLFACLGALEASGPRSPGLPVRTQGQGAEKDLLPANYCDPRYTKSK

SEQ ID NO: 67606 - protein, 491 aa, Zea mays
  Coding DNA Sequence Number=SeqID_24231
  Gene Ontology: Cellular component=integral to membrane; Biological process=peroxisome organization and biogenesis
  Homolog annotation: Hit_ID=Q85V22; Match level="QueryCoverage=89%, HitCoverage=98%, E-value=0.0, Identity=82%"; Hit description =Histidine amino acid transporter
  Pfam annotation: Domain name=Aa_trans; Domain location=71-478; Score =541.8; E_value=7.6e-160; Accession=PF01490.9; Description =Transmembrane amino acid transporter protein
METQAPEKENYLPEKCFFLSLALCVGNQDQHKTVSANSGNGGKPNKNKNLQDARSAREKAIDEWLPITSSRNAKWWYSAFHNVTAMVGAGVLSLPYALSELGWGPGIAVLVVSWVITLYTLWQMVEMHEMVPGKRFDRYHELGQHAFGEKLGLWIVVPQQLVVEVGVNIVYMVTGGRSLKKFHDVLVCGDGGASCEGKDNIKTTYFIMIFASVHFVLSQLPNFNSISGVSLAAAVMSLSYSTIAWGASVDKGRMAGVDYHLRATTTPGKVFGFFGALGDVAFAYAGHNVVLEIQATIPSTPEKPSKKPMWKGVVVAYVVVALCYFPVALIGYWAFGNSVQDNILITLSKPRWLIALANMMVVIHVIGSYQIYAMPVFDMIETVLVKKLRFPPGLTLRLISRTAYVAFTMFIAITFPFFGGLLGFFGGFAFAPTTYFLPCVMWLAIYKPKRFSLSWFTNWICIILGVILMILSPIGGLRQIIMDAKTYQFYS

SEQ ID NO: 67607 - protein, 609 aa, Zea mays
  Coding DNA Sequence Number=SeqID_24232
  Gene Ontology: Mol. function=binding
  Homolog annotation: Hit_ID=Q6YRM6; Match level="QueryCoverage=100%, HitCoverage=100%, E-value=0.0, Identity=68%"; Hit description=Zinc finger (C3HC4-type RING finger) protein family-like
  Pfam annotation: Domain name=DUF23; Domain location=336-561; Score =117.7; E_value=3.5e-32; Accession=PF01697.18; Description=Domain of unknown function
  Subcellular localization annotation: CTP_CleavageSite=80; ConfidenceScore=5.41e-01
MAISAKERKLSRLGSCKGGAAAGSGSGGGGGSPAARAHRSVAAAPQRRVFAALFRVPVRRRSRPRRRARHWRRGAHVLVSDAATFRPVLRTAWPAATLNAISSDARARRGGSSADTTVLPSVQIRHAVAMPDRVLLILKDGPLLPSPERFQCLYSPANSSELRRHRPLLAASSPDGPSLVHCPAEPSCVDVSLSLSLSPPVAPLQWDRLVYAALVDSRDNSTVVFAKGMNLRPGRLGVASRYQCVFGRDLWKPKQRVLTSPVISAAQEVFRCVTPARVRRHLRMTTDPNGNGNGNDKPMLVSIRTKGQRDSTLPSIAEPEPLPPRHNYRHHRRRPKAHSMCVCTMLRNQARFLREWIIYHSRIGVERWFIYDNNSDDGIEQVLGTMDPSTHNVTRHLWPWTKSQEAGFAHCALRARESCEWVGFIDVDEFLHFPGNQTTLPDILRSYSNRPRVGELRTACHSFGPSGRTRIPKQGVTTGYTCRLAAPERHKSIVRPDALNPSLVNVVHHFHLREGARYVNVGQGAMLVNHYKYQVWEVFKDKFSGRVATYVADWRDEENVGSRDRAPGLGTRPVEPEDWPRRFCEVYDTGLKDFVQKAFADPATGSLPW

SEQ ID NO: 67608 - protein, 130 aa, Zea mays
  Coding DNA Sequence Number=SeqID_24233
MASLGARLDELEEQEKYTIEWGAGKKVGGPEQDDLAHIDCLVLARLWPAQRRRRLPPRRGTDPKLSVHREYVNLIDSSSPFPSPSPTSSLSPPTDSPQGAPGMLDELKAFGEMPHPKSPLSIKASWFHEN

SEQ ID NO: 67609 - protein, 88 aa, Zea mays
  Coding DNA Sequence Number=SeqID_24234
MAPKEVSVATDLSCSLVGWALSPGWRLGALEGSRVGQLQNVGSCHMPTSFALVSNKATFDAAIEEEDNERISINHFVFFCTRNSEKAL

SEQ ID NO: 67610 - protein, 157 aa, Zea mays
  Coding DNA Sequence Number=SeqID_24235
MSTIHFYANDISGFLSKAGVKSPVSFTPCMWWDIREEAQMVLGGGRGGGAGLETWFPPTLTFSFQILQTVAATDSGNEDKMLEKTETELKTTGQSSVFYHPCLQSLANRCLGCQFAMLPALMVLPFYTHTRSQAARHPAQPEKSCATLLCFDTLCHE

SEQ ID NO: 67611 - protein, 170 aa, Zea mays
  Coding DNA Sequence Number=SeqID_24236
MEGSFTAVLRTGRRGFVEFGCYTPPAPPLSTPAAGVATGGDPDDGGSDGSSSFSTDLSVDQEPEGWVDRPITHDAARGCHFHDALDTLLRQALDRRTWSIEYRCVVFQHSRGVYPDRWEATVAEPPKLLGPLAPVLVSKTSDCYACAPDNLTGSVRVPQGPRINHEQPGS

SEQ ID NO: 67612 - protein, 579 aa, Zea mays
  Coding DNA Sequence Number=SeqID_24237
  Gene Ontology: Mol. function=transcription factor activity; Cellular component=plastid; Biological process=regulation of transcription, DNA-dependent
  Homolog annotation: Hit_ID=O24348; Match level="QueryCoverage=31%, HitCoverage=37%, E-value=6e-21, Identity=42%"; Hit description =Plastid RNA polymerase sigma factor
  Pfam annotation: Domain name=Extensin_2; Domain location=54-346; Score=-134.4; E_value=0.049; Accession=PF04554.4; Description =Extensin-like region
  Subcellular localization annotation: CTP_CleavageSite=42; ConfidenceScore=5.31e-01
MALGGTWPSGLAAWADSTHATWAGRARSCGESNGRVVEPVIPCSTPTSPARSRLQSKVVIVPCVIKKSQASGEDEASSVSPALCAPDAPPSPSPRGCSKEGRSACGDGRSDPARASPPPTPRHRPSPRGMLPRKEGPRVGDGKVPTPPRASPPPLSSLGRHHGRSDPAIAIPARLLQGRKVRVRRWKPHPGHQPRKSPTSRKSPPSIHGSRALSAGSLAAHKSHRRAKTQAGASWQPRPYRPQISPETRMPLLAANRPPAAPLPPLPSMAAAPLPSKISATKYRGCLHCSPSSLPTYAHHTCPFLSPNLPHSASTTVNGALSKCGATVPLPATKKEPRSHPPVCRHSASLRAAAFRSEANVVCLLAVEGCAALGKLLEPQDFVAPILSDIVNFSQTFTTRWRTVLPPTPTRDTLHAAPAAIPACHLRASSVSLAPTLLSAIHAVCTGLPATREQSLRPRIPRPLCWIRSFRNLQISPPSQPWPLALFEDVRAPDSLCFGSVAISFLGVEAIDKLDERFSKAMVVVARSGISVRQRRMNDRRQGTGRKSVTISPELTQSRNRVHLRSIFSKDLLTHKQVI

SEQ ID NO: 67613 - protein, 222 aa, Zea mays
  Coding DNA Sequence Number=SeqID_24238
MREVIIQFILQHAVSTTKSPVAFFSKYPDAAQPPPILFICARSSPHVPNARLLPQAPFLLLCRRPKPLLPGAQPDLLHRALRAPPALLPRPAVPPCSDFVRPASSPTCSAPPATRSCVPPSLPALARVDLHALGRASLPTHARALHPLDTGALWLAPLRAEFLLCAARLGCLSTLSSTACHEVPARKLSVGRARSSLFAVESSARCPCRRSSLAVHSGVGCR

SEQ ID NO: 67614 - protein, 238 aa, Zea mays
  Coding DNA Sequence Number=SeqID_24239
  Gene Ontology: Mol. function=nucleoside-triphosphatase activity; Cellular component=protein complex; Biological process=protein catabolic process
  Homolog annotation: Hit_ID=A2X465; Match level="QueryCoverage=89%, HitCoverage=46%, E-value=1e-115, Identity=98%"; Hit description =Putative uncharacterized protein
  Pfam annotation: Domain name=AAA; Domain location=43-230; Score =258.5; E_value=1.4e-74; Accession=PF00004.20; Description=ATPase family associated with various cellular activities (AAA)
  Pfam annotation: Domain name=AAA_2; Domain location=39-171; Score= -21.3; E_value=0.00045; Accession=PF07724.5; Description=ATPase family associated with various
  Pfam annotation: Domain name=AAA_5; Domain location=43-176; Score =15.8; E_value=0.00018; Accession=PF07728.5; Description=ATPase family associated with various
  Pfam module annotation: Pfam domain module=AAA::AAA_2::AAA_5; Domain location=43-230::39-171::43-176
MAQTFSVDIGGCDIQKQEIREAVELPLTHHELYKQIGIDPPRGVLLYGPPGTGKTMLAKAVAHHTTAAFIRVVGSEFVQKYLGEGPRMVRDVFRLAKENAPAIIFIDEVDAIATARFDAQTGADREVQRILMELLNQMDGFDQTVNVKVIMATNRADTLDPALLRPGRLDRKIEFPLPDRRQKRLVFQVCTAKMNLSDEVDLEDYVSRPDKISAADTLTHFVQQQIFFLEYTLWALLG

SEQ ID NO: 67615 - protein, 152 aa, Zea mays
  Coding DNA Sequence Number=SeqID_24240
ATFALNAPAIWSVGVAIWPRLLLGEDWASGEPELCADGGYQLRFRSLEAGLVVPSCELAVAQVPGRVPSSRAGMLTLSTVWPEPGLREQPPSLRTGREDGQGQTRLFYICPCVAFPQGGGGKSAMLPVEGAEHGVSSELLTGNPSGRPCPIC

SEQ ID NO: 67616 - protein, 169 aa, Zea mays
  Coding DNA Sequence Number=SeqID_24241
MLYFRIELVLLDCSVGLLGQEDEVPADSASGTDLLLIDCSGDSAAGAEGTASETAATEADARVPFIAPRQLGAVESNPGRQFLPSVGWRTGQSGVPPDRHCSVSGAYCFPKLAQPTVEGLEPLAHQALSGAHRTVRCTHQTVGSAKRHVRIARPTVGSPDSPVHHRTVR

SEQ ID NO: 67617 - protein, 92 aa, Zea mays
  Coding DNA Sequence Number=SeqID_24242
MSGASAKREMETGEKAISHGKAPSREFGAKGKEEYERENQRKDNWKRLGSSSQDSAQSGCTRLSGGAPDSVRVRQAGSGEKAALGISSAAYD

SEQ ID NO: 67618 - protein, 214 aa, Zea mays
  Coding DNA Sequence Number=SeqID_24243
MEEGREGWGERWRTVYLRSGWCDRRRRSQPPSQKLWWVGLASSWRRSWRETARPTHWSRPPTRAGPKAPGGEGATAEAGEGPKAQPAVERQTRHAEVWWGEEPRHPWMARATCGWCQSTGCRGMATESHPESCPGRPTCHRDRDPPGTSRLPISSRGQWGQSAVKRNPPGVRGGSLRCAVERRGGSGGRSGREAKLLEKQIVLGLCKGGKWLHA

SEQ ID NO: 67619 - protein, 110 aa, Zea mays
  Coding DNA Sequence Number=SeqID_24244
MAQGDDGGPSSGSGGGSGELNSREEVEEGENGPRVAHGDCGEPQSRRRSQYVPQRGEEKADLSSNNPAACLWALVASKLALEAVVGVAAAAPAASLLKSDQLSELPEFAS

SEQ ID NO: 67620 - protein, 155 aa, Zea mays
  Coding DNA Sequence Number=SeqID_24245
MDLQLRKKRSGERRPDELEGERVNQGVFQVAGDKAELTRARDTAGGWMATVERQRNHGERQNFLGVRAEPRMGCQIKIGENQASNRSVRPTECHSPWYSALSGSDRQHSNLAADDLYAVIHAAAWIRVHWRVDNYGKEKISRWGMDRIANCSLSP

SEQ ID NO: 67621 - protein, 97 aa, Zea mays
  Coding DNA Sequence Number=SeqID_24246
MRKNFEERGNFHASLCTKRREASSYFSFVKLQLRHPAHIKEQHKKRCKCQEEASLQKSGSCASRSYQGAEVGMPTNNFVKSINFAFNMFQGAGQVFG

SEQ ID NO: 67622 - protein, 159 aa, Zea mays
  Coding DNA Sequence Number=SeqID_24247
  Subcellular localization annotation: CTP_CleavageSite=28; ConfidenceScore=5.32e-01
MAVYNQKAARSGCTGLSGGAPDSVRCARLALVKRPLSGLRRRCTAINHRTVRWCTGLSGGAPDCPVLSDPLAAGEPCVRIRARRGDSLSDQLDSTRENEEEIEVEEARTSPPPPPPEEPQAGNYFYFDICGAEPDSPITQGKPQCICHLLAILKSFSLT

SEQ ID NO: 67623 - protein, 121 aa, Zea mays
  Coding DNA Sequence Number=SeqID_24248
MAPEAGLGCCQPHSVEWHSSRSGAGGAVLSSGRSVERRSDCGHFSSVDWRVHVRIRCQAILALNASATRSVGVAIWPRLLLSEDWASGEPKKSTEFTYYLTIFRAIRLWCSIYNGDSGILH

SEQ ID NO: 67624 - protein, 583 aa, Zea mays
  Coding DNA Sequence Number=SeqID_24249
  Gene Ontology: Mol. function=amino acid transmembrane transporter activity; Cellular component=integral to membrane; Biological process=amino acid transport
  Homolog annotation: Hit_ID=A2ZV89; Match level="QueryCoverage=96%, HitCoverage=65%, E-value=0.0, Identity=73%"; Hit description =Putative uncharacterized protein
  Pfam annotation: Domain name=AA_permease; Domain location=49-557; Score=-65.4; E_value=0.00056; Accession=PF00324.12; Description =Amino acid permease
MTWNRSPAGGGSAVTVDHSDDTGLARLRELGYRQELKRDLSVLSNFAFSFSIISVLTGVTTLYNTGLNFGGPATMTFGWFVAGAFTMAVGASMAEICSSFPTSGGLYYWSARLSGKRWAPFASWITGWYGETPFSRTPFSFSCKVTAFSLAEPEPIEVLTLTVSLLRAAVQWAVTTSVDYSLAQLIQVIILLATGGKTGGGYVASKYMVLGFHAAILLSHAVINSLPISCLSFLGQFAAAWNVLGSLPPILDLSACTGIILLLVAAGVFVLMIAVPTVATERASAEFVFTHFNTDNDGAGIRSSLYIFVLGLLMSQYTFTGYDASAHMTEETKNADKNGPIGIISAIGISILVGWGYILGITFAVKDIPYLLSPDNDAGGYAIAEVFYLAFKSRYGSGVGGIVCLGIVAVAIYLCGMSSVTSNSRMAYAFSRDGAMPFSSVWHKVNRQDVPINAVWLSAFIALCMALPSLGSLVAFQAMVSIATVGLYISYALPVLFRVTLARKCFVPGPFSLGRYGVMVGWVAVLWVATISVLFSLPVAYPVTKDTLNYTPVAVGGLFFLVIASWVLSARHWFTGPITNLDG

SEQ ID NO: 67625 - protein, 194 aa, Zea mays
  Coding DNA Sequence Number=SeqID_24250
MERTKGDRASRHAFVMRDWRTSSGSGLRLAMERTKGDRASYHGPVRLSHLVPKTSLDGGDAALTRSGPAGIFEPNIARPRPPPTPRPHPSVRAPLPRDRLLSGRPAPPVSPFSPLARDQATGAFTVDHRSPHLLGINALTSSVGTMRPRSLCPSRPFTPSPARAVPSPFCAITTVMASSPVLATPPPFALPGHL

SEQ ID NO: 67626 - protein, 48 aa, Zea mays
  Coding DNA Sequence Number=SeqID_24251
  Homolog annotation: Hit_ID=A9ZLX8; Match level="QueryCoverage=83%, HitCoverage=8%, E-value=1e-07, Identity=70%"; Hit description=CPD photolyase
MEVLGSKDGFLTKRIKSYSTSQSDPTKPHALQCLSPLIAGHVGNGIVC

SEQ ID NO: 67627 - protein, 29 aa, Zea mays
  Coding DNA Sequence Number=SeqID_24252
MRRLLLLTFVMPTSRTEEKISGFKFFHWS

SEQ ID NO: 67628 - protein, 82 aa, Zea mays
  Coding DNA Sequence Number=SeqID_24253
MTGPVEPPPRTVEQPLDNPGDLTASLTGRLQLKKLNSAEVKFSWKAQLQLKKFSCFQQEHSRFLKPPHGQPKNVKVIFGFQK

SEQ ID NO: 67629 - protein, 170 aa, Zea mays
  Coding DNA Sequence Number=SeqID_24254
  Subcellular localization annotation: CTP_CleavageSite=57; ConfidenceScore=5.10e-01
MLDEAAWWDDLVTGLRSMSYGAKGVPVRCLVSVGPMTTTKASSEGWRLRLRPNIAVRFEKGRERLGEGGIGAAEYLREREAPSPVCHGEGAIIAYLAEQARWDAGLVPCGPSQLGPKSEPWVGRSGVRRLPELSPSLSPGSGGAEFTVFRDLARVRALGRAERSSPSSGT

SEQ ID NO: 67630 - protein, 83 aa, Zea mays
  Coding DNA Sequence Number=SeqID_24255
MTAVGRALPWAGHLTACIMAGARESAGREGLRDAGTWAGFLVAQRWTELTGIQLHSGATPHRVLALSRRGSRGSRRYSALEFL

SEQ ID NO: 67631 - protein, 204 aa, Zea mays
  Coding DNA Sequence Number=SeqID_24256
  Subcellular localization annotation: CTP_CleavageSite=32; ConfidenceScore=5.06e-01
MQYKGSSSLISCEKRTSNGVFILARPHRLGTQCSTDPGCRRAVTALVPTIASMGDPVSGRMRDKVRARLHSVPAAEERAEGLTGGEIAPAGELVSGEESGLSSAKLTNQTGQRASPGIKEGGRLKSGEVDLRLPVKFCQVRGLGKLHGPMAELIEALARLGGDWSGLATVAEALAGGKELAGAKEGCLAGVGIKVNTLDLWLKV

SEQ ID NO: 67632 - protein, 538 aa, Zea mays
  Coding DNA Sequence Number=SeqID_24257
MEVVELVPCARNKWGNWHEFWFYIAEGTVEDHPGLPVSEMCSHFYSAYPPFEVAEEDADRGALRCAAGLSSGRDLVEEFVAYGVWPLAHGWALGEVCPRQMPSHGGKLVRSPAFALDLHNRDPAAFVREAEDGAVRIVGRYVPRTEGQRSWDIRGSNDRLNRVFELNRLPYGGYPGQDDVDRRGKKPVVESGDDPAPAAALSSKKRKLGTAMGGLRVSDGFARELMRTCAAPGGRMSSPELRESSARMLRVTGGWWPKNVPIPRAAGEYFFTSRMVREWKVFPYGWNIAAVVSAVMDKDRQGAAQKRQAVVRLHEARPKRQRGAAKATAPGGGQPPLAAKSAVPASSRAPEAATAAGGSKSAKAAPASGRVPETAKAARELPPPGKRVADFATDISVDDYLVGSDEGQLVVPPAAATTAAAVVPKAKGGALSAGGEMPALTAVWDEAGAVSRRLKEMKEALSQGEKTVLRRQLAEERNEANEALAKAQSVQAEANLARAEGSLAKQRAEQLEERLSALQARVERVEASTRAEAERTRK

SEQ ID NO: 67633 - protein, 117 aa, Zea mays
  Coding DNA Sequence Number=SeqID_24258
MVPTTTVSGGVGKQRRTATAVGGGGGGASISTSISAVADDSVSPIDTGGDRDDVHRWNCSVLPGGERLQQRVIDNMENFMHTTNAKENALGDNRNLPQASPHRRAGTPLRTAKSSAF

SEQ ID NO: 67634 - protein, 237 aa, Zea mays
  Coding DNA Sequence Number=SeqID_24259
  Gene Ontology: Mol. function=hydrolase activity, hydrolyzing O -glycosyl compounds; Cellular component=cell wall; Biological process= carbohydrate metabolic process
  Homolog annotation: Hit_ID=Q9LJR7; Match level="QueryCoverage=97%, HitCoverage=85%, E-value=7e-49, Identity=41%"; Hit description =Xyloglucan endotransglucosylase/hydrolase protein 3 precursor
  Pfam annotation: Domain name=Glyco_hydro_16; Domain location=4-164; Score=142.6; E_value=1.1e-39; Accession=PF00722.12; Description =Glycosyl hydrolases family 16
  Pfam annotation: Domain name=XET_C; Domain location=190-234; Score =25.2; E_value=3.2e-05; Accession=PF06955.3; Description=Xyloglucan endo-transglycosylase (XET)
  Pfam module annotation: Pfam domain module=Glyco_hydro_16::XET_C; Domain location=4-164::190-234
PALFDVNYVKDWGRLVDHGTEVNLILDQSSAARGGGFKSKSTYGSGFFHLRMKLPSGYTAGVVTTFYPEDGTRDEVDFEFLGDKDGVPVTLQTNFFVNGKGGREQRLHLWFDPAAGFHDYKILWNPYQLVVPGYEFPTKPMLIAGSIWTAHLGHDGGWDQRWTGPGHLSRLGTRGFDVSGCATASATPRCGSPGLWWNGVGYRNITAAQRAAYEGVVKKYMTYDYCKSSRKIECAYI

SEQ ID NO: 67635 - protein, 106 aa, Zea mays
  Coding DNA Sequence Number=SeqID_24260
MGKNNKRKASGRTSGPVERAGLEGSDESECSSDEEDSDGGDEGEDDDDDGDDGGGSGSGRGGGDGSRDSTKGDSRGSTKGDSRGSTKGSSRGSTKGGGGGRGRASG

SEQ ID NO: 67636 - protein, 155 aa, Zea mays
  Coding DNA Sequence Number=SeqID_24261
MGKNNKRKREPTPPSEEFGDSEYSEEEFSSESEGSPAPVSPPASSDDSDDSQGIAAEVWTYIRAVERAGLEGSDESECSSDEEDSDGGDEGEDDDDDDDGDGGGSGSGRGGGDGSRDNTKGDSRGSTKGDSRGSTKGSSRGSTKGGGGGRGRASG

SEQ ID NO: 67637 - protein, 310 aa, Zea mays
  Coding DNA Sequence Number=SeqID_24262
  Gene Ontology: Mol. function=hydrolase activity, hydrolyzing O -glycosyl compounds; Cellular component=cell wall; Biological process= carbohydrate metabolic process
  Homolog annotation: Hit_ID=A3BA26; Match level="QueryCoverage=65%, HitCoverage=22%, E-value=3e-66, Identity=62%"; Hit description =Putative uncharacterized protein
  Pfam annotation: Domain name=Glyco_hydro_16; Domain location=40-233; Score=172.1; E_value=1.4e-48; Accession=PF00722.12; Description =Glycosyl hydrolases family 16
  Pfam annotation: Domain name=XET_C; Domain location=248-307; Score =53.3; E_value=8.3e-13; Accession=PF06955.3; Description=Xyloglucan endo-transglycosylase (XET)
  Pfam module annotation: Pfam domain module=Glyco_hydro_16::XET_C; Domain location=40-233::248-307
MLACKASPSRPCVVPLVCLLVVAAAVVVVAASAPPAEAAFDDNYVAQWGRDGYHLVVRGTEANVTMDQSSGAGFRSKSTYGSGFFPHEDEAALRVTISEITESASSSTSLFQLISQPEDGSRDEVDLEFLGDKAGVPITLQTNVFVDGRGDREQRTRLWFDPAADFHDYKILWNPYQLVMFVDDTPVRVLRNLTGAVPGYPFPGKQTMLIRASVWDGSDWATDGGRTKVDWSRGPFTAGYRGFDVDGCANNGSDACQSPDLWWNAAEYRNITAEQRAAYEDVKRSYMNYDYCADKARFNSTTVPIECNYA

SEQ ID NO: 67638 - protein, 287 aa, Zea mays
  Coding DNA Sequence Number=SeqID_24263
  Homolog annotation: Hit_ID=A2WQD0; Match level="QueryCoverage=64%, HitCoverage=75%, E-value=3e-57, Identity=64%"; Hit description =Putative uncharacterized protein
  Pfam annotation: Domain name=DUF679; Domain location=54-225; Score =181.0; E_value=3.1e-51; Accession=PF05078.3; Description=Protein of unknown function (DUF679)
  Subcellular localization annotation: CTP_CleavageSite=39; ConfidenceScore=5.56e-01
MASSPQTVIQMSSPRANAATAPQTTPNKVVGADADNRVPAMAATAGSGGTMADKVMTSAANLAQLLPTGTVLAYQALSPSFTRHGVDCTASNQWLTAALVGVLAGLSLLLSFTDSVVGTDGRLYYGVATPRGFNVFNLSGQEEGLQWAPGQLRRLRLRPLDYVHAIFAAVVFLTVAFSDVGLQRCFFPHAGANTSELLKNLPLGTAFLSSFVFLIFPTTRKGIGYSDTTPHQKASDDDDATTPVRAIQCPTSASYRSVPLTRSLPGSRDPTYGAEVPQLGAIGYGAE

SEQ ID NO: 67639 - protein, 54 aa, Zea mays
  Coding DNA Sequence Number=SeqID_24264
MGGGLLAAASALRSVLPLFGPPEQKSSSSLLLERAHPYRVGLFVPAEGEPEFHL

SEQ ID NO: 67640 - protein, 296 aa, Zea mays
  Coding DNA Sequence Number=SeqID_24265
  Subcellular localization annotation: CTP_CleavageSite=71; ConfidenceScore=5.14e-01
MAERYPTSTKLRSSNDKSGGLRVFPHPGARKPSWAESSPTRSKILPLRRGGWVPRVMQAGPEQKKPNRRARCMQLPNGYEHSSTFAQTSGPTRHATGAPVATCEQLHRHSHHYHASSTAEPVPRLEATLRMTQQCQPGATVNMAKNGPAVMAVAGGQEQRSRRQPSLCPIQGQRENPLSRHEDGAPVFRSLNGSRTRNGRPANHSPRRINSAAGQAAPQGPGKGDTPKRILLREGNRPRASLLIRGSKAGPSEGFNSRLRALGFRAHYWSEVRRPAPRKGSTAASGHSGSAPTTDQ

SEQ ID NO: 67641 - protein, 69 aa, Zea mays
  Coding DNA Sequence Number=SeqID_24266
MALKSEPDRPPRYKSRTAPGQFHSGLSWVEHLHREPWRQAEKLREKKGCHHASWPASFDPLFPVNSDGT

SEQ ID NO: 67642 - protein, 122 aa, Zea mays
  Coding DNA Sequence Number=SeqID_24267
  Subcellular localization annotation: CTP_CleavageSite=13; ConfidenceScore=5.13e-01
MGSVAPLLQLGPCCADVWVRRVGAPFNLRTPDRLRGFRGSRTPRAPPIDFSPKSALKLEPDRPPRYKSRTAPGQFHSGLSWVEHLHREPWRQAEKLREKKGSRHASWPASFDPLFPVNFDGT

SEQ ID NO: 67643 - protein, 603 aa, Zea mays
  Coding DNA Sequence Number=SeqID_24268
  Gene Ontology: Mol. function=ribose phosphate diphosphokinase activity; Cellular component=chloroplast; Biological process =ribonucleoside monophosphate biosynthetic process
  Homolog annotation: Hit_ID=A2XBF2; Match level="QueryCoverage=55%, HitCoverage=81%, E-value=4e-75, Identity=50%"; Hit description =Putative uncharacterized protein
  Pfam annotation: Domain name=Pribosyltran; Domain location=402-552; Score=5.9; E_value=0.00081; Accession=PF00156.18; Description =Phosphoribosyl transferase domain
MAPPVDVVGPCPRLGEVEAPSRSRSSLSSEDEVESEPLGRARRRPSAEARAESEPWGWAKRSSSSSGAEPESEPWGRAKRSSSSSGAEPESEPWDRVKRSSSSSGAEPKSEPWGRAKRSSSSSGAQPESEPWGRAKRSSSSSGAEPKSETWGRAKWSSSSSGAEPESEPWGRAKRSFLWRLRPDLAAVSLTLSSGTAVGAAQAALSSCQTGQWSGEATFALNAPAIWSVGVASWPRLLLGEDWVSGEPRLCADGGYQLRFRSLEAPTSRRLGIFSSNANPILVQEISCYLGLELRQIKIQRWKESVHGCDVFQVQPTCPSPPNENLMELLIMIDACRRASRPRTSTLGIPYFGYARADKKVQGARLHRRQAGGQPHHGGRRPPRAGLRTPLGSVHRLLRHPRGPRVHSQPIILDYLASKTICPEDVVVVSPDMGGVARPRAFAKKLSDAPLAIVDKRRPGHNQAEVVHLIDDVRGKVVVMLSDAPLAIVDKRRPGHNQAEVVHLIHDVRGKVVVMVDGMINTTENISKGAELLHKGSASCVHLQHPRGPQQPTRAPEALQRPLPGGDHHQHRAGAQLTVLSVANLLGETIWRVHDDCSVSSIF

SEQ ID NO: 67644 - protein, 125 aa, Zea mays
  Coding DNA Sequence Number=SeqID_24269
MAEVHHEPRSTWRDLVTNDPICCAAFLPFPLAFASVQIPTSRPDLPRRREKKNRSPPPPSLRGLRLGATLPLNRVLGASPEVGEAGDGSNRAMDKRLRLNSSPKYKRRRGSALLCGQARNLFNRR

SEQ ID NO: 67645 - protein, 200 aa, Zea mays
  Coding DNA Sequence Number=SeqID_24270
  Homolog annotation: Hit_ID=Q6J9V9; Match level="QueryCoverage=33%, HitCoverage=33%, E-value=9e-08, Identity=44%"; Hit description =Putative uncharacterized protein
MTASKKGPGKGDTPKRILLREGNRPRASLLIRGSKAGPSKGFNSRLRAPGFHAHYWSERLGGYSREPGSGQTVDSVNIPARELGTRPYTRATASSHEGTTRPAEVLRNALRPQRSQTTPPRPRGLHPVGALARTHRNKTQPRKAGPLAKKCDKSLQASINTPFEARGLLSGTIIRGTLKTPKSQLVTPISTKLQRPDGCD

SEQ ID NO: 67646 - protein, 139 aa, Zea mays
  Coding DNA Sequence Number=SeqID_24271
MYNKQLVFNNRFRAASKGSSRPTICSMDWKLNIGEFDAMVAFSSCELMRVFGCKGEKWKMLMNKKPSSLRKINALKWCPDDRSRIAVAAGDGHLVTIDFLDFKGRHFKRVERYPKQVVFPAYHGAVVEIKDTVVFRGSL

SEQ ID NO: 67647 - protein, 93 aa, Zea mays
  Coding DNA Sequence Number=SeqID_24272
  Homolog annotation: Hit_ID=A2XBF3; Match level="QueryCoverage=84%, HitCoverage=25%, E-value=2e-30, Identity=75%"; Hit description =Putative uncharacterized protein
MTVEEQGGSGRGSSVMMEPKFAALLWILWIIYKRRTLSNRAEQIYEQVCEILEDNAVNAEIDNSNSEVWVVTSWLRDHLLVPQERKNAFLWKK

SEQ ID NO: 67648 - protein, 135 aa, Zea mays
  Coding DNA Sequence Number=SeqID_24273
MVGVLIEIQRFARRIVGLCASSSGCERNWSRFEFPQGARGCDCGEDENGLTWELVDQAVGASSSLRGRNLPRNANKRARVSHSRFDFEEDFGSANEEEEDQDPHDDVDVTDSEDAHDDVGGENTEAAPDEFEDGY

SEQ ID NO: 67649 - protein, 90 aa, Zea mays
  Coding DNA Sequence Number=SeqID_24274
  Homolog annotation: Hit_ID=Q10T70; Match level="QueryCoverage=43%, HitCoverage=13%, E-value=6e-07, Identity=64%"; Hit description =Expressed protein
SARPPLPTAAEPPPGLFPAREDLVRLLAVIFIAAAAAAACSVLNRRPEPFCDSPQWPDDYADGELLVISLRGENKNKRRDWKDNAVYKAG

SEQ ID NO: 67650 - protein, 174 aa, Zea mays
  Coding DNA Sequence Number=SeqID_24275
  Homolog annotation: Hit_ID=Q6J9V9; Match level="QueryCoverage=40%, HitCoverage=24%, E-value=1e-07, Identity=47%"; Hit description =Putative uncharacterized protein
  Subcellular localization annotation: CTP_CleavageSite=24; ConfidenceScore=5.49e-01
MAAQGAGRAVFSSLAKSLGFRKPKREAGSGAKNRHQTLSREKRVTLRLRRNNRAKKGWPPEGFDSRLRSRGPYTHYWSEVRRPAPRRVPRPPQATRAPRPLLIRGSKAGPRRVHSRLRRRARDDHGYVRYITKARAALPRYPRTYSETSGNDLVTGISSEREASSPRDPVARGP

SEQ ID NO: 67651 - protein, 100 aa, Zea mays
  Coding DNA Sequence Number=SeqID_24276
MEELGSRSYKAHKNNIKKPTRAARPPPRGFLTKLMMMLGAVLRIAESESNNLKAMAHCIPNPHWVLLDWECTCAVYHSTHQSRASLATFSGLSQSKVLKN

SEQ ID NO: 67652 - protein, 189 aa, Zea mays
  Coding DNA Sequence Number=SeqID_24277
  Gene Ontology: Mol. function=small protein activating enzyme activity; Cellular component=nucleus; Biological process=protein modification process
  Homolog annotation: Hit_ID=Q5NBF4; Match level="QueryCoverage=36%, HitCoverage=14%, E-value=2e-14, Identity=53%"; Hit description =Putative UBA3
  Subcellular localization annotation: CTP_CleavageSite=50; ConfidenceScore=5.83e-01
MVRCAGSSSTRAASSGAQGRAVVTTKSGSGSCFNFQQHTRPCLPRVTWPRSSARFGPVKGGPGRQLYRSGGLRQCNVLLMVGKRNETIKHKDRALNLYCLLWIGDKEIEFYSQFHIVVRGLDSIAHCIEYAHLIKWDEVHPGKPFDGDDAEHMQWIYSKIGNDASQFVGPLVLNLLIKRLVVYHITFVT

SEQ ID NO: 67653 - protein, 125 aa, Zea mays
  Coding DNA Sequence Number=SeqID_24278
  Gene Ontology: Mol. function=nucleic acid binding; Cellular component= cytoplasm; Biological process=regulation of translation
  Homolog annotation: Hit_ID=A7QIS9; Match level="QueryCoverage=24%, HitCoverage=6%, E-value=1e-09, Identity=93%"; Hit description =Chromosome chr2 scaffold_105, whole genome shotgun sequence
MGLIGFTIVQAYLLNLFTRGIDIQAVNVVINFDFPKNSETYLHRIILYLGVESIYCILLVASISGNFNVLFWIVRFFYCNFVDLFYSHIVLTEYCFWEQLIRFYGVDLIWCIGDNSKLVDYVYAC

SEQ ID NO: 67654 - protein, 157 aa, Zea mays
  Coding DNA Sequence Number=SeqID_24279
MPYRWLRPIEAKTQLRRRAKQVATPAVSQGQSGGATAPTREGWPYEAIGPPAGVEGRFIRLQGYLWNARRWPEDVYAFQLRILSDPRVGAYANDEKGLKNTFHESVVKNRYSQICFVATLATGAKAITQVKEGNVEYIVVDLDEDESDEESGKELEV

SEQ ID NO: 67655 - protein, 290 aa, Zea mays
  Coding DNA Sequence Number=SeqID_24280
  Homolog annotation: Hit_ID=A2YKC0; Match level="QueryCoverage=14%, HitCoverage=7%, E-value=2e-07, Identity=59%"; Hit description =Putative uncharacterized protein
MRRRNIGPGRHEHLVARVRDDEGPALLQPVQYDQQLQQGEKDRHQVLKDFSKLLDDQIFALNCFSRTAVATCKKNRALLRKLSLVDLAGVSLVGAMDTASVYVGIPCDIPFNSGCNVGLMDEGIVAAMAYPIIHATCEQDIAKGGARTEEDLNVSDEMIFEATVRSEQFFDFNGYPCPMRRNPSDHFLMMINKYFEEVGPLATSINVPIVKLKKCNGIKEEWKPEILGYRRHISPGPVLRPHLTPFLPIWILSHDIVVDSTHVFDLFDTKHNGILRFEDFAQVLSAWHKD

SEQ ID NO: 67656 - protein, 164 aa, Zea mays
  Coding DNA Sequence Number=SeqID_24281
ARPQEHPPVLTRGTHGSIHTPCVSRVLFTYVRDPHVINYFRQKRIHAAVIFTTIRAELPATPRIARSPGLPWISIEPHGPFSPPTRRLPTRYELHLRLESAPELRIRRDSVTIGPILAGEALFGLGPVAWGWRVALLRWELRRVMMAAPPRPDLGRKKMGAPLI

SEQ ID NO: 67657 - protein, 99 aa, Zea mays
  Coding DNA Sequence Number=SeqID_24282
MASFNIQVGAASAPKLAFGSKEKFRPQQSRLYADKEDRIYYKLRHPVYTKQQSKKGAIFKGEASLQKSSSCAPRSYQGAEVGVPTNNFVKGINFAFNIF

SEQ ID NO: 67658 - protein, 140 aa, Zea mays
  Coding DNA Sequence Number=SeqID_24283
  Subcellular localization annotation: CTP_CleavageSite=28; ConfidenceScore=5.27e-01
MGHLIRQAKQIGPRPQTSASPDAEPNPRAQSPSRLRLGLRAISPPHPTLRSASDGFSASPELGLDHLLHHESRGRPLRRLWHTSRDGSSNSSGRVPPRPSRALTLINATENLNVIPRKDVDGPRNQAFSPCPGAVTTTTV

SEQ ID NO: 67659 - protein, 173 aa, Zea mays
  Coding DNA Sequence Number=SeqID_24284
  Homolog annotation: Hit_ID=Q6J9V9; Match level="QueryCoverage=73%, HitCoverage=45%, E-value=1e-37, Identity=65%"; Hit description =Putative uncharacterized protein
  Subcellular localization annotation: CTP_CleavageSite=58; ConfidenceScore=5.21e-01
MRLRKQKQKASTSDRVKNHRRPLFRGSGKGIFRKDPSQRRKQAPSPPTDQGFEGCALRGSATALEHSGSKPLLIRGSKAGPSEGFDSRPKACRVRDDPGYVCYLAEARATLPRYPRTFLRPAGTICNGIPPEGGTKPSDPIKWVRVQRITCRGSEAALALGYDQIVDHVDKPA

SEQ ID NO: 67660 - protein, 50 aa, Zea mays
  Coding DNA Sequence Number=SeqID_24285
MKVNEVLFEVCIVSEDGVVLYSKRYLIHVGNEGSSSTSTFTHNNAVQAQP

SEQ ID NO: 67661 - protein, 65 aa, Zea mays
  Coding DNA Sequence Number=SeqID_24286
MPGILREVAGHSFDICAISRLVRQHLRRFDEDGEHSCPNYACIERLGEQSRPLEPLTMGDTFSVL

SEQ ID NO: 67662 - protein, 74 aa, Zea mays
  Coding DNA Sequence Number=SeqID_24287
MGKLCMKVMGFVARPSTTIVEQIRDVNFIYGTKLQFGIRPFFSLNVIAAEYNSDSPVHAHQGCRHHQYHQRLQR

SEQ ID NO: 67663 - protein, 90 aa, Zea mays
  Coding DNA Sequence Number=SeqID_24288
MSGILREVAGHSFDICAISRLVRQHLHRFDEDGCRRKLLKKVNFISGAKLQFDIRPFFSLNVVAAEYNSDSPVHAQQGFHHHQHHQRLQW

SEQ ID NO: 67664 - protein, 132 aa, Zea mays
  Coding DNA Sequence Number=SeqID_24289
MPGILREVAGHSFDICAISRLVRQHLRRFDEDGLTLSMGLSFNSASAHSSVLMSLPPSTTVTHQCMHTKDVVTTNTINDYNGEEFVFYSPWEYGAKKNSIIDYHTNQNGSLLPPERMYSLLCLALRESIALR

SEQ ID NO: 67665 - protein, 462 aa, Zea mays
  Coding DNA Sequence Number=SeqID_24290
  Gene Ontology: Mol. function=mannose-6-phosphate isomerase activity; Cellular component=cytoplasm; Biological process=carbohydrate metabolic process
  Homolog annotation: Hit_ID=Q2R1L4; Match level="QueryCoverage=81%, HitCoverage=82%, E-value=1e-163, Identity=78%"; Hit description =Mannose-6-phosphate isomerase
  Pfam annotation: Domain name=PMI_typeI; Domain location=40-401; Score= 394.7; E_value=1.5e-115; Accession=PF01238.12; Description =Phosphomannose isomerase type I
MASTTASLAPAAALERLGLLAAPTDADDPSPPLPAPLPGLLPLRCAVQHYEWGRRGADSLVARLAGDGDGRPCAELWMGTHPAAPSSLAPDVSLRDWVARNPAALGRAVAARWGGDLPFLFKVLSVAKALSIQAHPDRELAAALHALRPATYRDANHKPEMAVAVTEFHALCGFAATQELKEVLRTVPEVQELVDKEESRKLLSVKEQDGGIGVRSYLKSAFTKLMTACDEAVSEAITNLKSRLKSESKARSLTKKEQLVLSLEKQYPGDVGVLAAFFLNFVKLNPGEALYVSANEPHAYLSGECIECMATSDNVVRAGLTPKYRDVQTLCSMLTYNQAFPEILQGMPVQPYVTRYTPSTDEFEVDRYLLPPGKSVTMSPVPGPSIFIVLTGEGEIQAGFMTGSAKAKEGDVFFVPANTKGWKRAELSLAWCGSLDGLGLSTQQGTKELQKEARLLSAHLVY

SEQ ID NO: 67666 - protein, 158 aa, Zea mays
  Coding DNA Sequence Number=SeqID_24291
MDLYLQVTYEAVGAETVVSPLAMWIWSVEGRPSRRRHSGWHARGVLTGDDAVDVAWRVKVERVPAIVDFAVAPQNTTTARNNSRAVALESGSARSRGSLGCSTGAVRKMKMGKKKLVAATCLREIKMGAVRVKKCVGKMGHQIKAHVGTSMDAQTAGA

SEQ ID NO: 67667 - protein, 93 aa, Zea mays
  Coding DNA Sequence Number=SeqID_24292
MALVIKHFKNALKGRKYYSNKSKSRGKCTWFKCGLMGNMGLVHNKGFRLGDRRPRGLCSQRPHSFEDGKTWRPQGPQDEGLEDLAQEDYKQIA

SEQ ID NO: 67668 - protein, 102 aa, Zea mays
  Coding DNA Sequence Number=SeqID_24293
MDMGFEEDNTIIRSMKPSHVNFGKSKIKEGHIEILNRFGYIDWVQLGVETPSTAIEAEDKGSSNPTLEEEKGKWPAEIEEAKKAIEDDTSLEEGPFDQFLSG

SEQ ID NO: 67669 - protein, 106 aa, Zea mays
  Coding DNA Sequence Number=SeqID_24294
  Homolog annotation: Hit_ID=O48967; Match level="QueryCoverage=100%, HitCoverage=22%, E-value=8e-13, Identity=40%"; Hit description =Putative uncharacterized protein
MVQIVEHRDMTPADFLMEEEAASSMPRASNCPAPGAAAVHAARQHTPAQSSRAPSRAALGALSAARELLRDPPSFTASPGAMKQWRDDVDRLLSMAHSSSARPKPR

SEQ ID NO: 67670 - protein, 109 aa, Zea mays
  Coding DNA Sequence Number=SeqID_24295
  Subcellular localization annotation: CTP_CleavageSite=48; ConfidenceScore=5.54e-01
MAQQQPRRELASPSAVVAIYSRLSRVLFRAVACCFARRSRVVCALFVRGGLVVACWFVPITICSRASKNRRSSFDDQVIKLSEFYEVEDPEHLFGEGKCPLTHYVPFTL

SEQ ID NO: 67671 - protein, 131 aa, Zea mays
  Coding DNA Sequence Number=SeqID_24296
  Homolog annotation: Hit_ID=A3A737; Match level="QueryCoverage=35%, HitCoverage=4%, E-value=8e-08, Identity=55%"; Hit description =Putative uncharacterized protein
MRACAVLTKWDESDSESFEGFHIGNGFKWDTTRHMFEQFGDIFIAAMFDPMGIGFVSFYAFTNVLCLSAGNRKNQVGIKDGFVQPKSAQSGCTGQCPVRQADSGELAALGKSSATYGYKSPDCPVVHRTVR

SEQ ID NO: 67672 - protein, 57 aa, Zea mays
  Coding DNA Sequence Number=SeqID_24297
MESHDLRAEWESRLVGGYEIDDSGYGYGAGCQHCNHCSGEDEAVEGDFQEFQDYDEF

SEQ ID NO: 67673 - protein, 153 aa, Zea mays
  Coding DNA Sequence Number=SeqID_24298
  Gene Ontology: Mol. function=aspartic-type endopeptidase activity; Biological process=DNA integration
  Homolog annotation: Hit_ID=Q8H6I4; Match level="QueryCoverage=62%, HitCoverage=4%, E-value=7e-12, Identity=38%"; Hit description =Putative gag-pol polyprotein
MRFGSAGRGGTLDVLTTPCVGGVEKVGASRPRRSTSSAGYTPCQEEDGAFDDEVDPPSSDALLITGLHMHPMTVSQGPHEPLVDFSSKGVDSLQRLRFTNPTLTPRHPGVQDPRFWNLFHADFHNLSSCPRSTQSFDIVSLTGRGVRVWGMLT

SEQ ID NO: 67674 - protein, 264 aa, Zea mays
  Coding DNA Sequence Number=SeqID_24299
MDVPPANGIDMHVACQQNGQVSLNAEAAHCLPVEWTGHRLTAEQIGLIKCRGGTSLVRRRALSAINAGATRRTRATPQNHVENGAQWAGPGAPHDKEREYIPVFVARTGPPQEDTGPLYILVRDPKKVCRIPWKASALAGSRDEEDPGEGGVRIIQQAARLTGQLTNSAPVPSGAPYSSSLLQEASPARRRYEDLGCQSARRSPQQHTFVAPSTIFVKPLGPHVGAQYLCACPPSAIKGEACDVTRQVHSHPILGRHSQVHTSS

SEQ ID NO: 67675 - protein, 100 aa, Zea mays
  Coding DNA Sequence Number=SeqID_24300
MPLIKVFHNDSDPYGLKGPSATKHGPNIYHTWGVGLSASFALFLRGVVAVWVESAEVEVDDSEDVDRMDQMLEDLQPELAPDHHDSSTLEVLKFFDLLKA

SEQ ID NO: 67676 - protein, 69 aa, Zea mays
  Coding DNA Sequence Number=SeqID_24301
MSLMAGQPIRVVNFADEPGSKELVDLFPNGLAFFFAKAAQPLSHRGEPKIDSQGMLGDFPRGALHVGGF

SEQ ID NO: 67677 - protein, 143 aa, Zea mays
  Coding DNA Sequence Number=SeqID_24302
MVLEFLDSKSETDVDVGYNSLYSKQNFLQGEVCKISHGEVWSRNNSTATGCQRRALSVAAFGSTKSRINGGALISLSLVLEFKLCGVKMENAYKATVGATTQNGYYVAYDGWGNREDCATVRGHAGERMRGAAGVEVAVLHQI

SEQ ID NO: 67678 - protein, 144 aa, Zea mays
  Coding DNA Sequence Number=SeqID_24303
MYAARSAKVVTKMMFMSMLKVMEVESVRSCSHVPPLEAPPAAPLGVPTTGVVVGGDPDDGGDNSSSSHNTDLSEEQKLEGWVARPITRDATSGCHFHDALDTLLCQALDRRTWSIEYRCVVFQHRREVYLDPLGGDLLGASSGE

SEQ ID NO: 67679 - protein, 78 aa, Zea mays
  Coding DNA Sequence Number=SeqID_24304
MEVGAQPWYLRTQVGITTNQNNTKVDTAPKVNSTPVLFTLIWHLLLRHTCTFIYFQAEAFENKSPTLAPTSGELTSTL

SEQ ID NO: 67680 - protein, 136 aa, Zea mays
  Coding DNA Sequence Number=SeqID_24305
MLKVKKNRKCDLNNEPEGTAIFVRILIQDCNLADGEYVLVPEQGAAQEVAPDPAPEPAPEDLPATALESKPRGLYPSRDLRRGLPFRLWWVQVRSLHDGSRGSLEDMVAGVTWPSILPPGWTVEWDPTSADEEHEE

SEQ ID NO: 67681 - protein, 472 aa, Zea mays
  Coding DNA Sequence Number=SeqID_24306
  Gene Ontology: Mol. function=metal ion binding; Biological process =double fertilization forming a zygote and endosperm
  Homolog annotation: Hit_ID=Q9LWP7; Match level="QueryCoverage=86%, HitCoverage=83%, E-value=2e-89, Identity=46%"; Hit description =Putative uncharacterized protein P0451C06.8
  Pfam annotation: Domain name=DUF641; Domain location=85-220; Score =158.5; E_value=1.8e-44; Accession=PF04859.3; Description=Plant protein of unknown function (DUF641)
MAAAPAPQQRTGGIARRLARLLRRKSSPAGAGMAYSVAGDEFDDSLDSSINSLSKLKLSGNLAAAYTLDAIFKNATEKKAAAAAPQTQKQPSPAKDAAKHAFLATLFARASAVKAAYAQLQLSLHPYDAESIQAADAGLVAELTKLTSLKRRYTRDPAAAARGAGALAAHADEQLHLLRTYEITARKLEAELRARDAEAERARAALADELRAVRGLEERDHPGRRTLDGLHLSGLNATHFLTALQHAVKSVRAFARAMVDAMRPAGWDPAAAAAAAVHPGARLWDPAGDARFALESYVALRMFAGFHRKDLGLSSLHGRGSHDRRRFFQEFAEARAAAAADQLQDASDARWDALREFLRDRYVSVVHESMEAAFFGRGGDALPRAAWLREFAEMARRVWLLHCLFWAFDGAASVFQARPGERFSEVFMVSVRDADAGRSGHVSVGFTVVPGFKLGATVIQCRVYLSHPERRP

SEQ ID NO: 67682 - protein, 53 aa, Zea mays
  Coding DNA Sequence Number=SeqID_24307
MAVAGGQEQRSRRQPSLRPIQGRRENPFSRDRERGIPRKGSFPVKEPGSEPPY

SEQ ID NO: 67683 - protein, 75 aa, Zea mays
  Coding DNA Sequence Number=SeqID_24308
  Homolog annotation: Hit_ID=A2Y663; Match level="QueryCoverage=96%, HitCoverage=39%, E-value=3e-07, Identity=32%"; Hit description =Putative uncharacterized protein
MKKDSLEGLVGRYLDLKSKQVEDEVTQMVKGKESAQDEKIKADEVFDIPNNREIFINFRVDEPETALLWVKTEHG

SEQ ID NO: 67684 - protein, 58 aa, Zea mays
  Coding DNA Sequence Number=SeqID_24309
MTPFFNHLQAARKHADYTERRPVTERLEPVRSDANWPIGQQSCTSGDVQSAGGLVYNP

SEQ ID NO: 67685 - protein, 48 aa, Zea mays
  Coding DNA Sequence Number=SeqID_24310
MALAFCLCPAGAHASGPDPGRLSLSEVDVHTNQLAPALAGWYSRPQMG

SEQ ID NO: 67686 - protein, 106 aa, Zea mays
  Coding DNA Sequence Number=SeqID_24311
  Subcellular localization annotation: CTP_CleavageSite=30; ConfidenceScore=5.36e-01
MAAPQRWPPKTRDGGGSPRSRRSGNHLSVRCANGSKAPTVGFAKEGKKSAPDSPVCQATEGKNCLLEMLSMAPSCLGAIKGTPKRMEENTKHSLSIVDHSHFILAH

SEQ ID NO: 67687 - protein, 297 aa, Zea mays
  Coding DNA Sequence Number=SeqID_24312
  Gene Ontology: Mol. function=binding; Cellular component=anaphase -promoting complex; Biological process=regulation of mitotic metaphase/anaphase transition
  Homolog annotation: Hit_ID=Q949C2; Match level="QueryCoverage=34%, HitCoverage=16%, E-value=2e-42, Identity=81%"; Hit description =Anaphase-promoting complex subunit 8-like protein
MSCHKFLLRHITIKLLPASKSFMLAVWREAENAVNQELVALEKELSTHRRTGSIDSFGLYLYGIVLHDKGCEGLTRKILVEPVNSYPWNWSAWSELQTLCTSSDILNKLNLKNRWMKDFFLASAYLELETHEEDFFLASADSFFGLSCTIDAGPQTVLLKEDFPIPVRVPFVTKKRKQYNIFSSLASLQDSSDKLEHWTVSVKVTLLPYYVHRALHTRRNFSFQENICRAHSVMLIVCILVTRLHAAGYDDLPRMMLARSSWSLATRRTRRLHGAKMSVIGMSQTPNASINIAVFCE

SEQ ID NO: 67688 - protein, 112 aa, Zea mays
  Coding DNA Sequence Number=SeqID_24313
  Subcellular localization annotation: CTP_CleavageSite=52; ConfidenceScore=5.26e-01
MHSCRRRSIAGTQPYDRPGSAARARRGGTPGSRNRSWPAGYDITPSAKTCLSSSKVKRKTSLHSIEILSSRELRQHARSVEQNQNNRCLALCYQSEVHEFPWRVTFLGLIRK

SEQ ID NO: 67689 - protein, 152 aa, Zea mays
  Coding DNA Sequence Number=SeqID_24314
MADLSGCAANGGKEKEGIGKSVKREVTPEFVNMSKEILYPQIQGVTNLSPLRESRPEIQGCFFLRVVAPSDFAHSDGVSSGDSVCKLQNLCWLLYVCQILLDFQVLHWQLFLLVLADTSSICRHVEHICALLTNFSGRFELIGHFLHALLEI

SEQ ID NO: 67690 - protein, 142 aa, Zea mays
  Coding DNA Sequence Number=SeqID_24315
MALKEEQPSKGQPFLPLFGCTEYYTTKIHRSQGTGLRSLIVARVVGKPDAALDTDCDTPGPRCAPPPKVLAEVICGLQLWATCAVVFKLTDCGHQVAVWQCDHSNNFVHIAGARTEAGRCSGTAAAHAAIHLQQAGRVEEVG

SEQ ID NO: 67691 - protein, 90 aa, Zea mays
  Coding DNA Sequence Number=SeqID_24316
  Subcellular localization annotation: CTP_CleavageSite=37; ConfidenceScore=5.01e-01
MRVKCDALSQLIRGTRGVVASPSRRQRGPGTMLALPRLSAEPNGTFAEYVDVYSSLLYHKTPGCPRYNHCSGEDEAVEGDFQEFQDYDEF

SEQ ID NO: 67692 - protein, 87 aa, Zea mays
  Coding DNA Sequence Number=SeqID_24317
MAGVGRSTHAGGDARRRRGVRPGHGEIKQLNGSERFMGCQRRYGCKESRYGARKYGLSPCSNPRQIQGFVVSRARIPMPSSGTRQRG

SEQ ID NO: 67693 - protein, 333 aa, Zea mays
  Coding DNA Sequence Number=SeqID_24318
GLGTLQVVSELLGWPQDMEVRCQTSFCQNEDGFPKLLRACTVRLGIRSQPEYDGHEFVEHGTEKCVVTVYIGSSPHHVEWSVTTAGHKFKDTCQVVARKALRTLCQLYEEEVADTPLRFFPPFQRDRPVWMARMRALEGKQLLEDDPTVVYLTAYLLTLDAQYDFLARHHRQMIARAEDAEKRNRQLHVDLTSAQAHVAALESHEAIAVEALKQAKDEHIQKLMEAYLVTHNQRRALRIQEPASSNPFHPRRAEDPQILEAMDKQEHPESSQDPPPELFEPLTMKKIPAPSLEVKEEAASTPPAPPPSEELQEPVPLEEEFDPVLPSQSPPEE

SEQ ID NO: 67694 - protein, 635 aa, Zea mays
  Coding DNA Sequence Number=SeqID_24319
  Pfam annotation: Domain name=Transposase_28; Domain location=7-190; Score=-49.1; E_value=0.0052; Accession=PF04195.3; Description =Putative gypsy type transposon
MELQPGHTVEFGTSRISSVRVQEMQQLGYFGDGVGRVPGTGEIPEPEGELVVFEAFFIAGLRLLAHRFVAKVLQRFDVLVHQLTPNAVVALVEEFIGYGVWPLAHGWVLGEVFPRQMPTLGEQLVRSPTFALDLRGRNPAAFVREVEDGAVRIVRRYVPRMEALWSWDIHSSNVRLNRVFELNRLPYGGYLGDDAATTVDRRGKKAAAAVEEGPSRGAVPATKRRKLGTSTEGLGVSNHFAVDLMGTCAAPGGRMSSLELRESSARMLEVTGGRWPRNVPTPRAAGEDMFTSRLAHEMEIFPYGRNIAAVVSVVMDKDRQDATRKRRAFTRVGEPSREVKKARGVAKSAAPGSSKPPPAAKPAAPGPSKPSSGARVVAPGLSKPPSAETMKERGPPSPLRTAEVAASGADLSMDIYVDDYRVGGSDAGQLAVVLALVATAPAAAAAEAKGASQDPWSKFCASGKITSAATAKDVGGFCCAAAEACNAVAEACGSLCRSCCVRRSDLEVCCREAMTRGLMEKLAVAELEKEDLNRQLAAEKKDANRACAEAQAARAEAKLARAEANLSCQRAEAETSHNSLRDYLDKTEASTHAEVDRTHAQLADAYRQLGARTAPFDASGKEVGLHFLGWLQEEL

SEQ ID NO: 67695 - protein, 27 aa, Zea mays
  Coding DNA Sequence Number=SeqID_24320
MESLMRPRGRGRRTEDLRKVNRDGRCA

SEQ ID NO: 67696 - protein, 97 aa, Zea mays
  Coding DNA Sequence Number=SeqID_24321
MGRGGADALGAGHGQGWKLCEAAGRSPTTHQPAAHAHTGRAGRHECTTARARPWPPGALLGSHYLLAVGRAGIHNQGASRPWARPWEGSAKRGITTL

SEQ ID NO: 67697 - protein, 81 aa, Zea mays
  Coding DNA Sequence Number=SeqID_24322
MTAAALSLLTEARRRQQGLDSPDSCPFARLQRSSDGHDITRTGCQNLSGCHNGMCEAQGQLSMVVKVMRAHADGSREVKDE

SEQ ID NO: 67698 - protein, 152 aa, Zea mays
  Coding DNA Sequence Number=SeqID_24323
MGRGKRGKGWPRRADWKHKCPSSPPSEDFGDSEYSEEVSSEYDRSPAPASPMASSKDSDNSMGLSVASQAYWRSIERARLNGSDDSEEASSEEVEDSFDSEEWSDGKGDGGEDDGKGSSDSDSGDSKGDGKGDDDSKGDGGDGKAGGIMLLA

SEQ ID NO: 67699 - protein, 203 aa, Zea mays
  Coding DNA Sequence Number=SeqID_24324
MNRHRHSRCHYKWELRFHLRSGDNDFCSERPNSSSDDLRADAAAIKPSPTSPLEGRGRAEGRRVGGQSAGGTDYLVGGETSSSCRGGRWHREQRRSRSDRRAGHAAAASATNGERPSPRSLREGAGRCPRGDRPQLGALPSLALMMNILEAEGGAEAAARLASPHPGAGGHRLGHRGLSLLQHAPRFSPYNMGAGSHASCKLA

SEQ ID NO: 67700 - protein, 240 aa, Zea mays
  Coding DNA Sequence Number=SeqID_24325
  Homolog annotation: Hit_ID=Q6J9V9; Match level="QueryCoverage=30%, HitCoverage=27%, E-value=3e-09, Identity=44%"; Hit description =Putative uncharacterized protein
  Subcellular localization annotation: CTP_CleavageSite=34; ConfidenceScore=5.06e-01
MQAACDRTKGAHPFDFNASSMVAQAHTSCNWRAEAAVKSSAKLTSPPGTAREPSPTDMRHLWQAKQATLHLRHNDRVKKGTGKGDTPKGTLLREGNGPRAPLLIRGSKASPSEGFNSRLRALRLRAHYWLALEGFDSRLRRRARDDPGYVRYITKARATFPRVRLAAAKSGLGRHRKLRLARPQGSDSASAPEDDELRLARPQGSDLALAPEDDELRLARPQGSDSASAPEDNELRLARP

SEQ ID NO: 67701 - protein, 199 aa, Zea mays
  Coding DNA Sequence Number=SeqID_24326
MFSWFKSIVNKMHANKAQLPYDDHERALKLLLALDQRVSEIKVLATIESPNYETLTLDELFSKLKSNEIDHHTQAKIENPGKSKSLKISSKIQLSISMALEDSRSIIEHALNVDPSTRSCKEKLRKMFKDKAKGAKAKVKRLLSASDVAEVPDLSASRDNSDLAEDDPCDPTMTSKPEAPMQSLNQLPVVTDLADARSA

SEQ ID NO: 67702 - protein, 163 aa, Zea mays
  Coding DNA Sequence Number=SeqID_24327
  Subcellular localization annotation: CTP_CleavageSite=41; ConfidenceScore=5.23e-01
MALLILIALSFRSPNKSASYLAILFVQLKSSLTAKHVLTFEASPVQVPHSLQSAKLPHTTAEEPLAWVGLASLDLSGTASALRRLSAELIPIERLRPTSALQRMASLPKISKCFLQISVGTCSPVQVDPTGECSDVDRVFARDGNSSVNLASQGHCAGVFIGI

SEQ ID NO: 67703 - protein, 496 aa, Zea mays
  Coding DNA Sequence Number=SeqID_24328
  Pfam annotation: Domain name=MAP7; Domain location=156-313; Score= -82.9; E_value=0.083; Accession=PF05672.2; Description=MAP7 (E-MAP -115) family
  Subcellular localization annotation: CTP_CleavageSite=31; ConfidenceScore=5.32e-01
MDKDRQGATQKRQAVVRLPEARPKRSRGTAKAAAPGGSQPTLAAKSAAPGSSRVPEAAKAAGTGETKSAPVGAAKARELPPPGKRVADFVTDTSVDDYLVGSGEGQLVVVPPAVATAAAAVVPRAKGSALSAGSEIPALTVVKDEAGAVSRRVKEALSQAVDFADRVASGALTAVVSAEVERLRAQHADAVREKLAADSKCRKLAEKVAALEGERTDLRRQLAEERREANEALAKAQSAQAEANLARVDGSLARQRAEEWEERFNALQTRVERVEASTRSEAEWTRKQLMDSYNELGARTADFEVPDQEPGLRCLEWLQEELLALPAIVEGFMSYASLVTCEGVMNALSREGCRHYEVFDRSDEDFEREIYKVEDPVVKESAGALFDRMWGPHGREVVRERSDTARGQAARNEKVEDFGALNSAQPEAESNPVAAGSEVALVPPPETVEGSLAAPAATAAGGGTSPTALPRAEDPPKTATELAAEDPTAAGSSQVA

SEQ ID NO: 67704 - protein, 46 aa, Zea mays
  Coding DNA Sequence Number=SeqID_24329
MEPRVFVGGSRRYVNYSMVSSPVFALIPIVYSTSQVGFWGAVRGFL

SEQ ID NO: 67705 - protein, 277 aa, Zea mays
  Coding DNA Sequence Number=SeqID_24330
MSAIDHALEEIIPEDLLLEPPETESSVVHTKVPDDVPLAGNLVMQELTWTISHASSTMEGGLARGDTLALDVAGQGHLALVGTTEGASASEGATEDNLVPEGGAKDDLAPKGAELGSSSAASMDVHVGSPLVQSKEPVVMSSPTDLVGPVTLVASDPDAGNLPPAVGANVSLSDALIIVSVNTPSSDRAPMPSALGFPLFLSNLQIPVSVNVAAGELAPRFTPAATIRASVKWITVAGEKILGEENLGLSWIIAVPTCRAVSEISPLVLAVVIVKGT

SEQ ID NO: 67706 - protein, 102 aa, Zea mays
  Coding DNA Sequence Number=SeqID_24331
MCGEVVEDGPDARGPFMLRRGDTLSAEGPPVPGTRAKESDPWVPPVGAPFENKSPTLAPTSSELTSTFELMASFNNQPEAPSTTKLGPFIKSKWSHIPITFS

SEQ ID NO: 67707 - protein, 98 aa, Zea mays
  Coding DNA Sequence Number=SeqID_24332
MARVACTLRGKRLDGGVSVLSPSEVFETRTGACGPNNLGGSATPSACSKIWRSFPLVANNSFILRTFGREGDPQQHLLFLYVVLGVIINMIHDHALLL

SEQ ID NO: 67708 - protein, 144 aa, Zea mays
  Coding DNA Sequence Number=SeqID_24333
  Subcellular localization annotation: CTP_CleavageSite=77; ConfidenceScore=5.33e-01
MASLFFLLPCAQLVLSLFAACVSLCALLSPAPSLPWCALVLASFSLCSSPSCVLEFEFVIFNLGPSHSLSATRHGTLCVARGPALLTALGFRLPARTLGFRLPHAPLAEPVVTVSPCCHSRAYYRDRPAPLCALCFLAELIPVH

SEQ ID NO: 67709 - protein, 98 aa, Zea mays
  Coding DNA Sequence Number=SeqID_24334
MGFALIPAVTEPPKSLGPPTVVLVQQTSDNPVDAPDHLTSSISAVDGIKPNTWPEPWFHGGGDPDKGGGMALEIAFWTTNRIDAIIEAWGKLHGFTRN

SEQ ID NO: 67710 - protein, 192 aa, Zea mays
  Coding DNA Sequence Number=SeqID_24335
MPPRMRKTARKSTRPIGVPRHQLAPRHEESSSGSNDPIGDLETQVEQLRTVLRHRNRVWVEDGQLINELITDIRHLQDELVERDLALDWAVNSRSIAWDREAKARARVEELSTAVDNLQVYYNTLHEEVHELYLRLHPDVPADPIGMGAEPSRTAGAALGGELDLFKPPPSMNLADERSPTTDSEATKDDKY

SEQ ID NO: 67711 - protein, 31 aa, Zea mays; identical to SEQ ID NO: 56063
  Coding DNA Sequence Number=SeqID_24336

SEQ ID NO: 67712 - protein, 414 aa, Zea mays
  Coding DNA Sequence Number=SeqID_24337
MWPPESLLRAPVPRTRASGLHAAPPLRTLPGGWAEGREPSAATSFGFDTTTTAAYVRSTAVTTGAAAATAAGTAAAASTTTGAPLPRPLEGSWSQWLPQPHQRRCQALHWQRPKRFPLRLPPPCRVTLVLRWHRRTPRIRLSPPRRCLWVPKLQLGGPAVAMLPTAVADLEAAIPSDAPSVVGMGGASSSVPSPTPEAPEAILRRPLRSGIEPEATLTPLPQVLSRAHQALRETEAAIRREWEALETEHQRLGDWCTQLEECTKTVSCQFASERAEFEQEREDFKEDIQKVFDREEEVTKKEKSLARKEVWLDQREGAVTALHDKLKAYNTVLEKQRDKQAAAEAKLQKLQQELAEKANDIARAEESLKAREASLAKRATDLTWQEEDLAFREEMWSRRNKLLDELELEAEEKR

SEQ ID NO: 67713 - protein, 244 aa, Zea mays
  Coding DNA Sequence Number=SeqID_24338
  Subcellular localization annotation: CTP_CleavageSite=56; ConfidenceScore=5.71e-01
MRGATCQSAAKTGTTVEVTSSKLTTCTRWVSTARAKKMPRSPVTRSLHRMQVMGPTCRLASSLEVGPGATIGTLKQGYPLLQGEDDVPTVKSLVARQAVRRQTTSAALGSPRGQGEGRAPDTCSGSGPTTWKAPDPVHDGRTSKKDPRPFQVGSGQITTGSRDAGAGNTRTLPWKGSGAGMCPGLAPRSPHRQGPVAAAWHVVHDIRQQAESDVGPLKPPVSAFIAERTRRLPLGQRTMCPLGI

SEQ ID NO: 67714 - protein, 323 aa, Zea mays
  Coding DNA Sequence Number=SeqID_24339
MAERYQLLRSCVPPTTRRKDRRHPPSGGSEGGKTRCIREHEDMVAFQGGRPLFKGDSPYSRPQPSWAESSPTRSKVLPLRRGGWVPHVMQAGPEQKKPNRRARCMQPPSGYKRPSTFSQTSGREGGQPCRRHAAAPSGHTSPTSSAPSMEAQAHASYNRRAGCYVRATALPLAPLPRLLDCGTSTATRGNPTHDPTAPAWRDGQCDQKWASSNGGGRRAGAAVTSASGRGSKRRFAFAIMTASKKAPSLPTDQRFEGWPLEGFNSRLRARGLHTHYWSEVRRPAPQKGSTTASGYSGSAPTTDQGFEGWPSKGSQPPQTQSEG

SEQ ID NO: 67715 - protein, 373 aa, Zea mays
  Coding DNA Sequence Number=SeqID_24340
  Gene Ontology: Mol. function=fructose-bisphosphate aldolase activity; Cellular component=chloroplast; Biological process=metabolic process
  Homolog annotation: Hit_ID=A2ZNM7; Match level="QueryCoverage=98%, HitCoverage=22%, E-value=1e-177, Identity=87%"; Hit description =Fructose-bisphosphate aldolase
  Pfam annotation: Domain name=Glycolytic; Domain location=43-373; Score=786.9; E_value=1.2e-233; Accession=PF00274.10; Description =Fructose-bisphosphate aldolase class-I
  Subcellular localization annotation: CTP_CleavageSite=34; ConfidenceScore=5.47e-01
MAMATAKLSSPATSLLAGGRARRSAPARRATVIRAAAGSYSDELVSTAKSVASPGRGILAIDESNATCGKRLSSIGLDNTEPNRQAYRQLLLTTAGLGEYISGAILFEETLYQSTTDGRKFVDCLKDQNIMPGIKVDKGLVPLPGSNNESWCQGLDGLASRRTVVSIPCGPSALAAKEAAWGLARYAAIAQDNGLVPIVEPEILLDGDHGIERTLEVAEKVWSEVFFYLAQNNVLFEGILLKPSMVTPGADHKEKASPEAIAKYTLTMLRRRVPPAVPGIMFLSGGQSEVEATLNLNAMNQSPNPWHVSFSYARALQNSVLKTWQGRPENVEAAQKALLVRAKANSLAQLGRYTGEGESDEAKKGMFQKGYTY

SEQ ID NO: 67716 - protein, 170 aa, Zea mays
  Coding DNA Sequence Number=SeqID_24341
MAKRSHGVGGGAGVEQESANAKGRRELGGKRAQRLGENAKALASSPEVGPGATVSTLKLGYPLLLYKDAEPTRLSLSHVVEMLCVGPSHDSPQSQMVILGPQQRPTPPHGWVQSRHVSREGGILQSINSESRPPWESAGPSDIQFGPQGWSRTPGYTVRTPKVGPGPPRV

SEQ ID NO: 67717 - protein, 17 aa, Zea mays
  Coding DNA Sequence Number=SeqID_24342
MPAWNDIFKEIWSAWSA

SEQ ID NO: 67718 - protein, 344 aa, Zea mays
  Coding DNA Sequence Number=SeqID_24343
  Gene Ontology: Mol. function=CDP-diacylglycerol-serine O -phosphatidyltransferase activity; Cellular component=integral to membrane; Biological process=phosphatidylserine biosynthetic process
  Homolog annotation: Hit_ID=A2Y796; Match level="QueryCoverage=71%, HitCoverage=84%, E-value=1e-90, Identity=59%"; Hit description =Putative uncharacterized protein
  Pfam annotation: Domain name=PSS; Domain location=117-306; Score =297.6; E_value=2.4e-86; Accession=PF03034.6; Description =Phosphatidyl serine synthase
MGANGHHEPRRGCNGTVCNGSIRPLDYFGDVDPWTAWAYKPRTISLLLTGTCLLIWASGALDPERSSSADRVWSVKRHLQRELQSSFPDSDYCFISPQSKGRLMRRGVPRAFGLIRPHPAIWRLVHGMTVVYLVALTFLLFQTRDDARQFMKYLHPDLGVGIWAGMKTVQYFDGRTYEWVGLSRQPNIISKVKRMLGQFTPAQWDKDEWQPTLGPWRFIQVLSLCVVFMAVELNTFFLKFCLWIPPRNPLVVYRLVLWWLIAIPTIREYNTYLQDSKPFKKVGSFCWLSLAICIVELLICIKFGHGLFPRSMPSWLVTFWSAVALLLALFVWTWKYRTVKRKRV

SEQ ID NO: 67719 - protein, 246 aa, Zea mays
  Coding DNA Sequence Number=SeqID_24344
  Gene Ontology: Mol. function=catalytic activity
  Homolog annotation: Hit_ID=Q6ZKL8; Match level="QueryCoverage=57%, HitCoverage=25%, E-value=4e-38, Identity=58%"; Hit description =Putative uncharacterized protein OJ1118_A06.15
MTESFPACLFAPWKDYTALFIHVGDVCCEAWGHHIPRGDVLASCKPVCALNASVPHQFSGACVLSSWDQLGRDEQSSGDYGRGRDLPEVVDSWGEALGEAVWDWDVVSNKEVVDIVASVPSRVMTTNALVDYAVRSWRLKIPTSKSDDCAVVCLLLDHEKSTDSIQGSEPNMETTKPTRKEICTQDANAGVDKDIADAGVHVSNAKHIFEATQQHTTTLKEVDKIVPINEPTNSKKPRRCRSARCS

SEQ ID NO: 67720 - protein, 99 aa, Zea mays
  Coding DNA Sequence Number=SeqID_24345
MGGSEAATCPEKVAYSKASTVSSDPHGRASDPQIYSLDPQGWSWTPRYIVWTPKVARPYYRVHYAHHCSYVPRKQPSRINTARVADIMAPGDSTGVTCI

SEQ ID NO: 67721 - protein, 86 aa, Zea mays
  Coding DNA Sequence Number=SeqID_24346
MVRILTIFKAGRLLNIDLFLDRSIEEGTLHVHLIKLKAMNKQLLKQKEKMLRKLTPKMIITLLRQANPSHLDFGKSTVSKADLSKM

SEQ ID NO: 67722 - protein, 620 aa, Zea mays
  Coding DNA Sequence Number=SeqID_24347
  Pfam annotation: Domain name=TolA; Domain location=267-610; Score= -153.2; E_value=0.075; Accession=PF06519.2; Description=TolA protein
MHVVGDFLKHQVMPLQRRPRLCCWFTSPNDIGRIQRGPRTDLSWEELELLVKGITGESFIPESLIPPQDIPALCDDPGLRMAVLASLPTLNERGVAPTGAGSRAPTVAPSPLDKGKGAASSSSAPGGTGGRRKRGDTGCVARDESLVSNPPMFWIPPKASEDSWWGRGGRLPGPGRAEARQSPGAAVTTTTTATTTAAATVASTATTATAADVPLLGSLEGPEPQGFLPLCSQGCVSSAGCYARWWVWLSEAGICWEWCRRTADGYHSHNNGDAVEYTVDIGRGGPSCAHPRHGGDAGDASSSISPPTLEETEVVFGWRLRSGAELEAAPVPLPWVLSRAHQALQETEVAIQREWEVLESEHQRLSDWHTQLEERTKAASHQFAFERSELARDRKDYKKDLQKVYARELEASRKEKRLAKREEALNQREKTVAVERIQKWKRELEDKASDIALAEENLKAKDASLDRWAAAQATPSPQAVQATKKALEDLQAEHRARVQCIAAWAGEASTTLVPLGMSPILVSELPTSISDVLPVLDSTADRLRRLDQILGARLEAEGGRLCQAVIEYILTCFWSHNPAISLEPVIAGPVADTKDAAREGVQDTVEVVAERFQRDPADDE

SEQ ID NO: 67723 - protein, 109 aa, Zea mays
  Coding DNA Sequence Number=SeqID_24348
  Gene Ontology: Mol. function=zinc ion binding
  Homolog annotation: Hit_ID=A9PG29; Match level="QueryCoverage=37%, HitCoverage=37%, E-value=4e-07, Identity=51%"; Hit description =Putative uncharacterized protein
MAGTAAATTTVCSMCGDVGFPEKLFRYCTNYYGDSAPASADSDMCDWCLSVVAGKARSPAGKQNATGSQESSTTTGSGGSGRGAAGKAEAGRRATTRPAGRRYKLLKDV

SEQ ID NO: 67724 - protein, 155 aa, Zea mays
  Coding DNA Sequence Number=SeqID_24349
MGKIKKGGSSSHHPDDKRKREPTPPSEVFGDSEYSEEELSSESEGSPVPASPPASYDDSDDSQGLAAEVWTYIRAVKRAGLEGSDESEYSSDEENSSDSSEEGGGSDGGDGDDDGGDGDGGEGDDKGGDGGGKGGSGDGGGGSKDSSRGNNNASG

SEQ ID NO: 67725 - protein, 198 aa, Zea mays
  Coding DNA Sequence Number=SeqID_24350
MRRVLSVLLVTRLVDEHTRAHEGLEWFGLSGRNTLLNCVMYCESELGSDRQRDLSGLTLDSVGRLMSRATSHAAAAGLCPSGERGAIPGHVPAPDPFQGEARVSPAPESWDPVVICPTPHGRVWDLSRRSARYARGPVLPTWQARTYCMYPEHAFVPWPRGDPRRLMLHDGEPAYRATRGFTAGTASIPCNQGYPYFK

SEQ ID NO: 67726 - protein, 81 aa, Zea mays
  Coding DNA Sequence Number=SeqID_24351
  Homolog annotation: Hit_ID=Q8SA97; Match level="QueryCoverage=100%, HitCoverage=12%, E-value=1e-07, Identity=48%"; Hit description =Ornithine carbamoyltransferase
  Subcellular localization annotation: CTP_CleavageSite=30; ConfidenceScore=5.05e-01
MALPVDMAGPRPRSGDVGAPPKPGLSLSSVAEAEPEPLGRARRRRRSFGRGQGGVEFAVFRGLARVRALGWAERSSPSSGA

SEQ ID NO: 67727 - protein, 205 aa, Zea mays
  Coding DNA Sequence Number=SeqID_24352
MEGIHIEVSNASVAQEISERHNVRSAYSINISQLLPSGVDRAHLIPRRHIACQWNGQAARLIRNKCRDRAAQRPYVRLRPLAYVMDSRPRGSIWAPPERGAEAYVVWSGHVSAPDPRLALIKVWVFFVSESRDPAVSGPDPTQRGPGPVPGVRFVPLEVLDLAWRPDTFLWGFEPTVGTLEDIVFSGHMAAPELSMWWGRVLFTT

SEQ ID NO: 67728 - protein, 445 aa, Zea mays
  Coding DNA Sequence Number=SeqID_24353
  Gene Ontology: Mol. function=nucleotide binding; Cellular component =Golgi apparatus; Biological process=regulation of transcription, DNA- dependent
  Homolog annotation: Hit_ID=O23508; Match level="QueryCoverage=82%, HitCoverage=40%, E-value=1e-151, Identity=69%"; Hit description =Growth regulator like protein
  Pfam annotation: Domain name=DUF246; Domain location=53-400; Score =663.5; E_value=1.7e-196; Accession=PF03138.5; Description=Plant protein family
  Subcellular localization annotation: CTP_CleavageSite=55; ConfidenceScore=5.62e-01
MGRKPDAVAKSYHSGGGGAAASSPRAARKASPSPVFLGTALFVLGFVSLFTGHVVTDADWARIRSRWRPKQITDAVVVAWILNATLVVPELDHHSFWKDDSDFSDIFDVEWFISHLSKDVTIVKRIPYEVMLSMDKLPWTMRAPRKSVPEFYIDEVLPILMRRRALQLTKFDYRLTSDLDEDLQKLRCRVNFHALKFTSSIHAMGQKLVQKLRLMNTRYVAIHLRFEPDMLAFSGCYYGGGEKERKELGEIRKRWDTLPELSAEDERSRGKCPLTPHEVGLMLRALGFGNDTLLYVASGEIYGGDSTLQPLRGLFPNFYTKEKLAGDDLNPFLPFSSRLAAIDFIVCDESDVFVTNNNGNMAKVLAGRRRYMGHKRTIRPNAKKLNVLFQTRNQLSWDTFSRKVQRVQRGLMGEPDDIRPKQDDFHEFPSSCICSRKPGNISATT

SEQ ID NO: 67729 - protein, 348 aa, Zea mays
  Coding DNA Sequence Number=SeqID_24354
  Gene Ontology: Mol. function=oxidoreductase activity, acting on the CH-OH group of donors, NAD or NADP as acceptor; Cellular component =cytoplasm; Biological process=tricarboxylic acid cycle intermediate metabolic process
  Homolog annotation: Hit_ID=A3AW68; Match level="QueryCoverage=100%, HitCoverage=94%, E-value=1e-164, Identity=80%"; Hit description =Malate dehydrogenase
  Pfam annotation: Domain name=Ldh_1_C; Domain location=177-347; Score =162.6; E_value=1e-45; Accession=PF02866.9; Description=lactatemalate dehydrogenase, alphabe
  Pfam annotation: Domain name=Ldh_1_N; Domain location=26-175; Score =156.4; E_value=7.5e-44; Accession=PF00056.14; Description =lactatemalate dehydrogenase, NAD bind
  Pfam module annotation: Pfam domain module=Ldh_1_C::Ldh_1_N; Domain location=177-347::26-175
MLPSSLLQRLASWCPWLLRDEPKQPVKVLVTGAAGQIGYAIVAMIARGLMLGPDQPVVLHMLDLPKSTDALSGVRMELIDAALPLLRGVVATSDEAEAFRGVSFAVLIGGWPRKEGMQRKDLIANNVPIYQSQAFALQQHAAPNCKVLVVANPANTNALVLKELAPAVPAKNITCLTRLDHNRALGQISEKLGVHVGDVRNAIVWGNHSSTQFPDASHAIARTQHGEKPVRELIADEKWFKEEFVTVVQQRGEAVIKARKQSSSLSAASAACNHMRDWILGTPKGTWVSMGVCSDGSYGVPKGIFYSFPVTCEKGEWSIVQGLEVDDFARSKMELSANELDEERSMAY

SEQ ID NO: 67730 - protein, 101 aa, Zea mays
  Coding DNA Sequence Number=SeqID_24355
  Gene Ontology: Mol. function=carboxyl- or carbamoyltransferase activity; Cellular component=ornithine carbamoyltransferase complex; Biological process=amino acid metabolic process
  Homolog annotation: Hit_ID=Q8SA97; Match level="QueryCoverage=89%, HitCoverage=21%, E-value=6e-13, Identity=47%"; Hit description =Ornithine carbamoyltransferase
MALPVDVAGPRPRSGDVGAPPKPGLSLSSVAEAEPEPLGRARRRSFGRGQGGVERSGVRRLPGLSPSPSPGSGGAEFAVFRGLAPVRALGRAERSSPSSGA

SEQ ID NO: 67731 - protein, 196 aa, Zea mays
  Coding DNA Sequence Number=SeqID_24356
  Gene Ontology: Mol. function=transcription factor activity; Cellular component=nucleus; Biological process=regulation of transcription, DNA-dependent
  Homolog annotation: Hit_ID=Q3T5P2; Match level="QueryCoverage=44%, HitCoverage=38%, E-value=1e-35, Identity=89%"; Hit description=HvCBF7
  Pfam annotation: Domain name=AP2; Domain location=42-93; Score=77.8; E_value=3.5e-20; Accession=PF00847.11; Description=AP2 domain
  Subcellular localization annotation: CTP_CleavageSite=33; ConfidenceScore=5.75e-01
MDDAQEPPSPPSPSQSSSSSSSSSSVAPNPKKRARKDGSRHPTYRGVRMRSWGKWVSEIREPRKKSRIWLGTFATAEMAARAHDVAALAIKGARDAHLNFPGLAHLLPRPATAPQGRAGRARSPGTFPLPPSPGRQCQEPREQQLRLRSASASDDASAASPGRRTRAQPGRRAVRPPGPASGPEMLRPVFAGHRRD

SEQ ID NO: 67732 - protein, 31 aa, Zea mays
  Coding DNA Sequence Number=SeqID_24357
MAHADAGGHRRSHENGSVTRRRQVQENSCHS

SEQ ID NO: 67733 - protein, 140 aa, Zea mays
  Coding DNA Sequence Number=SeqID_24358
MMIVMHAGDRQCRRCTCDPCACYDNACMGHMPRVCRIGAFPGGRYLPLSSQHLTPPVIAGDHGSITASPSSSPAPRSDVRRAVCAAAPRPSVGSWAASRASGRGQRSGASAAREKPQNPYASLQIGSQCLQTFQTPEALY

SEQ ID NO: 67734 - protein, 68 aa, Zea mays
  Coding DNA Sequence Number=SeqID_24359
MDNIDELTGDRQEDADSEKDRSRLGLQQEALPKGKDHVLKTYVPPDEAANGPPEREMCPWAISKYFGD

SEQ ID NO: 67735 - protein, 334 aa, Zea mays
  Coding DNA Sequence Number=SeqID_24360
  Gene Ontology: Mol. function=metal ion binding; Biological process =metabolic process
  Homolog annotation: Hit_ID=Q10BU5; Match level="QueryCoverage=21%, HitCoverage=28%, E-value=1e-17, Identity=65%"; Hit description=DHHC zinc finger domain containing protein, expressed
  Subcellular localization annotation: CTP_CleavageSite=10; ConfidenceScore=5.11e-01
MASPVTWSVRARGRARRSSSEVEAESGPVGRASGDRRLRSRLSPSPGVGARRRLPSEVEAESELRGRARRRPSSEVEAESELRGRVRRSPSSKVEAESVPWGRARRSPSSEVEVESEPWGRARRSFLWRLRPVLAAVSLTLTGGTTVGAAQAVLFSCQAILALNAPAIQSVGVAIRPRLLLHEACPSWASGESKLCADGGYQLRLGVLGVNKAAKEAEASKEAQRLKNSMRGDAGVLLGPPPWLPEAAVTEAEVAGGTMYRSAGVAMAWNVFRFCTALRGLGSIMILLVLAIVGVTYYAVVLCNYGPALLTGGGTTLAALAVLLLFHFLVRSLT

SEQ ID NO: 67736 - protein, 354 aa, Zea mays
  Coding DNA Sequence Number=SeqID_24361
  Subcellular localization annotation: CTP_CleavageSite=40; ConfidenceScore=5.60e-01
VHMVHGSVVPSSVHAPAPPPTVIPPANPTVILLPRLPSILARPFNTSPVPLPSPSVLHHSTHAPLPSSSVLLPRPMRQRIRSTTSTTRSSLCCTRVATAADAGGATTTVVAQHASSLINSLGNSREGNPDRDGSLSMLFSKKLLAQTGWATGPVVAVARRGGPLPRARMEGRRGASAANERAADPAGDSAGAARRPARVHIHLPAALPGVRLPPPVRGRTLLCSRLPAINARHRTHTRYQHRPSWKVPEDPPPSSPTAVAFPLAGSLTPLCVTFSGGPRLSATPPTKHKEVLRMFLEERQLHGDFVTKISDMLKDELLLLTTGIGAACSLYCLLGFSPSSCDVVHSCSATAPLR

SEQ ID NO: 67737 - protein, 209 aa, Zea mays
  Coding DNA Sequence Number=SeqID_24362
  Homolog annotation: Hit_ID=Q9ASF7; Match level="QueryCoverage=22%, HitCoverage=14%, E-value=2e-07, Identity=52%"; Hit description=SF16 protein-like
MCQVSLLIDVSNKKDVILGYVVVIMQQHIKHMCSRRPESTHDLRSPGNRPRRSYELKGTKHVGDFVIKLEMMSDVIDETLDKDEAEEETEELTNQSTFVYWRLEFSCSMWDFCIIRQEWTVVHIQSAFHAFLALVRGCRVRKQLAIMQKCMNTLLKVQPVWKSPGLRKANRNHMLLYLWCPCYWPKPRAVLAPKPSGKETFTSNGSHGP

SEQ ID NO: 67738 - protein, 128 aa, Zea mays
  Coding DNA Sequence Number=SeqID_24363
MDENQPLKPKSWRSGAQVALTVSSAEATASARGSLTYGDHHLSTNDSSHLRANATSVNGGHPNAHRQVLTPVLVEAVPEHEHRPRGVRHVVRPPRCIRRRREDLDVAGPRTARPTPVRRTGSHALPQR

SEQ ID NO: 67739 - protein, 155 aa, Zea mays
  Coding DNA Sequence Number=SeqID_24364
MALTCGTHTADVPLVPRRAHCWWVSCVSRYRCARAARFGLQVGPFDQGLPQQPCRSFCTDRARLALTLAGDLGVRATIAGRYWRISTWPLTPSSPFPSTLPSAPSPESLHAAQDPATARNRRSSAPFASWKLRVVAEAIAGVVSKGVASVGVRRG

SEQ ID NO: 67740 - protein, 214 aa, Zea mays
  Coding DNA Sequence Number=SeqID_24365
  Pfam annotation: Domain name=IQ; Domain location=122-142; Score=27.0; E_value=7.2e-05; Accession=PF00612.18; Description=IQ calmodulin -binding motif
  Pfam annotation: Domain name=IQ; Domain location=80-100; Score=14.0; E_value=0.56; Accession=PF00612.18; Description=IQ calmodulin -binding motif
  Pfam module annotation: Pfam domain module=IQ::IQ; Domain location =122-142::80-100
  Subcellular localization annotation: CTP_CleavageSite=32; ConfidenceScore=5.28e-01
MDRRSMTPGISSRLSSPPPAAHPSPPPVAAQSAAATPSHPPSPTPDAFTRLEESFGHLAEKWDQFVVMFHRYKEKTEKELQAAVRLQAAAQGFLACRQVQSLRGEKHLAVASRATPWPSSHEQAVVRLQAAVRGFLVRRAVRKLHLLISSSLHQLAACAPNHQVSSILFEPPAEVEIWVSLWQLEDELVLKGGGDVMGIIGSERQQPGWDKARE

SEQ ID NO: 67741 - protein, 178 aa, Zea mays
  Coding DNA Sequence Number=SeqID_24366
  Gene Ontology: Mol. function=nucleic acid binding
  Homolog annotation: Hit_ID=A2Z0E4; Match level="QueryCoverage=32%, HitCoverage=11%, E-value=1e-15, Identity=68%"; Hit description =Putative uncharacterized protein
MPAPTSRPWHPRLAVAGGVVLADPSDIKPSISTAGPFHALLCVRQFFSPEGAAEGSPEDVTDYLEGHASVPIPTYFTDDYGPAAPRLLSKAAAGARGFAPGGIEDGGQFTQLGLSHCPQRPRHHQVFILWNLPTVRPHHTFRLHIEEKTTPIMLIDVDEIHGLEVGRNIVKNLHLAAK

SEQ ID NO: 67742 - protein, 168 aa, Zea mays
  Coding DNA Sequence Number=SeqID_24367
MARIQWFSLIHEMYGDGLFSAILYYTLRLERGRPPPSSCPCSSPRPHRPFLPAIPPPPAPSLPCNPAPASAVSPPPSPEAVRDRCPAFLSPCRSRPRPLPCFPRPAPKPSAIAALRRVRRDRDPGFEASLPLSCPETQPSTPPQTTAARRNPNQSRSQRSERLASTSR

SEQ ID NO: 67743 - protein, 85 aa, Zea mays
  Coding DNA Sequence Number=SeqID_24368
  Homolog annotation: Hit_ID=Q8W0S6; Match level="QueryCoverage=94%, HitCoverage=9%, E-value=3e-36, Identity=91%"; Hit description =Putative uncharacterized protein
  Pfam annotation: Domain name=NHL; Domain location=43-71; Score=28.8; E_value=2e-05; Accession=PF01436.12; Description=NHL repeat
MKAIDELTAFKEKPSENVQSRVSWRKEEVVKEPSVGSFRNLLLYHPACVSVDEDGDRIFISDSNHHRIIISNSNGMILDYKNHAV

SEQ ID NO: 67744 - protein, 140 aa, Zea mays
  Coding DNA Sequence Number=SeqID_24369
MSQSPCYDLSKIVSPFSISNQHDCKAVAMMSAQAPMDTIGAKMSDEQMALARSLLFTSRSVQEGCPGGPEEWWADDNNRHASLCSRTVNFRASGHLPCLDHLDNRHAGSQSIRRKKNGTTECLLGLVEGKRMAPHNLSFS

SEQ ID NO: 67745 - protein, 48 aa, Zea mays
  Coding DNA Sequence Number=SeqID_24370
MTSVALNPIRKQGNVSRIHAAPPAMLLQGSRHFSDGQLAHEMGFEPML

SEQ ID NO: 67746 - protein, 576 aa, Zea mays
  Coding DNA Sequence Number=SeqID_24371
  Gene Ontology: Mol. function=protein serine/threonine kinase activity; Cellular component=plasma membrane; Biological process =protein amino acid phosphorylation
  Homolog annotation: Hit_ID=A3B4W8; Match level="QueryCoverage=92%, HitCoverage=88%, E-value=0.0, Identity=67%"; Hit description =Putative uncharacterized protein
  Pfam annotation: Domain name=Pkinase; Domain location=66-372; Score =276.5; E_value=5.5e-80; Accession=PF00069.16; Description=Protein kinase domain
  Pfam annotation: Domain name=Pkinase_Tyr; Domain location=66-370; Score=-65.0; E_value=2e-08; Accession=PF07714.8; Description=Protein tyrosine kinase
  Pfam annotation: Domain name=efhand; Domain location=407-435; Score =37.9; E_value=3.5e-08; Accession=PF00036.23; Description=EF hand
  Pfam annotation: Domain name=efhand; Domain location=443-471; Score =19.4; E_value=0.014; Accession=PF00036.23; Description=EF hand
  Pfam annotation: Domain name=efhand; Domain location=479-507; Score =33.6; E_value=7.2e-07; Accession=PF00036.23; Description=EF hand
  Pfam annotation: Domain name=efhand; Domain location=515-543; Score =39.5; E_value=1.2e-08; Accession=PF00036.23; Description=EF hand
  Pfam module annotation: Pfam domain module=Pkinase::Pkinase _Tyr::efhand::efhand::efhand::efhand; Domain location=66-372::66 -370::407-435::443-471::479-507::515-543
MGNCCRSPAAAAREDVKSSHFPASAGGKKKPHQARNGGGGGAGEKKRLSVLGEEGCDVGAGIEEKYALDRELGRGEFGVTYLCMDRGTRELLACKSISKRKLRTPVDVEDVRREVAIMRHLPKSPTIVSLREACEDDGAVHLVMELCEGGELFDRIVARGHYTERAAAAVTRTILEVVQLCHRHGVIHRDLKPENFLFANKKENSPLKAIDFGLSIFFKPGELRTPRSIPDLGEPLAAILDFFVDSGWIRGVLLRSGVLGNSDYVQKYFEIKFAYRSMFQATSIKTLAVLTALTGEKFSEIVGSPYYMAPEVLKRNYGPEIDIWSAGVILYILLCGVPPFWADNAKDLVRQMLQPDPKLRLTAKQVLEHPWLQNAKKAPNVPLGDIVKSRLKQFSRMNRFKRRALRDIKEMFKVMDTDNDGIVSYEELKSGIANFGSHLAESEVQMLIEAVDTNGRGALDYGEFLAVSLHLQRMANDEHLRRAFLFFDKDGNGFIEPEELQEALMEDGGADTMDVVNDILQEVDTDKDGKISYDEFVAMMKTGTDWRKASRHYSRGRFNSLSIKLIKDGSVKLGSG

SEQ ID NO: 67747 - protein, 46 aa, Zea mays
  Coding DNA Sequence Number=SeqID_24372
MARDRSAVMPTARERRSWPPPAVEIRNFRVFKVVKSNSYGFLENKR

SEQ ID NO: 67748 - protein, 340 aa, Zea mays
  Coding DNA Sequence Number=SeqID_24373
  Gene Ontology: Mol. function=protein serine/threonine kinase activity; Cellular component=cytoplasm; Biological process=protein amino acid phosphorylation
  Homolog annotation: Hit_ID=Q6I5I9; Match level="QueryCoverage=98%, HitCoverage=74%, E-value=1e-150, Identity=74%"; Hit description =Putative uncharacterized protein OSJNBa0009E21.16
  Pfam annotation: Domain name=Pkinase; Domain location=120-325; Score =81.4; E_value=3e-21; Accession=PF00069.16; Description=Protein kinase domain
  Pfam annotation: Domain name=Pkinase_Tyr; Domain location=120-325; Score=-131.7; E_value=0.00024; Accession=PF07714.8; Description =Protein tyrosine kinase
  Pfam module annotation: Pfam domain module=Pkinase::Pkinase_Tyr; Domain location=120-325::120-325
TGLEDDLRGNINLDVCMVTNEKNADGKEFLKDTYCLHSLPESAIPFDVYGVEDFKVEDTYVQNPTTHKFQEDPKTDPAVSKFQQEYEVFDLKIFHRKSRTGFEENKEFAIVMDSVVAGRYRITEYLGSAAFSKVVRAHDLHTGVDSLDEIKLLKFVNKYDPDDDHHILRLYDYFYYQKYNQQSGDEVYFSLPRIQAIAQQCLEALVYLHHLNIVHCDLKPENILLKSYSRCEIKVIDLGSSCFLSDNLNLYVQSRSYRSPEVILGLPYDQKIDIWSLGCILAELYTGEVLFPNESVPIILARMIGTIGPIDMEMLASGQETQKYFTDDYDLFHKDEVIIG

SEQ ID NO: 67749 - protein, 170 aa, Zea mays
  Coding DNA Sequence Number=SeqID_24374
MALPVDVAGLRPRLGDVEAPPKPRSKARAESEPWGRAKRSSSSSGAEPESEPWGRAEWSSSSSRAEPESEPWVGRSGVRRLPGLSPSPSPGSGGAEFAVFRDLARVRAPGRAERIGVAQAALSFCQAETTDQAKDGGKKSFEVSSAREKVKETRNPKPGVKKKTCKVKVD

SEQ ID NO: 67750 - protein, 144 aa, Zea mays
  Coding DNA Sequence Number=SeqID_24375
  Gene Ontology: Mol. function=peptide-methionine-(S)-S-oxide reductase activity; Cellular component=chloroplast
  Homolog annotation: Hit_ID=A2Y5J9; Match level="QueryCoverage=96%, HitCoverage=96%, E-value=4e-54, Identity=73%"; Hit description =Putative uncharacterized protein
MVRALDRYSSGKDVAYSCGYCGFALNLSSSTRNTANIGSKYGKHIRKGVVSFFAIDESRFTQADEVSCTPYFRSSRSWGFFRNRTRLLCRKCGGHTGHAYEDEGPADDLDMSSRGSSTSPRKKYVIKISALRPSSDDSGALLSP

SEQ ID NO: 67751 - protein, 266 aa, Zea mays
  Coding DNA Sequence Number=SeqID_24376
  Subcellular localization annotation: CTP_CleavageSite=74; ConfidenceScore=5.65e-01
MGGTKMGALVRSAFKFLRASSASGFQVKRSAFLKRRYKGNPFSPRREMKRLRAARHPMTLCTPFKSLMGPMLVMAAIFSGLASMPRSETMNPRSMHRGTPKTHFSGLSFTLFAYRHLNVTSRSERRSEAFLVLTTMLSGTIIRGTPKTPNLNCHFAPPLADLTGKQRRLHYSDCCATRQGLGLNLDLRRRSPPRPTPGLGLNLDLGRRTPPLPTPGLGLNLDLGRRSSPRPTLGLGLSLNLGGASASPDLRLRPTTSQGGTSLPYP

SEQ ID NO: 67752 - protein, 85 aa, Zea mays
  Coding DNA Sequence Number=SeqID_24377
MTLYRSVMGVLRRATVRVPTTASHTVANKLAPPSARHAECIAYTKWVKSTEDSTNWCCPPFGFGTSGHLWSAWAPTPRPPSQAQR

SEQ ID NO: 67753 - protein, 123 aa, Zea mays
  Coding DNA Sequence Number=SeqID_24378
MKALRKNLFGHKRMPTNILPLKAKRNGEDTAAPIIRSPTKNNKNAKPSRHFRIGAQRHGRKRGGQPRGGGGRFGFEVTLARRRRQVWIRGDAGEAAVIYGGGYSARMRLFPAGRLDRFEWAGT

SEQ ID NO: 67754 - protein, 222 aa, Zea mays
  Coding DNA Sequence Number=SeqID_24379
MALTASAALSVSALVQAGGVWCSWRLCEESVGLLLQSFIGGSAKLFRISSQSDRASFADIVRKPALSGANLVPLGGQVRAGFLPSSMQHRSSVFNRISFPVRHRVDQSAIHSTSQAQFARRANFQNLSKFSNDRLERPNSWSSLRGSRACPWASRNLIWPPKKISKQHQEISKNKSVLSINGASDHGSDDSRSLRDNSFSGNNCQLFGFPGQNCKRDFLSFP

SEQ ID NO: 67755 - protein, 929 aa, Zea mays
  Coding DNA Sequence Number=SeqID_24380
  Gene Ontology: Mol. function=binding; Cellular component=nucleus; Biological process=metabolic process
  Homolog annotation: Hit_ID=Q6Z0F9; Match level="QueryCoverage=74%, HitCoverage=95%, E-value=0.0, Identity=56%"; Hit description=PPR -repeat protein-like
  Pfam annotation: Domain name=PPR; Domain location=158-192; Score =31.5; E_value=3e-06; Accession=PF01535.11; Description=PPR repeat
  Pfam annotation: Domain name=PPR; Domain location=259-293; Score =44.7; E_value=3.2e-10; Accession=PF01535.11; Description=PPR repeat
  Pfam annotation: Domain name=PPR; Domain location=360-394; Score =34.0; E_value=5.3e-07; Accession=PF01535.11; Description=PPR repeat
  Pfam annotation: Domain name=PPR; Domain location=461-495; Score =37.8; E_value=3.9e-08; Accession=PF01535.11; Description=PPR repeat
  Pfam annotation: Domain name=PPR; Domain location=496-529; Score =12.2; E_value=0.28; Accession=PF01535.11; Description=PPR repeat
  Pfam annotation: Domain name=PPR; Domain location=532-566; Score=2.0; E_value=4.5; Accession=PF01535.11; Description=PPR repeat
  Pfam annotation: Domain name=PPR; Domain location=57-91; Score=39.7; E_value=1e-08; Accession=PF01535.11; Description=PPR repeat
  Pfam module annotation: Pfam domain module=PPR::PPR::PPR::PPR::PPR::PP R::PPR; Domain location=158-192::259-293::360-394::461-495::496 -529::532-566::57-91
MQSRDVPFGEQVHGKIINLGLDVNLYVGTALVNLYAKVACMDAAMRVFHALPTKNPVTWTAIITGYSRIGHGELALGLFQTMVAQGVQPDRFVLASAVSACSALAFLQGGRQIHGYAYRSAAEVDASVINALIDLYCKCSRPLVARKLFDRMKNHNLVSWTTMIAGYMQNSLDAEAIQMFWQMCQAGWQPDAFACTSILNSCGSMEAISQGTQIHAHAIKVNLENDEYVKNALIDMYAKCAHLTAARVAFDALAHDDVVSYNAMIEGYARQGDLTEAVHIFRKMKYYSIRPNLLTFVSLLGMSSLLSSIEWSKQIHGLIIKSGTSVDLYVGSALIDAYSKSSLVDDAKAVFFMMQNRDMAIWNAMIFGHTQNEQGEEAVKLFNQVRVSGMTPNEFTFVALVTVASNLASMFHGQQFHAQIIKAGCDINPHVSNALVDMYAKCGFIKEGWMLFESTCGKDVICWNSMITMYAQHGHAEEALCAFQLMREAKVEPNYVTFVGVLSACAHAGLVDEGLHHFNSMKSKYGIDPGTEHYASVVNLLGRSGKLHSAQEFIEKMPIKPAAAVWRSLLSACRLFGNVQIGRYAAEMALLEDPSDSGPYVLLSNIYASKGLWVDVQQLRLRMDYAGAVKEPGYSWIEVMKEVHMFIARGTEHPQAELIYAVLDELTGLLKDFGYHPDISELALLGETGPQLVNDSRSKGMVLTNFGPIELLTGMVPYTHLRAEAQRCWDPYPEKRPSFEDIIGELNIAQKPLVSNASVPSFPVSKSQNGTKEVHRYQEASNCFNQGELFVKRSCRSDLKNLWSGCFDQSSEYHPTLNWGSFATSGRRETIEDTHFVPPFMSEEKEVFSFGIFYGHRADAEFSVRAVPGFHKQFGHGASPTYALSEAFVRTDIAFREELIVHRKSKMIIQKRLASRLHGSNSPDSDGLW

SEQ ID NO: 67756 - protein, 107 aa, Zea mays
  Coding DNA Sequence Number=SeqID_24381
  Subcellular localization annotation: CTP_CleavageSite=60; ConfidenceScore=5.70e-01
MSSVAAPRQQPPPASDGPPASDGPSNVQRVGRSPLLRRGAMMLRRYSPKYPTSLPGSPTKGMAAPQPMKDDKPFFLITMTVDNNTSVFWRGINQMYNLVPYLANYKI

SEQ ID NO: 67757 - protein, 113 aa, Zea mays
  Coding DNA Sequence Number=SeqID_24382
MDSKAMAVHGHLKAVDGRGGAGVEDGVDEVQERRPRLLVACAEAELGQAGPDVAPAAGEHAVDIEIMSSSNHNQGDNVNESQSQQGSIPSVNGSEAIGGNEEVEEIEVSNDED

SEQ ID NO: 67758 - protein, 788 aa, Zea mays
  Coding DNA Sequence Number=SeqID_24383
  Gene Ontology: Mol. function=nucleoside-triphosphatase activity; Cellular component=nucleus; Biological process=DNA replication initiation
  Homolog annotation: Hit_ID=Q5JKB0; Match level="QueryCoverage=99%, HitCoverage=83%, E-value=0.0, Identity=88%"; Hit description =Putative replication licensing factor MCM4
  Pfam annotation: Domain name=AAA_5; Domain location=390-556; Score= -4.3; E_value=0.006; Accession=PF07728.5; Description=ATPase family associated with various
  Pfam annotation: Domain name=MCM; Domain location=332-678; Score =637.6; E_value=1.1e-188; Accession=PF00493.14; Description=MCM235 family
  Pfam module annotation: Pfam domain module=AAA_5::MCM; Domain location=390-556::332-678
MSTDDVPPSSEAGDDETDGGGGVDATPVFVWGTNISVQDVNAAILRFLRHFRDPRDAGRVDPVMDEGKYMRAIHRILELEGGESLDVDAHDVFDHDPDLYSKMVRYPLEVLAIFDIVLMDLVARIEPLFEKHIQTRIYNLKSSICLRNLNPSDIEKMVSIKGMIIRCSSVIPELKEAVFRCLVCGFYSEPVMVDRGRVTEPHICQKEQCKATNSMTLVHNRCRFSDKQIIKLQETPDEIPEGGTPHTVSVLMHDKLVDAGKPGDRVEITGIYRAMSIRIGPTQRTVKSIFKTYIDCLHIKKTDKSRLHVEDTMDIDNSNASKSTEEDFLSDKVEKLKELSKLPDIYERLTRSLAPNIWELDDVKRGLLCQLFGGNPLKLPSGASFRGDINILLVGDPGTSKSQLLQYMHKLSPRGIYTSGRGSSAVGLTAYVTKDPETGETVLESGALVLSDKGVCCIDEFDKMSDNARSMLHEVWFAENFMHYLHAKNMVFHVMEQQTVSIAKAGIIASLNARTSVLACANPTESRYNPRLSVIDNIHLAPTLLSRFDLIYLILDKADEQTDRRLAKHIVSLHFENPNLEELEVLDLQTLVSYISYARKYIQPQLSDEAAEELTRGYVEMRKRGNSPGSRKKVITATARQIESLIRLSEALARMRFSEVVEVRDVVEAFRLLEVAMQQSATDHATGTIDMDLIMTGISASERQRRENLVAATRNLIAEKMQLGGPSMRMIELSSSELRVCVLAGVQLLEELRKQSSMEIHMHELRGALGTLMTEGAVVIHGDNVRRV

SEQ ID NO: 67759 - protein, 111 aa, Zea mays
  Coding DNA Sequence Number=SeqID_24384
MEDTMLVLMPSDKMRETPHTTVAAQMLEDAAIGLLHLLYLVLHPATSGLSRDVRCNAPASSPFSAPATLGFSCDVRCNIPNSQHERELLHARRGTSTLRADLVTRKLEAVH

SEQ ID NO: 67760 - protein, 141 aa, Zea mays
  Coding DNA Sequence Number=SeqID_24385
  Pfam annotation: Domain name=bZIP_1; Domain location=33-95; Score =27.3; E_value=5.8e-05; Accession=PF00170.12; Description=bZIP transcription factor
  Pfam annotation: Domain name=bZIP_2; Domain location=32-79; Score =16.0; E_value=0.0094; Accession=PF07716.6; Description=Basic region leucine zipper
  Pfam module annotation: Pfam domain module=bZIP_1::bZIP_2; Domain location=33-95::32-79
  Subcellular localization annotation: CTP_CleavageSite=33; ConfidenceScore=5.53e-01
MASPPTPSTVSTTVTTSPSSTGGSELGPDPQLAAERKRKRKESNRLSAQRSRARKQRQLDDLTAQVAALRARNGAMDAAARDAARRCVAVQAENAMLHARTVELSARLQSLVDLIQCMQAGDAMYQYQQLPLVDATIYNYY

SEQ ID NO: 67761 - protein, 151 aa, Zea mays
  Coding DNA Sequence Number=SeqID_24386
  Homolog annotation: Hit_ID=Q5GAU8; Match level="QueryCoverage=28%, HitCoverage=30%, E-value=7e-14, Identity=79%"; Hit description =Putative uncharacterized protein
MSRAFDDYYIEDYGVILAPEVTQGRTDNNDQFVILATVRPYFRKIFMFRPPEILYATLDPILGAIGCGAEMKYMYREALWQKRGRPRELYPDVSSKDVPVSPELPVPSCDCGRLAWCPTQVPKCKKVDKVQIKDKGKIQLEISWLEQPRLC

SEQ ID NO: 67762 - protein, 469 aa, Zea mays
  Coding DNA Sequence Number=SeqID_24387
  Gene Ontology: Mol. function=transporter activity; Cellular component= integral to membrane; Biological process=transport
  Homolog annotation: Hit_ID=Q9ATM3; Match level="QueryCoverage=36%, HitCoverage=70%, E-value=5e-50, Identity=62%"; Hit description =Aquaporin SIP1-1
  Pfam annotation: Domain name=Isy1; Domain location=11-190; Score= -47.6; E_value=6.5e-08; Accession=PF06246.3; Description=Isy1-like splicing family
  Pfam annotation: Domain name=MIP; Domain location=92-279; Score= -108.1; E_value=0.01; Accession=PF00230.11; Description=Major intrinsic protein
  Pfam module annotation: Pfam domain module=Isy1::MIP; Domain location= 11-190::92-279
  Subcellular localization annotation: CTP_CleavageSite=27; ConfidenceScore=5.06e-01
MPIPARPPPLRNPSVESPPARLLCACPANSPRKPRERRPYLVSGCRDLTDAERWRSEILREIGAKVDEIQNEGLGEHRLRDLNDEINKLLPSAVGVSTAAVTSYQGAQEGASHYALLVTTSLLSVLLFTFDLLCGVLGGASFNPTDFAVSYAAGLDSPSLFSVALRFLVQVVGVVGGALAISELMQAQYKHTLAGPSLKVDPHTGALAEGMLTFIITLTVLWVIIKGPSNVILKALLLSTSIVSVILPGAEYKGPSMNPANGALPVIIQNSQGGFTSYYPKFRKSKESRRDPARRNPATAAANYPPTSRNSATAEATSRSSATQRRLRGRPIALSAAGGRAPDPADIMVVDTVSASTSIIAPHLFDHRSRGAAASHHHHLRRTFHVVACRPLPTAFAGRRLVARVTRQPSSRLADWPVRALAMGSRRRPGPALAGSIGGSPGMVATWGTLGSPAPRRHGLHGTGQMTPN

SEQ ID NO: 67763 - protein, 208 aa, Zea mays
  Coding DNA Sequence Number=SeqID_24388
  Homolog annotation: Hit_ID=A2YMG2; Match level="QueryCoverage=89%, HitCoverage=44%, E-value=2e-10, Identity=32%"; Hit description =Putative uncharacterized protein
MAGSELGNLVSEQCPLLRNLYLFVRLAAASNVSIHSNSLQSLSFNVQNTQKLEVMAPKLEVLAVCDATKAHISAPKLSVVSWDNDTGYNPLCHHFANAARHLRLLHLGSKCVSASLMRQFDEVDVLKLKLNLLNIKIFKADGIILESLEEVKITFIRHCYGQVQFVEEFARCHAPSLKKLVVNSPTKGLQEMVGGLFDPDVTVKCNVI

SEQ ID NO: 67764 - protein, 234 aa, Zea mays
  Coding DNA Sequence Number=SeqID_24389
  Subcellular localization annotation: CTP_CleavageSite=29; ConfidenceScore=5.42e-01
MAGFARLRSLATFEQQKKLTSTCSTPSARARARPRAPPHAQRRARAKPAPWPAPEPIKPSQASTALFRAPSKPHRSLARRRLPVRSKSAAAQSLCYRRPANRAIPNLVQPSGKAGHASGKLPERGIGVCFAGEASPRSPELSTPPEYVDRVNHSTILRFLVHTVATLHREAHRALGIEPVRRSLAGTPHPPTSTPRLRSWDRAIPAIPDVKSYLDVTARVSPSQPHPSRTSLAA

SEQ ID NO: 67765 - protein, 46 aa, Zea mays
  Coding DNA Sequence Number=SeqID_24390
MSADLWPQNSVVAVPEGTGGGTRRERGGCVKAKQLRVKDVVVGSKT

SEQ ID NO: 67766 - protein, 281 aa, Zea mays
  Coding DNA Sequence Number=SeqID_24391
  Subcellular localization annotation: CTP_CleavageSite=62; ConfidenceScore=5.59e-01
MATTTSALTTAATCPPTPHQRTAAAPMRTGRSSLPTSPRLSQNTSTALAAYDVLCDPPVQPTAQGGPGRGRPAHGATDTRAADRQPRSAPAIGGGTGSSARATQAGEPDTRQLPAPRTANALLPRSLREGAGRCPRGGGPRLSAPSSSARMMNILEAEGKGAATSLARPSPPRSRWSSSWMTIGGGMQPGYVMKILEAKQRLESANPHGVALLQQQQEEGNTGAPHLGARKVERHDECEECEGMATARGVDPFLKVDLLTRTPKRHGQSLHRRAVTPGSRG

SEQ ID NO: 67767 - protein, 93 aa, Zea mays
  Coding DNA Sequence Number=SeqID_24392
  Subcellular localization annotation: CTP_CleavageSite=38; ConfidenceScore=5.09e-01
MAQSTVAVLEPLAHRTVRCPHMTVGSATRHARIARPTVGSPDSPVHTGQSVLVLTLVLLLVTLISFLELDLEPYDLHHITVAVTSLAVSHVLM

SEQ ID NO: 67768 - protein, 92 aa, Zea mays
  Coding DNA Sequence Number=SeqID_24393
MSRAFSVYYIMDCGIISASEVTQRRTDNNDQFVILPTVGVAFCAASVYGGVCLMTDDVRGNFFRHAWGVLSNDETMEIVAYIEVCMILMVAM

SEQ ID NO: 67769 - protein, 77 aa, Zea mays
  Coding DNA Sequence Number=SeqID_24394
MRTPCLTMDNMVQPRWTASKRAASELVIHSGSCGYVGLLPEVELAVVKLLLVVDERRQRISRASGMENDIVAIVVVG

SEQ ID NO: 67770 - protein, 91 aa, Zea mays
  Coding DNA Sequence Number=SeqID_24395
  Homolog annotation: Hit_ID=Q2QM62; Match level="QueryCoverage=46%, HitCoverage=4%, E-value=1e-07, Identity=76%"; Hit description =Kinesin motor protein, putative, expressed
MATMSFSIPDAREIPAAVGENLMNGECTKIKVWLNDLAGSEWATKTYAQGERWRFQNFDVSRVRSIELGQAKKQVDVGELSRYKLMVGRAK

SEQ ID NO: 67771 - protein, 658 aa, Zea mays
  Coding DNA Sequence Number=SeqID_24396
  Gene Ontology: Mol. function=nucleoside-triphosphatase activity; Cellular component=ATP-binding cassette (ABC) transporter complex; Biological process=inflammatory response
  Homolog annotation: Hit_ID=A2XIE7; Match level="QueryCoverage=98%, HitCoverage=98%, E-value=0.0, Identity=64%"; Hit description =Putative uncharacterized protein
  Pfam annotation: Domain name=ABC_tran; Domain location=139-324; Score= 70.8; E_value=4.7e-18; Accession=PF00005.18; Description=ABC transporter
  Pfam annotation: Domain name=ABC_tran; Domain location=458-632; Score= 157.3; E_value=4.2e-44; Accession=PF00005.18; Description=ABC transporter
  Pfam annotation: Domain name=Dynamin_N; Domain location=461-611; Score=-44.1; E_value=0.042; Accession=PF00350.14; Description =Dynamin family
  Pfam annotation: Domain name=MMR_HSR1; Domain location=459-532; Score= -20.6; E_value=0.082; Accession=PF01926.14; Description=GTPase of unknown function
  Pfam annotation: Domain name=SMC_N; Domain location=429-635; Score= -109.3; E_value=0.0013; Accession=PF02463.10; Description=RecFRecNSMC N terminal domain
  Pfam module annotation: Pfam domain module=ABC_tran::ABC _tran::Dynamin_N::MMR_HSR1::SMC_N; Domain location=139-324::458 -632::461-611::459-532::429-635
  Subcellular localization annotation: CTP_CleavageSite=48; ConfidenceScore=5.33e-01
MGRKDTSSSSAAAGGGKKEKPMSVSAMLASMDAPAAKPKSSKSAAPSKAKAKPSKAPASSYMGDIDLPPSDDEDQEEAQLAAAKPKPARAAVDLSAGAAPSHKDAKKKDKREAVAAAAAEAARQEALRDDRDAFSVVIGARVPGSSAADGTVDDNVPVPRNIDVLLVEQEIIGDDRSALEAVVAADEELTALQAEQARLEASNDADDNERLVEVYEKLNLVGSDVARARASKILAGLGFDQAMQARSTKSFSGGWRMRISLARALFMQPTLLLLDEPTNHLDLRAVLWLEEYLCSQWKKTLIVVSHDRDFLNTVCNEIIHLHDKSLHVYRGNFNDFESGYEQKRKEMNRKFEVYEKQMKAARKSGSKAAQDKVKGQALSKAAKEAAKNKGKGKSAADDDDDQKQVAVPRKWRDYSVEFHFPEPTELTPPLLQLIEVGFSYPGRPDFKLSGVDVGIDMGTRVAIVGPNGAGKSTLLNLLAGDLIPTEGEARRSQKLRIGRYSQHFVDLLTMEENAVQYLLRLHPDQEGMSKAEAVRAKLGKFGLPGHNHLTPIVKLSGGQKARVVFTSISMSQPHILLLDEPTNHLDMQSIDALADALDEFTGGVVLVSHDSRLISRVCEDEQRSEIWVVEDGTVNRYDGTFEDYKDELMEEIKKEVEE

SEQ ID NO: 67772 - protein, 514 aa, Zea mays
  Coding DNA Sequence Number=SeqID_24397
  Gene Ontology: Mol. function=structural constituent of ribosome; Cellular component=ribonucleoprotein complex; Biological process =translation
  Homolog annotation: Hit_ID=A2YIS2; Match level="QueryCoverage=100%, HitCoverage=100%, E-value=1e-161, Identity=79%"; Hit description =Putative uncharacterized protein
  Pfam annotation: Domain name=Ribosomal_L4; Domain location=23-267; Score=432.2; E_value=7.1e-127; Accession=PF00573.13; Description =Ribosomal protein L4L1 family
MVAVNRPLVSVKALEGDMVTDAPGIALPPVFGAPIRPDVVRFTHKLLSCNKRQPYAVSRRAGHQTSAESWGTGRAVSRIPRVPGGGTHRAGQGAFGNMCRGGRMFAPTKIWRKWHRRVNINLRRVAVASALAATAVPALVQARGHRIESVPEMPLVISDSAESIEKTSQALKILKQIGAHADAEKAKDSVGIRPGKGKMRNRRYINRKGPLIVYGTEGSKVVKAFRNLPGVDVANVERLNLLDLAPGGHLGRFVIWTQSAFNKLEEVYGSYDAPSQKKKGFVLPRPKMSNADLGRIINSDEVQSVVKPLNKEVKRREKRKNPLKNMAAVLKLNPYLGTARKMATLAEAARVKARKAKLDSKRTKLTPGVVRTVDRVASSGVRGELVAVGKAIGRGLAQVESSPEAEAALWAKRSFLSRVRLCPDVCVPHPKLFENSDQSGGAVSGIHGRASSKLVKLHGTVVPSSFVDHNVTWADIRIETAKVKAAGKAWYKTMVSDSDYTEFENFSKWLGVTQ

SEQ ID NO: 67773 - protein, 77 aa, Zea mays
  Coding DNA Sequence Number=SeqID_24398
MAPPAASDSPRRGRSGPNGAAPAPAAWARGPVEGTARHASQQRWCDPVVKRVEKDKCKRQNDSYCRATSLRGATLEQ

SEQ ID NO: 67774 - protein, 54 aa, Zea mays
  Coding DNA Sequence Number=SeqID_24399
MDESKDIPSLVTDLNNSEDFATYVKLANEEAGDEDNDASDPDVMNDEEELFGTF

SEQ ID NO: 67775 - protein, 447 aa, Zea mays
  Coding DNA Sequence Number=SeqID_24400
  Gene Ontology: Mol. function=transferase activity; Biological process= paclitaxel biosynthetic process
  Homolog annotation: Hit_ID=Q9LGF6; Match level="QueryCoverage=99%, HitCoverage=99%, E-value=1e-170, Identity=69%"; Hit description=3'-N- debenzoyltaxol N-benzoyltransferase-like
  Pfam annotation: Domain name=Transferase; Domain location=8-446; Score=170.2; E_value=5.5e-48; Accession=PF02458.6; Description =Transferase family
MESAAAAKTVERLAQRLVPPAEPTPTAPHRLSWLDRYPTQMALIESLHVFKPDPARDGLSPAETIERALARALVDYYPLAGRLAVSDSAGGLHVDCSAEGVWFIEAAVRCRLEDVDYLEYPLQIPKDELLPHPLPRPSHEEESKLILLVQLSDRCPDAYVQVTAFACGGFVVGFRFSHAVADGLGAAKFMGAVGELARGADQVSVAPTWARDAIPDPSGALVGSLPEPTGAKRLEYLAIDISADYIDHFKSQFAAATGGGRCSAFEVLIAKAWQSRTRAAGFEDPDTPVQLCFAMNARPLLGARLPRGGAGFYGNCYYIMRVASTADKVSSSSVTDVVKIIREGKKRLPLEFARWAAGEEGADGVDPYQITSDYRTLLVSDWTRLGFAEVDYGWGPPAHVVPLTNLDYIATCILVKPWAHKPGARLITQCVTPDRVSRFHDAMVDMN

SEQ ID NO: 67776 - protein, 59 aa, Zea mays
  Coding DNA Sequence Number=SeqID_24401
MNDGGLLALALDCLQTLPALLFGLFFLANAQRHVHGPRETRRRIRRVNTNGTAARLAPY

SEQ ID NO: 67777 - protein, 49 aa, Zea mays
  Coding DNA Sequence Number=SeqID_24402
MGGGLLAAAFALRSVLPLFGPPEQKSSSSPLLEQGCLCERELLLAEGDE

SEQ ID NO: 67778 - protein, 403 aa, Zea mays
  Coding DNA Sequence Number=SeqID_24403
MEREGGKGSRRETGVRGGNPAAFVRKERIQAEVESEPLGRARRRPSAEARAESEPWGRAKRSSLSPEAEPESEPWGRAKRSSSSSRAEPESEPWGRAKQSSSSSGAKPESEPWGRAKRSSSSSGAEPESEPWGQAKQSSSSSGAEPKSEPWGRAKRSSSSSGAEPESEPWGRAKRSFPWRLEPDLAAVSLTLSSGTAVGAAQAALSSCQTGQWSGEATFALNAPAIWSVGVAIWPRLLLGEGWASGEPKLCADGGYQLRIRSLEGTPNYGPRHGCARAHPPGVAPEASEEWFDSSEVLMPRTMLRLVWSFPHGERTVQDRLDFFTYAPASPFRKEEGGKAPCCPQRAPNMVSSVSCWRVIRVDARAPFVRGRLEARRRAQKYLRVICRSRSPFDGVRGLDASL

SEQ ID NO: 67779 - protein, 168 aa, Zea mays
  Coding DNA Sequence Number=SeqID_24404
MNKTLAFKMPLQMELRFRPRGYEQPPHRGACGATSSGQLASDLCSSSYGGTDGLDGGEASSGYHHVSTDNGIHLSTNAAPTNAGRSEAHRQVLAPVLAMKTRKRAECCILAGQQQFAFPGMAGGRPLRRARGWFPPPEAGRGGGQPTRARGRAPARLALRPSKDGGHP

SEQ ID NO: 67780 - protein, 243 aa, Zea mays
  Coding DNA Sequence Number=SeqID_24405
  Homolog annotation: Hit_ID=A7P7P3; Match level="QueryCoverage=15%, HitCoverage=11%, E-value=5e-10, Identity=82%"; Hit description =Chromosome chr9 scaffold_7, whole genome shotgun sequence
MGEEFVLPFLDFPTSDSSTLMLTPLSLYLTSVGFEVASPGHRDVVSFSAIANAHARRCKIFDDASSPNNEMIMTHDGRGYIYFLLLSQPARHADEQGAAPASVRNGVNKEEEREREGRSAFFMAVMNGGHQWRKGRSGSLVTAAGGFDCAQGSARRDRALGLGLVRSSRQSGARHRGWREAEGRKLVNGCRMWIAGFLGPSMSISLEKKKVAIPLVCHGSRPVVDLFYSSVTPNGYFLISASK

SEQ ID NO: 67781 - protein, 283 aa, Zea mays
  Coding DNA Sequence Number=SeqID_24406
MAERDQLPRSCVPPTTRRKDCGCPPSGGSEGGRTRCIREREDMVAFQGGHPPFKGDSPYLRPQSSWAESSPTHSKVLPLRRGGLGPTRHANWPRAEEAKPPRAVHATAQRLQAFLHFRPDQRVKGRTAVRAACNRAKWARPSDFQRTQHGGPGPRVMQPARRLLRASNCTATRTTTTPPRLRNQYRDSRQPCVRPRDRERGIPRKRILPREGNRPRASLLIRGSKAGPSEGFNSRLRARGLCTHYWSEVRRPAPQKGSTAASGHLGSAPTTDQGFVGWPSKGS

SEQ ID NO: 67782 - protein, 605 aa, Zea mays
  Coding DNA Sequence Number=SeqID_24407
  Gene Ontology: Mol. function=DNA binding; Cellular component =chromosome; Biological process=regulation of transcription, DNA -dependent
  Homolog annotation: Hit_ID=Q65WY8; Match level="QueryCoverage=96%, HitCoverage=96%, E-value=0.0, Identity=75%"; Hit description=FACT complex subunit SSRP1-B
  Pfam annotation: Domain name=HMG_box; Domain location=524-592; Score =84.7; E_value=2.9e-22; Accession=PF00505.10; Description=HMG (high mobility group) box
  Pfam annotation: Domain name=Rtt106; Domain location=326-470; Score =194.8; E_value=2.1e-55; Accession=PF08512.3; Description=Histone chaperone Rttp106-like
  Pfam annotation: Domain name=SSrecog; Domain location=215-403; Score =367.3; E_value=2.5e-107; Accession=PF03531.5; Description=Structure -specific recognition protein
  Pfam annotation: Domain name=YL1; Domain location=432-602; Score= -88.3; E_value=0.074; Accession=PF05764.4; Description=YL1 nuclear protein
  Pfam module annotation: Pfam domain module=HMG_box::Rtt106::SSrecog::Y L1; Domain location=524-592::326-470::215-403::432-602
MADAHHFNNISLGGRGGGHPGQFKLYSGGLAWKKQGGGKIIEVDKGDITNVAWMRIPKSYQLSVGTKEGLCYRFFGFREQDVSNLTNFIEKSTGITPEEKQLSVSGQNWGGIQINGNMLCFNVGSKEAFEVSLADVAQTQMQGKTDVVLEFHVDDTTGANEKDSLMDLSFHVPTSNTQFIGDEHRTSAQAISVEIDGGGSSEMAVVTFDGIAILTPRGRYSVELHQSFLRLQGQANDFKIQYSSILRLFVLPKFETEAVVERELTLSGEILAEKYKDRLESSYRGLIHEVFSKVLRGLSSAKVTRPSTFRSCLDGYAVKSSLKAEDGLLYPLEKGFFFLPKPPTLIPHEEIEYVEFERHGAGGASISSHYFDLLVKLTNDQELLFRNIQRNEYHNLFNFISGKHLKILNLGDGQGRTSGVTAVLQSTDDDSVDPHLERIKNQAGNEESDEEDEDFVADKDDSGSPTDDSDAEGSDASMSGGEKEKPSKKEASSSKPPVKKKQKSGPDEGSQKKKPKKKKDPNAPKRAIAPFMYFSKAERANIKSSNPELATTEIAKKLGERWQKMTAEERQPYVEQSQVDKQRYAEESAAYRGAAAQQGSGAGSE

SEQ ID NO: 67783 - protein, 244 aa, Zea mays
  Coding DNA Sequence Number=SeqID_24408
  Gene Ontology: Mol. function=transferase activity, transferring glycosyl groups; Cellular component=cytoplasm; Biological process =purine ribonucleoside salvage
  Homolog annotation: Hit_ID=A5C9H5; Match level="QueryCoverage=68%, HitCoverage=98%, E-value=2e-36, Identity=47%"; Hit description =Putative uncharacterized protein
  Pfam annotation: Domain name=Pribosyltran; Domain location=75-214; Score=57.7; E_value=3.9e-14; Accession=PF00156.18; Description =Phosphoribosyl transferase domain
  Subcellular localization annotation: CTP_CleavageSite=59; ConfidenceScore=5.31e-01
MVVVTTRDSGILARFLIKPAAFHPWRDRATTQPTHQRRPNKSPALRARRLATLTFLPCSAAATVASTAMVSAEVGIDYVLWTEDEVSTRVGEVAAELAADLRALPEPAVIVGVATGAFLFLADLVRRVDVRLVVDLVRVESYGAGTESSGKPRITADLKVDVAGKHVVVVEDIVDTGNTLSYLIAHLEKKAIVLKTEKLSWAALPHLCPDYFVVGYGLDYAELYRNLPYVGVLKPEMYKKDSSN

SEQ ID NO: 67784 - protein, 300 aa, Zea mays
  Coding DNA Sequence Number=SeqID_24409
MCGSGSSRSRGVLAESSSSYPSSISSEDAVVYAKAASADASGTEALAAHVEPEGVPRRVRDDGSEDGGELAALRMVAGSRPLRRRGRGRGGVLRQERGMVSRRRRRLSQQISGERTVVSGGKGGGRFGGVRGGHGTRAPHITRGGEGRAGAGAWECWCGRGRWDASVRHSGARASEEPTSRAQLWEVIDAAPPDRRAVVATPPDRGTVVVVQPDQGVIVGAPSNRETIVVESLGSCHCCAVGSGSHCRRGSGSESRHCHAFGSRSRRRRAFGFGIARRSHDRRPPLPPWALVEPPPPLMP

SEQ ID NO: 67785 - protein, 172 aa, Zea mays
  Coding DNA Sequence Number=SeqID_24410
MSSICVVPPTSHVGIRDSSDKATTTPRGRGVGVRDLVPVLELLQRRQDCLRSLVVWLKADGQVDHLLHAQFCPRDRDCRAMAVNCTSWMQPPGDIVAAPTPAMPRFRALHPCPSAAMVVETLEGALRDYGEGKPFLVATASGSWTSCTAAYLGGCVRQMSSTASDPLTLNGL

SEQ ID NO: 67786 - protein, 175 aa, Zea mays
  Coding DNA Sequence Number=SeqID_24411
  Subcellular localization annotation: CTP_CleavageSite=25; ConfidenceScore=5.35e-01
MATTSSRCLLMWPPSTYPILKRACRCGTRVAPPRVAFSCRRPALPHLKAKPIDVALVLCLLVSSAVVVSRLLLVLFECPGAECDVELKAVAPPRWWSGGHRAPGTSLIGHWLEMVKKGKNLGKERNIVDGAEVRRLGKWYGDAMQARMEETLISPDIPRASFTNRFEFDLIICVS

SEQ ID NO: 67787 - protein, 94 aa, Zea mays
  Coding DNA Sequence Number=SeqID_24412
MNMSMGLRIKIGVLIVVGGDKGDWIRKGNVRHLLKLVSHARCKRKFLGIGPRCKTTDQAKDGGKKSFEVPSAWEKVKEAEEPKAKGEEEGLQSQ

SEQ ID NO: 67788 - protein, 253 aa, Zea mays
  Coding DNA Sequence Number=SeqID_24413
  Homolog annotation: Hit_ID=Q6QP51; Match level="QueryCoverage=26%, HitCoverage=30%, E-value=5e-21, Identity=80%"; Hit description =Putative growth-regulating factor 1
  Subcellular localization annotation: CTP_CleavageSite=69; ConfidenceScore=5.74e-01
MQKAHNRTTVVHPFSFVASSGPASSGPVAQRTSAVTRGSPVRDPTVPIECNDHGASDTSGRRSRRRFTSVMMTASKRDWERGYSEKDPSQRRKRAPSPPTDQGFEGCALRGSATVQSTRAPSPLLIRGSKAGPSEGFDSRPRACRVRDDPGYVRYMAEARATLPSLGLGRRSSPRPTPGLGLSLGLGRRSPPRPTPRLDLSLGLGKSYEGTRPVSHLRLLRQHVMMVPRGSRHFFDDHDSSCTGLKALPRQPR

SEQ ID NO: 67789 - protein, 97 aa, Zea mays
  Coding DNA Sequence Number=SeqID_24414
MTKVMLAKGIQSSRNGIKLRFRGPSEAEGPQQHPWEPMGISISTQKKEHIGDLPVLGKILGVLGFKEAKFGCSFYRRSRVYCRKTLLRATTLDEANP

SEQ ID NO: 67790 - protein, 209 aa, Zea mays
  Coding DNA Sequence Number=SeqID_24415
MMVTRLAITERKKWRRKGQGGRFPLLWLSLSGCENLRGRQEAERRTVTRPSPGYIKAKARPVQTFRPDRTRDSKTQSETAVPRTARARATAASPTTRPVALTPWWDRRCLWQEKQATLRLRRNNRAKKGTRLRATLLIRGSKAGPPKGFDSRLRSRGPYTHYWSEVQRSAPRKGSTAASGYSGSAPITDQGFEGWPPKGSQPPQTPSEG

SEQ ID NO: 67791 - protein, 1089 aa, Zea mays
  Coding DNA Sequence Number=SeqID_24416
  Homolog annotation: Hit_ID=A2YH78; Match level="QueryCoverage=99%, HitCoverage=70%, E-value=1e-177, Identity=38%"; Hit description =Putative uncharacterized protein
  Pfam annotation: Domain name=DUF789; Domain location=760-1085; Score=- 16.3; E_value=7.8e-15; Accession=PF05623.3; Description=Protein of unknown function (DUF789)
MPCALEVIDARLQSTSHIQCSRSFDQNIGRRFSKIPKLRPYSFGALYSHQGHLIQKPVAICPENSDTSSTILLFRHDPDWKQAPFLSDTQEVNKPRILFCLDQPNEKNMHDQVDSSKPVSNGNTHGGSTFRQSQQRENVCNSLMAVPPCHVVAKKYSRSVATALSLGSDSDILHNGDKLPKRNSRKRGKQCKRTIRKRLNLASETIFEESTYGASPAEVVPTNLLVDKLSETTSSASSLVKTDGRYKEDHVECGIMLNLATLGTDEMDGSGCAGSSYNDAGGRLSSSCVSYLNDKSNTTDSSEFDGSTFTEHGLGEESNSYQKLTCPYVYNPSYATMDSIFSRWNSDNSGNYSVDVEARLTVKDENRHDHSKLGASTGRSNVRMECQLIGSCFSATHAEDTNDPLGIRSYSSKDVTDSCSHTEMVQCSSKSFHFKSGRRNIKSSKTPSYVDLTASNRVRGSNRHKNNGKDSSAVWQKVERNDKMVSKAGHPSDTPVHDKGANEVGKKGVQEDPTRIRAKHNPNKKVCKQKPSNGAVELEPAKGEDALNSCHTFSGPFYTKQAPFLRQQRNSFSKQGSQSLKNYCAPRNGIPKVAKDYLQQEELPMLVLVHAKNTSDKSSSYSSSADEVGLTGVSNNYPTEGNESSQPDIEVAASVSCNLVPDLAPQAASDDFHISDPHSLRPENKGASNSRSSNNLCTDPFAAEAKEARCVKLLTENNSQEPSDNAAETDYSKMKEVISYVYTAQQRVEDIQLCIGRPIADFENFVYSASPVVHCSSCSVGCKSCLQECVKDGLCLHQTPDITLRTVWQWYEEPSCYGLDVKAQDLWRSKALWNSHCQFTTYFVPYLSAVQLFSQPKRTSGGSIDKESIHRDVTCETSPQLNLPPIFAKLFPKQSVPVNKPSTLRTEDDQQSADGELVFEFFEYEQPYSRRQLFDKVNELIAGAKPSNCQISGDPKNLEASLHDLHPASWYCVAWYPIYRIPDGKFQATFLTYHSLGHWIRRSSSAGGAAVLPVMGLQSYNAKAEWWFEMSKSESEGGQSQASEASEILKERSRTLSEAAAVLSRASVLKNGQMSRNRHPDYEFFLSRS

SEQ ID NO: 67792 - protein, 157 aa, Zea mays
  Coding DNA Sequence Number=SeqID_24417
  Gene Ontology: Mol. function=structural molecule activity; Cellular component=intrinsic to membrane; Biological process=innate immune response
  Homolog annotation: Hit_ID=Q6H7R1; Match level="QueryCoverage=64%, HitCoverage=57%, E-value=9e-25, Identity=45%"; Hit description =Putative vesicle-associated membrane protein-associated protein
  Pfam annotation: Domain name=Motile_Sperm; Domain location=8-94; Score=3.9; E_value=0.013; Accession=PF00635.17; Description=MSP (Major sperm protein) domain
MSTESGELLGIDPVELRFPFELNKQISCTLQLTNKTDKQVAFKSAIMAKEIMSKEVTGDMFTKDSGNIVDEVKLKVVYTAPSSSQSEGFEDGNLGSLSYQECMSAIALIWLYCSRFDIETGLLTRYLKSAQRRPIALGSFFPAYLTHLFQGQLDGTD

SEQ ID NO: 67793 - protein, 113 aa, Zea mays
  Coding DNA Sequence Number=SeqID_24418
  Subcellular localization annotation: CTP_CleavageSite=35; ConfidenceScore=5.45e-01
MCSRPPPLLFPLGRRPPAHLLLSQFLQPPNPSPPSQSPPPKVPILAARIIVVVVRVFNRFGGGKKGGRKGGESKVVDFRIVLRDLPELPVKASKYSGGCYRLVCILFPVIEYA

SEQ ID NO: 67794 - protein, 212 aa, Zea mays
  Coding DNA Sequence Number=SeqID_24419
MRAQGRNEGNNIEVSNASVAQKISERHNLHSAYTIYILRCFLGNRHAAQRPYVRLCPLAYVMGSRPCGSIGSPPERGAEVYMVWSGHVSAPDPRLALIKAKMFFVPESRDPAEGGPDPIQRGPGPVLRVRSVPAEVLDPARRSGPDMQGSGTFPWGSGPTVDTLEDIVFPGHVAPLEPSTWWGHVLFATRLKIAAWTQHLHTIVTGTPFQGF

SEQ ID NO: 67795 - protein, 224 aa, Zea mays
  Coding DNA Sequence Number=SeqID_24420
MQPSAAQRPYVRLRPLAYVMGSKPRGSIGSPPERGAEVYMVWSGHVSAPDPRLALINAWVFFVPESWDPAEGGPDPTQRGEEAHYRRRWRTPHAVDWSAAFGGGEETHHRRRWCAPHAAVRLIRTRRPTLEEHDSWARAPVPEAGPLLSMEVKRRTAAGRRRAPHAAVPVLRTRRPMPKEYDSWARAPMLETGSPWRTSGEVFCGALGRQLGKSLFKKGLPQAW

SEQ ID NO: 67796 - protein, 52 aa, Zea mays
  Coding DNA Sequence Number=SeqID_24421
MARVACTLRGKRLDGGVSVLSVKKRQTFVASVQRWYQNKKTRTKAAGGKVLH

SEQ ID NO: 67797 - protein, 134 aa, Zea mays
  Coding DNA Sequence Number=SeqID_24422
MMVTRSAITEQKGWRRKEQGRRRSKRRFAFALMTATKKGPGKGDTPKRILPREGTRLRASLLIRGSKAGPSEGFDSRLRSRGPYTHYWSEVRRPAPRKGSTTASGYSGSAPTTDQGFEDWPPKGSQPPQTQSEG

SEQ ID NO: 67798 - protein, 104 aa, Zea mays
  Coding DNA Sequence Number=SeqID_24423
MVPPVDVVGPRPRLGDLEAPPKPRSSLSSVVEVESEPLVRVRQRPSAEPESEPWVGRSGVRRLPGLSPSPSPGSGEAELRMTGQWSGEVTAVTSALSAEGRASG

SEQ ID NO: 67799 - protein, 317 aa, Zea mays
  Coding DNA Sequence Number=SeqID_24424
MGSARVAFVLLSLLEERNFAEVGTFQPSLGFKDFHQAARLHPLADGERALTGLAEGADFDNAGLSGHNHRQLQHAWWLEKSSSPTGSLLPSALRASGSLALIACPCPSSGDVGEGLIAAASAMRSSLLLFGRTERRSLSLLPEWAAASYLGFCRPAGPPINPRPLCNESEPEAAVSAWTEAELARKEDFVGPEAGNLPSRGGVAAAAGAWPGRPLAGPTPESSCRGHDPGRRGADIFLRGGDPPTVSSSEAGPDSAEGGVDAEGAAAPLIDDLFVGSRIVYPSESYFSRKVMSEESLGSVDLAAYVYSVVFRIPLSK

SEQ ID NO: 67800 - protein, 138 aa, Zea mays
  Coding DNA Sequence Number=SeqID_24425
  Homolog annotation: Hit_ID=Q6QP54; Match level="QueryCoverage=37%, HitCoverage=18%, E-value=6e-08, Identity=57%"; Hit description =Putative kinase
MAPPVDVVGPRPRLGDVEAPPKPRSSLSSVAEVESEPLVRVRQRPSAELYADGGYQLRIRSLEDCNLADGEYVLVPEQGVAQEVDPDPAPEPAPENLRAPTLEGSLEDMVAGVTWSSILPPGWTVEWDPTSAEEEHEE

SEQ ID NO: 67801 - protein, 252 aa, Zea mays
  Coding DNA Sequence Number=SeqID_24426
  Homolog annotation: Hit_ID=Q6QP51; Match level="QueryCoverage=30%, HitCoverage=34%, E-value=1e-08, Identity=45%"; Hit description =Putative growth-regulating factor 1
MGYPLLQYEGVVSMWLSLVAWRTTLDPTTWTAPGPPRGQEGQYTPRWRQWVRTPQENVGAPNTQPGPLSEDSKAKTTQALIKARRGSGPYHERPHSPLRWRPSAATWPSTRDHLMCPVHSADGRWLGNPVGDVPARSGGRQYARLVTPISTKLQRPDGRDSGQGSVHSRDTISSRPSPASGRNSRPRQIHASPEGLLKQRAHLRLTRGPARGGFAENDRSHFTAPLTGLTGKQRRLPCSDCCATHQSEADSR

SEQ ID NO: 67802 - protein, 64 aa, Zea mays
  Coding DNA Sequence Number=SeqID_24427
MGKPVPSLLMFLLSRVTTLVPTITGMGDHVSCRVRGKVYCQVQSDQHQYDMKVGTINVLTSREC

SEQ ID NO: 67803 - protein, 143 aa, Zea mays
  Coding DNA Sequence Number=SeqID_24428
MHHRRQWRAPHAAVRLLRSRRPTPKEHDSWAWAPVPEAGPLLVSAEVKRRTTAGSGVLLTRRFAFSAHGGRRPRSMTHGPGPSCQRLVRCFRWRPMPKEYDSWARAPVLETGSPWRTSGEVFCGASGHQLGESLFKKGLPRAW

SEQ ID NO: 67804 - protein, 244 aa, Zea mays
  Coding DNA Sequence Number=SeqID_24429
  Gene Ontology: Mol. function=hydrolase activity; Cellular component =cytoplasm
  Homolog annotation: Hit_ID=A3B3T7; Match level="QueryCoverage=100%, HitCoverage=100%, E-value=1e-66, Identity=53%"; Hit description =Putative uncharacterized protein
  Pfam annotation: Domain name=DLH; Domain location=29-243; Score=4.8; E_value=1.4e-07; Accession=PF01738.9; Description=Dienelactone hydrolase family
MASSQCCDNPPALNPACGEGKVVDSFGGLKAYVAGPEDSKAAVVLVADVFVALSNSGSMPMGVRPSPGDRVKGKISETGRDAEIGNAAIKIASPFNTSFILWKFEKGFEETKQVIGALKEKGVSAVGAAGYCWGAKVVVELAKAHEIQAAVLLHPSFVTVDDIKEVKCAISILGAEIDKMSPPELIKQFEQVLSLNSGVGHFVKIFPGVAHGWSVRYNHDDAAAVKSAEEAFADMLDWFNKNLK

SEQ ID NO: 67805 - protein, 191 aa, Zea mays
  Coding DNA Sequence Number=SeqID_24430
  Homolog annotation: Hit_ID=Q5GAU8; Match level="QueryCoverage=16%, HitCoverage=22%, E-value=2e-09, Identity=93%"; Hit description =Putative uncharacterized protein
MTDAEKEVATERIMDLPPRCDCGDRAVIDEDTAKHFVCPNIDYIIPDRRSSLEKQAKRGPSGPLRRTVRNTRMTLGQNQCKNTSFHYGLSGGKAKTVRALARTVRLQARTVRSPLINRGGPSGPGSRTVRAQQNGATARKWLVAINTTPTTSIQDIQAFQPSTFNTRASNPFQDTFKASISPSFTIEKRDH

SEQ ID NO: 67806 - protein, 227 aa, Zea mays
  Coding DNA Sequence Number=SeqID_24431
  Gene Ontology: Mol. function=nutrient reservoir activity; Cellular component=extracellular region; Biological process=cell wall organization and biogenesis
  Homolog annotation: Hit_ID=A2WZ53; Match level="QueryCoverage=87%, HitCoverage=87%, E-value=1e-72, Identity=68%"; Hit description =Putative uncharacterized protein
  Pfam annotation: Domain name=Cupin_1; Domain location=66-218; Score =139.3; E_value=1.1e-38; Accession=PF00190.13; Description=Cupin
  Pfam annotation: Domain name=Cupin_2; Domain location=104-180; Score =47.8; E_value=3.8e-11; Accession=PF07883.2; Description=Cupin domain
  Pfam module annotation: Pfam domain module=Cupin_1::Cupin_2; Domain location=66-218::104-180
MAPKLPVVLLAACAVLLALATPLLAGDPDMLQDICVADYESLEGPLRVNGFPCKREANVTADDFFFGGLAAAADVYSGNPMGSAATAADVSVLPGLNTLGVSMARTDFAPSGGVSPPHVHPRATEILFVVEGTLEVGFVTSANRLFSRAVGKGEVFVFPRGLVHFQRIVGAAPAVAISAFNAQLPGTQTVAGALFGAAPAVPTDVLARALQIDGGAIEYIKSKFAPN

SEQ ID NO: 67807 - protein, 150 aa, Zea mays
  Coding DNA Sequence Number=SeqID_24432
  Gene Ontology: Mol. function=DNA-directed RNA polymerase activity; Cellular component=nucleus; Biological process=transcription
  Homolog annotation: Hit_ID=A2Y4G4; Match level="QueryCoverage=92%, HitCoverage=52%, E-value=5e-74, Identity=98%"; Hit description =Putative uncharacterized protein
  Pfam annotation: Domain name=RNA_pol_Rbc25; Domain location=52-144; Score=-58.4; E_value=0.093; Accession=PF08292.3; Description=RNA polymerase III subunit Rpc25
  Pfam annotation: Domain name=RNA_pol_Rpb7_N; Domain location=3-50; Score=8.5; E_value=0.064; Accession=PF03876.8; Description=RNA polymerase Rpb7, N-terminal domain
  Pfam annotation: Domain name=S1; Domain location=51-133; Score=53.3; E_value=8.7e-13; Accession=PF00575.14; Description=S1 RNA binding domain
  Pfam module annotation: Pfam domain module=RNA_pol_Rbc25::RNA_pol _Rpb7_N::S1; Domain location=52-144::3-50::51-133
MACGFLSLFPFSGRHGFVVAITGVEDIGKGLIREGTGYVTFPVKYQCVVFRPFKGEILEAVVTMVNKMGFFAEAGPVQIFVSNHLIPDDMEFQSGDVPNYTTSDGSVKIQKESEVRLKIIGTRVDATEIFCIGTIKDDFLGVISDPGAAV

SEQ ID NO: 67808 - protein, 220 aa, Zea mays
  Coding DNA Sequence Number=SeqID_24433
  Gene Ontology: Mol. function=protein dimerization activity; Cellular component=nucleus; Biological process=regulation of transcription, DNA-dependent
  Homolog annotation: Hit_ID=Q5VRD1; Match level="QueryCoverage=41%, HitCoverage=52%, E-value=5e-10, Identity=42%"; Hit description=Auxin- responsive protein IAA1
  Pfam annotation: Domain name=AUX_IAA; Domain location=19-171; Score= -92.6; E_value=0.0079; Accession=PF02309.7; Description=AUXIAA family
  Subcellular localization annotation: CTP_CleavageSite=44; ConfidenceScore=5.56e-01
MADLHFSLGRRCPPLVRARAGLPRPQSQSGSRRARSPARCTPPPAMSVDTERSSTESSAASRLGYEDTTLALTLRLPGSDSGRSSSLAAPSDAATSPKARVVGWPPVRSYRKNALADSSKASHAANFVKVVVSRRPLAFSGQSRPSPARPWPPAAALFCSARRALNLAPARRLDLPGAAPLLIFLARASSPWPAAGRQVSRVADISSQRSSSNSKDSKAR

SEQ ID NO: 67809 - protein, 135 aa, Zea mays
  Coding DNA Sequence Number=SeqID_24434
MSTYRGHYHMTGPFIKVSELNLDDYWWAWLGGDRRQGTTGAACVGQGSKSGSQCGLCHREFLERQGDRLGRRSGILGRRKGHAWCDCQGTGSLELYGEPERAGRGAALGHNVGESVGKSFEKPSADDGIHADPIE

SEQ ID NO: 67810 - protein, 248 aa, Zea mays
  Coding DNA Sequence Number=SeqID_24435
MDPSEHPSLGLRPRPRHVAWEIHGQERDARQRRGERKMDDGEAGEGAQRRRQGLQTLREPASYEQLGWSNQPSRIMSNTLMRETVGSKEEKEDSTLPKDVHLIPDLRENGHPGQRIKVPVVPMHVGGRPELPIIRDMNKFSLFPHGQPNVMHSHVAALNICIREAQNMGKTTITDFVPVTLDEEIHDWVIIPIDFLIYFLDPEGGIKTELPTSSFQGYSMVIMFLNPFLSKFWRVDIMSTSPMFSHPS

SEQ ID NO: 67811 - protein, 158 aa, Zea mays
  Coding DNA Sequence Number=SeqID_24436
MGKSNKRKRELTPPSKDFGDSEYSKEEFSSESEGSPAPVSPPASSDDSDDSQGIAAEVWMYIRAVERSGLEGSDESEYSSDEEDSDGGEDEDDDGDDGDDDDGGDGDSDGSGSGGGSGGGDGSKDSTRGGSSTGSTRGGSSKGSTKDGGGGSSSKASG

SEQ ID NO: 67812 - protein, 163 aa, Zea mays
  Coding DNA Sequence Number=SeqID_24437
  Gene Ontology: Mol. function=nucleic acid binding
  Homolog annotation: Hit_ID=A3AQ03; Match level="QueryCoverage=73%, HitCoverage=60%, E-value=4e-07, Identity=33%"; Hit description =Putative uncharacterized protein
MKMLHFDELTKEHEELKCSHVDLVQSKSSFELESTGANDDTYQKLKEENERLKISLTQLKGKCIAQPSQDNCDLMVKKLETGTTVACTKSLEENVKDLRIVKRRKQKKKINTSSKSLNHASIKGNIQGNKELILCRKVKTYNMEESQGMIYSRNLKELTMLVP

SEQ ID NO: 67813 - protein, 302 aa, Zea mays
  Coding DNA Sequence Number=SeqID_24438
  Homolog annotation: Hit_ID=Q7XC67; Match level="QueryCoverage=89%, HitCoverage=85%, E-value=1e-29, Identity=37%"; Hit description=CCT motif family protein, expressed
  Pfam annotation: Domain name=CCT; Domain location=231-275; Score =87.8; E_value=3.4e-23; Accession=PF06203.5; Description=CCT motif
MSASSAACRVCGGVAECACHGHGAGARCGAAVADLNRGFPGMWHQHHQQPEEEEPSVAGGGAAAGLQEFQFFGHDDDHDSVAWLFNDPAPHLHRGPAPAAGAAGNGVVAEAAQRRAPLFDGYAHAQYGQLPGHGLMFDVPLGRGGDDDAAVLEAGLGLGGAGAGAGDSNPATTSSATIILIWPITQVIIGNVKKPPICGPASLRLMSFCGSTFTDAAANGSASGADPAVDREAKVMRYKEKRKRRRYEKQIRYASRKAYAEMRPRVKGRFAKVPDGDAPAPPAPAAAGGYEPGRLDLGWFRS

SEQ ID NO: 67814 - protein, 68 aa, Zea mays
  Coding DNA Sequence Number=SeqID_24439
  Subcellular localization annotation: CTP_CleavageSite=28; ConfidenceScore=5.22e-01
MAIPTRINRVHMRGGLWGKGSRLAQRVSSNSVEQSRGFVPFLRFLQICFPVGVAQLQAFSSTAGRLEH

SEQ ID NO: 67815 - protein, 374 aa, Zea mays
  Coding DNA Sequence Number=SeqID_24440
  Homolog annotation: Hit_ID=Q7XC71; Match level="QueryCoverage=100%, HitCoverage=99%, E-value=2e-76, Identity=44%"; Hit description =Expressed protein
  Pfam annotation: Domain name=DUF828; Domain location=35-277; Score =311.5; E_value=1.6e-90; Accession=PF05703.2; Description=Plant protein of unknown function (DUF828)
  Pfam annotation: Domain name=PH_2; Domain location=253-362; Score =59.0; E_value=1.6e-14; Accession=PF08458.1; Description=Plant pleckstrin homology-like region
  Pfam module annotation: Pfam domain module=DUF828::PH_2; Domain location=35-277::253-362
MEKGWKARDAAGAFMMDLELVAEETDDAVPSIPPPQTPLEPMEYLSRSWSVSASEISKILLGGGKKSSVAAASRLPEVTIPEQSALATTSSVVPLPCHQQNVHHRETRRAKQSSKEKQRAEKAHVHAMVSVARVAAAVAAVASATSSNAQATTTKMATAMASATELLASHCVEAAQHAGARHDQVAAAVQAAVGVRSPGDLMTLTAAAATGTHYAVRRSCVIASQVFHCRFLKQDAKLPCTFGSRRPALRGAATLRQRAQRETRSNASILLPYEKAANSWSPDIWCKEGALLKRARKGVVYGVYSELPTWAEPGKDCIEETCCCFGLSTAQGLVEFECEGNASKQEWIDDVQNLLRQAALHDRVGDKLGLVKLS

SEQ ID NO: 67816 - protein, 337 aa, Zea mays
  Coding DNA Sequence Number=SeqID_24441
  Gene Ontology: Mol. function=transferase activity, transferring glycosyl groups; Biological process=metabolic process
  Homolog annotation: Hit_ID=Q2R1N0; Match level="QueryCoverage=30%, HitCoverage=20%, E-value=5e-21, Identity=50%"; Hit description=UDP -glucoronosyl and UDP-glucosyl transferase family protein, expressed
MLAGLFMELRDATRLVVFVTDQFGTTFFTAARDTSVIAQCLSMPMNLHVLSLVVHLPELVASMPDEFRDLAEPVHLPGCVPISGPDIVLSFQDQSDSLYAVMLRLIVRCVKPPMLSSSIPSTPSSLRLPRRCAIQHSPTGHPYHVGPLILQSKFNSGTSIDFFQREEAERRERDDCDGEASWEKKKRGGGDLPVGQLGGCLVAEGKGGRGRGHGLTPCGRGQGQDYLRRRRWRSRRGRRGPGGGGAAEGACERERKGEGAQGGMEHGHRSRQYSRHRDGGVGEWYVGRSQSVAVWGKKGAVVDLRAGGTRMRDSGGGGTEGTDRGDGRGAMSPIMLP

SEQ ID NO: 67817 - protein, 118 aa, Zea mays
  Coding DNA Sequence Number=SeqID_24442
MDDVDVGGNPVVVGGRELQHCSTNENVKKTSETVVATSPIYGLEQDQDQEASQSAVHVHQVLASPSDGRPPMAMQKQIVGCCYLYGCKRLRSMEILARRKNIRRNRGLKLIIGSLEKS

SEQ ID NO: 67818 - protein, 172 aa, Zea mays
  Coding DNA Sequence Number=SeqID_24443
  Gene Ontology: Cellular component=cytoplasm; Biological process =protein transport
  Homolog annotation: Hit_ID=A2ZA76; Match level="QueryCoverage=33%, HitCoverage=15%, E-value=7e-17, Identity=77%"; Hit description =Autophagy-related protein 3
  Pfam annotation: Domain name=Autophagy_C; Domain location=2-73; Score= -25.3; E_value=0.004; Accession=PF03987.6; Description=Autophagocytosi s associated protein, C-terminal domain
MANVLRNHTALAQVTIEDHPHLLAGKHASVHPCKHAAVMKKIIDVPMSGGVEPEVDNGVLWNSAPPSPRMSARLPVIGRRRSPDTRTPPPPSRRRALCSVMRPERDSAFTCVLMASSGSRRAWFAGGEPSLLAAAFRPYKRAPASACRPGRRSFADRGRTRAVKDSDEKSFG

SEQ ID NO: 67819 - protein, 273 aa, Zea mays
  Coding DNA Sequence Number=SeqID_24444
  Homolog annotation: Hit_ID=O22424; Match level="QueryCoverage=13%, HitCoverage=13%, E-value=3e-07, Identity=77%"; Hit description=40S ribosomal protein S4
MAWRVAGNPHRCTDGTIYNSDDNCFAQDSHIAAVDHSSAQPTQTAFVKCKDETWSECLPYGLAVKPKKKARFCSSVFMSMQQQLCLVSGDKWRWHYQFLDVPGMFGLLYSDIVWFNIFKFDVDNVVMVTGRRNIGRVGVIKNWEKHKGSFKEKSNLKRDDFVQPKSARSGCTGLSGGAPDSVRWFTRQCPVRQVGSGKLAALGALTAVYGYKSPDCPATEGKNCLPGMLSTAPSCLGAIKGAPRRMEKASKYSLSIPKHQDFDSAHLILCDSI

SEQ ID NO: 67820 - protein, 502 aa, Zea mays
  Coding DNA Sequence Number=SeqID_24445
  Subcellular localization annotation: CTP_CleavageSite=52; ConfidenceScore=5.52e-01
MAQGHISLSGIHIPGAPVGGSQSADVAPRASPAVPSSSDKGKGPTSSSSTPDAAGRSEEVRRHRLRRADGSFVLDLPRDSGSPRSIRRQLVGLRRPNLGSRTSRGARALCRHHIRLRHRHHRRLCQTDRRHRRGRGSNSSISNDNGRPASKATRRASSSSASVDAPSPLAAMPAGGSGSHQHTSVGNIAGDSSAATAASSASTLGPPSAAAEEVPVAFAPTMQDDAGAEVVPSNPQDPPITVEATPSDSQVLGGGPEVAALLKGKLTNVLCLSVGNRKKPIENALARAAKFQLSLEHRTVRWCTGQCPVRQAGLSELAALGNPPATYGYNLQDCPVCTGLSGEPTVGRAICAGHVAEPTARRMHRTVRCAPDMSGAPTALSLPTVDCFVYGKKSGTGQCPLPTAATDPTAAIPSDAPSVETEATIWREWEALETEHQRLGDWCTQLEKRTKATSCQFASEQAELEQEREDFKEDIWKACVTAASLGPWALAVLALAPGGSSN

SEQ ID NO: 67821 - protein, 199 aa, Zea mays
  Coding DNA Sequence Number=SeqID_24446
  Homolog annotation: Hit_ID=O48967; Match level="QueryCoverage=99%, HitCoverage=38%, E-value=2e-34, Identity=45%"; Hit description =Putative uncharacterized protein
MVRIAEHRGEISEDFPMEEEAASSTPQSSSHPTLGAGAVRPARRRTPVQAFRTPSEDAPAGALSVAKELLHHLLSPTTSPGAMRQWRDDMDRLLSMAHAGLIKPKPWSYRRWHEASASERSPSMRTAPTRDLQAELNRRHAEGGARVPPEGPGDLRDELNRRRAGKGACSSLEKARERCGNLGQDSAAVAPWAPGDARF

SEQ ID NO: 67822 - protein, 153 aa, Zea mays
  Coding DNA Sequence Number=SeqID_24447
MELLSKSYPTKEKTLKGMLVIWESRISRRVIKIKEVLRDSELRLGKGSWVHQGLRTSFDLGRTRPKERVDGGGGVTAVFDSAQVRSGEELRPNSKLPHLRAIGDQGLTKTGSNWRVTDQRNAGCAEVLHGGARTKKRGNWGCVGISGELESSA

SEQ ID NO: 67823 - protein, 56 aa, Zea mays
  Coding DNA Sequence Number=SeqID_24448
MAPPWGAVCAAAFLFRAVGSLGLLRVNHILYEDLGSNGCEWGLVLKNLDGRSLILR

SEQ ID NO: 67824 - protein, 87 aa, Zea mays
  Coding DNA Sequence Number=SeqID_24449
MAVEFNPRAQEASRGAKESTHARNRRKTHRGARSTYADGGVKSGDVDPASPARVFLRADLVTGDPEGKKSSCYSKLNCKGIPPRWIP

SEQ ID NO: 67825 - protein, 174 aa, Zea mays
  Coding DNA Sequence Number=SeqID_24450
MWRIFITHAKRRLRPLPHVNEDLGNLLLFVASFDHSVFTTFALSFLLDMANCNLADGEYILVPEQEVAQEIAQEPAPEPAIEDLPAPALEGKPRFSLVMDTSMLGRVAALLIRDLGRSQVIFLALVRGQELIVSTFRIGMMMVYGHGSMGMHGLRDGIGIRINVWIPVSSIGTY

SEQ ID NO: 67826 - protein, 73 aa, Zea mays
  Coding DNA Sequence Number=SeqID_24451
MAVGVSEALYAKAVSPDLLTGNRWGRLMCVGTECLATSCSLEDMVAGVTWLSILPPGWTVEWDPTSAEEEHEE

SEQ ID NO: 67827 - protein, 330 aa, Zea mays
  Coding DNA Sequence Number=SeqID_24452
  Homolog annotation: Hit_ID=A2YGA6; Match level="QueryCoverage=53%, HitCoverage=84%, E-value=4e-41, Identity=47%"; Hit description =Putative uncharacterized protein
  Pfam annotation: Domain name=zf-CCCH; Domain location=27-52; Score =23.9; E_value=0.00061; Accession=PF00642.15; Description=Zinc finger C-x8-C-x5-C-x3-H type (and similar)
MREGMKERDRGGSPDASGPPPFRGPAYKTKLCALWRGRGGCPRPNCGFAHGEAELRRPPPRASFQPRPRPGRRDYRDNDFRVRPERRHSPYGRFSPERDIRRRSFRDKRQRASSEDRGSSHSRSPIRKSERKHSKSPDGGKTDSSVSFRSSDNEDKGKDERYLSSDEKNGREEQLKQMHLDMEALREDKSKLEAILEKKTDEERKLCSRVEDLELQLNKEKDDFQRSQARFERLADLLASDILKPYTKEQGSIGITANDDPYNGKRQRENGDDMIPTPENYRPEDALEHVQDSKGTDRLESFTVKKLRVGDYDDEGNIVSSSNIFADRLL

SEQ ID NO: 67828 - protein, 152 aa, Zea mays
  Coding DNA Sequence Number=SeqID_24453
MGKSKKGSGSSHRSGDKRKCEPTPPSEDFDDSEYSEEEFSSESEGSPAPASPPTPSDDSDGSQGIAAEVWTYIRAVERSGLEGSDESEYSSDEEDSSYSSKEGSGGDCGDGDDDGGDGDVGDDSGRGGDGGDEGGSGGSSKGSSKGSNKASG

SEQ ID NO: 67829 - protein, 732 aa, Zea mays
  Coding DNA Sequence Number=SeqID_24454
MCSHFYSAYPPFEVAEEDADEGALRCAAGLSSGRDLVEEFIAYGVWPLAHGWALGEVCPRRMPSHGGKLVRSPVFALDLHSRDLAAFVREVEDGAVRIVGRVFELNGLLYGGYPGQDDVDRRGKKLVVESGDDPVPAAAPSSKKRKLGTTMGGLGVSDGFARELMRTCAAPGGRMSSPELRESSTRMLRVTGGWWPRNVPIPRAADEDFFTSRMVREWKVFPYGRNIAAVVSAVMDKDRQGAAQKRQVVVRLHEARTKRQRGAVKATAPGGGQPPLAAKSAVPASGRAPEAAAAAGGSKAAKAAPASGRVPEAVKSARGLLPPGKRVADFATDISVDDYLVGSDEGQLVVVPPAAATTATAVMPKAKGGALSAGGEMPALAAVRDEAGAVSRRLEEMKEALSQRLRTQHADAVREKSAADSKCRKLADKVAVLEGEKTDLRRQLAEERREANEALAKAQAAQAEANLARVEGGLARERAEQLEERLRALQSRVERAEAATRTEAERTRKQLVDSYHELGARTAEFEVLDREPGLRCLEWVQKELQALPTIVEGFMSYASLVTCEGAMNALSREGCRHYEVFDQADEDFERDIYKVEDSVVKESAGALYDRMWGPHGREVVRERAETARGQAARGERVDDFKALNSTLPDPESNPAEVALEPLPETAEGAPEAPAAAEAGEGPPPETAESVPDAPAAAAAGEGLPPTDVPRVEDPATAAVEATVEAPATAGSS

SEQ ID NO: 67830 - protein, 117 aa, Zea mays
  Coding DNA Sequence Number=SeqID_24455
MVRSRSDAMHHPGEQDRPHRNRAAALPCRAVAHTTAKSARRSRHPKEATVEGARASCASSSGGARRTTAARPAVQRSSECAWVDPQATELATREGGARTVVRRGARLDQWWPCEKQE

SEQ ID NO: 67831 - protein, 26 aa, Zea mays
  Coding DNA Sequence Number=SeqID_24456
MKKINLIKERIRVTVKGESNLGLKLE

SEQ ID NO: 67832 - protein, 248 aa, Zea mays
  Coding DNA Sequence Number=SeqID_24457
  Subcellular localization annotation: CTP_CleavageSite=78; ConfidenceScore=5.82e-01
MAAVLLPACRVSVASSSLALGFLPPSRVFFLRLAPFLLSRLARPCAAHRFTSSPLPLPSRSPRPAEFTPACNRGFRCAAFLLPGLCHARQIESRVVDLRSSCSAIDSAYVDLLIIMDSENSAACPAPTVVPLDRVRLTAAKSSLGCHGKLRLARPRARTQPRPRKTDSASPDPGLRLSLGLGRRTPPRPTQGSDSASTLEDRLRLARPQGSDSASASKDRLRLARPRARTQPRPRKTDSASPDPRART

SEQ ID NO: 67833 - protein, 289 aa, Zea mays
  Coding DNA Sequence Number=SeqID_24458
MTQAGEQERCAAKPTVARRGKLGWARRPAWQGKGRAGEAVRGTGASQARQQEGREPEEEDARWREETQRQGRARNRNAASREEHRGHGEGAGARAPWLWETGARTGRKASRAAVEEEGTYLVLKGVRCSCAHFKSGASISHLTTGNVSGAQRANFTKNPSHQGRKVEGVLHKIGTVVRCEMDAPDLKCAHEHRTPLSTRNADGNRGAASQGEIQSGAMGESFGKERETWRTAELGELEAKPVELEARRGGGRSAMGKQRTPSSARVQGTGTEPRELRAERRGSSMAGSR

SEQ ID NO: 67834 - protein, 147 aa, Zea mays
  Coding DNA Sequence Number=SeqID_24459
MDHLGDGAAEDEVVDLEVMVSVGWERRLGLLHTFPGGLRYNILFNVLGSSIVHTLNLAISFSLTKTTAKKCSSVRCFFHKKTTDMGYVSSVCLSIFCRNQKSCKQGLVFTYTMEPLLVPSMEDVMEDIAKVMTADQPRVNMPLVFER

SEQ ID NO: 67835 - protein, 196 aa, Zea mays
  Coding DNA Sequence Number=SeqID_24460
  Gene Ontology: Mol. function=protein transporter activity; Cellular component=cytoplasmic vesicle; Biological process=retrograde vesicle- mediated transport, Golgi to ER
  Homolog annotation: Hit_ID=A2XY73; Match level="QueryCoverage=75%, HitCoverage=49%, E-value=3e-67, Identity=84%"; Hit description =Coatomer subunit epsilon-2
  Pfam annotation: Domain name=Coatomer_E; Domain location=2-196; Score= 142.7; E_value=1e-39; Accession=PF04733.5; Description=Coatomer epsilon subunit
MVVAEEEAKRWARRSRRKYRSRLMNYSRDLFLFLYFLLIIVADMTSFKIYLQMNRTDHAKKQLRVMQELDEDHTLTQLANAWVDLVLGGSKIQEARLIFQDLSDKYPTTCTILNGKALCSTHMGNFEDAEGLLLESLNKDAKDTETLTNLTVCSLNLGKPATRYLNQLKLAHPDHALVKRMSSAAESFDRACQAMV

SEQ ID NO: 67836 - protein, 30 aa, Zea mays
  Coding DNA Sequence Number=SeqID_24461
MAVEEEEAFDGALTDEQLREPRNKAMREPS

SEQ ID NO: 67837 - protein, 67 aa, Zea mays
  Coding DNA Sequence Number=SeqID_24462
  Subcellular localization annotation: CTP_CleavageSite=44; ConfidenceScore=5.15e-01
MAGAQQQPCAAPLLHLLPIFPTKQHPQRAAVVHASRQCHPSRTRVRYKAGRVNHMHAQLRSDLVQVD

SEQ ID NO: 67838 - protein, 45 aa, Zea mays
  Coding DNA Sequence Number=SeqID_24463
MGTYSCLRYLTQGATTIVFRNLSGLLRIKGDAGDFDGDFIDAEEF

SEQ ID NO: 67839 - protein, 205 aa, Zea mays
  Coding DNA Sequence Number=SeqID_24464
MAGREQEQGEDKQREMSVVGLHSTRTPGKKTRPDAMAGHREDERAEGRRPGSSGRQRSMARAQSTEAGHGHGLGDRLGTRELRAGTPRSERRTPGGARDAGEARARGEGDKLREEKSRDWERRAGGSRCCSGYKSHKRPIDWEEIKERNDFRRIPARWRRYLEARTRAKSRKTANSAPPDSGLGLGLSPGIRRTPLRPTQGSDSG

SEQ ID NO: 67840 - protein, 117 aa, Zea mays
  Coding DNA Sequence Number=SeqID_24465
MVWSRSDAMHHPGEQDRPHRNRAAALPCRAVAHTTAKSARWSRHPKEATVEGAGASCASSRGGVRRTTAARPAVQRSSECAWVDPQATELATREGGARTVVRRGARLDQWWPCEKQE

SEQ ID NO: 67841 - protein, 98 aa, Zea mays
  Coding DNA Sequence Number=SeqID_24466
MNHDGVFTSPPIGTRRTGDGGAGQGKPSCRGAETIEEIAVNLLAHSNSGAESPGCGGGMQDRDSGEQTGAAQRLHAASTHGELGGEIEEDPNSSAAAA

SEQ ID NO: 67842 - protein, 198 aa, Zea mays
  Coding DNA Sequence Number=SeqID_24467
MAREQEPGRRGYGRRARAPAEKLRARPWKKHRRKQGRGEPRGNPAGRHGESFWKEGETWRTAELGELEAKPVELEGGRGGGRLAMGKQRTPSSARAHGTGTEPWELRAERRGSSMAGSRRPWEARDRGGAARMGEWTVEAENHGNTEMDWISDTLFFWDNARYRLFCLEHFSRRVLLNLFGIKSSEWVGLPNSYSRER

SEQ ID NO: 67843 - protein, 479 aa, Zea mays
  Coding DNA Sequence Number=SeqID_24468
MQAACNHTKGAHPFDSDASSVEAQAHTSCNRRAGYYVREAAPPLALVPRLLDCGTSAATRGDPENGPTMPTEHVDHGSVSRGRRRDGRYSQKWAGSNGGGRRAEAAVKSDRERGYSERDPSPRRKRAPSPLLIRGLKAGPSEGFDSRLRALRLRALLLIRGSKVGPSEGFDSRLRALGLRAHHWSEVRRLAPRMGSTAASGHSGSAPTTNQGFVGWPPKGSTTASEHAERGMTLGTFDTWPRIGLRSRGSGAALANPAPAKPLTTSTYQPENLEPDYAPGLRPENSAACLAPTAVPLERVRLTVAKSSLGRHGKLHLARLRARTQPRPWKTDSASLDPGLGRSLDLGRRTPPHPTQGSDSASASEDRLRLTRPRARTQPRPQKTDSASPDPRARTQPRPRKTDSASPDPGLGLSLDLGRQTPPRPTPGLGLSLDLRRRSPPRPTLGPRLDLDLGGASTSPDLGLRPTTSQGGHHYPTPT

SEQ ID NO: 67844 - protein, 162 aa, Zea mays
  Coding DNA Sequence Number=SeqID_24469
MGKSKKGESSSHHSGDKQKHEPSPPSEDFGDSEYSEEEFSSESEGSPGITAEVWTYIRAIERSGLEGSDESKVPRTRRTPLTRPRRGAAVTATTRATTTTEVTMVVTVTARKNGCVTAGVFRGNSRMVLGDVSVFDCNSRVMLSHIGVLEVTTEWCLATSAF

SEQ ID NO: 67845 - protein, 337 aa, Zea mays
  Coding DNA Sequence Number=SeqID_24470
MHHTLPRSEPPDGERPRFFHLVVVGGKQLRGSWYLSAIARLQGFSSGSPAASPRRWSPKTVTTSSMVGRSEPGCGLCPALSFKDLHHPGWGGGRAELELYLPRGFVGHLLPQHSGERALTGLAEGADSDNAGLVGRERRQLQHVGPAGSAGSGSAPDAPSRRTSGRRAARTGGPPKTSRAARAAFMFLGCPAFAPTAAVVGAEVVAAGEVLVADEIAATIRAPGLWLFGFDSMSSPLEWGCGRGPYRSSVCPEVIAAAVWPPGAEVIVAAGAGDGEPPGVLSPCRPSNVGGCSYLRGWNRSSIRNGTLSAGVCSLWLSGPEHVVFWREAVFRPYFEN

SEQ ID NO: 67846 - protein, 269 aa, Zea mays
  Coding DNA Sequence Number=SeqID_24471
  Subcellular localization annotation: CTP_CleavageSite=99; ConfidenceScore=5.36e-01
MAPPVTWSVRALGRARRRLLRGRGRVYLPRSRSSLSPWVGRGGDRRLRPGLSPSPGVGRGGVRRLPGLRTSPSPGSGETEFVFRGRGRVQALGRARRSSSSSGAEAESEPWVGRGGVRRLPRLSPSPSPGSGEAELPMAPEAGLGRCQPHSVEWHSSRSDTGGAIFLSDWIRCQATFALNAPAIRSVGVAIWSRLLLGEDWASGEPKWVEMFSKRKTCDGGSIKALIGSTSEKMYLCQVKKRQTFVASVQRWYPKKRTKTKAAGGKALR

SEQ ID NO: 67847 - protein, 234 aa, Zea mays
  Coding DNA Sequence Number=SeqID_24472
  Subcellular localization annotation: CTP_CleavageSite=42; ConfidenceScore=5.41e-01
MTKSRAREDGFNSSTTNASTREVRWTKSECAAVTTSRRMSVNASQRQARVMRYKYNRQHSANRTTTANKLEHQRVADAGEHSRQDVKRRGELNKDSARELDAMGSSHGLPCTMLQRNKDRAKLDAGRNTTQYLARRSAAQAQGAQCSGHGRCCGGTRQEKNKTEQATGGAPAGEEAAPLLGTRGGRARHQGERQGVRQTVRSELGPSTGHGSLDRRGVRELQPGAEHREIGELD

SEQ ID NO: 67848 - protein, 154 aa, Zea mays
  Coding DNA Sequence Number=SeqID_24473
MARYNGPDHTWASELDEAALRDDVVAGLRLVPNRAKGVLARFVSVRPATAAKASSEGWPVLDALQSILESVSHGTKLVEKRTTCIYPVFVWFHLILSFRRFIVGGSEFCVSQETSRLTSLFLVFMPTMQDNTATLMELDDFIRLDCIWMGWTLL

SEQ ID NO: 67849 - protein, 249 aa, Zea mays
  Coding DNA Sequence Number=SeqID_24474
  Gene Ontology: Mol. function=nucleic acid binding; Cellular component= mitochondrion
  Homolog annotation: Hit_ID=A2Y8L0; Match level="QueryCoverage=77%, HitCoverage=83%, E-value=6e-61, Identity=64%"; Hit description =Putative uncharacterized protein
  Subcellular localization annotation: CTP_CleavageSite=41; ConfidenceScore=5.49e-01
MAAAAAAARRLLSRRASSNSLSAFLRRGAAPEQSLLRPAVVAAASRLGFPRGMARRPGGDGYGAGRDRAPTEMAPLFPGCDYEHWLIVMDKPGGEGATKQQMIDCYIQTLAKVLGSEEEAKKKIYNVSCERYFGFGCEIDEETSNKLEGSFNLCSMMPLLRLPGVLFVLPDSYVDPEYKDYGAELLVNGEIVQRPPERQRRVEPVPQRAADRPRVNGTERDCESGIGTERLRSIDFLERNGSGSEENIL

SEQ ID NO: 67850 - protein, 33 aa, Zea mays
  Coding DNA Sequence Number=SeqID_24475
MGLCVSVQKLEHGWTAREKLCEPEKRVFTCDDA

SEQ ID NO: 67851 - protein, 94 aa, Zea mays
  Coding DNA Sequence Number=SeqID_24476
  Homolog annotation: Hit_ID=Q8W0X6; Match level="QueryCoverage=35%, HitCoverage=10%, E-value=4e-07, Identity=87%"; Hit description =Putative prpol
MASAEDEADCSVAKDAIEGIRLQAVENINKDQSLQRKVNADSAKSKGEEAPKTFLRECRAYSEIYYLNLQGSFGFGVIFDPPPSASSSYMNKIV

SEQ ID NO: 67852 - protein, 203 aa, Zea mays
  Coding DNA Sequence Number=SeqID_24477
  Gene Ontology: Mol. function=structural constituent of ribosome; Cellular component=ribonucleoprotein complex; Biological process =translation
  Homolog annotation: Hit_ID=Q53Q51; Match level="QueryCoverage=33%, HitCoverage=45%, E-value=1e-27, Identity=89%"; Hit description =Ribosomal protein L24, putative
  Pfam annotation: Domain name=KOW; Domain location=114-145; Score =32.1; E_value=2e-06; Accession=PF00467.20; Description=KOW motif
MGRIFLVKWDTAPAWRRGLGPPTGSGDARPDDARLHSLSHTENPSRRHRSALPGKLERPSHRRHEAQSPRHKLPPEVPQGALTAPSSVRCVLMSAGLSTELRHKYNVCSIPIRKDDEVQVVRGTYKGHEGKMVQVYRRRWVIHVERITREKSHMEALRAEPVAEGEMPASSVRLVSKLKRRLLFKVNLTSSGRNVKSSGDAVN

SEQ ID NO: 67853 - protein, 315 aa, Zea mays
  Coding DNA Sequence Number=SeqID_24478
  Subcellular localization annotation: CTP_CleavageSite=31; ConfidenceScore=5.54e-01
MVGTPALAQPARALAPVFGQVRRAPLPSVVPARAYKASPGAPHFTPRSPSPANHPSLAPTSSFPPATAARASATVASPLQPPPSRASASARSRQWPVKLSKPSDPAELHRKPEIDFTRLRSPACARGPSSPLYEEHWVPRCRVWLTLEAHPLQPGWCSLDSETIGLRTDDTVEAAAMKTLTTFCGYHPLEMVMHPLGLFPAEKKDDPMWCNRVSHVKDVWAMYPDLVGRVTVQCMGALYCLQALQSDAMALLANTAQTAKLTLDSREDFVVDLSTELVEKDLQVERLSQRITTLEQQVEIRDNTIDVLENQLHDV

SEQ ID NO: 67854 - protein, 123 aa, Zea mays
  Coding DNA Sequence Number=SeqID_24479
MGGGQREERGVRELKAVRRPMASFHAEPSLGRDEGAEKISASERKQWREVCRGRRRAEKERPPCALVLLLVSACPMRAGAVHALATFCVLLRAARMGLLVKGLREATFLSRWACDEQRTCRTR

SEQ ID NO: 67855 - protein, 105 aa, Zea mays
  Coding DNA Sequence Number=SeqID_24480
MTDLTGKQRRSLHSDCCATHQGEADNSQVQPQAQQEAPPRPTLGLDLGRRSPPRPTPGLGLNLGLGRWSPPRPTLGLGLNLGLGRNRVLARPRPRPQEESPPRPT

SEQ ID NO: 67856 - protein, 481 aa, Zea mays
  Coding DNA Sequence Number=SeqID_24481
  Gene Ontology: Mol. function=transferase activity, transferring glycosyl groups; Cellular component=integral to membrane; Biological process=protein amino acid glycosylation
  Homolog annotation: Hit_ID=Q2WBL9; Match level="QueryCoverage=27%, HitCoverage=31%, E-value=1e-36, Identity=59%"; Hit description=4 -alpha-L-fucosyltransferase
  Subcellular localization annotation: CTP_CleavageSite=56; ConfidenceScore=5.19e-01
MSSFLRRTVSMLLAWHAVGQGHHRDSASLCSVAPPQSSCAHSSPNRTALPTVDPVVVSQRSDTDVVTRQHVCPSPHYLQQHGSAGLRALVDTQLSISATSCPCSSASLSPFFCYVAGVRGLEGAIPGITPPFSPSSALRHPRPHPPPPSLPSYAQVLGTPSPAAIVSAPSLDPGFAAPSLDLGSAQGPVVSVPSLDPGIRGRKEGGYSEASRMRSARASSSPAPRSSSSSQPSPSLWPATSGNAPLSAPPSISPSPRAHFPSTLESFGSRICDPFTSLLEAIIAWDATVGCPHIRTKLAAAGLGPGLPLLAASANGNGSAEDPPGASVTGSAMWRGATRCEDLAVCHVRVLIKGWTWIPNALVDVYTCHCGVSCVGSKFPAAVDRPGALLFEVATPPPPPAILSPPPPPLCLGFAPSTPALLGGDRVGFVDVVHGGLLGWVRAIDELHDVRPFNPKWTLNLNPSLIHSLTDARLLFFFTSI

SEQ ID NO: 67857 - protein, 29 aa, Zea mays
  Coding DNA Sequence Number=SeqID_24482
MADPNAPDKLGFSYQCQQRRSPNDAGPQK

SEQ ID NO: 67858 - protein, 111 aa, Zea mays
  Coding DNA Sequence Number=SeqID_24483
MTAIAAKSSQGPPYTDHSPTAHAPFGYQDDLQMTRDLTLVVAIQTNMGVSYGRFQVAETQGMPPMANRSAVSHAHAAAWLSPLLSGCGERGLNHPRHPREHGDVVAMAAAA

SEQ ID NO: 67859 - protein, 82 aa, Zea mays
  Coding DNA Sequence Number=SeqID_24484
MGLGVCGSLCQGGYKIDGFGYDYGAASPLQLNRILAEYVDVYSPLLYTPNPPSPGCQHCNHCSDEDEAVEGDFQEFQDYDEF

SEQ ID NO: 67860 - protein, 53 aa, Zea mays
  Coding DNA Sequence Number=SeqID_24485
  Homolog annotation: Hit_ID=A5A6Q2; Match level="QueryCoverage=92%, HitCoverage=9%, E-value=9e-09, Identity=59%"; Hit description =Abscisic acid insensitive 8 homologue
YREHVAWTDRDTNLKLLRKDVLTHIYVPMASVRKILEMVDAQEGAAMPPMSPP

SEQ ID NO: 67861 - protein, 69 aa, Zea mays
  Coding DNA Sequence Number=SeqID_24486
MDRNSYVVKWFKSHAQDWIALEISFLEKNKVTKNRVQEIGVQNTPNPFPAIYEPSLTPTLCENELLVVD

SEQ ID NO: 67862 - protein, 85 aa, Zea mays
  Coding DNA Sequence Number=SeqID_24487
  Gene Ontology: Mol. function=calcium ion binding
  Homolog annotation: Hit_ID=A3AVC0; Match level="QueryCoverage=63%, HitCoverage=13%, E-value=8e-18, Identity=79%"; Hit description =Putative uncharacterized protein
  Pfam annotation: Domain name=efhand; Domain location=34-62; Score =21.6; E_value=0.0029; Accession=PF00036.23; Description=EF hand
MSSLRQSKWSVDEAGSKTCRITCKVCGVDLTDKVVDIIFHVFDANCDGNLSSEEFLRSLQRRESDIRQPATSGFLGELENVIGEF

SEQ ID NO: 67863 - protein, 58 aa, Zea mays
  Coding DNA Sequence Number=SeqID_24488
MAAPRTARPIALTLRRDRRRLWQEKQATLRLRHNDCVKKGTGKGDTPRRILLREGTRL

SEQ ID NO: 67864 - protein, 190 aa, Zea mays
  Coding DNA Sequence Number=SeqID_24489
  Gene Ontology: Mol. function=protein kinase activity; Cellular component=plastoglobule; Biological process=protein amino acid phosphorylation
  Homolog annotation: Hit_ID=Q9MA15; Match level="QueryCoverage=37%, HitCoverage=9%, E-value=1e-13, Identity=57%"; Hit description =Uncharacterized aarF domain-containing protein kinase At1g79600, chloroplast precursor
  Subcellular localization annotation: CTP_CleavageSite=35; ConfidenceScore=5.87e-01
MAATTSTAAAAVSFSLPSPPHCRGARRRRAPSLLRAASTAAPPSPDLSIQLSPRASPPASTNGAATALGPPVSASFARDRAEDLQAEARAMARAAGATVALRAGEVLSKLASFGVKVLLDERRGESSSERRRARAVELRTIFTRLGPTFVKIGQGLSTRPDLCPAEYLEELAELQVHPSPALCLLALYVI

SEQ ID NO: 67865 - protein, 316 aa, Zea mays
  Coding DNA Sequence Number=SeqID_24490
MGAEHGVSGELQAGPTRSEAAVEPLGGPAFEPLISREARSPVPSRGRILFGKRRLSHRGVNATGRVVGGAAVARWARWESEKRVHLARLHAACMAARLFRPLVWAKVEGHLNTTPWELVPFSHRSASRIFISQPGCTPPPRRWSPKTVTTSSWVGRSKPGCDLGPTLSFKDVHHPRWGGGRAEPALYLPRGFVGHPLPRRSRERALTGPAGGPDFDNAGLVDGRRRHLQRVGLVGLAPGGPFCRRAAAAPYSPVDYLNRFTKHESPRVKVTSESGDPWTMSPSEARSDLAEGVVDAEGATAPFQRQDPSLQDQSVL

SEQ ID NO: 67866 - protein, 122 aa, Zea mays
  Coding DNA Sequence Number=SeqID_24491
  Gene Ontology: Mol. function=superoxide dismutase activity; Cellular component=mitochondrial matrix; Biological process=superoxide metabolic process
  Homolog annotation: Hit_ID=P09233; Match level="QueryCoverage=86%, HitCoverage=44%, E-value=8e-39, Identity=80%"; Hit description =Superoxide dismutase [Mn] 3.1, mitochondrial precursor
  Pfam annotation: Domain name=Sod_Fe_N; Domain location=34-104; Score =89.3; E_value=1.2e-23; Accession=PF00081.13; Description =Ironmanganese superoxide dismutases, alpha-
MALRTLASKKVLSFPFGGAGRPLAAAASARGVTTVTLPDLSYDFIALEPAISGEIMRLHHQKHHATYVANYNKALEQLDTAVSKGDASAVVQLQGAIKFNGGASVPVPCTLRVSVAVVEVFS

SEQ ID NO: 67867 - protein, 84 aa, Zea mays
  Coding DNA Sequence Number=SeqID_24492
  Gene Ontology: Mol. function=superoxide dismutase activity; Cellular component=mitochondrial matrix; Biological process=superoxide metabolic process
  Homolog annotation: Hit_ID=P09233; Match level="QueryCoverage=90%, HitCoverage=32%, E-value=6e-39, Identity=98%"; Hit description =Superoxide dismutase [Mn] 3.1, mitochondrial precursor
  Pfam annotation: Domain name=Sod_Fe_C; Domain location=19-84; Score =43.1; E_value=2.8e-10; Accession=PF02777.9; Description =Ironmanganese superoxide dismutases, C-term
HVNHSIFWKNLKPISEGGGEPPHGKLGWAIDEDFGSFEALVKKMNAEGAALQGSGWVWLALDKEAKKLSVETTANQVIFVMLLN

SEQ ID NO: 67868 - protein, 384 aa, Zea mays
  Coding DNA Sequence Number=SeqID_24493
  Gene Ontology: Mol. function=protein kinase activity; Cellular component=cellulose and pectin-containing cell wall; Biological process=protein amino acid phosphorylation
  Homolog annotation: Hit_ID=Q5ZBN0; Match level="QueryCoverage=21%, HitCoverage=11%, E-value=4e-36, Identity=93%"; Hit description =Receptor-like protein kinase 1-like
MAHRTVRCAHRTLFGAPATSPGRWVPTVGALICGPAWLSGGAPDKSCRLSAVGPQGAVPAAQPAVRPHPDGNLEARRPRAPGPLPQQLVGPHPLRAQQPHCATRAQARRQPPLREHSQHQHRGSQLLRRLRQQPQWLHPQIALALPARILRWELPALRGPASALQQPVLSPAPSHGGPGPAPGSSKKRKLSGAAIAGIVVGAVVVGLLLLIATVLCVVSKRRGAGSRDIRGGQGAAPAGVRRGRRLDVLVQGGPRRRRIRVGHGSRGGGRRRRGGAESTGVRWEGRRVLGKGSVGTSYKAVLEEGTTVVVKRLKDVAVQRREFDAHMEVLGKVEHRNVLPVRAYYFSKDEKLLVYDYLPNGSLSAMHHGQCPTSFHPHACIASP

SEQ ID NO: 67869 - protein, 115 aa, Zea mays
  Coding DNA Sequence Number=SeqID_24494
MKGKKQIERSSFSSEDKRYEDEDDDDDNQASTSSSKADEEAIQRVRKVLRMIHKVNLMGVPIQVKDILFNIDRIEQRKKRYFECDMKGHYWDNCPNTTTYKKNKGKGQALTSTKN

SEQ ID NO: 67870 - protein, 127 aa, Zea mays
  Coding DNA Sequence Number=SeqID_24495
MAFVWPLLKPSTTPPHGRPAMAEDSPSLRDLGEFAPAGQPARPCDLPGAANPVWLACAAPAQPRRELASPSVVVGRNRQSSFGDQEIELFEFYEAEDPEHLFGEGKGLGLFPEYLSVRTCSLRDHPG

SEQ ID NO: 67871 - protein, 270 aa, Zea mays
  Coding DNA Sequence Number=SeqID_24496
MEDEKKLTRDEEDSRGGAVEDRARRSTAGTAPTLPIVTVFTRGKRLGGEPRAPRWASSPARAGVRHGTWALSAGCHHAAAPGQGVATAGARGGGELGEGKGETAQRRQGKAWLRGSLEQGEEHRVVPKFLASWTLVTASCSGPIDAILEDLLDLRVWTHARFRSLILLVDVDCIVFIGGVKEGGAVNDEIDEALSSYRDGKEEVSKGMFKERLLKDKFKEIGDFDNRNNVITKVWPRDGKGKGNTNRSTTKDGVENSQATRKRIRPRENR

SEQ ID NO: 67872 - protein, 172 aa, Zea mays
  Coding DNA Sequence Number=SeqID_24497
MAFVWPLLKPSTTPPHGRPAMAEDSPSLRDLGEFAPAGQPARPCDLPGAAKPVWLACAAPAQPRRELASPSVVVGRNRQSSFGDQEIELFEFYEAEDPEHLFGEGKGTRGVVASPSCRQWGPGTVLALPRLSAERVMKLIYQPCLRLRAALGSSLIRDTPEYTSDDDFNDDG

SEQ ID NO: 67873 - protein, 144 aa, Zea mays
  Coding DNA Sequence Number=SeqID_24498
MDAIAYDGIGDGDAGMDSMCMGTPCVAVAPGMRKGIEWRLWWGYDSSVSIGVGVVETGGEMVVDGPGTVEGDGGGGWLVNGGSLDIADTRLIGFLFLPGTSLKLYWCTAGGWRGTGREGRRDAVFTAWENRLAQVPASTGKTAR

SEQ ID NO: 67874 - protein, 128 aa, Zea mays
  Coding DNA Sequence Number=SeqID_24499
  Pfam annotation: Domain name=IQ; Domain location=48-68; Score=20.7; E_ value=0.0055; Accession=PF00612.18; Description=IQ calmodulin-binding motif
MEDLWTNIRVDLAKMQATLQKVEQGLLQIKIAVQHEQDQLALSARLRTSTTVGIQAAARGFLARRRVREMRRCLVLGQVDSVFEHTSCCNSRTSCLSRRGVVSGPKEAHGGAVTAATMGPPRGLDKDS

SEQ ID NO: 67875 - protein, 178 aa, Zea mays
  Coding DNA Sequence Number=SeqID_24500
MKQKRAKVTTKRRKVNFIKGEIVIEPRLPMELGFVKEIVIEPKLVFESKVSSSLGTTKEKKEDDREVDELPIRDKVLIASMQPEPKSKAATKGTLRKGSRMTLVMDILFGTMTTEEPSNPEPTPGSPKEKSAQDTKDTLVLVALKGIVQEKAEAKGDEKTEVHVTKENADKRANNWAY

SEQ ID NO: 67876 - protein, 109 aa, Zea mays
  Coding DNA Sequence Number=SeqID_24501
MAAQLEKHAAMRLEEHAATRDEDERERECAFRKARGAAQQDEDMLYSLQQRPLNEDVGTRTSGTAHSKKRAALCSASTRGSIERTKVADEADEGGRYRRPLIFDHNGEG

SEQ ID NO: 67877 - protein, 59 aa, Zea mays
  Coding DNA Sequence Number=SeqID_24502
MSGAPATSPKPLQFDRWSSDFWARLDVRWRTGHVLLSVRCASMGVPDDCALLARIKCAC

SEQ ID NO: 67878 - protein, 173 aa, Zea mays
  Coding DNA Sequence Number=SeqID_24503
  Homolog annotation: Hit_ID=Q6K8M3; Match level="QueryCoverage=30%, HitCoverage=15%, E-value=3e-09, Identity=47%"; Hit description =Cytokinin inducible protein-like
  Subcellular localization annotation: CTP_CleavageSite=42; ConfidenceScore=5.22e-01
MDGRPRSLPHSRPTSKARRTSMETALDAIGRSPPASRPDPRRSAMLPGAAAPQSIQAQALRHRTMATNVNLHSSSRAPAIYQQDPLGTADDYSALPGYYTSLLSQQTEDVFPYENNLDTYLNISKDAIVGRDQKEGRFWERIENYFHDNKTFETDRNASSLKHRWAIIHKEEP

SEQ ID NO: 67879 - protein, 67 aa, Zea mays
  Coding DNA Sequence Number=SeqID_24504
MALGGIETNSSIKAKGVTSVESTIGTKATRIILKTLGVALSAQLISDGTMVPCQDHKNSFTMEQGPT

SEQ ID NO: 67880 - protein, 40 aa, Zea mays
  Coding DNA Sequence Number=SeqID_24505
MVTRSAITKRKRWRRRNWVRGFLSLAIPSGCENGSEKGIL

SEQ ID NO: 67881 - protein, 210 aa, Zea mays
  Coding DNA Sequence Number=SeqID_24506
MAVPVVVEEEEERFGGRRPRASRRRQRAEARPSSRKLPGSHSFVTPGAVRSASGATHPPRQSAAPTNVSASSVPYPAPAPLNLRGQQAKHNGPLAQLGVACTSNQPTQTAKPKTPTAQRRGGRGKRTSCSTAGSGGRKLRGSFVLGARSGGDQPSTEQPCEAEKTAKSSLSKLARRNGRPIPRRATLRGGAADQVIDEQPYEAERPTKSP

SEQ ID NO: 67882 - protein, 267 aa, Zea mays
  Coding DNA Sequence Number=SeqID_24507
  Subcellular localization annotation: CTP_CleavageSite=43; ConfidenceScore=5.25e-01
MVGHARPFAQSQSQAREASHGNLVGPVGTAARRRPTTSQDKISTAHGPRRGNPVRYTDRCDRDGDERLRPAELAARCAWPVGHVATTSICSASKNLTLVQYYFQNLADTTAIAAIGNKISGRGCFDHVSLLSLYSPASQRNPPNLSSSSSTTTGTAIIAASMLQQSKQLQQCRLAASRTRPFFRRVRHGHCASRVLSPRGGTTGACSRQLLRAVANLDGMEQAKGASDAPMWPRSKAASPMAMRGPFARCSGTCGGPRDCMFLLKES

SEQ ID NO: 67883 - protein, 187 aa, Zea mays
  Coding DNA Sequence Number=SeqID_24508
  Subcellular localization annotation: CTP_CleavageSite=37; ConfidenceScore=5.11e-01
MARPGGGGGLAAALGPEHGLGGSRSRARTRPGSLGCRAPASRGDPALVPCGVLERLTGDHVDEGWIAFLVPHMGAMPHVHDPLLVLVPRVGGHQAHRPVVRHEAVVLAVGLAEDAHGVEGVEVETGNKSREKLGTLTDSAHARTVRPQGWTVREALFSFQHHFVDEGDSDPVVAGEGTEECDEEHGL

SEQ ID NO: 67884 - protein, 113 aa, Zea mays
  Coding DNA Sequence Number=SeqID_24509
  Homolog annotation: Hit_ID=Q8W0X9; Match level="QueryCoverage=52%, HitCoverage=4%, E-value=8e-08, Identity=45%"; Hit description =Putative copia-like retrotransposon Hopscotch polyprotein
MCSTSGGDWKVIQAMYASQSRAHIMYLRSKLASTRKDDQSTIAYFTKMKSYGDEMATSSKKLYVPMSRHVVVPKEEEDVMVVMLLEMALVMVADKGSMHQETQGQCFSYVFQE

SEQ ID NO: 67885 - protein, 131 aa, Zea mays
  Coding DNA Sequence Number=SeqID_24510
  Subcellular localization annotation: CTP_CleavageSite=50; ConfidenceScore=5.07e-01
MAPFPNGCRDAHAEAAALAPHPRPPSTSAAAPQIHPHTLLSPDQRRPSPTAANANALPQSLRLRLGASVEGTLERTSKDLRKAKGLRRRSKGGHNRKEIKSDSAATPSRVPGPVCTKMNAQDASRLRLRRT

SEQ ID NO: 67886 - protein, 224 aa, Zea mays
  Coding DNA Sequence Number=SeqID_24511
MNSGTCEDLEWFGPPERNTLLQDRVAQRPYVRLRLLAYVMGNKPRGSIGSPSERGAQAHRIKLGHVSVPDPCLGQGIPSPGTSLWVAWTPLRGVQTSPKGSVLLAWEPWSILGDPGHEYRGPALSRGGPNLLKPRGGAVLARAAVQLLCTHEPTPKEDESWAQAPVPDTELSVLTGAKRRTTAGDGALFTCQFAFSTHRNRRARCMTCGPGPPCQGLDCWLWQR

SEQ ID NO: 67887 - protein, 163 aa, Zea mays
  Coding DNA Sequence Number=SeqID_24512
MGAIGDPKLDWSGYKMSFAPMMSMRIGIGLGMGKLSVFGARPRTQGYPLRCFWGVWTDKVVRARWTDVWCERGVAILALLILVPIERMSVLADRVCRQWSIEKLSNDGFSRDMRVSDRFSGEGRGSSDDGVDPKVVVAAEVVRGRARWATGLRYSYLNLKTIY

SEQ ID NO: 67888 - protein, 55 aa, Zea mays
  Coding DNA Sequence Number=SeqID_24513
MARSREKLISRTRTRRKGKIGRTTLGEYIRGEGLDVLGAVGDALTTDVRPSLIND

SEQ ID NO: 67889 - protein, 30 aa, Zea mays
  Coding DNA Sequence Number=SeqID_24514
MDWLSKSGVHWSYFVEAAPFCAVIHSNLWE

SEQ ID NO: 67890 - protein, 31 aa, Zea mays
  Coding DNA Sequence Number=SeqID_24515
MAMGNSSVWVQGHSMGARAGKGATVVHGIFL

SEQ ID NO: 67891 - protein, 210 aa, Zea mays
  Coding DNA Sequence Number=SeqID_24516
MARMLRWSPPLGEAARRREVVTSAGESLRAEVAAAAGEPVSRPELASNVTLLDTSHRVVERAGPRYGIRLSGYMAPDHPRRQDQAKQPHRLRTSPWNGLPFFKTIPQAIGPSCFRKEVLNCKPGCSIRMPSYQQAGLMRVDLTGLVYTYALPSYKREKNSTPRLAPMDRTYRDAPVVRKRALLGLVLAVRLGPDPGFPSAFDDRVLVLML

SEQ ID NO: 67892 - protein, 48 aa, Zea mays
  Coding DNA Sequence Number=SeqID_24517
MEKKKKACSKLVEVRKRKMLLKSQILLKLHLLEESAKQRFVAEVKLYP

SEQ ID NO: 67893 - protein, 133 aa, Zea mays
  Coding DNA Sequence Number=SeqID_24518
  Homolog annotation: Hit_ID=Q6QP51; Match level="QueryCoverage=33%, HitCoverage=20%, E-value=2e-16, Identity=88%"; Hit description =Putative growth-regulating factor 1
MKARSHIPCNRRDGHYVQGNHTATCANVASSRLRNQCRDSRQPQQCQLSAAVTGQPLAGDRERGYFERDPSPRREWAPSPPTDQGFECWPLGRVRQPPQSTRAPRPLLIRGSKAGPSEGFDSRSKALELHAHY

SEQ ID NO: 67894 - protein, 352 aa, Zea mays
  Coding DNA Sequence Number=SeqID_24519
MGRTGVALLLLSLEERGLVEIGALQPSLGFKDFRHAARLHSLTNGQFGASKIFVIRAEAEERTEWGAPPRGSVTLFFPQRSGEKGILQPYGGILQPCGEGKLLFSGQGAAFRPPPRRRSCRALVATITALVEGRTSTTWVQSVVGVVICSVPGSLARAPPPTLPPTARPICEDLSGDLSAQAGAAAVRWRGVGVQVAAVIGAEVVIAIGEASSCTSGCVCRRDRRCHLRLDLRLFGLNGLSSPLVWGCGRGPFHNSVCPKNLRLLYDEPKLKAAVAWTEAMSARTEAFSAWEQVASQAEEVQQRQLGFGQITREQDQSRSQAVEAMSRAEILGGQLAGASERLAEAPARIAV

SEQ ID NO: 67895 - protein, 135 aa, Zea mays
  Coding DNA Sequence Number=SeqID_24520
  Subcellular localization annotation: CTP_CleavageSite=36; ConfidenceScore=5.08e-01
MAESSPYVRPQAPRAESSPTRSKALPCDSGAGSRMSCKPAQGRRSQTAAHGTGKGGYPERDPSPRRNRAPSPPLLIRGSKAGPPRVQQSPQIAWARHPLLVRGSKASPPKGFMAASGYSGSAPITDQGFEGWPPK

SEQ ID NO: 67896 - protein, 488 aa, Zea mays
  Coding DNA Sequence Number=SeqID_24521
  Gene Ontology: Mol. function=DNA binding; Cellular component=nucleus; Biological process=regulation of transcription
  Homolog annotation: Hit_ID=Q10LZ1; Match level="QueryCoverage=88%, HitCoverage=100%, E-value=1e-126, Identity=60%"; Hit description=Myb- like DNA-binding domain, SHAQKYF class family protein, expressed
  Pfam annotation: Domain name=Myb_DNA-binding; Domain location=271 -322; Score=48.0; E_value=3.3e-11; Accession=PF00249.22; Description =Myb-like DNA-binding domain
MLLAFYTEKLVRSSNKQGRISSEEAACTGEPGLPHCGDSTVHMTVESQKSRVLGAMSSSLPILPNPLKGSFSRPHNPQHIPMLRQLPDDSMPLCIDTHQSASLHPRAGVIGVPYSGYTASPLDSVSNLDSQTMAAPFISQSSNFEALQSLSNNTPETHTKAAWFTSSMDVSPLNTDNIAASDVNQIQSIRPAMTSDESATQNDWWADIMNDDWKDILDATATDSHSKAMIQISNSATSLPAVNQSASSHSREICPVASPPNSSNASVAKQRMRWTPELHECFVDAVNQLGGSEKATPKGVLKLMKVDGLTIYHVKSHLQKYRTARYKPDLSEGTSEKRTATEELVLDLKTSMDLTEALRLQMEVQKRLHEQLEIQRKLQLRIEEQGKYLQMMFEKQSQSSTEKVQDPSSRDTTAKPSSNQSQSTNKDCGATMDPNGTGGIVRTAELGERSSELGVKQKLVEIEESGTEVATGDRSKISQEKRRKLQDS

SEQ ID NO: 67897 - protein, 190 aa, Zea mays
  Coding DNA Sequence Number=SeqID_24522
MNELTGIRSAITNGTPVPPPQVQTTPLRGGRPAEQRKADEWCAVARSSSSDDNAFCSEGPSSGSASLGLDAAARKPPPMPKLGRQGRAEGHRVGGTGEGGYPERDPSPRRNRAPRPPLLIRGSKAGPPRVQQPPQIAWARHPLLVRGSKASPPKGSMAASGYSGSAPITDQGFEGWPPKGSQSPQTPSEG

SEQ ID NO: 67898 - protein, 46 aa, Zea mays
  Coding DNA Sequence Number=SeqID_24523
MGAAACTEGHFVEQTERRGEWLGACCCDGADSEVEHVGNGAQGHAM

SEQ ID NO: 67899 - protein, 282 aa, Zea mays
  Coding DNA Sequence Number=SeqID_24524
  Homolog annotation: Hit_ID=A2XFR6; Match level="QueryCoverage=39%, HitCoverage=41%, E-value=3e-15, Identity=38%"; Hit description =Putative uncharacterized protein
MDPGTHMVYARFYLLEPGVTEVMVRTLQTTRVNTSYAPQPRQIPVYPVVVEEAPANLPPVRVENVINLEDSSEEQLPTPTPLAESLAFAAGSSTSASSSPAFQAPAPRGDDPDDSGDGDDEDDDNEDDGEDGHINEEDDYAQQDNFMGFGPVVEHYTSMFKTGTSPTCCRRTLSAHESLIPLSTYAASVSDAARRTLWSLSHTYRQQLQNTRFRHLPQRLRGESQTNIVPGEPGEDRLNTLAALEAQLQGLDPPEAQVPAVALSPPRKRLRYGEPGSVTRLL

SEQ ID NO: 67900 - protein, 89 aa, Zea mays
  Coding DNA Sequence Number=SeqID_24525
  Gene Ontology: Mol. function=catalytic activity
  Homolog annotation: Hit_ID=A2Y3P0; Match level="QueryCoverage=62%, HitCoverage=15%, E-value=7e-14, Identity=67%"; Hit description =Putative uncharacterized protein
MVSAHAVFDRMPMRDAISWNLMISGYASYVAACAAMDDKLRHSRHLDAIQSGCTALSIVKQGDLMVITNVGDSLVVLGTAFEDGAITTV

SEQ ID NO: 67901 - protein, 489 aa, Zea mays
  Coding DNA Sequence Number=SeqID_24526
  Gene Ontology: Mol. function=protein serine/threonine kinase activity; Cellular component=plasma membrane; Biological process =protein amino acid phosphorylation
  Homolog annotation: Hit_ID=A2YMS7; Match level="QueryCoverage=65%, HitCoverage=58%, E-value=1e-162, Identity=88%"; Hit description =Putative uncharacterized protein
  Pfam annotation: Domain name=Pkinase; Domain location=19-272; Score= -4.3; E_value=2.3e-08; Accession=PF00069.16; Description=Protein kinase domain
  Pfam annotation: Domain name=efhand; Domain location=319-347; Score =28.1; E_value=3.2e-05; Accession=PF00036.23; Description=EF hand
  Pfam annotation: Domain name=efhand; Domain location=355-383; Score =25.7; E_value=0.00017; Accession=PF00036.23; Description=EF hand
  Pfam annotation: Domain name=efhand; Domain location=391-419; Score =21.2; E_value=0.0039; Accession=PF00036.23; Description=EF hand
  Pfam annotation: Domain name=efhand; Domain location=427-455; Score =36.6; E_value=9.2e-08; Accession=PF00036.23; Description=EF hand
  Pfam module annotation: Pfam domain module=Pkinase::efhand::efhand::ef hand::efhand; Domain location=19-272::319-347::355-383::391-419::427 -455
MALSTPTPARAEQPDITRCHRGGEVREGDLVQFNYVCRRANDYFVHRCVVEFPDAIALLFDACTGDACCTAPDFESDRVQIHQMCQGAQMVQGYCVRLMVGKLFVVENAAVGSEVEQEEPKKEAMAGVGETLRSFMEGFGDQGEDSIILSPRLKEISTPDRPAALRFLGERFSKIFGSPYYMAPEVLKRNYGPEVDVWSAGVILYILLCGVPPFWAETEQGVAQAIIRSVIDFKRDPWARVSDNAKDLVRGMLNPDQKRRLIAHQVLGHPWLQNIKKAPNVNLGETVKARLQQFSVMNKFKKHALRVIAEHLWVEEAADIKDMFEKMDLNKDQMLSFEELKLGLHKFGQQMPDADVQTLMEAADADGNGSLNYGEFVTLFVHLRKIGNDEHLHKAFAYFDRNQSDYIEIDELRESLADDLGQNREEIINAIIRDVDTDKDGKLSYDEFATMMKAGTDGRKASRQYSRERFTSLSLKLQKDGSLQMTITR

SEQ ID NO: 67902 - protein, 117 aa, Zea mays
  Coding DNA Sequence Number=SeqID_24527
METVMPKAEKVKGEICTTGNEIAMKKPNDKRIRSAVHTIWVKIRVKEKLDVVGHENRFLSSESRRLEVLVSQAREEVAVAEQVAATNESEAATLRAEVERLQGLLAAENTRNFRTSP

SEQ ID NO: 67903 - protein, 118 aa, Zea mays
  Coding DNA Sequence Number=SeqID_24528
MGHRKKASVELLAMGGAAPCLGKKGAAEGGEAKGKGLRAHGGEEELLLACTWRLPAAGEDAAGIPLVGMGGISYWPAAAIGAGFGGQPLAGGWQWQTVYATRWRCRQWHAGTRKENRC

SEQ ID NO: 67904 - protein, 575 aa, Zea mays
  Coding DNA Sequence Number=SeqID_24529
  Gene Ontology: Mol. function=transferase activity, transferring hexosyl groups; Cellular component=Golgi apparatus; Biological process=carbohydrate biosynthetic process
  Homolog annotation: Hit_ID=Q10LZ0; Match level="QueryCoverage=99%, HitCoverage=99%, E-value=0.0, Identity=65%"; Hit description =Glycosyl transferase family 8 protein, expressed
  Pfam annotation: Domain name=Glyco_transf_8; Domain location=299-559; Score=62.2; E_value=1.8e-15; Accession=PF01501.11; Description =Glycosyl transferase family 8
MKATAPPAKRRRGPRLAVLALVFCSLLVPIAFLFNRFPAVYVTDERPQQEIDLPSFDRVVFENGGSVNEDVSKKTSRSTSVSHRGIDSDPSIVSTKPKAIVLRPPKIEQVLPPPKVEPNPEVKPVLVPVPVHQNKKINLDKIRPPRVQSADEVEKAKACQLEFGSYCLWSIEHKEVMIDTIVKRLKDQLFVARSYYPSIAKLKGKETLTRELKQNIQEHERVLSESIVDADLPSFIKTKLERMDQSIARAKSCTVDCNNVDRKLRQILHMTEDEAHFHMKQSAYLYNLGVHTMPKSHHCLNMRLTVEYFKSMPLDPNDSSAHKFNLPDNRHYVILSKNVLAASVVINSTVSSSEDTENVVFHVLTDSQNFYAMKHWFARNSYRESAVNVINYEQIIFENFPEFGTQQLYLPEEFRVLISSLERPTEKSRMEYLSVFSHSHFFLAEIFKDLKKVIVLDDDVVVQRDISFLWNLDMGEKVNGAISFCGLKLGQLRNLLGRTMYDQQSCAWMSGVNVIDLDKWREHNVTENYLQLLRKLANLLTTMEPQPIYDYRKYWKRFLTRDERFMDECNLAGFS

SEQ ID NO: 67905 - protein, 55 aa, Zea mays
  Coding DNA Sequence Number=SeqID_24530
MGNSQLSNWVERKGRLLKDKFKHNPWTESRQDSPNGKVEKTIQDKISEVPTEELK

SEQ ID NO: 67906 - protein, 36 aa, Zea mays
  Coding DNA Sequence Number=SeqID_24531
MGSKHSACSAEAGCRGKEEGVEADLQEFQDFDEFED

SEQ ID NO: 67907 - protein, 182 aa, Zea mays
  Coding DNA Sequence Number=SeqID_24532
MAELQHRRGIATYPQLHMLEGCPQHHPCAPRSTLVEFPRPERHPRRGSTAAGISPPPRAQLWMQHALDPGLDSQKGFTGLGYISQEGRVREGGGNPITRGFRAGCNELAAMDSAAAGGDGADSVVPGFSDTCLPMNARLRLESGGGLAETSERARARGVTGCGTHMSDEVRLWPVEVVARVS

SEQ ID NO: 67908 - protein, 127 aa, Zea mays
  Coding DNA Sequence Number=SeqID_24533
MDGPRATTWPEKTMPSKVSTVGPDPHGKVPDPCIYGPDLQARSRTSTDTNWTLGTGLGPLCVGSGPLSAGSRDSRTKNTQALIKVGRGSGSRHVSGPYRVRYCSPLRRSPDAATGPTARDVMSRLSI

SEQ ID NO: 67909 - protein, 183 aa, Zea mays
  Coding DNA Sequence Number=SeqID_24534
  Subcellular localization annotation: CTP_CleavageSite=76; ConfidenceScore=5.41e-01
MAAASICLGWCLSLWVRWPVYSGLPFMTSQNTVDRTSASSSVFDTHLSVFVSENIRIRIRIQSYPYSNSNPNKNIKTNMVSMISIRIRSDYIPIGEDGKDVSLEEHSGGKARAHGRAVHHRKTLLGLQLEEAALDSGNFECLGSVDLVAVWGERNRVLTPSDEADNVGERHEVSRRGDRAAQR

SEQ ID NO: 67910 - protein, 324 aa, Zea mays
  Coding DNA Sequence Number=SeqID_24535
  Gene Ontology: Mol. function=phenylalanine ammonia-lyase activity; Cellular component=cytoplasm; Biological process=phenylpropanoid metabolic process
  Homolog annotation: Hit_ID=A2X7F7; Match level="QueryCoverage=71%, HitCoverage=33%, E-value=1e-108, Identity=87%"; Hit description =Phenylalanine ammonia-lyase
  Pfam annotation: Domain name=PAL; Domain location=101-324; Score=9.8; E_value=1.1e-15; Accession=PF00221.10; Description=Phenylalanine and histidine ammonia-lyase
MGERIQQHPVRVAISAWRGAFLPALPARARSDEATTVPGPATTIVQALVAAAAVVGAPLVLPPRPRMRPPLRCPPRLPRPRHLTVHLRCILRMVAEYRQPLVKIEGASLSIAQVAVVATGAGEARVELDESARSRVKASIDWVMNSMMNGTDSYGVTTGFGATSHRRTKEGGALQRKLIKFLNAGAFCTSTDDHVLPTEATRAAMLVGYSGIRFEILEVIVKLLNANVTPCLPLRGTVTASGDLVPLSYIVGLVTGCENSVALAPDGNKVNAAEAFKIAGIQGGFFELQPKEGLAMVNGTAVGSSLASTVLFEANILAILADRD

SEQ ID NO: 67911 - protein, 392 aa, Zea mays
  Coding DNA Sequence Number=SeqID_24536
  Gene Ontology: Mol. function=transferase activity; Cellular component= endoplasmic reticulum membrane; Biological process=protein amino acid N-linked glycosylation
  Homolog annotation: Hit_ID=Q7XIE1; Match level="QueryCoverage=100%, HitCoverage=86%, E-value=1e-158, Identity=64%"; Hit description =Putative alpha 3 glucosyltransferase
  Pfam annotation: Domain name=Alg6_Alg8; Domain location=1-375; Score =220.0; E_value=5.7e-63; Accession=PF03155.6; Description=ALG6, ALG8 glycosyltransferase family
MELTLHLTPADWYRNTSDNDLAYWGLDYPPLSAYQSLLHGRIINTSLPEAVALRSSRGYESMESKLLMRWTVLSSDLLVFFPSALWFVWAYMKLGVGISGEERREGWMWLLALVLISPCLVLIDHGHFQYNCISLGLTLGAIAGVLSKNELVGASLFTLAINHKQMSLYFAPAFFSHLLGKCLKQKYPIVEVTKLAFVVLGTFALVWWPFLHSYEAVQQQVKSPSNLGFLYSLMNNSFSFYLFSYQVHEKSILLPLLPASLLALEEPRMYGWFVYFALFSMYPLICRDQLLLQYIAVLSLFFLIYYSPGGSYGKRSNISCKAKLVLSLPFLCSLLLHITYLQIEPPKRYPFLFDALIMFVCFSQFVILAVYTNYKQWMLDSNSRSIGVKKDL

SEQ ID NO: 67912 - protein, 369 aa, Zea mays
  Coding DNA Sequence Number=SeqID_24537
  Gene Ontology: Mol. function=phospholipase A1 activity; Cellular component=nucleolus; Biological process=lipid metabolic process
  Homolog annotation: Hit_ID=Q6BTJ4; Match level="QueryCoverage=59%, HitCoverage=39%, E-value=3e-16, Identity=33%"; Hit description =Similar to CA1621|CaIFF6 Candida albicans CaIFF6 unknown function
MRRLWQEKQATFRLRHNDRVKKGNRPRASLLIRGSKAGPSEGFNSRLRALGFCAHYWSEVRRPAPRKSSTAASGHSGSAPTTDQGIPSEGGIEPSDPIERGPGLADHPQLTGDTMFGALRGQHGAFPLLLVERRSKGGSDSGSAPEDDELRFARPQGSDSGSAPGDDELRFARPQGSDSGSAPEDDELRFARPQGSDSGSAPEDNELRLARPQGSDSGSAPEDDELRLARPQGSDSGSAPEDDELRLARPQGSDSGSAPEDDELRSARPQGSDSGSAPEDNELRFAQPQGPDSALASADGLRLARPRGSDSTSVSEDRLNLDLGGASTLPNPGHGPTTSIGGAIITLPRADSGYGEQDRRPIWLAPPDK

SEQ ID NO: 67913 - protein, 221 aa, Zea mays
  Coding DNA Sequence Number=SeqID_24538
  Gene Ontology: Mol. function=hydrolase activity, hydrolyzing O -glycosyl compounds; Cellular component=integral to membrane; Biological process=cell wall organization and biogenesis
  Homolog annotation: Hit_ID=P0C1U4; Match level="QueryCoverage=88%, HitCoverage=37%, E-value=3e-77, Identity=64%"; Hit description =Endoglucanase 9
MSMYGRDPWGGPLEICHDSATDDDRSRNLDIDRGALSRTLDETQQSWLLAGPGDPGRKKKKYVDIGCLVVSRKLFVWTLGVLLAAAVFAGVVAGIAKAIPRRHRPPPPPDDYTVALHKALMFFNGQRSGKLPKHNNIPWRAAFSMTLLSWSVIEYSAKYDAAGELGHVRDIIKWGSDYFLKTFNSTADSIDRVVAQAIANLNYGEGAGGKYCNIARFNAAQ

SEQ ID NO: 67914 - protein, 193 aa, Zea mays
  Coding DNA Sequence Number=SeqID_24539
MKYWALIPIESHLEGAFINSLHQRRQDDRHGPPLVLFTARRRPMTKSLHPTSSPNLETHVSVTLPYGNILGIIQAAPSVDEAAKAALLAEKKGKVLADTTHQEACEDDALNKRQRNDQPTLEVTLRTCSSGGQPQEPPPGFAPLEGEDATEDGEVNGISAEEQLQLLAQRIKNRNLQKQKEIIEAKRQRVCAR

SEQ ID NO: 67915 - protein, 138 aa, Zea mays
  Coding DNA Sequence Number=SeqID_24540
  Gene Ontology: Mol. function=kinase activity; Cellular component =ornithine carbamoyltransferase complex; Biological process=amino acid metabolic process
  Homolog annotation: Hit_ID=Q6QP54; Match level="QueryCoverage=60%, HitCoverage=29%, E-value=6e-11, Identity=44%"; Hit description =Putative kinase
MALPIDAAGLRPRLGDVEAPPKPRSSLSSMAEAESEPLGRARRRSSAKARAESDPWGRAKRSSSSSGAEPESEPWVGRSGVRRLPGLSPSPSPGSGVGVAQAALSFCEAGQWSGEVTAVTSALPGGVRQDKGVRPPLR

SEQ ID NO: 67916 - protein, 123 aa, Zea mays
  Coding DNA Sequence Number=SeqID_24541
MMSSSSGIKQEGPKLFSSRRILARDRSSVAVADASFRVYYSLGAGTVPFLWESKPGTPKSSVTPPAPASSTAGAVPVPPISPPPSYQQAVSRSKANKFARKQRPARTSWPPADNSVLINFTRE

SEQ ID NO: 67917 - protein, 196 aa, Zea mays
  Coding DNA Sequence Number=SeqID_24542
MSSSSSPPPGELTVIVVMLRGEEYHVVAAVKGHELETREAEHRPGLKRLLKSTHLELNGKMFVNTQQAPTWRANCRRFGLGGSLDRRVNLSLRVPAQMGWIRCQAIPALNAHALRSAGQAIWPRSLAQQGLPLAEPRVCSLLEETLGRDVNSSGTTVPPEAGLERGEIASLGRRSFDFDPNCKPLWFVLKVFTSRV

SEQ ID NO: 67918 - protein, 674 aa, Zea mays
  Coding DNA Sequence Number=SeqID_24543
  Homolog annotation: Hit_ID=Q6J9V9; Match level="QueryCoverage=14%, HitCoverage=33%, E-value=2e-37, Identity=78%"; Hit description =Putative uncharacterized protein
MDERATLGGLEFEDDAKPGHGLHAVFPSLRGRGHLTHGLGIRWKRLETWPYYTQRGISSLYDATTPEGFGPEASKLKHQQGEEQHPRRCFHPRQNLAQPQTTMRANASASRSEASASCPPRISARLTASAAWLRDWSRSRVIWPNPSCRCCISSAWEATCSRAEKASVRADIASVHAIAAFSFGSSQSGRSALGGFPDLQQISQYMEQSHFAPTFPNKRDSSSIPLGMNYLHTRGAARRLDSSSDGLRANATAEGPSFTSLTEDENQPLKPKSRRPGTQLALAVSSAETTACARGSLTYGDHHLSTDDSSHLPTNTEPANSGRPKAHRQVLTPVHAETVLEHEYRPRGIRRVERPPGAADGARKTWTWPARARHDRRPGGGRKAAPWPGSSSSPSPAWLEDVTSAGLEDALPLRMLEEEAGHQPTREADPSSVRSSTSARMTKILEAEGGAEAAARLASPHHKAASNTFGRRSERRFTSAIMVASKKVAPCGVQQPPQSTQAPRPLLVRVSKAGPSKGFDSRPRARRVMDDPGYVRYMAEARATLLRYPRTFPRPAGTICNGIPPEGGTEPSGPIEMGPGPANPPQENNATRPAWAAVPTTRAKATTAKFSLGRNRKLRLAQPQASASASASGGDLRLAQPQGSASRRVTPSPDPGSRPRPRPRRSHRLARPQA

SEQ ID NO: 67919 - protein, 101 aa, Zea mays
  Coding DNA Sequence Number=SeqID_24544
  Gene Ontology: Mol. function=oxidoreductase activity; Biological process=negative regulation of transcription
  Homolog annotation: Hit_ID=A2Z7Q5; Match level="QueryCoverage=58%, HitCoverage=11%, E-value=1e-11, Identity=59%"; Hit description =Putative uncharacterized protein
MPSVPANIAPARNIYHARRQQPLHHPPEVLEKMQAPIKDPTIPVNASAAELQEADGVLFGFPTRQNVVESYTVPFQMPPFPKHIFLEALAAVQGVNIIAYD

SEQ ID NO: 67920 - protein, 175 aa, Zea mays
  Coding DNA Sequence Number=SeqID_24545
  Gene Ontology: Mol. function=cysteine-type peptidase activity; Biological process=proteolysis
  Homolog annotation: Hit_ID=Q5NKQ2; Match level="QueryCoverage=60%, HitCoverage=11%, E-value=2e-36, Identity=65%"; Hit description =Putative uncharacterized protein 9C20.3a
MERFPQIDWCHLIFSDLCEAAQRWHNRSINNVSATIYGCSIVVLLYYLDHLHYAAAPNNKNGTPRIKYFNKNIIRALSMADKRKPRQGGEPFGVCPFRSSSETCYVSKSPSTGQIEQGQTVVGGTVDHDSGPVFDKTPIGSVFAPGLFLSELECARALRAYLCSRFIELDRFSLE

SEQ ID NO: 67921 - protein, 472 aa, Zea mays
  Coding DNA Sequence Number=SeqID_24546
  Gene Ontology: Mol. function=sugar binding; Cellular component =cytoplasm; Biological process=establishment and/or maintenance of cell polarity
  Homolog annotation: Hit_ID=Q6ZXK6; Match level="QueryCoverage=67%, HitCoverage=98%, E-value=1e-150, Identity=58%"; Hit description =Kelch repeat containing protein
  Pfam annotation: Domain name=Kelch_1; Domain location=162-209; Score =20.8; E_value=0.0052; Accession=PF01344.16; Description=Kelch motif
  Pfam annotation: Domain name=Kelch_1; Domain location=214-260; Score =26.9; E_value=7.6e-05; Accession=PF01344.16; Description=Kelch motif
  Pfam annotation: Domain name=Kelch_1; Domain location=267-312; Score =41.9; E_value=2.3e-09; Accession=PF01344.16; Description=Kelch motif
  Pfam annotation: Domain name=Kelch_1; Domain location=317-361; Score =38.7; E_value=2.1e-08; Accession=PF01344.16; Description=Kelch motif
  Pfam annotation: Domain name=Kelch_1; Domain location=366-420; Score =13.3; E_value=0.078; Accession=PF01344.16; Description=Kelch motif
  Pfam annotation: Domain name=Kelch_2; Domain location=162-209; Score =17.8; E_value=0.04; Accession=PF07646.6; Description=Kelch motif
  Pfam annotation: Domain name=Kelch_2; Domain location=214-260; Score =13.1; E_value=1; Accession=PF07646.6; Description=Kelch motif
  Pfam annotation: Domain name=Kelch_2; Domain location=266-312; Score =33.1; E_value=1e-06; Accession=PF07646.6; Description=Kelch motif
  Pfam annotation: Domain name=Kelch_2; Domain location=317-361; Score =16.0; E_value=0.14; Accession=PF07646.6; Description=Kelch motif
  Pfam annotation: Domain name=Kelch_2; Domain location=364-420; Score =2.8; E_value=21; Accession=PF07646.6; Description=Kelch motif
  Pfam module annotation: Pfam domain module=Kelch_1::Kelch_1::Kelch _1::Kelch_1::Kelch_1::Kelch_2::Kelch_2::Kelch_2::Kelch_2::Kelch_2; Domain location=162-209::214-260::267-312::317-361::366-420::162 -209::214-260::266-312::317-361::364-420
MARFTLFCSGMSACDEDATILCTSKVRARAPPSTSLTPPKHGKAEEAEQSFVGASMAGTWVKFCKPSLILGSKVSWDQLAIVTHPLGWSGNWTLEPYVIYKGGLIAGLVGGVDEEVSIPSSMDLRLPSVKGMLTGKSVMPKFCSSQRASFAAMEQKGAGPGARSSHAITLLGGTAYSFGGELTPRVPVDSTMYAFDLNTQTWSALDATGDVPPPRVGVTMAAAGGTVFTFGGRDLEHKELNELYAFDAATRAWTLLSSGADGPPHRSYHSMAADAGAGRVYVFGGCGDAGRLNDLWAYDVAAGQWEQLPPPGEACQPRGGPGLVVAGGKVWVVYGFSGEELDDVHCYDPATREWAAVQTTGDRPSPRSVFCAAGFGRHVVLFGGEVDPSDLGHLGAGKFSAEAFALDTETGAWTRLDDRAEAEHHPGPRGWCAFTAGEKDGQRGLLVYGGNSPTNDRLGDIYFFTPVLEAAS

SEQ ID NO: 67922 - protein, 204 aa, Zea mays
  Coding DNA Sequence Number=SeqID_24547
MEGGASGSAAVIDSAMAEAGAVDPDLALVSVPSAATLLRLPIIPPPAAPSPHAPRLSAVVPGAPQPSPPAPPHRHALLASRLKRMVHFHVSSTRQQQTAARAHGTAAAATRRTRAGEAARTPLLGCWRLELLRFCPSRPRPRAAEPRPPDDESTTTAALLLLGCSHAPSLQRFNAPARLLGQALGLSNASTLKVPSCFIPRMGV

SEQ ID NO: 67923 - protein, 135 aa, Zea mays
  Coding DNA Sequence Number=SeqID_24548
MAPEAGLGCCQPHSVEWHSSRGGAGGAVLLSDRPVERRSDCGHFGSVDWRACVRIKTAWWRWELGDHCEDLVGDPTQVYKRSRGIHRARVPKESRSEHLVLARAKGERYPCAGAPTRTSGECRLFDTSGKIGGVF

SEQ ID NO: 67924 - protein, 232 aa, Zea mays
  Coding DNA Sequence Number=SeqID_24549
  Homolog annotation: Hit_ID=Q5GAU8; Match level="QueryCoverage=21%, HitCoverage=36%, E-value=2e-14, Identity=74%"; Hit description =Putative uncharacterized protein
  Pfam annotation: Domain name=CRF; Domain location=102-145; Score=7.7; E_value=0.084; Accession=PF00473.8; Description=Corticotropin -releasing factor family
MSKTGGSRLSMTVAILAKGRTSHERFKRWVPPPPNPPPMTDAEKEVATERRMDSPHRCDCGDRAVINEDTAKHFVCPNIDYEMRKCSWESYDDKREDMRRYAKSVSFDSPMHAEQRRLKAANEKRAHDAREWEAARAEKQMLDNLTDRLKGKIGCGVNYIADEAHARYVQEKMAMVELMEEDNDTSRLSEFIALAEEGLHGEEEDDTSRLSELITLAEAGLRAQEEEDEFMS

SEQ ID NO: 67925 - protein, 459 aa, Zea mays
  Coding DNA Sequence Number=SeqID_24550
MHRIPPPSEPPDGERPRCLRLVVGGAQPYGGGHPSAIARLQGFSSGNPAAFPHRWSPRMVTTSSMVGRSKPGCGLCPTLSFKDLHHPCWGGGRGEPGLALAWAGDRLLPPASRGGNHPPALWRRRPPAMRGKANCCYLARVQHSVLRPGDCDRLHQGVTQHVVRREGDTRVLRWSRSRSCGEDGSEDLPVRFGAAGARWCGAGGQVAAVVGAEVVAAREGFSADEIVGATCGRTSGSSALAACPRPSCGDVGEGPPAAAFALRLSLQLSCRLRRRSLTLLQGLAASHPEFVVPQALRRGGCSYPWEWNRNFVCNGTLSVGNPRLLCDEPEPEAAMSAWTEAESAREEASLAREHVASLAEEVEILTPASPSEAGPDSAEGGDDAEGAAAPSVDDLFIGSRIVYPSESYFSRKVTSEESLGSVGLASYVYSVVFRIPLSKQSKSAKDVLAERLFPRKILT

SEQ ID NO: 67926 - protein, 44 aa, Zea mays
  Coding DNA Sequence Number=SeqID_24551
MAIAKRMWSSDELKRNSCESVSVSVPGLVRLALIQCGLSGIGWV

SEQ ID NO: 67927 - protein, 161 aa, Zea mays
  Coding DNA Sequence Number=SeqID_24552
  Gene Ontology: Mol. function=protein serine/threonine kinase activity; Cellular component=cytoplasm; Biological process=protein amino acid phosphorylation
  Homolog annotation: Hit_ID=A2YFX3; Match level="QueryCoverage=26%, HitCoverage=7%, E-value=3e-17, Identity=93%"; Hit description =Putative uncharacterized protein
MPPALQRRAFCCAHDELAAMPHFPRRLEPKRLALALKKLIWKVLRVADPTIGSSSIKRPLVTEASTSMAFCDFDSVISVSTSALDVKASNILLTEDYQPQISDFGLAKWLPDKLTHHVVYPIEGTFGERLCVRVTRTWDFYDPGDDKKLLHSDLVPLDEEV

SEQ ID NO: 67928 - protein, 279 aa, Zea mays
  Coding DNA Sequence Number=SeqID_24553
  Gene Ontology: Biological process=regulation of transcription
  Homolog annotation: Hit_ID=A2ZA17; Match level="QueryCoverage=70%, HitCoverage=37%, E-value=4e-55, Identity=59%"; Hit description =Putative uncharacterized protein
  Pfam annotation: Domain name=GRAS; Domain location=39-276; Score =45.7; E_value=1.7e-10; Accession=PF03514.5; Description=GRAS family transcription factor
MGTGLRCGIEHGYDFFILFSAYWHLSEQGYLCVFLALTSSLQAGGGFASALKPKGEAGNDEAGAAVDHLAEAARLAEASDAFDAREILAQLNYRLSTVPTTGTPLLRSAFYFKEALRVALSPTGEALAPPVVSTSYDVVLKLGAYKAFSEVSPVLQSGVADAGAGAALPAATLKVTALVSPASHHSLELNLIHENLSGFARELGVFLQFVAYNVDALDPAELVAITSDDAVAVHLRVGSAHVTTMSTVLRLVKRLGVKVVVSVDRGCDLSALGGEIYTG

SEQ ID NO: 67929 - protein, 213 aa, Zea mays
  Coding DNA Sequence Number=SeqID_24554
  Homolog annotation: Hit_ID=Q6QP51; Match level="QueryCoverage=43%, HitCoverage=41%, E-value=2e-18, Identity=59%"; Hit description =Putative growth-regulating factor 1
MTLGTFDTWTRLGLRSRGTLGHFRDQQERFCNGIPSEGGIEPSDPIEWDRVWQITCRVRLTAAESSLRRHRKLCLARPWASASGEVSVSPNPRARPPPQLRKVVSALPDPRARPQPRPRKESCPRPTPASASGGVSTSPDLGLGPTTPQGVHHYPTPSYLRLRGNKTDVPSRLAPVTSNDGSPHASMTTVALSPLQKQGDVSKVPTAPTAVLL

SEQ ID NO: 67930 - protein, 374 aa, Zea mays
  Coding DNA Sequence Number=SeqID_24555
  Gene Ontology: Mol. function=nucleotide binding; Cellular component =endoplasmic reticulum lumen; Biological process=nematode larval development
  Homolog annotation: Hit_ID=P24067; Match level="QueryCoverage=70%, HitCoverage=40%, E-value=1e-129, Identity=89%"; Hit description =Luminal-binding protein 2 precursor
  Pfam annotation: Domain name=HSP70; Domain location=1-374; Score =175.0; E_value=1.9e-49; Accession=PF00012.11; Description=Hsp70 protein
  Pfam annotation: Domain name=MreB_Mbl; Domain location=94-337; Score=- 260.8; E_value=0.0041; Accession=PF06723.4; Description=MreBMbl protein
  Pfam module annotation: Pfam domain module=HSP70::MreB_Mbl; Domain location=1-374::94-337
  Subcellular localization annotation: CTP_CleavageSite=27; ConfidenceScore=5.18e-01
MAGKGAKATAAKSADKDKGKKTDGPVSRSSRAAPQTTAVDFKPYVGPIYNAILGRLVNQDQDQEVKECAISCMSLVVSTFGDGLERELPACLPILVDRMGNGITRLTAVKATKDAGVIADLNVARIINEPTAAAIAYGLDKKGGEKNILVFDLGGGTFDVSILTIDNGVFEVMATNGDTHLGGEDFDQRIMEYFIKLIKKKYSKDNRALGKLRREAKRAKRALSNQHQVRVEIESLFDGTDFSEPLTRARFEELNNDLFRKTMGPVKKAMEDAGLEKSQIHEIVLVGGSTRIPKVQQLLKDYFNGKEPNKGVNPNEAVAFGAAVQGSILSGEGGDETKDILLLDVAPLTLGIETVGGVMTKLIPRNTVIPTKKS

SEQ ID NO: 67931 - protein, 431 aa, Zea mays
  Coding DNA Sequence Number=SeqID_24556
MNKNTGIQDAITNGTPVPPPQVRTTPHDWGPAEQQKTDERLAVARSSSSDDDDFCSGGPNSSSDDLRADAAAMRPSPMPSLERQGWAEGRRVGGQSVGGTGYLVGEGTSSSCRGGRRRRERLRSHSGQRARHATAASATNGERPSHRSLREGAACRPRRDRPQLGTLPSLALMMKILEAEGGAEAAARLAFPRHRTGGHRLGRRGLSLIQHAPRSSPYGTGAGSRASCKLARGRRSQTAVRDACNRPAVTSIPPLSPRPAGERADSRAGGMQPRQLGAPLQLPTHPAWRPRPTRHATGAPVATCKQLHRHSHHYHASWTAEPVPRLEATLRMTQQCQPGATVNTAKNEPAVMAAAGGQEQRSHRQPSSRHLVGQRENPLSRREDGAPVFRSSNGSRTRNGHFTNHSPRRINSAAGQAAPLAGEASDASPSP

SEQ ID NO: 67932 - protein, 146 aa, Zea mays
  Coding DNA Sequence Number=SeqID_24557
MGKNNKRKREPTPPSEDFGDSEYSEEEFSSESEGSPAPIPLRESSDDSDDSQGLAAEVWTYIRAVERSGLEGSDESEYSSDEEDSSKEDGGGDGEDDDDDEGGGGGDDDGGGRGGSGGGKGDDDGSSRGGSSGGGGSSKGSNKASG

SEQ ID NO: 67933 - protein, 108 aa, Zea mays
  Coding DNA Sequence Number=SeqID_24558
  Subcellular localization annotation: CTP_CleavageSite=40; ConfidenceScore=5.41e-01
MAAQQSSAQLILSPPQALFFFLQRAASAGSSSPGADALLRDEARRPSHGTLLPHAAPLLSLSQAPALTNRSSASPLLHGEQQLIHLSLPWCPCSSSPWSAPSSSAPRL

SEQ ID NO: 67934 - protein, 135 aa, Zea mays
  Coding DNA Sequence Number=SeqID_24559
MEKELSIHGWNRRCVMSRARHKLPAATRALGAGGTHLGDGSAELQGLEEGREKPYGALVTQEQGGVDLHGRWPTKGVCSPARAQTRGGPAPTKGEVEVGHGWRRVEDEVGISSSAMGERAHGGGASAIVREKLLS

SEQ ID NO: 67935 - protein, 89 aa, Zea mays
  Coding DNA Sequence Number=SeqID_24560
MTKDFAMPTVLPPYDDMFRASLRGRPSWLMSNGARAAPGAIAFFDGMTKLVAWDVVEGGRLSSPEMGANVGHLFSNTVDQEQGNTIIKD

SEQ ID NO: 67936 - protein, 114 aa, Zea mays
  Coding DNA Sequence Number=SeqID_24561
MEKRAARLTCVVLAPVRCPGRLRWSRRCAGRRRRWSESVGPRAQAGELVGGECPDLTTTKEFYWLDRRALPSDAEAVCARNLEMVQWLTRSTLSGERKKSGEDDPVFPVRFRLV

SEQ ID NO: 67937 - protein, 97 aa, Zea mays
  Coding DNA Sequence Number=SeqID_24562
MAELTEALARLGGDWSGLATVVEALAARAGEKELTGAKEGCLAGEGFELGIKVNTLDLWLKHLRETLGDTGVSQPSPLKGISSRDSGQSPPGVKRRI

SEQ ID NO: 67938 - protein, 72 aa, Zea mays
  Coding DNA Sequence Number=SeqID_24563
MEAKSQHQPEQGGTCKNYATSKAEYTNTQLELPETKSFNRLQIWLFLISNNSKLGETFMSNLINGDKYDKEI

SEQ ID NO: 67939 - protein, 162 aa, Zea mays
  Coding DNA Sequence Number=SeqID_24564
  Gene Ontology: Mol. function=RNA-directed DNA polymerase activity; Cellular component=chromatin; Biological process=RNA-dependent DNA replication
  Homolog annotation: Hit_ID=Q8W1D1; Match level="QueryCoverage=40%, HitCoverage=4%, E-value=1e-08, Identity=46%"; Hit description=Gag-pol
  Pfam annotation: Domain name=Retrotrans_gag; Domain location=27-103; Score=9.4; E_value=0.0066; Accession=PF03732.8; Description =Retrotransposon gag protein
MADLIVPPISVMPLRLRPRRIYEMHLTLFLKSGCDKEFKTAFRGHHIPAGILDRKLNEFLALTQGTHTVLQYAQAFNDLCQYAGYHADSDEKKRDYFHRGTQQQAAKEEEGTNVWIFSSVSEISDCLQQSEQRIPAASGKMGHQAAIAAASTQQFPRPRSKE

SEQ ID NO: 67940 - protein, 17 aa, Zea mays
  Coding DNA Sequence Number=SeqID_24565
MAADHPPAGAESTTSTP

SEQ ID NO: 67941 - protein, 359 aa, Zea mays
  Coding DNA Sequence Number=SeqID_24566
DALLGHLGSDQWRVMISGQNGNHGLWRYFGTGGYEIDGFGYDYGAASPLQPNRILAEYVDMARLRHTARKSVIPFLPSRLAERPLRRPVAGQSSHLERLHHRLREEQERRRQEQQGSSFSLQQEIESVRSCSPVLPLEAPPAPPLGAPASGVAARGCHFHDALDTLLRRAFNRHTWFVEYRCVVYQHSRGVYPDRWEATCLVRCPENSLQGAEACSEHYSISERDSAEAAMQDAARRALSHYGSVFGGAVDGLDLKYYPRRPSGSTGGVIVSPVGEGNPRLSSTVNLAAMLNTELDHALDELSRARAEIALLRAERAERRHLDGSSPAPVGTQHPYRSPQRGHQSYSNPDCKTKITLEP

SEQ ID NO: 67942 - protein, 202 aa, Zea mays
  Coding DNA Sequence Number=SeqID_24567
  Gene Ontology: Mol. function=metal ion binding
  Homolog annotation: Hit_ID=Q2QUH9; Match level="QueryCoverage=89%, HitCoverage=35%, E-value=2e-49, Identity=55%"; Hit description=DHHC zinc finger domain containing protein, expressed
MARCGDRDIVTAAMARQPWRRRHGWQLPLHPLQLVAAAVFALLVAAFYVVLGPYIGNTLAGNILLITFSFSAAATAALYVRCTAVDPSDRTDAKKTKRRRQLARGGGGTAKLPRLRYGYILWRYAVRLLRRVEARVTNRWVRRSYLEQWNTSVQLDPMLPFAFTSLDDIVSPCATADGHDISFCPICDCEVFVSFFASAYRW

SEQ ID NO: 67943 - protein, 35 aa, Zea mays
  Coding DNA Sequence Number=SeqID_24568
MDLDEVDIRKAITKDYVTSTPREEMVKRLSLPVFK

SEQ ID NO: 67944 - protein, 97 aa, Zea mays
  Coding DNA Sequence Number=SeqID_24569
  Subcellular localization annotation: CTP_CleavageSite=75; ConfidenceScore=5.02e-01
MWLVRWPLPLLVLLVLVWPVGARLGLGLGASTTMRLFSCHFQRAAAVRWRLRLAVRHLHCTAHPIGSKAGGGGVRLKLRSDEKIPSPANQMQMLLAT

SEQ ID NO: 67945 - protein, 795 aa, Zea mays
  Coding DNA Sequence Number=SeqID_24570
  Gene Ontology: Mol. function=voltage-gated chloride channel activity; Cellular component=integral to membrane; Biological process=chloride transport
  Homolog annotation: Hit_ID=Q6Z673; Match level="QueryCoverage=94%, HitCoverage=96%, E-value=0.0, Identity=71%"; Hit description =Putative chloride channel protein
  Pfam annotation: Domain name=CBS; Domain location=610-748; Score =55.8; E_value=1.4e-13; Accession=PF00571.19; Description=CBS domain
  Pfam annotation: Domain name=DUF368; Domain location=121-454; Score= -130.3; E_value=0.062; Accession=PF04018.4; Description=Domain of unknown function (DUF368)
  Pfam annotation: Domain name=Voltage_CLC; Domain location=177-542; Score=263.2; E_value=5.4e-76; Accession=PF00654.11; Description =Voltage gated chloride channel
  Pfam module annotation: Pfam domain module=CBS::DUF368::Voltage_CLC; Domain location=610-748::121-454::177-542
MSSCDDDHASLLRSHAGASSPSCPSPRGSAGHQHHADVEADEATVTASPRLASGGGGVRGLLRNLERRMSARGSGPGRRQHQHYQQLDRSVAIESPPSQRQRERAAAGDDDELGDGAPPEWALLLIGCLLGLATGICVAAFNRGVHVIHEWAWAGTPNEGAAWLRLQKIADTWHRILLIPVTGGVVVGMMHGLLDIFEQLKLVKSGQRQGINFVGAIFPTIKAVQAAVTLGTGCSLGPEGPSVDIGKSCANACSEMMESNRERRIALVAAGAAAGIASGFNAAVAGCFFAIETVLRPLKAENSPPFTTAMIILASVISSTVSNVLLGARPAFIVPAYELKSAAELPLYLILGMLCGAVSVVFDRLVGWFSRFFGHIKEKFDFPIIVYPALGGLGAGIIALKYPGILYWGFTNVEEILHTGKSASAPGIWLLTQLAAAKVVATALCKGSGLVGGLYAPSLMIGAAVGAVFGGSAAYLINSALPGNAAVAQPQAYALVGMAATLASVCSVPLTSVLLLFELTKDYRILLPLMGAVGLAIWVPSVVNQPNDSEPSGFRTSRRGYSSMSPEERNGSLRQGDVVDDLELSIIQTDMSNYGTYNAEMLLDDLKVFQAMSKIYLKVLPSATVTEVLNLLHDRQQNCALVVDPEDFLEGIITLGDIRRMGYGLHVESFINGDHPKADDNSSSISLCLTRGFQYRGSERGLLTCFPDTDLTTAKSLMEARGIKQLPVVKRGVAHRTAGKRRPIALLHYDSIGCCVRGKPDKFCKDLPLLQVSCGIPARTTYLFLLRPGLVLYAG

SEQ ID NO: 67946 - protein, 544 aa, Zea mays
  Coding DNA Sequence Number=SeqID_24571
  Gene Ontology: Mol. function=aspartic-type endopeptidase activity; Cellular component=extracellular region; Biological process =proteolysis
  Homolog annotation: Hit_ID=A2X915; Match level="QueryCoverage=83%, HitCoverage=96%, E-value=1e-173, Identity=70%"; Hit description =Putative uncharacterized protein
  Pfam annotation: Domain name=Asp; Domain location=205-541; Score= -45.0; E_value=6.1e-11; Accession=PF00026.14; Description=Eukaryotic aspartyl protease
WLDWIKRGRFSTAEAESYRGGSQASTSRTGGRAIGISIKGREVARLSVIESHRPQAGRRIGRVSEEAACFQIERVIKMALLRLLAISLLFAVATPVRDIAHDACSSEVKDFQHLNNSSGLHLTLHHPQSPCSPAPLPADLPFSAVLAHDGARVASLAARLAKTPSSRPTLLDESRAGSSSSSSPDDESSLASVPLGPGTSVGVGNYVTRMGLGTPAKSYVMVVDTGSSLTWLQCSPCVVSCHRQSGPVFNPKASSSYTSVSCSAQQCSDLTTATLNPASCSTSNVCIYQASYGDSSFSVGYLSKDTVSFGSTSVPNFYYGCGQDNEGLFGQSAGLIGLARNKLSLLYQLAPSMGYSFSYCLPTSSSSSSGYLSIGSYNPGQYSYTPMASSSLDDSLYFIKMTGIKVAGKPLSVSSSAYSSLPTIIDSGTVITRLPTGVYSALSKAVAGAMKGTPRASAFSILDTCFQGQAARLRVPEVTMAFAGGAALKLAARNLLVDVDSATTCLAFAPARSAAIIGNTQQQTFSVVYDVKNSKIGFAAGGCS

SEQ ID NO: 67947 - protein, 109 aa, Zea mays
  Coding DNA Sequence Number=SeqID_24572
MALTGFSRVLAIALLIWPLTGTMRGPRNTRRPCGARYNGPDHTWASELDEAARCDDDVAGLRLVPDKAKGIPARFVSVGPATSAKASSEGWRLCLRPNSSLNCFSNLKR

SEQ ID NO: 67948 - protein, 70 aa, Zea mays
  Coding DNA Sequence Number=SeqID_24573
MDEASLWSGKRAKKLHPCVQVEKVLDKADSFGDNRGTSDSYNFVVLSLRRIIVHPITLESMQLKTSGHIM

SEQ ID NO: 67949 - protein, 162 aa, Zea mays
  Coding DNA Sequence Number=SeqID_24574
MTPRTRCCSAAEPSSTPAMNASSKREPSPLTVETRTLDLERARWCGGELAGSQVASHGHGASPDSDSSIDLWAACRKQLAAPVTHGAMSQSHAPVWLQNQELVAFTDTQRPCPASVFAESSSPVPASPGDLRPLGGGVCPVSSEFAATDGVAPVTVLFTPAR

SEQ ID NO: 67950 - protein, 70 aa, Zea mays
  Coding DNA Sequence Number=SeqID_24575
MAHRTVSGAPGPYSVQLSTLRFLRARSAIIHRTVWCAIGLSGVPPDCPMHQRSNGYFAQRSPAKAKDSDE

SEQ ID NO: 67951 - protein, 75 aa, Zea mays
  Coding DNA Sequence Number=SeqID_24576
IQGLGDVAFRDSSSSKEEDEKKTIEGSGSLGHEKAEEEPKEPSLTLRTNTTDPTQSISEEIDEIGFFVRHLGGVS

SEQ ID NO: 67952 - protein, 165 aa, Zea mays
  Coding DNA Sequence Number=SeqID_24577
MMRVMDKLKGKKRRDRGDSSRPRSTRGSGGGDTFSMLFQGSTASRQRLEQLLGCMEEQGREVASHSAPGQERKVVGHSAPGQEREVAGHNALEPEREAIGSSGPMLEQDHNAFEQAREAADHNAPRQEDELARHGSPMHDDDDYGEDYDGEANDEIVTMTQATNF

SEQ ID NO: 67953 - protein, 321 aa, Zea mays
  Coding DNA Sequence Number=SeqID_24578
  Homolog annotation: Hit_ID=Q2QTH9; Match level="QueryCoverage=66%, HitCoverage=75%, E-value=3e-07, Identity=26%"; Hit description =Putative uncharacterized protein
MARRRSQKNKKTTPKENKEVTLEILLFDYSNYASWSTRVVNAFRTIDSRLEQILDKSILPFNYDKKNASEEDQRCIRLNYLAFDILGSSSHFDSHICCVANENGSGSTNEDEEDEKSFTQLYAHLSQEDKTVMLKLLKRVREKSEAPHMLEDILTIKMQCFEELTKEHEELKSSHVDLVQSNSSFELEFPRTKDDACQKPKEENERLRMSLTQLKVKCTTQPSQDNRDYMVKKLETGTTVACTKSLEEKVKDLRIVKRKEQKKKINTSAKSLNHASMQGNIQGLSYVENQENLQHGGKPKDGNTYVFKCKYIQLSFLLCIV

SEQ ID NO: 67954 - protein, 245 aa, Zea mays
  Coding DNA Sequence Number=SeqID_24579
MSLHALLPVGSRIHGPQYDRTRIPSEPQDVDLTEDEVIRSDGFLTGIRGGEHPVRGVRRVCGGGVAPSSNCLDVEGPHAKLMVSGAPRNNDAAPEYHTEVQATQPCARVGSGLPAPVVGIVAHATEKMTPAAQRRGSTAARERNKGKETGEIRGGSAPDGESARGSRHGSRSSEILGAERVVGEGDEPDEWVPPGSAPIGKEKEEEQSGLARWKSSVGPRRARIRPKITWFNLYFCMMGMSPVDR

SEQ ID NO: 67955 - protein, 123 aa, Zea mays
  Coding DNA Sequence Number=SeqID_24580
MSTALAVYDVLGDPPARLTVRGGPGRGRPARGTTAARTKDGKLHPGQGAAVRLPSHGWRMPPQGWRMPFSPKRWGKKRVTDPRGGNPHSVCSSTSARMTKILEAEGGAKAAARLASPHQTDHW

SEQ ID NO: 67956 - protein, 193 aa, Zea mays
  Coding DNA Sequence Number=SeqID_24581
  Subcellular localization annotation: CTP_CleavageSite=31; ConfidenceScore=5.31e-01
MASSPSSPAQGARLLPSHGRDAPNRPPSSPSAGAREPCPLCPENVELEHTPLLPRWTPGRPPLAHGRQDPQSRAAPLLLLPSSNVDRRHVAEPEPPLSNPTLKAPLPLSHPWRHTQQQLCPLHLGQRRAPLIRARAVSSPSLMEPPLPATLSPGLLCPAATSPSPKLLLPWLAPCAVPLLSYLSRSPTTLALR

SEQ ID NO: 67957 - protein, 57 aa, Zea mays
  Coding DNA Sequence Number=SeqID_24582
GVVLYSKRYEGRGHMHCIHMHSLKWYLQMESVIQPIVVVRGNEMALVILGLLSSIST

SEQ ID NO: 67958 - protein, 541 aa, Zea mays
  Coding DNA Sequence Number=SeqID_24583
  Gene Ontology: Mol. function=kinase activity; Cellular component =ornithine carbamoyltransferase complex; Biological process=amino acid metabolic process
  Homolog annotation: Hit_ID=Q10NQ5; Match level="QueryCoverage=39%, HitCoverage=93%, E-value=1e-83, Identity=74%"; Hit description =Harpin-induced protein 1 containing protein, expressed
  Pfam annotation: Domain name=Hin1; Domain location=370-518; Score =95.1; E_value=2.2e-25; Accession=PF07320.4; Description=Harpin -induced protein 1 (Hin1)
MAPPVDVAGPRPRLGDVEAPPRSRLSLSFVAEVESEPLGRARRRPSAEARAESEPWGRAKRCSSSSGAEPKSEPWVGRSGVRRCLQGLSPSPSPGSGGADSRSGAGDAVLLSGRSVERRSDCGHLGSVDWRTCVRIKVSGHLCIKCPCDLVGWRGDLARVASWRRLGLGRAGSMLVAGGMPRARRRSSGLCADGGYQLRIRSLEGGRRVIRLPTPLLQSPNRAISTPEIPVPKRNKNGVRRNNGKKENRPPRTRSHLARPPPPPHLGLAKLSPRPPPSPALPPPHLADAPVGSKNPKWPERGEEIPGAAAGTMTTGSNGDGGGAGSWYPQRRPHYGYGGGSASFRGCCCCLFLLLTFLALLALAVALVVVLVVKPRKPQFDLNQVSVQYLLVASPTTSPAGVPPGAAYLSLNITLLFTAENPNKVGIRYGATAFDVMYHGVPLGVAAVPGFEQPAHSTRLLQTRVIVDRFNVLQTDAQDLIRDAAINDRVELRITGDVGAKILVLGFSSPRVQVSVDCTIAISPRSQSLKYKQCGVDGLSV

SEQ ID NO: 67959 - protein, 225 aa, Zea mays
  Coding DNA Sequence Number=SeqID_24584
  Gene Ontology: Mol. function=methyltransferase activity; Cellular component=mitochondrion; Biological process=ubiquinone biosynthetic process
  Homolog annotation: Hit_ID=A3A226; Match level="QueryCoverage=97%, HitCoverage=80%, E-value=1e-107, Identity=78%"; Hit description =Putative uncharacterized protein
  Pfam annotation: Domain name=Methyltransf_11; Domain location=65-150; Score=50.0; E_value=8.4e-12; Accession=PF08241.3; Description =Methyltransferase domain
  Pfam annotation: Domain name=Methyltransf_12; Domain location=65-148; Score=7.4; E_value=0.082; Accession=PF08242.3; Description =Methyltransferase domain
  Pfam annotation: Domain name=Ubie_methyltran; Domain location=11-224; Score=294.7; E_value=1.9e-85; Accession=PF01209.9; Description =ubiECOQ5 methyltransferase family
  Pfam module annotation: Pfam domain module=Methyltransf _11::Methyltransf_12::Ubie_methyltran; Domain location=65-150::65 -148::11-224
ILKSRSSLGYKQVREEDKSKLVGNVFSSVASSYDLMNDLMSVGLHRLWKDRLISKLNPFSGMKHLDVAGGTGDVAFRVLERVKSVGHRAMQGYSEEHCLSWIQGDAEALSFEDGSMDGYTIAFGIRNVTHIEKALSEAYRVLKQGGRFLCLELSHVDVPIFKEIYDVYSFSMVPAIGELVAGDRQSYQYLVESIRRFPNQEAGFQRVEYENLVGGVVAIHSGLKL

SEQ ID NO: 67960 - protein, 620 aa, Zea mays
  Coding DNA Sequence Number=SeqID_24585
  Gene Ontology: Mol. function=aspartic-type endopeptidase activity; Biological process=DNA integration
  Homolog annotation: Hit_ID=Q8H6I0; Match level="QueryCoverage=58%, HitCoverage=19%, E-value=3e-14, Identity=23%"; Hit description =Putative gag-pol polyprotein
  Pfam annotation: Domain name=zf-CCHC; Domain location=216-233; Score =26.3; E_value=0.00011; Accession=PF00098.14; Description=Zinc knuckle
  Pfam annotation: Domain name=zf-CCHC; Domain location=519-536; Score =13.0; E_value=0.016; Accession=PF00098.14; Description=Zinc knuckle
  Pfam module annotation: Pfam domain module=zf-CCHC::zf-CCHC; Domain location=216-233::519-536
MGDSDFCARRARIKCAAESRWRGDDRCSGVAPDSPVHTGQSDDELVRGMYSRLNLIINELNSIGINKLGDADIVRKIISLLPQRRYGSIITILHNMEDLGNMTPTIVIGKIVAFEMSRKMCRGEEPTSSRPYAFACDERKGKKKAPTPSSSSEEEEEEEIDDDEDNQPCTSSSEDEETIRRVGKVMGMIRKINLMGVPLQVEDLLFNIDRKKQRKRGCFTCGEKGHFRDNCPTMAEPKKERSKGKALTSVRTWDDSSSEDEPPRTRSHRSSSRSSRSSHKCLMARGNKSIPYSSDESGSDDEGEGKPSVDELANAVEFFQDVCTKQKAQLKTLKNKLISSQNDYKGLLEKFETFANLNSELSTKIELLESSAPSTATDDGLIKKNEKLKAKLASSQNTIENLLEKMEILSIHNNELTTKLENIGSTPEASLVPEIIKKDASTSCFDLIDDSNPCNQVRVENIVAETCSDEVAKENEQLMQEVARLGKALYDKKGKAKQIRPPQDNTTAGVNKPMEGEIVICRLCHMEGHKSFQCKAMTGDKQRQKLKQKPSSKISNTYIKKVDKKAATPYLIKKKKNGKVIAIKANKQANKGKGAKRIWVPKEIITTMKSTKKVWIPKGK

SEQ ID NO: 67961 - protein, 90 aa, Zea mays
  Coding DNA Sequence Number=SeqID_24586
  Gene Ontology: Mol. function=CDP-diacylglycerol-glycerol-3-phosphate 3-phosphatidyltransferase activity; Cellular component=integral to membrane; Biological process=phospholipid biosynthetic process
  Homolog annotation: Hit_ID=Q8H8U0; Match level="QueryCoverage=51%, HitCoverage=14%, E-value=1e-15, Identity=85%"; Hit description =Putative phosphatidylglycerolphosphate synthase
MEMEERINDGGWQTVGEKKRHGRPQQGPWAAMATTGIFLAAAVTDWLDGYINRKLGTPFGAFLDPVADKALPLSGKEAIELLDILLSTIT

SEQ ID NO: 67962 - protein, 119 aa, Zea mays
  Coding DNA Sequence Number=SeqID_24587
MAENVEAVGSAESEGAEPSPEKTASGEGLEKSSDRGAESPVWKNRWRILESRRGWGFAVMETEAGAKELIAGSRRYLYGNRKVCCKRGFEKSLMKMLSHLPEIRSSIVHTPTIRGKKLG

SEQ ID NO: 67963 - protein, 293 aa, Zea mays
  Coding DNA Sequence Number=SeqID_24588
  Gene Ontology: Mol. function=cysteine-type peptidase activity; Biological process=proteolysis
  Homolog annotation: Hit_ID=Q5NKP7; Match level="QueryCoverage=100%, HitCoverage=34%, E-value=1e-155, Identity=89%"; Hit description =Putative uncharacterized protein 9C20.3c
MKQVDRPPNNPKRITIQSSQECFSVDIPSAEHPNPCPEVQNPSNADSQNVTNETVQIDSDEDDFMPALKKRNVSESHTRVLRKVVTKRVKHEELPRQRLNVRCNPQDVIASINILNERQREAIRLDALCSKSHLQWLMDKLDPKDMTIRPGPGKELKITKDIVHLILGVPNHGGGKPLGIDEAVAASNLRAELGVAKDEFNVAFLQDHLRKGEDDDLSIRCFFLILFNRLLFPTASWGITYHEVLLTEEMHRFHDIDWCQLIFNDLCEDAKKWHNRITTNVSTTIYGCSIVVL

SEQ ID NO: 67964 - protein, 322 aa, Zea mays
  Coding DNA Sequence Number=SeqID_24589
  Gene Ontology: Mol. function=cysteine-type peptidase activity; Biological process=proteolysis
  Homolog annotation: Hit_ID=Q5NKP7; Match level="QueryCoverage=89%, HitCoverage=37%, E-value=1e-154, Identity=86%"; Hit description =Putative uncharacterized protein 9C20.3c
MPRPTFNIKLPSIKEMMSNILAAYDLEVDKSCVAIKDSIDKIIVKQYDIVDKFIELIEEVLRAESENLENETDEPQQPGNSADSAGHTVDATQPTPDMPSQASQLETQLGATQFEEIHERQQHIRTVLETFPDESDVVSDQQRGAMATEEMEHNDSGPVFYQTPTPHVDTLKGTTNSGSDPPLTEVVIDYGDYSANCMDIYESFAEGKCLEDVFMQCFIECVRDDSKNHRRTLTSNRLILDVNVGALLNFEEQERHSKNPQPFDQNVLQNCLHNTLPALVNLDKCKSVSYLPSINQTIPETYVLMPFINSHSIASTRRCHFH

SEQ ID NO: 67965 - protein, 296 aa, Zea mays
  Coding DNA Sequence Number=SeqID_24590
MAVMGSTSGKDVPLPGLLTEDPLTGHMPRHGNAQQILYEGAGVISPLGADTLQGSDTRRRLRCEDNARHVPRGSASVVDSLWCDSRQGAASCVAMVAPSPPPPARRVAGTIGVLLFRRREMLSPSSPPPGESKTVVVVVPRGEEYHVIAAVKGHELETPEAEHRPGLKRLLKTPHLELNGKAFVNTQQAPTWRANCRRFGPGGSLDRRVKLSLRAPAQMGWRAMEHKRWDKPCIILHQGAARSRGYKHVARGKEREREPIRSLLPPREPPSRMALVLPFIDARRGSRRTMGGVAMC

SEQ ID NO: 67966 - protein, 388 aa, Zea mays
  Coding DNA Sequence Number=SeqID_24591
  Gene Ontology: Mol. function=transferase activity; Biological process= amine metabolic process
  Homolog annotation: Hit_ID=A7QUF0; Match level="QueryCoverage=85%, HitCoverage=73%, E-value=1e-59, Identity=42%"; Hit description =Chromosome undetermined scaffold_178, whole genome shotgun sequence
  Pfam annotation: Domain name=Transferase; Domain location=42-388; Score=125.5; E_value=1.5e-34; Accession=PF02458.6; Description =Transferase family
  Subcellular localization annotation: CTP_CleavageSite=45; ConfidenceScore=5.09e-01
IRLLLLTFSLALSLLCALYPVPLWGTPHTLVARNMVKQERVSTVTVAAVSTVAPALPMQEHRLPLSNLDLILPPIDVGVFFCYDADPAGGRSHQPVAAVLKAALAKTLVAYYPLAGEVVANAAGEPELLCSGRGVDVAEAAADGTVLRDLRLGLPDESVEPLVPKKKAGVMSVQVTKFKCGGAVVGCTFDHRVCDAYSFNMFLVAWAAAASGSSAPPAPCFHRSFLAPREPAAAPLRTAGSLADRLFVPVSRAPALPDTATANRIYRVSAADVAALQASAGAGRTKLEAFTAHLWGLHAKAAAASRRQQPRSCCMGVVVDGRSRLRRDGAMGAYFGNVLTIPYGVMGTGALGEMALADVAGDVLRWVAEAATGEHFRELVDWVEAQRP

SEQ ID NO: 67967 - protein, 81 aa, Zea mays
  Coding DNA Sequence Number=SeqID_24592
MSSPEAPTPVKTTRRTPEGPRALRSTELKIAFLRKPFWIPHGSRLPSGGDPGRDLALRQVPNQEGLRNSPPAGKDPSSFFR

SEQ ID NO: 67968 - protein, 146 aa, Zea mays
  Coding DNA Sequence Number=SeqID_24593
MGWRPASSSSVRGRRAFASLAEEVNFGYAGPADCRCRRPPRAWFPSLDGLNVASDAASCRLVGAWLSIHRTSDGRAVRSEDGSEDLFTHAGWPPFAGTALVRRWPLSSVLRWSPPLVRLPTAEVVASAGKTEDGGEDLFTAAYVLR

SEQ ID NO: 67969 - protein, 378 aa, Zea mays
  Coding DNA Sequence Number=SeqID_24594
MDESGMPHSDDMSRVVDQLLKLFATFIEDWDASGGIRAVRLAAGQVRWRFSAKPVFQKEDGFPELLRACTVRLGIRSQPEYDGREFVEHGTEKCVVTVYIGSSLHHVEWSVTAAGHRFKDTRQRDRLAWMARMHALEEQQLLEDDPTVMYLTAYLLTLDAQYDFLVRHHRQMIARAEDAEKRNRQLHVDLTTAQARVAALESHEVIAVEALKQAKDEHVQKLMEAYLVTHNQRRALRIQEPAPSNPVQPRRVEDPQILEGHPVSTRGEKKAWEPPEGAIVLEGIPVSPKAMDKQEHPESSQDPPLELFEPLTMKKIPAPSLEVKEEAASTPPTPSPSKELQERVQLEEEFDPVSPSQSPPKEVINISSILTHPGDVSD

SEQ ID NO: 67970 - protein, 171 aa, Zea mays
  Coding DNA Sequence Number=SeqID_24595
MGWRPASSSSIRGIRAFASLAKEANSGWLWCRLQRCLLPLGWDVAVRPPHGRRSRRGRIGHTHGFSRAADRTGGSYKTSYSAGAVAAFLDGLVLTPAVRTGARTSSRALGRPPFASTALVRRWPLSSVLRWSPPLVRLPTAKVVASAGETVSATYRRTSGSLALMASLSPL

SEQ ID NO: 67971 - protein, 79 aa, Zea mays
  Coding DNA Sequence Number=SeqID_24596
MSILFSVFLLCLRHRCPMCVLEGTWRALRRFGQGQTVEGFEAHDASQQKQSLVDFAPDARSGNRHFGVSACSDGKVILE

SEQ ID NO: 67972 - protein, 244 aa, Zea mays
  Coding DNA Sequence Number=SeqID_24597
  Gene Ontology: Mol. function=molecular_function; Cellular component =cellular_component; Biological process=biological_process
  Homolog annotation: Hit_ID=Q336P8; Match level="QueryCoverage=81%, HitCoverage=91%, E-value=2e-93, Identity=81%"; Hit description =Expressed protein
  Pfam annotation: Domain name=AMMECR1; Domain location=4-187; Score =77.1; E_value=5.7e-20; Accession=PF01871.8; Description=AMMECR1
MVVATEEMVVYCFDTLVAYFTGERPPPPAFEDGNHPLFVTWKKAANGSEPRLRGCIGTLESRQIVSGFRDYALTSALRDRRFPPIQSKELPTLECTVSILTDYEIAEDYLDWEVGKHGLIIEFTAPDSNTKHSATYLPEVAGHEGWTHVETIDSLVRKAGYQRIITESLRKKIKVTRYQSTLYTMHYGEYVAYLKKNRVSFQKMDPNLGAIIIGVEVRHNDASTIGANFSYVPADVANPRGSAP

SEQ ID NO: 67973 - protein, 198 aa, Zea mays
  Coding DNA Sequence Number=SeqID_24598
  Gene Ontology: Biological process=plant-type hypersensitive response
  Homolog annotation: Hit_ID=A3C7J7; Match level="QueryCoverage=60%, HitCoverage=64%, E-value=6e-31, Identity=58%"; Hit description =Putative uncharacterized protein
  Subcellular localization annotation: CTP_CleavageSite=34; ConfidenceScore=5.30e-01
MAKKSASTGAAITATKSPAAASPLIVIEIPSSPDASTGGRRSTTKARKRPALWPLVLDDEIEMWTPREKRRLDEDCQILAGDPLASNIEVAPAAASDEIAVVAERGKIACRDYPHPRSACAKHPFSRTPHERYCDQLLGSQIDVLLDTFNLHAVMALVGTAVLRGEMEMWNNKVMKGLIIIAALCSNLSETSDSLETA

SEQ ID NO: 67974 - protein, 324 aa, Zea mays
  Coding DNA Sequence Number=SeqID_24599
  Subcellular localization annotation: CTP_CleavageSite=41; ConfidenceScore=5.76e-01
LPATAAQRASAARPSSQRDAPQPSARPSLRSAQRPHQPSTRCPAPSAWSASARRRPVGPARQEARFLPKPNRRNNRPSRRFSLASHAVFPPNCPVFSSTTSLSASPNHRRSHVPLERRRSSAEVSSLLLSSLHRSPPRRSLAATGARLSRPGCPRLSSSGGSARPAALTSSAVAAASRFAGEPRPCASQPSRCALAACPAHPMPLVAGALRARPNPAQISEPPRVQYPVPDRPWPPWLAMVTEPPTPTPPVSLQPAPYVRPPSPRLELVGSRVVHVKSRARSASPCYRSRVAQLVRALELACAQCVDGTPSTFVYPPSTPRLPP

SEQ ID NO: 67975 - protein, 143 aa, Zea mays
  Coding DNA Sequence Number=SeqID_24600
MNYLHTNNSPAVAITSACTPLRKGPRPRLPTGGDNEAIKAKEPEVRRQVALTISPAEATTSTVGSLTSGGDHLSTDGSGHLRTSAIPTNGGRPSASDEVLTPVLTAGVRTRPSKNAVAAPTAYDVLYDPPVRPAAREKPWVWL

SEQ ID NO: 67976 - protein, 250 aa, Zea mays
  Coding DNA Sequence Number=SeqID_24601
MAAATSAPTTRQQRKVLAPVFLRGGGGGDNEAIKAKEPEVWRQVALTISLAKATTSTVGSLTSSGDHLSIDDTGHLRTSVILANGGRPSTRKEVLAPVLTVGVRTRPSKNAVVAFMAYDVLYDPPPCPIQAAGGNAGGSTKATQAEEPDTRQLTAPQTAGSAYPEFASFARLANALLPRMLKEEAGRQPMRKAGPQLGSPSSLARMMNILEAEGRGRPQPGSLLSTTRLVVILVDDHRPEVATELRDENP

SEQ ID NO: 67977 - protein, 130 aa, Zea mays
  Coding DNA Sequence Number=SeqID_24602
MGKNNKRKREPTPPSEEFGDSEYLEEEFSSESEGSPAPIPLRESSDDSDDSQGLAAEVWTYIRAVERSGLEGSDESEYSSDEEDSDGGGEDEDEDDDDDDDEGGGDGDGGGSRGGSGGGGSSRGSNRASG

SEQ ID NO: 67978 - protein, 73 aa, Zea mays
  Coding DNA Sequence Number=SeqID_24603
  Homolog annotation: Hit_ID=Q8S467; Match level="QueryCoverage=36%, HitCoverage=6%, E-value=2e-07, Identity=96%"; Hit description =Putative gag protein
  Subcellular localization annotation: CTP_CleavageSite=41; ConfidenceScore=5.02e-01
MPTYVGNGTPMRAPPTPPPTRGTANIAVTKGLLFPNVGHKCLMAKDSKRKKHHRLAHVGMKNVNKLLKEKSQT

SEQ ID NO: 67979 - protein, 140 aa, Zea mays
  Coding DNA Sequence Number=SeqID_24604
MGKSKKGGSSSHHSGDKRKHEPTPPSEDFDDSEYSEEEFSSESEGSPVHASPPASSDDSDDSQGIVAEVWTYIRAVERFGLEGSDESEASSDEENSSDSSEEESGSDDDGEGDDGGDGKGVGKGDGKGGSGKASGNASLA

SEQ ID NO: 67980 - protein, 153 aa, Zea mays
  Coding DNA Sequence Number=SeqID_24605
MEITLKGLLTYQSDFQKGRPGIEAEEVGMMEAPKSVQNLVANAISARVISIEKDGSVSDTPATPCCHRREQARRCGPRRERTHERAPPSPPAVRTSKRPCRRRGHTRTFAAAAQASVRGPSALHRQHRTVPRPGAPVAIAQASAGGSPSPPPH

SEQ ID NO: 67981 - protein, 21 aa, Zea mays
  Coding DNA Sequence Number=SeqID_24606
MEGVLAYRLGHRVCTRPGIYI

SEQ ID NO: 67982 - protein, 95 aa, Zea mays
  Coding DNA Sequence Number=SeqID_24607
MAAVGALQRGVGGGSALQRGCGAVVVRMEAGTRAGARVSGGVDDPDVCGLWFQESLPLCMLVPGFKGKLSGIFFGKGSSQSEEKLHYPMHAEDWA

SEQ ID NO: 67983 - protein, 224 aa, Zea mays
  Coding DNA Sequence Number=SeqID_24608
  Gene Ontology: Cellular component=endoplasmic reticulum
  Homolog annotation: Hit_ID=Q2QMH2; Match level="QueryCoverage=77%, HitCoverage=24%, E-value=4e-66, Identity=63%"; Hit description=Root hair defective 3 GTP-binding protein containing protein, expressed
MEPRHRERDAPPPRPQELSASLPLPQELSAPPPSPSERGDSDTVSSVARFTTVFSHDKDSISRVWTGKEDVRAIAKEARSAALKLLSVMAAIRWDDEPDRIESILTSTLLEGSVVSKIASAASADPLASTTWEEQAHRRDNSKLPPPWAIVAIAILGFNEIMVLIRNPIYLFLLFVGYLMVKALAMQLDVSREFQNGVVPGIISVSVKLLPTIQNLLSKLSYFV

SEQ ID NO: 67984 - protein, 113 aa, Zea mays
  Coding DNA Sequence Number=SeqID_24609
MRLLMGSNENPTGTIGSIPLKDPNFRYIPWTPHVIDSCGPTCGDDEGNDGGAWTVGGSRHRQQQAQQGLVSDGGDPTSGSSRDASVLGGKCDDKGGLGQPKDYADWLRAGEAG

SEQ ID NO: 67985 - protein, 114 aa, Zea mays
  Coding DNA Sequence Number=SeqID_24610
MSGRDPKGKGKMVDDNIEKDKTPINDRTKDEKPIDSKKKDGKKKRIKKIVYYETDSSTTLSGEPTVAGPTVGRLIRARRVAEPMARRGHRNVRCAPDSVRCANDSKAPTVGFAK

SEQ ID NO: 67986 - protein, 284 aa, Zea mays
  Coding DNA Sequence Number=SeqID_24611
  Homolog annotation: Hit_ID=Q6J9V9; Match level="QueryCoverage=35%, HitCoverage=35%, E-value=4e-44, Identity=88%"; Hit description =Putative uncharacterized protein
  Subcellular localization annotation: CTP_CleavageSite=41; ConfidenceScore=5.75e-01
MGSRSSNSSKKKATQGPGKGVFRKRTLPSEGNGPRALLLIRGSKVAPSGVRQPPQSTRALSPLLIRGSKAGPSEGFDSRPRARRVRDDPGYVCYMAEARATLLRYPRTFPRPAGTIVMESHRREASSPRTLLNGSGSSESPAGTRNNKFTSWLTVPADPKRRHLCYDDDDPMCQRFIYNYTKSTVRNTIDYSRQEKLFGKTGQARTVRALAADRSQHQDDPRTEPMQKSKSALRTVRRKSKDHLTPRADRRASGADRPVAVDLQARIVRTRRADRPRSAEWSNG

SEQ ID NO: 67987 - protein, 182 aa, Zea mays
  Coding DNA Sequence Number=SeqID_24612
ADALAVGGYKRSRERERASFVSPSSRAATLSYEGPGPFFYRCKERAQGNDVPPLRHGRSEPEVGRGGDSSEVEAESEPWGRARRRPSSEVEVESEPWGRARRTPSSEVEVESEPWGQSVEGRMTVITLALLTEERASDKVSGDPCIECSCDTVGWRGDLAKVASSRSLLELGLGRVEGAPVA

SEQ ID NO: 67988 - protein, 250 aa, Zea mays
  Coding DNA Sequence Number=SeqID_24613
  Homolog annotation: Hit_ID=Q6J9V9; Match level="QueryCoverage=42%, HitCoverage=27%, E-value=2e-12, Identity=47%"; Hit description =Putative uncharacterized protein
  Subcellular localization annotation: CTP_CleavageSite=44; ConfidenceScore=5.50e-01
MAAAGERKRQSNRLHAHVPSWGSRRALSHGVKMTRPCSVPRTARATAAPRTTCPVALTPRQGRRHLWQAKRATLHLRHDDRIKKGTGKGDTPKGILLREGSGPRALLLIRGSKVGPSERFDSRLRALGLCAHHWSEVRRLAPQKGSTAASGHSGSAPTTDQGFEGWPPEGFDNRLRTRRARDDSGYVRYMAEARATLPRGSGAALANPASAKQLTASTYQPENSEPDYAPGLRPVRMREQLDRPRHHERH

SEQ ID NO: 67989 - protein, 316 aa, Zea mays
  Coding DNA Sequence Number=SeqID_24614
MGSARVAFILLSLEERNFAEVGSPVTSRHQWSPKTVTTSSMVGRSKPGCDLCPTLSFKDLHHPCWGGGRGEPGPAFAWAGVPLLPPTSGGGNHPPALRRRRPPAMPGKANCCCPARVQHFILCPGDGGQPHWGVSQHVVRREGGTRVLGWSHSHFCGEDGSEDLPVRFGAAGARWCGAGGQVDAAAGAEVVAAGESFSADETRSPASHPEFIVPQALRCGGCSYPREWNRSSVCNGTLSAGESLGSVGLATQGFSCSVKENHRPLCDEPEPEAAVAEAMSRADILGGQLSEATERPVQPSTRARFLEEILAAMAQA

SEQ ID NO: 67990 - protein, 59 aa, Zea mays
  Coding DNA Sequence Number=SeqID_24615
MAKNFGSETVQIAMNAVVTSHLLVCLYSAAAFENKSPTPLDPSNDASKQVRIGSELDPK

SEQ ID NO: 67991 - protein, 326 aa, Zea mays
  Coding DNA Sequence Number=SeqID_24616
MSRWKTQTRTPRRSADGGYVLTSAFAEQRSPMPMPIGDCPAPKSECPATTSSCLGGCPYHRERLSCMGVGPALAGGLALGLRGGSGLVERGTRKERIQVYNGGVAGNDGASCRRGRSVPWVGRGGGSSEVEVESVFQGRGRVRAPGAEARVRALGSGEAEFVVFRGLSPSPSPGVGRSGVRRLPGAEPESEPWGRAKQSSSSSGAEPESEPWGRAKRSSSSSRAKPESKPWGRAKRSSSSSGAEPESEPWGWAKRSFPWRLGPDLAAVSLTLSSGTAVRAAQAALSPCQAVGVAIWPRLLLGEDWASGEPKLCADGGYQLRFRSLE

SEQ ID NO: 67992 - protein, 75 aa, Zea mays
  Coding DNA Sequence Number=SeqID_24617
  Homolog annotation: Hit_ID=A3AA52; Match level="QueryCoverage=98%, HitCoverage=12%, E-value=1e-18, Identity=66%"; Hit description =Putative uncharacterized protein
MATTAQASVEGFNCTANRTYPCQVYALYRTGFAGVPLDLAAIGDLFAVSCFMVAHANNLSTTAALANGQPLLVPL

SEQ ID NO: 67993 - protein, 298 aa, Zea mays
  Coding DNA Sequence Number=SeqID_24618
MVMKAGEHQEDKVGECFVRFGHGGGLTPSSIIVKDILLLRGGRVPTSVAKLCASHGNPQKSQNMSGTSISRMGWKSALWQSTWDKAETIRTILLSKSLSPDTASQILAKMLPGKPSDNYARATTSNKYTPAWRKRLQALSGGDTIEDDPTIVYMAGYLHTLDNQYDDLASHCTHLNSRVESLEQKVRELTKEKTSLQESLEIAEGEETNTREAYRTLKMDYDKKLKKLAPARKLRKKTKSQGCQTEQKEEAPPALPPTRIRNSSDTKEMSLASLDDLLKEFGDTLEKEFGSTLDSTRV

SEQ ID NO: 67994 - protein, 156 aa, Zea mays
  Coding DNA Sequence Number=SeqID_24619
  Gene Ontology: Mol. function=FMN binding
  Homolog annotation: Hit_ID=Q8VXY3; Match level="QueryCoverage=48%, HitCoverage=19%, E-value=5e-26, Identity=75%"; Hit description =Putative uncharacterized protein At1g51560
MAETKTDMVVVVVLMAQRTSLLSNRYMSFGTVAWVDVNEYETLQPDKIAMDGGEQNLKELNSMFSKPVKEHLSTDEGEVDDLAVISMDSKGIDIRVQQGAQVQLSEKGAGALTTLAKECFLFCQNTLSIELANFYYLKNEDLICSSLESSCMMGFD

SEQ ID NO: 67995 - protein, 160 aa, Zea mays
  Coding DNA Sequence Number=SeqID_24620
MEMTAARLQHDPTDVDHPLIHAQDLQVLVWEAKLCVQTPWIAVPDTRTPVAKWWSMQAYGQQAGFMRADLTGLAYTYAQPSYKREKIQSLRLAPMDRTYRDAPEVRKRCSSCSKVVTPGSAHFRHLEGFRTPLSSVLTIGLGPDPGFPSAFADKVHVLTL

SEQ ID NO: 67996 - protein, 451 aa, Zea mays
  Coding DNA Sequence Number=SeqID_24621
MHRILPPSEPPDGERPRCLRLVVGGAQPYGGGHPSAIARLQGFSSGSPTAFPHRWSPRMVTTSSMVRRSKPGCGLCPALSFNDLHHPCWGGGQVEPELYLPYGPAGHLFLQHSGERALTGLAEGADFDNAGPIGRKRRQLQHAWLADSAGFGVASGATSHRWGRVWLSAGGQVAAIVGAEVVAARGGFSADETIGATHGPTSGSLALIACPRPSSGDAGEGLVAAASALRNPRLLCDEPEAAVSAWTEAESAREEASSAREHVGSLAEEVQQRWLEPGQVIDWRDQPRSRAAEAMSRADVLGGQLAEAMERPVKVFARAGTLTETLAMMVRGWCWLPSSRWRSFRPRRRPRPGQIPPKVETTPRVLLLPLLMSESAGRDLFVGNRIVYPSESYFSRMVMSEESLGSVDLAAYVYSVIFRIPAIEAVEKRERCSSRKTFSEENVDAEGVPPF

SEQ ID NO: 67997 - protein, 176 aa, Zea mays
  Coding DNA Sequence Number=SeqID_24622
MRLSAAESSLRRHRKLRLARPQGSAPASASEDGLRLARPQGFAPASASEDGLRLARPKGSASTLTSGGIASSPDPGLGLRRSLRLARPWARTDHATGGIIITLPLASSGYGEQDRRPIWLAPWHGKDGKSPFGLEDKEVEKQSKRRSTTEVESYRFPRKRARVASPHFLILRLCYW

SEQ ID NO: 67998 - protein, 316 aa, Zea mays
  Coding DNA Sequence Number=SeqID_24623
  Homolog annotation: Hit_ID=Q6QP51; Match level="QueryCoverage=51%, HitCoverage=79%, E-value=2e-08, Identity=33%"; Hit description =Putative growth-regulating factor 1
MEAQAHASCNRRAGCYVRATAQLHRHLHHYHVSSTAEPAGRSSGHVVSQAYVPSRGSERTLSHGAKTARPCSVPRTACARATAAPQTTRPVALTPRRDRRRLWQGKQATLRLRHNDRVKKRLRASLLIRGSKAGPSEGFNSRLRARGLRTHYWSEVRRPAPRKGSTAASGHSGSVPTTDQGSPETPCSAPSEGNMALPPLLLAERRRRGVCKKVESVLDRPLALCRGSGAALANPAPTVSVSPDPGARTRPRPRKTDLTSTSEEPPHRPTQGTDRPHQQEAPSLPYPKLTQAMGNKTGVPSGSLRQTSNDGAPHAL

SEQ ID NO: 67999 - protein, 260 aa, Zea mays
  Coding DNA Sequence Number=SeqID_24624
MNKRPAFKVPLQTELRFHLRRHEQPHTIGGPAEQQKANGRLTVARSSSSDNDPRYGWPNCSSDGLRAHAAATLPSPTPTLEGRGQEPSALRQIPTQILPDEWSTDLHAEAPYRCEGRIAPEHERRPSSARRLGRSSRARGATTALAAGGGTGSQAGEPNALKLTTPAVDQPRVFEVRPSRRASERPLPRMLKEWLAHEPAQEVELRLSPASALARMMNILEAEGGIKIAARLASPHPGLVVTVLGDHRRGDAAELTDENP

SEQ ID NO: 68000 - protein, 231 aa, Zea mays
  Coding DNA Sequence Number=SeqID_24625
MARVSLEHSDHFASVDQPHVATSAMEFPGRAIGVLSVDGERRKGVSTTRIYIHTLVKKGKNLNNRTESGGIGFGVRYEEGRKRMTARDDISVSGVERALFESDQWAPPGSAMRTPRLGSGARMSDHTRQNLGRTHGHTCSTLVGTPELAQPARALAPASGQVRRAPTPSAVPACAYKASPGAPLFAPHSPSPGQPPFLSSGELNSARHCRQSFGHRGQPTPATLWGSQCFG

SEQ ID NO: 68001 - protein, 97 aa, Zea mays
  Coding DNA Sequence Number=SeqID_24626
MGKPVPSLLMLLLSRGGVPLDSPTRWQDGRPSHSSNHYNGSSSLINCEKQTIQNEFLSLQVTALVPTITGMGDHVSGRVRGKVCGQVHSGFGNHYAK

SEQ ID NO: 68002 - protein, 52 aa, Zea mays
  Coding DNA Sequence Number=SeqID_24627
MAREACTLHGKRLDGGVSVLSVKKQQTFVASVPRWCPKKKIKTEAAGGSVLL

SEQ ID NO: 68003 - protein, 522 aa, Zea mays
  Coding DNA Sequence Number=SeqID_24628
MANIRATVLPAIAMQRARAMANGGETQTRPQWVMLRDDESPATQAQHTTAMPTSQPSRAMARAGKEGEKSQQPVPGAAASDLVFEEHLHVFDALWARQSTPAPDPARPVPRQAAPASPARARAYKSPSGVDRTPLRTLDLTGARNHRRLPRARRARGHPSPCHRRPANRALPSHARPLEETVHASVMLPEHGIGLCFVGEASPRSSDFARPPVNVDRPEHLPPTRSPACARGPDDSGHLRRQVVHRCDRQDLPEPTPPLAGPLSPPGAGYTTPPQYAVQQFEKHRVPRCRVRMTLEPHPLQPGWRSLDYESFGYRAEDTIEAIALHGLTTFCGFHPLELSTHPIGLFPAEKEDDPIWKDRVEHAKDIWAIYPGQTAHLTVRCMNALYRLQVMRGEAMSHLMALLEATKITLDNREELVVDLSTEMVEKDLQVEQLSNEIQELEELVGTRENTIEVLEDQLINTQQQLAEANEHLDMHHQEIQDMEANEDVDIEGGEEPASSLDTTSSGRPPSPESSVASFAH

SEQ ID NO: 68004 - protein, 77 aa, Zea mays
  Coding DNA Sequence Number=SeqID_24629
MGKPVPSLLMLLLSRGAYNGSSSLISCEKQTIQNEFLSLQVTAVVPTITGMGDHVSGRMRGKVCGQVHSGFGNHYAK

SEQ ID NO: 68005 - protein, 131 aa, Zea mays
  Coding DNA Sequence Number=SeqID_24630
MAGSLSIFRRGSLENQPGRNGIHRSRPFEQTRMTQIKSSLDTGMEIQSLDQRSPVSFLWAKMLSEPHIDISTVRVQRSKRLRHIFQLSANNRSGCATAPWLWSRRSSGIRRTNALFPRLTGDRRCGDNCEL

SEQ ID NO: 68006 - protein, 69 aa, Zea mays
  Coding DNA Sequence Number=SeqID_24631
MAAGGAVHGVGCVGYRGTSAVLERGSVASKGSWRAVGREQRKRREGRRESRCYKCTPLKKNLVLEIKEG

SEQ ID NO: 68007 - protein, 154 aa, Zea mays
  Coding DNA Sequence Number=SeqID_24632
MAARGAVHGVGCTGYRGASAVMERGSMASKGSWRACYKREQYGDIVHLFIGTGRSPSKSHHQHFFASLRAEASSSSECFGVYTCFLWIYLHHAGKGSWLVGKVCDLCRGMKLIYQSCSWLRAALGAPLIRDATNLRYNCSIDGFCYDDDNDVPR

SEQ ID NO: 68008 - protein, 87 aa, Zea mays
  Coding DNA Sequence Number=SeqID_24633
  Subcellular localization annotation: CTP_CleavageSite=23; ConfidenceScore=5.00e-01
MTVGGGYLSYGAPDSPVYTGHVRCASHVTNAVGFRPLELLSSGPAWMSGAHRTCTVQCPVLAFGVIENSHSWLFSTKMGVEWPFIMD

SEQ ID NO: 68009 - protein, 119 aa, Zea mays
  Coding DNA Sequence Number=SeqID_24634
MAEASFHVFDEPPTTPAACARGQGSPDHLRRRPAHRRDRRDLPDVTDHPARALLPPAIPIHYVILKENLSLKDCNLADGEYILVPEQGAAQEVAPDPAPEPAPEDLPATALEGKPRFYA

SEQ ID NO: 68010 - protein, 75 aa, Zea mays
  Coding DNA Sequence Number=SeqID_24635
MGTSPVRPRDGCGRSSTDSADSVLGGESDPRKEKMFLVSGPGCQSDVIVDITPQPITLNQRSKSDKHHKNKHSSI

SEQ ID NO: 68011 - protein, 533 aa, Zea mays
  Coding DNA Sequence Number=SeqID_24636
  Gene Ontology: Mol. function=transcription elongation regulator activity; Cellular component=intracellular; Biological process =regulation of transcription from RNA polymerase II promoter
  Homolog annotation: Hit_ID=A3B9I0; Match level="QueryCoverage=75%, HitCoverage=40%, E-value=0.0, Identity=84%"; Hit description =Putative uncharacterized protein
  Pfam annotation: Domain name=KOW; Domain location=279-310; Score =23.4; E_value=0.00081; Accession=PF00467.20; Description=KOW motif
  Pfam annotation: Domain name=KOW; Domain location=430-459; Score =28.2; E_value=2.9e-05; Accession=PF00467.20; Description=KOW motif
  Pfam annotation: Domain name=KOW; Domain location=482-513; Score =27.4; E_value=5.2e-05; Accession=PF00467.20; Description=KOW motif
  Pfam annotation: Domain name=Supt5; Domain location=153-197; Score =51.9; E_value=2.2e-12; Accession=PF03439.4; Description=Supt5 repeat
  Pfam annotation: Domain name=Supt5; Domain location=229-276; Score =62.5; E_value=1.4e-15; Accession=PF03439.4; Description=Supt5 repeat
  Pfam module annotation: Pfam domain module=KOW::KOW::KOW::Supt5::Supt5 ; Domain location=279-310::430-459::482-513::153-197::229-276
MARRDHDDDDEEEVEEEAYDLDEEEDDEDEEDDYEEEARRGKASRGGGKGGGGRKRSREDNFIDDSAIEDEDEDDDDDGGGRPRKKGGGGVRGFFDEEAQVDEDEEEEDEGEGEDDFINDAGADLPDEDVVRGSRRHSIPMRDEEEDIDEIERQVRERYARSTHIEYGEEAAEVEQQALLPSVKDPKLWMVKCAIGHERETAICLMQKFIDRSDLQIKSVVALDHLKNYIYVEAEKEAHVKEACKGLRNIYASAKITLVPIKEMADVLSVESKSVDLSRDSWVRMKLGIYKGDLAKVVDVDNVRQRVDVKLIPRIDLQALASKLEGESVKKKAFVPPPRFFNIDEAREMHIRVERRRDKESGEYFEWVDNLKFKDGFLYKSVSTKSIHTNNIQPNFDELEKFKKPGDDMNGDMASLSTLFANRKKGHFMKGDAVIVIKGDLKNLEGWVEKVEDETVHIRPKISDLPKTLAFNEKELCKYFKPGDHVKVISGVQEGATGMVVKVEGHVLIILSDTTKEHESPESVIMNCMILSF

SEQ ID NO: 68012 - protein, 166 aa, Zea mays
  Coding DNA Sequence Number=SeqID_24637
  Subcellular localization annotation: CTP_CleavageSite=54; ConfidenceScore=5.05e-01
MGGVAECYVSSGKRASALGRAVWGLLRSRGRVCLPLPRPSPSPWVGRGGDRLAEARAESEPWGRARRSFVVFRVLARVRALGSGGAEFAVFRVLARVRALGSGGAEFAVFRVLARVRALGSGGAEFAMAPLARPDCLSDSLCRVALQSEWRRRRCPSVRLVSGAVE

SEQ ID NO: 68013 - protein, 177 aa, Zea mays
  Coding DNA Sequence Number=SeqID_24638
MQESLAGPPSQQNPPEGLPRNPLQDRHHSKILPRAFPGIPCRTAITAKSSRGPPYTDHSPTALAPFGYQDDLQVTRNLTAKRSNTDKHAVRCEINARQSFSYLAPEQNSRPARLRRTPPRTKEVTNSDTNRSSSTNRDLESLWKAPKGEGQVPTYLYPRQELRTEFSPGSTDRAKIG

SEQ ID NO: 68014 - protein, 92 aa, Zea mays
  Coding DNA Sequence Number=SeqID_24639
MDDILEERYRLLGLDVGEGSDLDPLGKLVDGDQPYEGLGPLSQLYGLSLAKRESLRRRYSRYGAINQGFVLGYVLGCSKVEAYYIAQMYAKG

SEQ ID NO: 68015 - protein, 144 aa, Zea mays
  Coding DNA Sequence Number=SeqID_24640
MGIRKKPEYVWKEYRENGIEKCSMAVYLGESRSYPNHPPFQALSGRDPTIVYMARYLHTLDNHYDDLSSHCTHLNSRVESLEQQVKELKKEKASLQECLDIAEGEEANTREAYRTLKMDYDKKLKKLAPTKKNPKEDQEPRRPS

SEQ ID NO: 68016 - protein, 74 aa, Zea mays
  Coding DNA Sequence Number=SeqID_24641
MGKNNKRKREPTPPSEYFDDSQGLAAEVWTYIRAVERSELEGSDESEYSSDEEDSDGGGEDEDGDDDDEGGGGG

SEQ ID NO: 68017 - protein, 157 aa, Zea mays
  Coding DNA Sequence Number=SeqID_24642
MAQGGTDLKMKRLRDEQYSRTVHADLAFAFASRSYFSPFSQDRRNDSMMMLILYFVLYVSPSSLLVMFTKGSIKDYYHHTEEENKGYEPCRMVLNPKIPKHCDLKGKRVENELLVNRHMGFYQTQMGDARRHKSLSWFGQEKTLLPMEGDETYISCT

SEQ ID NO: 68018 - protein, 190 aa, Zea mays
  Coding DNA Sequence Number=SeqID_24643
MESVRRCGRPQRGGVKPGPGPAWRGGDVGAQVEAGGAEHARVVGRELALQARPWCVGVGLWVELRPRRVAEEVRHHSEDGRQLRPRQLRCRYISPEASSGRETRFWLAWGQPRMRDIVLTRPGTTLNGRHCFDSLEASSGQEKQSRLARGQLWVGEAVMTRPRLALGGRCSRYSPKANLGWEHRNAPWAA

SEQ ID NO: 68019 - protein, 267 aa, Zea mays
  Coding DNA Sequence Number=SeqID_24644
  Gene Ontology: Mol. function=RNA-directed DNA polymerase activity; Biological process=RNA-dependent DNA replication
  Homolog annotation: Hit_ID=Q8S463; Match level="QueryCoverage=29%, HitCoverage=4%, E-value=4e-09, Identity=43%"; Hit description =Putative prpol
MSLDIKYDMVLLPPRHMADTQGHPDIYPCPPRRRRQRRNNRNCTASNAPCLVDAPRLANDEDSLARDLTNVSITSGASTTTHVTLAPTLLAPPPMVWGAPASSAPHTLRRVAQSLSSPPPASWEALASSRLEMLASSVARGEPSMFSPIPFQPSFDTSAFTNMYADFPFPSRCLDSEEEDGLGRGLDFSRLCDPEAMLQFLFSCDELLSDGLDGYSTNEEGYDPTRESFHVVHEEHAKGDQLGMPREGNTPPPHVRESREQGEARTP

SEQ ID NO: 68020 - protein, 140 aa, Zea mays
  Coding DNA Sequence Number=SeqID_24645
MKRRSPTSDLGPSNPHEIQGVSIDDVEAAASIHEHLGESGVADDGVDDKRVLPRVRDVVRVIISVEGRPLTIPASAASWRGSRSVHQRLRRVRGALAVLKWSRTGRGPSAEAVVNTVILAVVEEAVFNCECLLHGGLGVD

SEQ ID NO: 68021 - protein, 232 aa, Zea mays
  Coding DNA Sequence Number=SeqID_24646
  Gene Ontology: Mol. function=transcription elongation regulator activity; Cellular component=intracellular; Biological process =regulation of transcription from RNA polymerase II promoter
  Homolog annotation: Hit_ID=Q69T55; Match level="QueryCoverage=85%, HitCoverage=68%, E-value=6e-92, Identity=82%"; Hit description =Transcription factor-like
  Pfam annotation: Domain name=KOW; Domain location=183-214; Score =22.1; E_value=0.002; Accession=PF00467.20; Description=KOW motif
MGIIGKMEILLLGVAVQLTRCVTPTCLTPIIQNFQPGTPQARPYEAPTPGSGWANTPGVSFNDAPTPRDNYANAPSPYVPSTPVGQPMTPNSASYLPGTPGGQPMTPGNAGMDMMSPIIGGEGEATWLLPDVLVNVLSGGDDGPGVVREVLGDGSCRVALGSSGNGDMVTVLPNEVEVIRPKKSDKIKILNGSFRGHTGKLIGIDGSDGIVRLDDTYEVKILDMVILAKLAT

SEQ ID NO: 68022 - protein, 191 aa, Zea mays
  Coding DNA Sequence Number=SeqID_24647
  Homolog annotation: Hit_ID=Q69T56; Match level="QueryCoverage=51%, HitCoverage=52%, E-value=4e-26, Identity=59%"; Hit description =Putative uncharacterized protein P0664C05.19
MKEGGSAPMRFHDKANSMHKSCLSLITKYGYVSWPHKVERIWCSKGYRAHDKVEAAADDVVIDGAGVGVGDAGEEEEEEMAPVEPLPEPLDDCGPVAWPMPDFCPLTIDGALKESFLETLRKDAAEVERPAREGAEEGEEALSPDSRPSSSKRHRAGTASPSSRSSPYRNILHVFQQCRQDAVGETPTKNY

SEQ ID NO: 68023 - protein, 732 aa, Zea mays
  Coding DNA Sequence Number=SeqID_24648
  Gene Ontology: Mol. function=sequence-specific DNA binding; Cellular component=nucleus; Biological process=regulation of transcription, DNA-dependent
  Homolog annotation: Hit_ID=A2YAI5; Match level="QueryCoverage=100%, HitCoverage=99%, E-value=0.0, Identity=71%"; Hit description =Putative uncharacterized protein
  Pfam annotation: Domain name=Homeobox; Domain location=74-117; Score =40.8; E_value=5e-09; Accession=PF00046.20; Description=Homeobox domain
  Pfam annotation: Domain name=START; Domain location=253-478; Score =171.1; E_value=3e-48; Accession=PF01852.10; Description=START domain
  Pfam module annotation: Pfam domain module=Homeobox::START; Domain location=74-117::253-478
MDFGDEPEGSDSQRQRKRYHRHTPRQIQQLEAYDLASFPFLLLLLYSVRPPLWLFVVRRDGLAERNVMACVLAHDCRMFKECPHPDENQRAALSRELGLEPRQIKFWFQNRRTQMKAQHERADNCFLRAENDKIRCENITMREALKNVICPSCGGPPVDEDFFDEQKLRMENARLKEELDRVSSITSKYLGRPFTQMPPVPTMSVSSLDLSVGGMGSLGGPSLDLDLLSGCSSGLPYQVPAPVTEMERPMMVDMAARAMDELIRLAQAGEQIWVKGVPGDAREVLDVGTYDSLFAKPGAAFRPPDINVEASRDSGLVFMSAVALVDVFMDTNKWMEFFPGIVSKAQTVDVLVNGLGGRSESLIMMYEELHIMTPVVPTRELSFLRYCKQIEQGLWAVADVSLEGQRDAHYGVPSRSRRMPSGCLIADMSNGYSKVTWVEHMEIEQMLPINVLYRNLVLSGAAFGAHRWLAALQRACERFASVATLGVPHHDVAGVTPEGKRSMTKLSQRMVSSFCASLSSSPLQRWTLLSGTTDVSVRVSTHRSTDSGQPNGVVLSAATSIWLPVPGDHVFAFVRDENARSQWDVLSHGNQVQEVSRIPNGSNPGNCISLLRGLNANQNSMLILQESCTDASGALVVYSPIDIPAANVVMSGEDPSGIPLLPSGFAILPGSGAGASSSAVVPPPGCVVTVAFQILVSNLPSSRLNAESVATVNSLIGTTVQQIKAALNCAGH

SEQ ID NO: 68024 - protein, 153 aa, Zea mays
  Coding DNA Sequence Number=SeqID_24649
MVGDARSTCVGGGSKFQSTVVVELDSTGWEASLEVGGAASARNWAAVYWVALDTFISGRMKSGKQWHRRCRGIKSEGAGGELHHDSGKLAIELARSKGGYDGRATVAGARVAMAGGGALSLGKTPARAHLPTGLGLAGRTAEGRGGLYRHGRG

SEQ ID NO: 68025 - protein, 424 aa, Zea mays
  Coding DNA Sequence Number=SeqID_24650
  Gene Ontology: Mol. function=aspartic-type endopeptidase activity; Biological process=DNA integration
  Homolog annotation: Hit_ID=Q10G21; Match level="QueryCoverage=65%, HitCoverage=20%, E-value=8e-11, Identity=24%"; Hit description =Retrotransposon protein, putative, unclassified
  Pfam annotation: Domain name=zf-CCHC; Domain location=323-340; Score =16.6; E_value=0.0047; Accession=PF00098.14; Description=Zinc knuckle
MTAHPMFVSKNIALNDYNSFAMKENELVRDMYSRLNLTINELNYISINKLGDANIVRKIISLLPQQKYGSIFTILHNMEDLSQMTPTIVIGKIAAFEMSRKMGQQEEPTSSKPYAFACDEKKGKRRLPLQVPHVNKRKKKKAMMMMIINHQHHPLRTKKQSDASERGGAKARRLQVSKHGMTLQAKMNLQGPQPLILITLIMVITQVPYGKSIHNNELTTKLENISSTSEVSFVEIPRTIKKDASTSCFDLINDSNPCNQDLVENVVIETCSNEVAKENEQLRQEVARLGKALYDKKGKAKQIQPSQDNTTAGVKKPLEGETVICRLCHKEGHKSYQCKVKIEDNQKQKLKQKPTNKISNTYIDKVDKKDDTPYLINKKNNGKVIAIKANKQANKGKGAKRIWVPKEIISTMKNTKKVWIPRGK

SEQ ID NO: 68026 - protein, 102 aa, Zea mays
  Coding DNA Sequence Number=SeqID_24651
  Gene Ontology: Mol. function=structural constituent of ribosome; Cellular component=ribonucleoprotein complex; Biological process =translation
  Homolog annotation: Hit_ID=O22453; Match level="QueryCoverage=64%, HitCoverage=24%, E-value=1e-22, Identity=80%"; Hit description =Ribsomal protein S4
  Pfam annotation: Domain name=Ribosomal_S4e; Domain location=6-75; Score=63.9; E_value=5.3e-16; Accession=PF00900.11; Description =Ribosomal family S4e
MKVHFEKDKALAHRFQPVLVNEPSQFKLCKVMSVLFGQKGIPYLNTYDDRTIRYPNPLIKANDTIKIDLETNKIMDFIKLYLPFHGLHQVIYLVRLNVSTNS

SEQ ID NO: 68027 - protein, 294 aa, Zea mays
  Coding DNA Sequence Number=SeqID_24652
  Homolog annotation: Hit_ID=Q7XBD4; Match level="QueryCoverage=50%, HitCoverage=12%, E-value=2e-10, Identity=32%"; Hit description =Cinful1 polyprotein
  Subcellular localization annotation: CTP_CleavageSite=50; ConfidenceScore=5.13e-01
MVASSSSTAPKPKKVKVLTHRPMPHSIKRTAVIPNTKRIEIPEQAEVIPLASEAIPTVTVEASAGPTCDSLAYNSLKVITLRNEALEKDKILLSLVERLKSSEARLSSLSEAEQRVKEFEEKQQKYVKRIADLEYALSVQVKSHRSEVQGLEKKLDEVAENFNVEQRKREISNTKRLRVQKNVEEFRLAKVECYNVAMECCNKLKEAFPKLVHSLRSKILSVVILMELFDGSAAKPKLLRRFLVIGETSAPSSAGVELCHSLRRLAASMQRVYFSQNSRSQPMTLRTLQPKPLH

SEQ ID NO: 68028 - protein, 63 aa, Zea mays
  Coding DNA Sequence Number=SeqID_24653
MATARRRGGPIRRLGASAKLKALKRRGHGLGFLWTEDECPSGQGVTFHKVVTAIGGGVSVAKA

SEQ ID NO: 68029 - protein, 123 aa, Zea mays
  Coding DNA Sequence Number=SeqID_24654
MGLTSYASLVSCEGVANADLSREGFKNIEAFEQSNEEFDREALRNEEVEDLAGFKCFLATQDVGVEEGAEEQSSCAEVNHAILDAVGTLQPYAAEQCAKGADPVHVEEIFCYYLIDVWDGVGV

SEQ ID NO: 68030 - protein, 87 aa, Zea mays
  Coding DNA Sequence Number=SeqID_24655
MRGPGHGVERELLGQAPWQAGANDHGVQVWGGVAGEHQLAVVGGGGWLRRARRLRDGTSAWGGREAMQPGSFDGGQGNEDKGKSARR

SEQ ID NO: 68031 - protein, 87 aa, Zea mays
  Coding DNA Sequence Number=SeqID_24656
MARAYKAPRDFDHCNLADGEYVLVPEQGAAQEVAPDPAPEPAPEDLPATALEGSLEDMVAGVTWPSILPPGWTIECDPASAEEEHGE

SEQ ID NO: 68032 - protein, 208 aa, Zea mays
  Coding DNA Sequence Number=SeqID_24657
MTENKSRNLLDKVIMLEKEKEDLGHRLNDEREATAEARTDAENARTEAQATTNLELETALFDKSGEEVGTRFIGWLQEKLESLPSIMTCLMSYASLVEDDVLKRSAWALYDRMWGPHGRGIVRKRANQALAQATRDEELEELTDLESSVAQKNAKVAQKEWKSNPHSRKAARRVLRRRGLLRRFVCRGVSAKGRPHCGGEDFAKGCPE

SEQ ID NO: 68033 - protein, 76 aa, Zea mays
  Coding DNA Sequence Number=SeqID_24658
MGSKASRLFVEELMETCAGPEEVMTSPELRETSLRMLKRNIGAIVSIVMEKDHQEIQRKKRKAPLRLVDPHRDAKT

SEQ ID NO: 68034 - protein, 74 aa, Zea mays
  Coding DNA Sequence Number=SeqID_24659
MFDDQTGLLPAGVEAGKLVVAPSKVPTDPGIQEKSDTGTSLDPWSKFCAAADGGSKVALAVAADGVATSVAQQL

SEQ ID NO: 68035 - protein, 473 aa, Zea mays
  Coding DNA Sequence Number=SeqID_24660
MASLGHPDRFQFEEAINLPFFLLLMEEFRLQLQHLMPHSILQTAIFVHLREMIKVLATGDLTSMHVVGDLLKRRIAPLQRRIQRGPGLRTTILATLTTLDDSSVAVRQTGGRDPLRGIRISDAPARGPQPVGVAPSANLAVASSPLDKGKGVASSASAPGSSGGSEEERRRRLCRANGSLVSEPPEAPEDYRGTSVLQSRRHHHHLGVITPGAPASATATTAAAGAAIASLLGASSSAAPKATPPPPDTRPTDGSGSQQQESVEGGAGGPPPAATKIAPAASHAPAEDPVAAAPTSGGVVVVEEVPAAGSAPTPDTGAILREWEALEAEHQRLSDWRTQLEERTKTASRQFTSERSQLKRGRKEYKRDFQRAKLNALDQTLEAQRAQQVKAMERLQKWQQELEGKASDAALAEKNLKAKEQSLDRWETDLAREEMLTRRGKLLAEHELEAEEKEWKLEEQIYQYNAAQAAPRP

SEQ ID NO: 68036 - protein, 159 aa, Zea mays
  Coding DNA Sequence Number=SeqID_24661
  Homolog annotation: Hit_ID=O48967; Match level="QueryCoverage=69%, HitCoverage=23%, E-value=1e-36, Identity=66%"; Hit description =Putative uncharacterized protein
MLEKLATHDVETVTTLFALADKCARAAEGYAWHSAPQTGVTQTAGSGPATQGDSKKKKKNRSHERSQSAAPVVATATGGRNEHNKRPWPQGGNSGLCPMHPNSRHSASECHEIIKLEKLALKLSDSQYNIHTVEVYSATRPEDFLSDREVDDATHNKDK

SEQ ID NO: 68037 - protein, 90 aa, Zea mays
  Coding DNA Sequence Number=SeqID_24662
MSVEQPLRIPEAAKFQSRVLLEHRTLSGVHRTVRCTPDSPVNYSAPTLKIPEAEEFIAESPGAPDTVRCATGQSGAPDQGAFRDAFSTIF

SEQ ID NO: 68038 - protein, 242 aa, Zea mays
  Coding DNA Sequence Number=SeqID_24663
MSHPPWALVPRCREVEPPLAPVPCLIEAAAEDREGVTFGMTEGGLAVITSESAQKQHANRQSGFGPTCRLVSSPEAGPGATIGTLNQGRRPDAATWPTTRDVSQRVEPDVRPLGRVASAFNVDKARRLSTPLGSFRCTPMLHRPRIPGRKEIALATSISCSKYYIRYVPRPACTRVGAFRHPAGGFLSDNNITVKPIHSYKSGLIEVGVVDAHPKLPVCLGNDVWIDQPYWVMDLFDEASVQ

SEQ ID NO: 68039 - protein, 109 aa, Zea mays
  Coding DNA Sequence Number=SeqID_24664
  Homolog annotation: Hit_ID=A2YTZ0; Match level="QueryCoverage=28%, HitCoverage=8%, E-value=1e-07, Identity=80%"; Hit description =Putative uncharacterized protein
MSEQLAVLLRCGVPCQGLVLQDVDLRYKGQGATSVCPARVWVLRPNKETHRWTYSGRCPLEDRFFLLHNQVWDIGHHHYGDILHTQWGLGDAPMANTATSITSGFRLIK

SEQ ID NO: 68040 - protein, 104 aa, Zea mays
  Coding DNA Sequence Number=SeqID_24665
MDEGLKPKFFKLSELRSKRCIFVISEGEMSQDKKVAAETKLTEEEKLFEEKKAVNPYIAGFIESMAKTNTEKITKEILEGFLKILVTVIVMMRKAGGEDSKDRP

SEQ ID NO: 68041 - protein, 79 aa, Zea mays
  Coding DNA Sequence Number=SeqID_24666
MAPGEAVELGGWRSKSLAADSTPGAALDGALDVCAGVCYSVERTAAAPGAGRLEARGMDDTTFSSTRKSSGVKPRCSTI

SEQ ID NO: 68042 - protein, 127 aa, Zea mays
  Coding DNA Sequence Number=SeqID_24667
MALLDPLECFQSEVALDLVRNLLGWGASAFAGRICVGASPHGDLTAREFVLFVSCVLALLISPFFLLLPEEHGLVGGGALPPVLSFKDVHQPCGGGKRAELRLHLSRELHQCLMDLAWEAKPCVRTP

SEQ ID NO: 68043 - protein, 46 aa, Zea mays
  Coding DNA Sequence Number=SeqID_24668
MARELELARWGPEKEEVTGGAIVAFTGAVVQRGPKSHGFFCKSSNM

SEQ ID NO: 68044 - protein, 260 aa, Zea mays
  Coding DNA Sequence Number=SeqID_24669
MDDTTTAATGPIAPAAISSELAHGGGPYIAGLGPLLAVPPLTLRRGSPPGFPTLASPTWSHAVAPSALPTTDSPLVDTLATIQAAVTASRERERAASLAVERERALGAALTTQMATTQRLLGRPPTAPVEPPEDPLASDLDADLIAALHAQAAGLHNIRALVSVVLDLASSHYPVGEDRSFSRFGGSSSTITSSSTTTLRRLAPGASWTALSSRGSTAPSPLSYRTSSATRRTLRARRGSLSRTSSSGIGMHRLPPAEVY

SEQ ID NO: 68045 - protein, 128 aa, Zea mays
  Coding DNA Sequence Number=SeqID_24670
  Subcellular localization annotation: CTP_CleavageSite=59; ConfidenceScore=5.15e-01
MARARAYKAPRDFDRTPPHALDLTGAQTHRRLPVHGVSAAARSPCHRRPASRTLPNPVRPSEKTVHTSVKLPERGINVCFAGEASPRSPDSTRPPASVDRVILCSILRVLVHTTSMSPREAHRALGLN

SEQ ID NO: 68046 - protein, 101 aa, Zea mays
  Coding DNA Sequence Number=SeqID_24671
MSIILQYLVLTCGVCETARVSSHTFIAQQVVGNNVHELAKGPPSQQNPPEGLPRNPLQDRHHSKILPRAFPGIPCRTAITAKSSRGPPYTDHSPTALAPFG

SEQ ID NO: 68047 - protein, 987 aa, Zea mays
  Coding DNA Sequence Number=SeqID_24672
  Homolog annotation: Hit_ID=Q5SN38; Match level="QueryCoverage=76%, HitCoverage=89%, E-value=0.0, Identity=62%"; Hit description=TA9 protein-like
MYDRLFPSLPALRNLGSMEDEGCGSLICCLWYPFDGSTSSVYMVFEVAELDGAAMIYHANSKMKVCSQTYINVGEGEAGRVLEFGRRLRCVGRGRSRRPGAEPQKQTRKQPRPEPKRGGDAAALPLTRSAICRLAGASFGVGVGVEFPERGSGEDERQRQRQRRRGSQGAVGARAGVREEARAGAQGDREPSRRGDLRGAAGVRHGPRRGDTFQEVKSKRDKKKEVKETLDPRSRGASNSCRSSRGGMDRAGRSSSVQSGSSGTDYVTSRSSILGPAVPVKPTVPSLSTNKDVVFNGSVGAPQSSSGFQHNWFGVPGQMSMADIVKMGRPQVRSSGKPMAAADTSYAGQTPSLSSSVNQNSKQSASTTLPTTFDQGFPALPDPIPHTVNSSHGSAGNNHTHENDWFPQDEPQSGVQSTGIEASGDQSLSVASLDQSMLVAGTAYSQENSHAEENNSTAVKATVSSERHLEIVEEDNHYNDGLLQNCAYQAQVHSYVDNEVGVSNVDAESAVANFQHLSLQNEDIVVTKSEDNHAVILPDHLQATNADCAHLSFGSFESGAFSGLFSSKVTKDSLEDNEVHIPDESPSVNLDARNQDYYDNDALNLSANEDVETRIGTNMDNIDGPSVSQSDVPRQGAIDVPGLQYDMPSVPSHAYSSTTQPSKMEDPQGNTQAQPLSHFSGLLQANTLPNYLLGSNLTPIREFDFSQLLQTQSATKYNPSAAPNNLPAISMQETLKPGGFPNTQSTQHVPNTSIPSGLPLPQQLPVYSQPTLPLGPFTSLVGYPYLPQNYYLPSAAFQQAYSSNGPFHQSGAPAVPGAGMKYSMPQYKSSPPASSLPQPSSLSGYGGFGNANNIPGNFSLNQGAPSAPTTLGFDEALGTQFKDPNHYAALQQSDNSAMWLHGGAGSRTVSAVPPGNFYGLQGQSQQGGFRQAHQPSQYGGLGYPSFYQSQSQASLPQEHPQNLTEGSLNNSQGVPSQPSHHLWQHSY

SEQ ID NO: 68048 - protein, 137 aa, Zea mays
  Coding DNA Sequence Number=SeqID_24673
  Subcellular localization annotation: CTP_CleavageSite=36; ConfidenceScore=5.18e-01
MVLALVTATSFTILLLFSLPSCLHLRVTPFSTEGVGAGTSSPYSSDTSLDTDPHSGYCTFTRTFHSMRAPSFSPSSDIPLVFPAFVLFFTPAHGRSRKPTNARRRGYEASRSCFWPFSVCVAEEDTMEPAMLRLSWR

SEQ ID NO: 68049 - protein, 141 aa, Zea mays
  Coding DNA Sequence Number=SeqID_24674
MGKNNKRKREPTPPSEDFGDSEYSEEEFSSESEGSPAPVSPPASSDDSDDSQGIAAEVWTYIRAVERSGLEGSDESEYSSDEEDSDGGDEGKGDDDDNDDDDDDDDDDGDGDGSGSGRGGGDGSRGSTKGDGDGSRGRASG

SEQ ID NO: 68050 - protein, 215 aa, Zea mays
  Coding DNA Sequence Number=SeqID_24675
  Subcellular localization annotation: CTP_CleavageSite=45; ConfidenceScore=5.32e-01
MPMPTFNHLALPLKRRPRGQLLGITSKVPMPTFNHSVSPLKRRPRVQLLGITSKVPMPTFNHSALPLKRRPRVQSLGITSKVQMPTFNHSALPLKRRPRVQSLGITSKMPMPTFNHSASPLKRRPRVQSLGITSKMPMPTFNHSVSPLKRRPRVQSLGITSKMPMSTFNHSVSPLKRRPRVQSLGITSKNADADLQSLGVVSKTSTLYSVARHYF

SEQ ID NO: 68051 - protein, 188 aa, Zea mays
  Coding DNA Sequence Number=SeqID_24676
MSSCETNPLKEEEENERWRPNDESTSPKGLYFHFNSHICCVANENDSGSTNEDEEDETRFMQLYAHLSQEDKAVMLKFLKRAREQREARHMLEDILAIKMQSFDELTKEHEELKCSHVDLVQSNSSCELEFPGTKDDTCQKIKEENERLRTSLTQLKGKCTTQPSQDNRDYMVKKLETGNNCGMHKIP

SEQ ID NO: 68052 - protein, 79 aa, Zea mays
  Coding DNA Sequence Number=SeqID_24677
MQVACNCTMETHPFDFNASSMKAQAHTSCNRVRERGYSERDPSPQRKWALSPPTDQRFEGWPSEGFDSRLRALGLRAHY

SEQ ID NO: 68053 - protein, 334 aa, Zea mays
  Coding DNA Sequence Number=SeqID_24678
  Subcellular localization annotation: CTP_CleavageSite=41; ConfidenceScore=5.36e-01
MAPPVDVAVCALSRATWGAESEPWGRARRSFVVFRVLARVRALGSGGAEFVVFRVLARVRALGSGGAEFTVFRVLARVRALGSSGAEFAVFRVLARVRALGSGGAEFAVAPLARPDCLSDFTLSSGTAVGVAQAALPFCQTGQWSGGVTAVTSALPGARVRIEVSGHLCVKCPCNLVSRCGDLVKVASERSQGLGRADDVSAIKGGPRARRKSLELYADGGYQLRIRRLEAPEPLHRARGRSGTDPTFYIRPYVAFPQGGGGECAMLPSMGTEHGVSGELQAATGAPVARLVGLGSKLACQKSEKRVRLARLHAACMAARPFCPLVWAKMGGRL

SEQ ID NO: 68054 - protein, 25 aa, Zea mays
  Coding DNA Sequence Number=SeqID_24679
MEIHDYNEDHMAWNKGSYKLVYAIS

SEQ ID NO: 68055 - protein, 71 aa, Zea mays
  Coding DNA Sequence Number=SeqID_24680
MDAQNDVTQEWLDRVKIARKGLRGTKRRESSAGVFSSDLTGQNRLNRVLGEVQPVSGSKLHFGQYVLEDCL

SEQ ID NO: 68056 - protein, 321 aa, Zea mays
  Coding DNA Sequence Number=SeqID_24681
MVATLRLIASPTHLHGVGLAARPGLGDGPPSTIRIGGHVAWPTPCRDGNGYPKPEYVTGFTWYEGGYGMISLSADTEFGAEIHGANLGAEIHCAEVLPRQVHGKFNRGPERFNRGPGQVQPGSRGSTGVQGKFSRDVDPRAIDLGMRIAERMFLKMKEDEAKNKIEEENDRWRPNDESTSSQGSSFKSTSHMCFIANGSDSESEREDEEEQESDNEDEDDLQQFFAQLSKKHRMSLLKLMKRAEEQKEMLHKQEDFLIRKIEDLEKLTKEHEKLKCSHDDLVQRYFGTGGYEIDGFGYDYDAGEDEAVEGDFQEFQDYDEF

SEQ ID NO: 68057 - protein, 64 aa, Zea mays
  Coding DNA Sequence Number=SeqID_24682
  Gene Ontology: Mol. function=nucleic acid binding
MEDDNSITCHKMDEHNTIAGCEHVLTLITAGNQMDNMRIPPEVGDTSSPCHVAHEQMEQIGASS

SEQ ID NO: 68058 - protein, 75 aa, Zea mays
  Coding DNA Sequence Number=SeqID_24683
YILVPEQGAAQEVAPDPAPEPAPEDLPATALEGKPRLPLLTRPETRYPIPGYGWGTSAATAQRPFGVSEDLYAKA

SEQ ID NO: 68059 - protein, 114 aa, Zea mays
  Coding DNA Sequence Number=SeqID_24684
MGLSVAERAYIRSVERVGLEGSDDSEEDSLEEEEEDSSDSKEGGGKGDDDGEGDGDGGDGEGDGNNAGGEGDDDNAGEVPTNSEVTEARILLAEISVLKNRGLACGGTARIIPA

SEQ ID NO: 68060 - protein, 45 aa, Zea mays
  Coding DNA Sequence Number=SeqID_24685
MAAAGVSGALYAKADMVDGVTWPTTLPPGWTVEWDAASTGEEQEE

SEQ ID NO: 68061 - protein, 163 aa, Zea mays
  Coding DNA Sequence Number=SeqID_24686
  Homolog annotation: Hit_ID=A2X1T9; Match level="QueryCoverage=66%, HitCoverage=94%, E-value=4e-40, Identity=71%"; Hit description =Putative uncharacterized protein
MIYEPLGLRHIYGMCVPARPGSKQPDHGTPSDPRSDHLHRLSSSSQVKMIPQSQSSSLQRLQHVEKRIVRVLELAGAVMEELGNSHGPRTDAVSAHCREFMIAMKEIQTTLREEIKSACEYRPFEKCDYSARIANEICCKKLEYVIEKLDTMQQSLEHITDDV

SEQ ID NO: 68062 - protein, 94 aa, Zea mays
  Coding DNA Sequence Number=SeqID_24687
  Subcellular localization annotation: CTP_CleavageSite=70; ConfidenceScore=5.06e-01
MVLRHLRVGSAVQCHLPPPCAHGGALQRLNRDFRPRLTQRATPAPISTSAAPWVNPHANPSEPRPCVDEQATMETEVQQVEVAEQELIEGKLCP

SEQ ID NO: 68063 - protein, 160 aa, Zea mays
  Coding DNA Sequence Number=SeqID_24688
AALATALSLSERLRLARSPNPPEDSTGNLPPARCRFSTRSQALNDDGQKRGTLGQPRPEIAVQPLKCPAMRARWGKVALHGGPHAQVSEHHLHDRKSLSAGPRQSACLQKRGQVAPPTRGSRSDSEKAAGCAGFGVAGVRLLSGARTPEWLRAWSWAESA

SEQ ID NO: 68064 - protein, 79 aa, Zea mays
  Coding DNA Sequence Number=SeqID_24689
MAMMGPTSEKMYLCQKDAATHQANGTQVYGTNWGASGINWLPDMKAAAVEVMTPSGDLESPSFLCTLWAGSPSTDADLV

SEQ ID NO: 68065 - protein, 235 aa, Zea mays
  Coding DNA Sequence Number=SeqID_24690
MVTSSLMVGESEPGCGLCPSLSLKDFHHQGWGGKEGRPSSVAPVAAPCLALGREWLRSRSQCRRLPQQLEEVLPPALMAKAGHGADLQLYGILPVLASRVWAWAGGLLAAASALRSVLPLFAPPEQKSSSSPLLERVTAHRSPVFRCSAGPPLSSGAVRTCGGGNRSSVCDGTSNADSSVDYLNRFTKHESPRVKVTSEESLGSVSLAVRGSSGLVKETPRPLFDEPRPGVAISV

SEQ ID NO: 68066 - protein, 80 aa, Zea mays
  Coding DNA Sequence Number=SeqID_24691
MGSARVAFVWLLLEERNFVEIGTFQPLLGFKDFHQAARLHPLTNGLAGDANESLPVVAFTLGPSLLLQRSLASHPEFVVP

SEQ ID NO: 68067 - protein, 95 aa, Zea mays
  Coding DNA Sequence Number=SeqID_24692
MTGKKTMTSSDGGTPKKAKVVVEDEEEAGLEDEEEATVTLSVEKDALECDICCLPFQSEVFMASQITMHCKNGHSGCAKCCIRTDESRVKLHDMS

SEQ ID NO: 68068 - protein, 303 aa, Zea mays
  Coding DNA Sequence Number=SeqID_24693
MKIDQKYKIKLRVRKKIPNLSSSSGAPTGLSEMNQQEAPTGVGEFLRDFGVSVVLWRLLQEVGYTEAPKYQWSRTVLRGQPWYEVVVHIPERARKPSWPYWMFHAEGMTPWEGAQAQLMESIPIGQDSVESASTRVLMVVLELQLTRGHSRQKWQQLYTGSYAAFKMMEMAKNSACTQAQERLEETKVQAEHVIGLEHQVTELQMQHQVDQNRIKELEHQLTNAHSKLKILSQQQEEICLYAVAVREDLKETMSFISHQDQAIKELNRAHPMEFQVAQRLVNHLQQAVHRLNAAFYPTPASVD

SEQ ID NO: 68069 - protein, 79 aa, Zea mays
  Coding DNA Sequence Number=SeqID_24694
MQWLFGATSYGNIVDGILLYNFAAELEHEEEVEVTEEKTSPPSDSQAENCFYFDICGSEPDSPTNEGKPRCMQPLSLRY

SEQ ID NO: 68070 - protein, 212 aa, Zea mays
  Coding DNA Sequence Number=SeqID_24695
  Subcellular localization annotation: CTP_CleavageSite=24; ConfidenceScore=5.33e-01
MGMVKVKAQSTQGTRSRLARAQPRAKENSAACPAPTAVPFDRVRLTAAKSSLGRHGKLCLARPRARTQPRPRKTDSASPDPRARTQPRPRKTVSASPDPGLGLSLDPGRRTPPRPTPGLGLSLDPGRRTPPRPTPGPRLDLDLGGASASPDLGLGPATSQGKAIITLPLDSSGCGGQDRRPIWLAPDNTKVVGFPFAVSPPFVLHLAPTHLG

SEQ ID NO: 68071 - protein, 197 aa, Zea mays
  Coding DNA Sequence Number=SeqID_24696
  Subcellular localization annotation: CTP_CleavageSite=24; ConfidenceScore=5.52e-01
MGTVKVKAQSTQGTRSRLARAQPRAKAADPGGFTSRPRAPSSDGHTFGSPEAQSSRRSNLGQIATPTDRIAGAFNATKSSLGRHGKLRLARPRARTQPRPRKTDSASPDPRARTQPRPRKTVSASPDPGLGLSLDPGRRTPPRPTPGLGLSLDIGRRTPPRPTLGPRLDLDLGGASASPDLGLGPAMSQGRPSLPYP

SEQ ID NO: 68072 - protein, 207 aa, Zea mays
  Coding DNA Sequence Number=SeqID_24697
  Homolog annotation: Hit_ID=Q6J9V9; Match level="QueryCoverage=42%, HitCoverage=32%, E-value=3e-08, Identity=44%"; Hit description =Putative uncharacterized protein
MVEKGHGSRGETTVTRSAITKQKRWRRSGQGTEKGDTAKGILLREGSGPRAPLLIRGSKAGPSEGFDSRLRALGLRALLLIRGSKAGPSEGFDSRLRALGLHTHHWSEVRRLAPRMGSTAASGHSGSAPTTDQGFVGWPPKGLTAALEHAERGMTLGSGAAPANPALAKPLTASTYQLENLEPDHAPGLRPVRMREQPDRPKHHETR

SEQ ID NO: 68073 - protein, 478 aa, Zea mays
  Coding DNA Sequence Number=SeqID_24698
MQWLFGATSYGNIVDGILLYNFAAELEREEEVEVTEEKTSAPSDSQAENCFYFDICGSEPDSPTNEGKPRLDDRGPFNWSHASSWHTLESLFLSRVRKRQIFVAFAPRWYQMKKYKSEDAGGRGPPYRTFCFKTIGRSFCLPCLCNCFRISISPMFCNVCKTGEMFLMNQQEAPTGVGEFLRDFGVPVVLWRLLQEVGYTEAPKYQWSRTVLRGQPWYEVVVHIPERARKPSWPYWMFHAEGMTPWEGAQVAALEVLTTICYQKWEEIQATSMRLFPAVALSDPFVYHHQAQLMESIPIGQDSVESASARVLMVVLELQLTRGHSRQKWQQLYTGSYAAFKMMEMAKNSACTQAQERLEETKVQAEHVIGLEHQVTELQMQHQVDQNRIKELEHQLTNAHSKLKILSQQQEEICLYAVAVREDLKETRSFISHQDQAIKELNRAHPMEFHVAQRLVNHLQQAVHRLNAAFYPTPASVD

SEQ ID NO: 68074 - protein, 73 aa, Zea mays
  Coding DNA Sequence Number=SeqID_24699
MKSDYLFEINSGKGGSSKGVTLGHTLSYVFLHPSPPVPGFEVKDLSCFPFWYTQTIFEPKGSLFICLDVTPGF

SEQ ID NO: 68075 - protein, 93 aa, Zea mays
  Coding DNA Sequence Number=SeqID_24700
MENHPGKQCYHKCGDEDITSIHTMNGPITRSRARQLNLKVQGTSKDLGKAKVLRRSSKGVHNRKEIKSESAATPSRVPGPVCTKMDVQDASGL

SEQ ID NO: 68076 - protein, 81 aa, Zea mays
  Coding DNA Sequence Number=SeqID_24701
MGQKGLILSKALKAKKDAKDESTRITFGNLRSEVIELQHQVEEKEEILSTLARELIENRIEFTKSSKEKDDKILKLEDEKT

SEQ ID NO: 68077 - protein, 42 aa, Zea mays
  Coding DNA Sequence Number=SeqID_24702
MAVRRGIPALELDSHERLVGKDAQPLQSVKLVWMRESDYNPV

SEQ ID NO: 68078 - protein, 204 aa, Zea mays
  Coding DNA Sequence Number=SeqID_24703
MGRSPWVTKRDPIGHVAEDRGGGLRQEEVDISDPPVETEGDNTAEWAGVHRVVTPALPLSLSLHRGTALSAPPSPRPPWTSVRALAHVRRIPWPRHPPTPPTPFEHRPHPHSLPRPISHSLALSRALPTPLDLAGDSRPPSRSSSSPEATPGHPELRPEVRHPFPCSIFPIHAYISGDTGTAVARTHPNSGDLTAAKRSDAGRS

SEQ ID NO: 68079 - protein, 219 aa, Zea mays
  Coding DNA Sequence Number=SeqID_24704
MPPAPPLGIPAAEGDPDGDRNDDAGGSSSHGTELSEEPEPEGWIARPITHDATHGCHFHDALDTLLRRAFDRHTWSIEYCCVVYSQRRGLYLDQWEATCLVRCPDDDLWADGLDLKYYPRRSTGGAGGVIVSPVGEGNPRMNSMVNLAAVLNTELDHALDELGKVQVEVAELRAECAARHYLDGGSPAPIGIQHPYRSPPRGRFDYGTPDYRTRIDLDP

SEQ ID NO: 68080 - protein, 47 aa, Zea mays
  Coding DNA Sequence Number=SeqID_24705
MANSTVGITPVRGHQSARNMECLEDGGDAVKSRVDDSGLRLHGKTLR

SEQ ID NO: 68081 - protein, 142 aa, Zea mays
  Coding DNA Sequence Number=SeqID_24706
MQSDQAVPEAEVPVMPEEIPLAETNEAKNEDDIALIDQKVIPLKPLSESEEEEERIALVMSSFFGIDEGESEEKDIAGTILAAEGVTLPTVDATIPRGLKVDSAATIVTPLAIVVVEEKIGSSKPAIAEDKGVKPKNLYEGK

SEQ ID NO: 68082 - protein, 983 aa, Zea mays
  Coding DNA Sequence Number=SeqID_24707
  Pfam annotation: Domain name=HR1; Domain location=574-644; Score=3.1; E_value=0.1; Accession=PF02185.7; Description=Hr1 repeat
  Pfam annotation: Domain name=Transposase_28; Domain location=26-179; Score=-59.2; E_value=0.032; Accession=PF04195.3; Description =Putative gypsy type transposon
  Pfam module annotation: Pfam domain module=HR1::Transposase_28; Domain location=574-644::26-179
MPTSSSSAAATPPADASSEETLSTVAAEELRAGDTVDFGASRMSSVRVQDMQRLGYFGGGVARVLGAEEVPEPEGELVVFEAFFAAGLRLPAHRFMGEVLCRFNVQPSVEVFAKYYCLHWQKRMIGNKIAQFESYTFMPKTGKTSMEVVELVPCARNKWGNWHEFWFYVAEGAVEDHPGLPVAEMCSHCYSAYPQFEVAEEDADEGALRCAAGLSSGRDLVEEFVAYGVWPLAHGWALGEVCPRQMPSRGGMLVRSPAFALDLHSRDPVVLVREAEDGAVRIVGRYVPKTEGQRSWDIRGSNDRMNRVFELNRLSYGGYPGQDDVDRRRKKPAGIDEDMRGPRGKDVFARAPRVFGADAEVMDKDRQGAAQKRQAVVRLPEARPKRSRGTTKAAAPGGSQPMLAAKSAAPGSSRVPEAVKMAAAGGTKSVPAGAAKARELPPPGKRVTDFATDISVDDYLVGSGEGQLVVVPPAVATAAAAMVPRAKGSALSAGGEMPALTAVRDEAGAVSRRLKEALSQAADFADRAASGALTTIVSTEVERLRAQHADAVREKSAADSKCRKLADKVAALEGERDDLRRQLAEERKEANEALAKAQSAQAEANLARAEGSLARQRAEELEERFNALQTRVERAEASTCSEAERTRKQLMDSYHELGARTANFEVPDREPGLRCLKWLQEELLALPAIVEGFMSYASLVTCEGAMNALSREGCRHYEVFDQADEDFERDIYKVEDPVMKESAGALFDRMWGPHGREVVRERSETTRGQAARNEKVEDFEALNSAQPDSESNPVAAVSEVAPAPPPETVEGAPDAPAATAAGGGSSPTVAPRAEDPVKKPVEPAAEDPATAGSSQVQDFGPAHATATANFLAASTVDDGNESDESASKFSDFGDSGTSVEWTEESSDEDLDYFAALDVGAAEASPCAVDAEVVPGPSAGRRRQRAVAKRRVSEADGGRLRVGRVGRQELLSLPAVASAGEGEL

SEQ ID NO: 68083 - protein, 155 aa, Zea mays
  Coding DNA Sequence Number=SeqID_24708
MPKLSPITLRHSDMSQDEGVNRPKDEMTNKPMIVCVMIVIDCEGHKSFENKSPTIIYVCISKDELFIAAGREVNGIDIICSYMNSIRRRGLRSDPNLSPETLERINKDLGQAEVSRRSSKGEQNRKEIKSDLDAIPSRVPGPICTKIDVQDACEL

SEQ ID NO: 68084 - protein, 81 aa, Zea mays
  Coding DNA Sequence Number=SeqID_24709
MAEVGHGRGKVRERMGELSEARECAEGRRASPFLSVTMKAYPCKRNQEHKPEHEEHNQSCVDYEMWSHKPMTTTLFDDRII

SEQ ID NO: 68085 - protein, 98 aa, Zea mays
  Coding DNA Sequence Number=SeqID_24710
MAEGRGELSDGVEKGLEQRMGELDWGARGSGAKADARKGDAAALATGEDAAGWRSEQGMDAVARAGGEGLGIRVERMVCSAAGRRGRLEDEPSYLGLI

SEQ ID NO: 68086 - protein, 38 aa, Zea mays
  Coding DNA Sequence Number=SeqID_24711
MGLPGCQVGAADLAFLPAAVGGVQALASAPESRLEGGE

SEQ ID NO: 68087 - protein, 95 aa, Zea mays
  Coding DNA Sequence Number=SeqID_24712
MGGPDPIWGVRIPFQGFAFENKSPTLAPTFGELNRPPLASCDLCHAAEENFFRARGCTVATGRQPGHAMRSSNSKEEGYKSNTPRGGVGPGDKGS

SEQ ID NO: 68088 - protein, 47 aa, Zea mays
  Coding DNA Sequence Number=SeqID_24713
MGISSVESLRRAEAIFDRPNDVNSTNARGSSVAVRGSFTFSSFQLKV

SEQ ID NO: 68089 - protein, 293 aa, Zea mays
  Coding DNA Sequence Number=SeqID_24714
  Gene Ontology: Mol. function=phospholipase A1 activity; Cellular component=nuclear speck; Biological process=lipid metabolic process
  Homolog annotation: Hit_ID=Q6BTJ4; Match level="QueryCoverage=82%, HitCoverage=31%, E-value=2e-14, Identity=32%"; Hit description =Similar to CA1621|CaIFF6 Candida albicans CaIFF6 unknown function
  Subcellular localization annotation: CTP_CleavageSite=28; ConfidenceScore=5.12e-01
MQSACNRAKWAHPFDSNAPSMEAQAHTSCNRRAGCYVRATAPPLRPLPCLLDCGTSTATRGNPAYDPTVPARRIGHGPETPHRPKGSDSGSAPEDDELRFARPQGSDSGSAPEDDELRFARPQGLDSGSAPEDDELRFARPQGSDSGSAPEDDELRIARPQGSDSGLAPEDDELRFARPQGSDSGLAPEDDELRFARPKGSDSGSAPEGDELRIARPQGSDSALASTDGLRLARPRGSDSTSASEDRLNLGGASTSPNPGLRPSTSQEAPSLPYPKLTQATGNKTGVPSSSPR

SEQ ID NO: 68090 - protein, 187 aa, Zea mays
  Coding DNA Sequence Number=SeqID_24715
MTAPPVVSRRPLEAATGNTSSMSGSGVDVRGNYASGGADVELLMTTLPLVSGCAPNAAAPPQFPTAPAAPSTDIPAAGLHRVPLTPGPWRRTRPHLGPRVTDRTRADVDVNAVDDDWTHYQHGRPAAARRKPGSLHPAICRPPAHARSSPSLAWAPPPVPSSRPLLPASSFHRPDPPYSGQQCRRRR

SEQ ID NO: 68091 - protein, 182 aa, Zea mays
  Coding DNA Sequence Number=SeqID_24716
  Homolog annotation: Hit_ID=Q6QP51; Match level="QueryCoverage=70%, HitCoverage=47%, E-value=2e-18, Identity=47%"; Hit description =Putative growth-regulating factor 1
MQVACNRTTGMQPFDFDASSMEAQAHTSWTEKGDISKGILLREGSGPRALLLIRGSKAGPSEGFDSLPRALELQAHYLSEAGPSEGFDSRPRARRARDDSGYVRYMAEARATLPSHFALPLTDLTGKQRRSPLSDCCATREGLGLTLSLGRWPPPRPTPGLGLNLDLARPQGTSPTTTLACT

SEQ ID NO: 68092 - protein, 360 aa, Zea mays
  Coding DNA Sequence Number=SeqID_24717
MHRAFPPSEPPDGERPRCLRLVVGGAQPHGGWHPSAIARLQGFSSGSSAAFPYQWSPRMVTTSSMVGRSKPGCGLCPALSFKDLHHPCYGGGRAELELYLPYGPTGHLFLQHSGERALTGLAEGARFDNAGPAGRKRRQLQHAWLAGSAGSGAASGATSHRWGGAWLFAHRTGGCCAVRTRGPSKTSHAARAAFVSLDCLVLTPARRLRTEVAAVVGAEVVAAGEGFSADETVSATRGLTSGSLALIACTRPSSGDMGEGLVAAASALRSSLLLFSRPERRCCRCCCSGRRRANWSLSSRRPSDVENPRLLCDEPEPEAAMSAWTEAESAREEASSARGHVASLAEEAQQRRLELGQVVR

SEQ ID NO: 68093 - protein, 102 aa, Zea mays
  Coding DNA Sequence Number=SeqID_24718
  Homolog annotation: Hit_ID=Q8S472; Match level="QueryCoverage=71%, HitCoverage=7%, E-value=9e-09, Identity=49%"; Hit description =Putative gypsy-type retrotransposon RIRE2
MSGAPEDSNFELVTFENFRKRLRYNSPDYPVYTGHVRCSKEEWPPELTSLGNLLKLLRYNSPDCPATFTGNFEPAETVKSVPLNPSNDASKQIRIGSELDPK

SEQ ID NO: 68094 - protein, 157 aa, Zea mays
  Coding DNA Sequence Number=SeqID_24719
MGKNNKRKREPTPPSEDFGDSEYSEEEFSSESEGSPAPIPLRESSDDSDDSQGLTAEVWTYIRAVERSGLEGSDESEYSSDEEDSSEKDGGGDGEDEDDDDDDEGGGGGDGDGSGRGGSSGSKDGDGGSSKGGSGGDGSSRGSNRGGNGRGSNRASG

SEQ ID NO: 68095 - protein, 235 aa, Zea mays
  Coding DNA Sequence Number=SeqID_24720
  Gene Ontology: Mol. function=zinc ion binding; Cellular component =intracellular
  Homolog annotation: Hit_ID=A7QTF1; Match level="QueryCoverage=43%, HitCoverage=43%, E-value=2e-27, Identity=60%"; Hit description =Chromosome undetermined scaffold_167, whole genome shotgun sequence
MASSIGSPMRQESAIEVEKANLTWEEAIKRDLNLRQLVWDYKAMLMMMMFHYRQLKAILSLMHTLICSNCGLTEYDDEHSSPRDEERHEISLPIMKSSGANADSAKSADNTDDAVDADFPNCILKCKSVFKCKLCPRIMCLNVEMVKIHLKSKRHARSEKLLGEGRLKLMLNSDGELEEEQETHAERHARTIALSQQVQKQKKDSGRQRQNRRKKKRSRVNLEEAQNNKKQRKAK

SEQ ID NO: 68096 - protein, 215 aa, Zea mays
  Coding DNA Sequence Number=SeqID_24721
MGTATSRESCDLVSLVLSCPLSARGVVASKPSAQTEDTIDQSDNHKRRNFAGNTTILQFIAVLFIDQGTFGKVELTAVTSPPLLTVLTGKQCCSPRSGNCASYQGRADNSKSRPPPSSALGATGSSTLPDPRPRPQLRPREKVSASPDPDLSLDFGLERRSPPRPTLGLGLNLGLGRRSPPRPTLGLGLGGVAASPDLGLVSVTLLGIHHCPTLS

SEQ ID NO: 68097 - protein, 229 aa, Zea mays
  Coding DNA Sequence Number=SeqID_24722
  Gene Ontology: Mol. function=endonuclease activity
  Homolog annotation: Hit_ID=A2YIK4; Match level="QueryCoverage=55%, HitCoverage=65%, E-value=2e-48, Identity=58%"; Hit description =Putative uncharacterized protein
  Subcellular localization annotation: CTP_CleavageSite=55; ConfidenceScore=5.32e-01
MAAKAVASPLAFRRDVRGPLGRPAPGGCRSGTGTGTGLPGVLYWSGGAGGGSRLLAARARGRNRFGGGGGGRGASRDETAEEDEDEAADVVIVDAGDEEEYASDELSGFRGLVLDLSYRPVNVVCWKRAICLEFIGKAHVLEYYDQTVSSPSGSFYIPAVLRVTACARCNSRKGQKTLEQANMKLRKIPRAPKEYDIMAVPLTKSAFRTLKRNHGLPEVWLQYLARPSP

SEQ ID NO: 68098 - protein, 107 aa, Zea mays
  Coding DNA Sequence Number=SeqID_24723
  Subcellular localization annotation: CTP_CleavageSite=65; ConfidenceScore=5.25e-01
MEEQRRPPSSKIAPVSMKASSANATLQGMKNRSHFRRDMKTALQQDVCVLFYLVFSRGQAEEEVVAREERPLSSKAGVREAALPRLPIVSSQCPSLLFDQFHKQEAT

SEQ ID NO: 68099 - protein, 289 aa, Zea mays
  Coding DNA Sequence Number=SeqID_24724
  Subcellular localization annotation: CTP_CleavageSite=40; ConfidenceScore=5.17e-01
MDASQVARSQWPASWGFSLLHGVWDSRAPQQQGRKTSSPRLKAAQDLGPSEQPAGLALCLSLSPCRASGHPGSGFRHPSGVLIRWCRAASAEQSSKAEQRAAEQRGSGRPQNPGCRAAEQSSREQRGSENGPREGPCGCGRPGPNNPGPPSAASYSSPLHPACALSLLLCYNCGAAAAAALRQLPSPSSLFSPATSTHHNKVFPPLVFPPCEFRSAAAHGIDLPPLHAPALSQPSLHVLLLRPAVPHAPAPTSQPQPRPPPGSCAAAPAPVNHDRAPAPCNRGPAPARA

SEQ ID NO: 68100 - protein, 128 aa, Zea mays
  Coding DNA Sequence Number=SeqID_24725
  Subcellular localization annotation: CTP_CleavageSite=44; ConfidenceScore=5.34e-01
MATFASSPPPPVRRVAGQTRVFLFYHSGKPSSSSPSLGELSTVVAVTLRGEEYHVVAAVAGHELETPEAEHRPPLKRLLEATHLELNGKVFVNMQRAPTWRANCRCFGPAGTINRPVNLLLRVPAQMG

SEQ ID NO: 68101 - protein, 102 aa, Zea mays
  Coding DNA Sequence Number=SeqID_24726
  Gene Ontology: Mol. function=structural constituent of ribosome; Cellular component=ribonucleoprotein complex; Biological process =translation
  Homolog annotation: Hit_ID=O22453; Match level="QueryCoverage=53%, HitCoverage=20%, E-value=7e-22, Identity=90%"; Hit description =Ribsomal protein S4
  Pfam annotation: Domain name=Ribosomal_S4e; Domain location=8-75; Score=71.8; E_value=2.3e-18; Accession=PF00900.11; Description =Ribosomal family S4e
YKATVGAIAQNGYYVAYDGWGNREEFKLCKVMSVLFGQKGIPYLNTYDDRTIRYPNPLIKANDTIKIDLETNKIMDFIKLYLPFHGLHQVIYLVRLNVSTNS

SEQ ID NO: 68102 - protein, 342 aa, Zea mays
  Coding DNA Sequence Number=SeqID_24727
  Gene Ontology: Mol. function=oxidoreductase activity; Cellular component=membrane; Biological process=response to oxidative stress
  Homolog annotation: Hit_ID=Q5U1M7; Match level="QueryCoverage=93%, HitCoverage=90%, E-value=3e-84, Identity=56%"; Hit description=Class III peroxidase 66
  Pfam annotation: Domain name=peroxidase; Domain location=36-304; Score=268.7; E_value=1.2e-77; Accession=PF00141.14; Description =Peroxidase
MTNLNATVAAVLVMLAFLAGQSVAGRYYYDKVQDKVRKEVEKAMAKNPSVGPALVRLVFHDCWVYGCDGSVLLDSTPTDGTNTEKKAANNIGLAGFEVIDAIKQKVGTDASCADIVAFAARDAADILSGGKIFYTIPGGRKDGVVSSAAVADANLPHPDFNFDELKDNFNASSRGSSFTVEELVVLSGAHSIGVAHLSSYQDRLGPDSTPIDSDYQEALNKATPPGLLKTGQNPTVTNNVRDETDAFQKDAAYNPVAMGVNPKRGVLDNSYYHNNLVNKVLFKSDWVLRTDDFAASKLDEYKNNPAEWNSDFAAAMVKLSSLPAQGNKLEIRKNCRVPNPQY

SEQ ID NO: 68103 - protein, 365 aa, Zea mays
  Coding DNA Sequence Number=SeqID_24728
  Homolog annotation: Hit_ID=Q6QP51; Match level="QueryCoverage=76%, HitCoverage=93%, E-value=1e-30, Identity=49%"; Hit description =Putative growth-regulating factor 1
MQVACNFTTGMHPFDFDASIVEAQAHTSWTRKGIFRKGSFSRRKRAPSPPTDQGFEGWPLERVRQPPQSTRASGSLLIRGWPLEGFDSRPRTRRARDDSGYIRYMAEARATLPRYPRTFPRPAGSTAAPEHSGFRLITDQRFEGWPLGRVRQPPQSTRAPRPLLIRGSKAGPSKGSTAAPEHAERGMTLGTSDTWPRLGICSRGQGSVHSRDVNSPHSSPASGRNSRPRRIHASLRASSSNGHTLDSLEAQLGAKPPPRPRKVVSASPDPKARPQPRPRKAVSASPDPRAWTQPRPQEESRPYPTPASASGGVSASPDLGLGPTTPQGPLMKARRRQQGPDSPDSCASTGLKRSSDGHDIACTGL

SEQ ID NO: 68104 - protein, 188 aa, Zea mays
  Coding DNA Sequence Number=SeqID_24729
  Gene Ontology: Mol. function=carboxyl- or carbamoyltransferase activity; Cellular component=ornithine carbamoyltransferase complex; Biological process=amino acid metabolic process
  Homolog annotation: Hit_ID=Q8SA97; Match level="QueryCoverage=46%, HitCoverage=21%, E-value=1e-14, Identity=49%"; Hit description =Ornithine carbamoyltransferase
MALPVDVAGLRPRLGVVEAPPKPGSSLSSMAEAESEPLGRARRRSFGRGQGGVRALGSGEADPSPSPGSGGAEFAVFRDLARVRALGSGGAEFAVFRDLARVRALGRAERSSPSSGAYPESEPWVGRSGVRHLPGLSPSPSPGSGGAELPMAALSFYQTGQWSGEVTAVTSALPGGARQDKGVRPPLR

SEQ ID NO: 68105 - protein, 224 aa, Zea mays
  Coding DNA Sequence Number=SeqID_24730
MEYTATHTWLSGSASRQASPGARNEEETRYCTQIPRCSGPDSHNEQTPALKVPLQTELWFHSCGYEQPPHRRACGTTNSGWLAASHSISSDNDLRSGRLNNSSDDLRVDAAATRPSPASPLEGQGQAIKAKEPEVDPRVALTVSSAEKPSPAATTSAPMMAATCPPADPHSSHLGRASTDLRAEASCRSEGRTTQEHERRPSGVRRLGRSPGEHGATAARTVGR

SEQ ID NO: 68106 - protein, 135 aa, Zea mays
  Coding DNA Sequence Number=SeqID_24731
MDREVEVGHGDGELTCSSWGAGPARGEQGQEKLVHALDSRGKRPAGGGSQGRAPRERMNDRRAREQGRWLLAVRRARGGRAPSLENASGERAPWEADQRGGGRLLLAAFAEEGVVGSFCRGVRLGASREPRGRRA

SEQ ID NO: 68107 - protein, 126 aa, Zea mays
  Coding DNA Sequence Number=SeqID_24732
MGGGLLAIAPALRSVLLLFGPPEQKSSSSLLLEQYLDFFVGNRDVCASKSCFSRKVMSEDPLFEVVKKHERYSGKRDLFSRKISTQRGFPPFSPRGRVGLCRGEADPSLMTKLCVGARYMNNLKTS

SEQ ID NO: 68108 - protein, 179 aa, Zea mays
  Coding DNA Sequence Number=SeqID_24733
MRRKDGGYPPFGGLEGGKTRCIREGENMVAFRKGRSGRRFAFAVITAPKKAGLRRVHSRLRRRARDDQGYVRYITEARAALPSSPETPCSVPIEGNMALSPLLLAERRRRGVCKKAESVLDRPLALCGGSGAALANPAPAEPLTASTYQPENLGPDRAPGLRPVRMREQPDQPKHYARH

SEQ ID NO: 68109 - protein, 255 aa, Zea mays
  Coding DNA Sequence Number=SeqID_24734
MARVACTLRGKRLDGGVSMLSVGVNPDQVTECKIEEVGSTKVDSVIIHASCLKTILINFPPYGDMPRTRKIVRKSTGPISMPRHHLAPRHEGSSCGSNDPIGDLEAQVEQLRTELRHQNRVWAEDGQRINELAVDVTRLQDELAERDLAVDWAVNSRSVAWDREAKARARVTELSAALDNLQVYCNTLHEEVHVLYSRLHPDVPADPVAMGARPSGTTSEGTDGELDLFRPPPFMNLAVDRSPTAGNEETKDDED

SEQ ID NO: 68110 - protein, 200 aa, Zea mays
  Coding DNA Sequence Number=SeqID_24735
  Gene Ontology: Mol. function=sodium:hydrogen antiporter activity; Cellular component=integral to membrane; Biological process=sodium ion transport
  Homolog annotation: Hit_ID=A2Y0E4; Match level="QueryCoverage=40%, HitCoverage=15%, E-value=3e-31, Identity=82%"; Hit description =Putative uncharacterized protein
MQKKLEDPDMLEGSWVSSAMQIHASQINPNSNKDRGYDMHYQYRFKCYSLTGRVQDTFKISDCTIIETSLKPFKVELENNFLIFVVHHIWLELGNWCYFLGNIFCLHLTGVNQDETPLLYSLVFGEDVVNDATSIVLFNAIENLDIDNFDAIVLLNFVGKFLYLFFTSTIIGVVTGLLSAYIIKKLCFARSAHNSLALWG

SEQ ID NO: 68111 - protein, 181 aa, Zea mays
  Coding DNA Sequence Number=SeqID_24736
MWVPSNLWERIRRPSSNLKTHVLNLKFDGTHVLNVKFDGTHVLNLKNMGAVELTSLSSSKNRRRLYSSVNPRSYVSCSVSLPQMPSRTHAHDSAGTTRGREDTPNPPYVPPTLAEAIAALVNATTYNTRFLREMAGNQFQQHGRRAPPQGPRETSYLDFSEMRPHSLLKLKTLLKLMSGSG

SEQ ID NO: 68112 - protein, 103 aa, Zea mays
  Coding DNA Sequence Number=SeqID_24737
MGPASQRHRAGERVSTWHAALTCGTRAHAPVTVRGKREEGGSELVGWAIAVGVVFNPEPAHGRPCPTAGGLSLGRTTCGYHGGVTGRHDRDEWMKKGEERMGY

SEQ ID NO: 68113 - protein, 168 aa, Zea mays
  Coding DNA Sequence Number=SeqID_24738
  Subcellular localization annotation: CTP_CleavageSite=89; ConfidenceScore=5.40e-01
MEAGLLPRVVVLGPILSLGSSPRSFPCSLGAINVQTWSIPSPRAAFLPCRSFLKPSRKSNAFSRLVSSPSHTRGRECRVGEDPRRGTARAAEGLGTSHTMTGTYGVDMEAKQNREIEGAVCSEYCGMFTGWSTSSPTRIFHLDVVRNPGSGLGIARYLEERSTARNLE

SEQ ID NO: 68114 - protein, 137 aa, Zea mays
  Coding DNA Sequence Number=SeqID_24739
  Gene Ontology: Mol. function=carboxyl- or carbamoyltransferase activity; Cellular component=ornithine carbamoyltransferase complex; Biological process=amino acid metabolic process
  Homolog annotation: Hit_ID=Q8SA97; Match level="QueryCoverage=78%, HitCoverage=21%, E-value=1e-21, Identity=53%"; Hit description =Ornithine carbamoyltransferase
MALPADVAGLCPRLGVVEAPPKPGSSLSSVAEAESEPLGRARRRAESEPWGRVKWSSSSSGAELESEPWIGQSGVRRLPGLSPSPSPGSGGAEFAVFRDLARVRALGSGGAEFAVFRDLARVRALGWAERSSPSSGA

SEQ ID NO: 68115 - protein, 113 aa, Zea mays
  Coding DNA Sequence Number=SeqID_24740
MVNLDKEIGFHCITVSLYLVQIALGTNKVCLSARNHLKSSQENPKEFGTKRKKIGWSGQHQTIRCLYGRTHHSQAVLAKIHRMVRVERRTVRCEKSQWLPATSASGQMEHRTV

SEQ ID NO: 68116 - protein, 175 aa, Zea mays
  Coding DNA Sequence Number=SeqID_24741
MAYHRVDPSLFLPQSFVTGHIQHREIMRCNNPRPTLTPTAIKPTPVLTVHPRALLTLLEHEFTGLPRSSVKLSEPRIGHHLTGDAGSTSPDFNRSLSHVDRATWLEHTPPTSPTACARGQPYSGHHRRLSAPQRDRQDLPDLSRRWRTVPTGHRLNDLVKGNPRGPGANMFSLNP

SEQ ID NO: 68117 - protein, 148 aa, Zea mays
  Coding DNA Sequence Number=SeqID_24742
  Homolog annotation: Hit_ID=Q948G9; Match level="QueryCoverage=36%, HitCoverage=6%, E-value=1e-07, Identity=46%"; Hit description =Putative transposable element
MANLHYGRLAARKPTPYLKGDMSDLVWQHREKVVKGFKCYGPRQQRIDTSPWTNKGRNSKEILGKAWANACHVVGIPCRKVDNPYFRAAIMESQKQDIISLPQMKVWGSHYQLFERLIASILMKMLRSFIKRLINGREIKEVLKIIEP

SEQ ID NO: 68118 - protein, 62 aa, Zea mays
  Coding DNA Sequence Number=SeqID_24743
MTTFAKLSCKGDEGLERRVASSPSPQQAARASNQEVALETGTPNARVLIPAGDVELIPNDAL

SEQ ID NO: 68119 - protein, 192 aa, Zea mays
  Coding DNA Sequence Number=SeqID_24744
MKKRNINGSPSKLMKKMVTKRMKAVESPTSGRPDRGANHPEKAGRAVGPQQDAPCARSLAATREPAAADAGSGRPTCTTRAPGPARRTTPAAGRSGSPTADPVGSGNLNRVTRGEQQRGRATGSRALVQRQHACAALVCVCVCVCVCVCEANSTGEGGSGGSARDPGDLTAQIFLRRSTTPTRRAHRAGRQT

SEQ ID NO: 68120 - protein, 61 aa, Zea mays
  Coding DNA Sequence Number=SeqID_24745
MQCPKKAAQQQSVSNTRARQGAPQQASGDHGQAYNRGKVNHLEAEANQDAPDVDVVCSWTI

SEQ ID NO: 68121 - protein, 501 aa, Zea mays
  Coding DNA Sequence Number=SeqID_24746
MDKDRQAAARKRQATVRVHEARPKRQRGASKAEASGGGKPPLPAKAGASAPGKAPEATVGAGGPKLSKVVPSASGVAEAAKAARSLPPPGKRVADFGTEIDVEDYLGGLDEGSLALVVPGAAVATAAPAPKAGVETLGAGGEVTALALVRDEADAATRRLKGAMEALSQVADFTSRTASGALTATLSAEVERLRTQHADAVREKSASDSKCRKLAEKVAALEKEKADLRRQLMEERREANEAIAKEQSAQAEARLARAEGNVAKELAGELQRRLAAFESRAEGAEAAARAEAERTRTQLMTSYRELGVRTSDFEVPEREAGLRCLEWVQEELQELPTVLAGLMSFTSLVTCEAAMNVLSREGCRHFEAIDQVDEDFGRDIFEVEDPVVKESGGALFDRMWGSYGREAERGERVDDFGALNSAPPEPETTPAEAATGVAPVTAEDAPGALVPAAAGEGLLPRVVEGASDAPAAAVPGAEDPAETTAEAAAAAPAAAGPSQVA

SEQ ID NO: 68122 - protein, 62 aa, Zea mays
  Coding DNA Sequence Number=SeqID_24747
MTNNNARLKGLIVRGEVTRNQKPTFGSTLGQQVIASIRQVVLDHSSLPNNVPVIHCDMLRLT

SEQ ID NO: 68123 - protein, 75 aa, Zea mays
  Coding DNA Sequence Number=SeqID_24748
  Subcellular localization annotation: CTP_CleavageSite=51; ConfidenceScore=5.52e-01
MGRITRGPPFWTRSQDETISSQVFVRRRMRQRRVRRRPRAKGGVFAFAPTACTLRGKRLDGGVSVLLVGVNPVWS

SEQ ID NO: 68124 - protein, 650 aa, Zea mays
  Coding DNA Sequence Number=SeqID_24749
  Gene Ontology: Mol. function=triacylglycerol lipase activity; Cellular component=integral to membrane; Biological process=lipid metabolic process
  Homolog annotation: Hit_ID=Q8L570; Match level="QueryCoverage=100%, HitCoverage=99%, E-value=0.0, Identity=72%"; Hit description=Lipase class 3-like protein
  Pfam annotation: Domain name=Lipase3_N; Domain location=43-141; Score= 48.2; E_value=3e-11; Accession=PF03893.7; Description=Lipase 3 N -terminal region
  Pfam annotation: Domain name=Lipase_3; Domain location=194-335; Score= 123.9; E_value=4.6e-34; Accession=PF01764.16; Description=Lipase (class 3)
  Pfam module annotation: Pfam domain module=Lipase3_N::Lipase_3; Domain location=43-141::194-335
MATAVGAAMLLYFVLSRRLAGEDVSARGGGGGGVGSGKRRRGRALRRPVQPPATWIEAVGTLAETLRFTYSETLGKWPIGDLAFGIKYLMRRQILRLRELYLFNLQVVLVGNLHVASVYAGSDCIELKGPQIMEELIVLRRLIDLCFLFSKKPFPVFRELAGFSQEDVLIEEPKAGILKPAHTIIRDECTKSFLVLIRGTHSMKDTLTAATGAVVPFHLSLLDEGDVSKLVLGYAHCGMVAAARWIARGVTPCLREAVRQCPEYQIKIVGHSLGGGTAALLTYILREHKEFSSTTCVAFAPASCMTWELAESGKHFVTTVVNGADLVPTVSTASIDDLRSEVTASSWLNDLRDQIQQTRFLNVVYRSATALGTRLQSFSGARERVAGAGAFLRPVSNKTQVVMKQAQNVAQAVARSRSAFSSWSCMGARRRGVGVVTACSKDDMRVETHVTSTVESKSVLVEHCGAKTIEELQYTAASVSVHDAAEEEEALLSEHETSRENAEEETTEGELWYEFEKDLDRQAEMEARTREEEAAAAKEIMEEESAVLKGVDDRQSFTPDSLERQQFYPPGRIMHMVAMPPTDADPDDPVAADECCVGIYETPRDLYSKIRLSNTMINDHYMPMYKKMMETLIEKFARDEDCYCTGSTAE

SEQ ID NO: 68125 - protein, 57 aa, Zea mays; identical to SEQ ID NO: 66919
  Coding DNA Sequence Number=SeqID_24750

SEQ ID NO: 68126 - protein, 216 aa, Zea mays
  Coding DNA Sequence Number=SeqID_24751
MGNRKLFFSDISTVSLEIFILHASALPCDRLHVWCMDPSPSALSKYPGRYLLTALRSASFVSVSSHLRLLPSHLTGRARELLCSRSTPMLPPSSPAITFLAARAFSLRRTPLTLLQPRRRHLRPPTLIPTAPSSSPPQPHLLTLGLPLRERAELCLSYARLCRAPSAPASPASLCRRRVLVAEHRHQRSFLNFGSACSSPSRRSGSGVLGRLAPSR

SEQ ID NO: 68127 - protein, 68 aa, Zea mays
  Coding DNA Sequence Number=SeqID_24752
MAPCMGRRRVHGAMHRKTASACDAAWSSRHMRLPIPFSRHERAEGRWFCVRAARSKHVEPVTGMVHAT

SEQ ID NO: 68128 - protein, 143 aa, Zea mays
  Coding DNA Sequence Number=SeqID_24753
  Homolog annotation: Hit_ID=Q6QP51; Match level="QueryCoverage=36%, HitCoverage=30%, E-value=9e-07, Identity=49%"; Hit description =Putative growth-regulating factor 1
  Subcellular localization annotation: CTP_CleavageSite=71; ConfidenceScore=5.20e-01
MDPSSSHAWRHGPLPCMGSVHSRDSITPRPSPASGQGQPTPEDSRSDRSHFAAPLTGLTEGQCRLRRSDCCATRQSEADRQPGPASGTIGNSASPDPGLRLGLSPGRRRTPLRPTQGSDSGSAPEDGELRTARPRDRTRAQPR

SEQ ID NO: 68129 - protein, 37 aa, Zea mays
  Coding DNA Sequence Number=SeqID_24754
MLLLDQICINSPSIRQVSGLAELSYARGFNSPLPNRP

SEQ ID NO: 68130 - protein, 140 aa, Zea mays
  Coding DNA Sequence Number=SeqID_24755
MASAGNSGGGDDDDAGENSEKLLADRYHEAPKPCRQRTCAAASVPRWWSFPVARAVRLAGSSTSSSIASTMASYFGVYESNVCSRFRLQPPPSNLYSPMLYGKLDVGSMLRRRRSSREKRLKMCEQVSSDSYQKGKSYKG

SEQ ID NO: 68131 - protein, 108 aa, Zea mays
  Coding DNA Sequence Number=SeqID_24756
  Gene Ontology: Mol. function=kinase activity
  Homolog annotation: Hit_ID=Q6QP54; Match level="QueryCoverage=95%, HitCoverage=36%, E-value=1e-08, Identity=40%"; Hit description =Putative kinase
MSKDHGMHMCLFGELQVLWRKERIQPESAWGRVMMAPPVDVVGPCPRLGNVEAPPRSRSSLSSEAEVESEPLGRARRRPSAEARAESEPWGWAKRSSSSSGAEPESEP

SEQ ID NO: 68132 - protein, 192 aa, Zea mays
  Coding DNA Sequence Number=SeqID_24757
  Subcellular localization annotation: CTP_CleavageSite=46; ConfidenceScore=5.38e-01
MAGRPPFPTSSVATPYFIDSFPPLPLSYRAALTAPRSARAPAPILVAAVAPAPPPVAPQPDPAEPTSPPASAPTSSTSLSAPTLAAAALYPGFPSSALSLPDAALFRSQLLAPGFSHVPLEMPVGALVRDRPPPLTVYSQPSAITSSLCAPSDDAAALLVATRAVVTAARQRAHAVTACTFLLWVKCAHCHP

SEQ ID NO: 68133 - protein, 225 aa, Zea mays
  Coding DNA Sequence Number=SeqID_24758
MATRPRDATAEPARLRATARDGPAGAVGAGRGAHERDEPNCPSPWRRLIGVASPRWGTQPPRRPALPRAEGTRGVGYWGCCIWRAPHRARSPCGSCACGAIVRPSSSCARPCAMPRRTGLSREPNGWLNSRSRAATTVRLVPYCVLGVCLAQLFVARGRGPAGRGHRCVSWRRRSRQMARLVSVRARCSGVRVNRCTPLRWLPACHSATPVDNMVIKDVPGTPLR

SEQ ID NO: 68134 - protein, 82 aa, Zea mays
  Coding DNA Sequence Number=SeqID_24759
MAHRTVQCATGAPTVRHRCANGYFQRLVLTESRWTHGAPDSEQSTVRCTPDSPGRIPAVDQPGPPGRGCTGQSGAHRTVRCP

SEQ ID NO: 68135 - protein, 46 aa, Zea mays
  Coding DNA Sequence Number=SeqID_24760
MAMMGSTSEKMYLCQVRKQQTFVAFVPRWCQMKKSKNEAAGGPSPP

SEQ ID NO: 68136 - protein, 325 aa, Zea mays
  Coding DNA Sequence Number=SeqID_24761
  Subcellular localization annotation: CTP_CleavageSite=31; ConfidenceScore=5.30e-01
MARPSTKPAAPDTGMPPSVVLVAGQRPPSPLCAAEAAVAGVRVSMELSVDDYLTRLAPVGEFFKGLRFSLDHGVGAETGQLAVVPVAESAGLVAAATMVKGDMGAPEDPWFMFCASGKIASAATAKDMATSVAQQLKYGALTSEFSAEKRRLEGRIERLRTQHTEAVRDKSAAENKSRYLLEKLTAAKIEKEDLSRGLAEERKGTEKARMEAHAARAEAYLALKRVADAESRLKSLRSYAEKTEASTRVGLSGRTRCSWMRTASSTCGPPLLTGGAGVASVYRDGPHVLCFVVTCEGAMNALSREGCRHFEVFDRATKDFDRGIF

SEQ ID NO: 68137 - protein, 130 aa, Zea mays
  Coding DNA Sequence Number=SeqID_24762
MELGRFGFGRGRNIVSGTASVGVIAGWGASHGVGRARQGLQACVGSRGRERGLLPGARRAAGPEWRARAVHGWESQREEMSVERERPGGTRLQDTEEEGGVEDGGGCAGVGASAAAGNSRGALGFFFKKN

SEQ ID NO: 68138 - protein, 159 aa, Zea mays
  Coding DNA Sequence Number=SeqID_24763
MDERELGYQSPEQVLKDLLIGDSDFGDNDRLKKLYQMYDGSWDIASQRDIKSLRLEVLSSTLGTPNLVPHQRLGPCIGSWPLPTTGTWVLKMLSPASFLIVRCDQTDVLVAIENLHALMIEVTGPDGKGQDPSTARTKARTKVPKVQPSRANDVLVKTI

SEQ ID NO: 68139 - protein, 132 aa, Zea mays
  Coding DNA Sequence Number=SeqID_24764
MTRRGALLHGPLPAPRGTWPYDLRGVFVLACRSEGGQTVLLVDDVLGLSGGSCVAAFVRADACGSSLHPCGRKAGVVDAHSKLLVLLRDDDQVGQPHGVVDLLDKASMQQLMDLFTDDVLPLDGQLSRLLTH

SEQ ID NO: 68140 - protein, 77 aa, Zea mays
  Coding DNA Sequence Number=SeqID_24765
MKGLLLGACFVTEGPLRRITFERSAYNQTQREAFENKSPTPHIKACQPQLHAPKRTNVLVSAPLAYSQQMTMRLTWE

SEQ ID NO: 68141 - protein, 315 aa, Zea mays
  Coding DNA Sequence Number=SeqID_24766
MPSSEATLSNLAVVEFQPDHTVEFGTSWIFSGHMLEMQQLGYFSNGVTRALGAEEVSEPKGELIVFEAFFTAGLRLLTHQFVVEKRKIGDKIAKFGSCTFTLRTGKTSSEVVEIVPCARNKWGNWWDFWFYVASGDVEGLSSLPPAILSSHCYVAFPRFEVADEDKDKGALRYAARLSSGHDLVEEFIAYGVWPLAHGWPLGEVSHCRMPTLGGQMVRSPTFAVDLRDCDAATFVREVEAEAVKIVGKYVPKTETLRSWDIRGSNVRLNRVFELNHLSYGGYPGGLCLCCWLPRETSNVNSQRRPLTGQGSECSR

SEQ ID NO: 68142 - protein, 23 aa, Zea mays
  Coding DNA Sequence Number=SeqID_24767
MAAALAVSVPGAHGEQRVECKNN

SEQ ID NO: 68143 - protein, 135 aa, Zea mays
  Coding DNA Sequence Number=SeqID_24768
MAPKRANSQAAPSVDEAATAALLAEKKGKALADNTHQGASEDEAHSKRQRNDQHTPEGTLRTCSSEGQPQVPPPGFAPPEGEHAAEDGEVLGVSAEEQLQLWALCLRNCNLQKQKEILEAKRQRVSMQAKLRQMI

SEQ ID NO: 68144 - protein, 125 aa, Zea mays
  Coding DNA Sequence Number=SeqID_24769
MGALGMWHQTIRYAPDSLAMVGSNGRLTWLRHWTVRCVSDSLGISRIQRLTAIDPNGRLMWQAPDTVCVVVIMLVLVIARVGLALELGVASNEVIVAPTPKTPILVHMLSVLVVVVKPLEIFDDQ

SEQ ID NO: 68145 - protein, 175 aa, Zea mays
  Coding DNA Sequence Number=SeqID_24770
MPPAPPQGILAAGGDPDGDDNDDNAGGSSSHITELSEEQEPEGWITRPITRAAAHGCHFHDALDTLLCRAFDRHTWSIEYRCVVYQHHLGGVADGLNLKCYPHCLTDSAGGVIVPPVGEGNPRLNNTVNLVAVLNTELDHALDELGKVRVEVVELRIECAAHHYLDGGSPAPVGI

SEQ ID NO: 68146 - protein, 253 aa, Zea mays
  Coding DNA Sequence Number=SeqID_24771
MGWFGACVAGTNYAAPAGVALEASSGQLHQWRWPPLNQWIAGGSDHLCTSSDNDLGSVRLASDSGHLRAGEGVDVPDPHTAQPSPVRWMDIHAPARAAGGSVRGGAEAVQPKGPDTLQLMACSRLALCSQGLSPLQGCDSRHPAHDPSVAKVTGRSTVGTGMTIGMAIGAPAVIAPAGPQEQQADRQSGSGPTCRLASSPKSGPGATVSTLNQGYLLLLHKGAAPMQRLKTTWRMAPNGQVQERRVARKGSTS

SEQ ID NO: 68147 - protein, 562 aa, Zea mays
  Coding DNA Sequence Number=SeqID_24772
  Subcellular localization annotation: CTP_CleavageSite=30; ConfidenceScore=5.56e-01
MPTAKPAAPGSSKVSASAKTAASGGTKPPPGGSAKGRELPSPGRRVGDFGTDISVKDYFVGSGEEQLVVVPPSAATALPALVARGKGAAQDPWAAFCTSGEIPSAVAAKDVAGSMSRWLREASQELKHAADFADRVASESKNRRLAEKVAALEAEKTDLWRQLAEERREANQAIAKAQAAQAEAKVARAESSLAGQRAEELEVRFNTLRGRVGKAEASTRSEVERTHAQFVGTYRELGARTADFEVPDREAGLRFLEWMQEELLVLPTIVEGFMSFASLVTCEGAMNALSREGCRHYEVFDQSDENFECEIFKVDDPVVKQSGGHFSIGCGMERAEDVEDFGALASAPPEAAKVKPVLPSEEGGGPSAVPEPAVVEEDPASAPAPSVEGALEMVAEPAVEDPMAAVASSQVQGFGPVHATATDNTNFVASTGVAGDNSDDSVSKFFGSDDFGSSIVWIEGSSDEDSDYFAALDVAAVETSLRVMGEDILVRMLDVGVEGRWRSEGNAPGLHQIALLAYEYEVSFVEFPWDDCVVAPGLRLGLIFVEGLQGEDAVCIDEIFGG

SEQ ID NO: 68148 - protein, 266 aa, Zea mays
  Coding DNA Sequence Number=SeqID_24773
  Homolog annotation: Hit_ID=O48967; Match level="QueryCoverage=57%, HitCoverage=32%, E-value=2e-44, Identity=61%"; Hit description =Putative uncharacterized protein
MAIGGPAVIAPAGPQEQQADRQSGSGPTCRLASSLEAGPGATVSTLNQGYLLLLHKGAAPVQCLKTTWRMVPNGQVQERRVARKGCTCRCSSLGPDPAGRHRTPIYTSPGPQEVRIIEHHAETSEDFAMEQEVASSAPQVPDRPDTGTDVVHAVQQHMPAQASQTPSRAAPTALSVARELLRHPPSSAASPGAMKQWHDDVDRLLGMAHSTSTRSRPRSSRRQREATASVLSPFVRGAQTDNLREELNYRRTGEDARISLERAREC

SEQ ID NO: 68149 - protein, 78 aa, Zea mays
  Coding DNA Sequence Number=SeqID_24774
MVSLGLDQNQREEAQGIQRLAQSRSYMQGRSFGMIAEEETDLKRKRLFRPRWVIVEPLANVKDMGVILHGLRVVPINR

SEQ ID NO: 68150 - protein, 170 aa, Zea mays
  Coding DNA Sequence Number=SeqID_24775
  Subcellular localization annotation: CTP_CleavageSite=60; ConfidenceScore=5.45e-01
MAWPAACRRPRTDAWRSPSAAARCGQLGSPLAAARAPCLRRARLGLRAQFPRARGVLAARSAARSPAPGMPLLACAQHSPTPRAAWHARPLPRHGSQCAAWLLVATLHENDLVEEPEKLAGEAPEQQSVATRLMVLGIDSGNGCPHCNCCSGEDEAVEGDFQEFQDYDEF

SEQ ID NO: 68151 - protein, 364 aa, Zea mays
  Coding DNA Sequence Number=SeqID_24776
  Gene Ontology: Biological process=intracellular signaling cascade
  Homolog annotation: Hit_ID=Q2RAK5; Match level="QueryCoverage=16%, HitCoverage=11%, E-value=2e-22, Identity=76%"; Hit description =Expressed protein
MWTAGPSPRLVLAAAGSGGGGEVAAAANEEEEECDVFDREWVWAGAGGGYPLYHSSDCPFLDVGFRCAENGRPDASYTKWRWQPLRCHLPRFVSSLQFSPATFLSLSRARRQLSHRRRCPMSVAQVLGVPFSNSSSDPLPAMSTHQGFHGSVTCVSLKMYIKKARCSALGTIWWYFFIIQKTMTLKQLRLSPCNSSLVQMDLANQISFMEGAGHSVVSAFVEIVFDNSDNRILEQMVAEKERELEEGEAQKSPSKIVADSLSQISRSSTFLPNIGVPTMSKTGRSTSLAAQARMQAQFEEKLQAERDEATRKQEELQTQLQAQQAALEENQSLLRQTQEEVKGMHTKFEETNALLRAILKLQKD

SEQ ID NO: 68152 - protein, 123 aa, Zea mays
  Coding DNA Sequence Number=SeqID_24777
  Subcellular localization annotation: CTP_CleavageSite=34; ConfidenceScore=5.13e-01
MPRWRPRQPTALPCAATSAVAEQRSEAARRSSSSAAAAASHASWAVYGMDGSVHQWRCGGVVGASGGARLRGGRGLDLSAVVGSREDKTIICETICKILLRHGTKASFKLRKPHTSGHIPADR

SEQ ID NO: 68153 - protein, 87 aa, Zea mays
  Coding DNA Sequence Number=SeqID_24778
MDGKEKASKGRFKVSRKARGIDITKGFKRLRVIANRNTTRDGINTKLIRQQEVKRNQRRELRQDSESNEVEKIIKRKIGEVAIEWLK

SEQ ID NO: 68154 - protein, 293 aa, Zea mays
  Coding DNA Sequence Number=SeqID_24779
AAELFSWAELQLNSTSAVNLFDHTPAELASGQLSWVCQSDWQTGRQELSGAVQPPPLGGSTDVDPRAIDLAMRIAERMFLKMKEDEAKNIIEEEENDRWRPNDESTSSQGSSFKTTSHMCFVANESDSESESEDEEEHESDSEDEDDLQKFFAQLSKKNRMSLLKLMKRAEEQKEMLHKQEDILIEKIKDLEKLTKEHEKLKCSHDDLVQSWAELQLNSTSAVNLFDHTPAELASGQLSWVCQSDWQTGRQELSGAVQLVLVNFDQSAVSLRVSLPVRLANRLPGLPGEAQPP

SEQ ID NO: 68155 - protein, 153 aa, Zea mays
  Coding DNA Sequence Number=SeqID_24780
MSMAERVAPASGVYLPSSALQHHLKPHACVGALPHVVVGQAIVEHPCAVAWLPAVVPQLRPALRCHLPYAAAVRSRVAVLRPWPALCDRALAMAQPAWPPPRPASQLRWHDHGPYAPSLASPLRPARLSSPSEPPAMVDPPFSHYGCTMEEEN

SEQ ID NO: 68156 - protein, 115 aa, Zea mays
  Coding DNA Sequence Number=SeqID_24781
MRLENLLNKYEVVKNFAKDLPYTKSTRIDNMNQPTNLKRLTRTHKNTQYNPRFDNHHKGVLLLVEEPTKGQVFSNPNPPQADYKGQGNLFSNMLKERVIQTSWGRPQIWRLPSNL

SEQ ID NO: 68157 - protein, 87 aa, Zea mays
  Coding DNA Sequence Number=SeqID_24782
MELLSKSYPTKEKTLKGMLVIWESKVSRRVIKIKEGNAGIVLSSNSYHLMQQASEKDFKNIKEGGKCTGACLRSQEIRVLRKLVSYF

SEQ ID NO: 68158 - protein, 101 aa, Zea mays
  Coding DNA Sequence Number=SeqID_24783
MKGRSITHANAKSKSEKFPPLVLLVSPWMLQYPFPLYSFNAPGGLAANPLNKSIDTHLMKMLPTLILTYLEELEVAKRTCVRGKNNEKRGNYSKAIERKGE

SEQ ID NO: 68159 - protein, 152 aa, Zea mays
  Coding DNA Sequence Number=SeqID_24784
  Gene Ontology: Mol. function=oxidoreductase activity; Cellular component=endoplasmic reticulum; Biological process=electron transport
  Homolog annotation: Hit_ID=Q8LGM8; Match level="QueryCoverage=45%, HitCoverage=13%, E-value=2e-29, Identity=88%"; Hit description =Cytochrome P450 monooxygenase CYP72A5
MDGKIVNNDVRIINHVVQTYERHIWDQGSSWPGGVRTQVVWSRAAAGQRRQRQPSAHLGMMPVFSTCCIEMITRWDNSMPSEGSSEIHVWPEFQNLTGDVISRTAFGSNYQEGRRIFELKLQIEKALAALGPNSQAIEANTVQLTGHSIFLQ

SEQ ID NO: 68160 - protein, 92 aa, Zea mays
  Coding DNA Sequence Number=SeqID_24785
MEGHHAGWVKIWFTGIVPSAVGRGSSSCLMGDAHDLIRGCASLPTSHVTHLPRDRDFPYTLYRGGEAGTAIAAKSSRGPPYTDHSPTALAPF

SEQ ID NO: 68161 - protein, 187 aa, Zea mays
  Coding DNA Sequence Number=SeqID_24786
MPPTPPQGIPAAGGDPDGDRDDDDIGGNSSHDMECSEEPEPEGWFARPITRDATQAFLEHYSITDRDTVEAAMQDWVADGLDLKYYPRRSTDNAGGVIVSPVGEGNPRLNSMVNLGAVLNAELDHALDELGKVRAEVAESRAECTTHHYLDGGSPAPVRIQHPYRSLPHGRFDYGTPDCRTQIDLDP

SEQ ID NO: 68162 - protein, 63 aa, Zea mays
  Coding DNA Sequence Number=SeqID_24787
  Subcellular localization annotation: CTP_CleavageSite=13; ConfidenceScore=5.15e-01
MEQPATSVAPSARSALTGVLPVQSELCHRRPEASLRFRRCPDTPAFPLKVTNLPAPLFPCLLP

SEQ ID NO: 68163 - protein, 394 aa, Zea mays
  Coding DNA Sequence Number=SeqID_24788
  Homolog annotation: Hit_ID=A2YGC2; Match level="QueryCoverage=41%, HitCoverage=70%, E-value=1e-09, Identity=28%"; Hit description =Putative uncharacterized protein
MSENRHRGGRRAQQEQAAQQDETQAVQAIGQTLSAIQQQQQQPPPQPQMPQMPRDCLWLVLDTLHGSLSSPSYPLVSLSVRFTIPWPQKIESVRSCSPVLPLEAPPAPPLGAPAPGVAAGGYPDDGGGDSSSSHDTDLSADQEPEGWVARPITRDAARGCHFHDALDTLLCRALDRRTWSIEYRCVVYQHSRGVYPDRWEATCLVRRPENSLRGAEVCSEHYSISERDSAEVAMQDATRRALSHYCSVFSGVADGLNLKYYPHRSSGSTGGVIVSPVGEDNPRLSSTVNLAAVLNTELDHALDELSRARAEIAQLRAECAERRHLDDGSPAPVGTQHPYRSPRHGHQSYGNPDCAEEEGVLSGSKPLSRMSTAATATTSAQMPQMLRDSVLIHE

SEQ ID NO: 68164 - protein, 151 aa, Zea mays
  Coding DNA Sequence Number=SeqID_24789
MYFNASIDWTCTSRQERERWAHHADGKRKHPLSPPSEDFSDSEYSEELSSEYDRSLAQASPMASSEDSDDSMGGSLLSGGEDSFDSGEWSNSEGDGGEDDDNNGDDNGMGSSDDDGEGGDGEGDGEGEGDDKGDSGDGKGDGKAGGIMLLA

SEQ ID NO: 68165 - protein, 27 aa, Zea mays
  Coding DNA Sequence Number=SeqID_24790
MAPKRRKHSAAIPIIPPIDPNSQLPFA

SEQ ID NO: 68166 - protein, 136 aa, Zea mays
  Coding DNA Sequence Number=SeqID_24791
MDINPDSRVIVGSEIDDPPFRFSRQIADLRWITVGMKGDHRKRGGLARPTRPLPRLLVRKVGRWVPSPHATNAQQKINARVIRRDVGEVGAPTPAEFAAANHPPAEEGAPDITTPQIRESERSGHKKIETAKGSQR

SEQ ID NO: 68167 - protein, 135 aa, Zea mays
  Coding DNA Sequence Number=SeqID_24792
  Homolog annotation: Hit_ID=Q6QP51; Match level="QueryCoverage=65%, HitCoverage=31%, E-value=3e-15, Identity=52%"; Hit description =Putative growth-regulating factor 1
MPDDDGLDDLGLEASACQLDDFGYIGSPGLLIVTGSPSHPMVRAQQLGNSASPDLRPRPRKEVSASPDPSARPQPRPRKVVSASPDPRARPQPRPREESRPRPTSASASGGVSASPDLGLGLTAPQGIHHYPTPS

SEQ ID NO: 68168 - protein, 100 aa, Zea mays
  Coding DNA Sequence Number=SeqID_24793
MGKKRKREPTPPSEDVDDSQGLAAEVWTYIRAVERSGLEGSDESEYSSDEEDSSEEDDSDGGEDDDDDDDDDGDDDGGSRGGNGSSRGGSSGRGGNKANG

SEQ ID NO: 68169 - protein, 116 aa, Zea mays
  Coding DNA Sequence Number=SeqID_24794
MQLKKRIRYAYCMILMHIITPSRLPDHQVLCVPLDFANCYLNLVNTDHNSIEDILSLLYSCRPFDQHLGRPGSIKVNCAHSTYEAVQNGGTLRMGDNPPCTVVGMGTVQIKMFDGD

SEQ ID NO: 68170 - protein, 68 aa, Zea mays
  Coding DNA Sequence Number=SeqID_24795
MDYGWGAGESPIAAVAVDRGVPFGKTGEQMGPRIMEQVKVVRDMSRMGILARDLTRIRVKLVCLSISW

SEQ ID NO: 68171 - protein, 153 aa, Zea mays
  Coding DNA Sequence Number=SeqID_24796
MAQWLTRSTLAGGRVESGDRGLASPAKQTPIPRSGSFTEVCTVFSEGRMGLGRAWLAGLRWQGLGWPRTRRARANAGAGAGHGVTGLWRDEGHARSGVGVLWRAQNASNTWRCSSARVQTPAEIANVRILAKIRRRPLPGTYGYLLYVSSKGR

SEQ ID NO: 68172 - protein, 80 aa, Zea mays
  Coding DNA Sequence Number=SeqID_24797
MARTQSLQAVRLTDRVNVEMTACSTVAYAMYLDEQKITLLLRYRTKLREDSNNSQTPAVHSGAGGGTAEDPSSREYNPPQ

SEQ ID NO: 68173 - protein, 70 aa, Zea mays
  Coding DNA Sequence Number=SeqID_24798
MESALHFSSVYLESKVCVDLTSDLDLCWGRSSDKDFIGRRQLQMQQIWFKSVKIVKNVQETRNNLRRSPN

SEQ ID NO: 68174 - protein, 82 aa, Zea mays
  Coding DNA Sequence Number=SeqID_24799
MRKGSGCLLGETRVRGGQDQEKPLRGMQIQSGATGAGIRRDSEKEEQNSKCRKTLSQKRENNDPMLESLVAVTRKTPKFNEV

SEQ ID NO: 68175 - protein, 160 aa, Zea mays
  Coding DNA Sequence Number=SeqID_24800
MTATPNLRSTNLAFLVLHLPTLPFSHDCSIYQMLEGWEGVVHQLIVEGVNQSSQEAVLSLGIRVDILWGITQQLQKLVPVFADGQGSLLQGEKLLLSHYHQSLGHMVATELVPEFFPTDSFRVGMGGEVCIKNICSMVIGGGGGKCCCRAASSWGACCYG

SEQ ID NO: 68176 - protein, 255 aa, Zea mays
  Coding DNA Sequence Number=SeqID_24801
MPPASPQGIPAAGGDPDGDDDDAGGSSSHGTELSEETDGWIARPNTRDAARGCHFHDALDTLLCRAFDRHTWSIEYRCVVYQHRCGLYPDQWEATCLVRRLDDGLRGAKAFSEHYSITERDTTEAAMQDVARHALSQYCSLFSGVADGLDLKYYPRRSTGSAGGVIVLPVGEGNHRLNNMVNLVVVLNTELDHALDELGKVRAEVAELRAECAARHYLDGGSPAPIGIQHPYRSPPCGRFDYGTLDCRTRIDLDP

SEQ ID NO: 68177 - protein, 123 aa, Zea mays
  Coding DNA Sequence Number=SeqID_24802
MITQKGAIREIGYGDGCLTSGQRSGRLGADSGELDGHRRGYKKGAGRVGDVVAEKPGDVRECACADPRRRAERAELTGLAHDIGREDKGFRATAQRLAIQVRETEREGERAGEGKLAPTGRPH

SEQ ID NO: 68178 - protein, 36 aa, Zea mays
  Coding DNA Sequence Number=SeqID_24803
MAVMGSTSEKIYLCQGLVNVGLMIEDPLTGHMPHHG

SEQ ID NO: 68179 - protein, 154 aa, Zea mays
  Coding DNA Sequence Number=SeqID_24804
  Gene Ontology: Mol. function=catalytic activity
  Homolog annotation: Hit_ID=Q6Z8B8; Match level="QueryCoverage=100%, HitCoverage=44%, E-value=9e-38, Identity=53%"; Hit description =Putative uncharacterized protein P0470A03.13-2
MEDGVFCGVFDGHGRCGQLVSKLARDHLPFMILSQRNALLLGSDDDGDGDGDDPAFNDASPTAPSSTDGSRSRWSSPSLAPAPAQMLEGARVQARVDCNFSGTTAVCAIKQGEDLVVANLGDSRAVLATVSETGYLKVVQLTTDQKPNVPRESS

SEQ ID NO: 68180 - protein, 489 aa, Zea mays
  Coding DNA Sequence Number=SeqID_24805
  Gene Ontology: Mol. function=protein serine/threonine kinase activity; Cellular component=cytoplasm; Biological process=protein amino acid phosphorylation
  Homolog annotation: Hit_ID=A2X7C7; Match level="QueryCoverage=92%, HitCoverage=73%, E-value=0.0, Identity=73%"; Hit description =Putative uncharacterized protein
  Pfam annotation: Domain name=Pkinase; Domain location=9-311; Score =127.7; E_value=3.5e-35; Accession=PF00069.16; Description=Protein kinase domain
  Pfam annotation: Domain name=Pkinase_Tyr; Domain location=9-297; Score=-143.9; E_value=0.0013; Accession=PF07714.8; Description =Protein tyrosine kinase
  Pfam module annotation: Pfam domain module=Pkinase::Pkinase_Tyr; Domain location=9-311::9-297
MEHVFGGKFKLGKKIGSGSFGELYLGVNIQSGEEVAIKLESVKSRHPQLHYESKLYMLLQGGTGIPHLKWFGVDGEYNVMVIDLLGPSLEDVFNQCNRKFSLKTVLMLADQMITRVEYMHTRGFLHRDIKPDNFLVGLGRKANQTISYFWARSISYFWGSIQLMGEVLVYIIDYGLAKKYRDLQTHKHIPYRENKNLTGTARYASVNTHLGVEQSRRDDLESLGYVLMYFLRGSLPWQGLKAGTKKQKYDKISEKKMLTSIEALCKSYPSEFITYFHYCRSLRFEDKPDYSYLKKNFRDLFIREGYQLDYVFDWTVSRQAVDNNRLRLSGKTGGLVGPSVDRAERAAARQDVPDRFTGQAGAFARRTGSGSGQYGEHTKHRTLLDSLMASKMAVDSDKRKHSSSRNGSTSRKALLSSSRGSGDPSDPNRSSHLVPTTSSSSRPSTNQRLHQSTGLEGRTSSFPKPGRIGQDDPTMRSFERLTISAERRR

SEQ ID NO: 68181 - protein, 132 aa, Zea mays
  Coding DNA Sequence Number=SeqID_24806
  Homolog annotation: Hit_ID=A3B152; Match level="QueryCoverage=70%, HitCoverage=34%, E-value=4e-34, Identity=74%"; Hit description =Putative uncharacterized protein
MTVAYDPYRNDSLLEETLLDIIYKLKGGEDTPVYTNKGVNGAVRDETLLQLKVPTMFVQGSKDALCPLDKLLSTQKKMTCKNELHIIDGGDHSFKVGKKYLESKGLNQYDLEMEAVTKISQFFQDSFTESCT

SEQ ID NO: 68182 - protein, 389 aa, Zea mays
  Coding DNA Sequence Number=SeqID_24807
  Gene Ontology: Biological process=response to biotic stimulus
  Homolog annotation: Hit_ID=A7QN92; Match level="QueryCoverage=41%, HitCoverage=85%, E-value=2e-70, Identity=79%"; Hit description =Chromosome chr2 scaffold_132, whole genome shotgun sequence
MVGLVGGSTARAEHVVANAGGETEYVRRLHRHAPAEHQCTSTLVKHIKAPVHLVWELVRSFDQPQRYKPFVRNCVVRGDQLEVGSLRDVNVKTGLPATTSTERLEQLDDDLHILGVKFVGGDHRLQNYSSIITVHPESIDGRPGTLVIESFVVDVPDGNTKDETCYFVEAVIKCNLKSLAECGLAQPDPAQPSSARAPLAPPAPHVLETVIAGFGTPRRAPPRLPLSLSLFPSPPLSSSMHTTPVAPSRPPLRPRRAAPRPRARSPPVAPLAVPPGGSPPRACFPSGLCPPDIPRPAPRPYGSRPSLAAVRPLGGSPAPRRPGALRPRAPPAARPHARVPRIRPRAPTSAFRALGPRAPSCLASRQPCALVALSRAPAWPRVPPARAQL

SEQ ID NO: 68183 - protein, 275 aa, Zea mays
  Coding DNA Sequence Number=SeqID_24808
MVTSSLMVGESEPGCGLCPSLSLKDFHHQGWGGDCTVPGSRTRVASEPLAAPASATAAGRGSSADEIARAAHGPTSNSTAFCPSLPHEFGHGRGPLGSSIRPEVSAAAVRPPRAEVVVVAAAGAGDGVPFVGLLLLRRPSPIEWGCSYLRRWNRSSFCNGTSNASVFVHCGCRGLNMTDAGVDQPRPRVGLTSLEDGWPRPRGDRPSRLLGLGSRRRPWQRLPGRGDDVILQSGDPRTASPSEARSDLTEGVVDAEGVAAPFQRQDPSLQDPIVL

SEQ ID NO: 68184 - protein, 139 aa, Zea mays
  Coding DNA Sequence Number=SeqID_24809
MAERYQLPWSCVPPTMRRKDGGYPPSEGLEGGKTRCIREREDMGPGKGDTSKRILPREGTRLRASLLIRGSKAGPPEGFDSRLRSRGPYTHYWSEVRRPAPRKGSTAASGYSGSAPITDQGFEGWPPKGSQPPQTPSEG

SEQ ID NO: 68185 - protein, 194 aa, Zea mays
  Coding DNA Sequence Number=SeqID_24810
MAAYRRAEASGLLDVGQISDEQEQGGQASGRTVSKRRLGFCGAQKENLTHAAPPLFIHRTRRFGKPAVQQYHVRQRSHQKPPRNHFERGQRLHHLATSSAPDDLVELVPRRANVGAKAKNLPFAPAFVNLAAPIEAKRPAGSTLRPLYYKTEAYDDVAPPHVLTRPGGPRGIRPIVTGPARRSVLRARFVMAFL

SEQ ID NO: 68186 - protein, 759 aa, Zea mays
  Coding DNA Sequence Number=SeqID_24811
  Gene Ontology: Mol. function=transferase activity, transferring glycosyl groups; Cellular component=integral to membrane; Biological process=metabolic process
  Homolog annotation: Hit_ID=Q6I5X0; Match level="QueryCoverage=54%, HitCoverage=93%, E-value=1e-131, Identity=56%"; Hit description =Putative uncharacterized protein OJ1076_H08.4
  Pfam annotation: Domain name=UDPGT; Domain location=107-536; Score= -71.8; E_value=5.5e-07; Accession=PF00201.9; Description=UDP -glucoronosyl and UDP-glucosyl transferase
MATKVKKQTSILRTLSHPDLMANSGRIKVDDRRALEVSKKYTTAQALHFKLPPSPGHHRWRTGGGAHKPFLPCSSSPLSLHRSFRQPAHLTCARAMGPACKTAARPRVLLLCSPCMGHLIPFAELARRLVADHGLSTTLLFASATSPPSEQYLAVAAAVPDAVDLIALPAPPPDALPPATAARERAELAVASNVPRVREIARELGAAAPLVALVVDMVGAAAARDVAAELGVPFYAFFTSPWMTLSLLLRLPEIDAARAGEHRDAAEPIRLPGCVPIHAHELPTSMLADRSSSAYAGFLSMAKGVAGVDGVLVNTFRELEPAVGGDGRLQLPVYPVGPLVWTRPAGVDTDHECMSWLDGQPRGSVAYVSFGSGGTITWQQTAELALGLELSQWFMERTRGMGLVAQSWAPQTAILGHPSIGCFVTHCGWNSVLESVINGVPMVAWPLYAEQNMNAAMMEVQVGVALRAKVGADRFIRKDEVANAIRRAIVGEEAERLRKRSSELRRQSAQALSKDGCSTRPLSSLDWLLSPPPAASLSTSRDLVSCSRHLGCSPSPCHRQGSSRFRPCCKYCRMMLQGASHRGPSPLRGGLGAGVIVASLTTTKSTHARTPSVASVVAAPVIGSGIIAFGLPLPVHRVNCSVQCDHPQQTSTCAKDTSANATAFVLGEKPTRISGTKIHRETNLSTNEAVAGTFEADSRQMMSTEQTIEVPSDTFTLLQAITSVEDVVLVEDASYDEEATLVMQTTFDGPIFITTIDYG

SEQ ID NO: 68187 - protein, 103 aa, Zea mays
  Coding DNA Sequence Number=SeqID_24812
MAIALLIQPLKGTVRGDMQQLGYFGSGVGRVLGAEEVPEPEGELVVFEAFFTTGLRLPAHRFVAEVKGKCALGPFLCILVIECQHMCLIGNLCTWMNKVKIMK

SEQ ID NO: 68188 - protein, 639 aa, Zea mays
  Coding DNA Sequence Number=SeqID_24813
  Gene Ontology: Mol. function=protein binding; Cellular component =nucleus; Biological process=regulation of transcription
  Homolog annotation: Hit_ID=A2XIA8; Match level="QueryCoverage=79%, HitCoverage=83%, E-value=1e-161, Identity=63%"; Hit description =Putative uncharacterized protein
  Pfam annotation: Domain name=GRAS; Domain location=183-530; Score =259.3; E_value=8.4e-75; Accession=PF03514.5; Description=GRAS family transcription factor
  Subcellular localization annotation: CTP_CleavageSite=39; ConfidenceScore=5.23e-01
MVVFILHQHHQQHHQQAAAAAASSSPDQHHHHQSPYSSRSTSRSNDTSTGSRSSPSSYHTHNHHYHSSHPHSHYSSASYYYDPAGSGSGSAGYYYYDHHQPPPPPPYQEECGNDHGFYMDEDFSSSSSSRSRHFQSSSRAPPSSSPTPPHAQPQPPPASTSSGAGAGALFEAADFSFPQVDIDLDFSSPASSSGAAASSSGGGGAGRWAAQLLLECARAVAARDSQRVQQLMWMLNELASPYGDVDQKLASYFLQGLFARLTTSGPRTLRTLAAASDRNTSFDSTRRTALRFQELSPWASFGHVAANGAILESFLDAAAAAAASSSSSSQHPPRLHILDLSNTFCTQWPTLLEALATRSSDDTPHLSITTVVPTAGVPSSAAAQRVMREIAQRLEKFARLMGVPFSFRAVHHAGDLAGLDLDGLGLGLREGGAATALAINCVNALRGVAPGGARRRDAFVASLRRLEPRVVTVVEEDADLVAASEPSSSSAGEADAEAAFMKVFTEGLRFFSAYMDSLEESFPKASNERLALERAAGRAIVDLVACPASESVERRETGASWARRMRSAGFSPVAFSDDVADDMRSLLRRYREGWTLREPGADDGAAAGVFLAWKEQPVRRACIASLDRVSGGNDAHGDQ

SEQ ID NO: 68189 - protein, 94 aa, Zea mays
  Coding DNA Sequence Number=SeqID_24814
MSSQHESDYDWRTAPIDPQVVYETGGNPHGRFAARSSRHRLESGDGSEGRFVETPPATMPMQQQDDGFDFVNALFASGGSEHHSSQFPDVDWQQ

SEQ ID NO: 68190 - protein, 271 aa, Zea mays
  Coding DNA Sequence Number=SeqID_24815
MQPGCTPPPAVTQDGDHQLLDGEKQAGPRSPPLPQLQGCLPSLRGRRVKRAGALPPHGLAGHLLFQFLVVETILQLCGGGVLQPCRGRCALERPAFAGADVVAAGGSFPTVEAVSGPYGPASGSLALMAEVAGESPGTCRPAGSPESLGSVGLALRGFSCLVKGTPRPLFDESKPRVAVSARTEAELARKEDLVGRSLAGSSVSGTDAGVDLPRPRAGLMSLGDSWPRPRGDQSSCLLEPDSWRRPRRRWLEETQSRPSEWRSSDRVAVRG

SEQ ID NO: 68191 - protein, 59 aa, Zea mays
  Coding DNA Sequence Number=SeqID_24816
MARTLRWSPPLGRPLGAEVVASAGEPLGAEVAANAGEASEQRWPPLLANHRCRGGRRRW

SEQ ID NO: 68192 - protein, 159 aa, Zea mays
  Coding DNA Sequence Number=SeqID_24817
MSARHSQRRTWSTSSHGVAYIERLNDALVEHGGTPVQQRCKTPPGTERISSLLLGRTGNEQALRVIGCTLARRVKWLVGDGDVRVGLHDFSSGLARWLMPWATSSGSPPEREVEGKARTHGSGVLLWGFGLTEMWCLSLPCGALWPASPSGVRRRPQRG

SEQ ID NO: 68193 - protein, 84 aa, Zea mays
  Coding DNA Sequence Number=SeqID_24818
  Homolog annotation: Hit_ID=Q8SA85; Match level="QueryCoverage=44%, HitCoverage=2%, E-value=2e-08, Identity=83%"; Hit description=Prpol
MNSNIILFTLNDNHSLASLPSSKLKHLRTNDQHWRPPPVNSLPLIVTMASYNDQAETPSVMKLVLPITGGSSSEPANKKQKKEA

SEQ ID NO: 68194 - protein, 76 aa, Zea mays
  Coding DNA Sequence Number=SeqID_24819
  Subcellular localization annotation: CTP_CleavageSite=37; ConfidenceScore=5.16e-01
MALGGIGTNSSIKAKGVTSVESTIGTKATAYHPTPFVASQPVDSTTSPLVGSLFCCYGASGARKALAYVAKIREQC

SEQ ID NO: 68195 - protein, 273 aa, Zea mays
  Coding DNA Sequence Number=SeqID_24820
  Gene Ontology: Mol. function=protein binding
  Homolog annotation: Hit_ID=A2YSE3; Match level="QueryCoverage=48%, HitCoverage=26%, E-value=4e-10, Identity=35%"; Hit description =Putative uncharacterized protein
  Pfam annotation: Domain name=MATH; Domain location=55-175; Score= -4.6; E_value=0.1; Accession=PF00917.17; Description=MATH domain
  Subcellular localization annotation: CTP_CleavageSite=38; ConfidenceScore=5.51e-01
MAASSAAVLSAAARRISRSTAGSGGALLSGTRRISSCSASSIIVTREVTGHHNLTISVSPVEWIASSQAFHAAGYSWRIKYDLNGNSWNESNQCISIIVELTHDKGRQEVEDPIQFKLSLLDRAGNPSPKYICCNDVSFFVDGQARFQDFIRWKDLEESGCLKDDSFIIRCDITVIKKWVIRRSRRRAPRGDRWHRSQGVQGAAPLHDVLAAAHRYKLERLKLLCLEVLCRRIDMDTVAGTMAVEEQHSCGALVATCAEFLVRVPSSKSAQFI

SEQ ID NO: 68196 - protein, 69 aa, Zea mays
  Coding DNA Sequence Number=SeqID_24821
MAMRLKLQKEGTTSSVDATEYRSLIESLRKLINVDFVGTEHQLGDILTKALGHTQFQELRGRIGMEKLV

SEQ ID NO: 68197 - protein, 181 aa, Zea mays
  Coding DNA Sequence Number=SeqID_24822
MDDATGSDEAVGDDGASSRRVGPGRGQGREPARRGGARRLSRLEKERAGALLAIALGEVAGKGMGHGAEIVGACVVGRGWRWETDLTSVPSGSRTQARSGLHQRVGAGPRPWGRAQSEGRGGPRDDAGWAVRRGEARWASAAGGLRGAGRGGESARGGGGWGARWATLLLAHELGREGGAR

SEQ ID NO: 68198 - protein, 114 aa, Zea mays
  Coding DNA Sequence Number=SeqID_24823
MLVTYLKGKCALGPFLSILVIECQHKGLNVNQCPWMNTVQIFNKALVATCVRVVALIFESCVRCSFPPYSVFLCELNCKGERLQVVEIPRKREKIKGKKNTVVFKLIIGSLERS

SEQ ID NO: 68199 - protein, 44 aa, Zea mays
  Coding DNA Sequence Number=SeqID_24824
MGLPEGRQWGLGRSARSAKVGCRGKEEGVEVDLQEFQDFDEFKD

SEQ ID NO: 68200 - protein, 283 aa, Zea mays
  Coding DNA Sequence Number=SeqID_24825
MTRVVVFNLNSSSDTCLAVLRLLVISPIWVMWAKDLKTCQMFDDKPEPEFINIFTSIESRLMLPHFSSPSRFLFFSKPFVISSLAFVLGSHGRLHFPASFPWSTSRRAELLLYGSLPLAAPSLHLLSRFSLALLPLLYRALRRSGSFPWRSLGPALLQPRLLWLICAHRTQFSTHAPPSSSTPAKVSPATAPLGVPTAPRLTHAPTLLFTGFAQRHLLAMDVVVLQSRGRVPLYPNIGSVPGLVFVDLFTPLPWSTNLADVALWLSPLGLTDDFPRPKPCPRA

SEQ ID NO: 68201 - protein, 143 aa, Zea mays
  Coding DNA Sequence Number=SeqID_24826
MRSSSSSGAEPESEPWGRAKRSSSSSGAEPESEPWGRAKRSFLWRLRADLAAVNLTLSSGTAVGAAQGGAVLLSGQIRCQATFALNAPAIQSVGVATWPRLLLGEDWASGEPKVMVAGVTWPSILPPGWTAEWDPTSAGEEHE

SEQ ID NO: 68202 - protein, 86 aa, Zea mays
  Coding DNA Sequence Number=SeqID_24827
MENRKSTIGETDSRTGIAQIDDARPNLVSTTQRWASRLQHQHEVLAAEHDRGRGAADEEGSMSLVRPASNGAGHIFSGSDARGQQK

SEQ ID NO: 68203 - protein, 219 aa, Zea mays
  Coding DNA Sequence Number=SeqID_24828
  Gene Ontology: Mol. function=carboxyl- or carbamoyltransferase activity; Cellular component=ornithine carbamoyltransferase complex; Biological process=amino acid metabolic process
  Homolog annotation: Hit_ID=Q8SA97; Match level="QueryCoverage=48%, HitCoverage=21%, E-value=2e-20, Identity=56%"; Hit description =Ornithine carbamoyltransferase
MAPPVDVAGLRPRLGDVEAPPKPRLSLSSVAEVESGAPVSGEAETRWLRPGRSPSFGVGRSGPESEPWVGRSGVRRLPGLSPSPSPRSGGAEFAVFRDLARVRALGRAKRSFLWCLRPGLTACQPHSVKWHHSRSGAGGAVLLLDRSVERRSDGGHFGSAGWGARVRIKLYADGGYQLRIRSLEGSLEDMVAGVTWPSILPPGWTVEWDPASAEEEHEE

SEQ ID NO: 68204 - protein, 152 aa, Zea mays
  Coding DNA Sequence Number=SeqID_24829
  Subcellular localization annotation: CTP_CleavageSite=42; ConfidenceScore=5.32e-01
MQSACNRAKWAHPFDSNAPSMEAQAHTSCNRLLRASNCTAPRATTAPPRLRNQYRDSRQPCLVTPISTKLQRPDGCDYVKDQSTQGTRSRLTRAQPRARAADPGGFTSCPRTPSSNGHTFGSPEAQSSPRSNLGQVATPTDHIAGAFNAKVA

SEQ ID NO: 68205 - protein, 269 aa, Zea mays
  Coding DNA Sequence Number=SeqID_24830
MGRRETEREGGKKTEGDRRKRGNPAAFVFVPRPGRGNDGASYDVVGPSPGLGEVEAPPRSRSSLSSKAEVESEPLGRARRRPSAEARAESEPWGRAKRSSSSSGAEPESEPWGRAMRSSLSSGAEPESEPWGRAMRSSSSSGAEPESEPWGRAKRSSSSSGAEPESEPWGRAMRSSSSSGAEPESEPWGRAKRSSSSSGAEPESEPWGRAKRSFLWRLRPDLAAVSLTLSSGTTVGAAQAALSSCQAGQWSGEVTTVTSALSTEGRTSG

SEQ ID NO: 68206 - protein, 108 aa, Zea mays
  Coding DNA Sequence Number=SeqID_24831
MCHLIEQYHREYAGVHAADEPDLLRTWSDRFRPTPSTSRTSTSPLGPPGPNPTLHRTSLAADCNLADGEYILVLEQGVAQEVVQEPAPEPAIEDLPAPALEGKPRFYA

SEQ ID NO: 68207 - protein, 323 aa, Zea mays
  Coding DNA Sequence Number=SeqID_24832
  Subcellular localization annotation: CTP_CleavageSite=68; ConfidenceScore=5.27e-01
MSSRSLMHRVFPPSKPLDGGYPPCFCLVVGGTQLRGSRYLSAIVRLQGFSSCSPAAPLHRRSPKTVTSSLMVGESEPGSGLCPSLSLKDFHHQGWGGDCRVPGSRTRVASEPLSASSSATAAGRGSPARGATRAAHRPTSNSTAFCPSLPHEFGHGRGPPGSSIRPEVIAAAVRPSGAEVVVVAATGAGDGAPFVGLRLLRRPPHRVGLFVPAEHEDSPVGCLNRFTKRESPRAKVTSEESLGSVGLVARGFSCSVKGTPRPPFDEPRPGVAVSARTEAELARKEDLVGRSLAGSSVSGTDAGVDQPRPWVGLASSEDSWPRP

SEQ ID NO: 68208 - protein, 129 aa, Zea mays
  Coding DNA Sequence Number=SeqID_24833
MEAQAHASYNWRAECFVHATAPPLAPPLRLLDCGTDTTTRGDPEHDPAGPGKGDTPKRILPREGTRLRASLLIRGSKAGPSEGFDSRLRSCGPYTHYWSEVRRPAPRKGSTAASGYSGSAPTTDQGFEG

SEQ ID NO: 68209 - protein, 101 aa, Zea mays
  Coding DNA Sequence Number=SeqID_24834
MRLHTLRGMKVLLTQGSVIEPIVVVRGNEMTHQVMEEAKKAEAAELERRKTELSPPPKPYDPEADPTLKGILDEFRVVNVAIDEAGNTLLNEAAEKVLKED

SEQ ID NO: 68210 - protein, 93 aa, Zea mays
  Coding DNA Sequence Number=SeqID_24835
  Homolog annotation: Hit_ID=Q7XBD4; Match level="QueryCoverage=63%, HitCoverage=6%, E-value=1e-08, Identity=44%"; Hit description =Cinful1 polyprotein
MPLLEKVVCDHAKVVIQPNFAVSADDVKEPSTEAIVLGGKFYSEVWLSGEREIADKAIRQSVNEVLFEVDIVSEDDVVLYPQRCLLLIKGSGK

SEQ ID NO: 68211 - protein, 64 aa, Zea mays
  Coding DNA Sequence Number=SeqID_24836
MYYIEREAELPTLPAAEASKAKSAEITEVGAAPPKVKENKTTMLSETPVAVMELKAEEFLKKQE

SEQ ID NO: 68212 - protein, 199 aa, Zea mays
  Coding DNA Sequence Number=SeqID_24837
MAHRTVRCTPDSPVPLPRHHCRWILTVGASDFWALLDVRCTPDMYCLMSGAPVALGATHAQAMKELLMSIPKRFKTSSSLKIKLVTSPNSEEKRNVDTSKVGVMCSQWIQQCFYVFLQTRSSQFHKQPQQDVTVGRAKRDIRPPKKLIEECNIAFDLSCANDVDCSTEPPLIMKQWFPMIVRNGCLLCKRRCSHLRKMW

SEQ ID NO: 68213 - protein, 262 aa, Zea mays
  Coding DNA Sequence Number=SeqID_24838
  Gene Ontology: Mol. function=quinolinate synthetase A activity; Cellular component=chloroplast; Biological process=NAD biosynthetic process
  Homolog annotation: Hit_ID=A3CGJ6; Match level="QueryCoverage=51%, HitCoverage=17%, E-value=1e-46, Identity=72%"; Hit description =Putative uncharacterized protein
  Pfam annotation: Domain name=SufE; Domain location=79-207; Score =45.5; E_value=1.9e-10; Accession=PF02657.6; Description=Fe-S metabolism associated domain
  Subcellular localization annotation: CTP_CleavageSite=45; ConfidenceScore=5.62e-01
MDAAAAASLLPRAAASSLLPRRVLSPLHVSRSGLLPRQSSFLAARCAHSRAPPPHPPLPRADCDDAAAKAHPRLRLRLLAEEFRALPSDADRARRLLSLAAALPRLPEPDRAQGNRVMGCVARVWLVARCNASTGWRMWFSADSDSDLSRGYCACLVAALDGAKPEDVLAVDPADPDLAPLGAGTTAAWSRASTWHNVLVGMQKRARTAIAAREGRHPGKPFPSLVIARDGAVSAQGSYAEAQGTLGNLCGVSTTVNVENED

SEQ ID NO: 68214 - protein, 95 aa, Zea mays
  Coding DNA Sequence Number=SeqID_24839
  Homolog annotation: Hit_ID=A3A3G7; Match level="QueryCoverage=77%, HitCoverage=14%, E-value=3e-08, Identity=40%"; Hit description =Putative uncharacterized protein
MGVALTAQIATAQHLLLSRPPIAHEDPPVAHEAPHASKLDANIIAALQAQVVGVHNTRSLVSIVLDLASSHYPRWRTQVILTLRRYALADYVLDP

SEQ ID NO: 68215 - protein, 154 aa, Zea mays
  Coding DNA Sequence Number=SeqID_24840
MQYKGSSSLISCEKHTIRIEFYPCKAGELVGGEESSLSRAKLTNQTGQRASPGIKEGGRPKSGEGDLRLPVKFCRVRGLGKLHGPLAELTEALTQLGGDWSGLATMAEALAAMAGGKELAGAKEGWLASDEIWIPEIWSVSLLKPEANLGFCRV

SEQ ID NO: 68216 - protein, 129 aa, Zea mays
  Coding DNA Sequence Number=SeqID_24841
MDGATRILLRAKFVVGVGRTEWPLDVTGMLVPLPTVIEEMEGGRRWVSIPAEDVMCVEAPESTIQSPCSSMFCRAAMRPAASQVLVEVLEPLEEVWSGAKAVLACGEGPSIPRLRPAWAPGPPGAPELL

SEQ ID NO: 68217 - protein, 317 aa, Zea mays
  Coding DNA Sequence Number=SeqID_24842
  Gene Ontology: Mol. function=quinolinate synthetase A activity; Cellular component=chloroplast; Biological process=NAD biosynthetic process
  Homolog annotation: Hit_ID=Q2QTL0; Match level="QueryCoverage=71%, HitCoverage=47%, E-value=1e-109, Identity=85%"; Hit description =Expressed protein
  Pfam annotation: Domain name=NadA; Domain location=98-313; Score= -163.3; E_value=0.00024; Accession=PF02445.7; Description=Quinolinate synthetase A protein
  Subcellular localization annotation: CTP_CleavageSite=29; ConfidenceScore=5.11e-01
MSPRVVTFCRPLTHQPNIPKSPTLRAPTSVEHQRETSRRPRRGFPHGGERSKDDTLNRVGVAPASVTTVRPQAGMAFARGPPTTRPNAMFLSPDESKVSGLVNTLKEKKIGIVAHFYMDPEVQGILTAAKKQWPHIQISDSLIMADSAVKMAEAGCDYITVLGVDFMSENVRAVLDQAGFNKVVVYRMSSEPIGCSLADAASSCEYTHFLREASRCYPSLHVIYINTSLETKAHAHELVPTITCTSSNVVPTILQAFSQIPNVNVWYGPDSYMGANIADLFQRMATMSDEEIAKIHPDHNRKSLSSLLPRLHYYQVV

SEQ ID NO: 68218 - protein, 158 aa, Zea mays
  Coding DNA Sequence Number=SeqID_24843
MGTCGVGCQDGVTKVTCGVYGDGDAGCQDDTAKLAAEAMGSDRNPTVAAPTGVAHGDGDAVNEDDVMKFGVAPGDGHVGIQDVVTKLAGDVAHRDRDVGCQDGVTKVACGAAHGDGDVGCQDGVTKVTCGVHGDGDADCQDDTAKLAAEAMGSDRNPS

SEQ ID NO: 68219 - protein, 497 aa, Zea mays
  Coding DNA Sequence Number=SeqID_24844
MNEKHWHSKCHYKRNSGSASAGWVLLQSCPRPRRRSRGEDKYKEPEARSADGGGGPIGDGDFSSRLHLGTDDRSRSRQIPTQILPDEWGTDLRAEAPYRRLPAGGAAGSQADKLDTLGLTTPAVDQPRVVEVRPALRASERPHPRTPRERVTHEPAREVELRLSSASTPARMMNILEAEGGTKIVARLTSPHPGADQRAKGWAAMQVACNRAKWARFSDSQHAQPGGPGPRVMQLARRLLRACNCTATCATTAPPRLWNQYRDSRRPSARPSSASLARRRSGRRFAFAIMTAPVKAPSLPTDQRFEGWPPEGFNSRLRSRGPNTHYWLEVRRSAPPKGSTAASGYSGSVPITDQGGSDLVTQSHQREASSPRTPSPRDRVQQITHSSPETPCSAPIEGNMALSPLLLAERRRRGSEADRQSGPAGGIIGSSLRPTQGSNSGSAPEDGELRSARPRARTQAKTRKTANSAPPDPGLGLGIRPGRRRTPLRPTQGSDSG

SEQ ID NO: 68220 - protein, 189 aa, Zea mays
  Coding DNA Sequence Number=SeqID_24845
  Gene Ontology: Mol. function=kinase activity; Cellular component =ornithine carbamoyltransferase complex; Biological process=amino acid metabolic process
  Homolog annotation: Hit_ID=Q6QP54; Match level="QueryCoverage=52%, HitCoverage=35%, E-value=1e-36, Identity=77%"; Hit description =Putative kinase
MKLVGVSPLLPRSAASYVLRTPAYLQSTEFPYGVTKKCVGVDLGTNTSGSALYCSVDGRSARAWEGGVRQQHLDLAPRRDPVREERTYEHAGRHHCLSGGASQMGRRSGSLWPESARGRVMMAPPVDVAGLRPRLGDAEAPPKPRSSLSSVAKAESEPLGRARRRSSTEARAESEPWGRAKRSSSSSGT

SEQ ID NO: 68221 - protein, 35 aa, Zea mays
  Coding DNA Sequence Number=SeqID_24846
MAQLLTILFDAVVVWILTRSSCGRQPDRSTQYLMQ

SEQ ID NO: 68222 - protein, 366 aa, Zea mays
  Coding DNA Sequence Number=SeqID_24847
MAIAPVINREREQVMVMRWKGLDTRRKARRRWFTGELICSSRKAAECGGFSRVPMGVFGISRAKVARAESSIASQRAEELEARYNALRSHMDKVEASTCSEVERTQAQFVDTYHELCARTANFEVPGQEAGLRFLEWLQEELLVLPTIVTGFMSFASLVTCEGAMNALSREGCRHYEVFDQADENFEREIFKAEDPVVKQSAGALFDRMWGPHGWEAVRERSDRAIEQMAHAEDVENLGGLDGVSPEAAEINPVLPSDAGEGSSAVPVPTVAGEDSASAPAPTGEDATRVVVEPAVEDPTAAAGPSQSDDSGSSIAWTEESSDEDLDYFAALDVAAAEASPRAEGSEELPGASTGYKRRRVVAKRR

SEQ ID NO: 68223 - protein, 46 aa, Zea mays
  Coding DNA Sequence Number=SeqID_24848
MAMMGSTSEKMYLCQVRKQQIFVASALRWCQKKNTRNEVREERILH

SEQ ID NO: 68224 - protein, 198 aa, Zea mays
  Coding DNA Sequence Number=SeqID_24849
MNKDRQDVAQKRRAVVRIADPMCEAKRAWGSTKAAASGSSKPVPAAKLAAPGHNKASARSGEGQLVVVPPSVATTAPTAVVGAKGAARDPWAAFCGSGEILSAAAARDVAGSISQRLRETSQQLKQAANFTDRVALGVLTADVAAEVESLRAQHADAVREKSAAESKNRRLAEKVAAMEAEKTDLRRQLEANQAITEA

SEQ ID NO: 68225 - protein, 338 aa, Zea mays
  Coding DNA Sequence Number=SeqID_24850
  Pfam annotation: Domain name=IQ; Domain location=209-229; Score=25.0; E_value=0.00028; Accession=PF00612.18; Description=IQ calmodulin -binding motif
  Pfam annotation: Domain name=IQ; Domain location=251-271; Score=18.5; E_value=0.025; Accession=PF00612.18; Description=IQ calmodulin -binding motif
  Pfam module annotation: Pfam domain module=IQ::IQ; Domain location =209-229::251-271
  Subcellular localization annotation: CTP_CleavageSite=50; ConfidenceScore=5.46e-01
MRKGQRLVPGMTTAGVTFSSSSPRQVQLGDSLGVNASGGHLRVSGFPHLRQTLAQSQLPLAQCGFGKILKWGNQGLNVLWGGPHSMAWATISSRRIGDKIRERTIRRAATLEPSLRQRGITSPEKTAIPMDRRSMTPGIRARLSSPPPAAHPSPPPAAEPSAAATPSHPPSPTPDAFTRLEESFGRLEEKWDQFVVMFHRYKEKTEKELQAAVRLQAAARGFLARRQVQSLRGEKHLAVASRATPWPSSHEQAVVRLQAAVRGFLVRRAVWKLHLLISSSLHQLAACAPNHQVSSILFEPPAEVEIWLEDELVLKGGGDVMGIIGSERQQPGWDKARE

SEQ ID NO: 68226 - protein, 89 aa, Zea mays
  Coding DNA Sequence Number=SeqID_24851
MGRGRSGRGLPRHAGGKHESGVSSDEADSSESSEEWSGSNVDDKGDGNSGNDDGSYDSKGDGGKGDSDGSVGTSQERFTRLADITNHRR

SEQ ID NO: 68227 - protein, 170 aa, Zea mays
  Coding DNA Sequence Number=SeqID_24852
MKTTTNLSNSGMNTEFIKYVKWAGAFVNPKDITRLFDDWPVERPQNYPTKCWQAAIASANVGGTGGGFGVDSLPREFFNGQVELGYSSLSFLLLVPCKRTRLNNPVKCQISVRELISQMADISSQLIYAVAIYDPDSCPAAEFCLEPTYFSFKIPYRIIASASTIIMPWG

SEQ ID NO: 68228 - protein, 246 aa, Zea mays
  Coding DNA Sequence Number=SeqID_24853
MEETHLHVFDASCPRQSTLARAPAGPAPRPSQASAMAHARAYKTLPDFDCTLPRTLKPHRSLARRRLPVRSVSAAAQSLCHRRPARRAIPNPIQPSEKTVHTSVKLPEQGIGVCFAGEASPRSPELSTPPEYVDRVIRSTILRFLVHTVATLPREAHRALGLNQFAVVWPVHSPPTRTPACAHGPGDSGHPRRQAIPRRDRQSLPEPTPPFAGPPSPPEVAPDPAPEPALEDLPATALEGKPRFYA

SEQ ID NO: 68229 - protein, 606 aa, Zea mays
  Coding DNA Sequence Number=SeqID_24854
MGTCAAPGGRMSSPELRESSPRMLEVTGGRWPKNLSIPWAEGEDMSTSRIARGLKIFPYGRNIAAVVSAVMNKDRQDVAQKRRAVISLPDPRREAKRARGSTKAVAPGGSQPTLAAKPAAPGSSKVPESTKAVVAGGTKSTPGEAPKVRELPSPGKRVADFDTNISVDDYFVGWRFLRKAVRFSRPAAVKDEAGAMSRQLRGGVAAAVAAAKSNVSAEVERLRAQHADAVREKSAAESKSRRLAEKVAALEAEKMDLRRQLAEAKLARVEGSLASQRAEEWKVRFNALRGCVEKAEASTRSEVERTRAQLMDSYRELGARTADFEVPDREAGLRFLEWLQEELLVLPTIVEGFMSFASLVTCEGAMNALSREGCRHYEVFDQADESFGREIFKAEDPVVKQSAGALFYRMWGAHGREAVRERSDRAREQMERAEDVEDFGSLAGAPPEAAEGKLVLPSDAGEGPSDAPVPAATGEDPVLAAVPTAEGAEEGSGPAHATATESANFVAAATVVAENDSDDFVSKFFESDGSGSSVVWTEESSDEDLYYFAALDVAEAEASPRLMDTEVIPGPSAGREGELRSLFEGEELRIMLFNYREMGIVPKVEA

SEQ ID NO: 68230 - protein, 149 aa, Zea mays
  Coding DNA Sequence Number=SeqID_24855
MGKSKKGGSSSHHSGDKRKREPTPPSEDFGDSEYSEEGVILRVRGLTDDSQGITAEVWTYIRAVERTGLEGSDESEYSLDEENSSDSSKERGGGDGGDGDGDGDGGDGDGGGDGGKGGDGSGKGGSDDDSDGSKGSSRGSNKGSSKASG

SEQ ID NO: 68231 - protein, 268 aa, Zea mays
  Coding DNA Sequence Number=SeqID_24856
MLLGELYGHLAILIVYNYMTRRIGTFLYVLVHSFRNIMFPKCQFELFLGDLMSRRLDGENEFLRLDKERWTGFEELQIGGVLWSLRGTPSSVLLKLISRHFTQKARVVGGSVDQDSDSLDPSRRCTTGILLIPVGQGRRRVGSFLLRSHKRSNFASPSLPNRRPCSTVALPDRRPCSSAALPDRRPCPSAAVEAAPAPARAAAYPSGALAEHRCRLSAAALPEAAPPERRRRRPSASTSSRAPRTPSVVVPSPPSSTVRSCPDAPVSH

SEQ ID NO: 68232 - protein, 62 aa, Zea mays
  Coding DNA Sequence Number=SeqID_24857
MVSHSGYGGYKCGHCTTAVGVSEALYAKAVSPGLLTGNRWGRLMYLLVLVDGVTWPSSLPPG

SEQ ID NO: 68233 - protein, 174 aa, Zea mays
  Coding DNA Sequence Number=SeqID_24858
  Homolog annotation: Hit_ID=Q9ASF7; Match level="QueryCoverage=39%, HitCoverage=18%, E-value=1e-14, Identity=57%"; Hit description=SF16 protein-like
MPLHSLSRPSAQRGRTGTRPPPSSAWGAAVWLPRPPEEVPTTGEHGATARVSLKYPDPPTLADEDERRTPRRPDPRPTSTPPVEKLLAPLARTSVAVAVVHAQPRDFRIIRQEWTVVRIQFAFLAFLTLVCDRRVRKKLAVTQKCMNALLRVQERGRDCCFPDLRGRLPLAGHP

SEQ ID NO: 68234 - protein, 247 aa, Zea mays
  Coding DNA Sequence Number=SeqID_24859
  Subcellular localization annotation: CTP_CleavageSite=57; ConfidenceScore=5.41e-01
MCVDSTRIRKGITARKPLRPCPPVFGAPHHVRRDLRPTPTSRSSSLIPIATSQRRARANPQSACHRFPSPSPPNPIVSNRQSARHLHHRIPGRHGVRARGAPLGGVGIVEGEQLGRPAIRCTTDDVYFADRLQPSIRPPPPPPNPRQAWSASQRSSVGRRRHRGEGAAGAPRHPLHHRRRLLRGSSPTVDPPATSTTESQAGMECEPEELRWAASASTACPPTTPPSCSSLPTTPSPCSSSLASSSP

SEQ ID NO: 68235 - protein, 105 aa, Zea mays
  Coding DNA Sequence Number=SeqID_24860
MERSRADGGTTQARAEGELGLELCGINGEETPAHSGGRAGEGALFGRSDGGVEGEKVSCCHAGRGAPRGKKIGSTDVEGGGAQSTGAEVRPWEELGGHGSLELSS

SEQ ID NO: 68236 - protein, 73 aa, Zea mays
  Coding DNA Sequence Number=SeqID_24861
  Subcellular localization annotation: CTP_CleavageSite=49; ConfidenceScore=5.09e-01
MKPWKETSRSSKTMTSSRRGLAATPSRLPVKAAFIYVSFPHFDLFVVLGAEEKWRWGLPRDLQTHLKSLLEAL

SEQ ID NO: 68237 - protein, 116 aa, Zea mays
  Coding DNA Sequence Number=SeqID_24862
MSYVDGPYQEVESGRPPSPTPQPEMPPTPPQGIPTAGRDPDRDRDDDDVGGSSSHDTELSEEPELEGWIALAEVQGKAASQTPPPAEARGKSPVAPVPGVGAPAPHASDDAVSPGG

SEQ ID NO: 68238 - protein, 62 aa, Zea mays
  Coding DNA Sequence Number=SeqID_24863
MALCLRPPRSGCERFEESLIKHGDQLIELFEFYEIETLSICLVKVAFGAIYDQILVDLVVSL

SEQ ID NO: 68239 - protein, 874 aa, Zea mays
  Coding DNA Sequence Number=SeqID_24864
  Pfam annotation: Domain name=MAP7; Domain location=361-537; Score= -82.5; E_value=0.079; Accession=PF05672.2; Description=MAP7 (E-MAP -115) family
MPSSSSSAAATPPADASSEETLSHVVVEELRAGDTVEFGVSRMSSIRMQDMQQLGYFGGGVAHVTGAEEVPEPEGELVVFEAFFAAGLRRPAHRFVGEVLRRFNVQATTSYGGQPSVEVFAKYYCLHWQKRMIENNGDKKRKLGTVKGGLGVSDSFAMELMGTCTAPGGRMSSPELRESSARMLKVIGGWWPKNVPIPRAAGEDFFTSRMVRDMRVFPYGRNIAAVVSAVMDKDRQEAEQKRRAVIRLPEARTKRVRGTAKSAAPGGSQSTLTAKSAAPGSSKVLEVVKAAGAGGTKSASAGSAKARELPSPARRVADFATDISVDDYLVGSGEGQLVVVPPAVATAVSVAVPVAKGSALSAGGEIPALTAVKDEAGTVSRRLKEASQRLSQESLARLRFLPVSLGLWSYHADVVREKSAADSKCRKLAEKVGTLEGERTELRRQLAEERREANQALAKAQSAQAEANLVRVEGSLTRQRAEEWEERFNALQARMERVEASTRSEVERTRKQLMDSYHELGARTADFAVPDRESGLRCLEWLQEELQALPTIVEGFMSFASLVTCERAMNVLSREGCRHYEVFDRSDEDFEREIYKVEDPLVKKSTGALFDRMWGPHGWEVVRERSDRARGQVARAETVEDFGSLNSARPEAETNPVAAEAEVVPAPPPETGEGSLAAPAAAASSGGSSPTAVPRAEDPPKTAMEPAAEDPTAAGPSQVQDFGLAHATATANFVAASTVDAGNELDESASKFSDFGDSGSSVEWTEESSDEDLDYFAALDVAAAEASSRAAGAEVVSGPSAGRRRRRAVVKRRVSEADGGQLRVGRAGKQELLSLPAVASVGEGELRSLFEGEELRIMLFNYREMGIIPKVEPM

SEQ ID NO: 68240 - protein, 112 aa, Zea mays
  Coding DNA Sequence Number=SeqID_24865
MVVVMGAGARKLVNDLSKQQKLQVDYPRILKLLQGLRGFPGNVLSRRSWPKPFDHDLNDNFIGHCGRLCSQTQEPSYIRLEVFFMVLRVLEQSLSSDQLRLEPLETCDQHVI

SEQ ID NO: 68241 - protein, 132 aa, Zea mays
  Coding DNA Sequence Number=SeqID_24866
MTRTCEQACYSRMHQLPEELGSRKKRWCLVEQREIRSGEGSADWGRAGTAESVGARRGRRGGRWLGRRVDQGHSAATRVPWLGGEAPLEKRREEQSGIGPAREIFGPRGLYLCLGKDWFPNDAIAITRMREQ

SEQ ID NO: 68242 - protein, 57 aa, Zea mays
  Coding DNA Sequence Number=SeqID_24867
MVKHLRTSDQHEPDDDWHEDIEATCDEMFEAYTKVEGTWRTTQENSGTTRVEWDSLG

SEQ ID NO: 68243 - protein, 76 aa, Zea mays
  Coding DNA Sequence Number=SeqID_24868
MAHFFSGFIDLLLKLLAYRREIVSWFVSSGYSAAPGAVVFFGGMTKVDALPKVVEVSTLEVGANVGHLFSNAIDQE

SEQ ID NO: 68244 - protein, 160 aa, Zea mays
  Coding DNA Sequence Number=SeqID_24869
MGKPGPSLLMLLLCQVTAVVPTITGMGDHISGRVRRAICGQVHSVTVEVNRAARLTGGEGGPVKGGVSSGKSLRSRRGTAHRRRWAKSVGPRAQTVGLVGGVCSSLLTAVGFNPKAQEASWGAKGSTRARNRRKTHRGARSTYAGDLVKSVDVDLVSPAR

SEQ ID NO: 68245 - protein, 207 aa, Zea mays
  Coding DNA Sequence Number=SeqID_24870
MTLEPHPLQPGWRSLDSESLGYRAEDTIEAIALHRLTTFCGFHPLELSTQPIGLFPTEKEGDPMWKDRVEHTKDVWALYPGQTAHLTVRWMNALYSLQAVRGEAMSQLMGLVEATKITLDNREDLVVDLSTELVEKDLQVEQMATQIQELEELVGARENTIEEIQDMEADEDVDIEGGVEPEPASSLDTAGSGRLPSPESSVASFAH

SEQ ID NO: 68246 - protein, 80 aa, Zea mays
  Coding DNA Sequence Number=SeqID_24871
MSRPEHTPPMSPIVCARGPTDSGHLRRRVVPRRDRKDFPELTPPFTGPPLPPEVAQEPAPEPAIEDLPAPALEGKPRFYA

SEQ ID NO: 68247 - protein, 283 aa, Zea mays
  Coding DNA Sequence Number=SeqID_24872
  Subcellular localization annotation: CTP_CleavageSite=69; ConfidenceScore=5.14e-01
MEASEIREIVPRTLVKQEMNARRVSPGSCLTAWRSLGPSGGTRTSPSACLRLSFVRRSPVGAVLTEGVRSGADASCRRQDERGLGLTELECATPRRRSTSSRHCLIAPGEAVGLGKWRNNSLAAEWAQAGDSPDGVRDAHPGVRRRAGRMAAAPSVGWLELCSIEDAASSSMQKPSEGHKEYREASCGREDGCSAPIGTGALSANRLVKRAVYWTTLTPSASGLHKAHLMSRGLVTCQRGGRRRVPSAINAEVERLHGPYVRLDPLAYVTGLKPNGSSRATPG

SEQ ID NO: 68248 - protein, 284 aa, Zea mays
  Coding DNA Sequence Number=SeqID_24873
MENHRNFRDFLSQGCSSSTSRGRTGHEAPEDDDFGTFSQSPFALPPRINVPAPRSRIEALDLNSQSQGTDFPYLSSYQDVLQSGDGGSDLGLPPLGRGRSARTLFQSTRTISAPISHARGPIRGCRGVRGRGTSSRGGGRSAISAPIDPVLIEDFGDEPTNEMDSRASVGYLDYVPKNTLNPKTTIKTRLMLTEVSSPQNRSASARLGKGRQLRSRTQPKSLGDRSIQCVYRHHVELQVNKSNKTVVLSNFTNYDDACGDCSRTPPANSRWDADTSRVQADPRA

SEQ ID NO: 68249 - protein, 133 aa, Zea mays
  Coding DNA Sequence Number=SeqID_24874
MDSGRMVHQQLVTRAGRGTGWIDGGDRGSRPHTPLVDAGGIGGWRGEAACGMDGGNGATCGIGKGDVATLGAEGGNETTHDAEEVARTKGRGREGTAKNAEVHIGTGDAEEGEERSGMTDLLGGQAVEMGDSI

SEQ ID NO: 68250 - protein, 40 aa, Zea mays
  Coding DNA Sequence Number=SeqID_24875
MGYTEIDIRPSGSGKGVLDKESLYLKTGGYKKLEWLSKGF

SEQ ID NO: 68251 - protein, 70 aa, Zea mays
  Coding DNA Sequence Number=SeqID_24876
MPVMIEKGEEFVFVTGAGQETTLVTWSPGDARSGCGAGAGGLEDPPMNTLETGRPPLDDGQGHRQVLSYG

SEQ ID NO: 68252 - protein, 187 aa, Zea mays
  Coding DNA Sequence Number=SeqID_24877
  Homolog annotation: Hit_ID=Q6QP51; Match level="QueryCoverage=22%, HitCoverage=19%, E-value=4e-07, Identity=65%"; Hit description =Putative growth-regulating factor 1
MFGALQGQHGAFPPSSLWKGDEGAHFTLSLTDLTGKQRRSLRSDCCATHQGEADNSQVQPQAQQEAPPRPTLGLSLGRRSPPHPTPGLSLNLGLERNRVLTRPRSRPQEKLRGNKTGLKHFSDGHVIAYTGLKHFSDSHVGMAFMRRVARENELTNRAGGGHRCLDLAPERDPVGEERSCNTMNLGV

SEQ ID NO: 68253 - protein, 446 aa, Zea mays
  Coding DNA Sequence Number=SeqID_24878
MGSTRVAFVLLLLEERNFAEVGTLQPSLGFKDFHQAARLHSLTNASRIFIILAGEEGEARRGLPSRGLASRFFLRHLGVETILQLYEGGVLQPCEGRRTAAARPGCSIPSSVRVTLAGRTGGSHNMSYATRAVLVFWDGPVLVSVARTRVRTCRGALGRPTLAGAVLVGRWTPPSVLRWWQPEKVSPPTRSSASPALRASDSLALMAGSRPPRGDTNESLPAVAFALGPSLLLQRSPASHPEFVVPQALRCGGCSYPREWNWSSVCNGTLSAAGAGGSGVSMDRGGVGSKRGFVGRGAGGFPGRGGAVLTSSFEVEILPPVSPSEAGPDPAEGGNNAEGAAVPSVDDLFFGSRITYPSESYLSQKVMSEDSVIDIVEKARKLVLAEKFSGIKTCSVSRIAYPSVSYLSQKVMSEDPAIEAVEKHERCFGRKTFSEENFDAEGVPPF

SEQ ID NO: 68254 - protein, 116 aa, Zea mays
  Coding DNA Sequence Number=SeqID_24879
MTLGTSDTWPRLGLRSRGTLGHFRDQQERFCNEIPSEGGIEPSDPIKWDRVRQITCRAGLTTAKSSLRRNRKLRLAQPWALVSEGGLRLARPQGLAPASASEGGLRLARPQGSAST

SEQ ID NO: 68255 - protein, 132 aa, Zea mays
  Coding DNA Sequence Number=SeqID_24880
MLLFRHGGKTSSILPPPGGLTATIVAVARRRKEYHVVAAIEGHELETPEMEQRPRLKRLLETTHLELDGKLFVNTQQAPTWRANCRRFDPRGSLDRRGAENHRRHGRTQGAIITCLSGRARWDAGLVPRSLS

SEQ ID NO: 68256 - protein, 156 aa, Zea mays
  Coding DNA Sequence Number=SeqID_24881
  Homolog annotation: Hit_ID=Q6QP51; Match level="QueryCoverage=45%, HitCoverage=30%, E-value=5e-17, Identity=66%"; Hit description =Putative growth-regulating factor 1
  Subcellular localization annotation: CTP_CleavageSite=45; ConfidenceScore=5.26e-01
MGNSQISNWVERKGSLLKGKFKENSAAYPAPTAVPPVRAGLTTVKSSLRRNRKLRLARPWASVSEGGLCLARPQGRLPLRPRKVDSASPDPRARPQPRPWRMVSASPDPRAGPQPRPRAESRPRPTPASALGGFSASPDLGLGPTTPQGASSLPYP

SEQ ID NO: 68257 - protein, 247 aa, Zea mays
  Coding DNA Sequence Number=SeqID_24882
  Homolog annotation: Hit_ID=Q2QNA4; Match level="QueryCoverage=89%, HitCoverage=96%, E-value=4e-76, Identity=63%"; Hit description =Expressed protein
MALVADCSAYELQMELPDERVQVDALERHLLAGLSSNDYDGSFEDEVLYDASFAEMEDNFVKYQIAQWTLLSLLLIVAWGVGVLMLLYLPIGVYVCRRDFRSRKLYLTPHAVIYKFPKKEKYWILPSISDVVVEQDYLQSIFGVYSIRIENISVRKPPSCDVKITGVAHPHDFRKAVVVHLLNTRNQKTSSDDQQSTNLNYAASSSEASLGDLMLEKLDEVEISVKVVPLIVKENIKASEGIITSDA

SEQ ID NO: 68258 - protein, 217 aa, Zea mays
  Coding DNA Sequence Number=SeqID_24883
MGALGPPERGRRWRSRGGGARPPPARRQGHPPRREHKHKSGGAQRGQEIRPQERRIRHEGPHSEGKEERVVGGHGLEDIGTLARGLLVAGDTGAIEGRGDCPSNGVAEEGGGHATVGKGGRRDNAREGVWRGCAAAGEGRDSGCVHATEGRAGAGTTPLGRTRAEPRWRASDSGGSVRATAEGGRDADEDGCHLLVREQGCRCKRERRWGRLEKLGG

SEQ ID NO: 68259 - protein, 70 aa, Zea mays
  Coding DNA Sequence Number=SeqID_24884
MPDLDGGAGGHVLEPVEDDSAPPACLRGLCTCFDVDDDKANNHEQQPMMAADDDHTASTIIAHRTVEMST

SEQ ID NO: 68260 - protein, 303 aa, Zea mays
  Coding DNA Sequence Number=SeqID_24885
  Gene Ontology: Mol. function=hydrolase activity; Cellular component =peroxisome; Biological process=proteolysis
  Homolog annotation: Hit_ID=Q8H289; Match level="QueryCoverage=94%, HitCoverage=86%, E-value=8e-83, Identity=52%"; Hit description =Epoxide hydrolase
  Pfam annotation: Domain name=Abhydrolase_1; Domain location=29-297; Score=69.5; E_value=1.1e-17; Accession=PF00561.11; Description =alphabeta hydrolase fold
RDRGVDAARLPGAVVHLRHQMRALAATGYRTEAPDLRGYGGSDAPPARGDDDDDDPTAQYTALHVVGDLVALLDALGESQVFVAAHDWGALVAWSLCLFRPDRVRALVALSVAYTPRSAARKPVDGLRALFGDDYYICRIQEPGEIEAEFARLGTELVLKKFFSYRSPGALFFPKSGWGSPDDEVPLPSWVTEEDLKYYTSMFEKTGFTGGLNYYRALNKTWELTSPWTLAKINVPVKFIIGDLDLTYHNPGIQDFIHKGGFKKFVPLLDDDIIVMKDVGHFINEEKPNEVSEHIINFIKKFG

SEQ ID NO: 68261 - protein, 56 aa, Zea mays
  Coding DNA Sequence Number=SeqID_24886
MRKLNEEYSLDRRMKYQWGLSRSCQEFSWKRVNPKLKLRSVLITAPVPSRNASPDI

SEQ ID NO: 68262 - protein, 314 aa, Zea mays
  Coding DNA Sequence Number=SeqID_24887
  Homolog annotation: Hit_ID=Q6QP51; Match level="QueryCoverage=13%, HitCoverage=30%, E-value=5e-07, Identity=50%"; Hit description =Putative growth-regulating factor 1
MGAQAHASCNRRAECFVHATAPPLAPLPRLLDCGTNTATRGDPARDPAAPAWRDGQCGQKWAGSNGDGRSSGPVVSQAHVPSGGSKRTLSHGVKTTRPCSVPRTARARATAAPPTTRPVALTPWRDRRHLWQEKRATLRPRHNDRVKKEGFDSRLRSRGLYTHYWSEVRRPAPRKGSTAASGYSGSAPITDQGFEGWPPEGFHSRLRCRARDDHGYVRYITKARAALPSSPETPCSAPIEGNMALSPLLLAERRRRGVCKKAESVPDRPLTLCRGSGAALANPAPAEPLTASTYQPENLGPDRTLGLRPARMRE

SEQ ID NO: 68263 - protein, 216 aa, Zea mays
  Coding DNA Sequence Number=SeqID_24888
  Subcellular localization annotation: CTP_CleavageSite=68; ConfidenceScore=5.25e-01
MSSRFLMHRVFPPSKPPDGGYPPSFRLIVGGTQLRGSWYLSAIVWLQGFSSCNPAAPPRRRSPKTVTSSLMVGESEPGCGLCPSLSLKDFHHQGWGGDVPGSRTRVAPGPLPAPASATAAGRGSSADEIARAAHGPTSNSTAVCPSLPHEFGHGRGPPGSGIRPKVITAAVRTPGAEVVVVAAAGAGDGTSFVGLLLLRSPPPPSSGVVRTCGGGT

SEQ ID NO: 68264 - protein, 123 aa, Zea mays
  Coding DNA Sequence Number=SeqID_24889
MAYDGSSPTKVLRRAIAGRHAMHTPYRMVLSIPGVKGSQPEDYLPKVGKLVELPASRSDRTVERQPQQEIRPPRSLSRPGMSSAMRPECRELRVVSVRGEEGRSHNVVAADPGAETPHGSDIG

SEQ ID NO: 68265 - protein, 119 aa, Zea mays
  Coding DNA Sequence Number=SeqID_24890
  Gene Ontology: Mol. function=oxidoreductase activity; Biological process=L-ascorbic acid biosynthetic process
  Homolog annotation: Hit_ID=Q1PBI2; Match level="QueryCoverage=73%, HitCoverage=27%, E-value=4e-41, Identity=96%"; Hit description=L -galactose dehydrogenase
MTQRRALVDQGLGQGPRHPAGLETRGVLYHCIKSACKAAADHCRKKGKSITKLAMQYSLMNNEISTVLVGMNSLEQVEENVAAALELSTSGIDEELMREVEAILEPVKNLTWPSGIQQA

SEQ ID NO: 68266 - protein, 412 aa, Zea mays
  Coding DNA Sequence Number=SeqID_24891
  Homolog annotation: Hit_ID=Q2QQV4; Match level="QueryCoverage=71%, HitCoverage=71%, E-value=3e-44, Identity=42%"; Hit description =Expressed protein
  Pfam annotation: Domain name=DUF593; Domain location=200-272; Score= -26.3; E_value=0.026; Accession=PF04576.6; Description=Protein of unknown function, DUF593
MIREFLAVAARAALEWALASLLLANGAAFCLIAAAAARLRLGPPCIVCARVHRLLCSSSSSAAASATGVARDALRLLLCDAHLAAVAPDRCDGDGGVSETDAAMADDDPNTFSGMETHRDVSIGSEICEQEEDGIKHHAGDRIARTTSAGDGCGPLVSLFELAPIVSSRPREDDDSIDQLARTMPQSLTLTVDGDESLTLGELVTAFRAQRRELDALRAELAAERRLKAEVEEYQRQLEEQGELDREAARLAMQLVYESEAEKHGLQRRQLDACGARAQLQLQLQLCQSDPAAVEDAGGGCSGDGNNYQSLVDFLPGSVHSSSPDLANLLRLYTESGHAGRRPGPGHGYDVPAIAVGEEAEEGEEAVAVTVTVTAATESIGRVDATSAATVSESLQESSNTFHVETTATEAA

SEQ ID NO: 68267 - protein, 179 aa, Zea mays
  Coding DNA Sequence Number=SeqID_24892
MAPLAVVDVPPVDAAIAPPMTGTLTSLVAQEMMGATVPDVALLELSVPMFASEEVSKAGVVLEEVAFVTSPGIEVEEWQCIKSASSLADISLETIERMLDSFGEAVSIARVSMMQDFIPYGQNAKKAIEEVKAAIEGKARELSLARGSAIAAKVQAETSLLKRSAELQELQMVIGKGSK

SEQ ID NO: 68268 - protein, 30 aa, Zea mays
  Coding DNA Sequence Number=SeqID_24893
MTSLLPQRLSLGAKICGAELRGRAAATSAP

SEQ ID NO: 68269 - protein, 56 aa, Zea mays
  Coding DNA Sequence Number=SeqID_24894
MPLHYAAKGFATPRTAGHRPWPRRRAVLPWGAGASLRLWPEEGENLDRRFPMDDRD

SEQ ID NO: 68270 - protein, 219 aa, Zea mays
  Coding DNA Sequence Number=SeqID_24895
MSSIPPPAGGLSAAIVVVARRWKEYHVVAAVGGHELKAPETEHRPGSERSLETAHLELDGKLFVNTQQAPTWRANCRRFETGGSLSRRVGRHGGSSESEVESVFPGRGRVRAPGSGEAEVVRQRPGRSLSPGVGRSGVRRLLGLSPSPSPRVGRSGVRRLLGLSPSPSPGVGRSGVRRLPGLSPSPSPGSGGAEFAVFRDLARVRALGQAERSSPSSGT

SEQ ID NO: 68271 - protein, 143 aa, Zea mays
  Coding DNA Sequence Number=SeqID_24896
MTILESPSVGEKKCSIFMRGNESLPASSLMVRRLAHPLPMPPPITCSVSCPSSKSPPPAMYPQGPDGERDVSHCLVPATLAGNDTREANEVTATEVHVEEDTARRDAALVMQTTPNMDESRTEGDPDPTGSGSGILGPSAAER

SEQ ID NO: 68272 - protein, 122 aa, Zea mays
  Coding DNA Sequence Number=SeqID_24897
MDTSMLGRVAAMLNQDLGRSRVIFLALVRVETLATAHVETGSKLREDHRQKPLGEDVGELGGGRDVKNTNSSTSYPFADEVEVDFDMLRALVLDGVGGEVGGADVVAENQGARGQRIVELLE

SEQ ID NO: 68273 - protein, 79 aa, Zea mays
  Coding DNA Sequence Number=SeqID_24898
  Homolog annotation: Hit_ID=Q7XBE0; Match level="QueryCoverage=53%, HitCoverage=4%, E-value=3e-07, Identity=59%"; Hit description =Putative gypsy-type retrotransposon
MERDVLSRVELMLRGVIVNDGAPWAYSAWNLPPTRPFSEFVSDHPQCRECSSSSSRARLCAEEVEIIISTHRNLSVEEK

SEQ ID NO: 68274 - protein, 184 aa, Zea mays
  Coding DNA Sequence Number=SeqID_24899
  Homolog annotation: Hit_ID=Q7XBD4; Match level="QueryCoverage=98%, HitCoverage=22%, E-value=1e-11, Identity=27%"; Hit description =Cinful1 polyprotein
MNEDFEVAKAKQEISEWKSSRLQKNVDELRESKERCYEKSLDCAKKLKDSFAKVGAYSSKQNLFEAIPKGSFNGSAKKLKLLKKYLATMWIFVPSPDDREIADEAIKKNEKESHDARVEAKEAEEAAERALITAGLSPPPEPFNTEADPIIKEALDVMKVANTIIDEVVDKLLNEAAKRILKED

SEQ ID NO: 68275 - protein, 113 aa, Zea mays
  Coding DNA Sequence Number=SeqID_24900
MTKVDALPKVVEVSTQEALACLKPPMAEMPRWSSSGPPEAFPPPFSPLCPRIHDLFPATEFAMASFSSLPNFGDPGATLARACLNSGDLTAVERSSATLSRLPLPDLIPSVRS

SEQ ID NO: 68276 - protein, 141 aa, Zea mays
  Coding DNA Sequence Number=SeqID_24901
MKKVAPEVELAQLKREVASEVEATHRRDRCPDNDLDLEVTMVSIRGGRAAPPVKATIFVDSAATTGSTAVTSALVWAVASRTLARSIINTSAPVWAAAARSPMGMCGCPLCRQLLRYLPRQLELIVGAAINRSRAADADAA

SEQ ID NO: 68277 - protein, 353 aa, Zea mays
  Coding DNA Sequence Number=SeqID_24902
MTSPTPASGGDTRFSSDFLSHDGFPSILWEVLNSAGYPTPPLYTVQLYEEHRVPCCQVWLTLEAHPLQPGWRSLDSETIGFRTDDTTEAATMKTVTTLCGYHPLEMVMHPLGLFPAEKKDDPMWCNRVSHVKDVWAMYPDLVGRVTVQCMSAMYHLQALQSDTMAHLANLAQTTKLTLDSREDFVVDLSTELVEKDLQQELEKANDHLDMHHLEMEANEVRSEGEEAPEELGPAPSANVTASEMPPSPASSVASTTQARQRRGQNEQVPPPPPPAPTVQELMAQQNEILRQLLQRQPHPQQYGGGQLQRPPTAATYQEFLTGILDRKLNEFLALNQGSRTVLQYAQAFNDLCQ

SEQ ID NO: 68278 - protein, 122 aa, Zea mays
  Coding DNA Sequence Number=SeqID_24903
  Subcellular localization annotation: CTP_CleavageSite=3; ConfidenceScore=5.10e-01
MARARAYITPSDLNRTIPRTLNLTGAQTHRRVRGHPSPCHCRPANQALPNPVRPSEKTEHTSVKLPERGIEVCFAGEASPRSPDSIRPPASVDRVSHYAIFRFNAQIASTSPREAHRANGLN

SEQ ID NO: 68279 - protein, 111 aa, Zea mays
  Coding DNA Sequence Number=SeqID_24904
MVYGLGSREDAMSMRREKLWWVQVRSLHGGSQGQWSLVCQGGTLQDMVDGVTWPTTLPPGWTVEWDAAPAGEEQEEKWARPCPIPRFGRYRLSAAVYFVNSYQLLEKLRLI

SEQ ID NO: 68280 - protein, 89 aa, Zea mays
  Coding DNA Sequence Number=SeqID_24905
MATWKKAGAAGNGGRPVLLPGAARVRETSKGEKETMVENFEHGEDEIGTRNGGFTKGIRQRWFRRWKGERKFRILLFSPIFNQNKYVLT

SEQ ID NO: 68281 - protein, 120 aa, Zea mays
  Coding DNA Sequence Number=SeqID_24906
MCWREVVALDIVALLARVGASASRGGGAATGSGQAGATMENLRGCGRRDCASRSKRVRADGKQAGWSGDISGGGGASGHSRLRGTRYGREPREQGPTAKWRRMGDKRSKGLMAEGGREDM

SEQ ID NO: 68282 - protein, 617 aa, Zea mays
  Coding DNA Sequence Number=SeqID_24907
  Gene Ontology: Mol. function=voltage-gated chloride channel activity; Cellular component=integral to membrane; Biological process=chloride transport
  Homolog annotation: Hit_ID=A2YTR4; Match level="QueryCoverage=96%, HitCoverage=77%, E-value=0.0, Identity=80%"; Hit description =Putative uncharacterized protein
  Pfam annotation: Domain name=CBS; Domain location=432-580; Score =23.2; E_value=0.0003; Accession=PF00571.19; Description=CBS domain
  Pfam annotation: Domain name=Voltage_CLC; Domain location=1-399; Score=197.0; E_value=4.5e-56; Accession=PF00654.11; Description =Voltage gated chloride channel
  Pfam module annotation: Pfam domain module=CBS::Voltage_CLC; Domain location=432-580::1-399
MKCWPSWYTASQVAITHHQIIVVVGNIAAVSSSLHVGKAGPMVHTGACIAAIFGQGGSRKYGLTCRWLRYFKNDRDRRDLVTIGAGAGVAAAFRAPVGGVLFALESLSSWWRSALIWRSFFTTAVVAVVLRLFIELCGTGRCGMFGRGGLIMYDVSTVFDDLMTYHLKDIPTVILIGVTGALLGGLYNFLMIKVLRLYNAINERGGAHKLLLAATVSIVTSCCVFGLPWLAPCRPCPTTGPLSSPDGTCHALNRFRRFHCPKGHYNDLASLFLNINDDAIRNLYSTGTNDVYHPVSMVIFFVASYALGVLSYGVVAPSGLFVPIILTGATYGRLVAMLLGGRSGLDHGLVAILGSASFLGGTLRMTVSVCVIILELTNNLLLLPLVMLVLLISKTVADSFNSSIYDLILRLKGLPHLDGHAEPYMRQLAVGDVVAGPLRSFGGVEKVGNVVHTLRTTGHHAFPVVDEPPFSPAPVLYGLRCPKEYVAERFQAEDFDKRGSGKQDTIADVVLSPEEMEMYVDLHPFTNTSPYTVVETMSLAKALVLFREVGLRHLLVVPKACDRSPVVGILTRHDFMPEHILELHPVLLRSRWKRLRWQRGAMAKYFRSLIVWVANSG

SEQ ID NO: 68283 - protein, 157 aa, Zea mays
  Coding DNA Sequence Number=SeqID_24908
MTGVDWPLKVVGIHLGPYEGVYSCVDSDLPAYIRCAARMSRRGLGMTHLVLADAGSAVLDWDLRALRVARSGVGQPLCLTELLSGDLVGRFASLGYSTGTWSAATPRKGCLAKTWLAGGLFLKRPWVYFGYPVPEYPTVAHEPLCNSLELHGDFVVD

SEQ ID NO: 68284 - protein, 126 aa, Zea mays
  Coding DNA Sequence Number=SeqID_24909
MTIEQMFLMQTQAVQAIGETLAVMQQVQQQPPPPQPPMQLKGKCAIGPFLSILVIECQHKWTHVDLWIKCKSSKKTNVLCLSAGNRRNQVGKEVALFSQRQLGLGAPDSVRCARPVTVNWLLSGSN

SEQ ID NO: 68285 - protein, 173 aa, Zea mays
  Coding DNA Sequence Number=SeqID_24910
  Subcellular localization annotation: CTP_CleavageSite=53; ConfidenceScore=5.30e-01
MLVDYTTILDGPSVSVEGPTQQGVKSVVEVTPTSGVTSDGSSDPSLRLLRELRAVARTATSVVVVSVSVRGASLAEVQGKVASQTPPPAEARGRSPAAPGVGAPAPRAGDDAVSPGDWTDLAPCVSRRSTRREGKKGITDLRVVHLIRAIYKRHRKHKSKNRTMRPESKQEEK

SEQ ID NO: 68286 - protein, 77 aa, Zea mays
  Coding DNA Sequence Number=SeqID_24911
  Gene Ontology: Mol. function=oxidoreductase activity
  Homolog annotation: Hit_ID=Q10CV5; Match level="QueryCoverage=61%, HitCoverage=16%, E-value=3e-15, Identity=87%"; Hit description=RNA recognition motif family protein, expressed
  Subcellular localization annotation: CTP_CleavageSite=18; ConfidenceScore=5.25e-01
YVSAGTSWLNGAFSKVAKAGHVAGSRTREKFQLAVSNLTAKLNSIFAHIYSRTGPDSRSVKKALPGPCCCCLRGDAG

SEQ ID NO: 68287 - protein, 118 aa, Zea mays
  Coding DNA Sequence Number=SeqID_24912
  Gene Ontology: Mol. function=catalytic activity; Biological process =guanosine tetraphosphate metabolic process
  Homolog annotation: Hit_ID=A2XGJ1; Match level="QueryCoverage=61%, HitCoverage=8%, E-value=3e-22, Identity=78%"; Hit description =Putative uncharacterized protein
MATEAAPEWLDKGDNAWQLAAMTLVGLQSVPTLAADGQGKRKGPSELEYLSFMYVNPTGFAGLRKRVEDLYKAHEQELEEILQFQANRILRQKIDEDQFLDLVSVETEVRSVYKELYR

SEQ ID NO: 68288 - protein, 225 aa, Zea mays
  Coding DNA Sequence Number=SeqID_24913
  Subcellular localization annotation: CTP_CleavageSite=54; ConfidenceScore=5.59e-01
MVNAIGAVGAGPTNSSHLAAPDSCSAVTTSTPGIKLRVVVAGGSGASTTVRVVVAEEGGAVAAAIASRGHRIDARRRWGMGSTRRGARGSEAGIRVGCRVRMRASCVTAMLESLGDGRGWGRGLRRGSRRGGEGLDHAALRAEEEKGVDRVEEWIADLPWIAPRRRREWIVDLPSAAPGRTVRQEKNVDAYTLLLRSSREKYSNLIFHLLSCYSPQSLIPLTSIP

SEQ ID NO: 68289 - protein, 245 aa, Zea mays
  Coding DNA Sequence Number=SeqID_24914
  Gene Ontology: Mol. function=oxidoreductase activity
  Homolog annotation: Hit_ID=Q10CV5; Match level="QueryCoverage=84%, HitCoverage=75%, E-value=5e-88, Identity=80%"; Hit description=RNA recognition motif family protein, expressed
MTLAPRYGLSYKFLIPKSKGATIVDQIMNITPAEDYIYIPVTEQQLMVHEVTSRSSASTAELEYSSEANVSPNSRVYVSKAHDVMTNVIAKGSAMRQDAVNKAKAFDEKHQFRANASARINSFDKRVGLSEKINNGISIVNERVKSVDQILHVSDKTMAALMAAERKLNDTGSAVKTNRYVSAGTSWLNGAFSKVAKAGHVAGSRTREKFQLAVSNLTAKLNSIFAHIYSRTGPDSRSVKKALPR

SEQ ID NO: 68290 - protein, 93 aa, Zea mays
  Coding DNA Sequence Number=SeqID_24915
  Subcellular localization annotation: CTP_CleavageSite=33; ConfidenceScore=5.72e-01
RVPSLDSSSEFAVFRSSPSSSLGSGGSGVRVFRAALSFCQTGQWSGGVTAVTSALPGARVRMKLYADGGYQLRIRRLEGTPNYGPRQQRSPDC

SEQ ID NO: 68291 - protein, 272 aa, Zea mays
  Coding DNA Sequence Number=SeqID_24916
MSRHDAKVLQNLVLNLASSVESGVVNIRTFLEEAFRHLGDEHYLLNALLAIRKEVDLMEQDALESKARSDPEKERMEEQINLAEAAKTVPRQFTFTPPSSPELYEASDNDSYDSDRSTRMADNNTNTPFRPPAASPNSVEYDEGGSKGKRPLGRDSTKASRKKSMSSSSQSTDYLSRIHDIQIARLKQSEEKSDLKQQNIEFMKEVELKKLEVQSKEIEVQEKKLMMEDRKQKDEELNKLYAMDMNALPEELRVVYIARRKGLIDYFINNPV

SEQ ID NO: 68292 - protein, 63 aa, Zea mays
  Coding DNA Sequence Number=SeqID_24917
MIVEDEGDGAANVDFIGPTGSPEVCNNIPEHNLIEHLLGSSRVHGLKAFIHIICYNNVGLSLL

SEQ ID NO: 68293 - protein, 323 aa, Zea mays
  Coding DNA Sequence Number=SeqID_24918
  Homolog annotation: Hit_ID=A3AMQ0; Match level="QueryCoverage=10%, HitCoverage=12%, E-value=2e-07, Identity=81%"; Hit description =Putative uncharacterized protein
MATEAAPEWLDKGDNAWQLAAMTLVGLQSVPTLAADGQGKSKGPILQFQANRILRQKIDEDQFLDLVSVETEVRSVYKELYSEAGAGIPSVPIRVSRPHPDRGRSPVVQISPFTFSSFGITVSIGVSVLGMAWARTRAKSRKTANSAPPDPGLGLGLSPGRRRTPLRPTQGSDSGLVPEDGELRSDPGLGLGLSPRRRRTPLRPTPGLGLGLSPGRRQTPLRPTQGSDSGSVPKDGELRSDPGLGLGLSPRRRRTPLRPTPGLGLELSPRRRRTPLRPTPGLGLRPGLCRTTSASPDPGARTRPRPGKTDSTSASEEPPRRPT

SEQ ID NO: 68294 - protein, 356 aa, Zea mays
  Coding DNA Sequence Number=SeqID_24919
  Gene Ontology: Mol. function=oxidoreductase activity
  Homolog annotation: Hit_ID=Q10CV5; Match level="QueryCoverage=57%, HitCoverage=74%, E-value=9e-85, Identity=80%"; Hit description=RNA recognition motif family protein, expressed
MRLVAGAEHATVSTLRDDLPIARKASLQRFACGACDGGDGELSFPLMKPVEIMEVLHNYVIAPDSRLHAKDIVNPQHGFVVEVLALFLSNVVRYAPIVPPPPICLVSLGSGIIPRFALGLQDGHAKSLNIKTDPPYLLSASDACLSTATIRGATIVDQIMNITPAEDYIYIPVTEQQLMVHEVTSRSSTSTAELEYSSEANVSPNSRVYVSKAHDVMTNVIAKGSAMRQDAVNKAKAFDEKHQFRANASARINSFDKRVGLSEKINNGISIVNERVKSVDQILHVSHKTMAALLAAERKLNDTGSAVKTNRYVSAGTSSLNGAFSKVAKAGHVAGSRTREKFQLAMSNLTAKVSDN

SEQ ID NO: 68295 - protein, 238 aa, Zea mays
  Coding DNA Sequence Number=SeqID_24920
MECQGDAIEQGLVHGLNWVLVSCDESDDSSMSEVQSFLAAVKALSRKDVHYGSYATAEQSSCSSFNSRLKAHLSEAKRTRKEEWCGTEGAVGGGLRGHLEPLRVGTTTRVSFAEAGVGVTVDHPWTGWATWRCSRSTSCRGMARVCQSSHHHHPDVERRHQLSLELDLGLPLGPVLGGRHGAPNIGVGEREEEYSEAGIERSYVENGPRAGVVEGRDGVGTEPSSLSELLKKVIANLV

SEQ ID NO: 68296 - protein, 85 aa, Zea mays
  Coding DNA Sequence Number=SeqID_24921
MTMTPGLRTVGKAEGMADQHGGREHVGSGVWASRNAGGNSTTRGKRLGRASSCSREWRRPWQEGEGARLGTIARGGWGGLGVRQE

SEQ ID NO: 68297 - protein, 311 aa, Zea mays
  Coding DNA Sequence Number=SeqID_24922
  Gene Ontology: Mol. function=1,3-beta-glucan synthase activity; Cellular component=1,3-beta-glucan synthase complex; Biological process=1,3-beta-glucan biosynthetic process
  Homolog annotation: Hit_ID=A2XBU2; Match level="QueryCoverage=31%, HitCoverage=9%, E-value=2e-17, Identity=75%"; Hit description =Putative uncharacterized protein
MAQMTVTLPVLCANLGTDASSSGTTLAATLFSACQYLADEASSLPSEQKEPRLYKQHVDSLHQLHGGKNLWWYPRHISKRTIQSDLHFKKLLNVIAKLVAVLGILRGTTESSDLKKGLVNAIQDLYDVVHHEAFSVDMSMFTPYYSEIVLYNMAELQKKNEDGITTLFYLQKIYPVTSADFKSQQCHISKNGDFYLWHDSMPSCRFCGIFLKSFVITFSFGMGAIPWLMMSEFCFTSGDTEIGGQKGAAQDYSEDVINGDLCEQYPSLPADMQRKIADQLDRTPMPAALLGEDCQGGRLEQARTALISDRA

SEQ ID NO: 68298 - protein, 191 aa, Zea mays
  Coding DNA Sequence Number=SeqID_24923
MYNHSRLYGQSLNLNSYGPNPRVMLVREHREDKEGECFVRFGHGGGLTPSGITIKMEGSFVIRTSYCSEVEGFPHLLQSCALRMGIRKKPEYVWKEYRENGIEKCSMAVYLGESRNYPNRPPFQVTATVHRFPDTCQKLPKEHSTSYAKTTAGKSLRHPFVTSHPATKIPLPGGKDFRPCQGEILMRMTSP

SEQ ID NO: 68299 - protein, 432 aa, Zea mays
  Coding DNA Sequence Number=SeqID_24924
  Gene Ontology: Mol. function=protein dimerization activity; Cellular component=nucleus; Biological process=regulation of transcription, DNA-dependent
  Homolog annotation: Hit_ID=Q69IL4; Match level="QueryCoverage=84%, HitCoverage=77%, E-value=1e-74, Identity=49%"; Hit description =Transcription factor RF2a
  Pfam annotation: Domain name=bZIP_1; Domain location=213-276; Score =8.0; E_value=0.044; Accession=PF00170.12; Description=bZIP transcription factor
  Pfam annotation: Domain name=bZIP_2; Domain location=214-267; Score =10.0; E_value=0.041; Accession=PF07716.6; Description=Basic region leucine zipper
  Pfam module annotation: Pfam domain module=bZIP_1::bZIP_2; Domain location=213-276::214-267
  Subcellular localization annotation: CTP_CleavageSite=18; ConfidenceScore=5.11e-01
MPGDGGPSDGLPPQSTRRAGAPPSSSTPPLECDISRMPDFPTRSTGHRRAHSEILGLPDDLDLSAPGGGEGPSLSDENDEELFSMFLDVDKLNSSCGASSEAEAESSSAAGGGGEGAELADAPRPRHQHSQSMDGSMSIKAEQLVGAPGMEGMSSAEAKKAVSAAKLAELALVDPKRAKRFIFETELTTMIWSSLRYLLIIFISNACICKSAFARFLAKGRIWANRQSAARSKERKMQYIGELELKVQTLQTEATTLSAQLALLQRPDRNEASKYMALGFELAIVVLLEIIQRDTTGLTTENSELKIRLQTMEQQVHLQDALNDTLKTEVQRLKVATGQVGNGGGGMMLNFGAMPRLVGGNQQMFHSSQAMQSVLATHQLQQLQLHSQPQQQQLHSLQLQQVARDLKMKGHLGGQGQWGDGKSGSGSRSSGS

SEQ ID NO: 68300 - protein, 161 aa, Zea mays
  Coding DNA Sequence Number=SeqID_24925
  Gene Ontology: Biological process=protein transport
  Homolog annotation: Hit_ID=A2Z336; Match level="QueryCoverage=70%, HitCoverage=100%, E-value=5e-32, Identity=57%"; Hit description =Putative uncharacterized protein
  Subcellular localization annotation: CTP_CleavageSite=41; ConfidenceScore=5.07e-01
MALVSPSFKFVLQITNQMCARGTENLMQSPVSFSDFSVSVCAQEDGLIKLQVNVSGTMTDSIFEKVFTKNVAAAQPLPGFRRMKGGKTPDIPKEVALHLIGPSKVKKETIKKIISSTVAEYVQKEGLTVSKNMKVQQSYEELEAAFEPGKEFCFDATVHLQ

SEQ ID NO: 68301 - protein, 691 aa, Zea mays
  Coding DNA Sequence Number=SeqID_24926
  Gene Ontology: Mol. function=transcription factor activity; Cellular component=nucleus; Biological process=negative regulation of transcription from RNA polymerase II promoter
  Homolog annotation: Hit_ID=A2Z333; Match level="QueryCoverage=86%, HitCoverage=54%, E-value=0.0, Identity=74%"; Hit description =Putative uncharacterized protein
  Pfam annotation: Domain name=DUF654; Domain location=292-686; Score =353.4; E_value=3.7e-103; Accession=PF04910.5; Description=Protein of unknown function, DUF654
MSARLLRRVLQEREATPQDTDVADDDQSVEEEASPPRSSARNLFDLLDDGNGDGGEEDEKVRTSRPLATFGPSLLVTFGVQSSSWVKFCLIGAASCLPFSIEQVAGWNLRLWRVFSCHCDLKSEDETEIIQAVSYTEQRHSVQKKANAVPETNKKSKKKKKKSKAEPSSTKAKDAQSLESILEDLCIEKNPIQQRAHQSDRAAGKEFETNEATHVASSVLAIDPKHLKGENEMRRIFGSKVVDSFENQRSMPSSSRQVRGARRVAHNPRKTLLVSPPSYWPPWDKSITMDLLEMKNGLNYFRYTYDPSVSHVQELFEAAKAANDLNAIAAILGKYPYHPESLLTFAELFKYSGEHQSSADAVEKCLFALECAWHPLFSPLQGNYQLKFNHDTNKPLFTALFSHMKNLDRRGCHRSALEVCKFLLSLDFDDPKGSLFCIDYFALRSQQYKWLEQFAEEYQCDNSLWLFPNFSFSLATARFYLECDAASEGSDDADKSTSLDLMKQALMLHPMVLRKIVDKAPLKDSSWTQILRNVFFGSAKPGSPSLEHMINIYVERHYIMWRFPELQNLLKEAALLVIESLKQDNREALDWACVRKEAFSSDKNEYSHLLVSDFTDTTPSLPPEELRPFMVGPGMLHEMPPVEQEAGPERLRAPREVAGRNPAVVFLESLLPWVDYGDNHQGANDDDNDDE

SEQ ID NO: 68302 - protein, 243 aa, Zea mays
  Coding DNA Sequence Number=SeqID_24927
  Subcellular localization annotation: CTP_CleavageSite=38; ConfidenceScore=5.54e-01
MQSACNRAKWAHPFDSNAPSMEAQAHTSRNRRTSCVVRAAAPPLAPLPRLLDCGTSTATRGNPVYDPTVPARRIDHGPVSRGRRRDGRCGQKWADSNGGGRRAEAAVTSSAKLTDRERGDTPKGILLREGNRPRASLLIRGSKAGPSEGFNSRLRALGLRAHYWSEVRRQAPRKGSTAASGHSGSVPTTDQRGSGAALANPAPAKLLTASTYQPENLGPDRTPGLRPARMREQPDQPKCCETH

SEQ ID NO: 68303 - protein, 266 aa, Zea mays
  Coding DNA Sequence Number=SeqID_24928
  Subcellular localization annotation: CTP_CleavageSite=34; ConfidenceScore=5.14e-01
MEETHLHVFDASCPRQSTLARAPARPAPRPSQASAMTRARAYKTLPDFDCTLPRTLKPHRSLARRRLPVRSVYAAAQSLCHRRPASGAIPNSVQLSEKTVHTSVKLTEQGIEVCFAGDASPRSPELSTPPEYVDRVNHSTILRFLVHTVATLPREAHHALGLNQFAVVWPVYSPPTRTPACTRGPGDSGHPRRQAVPRRDRQSLPEPTPPFAGPPSPPTASRGQWGIVRQGGSLEEMVAGVTWPSILPPGWTVEWDPASAEEEHEE

SEQ ID NO: 68304 - protein, 65 aa, Zea mays
  Coding DNA Sequence Number=SeqID_24929
MTQTRPTGLRTSKWPADTPEKEEYEPKGRRGSLEDMVAGATWSSILPPGWTVEWDPTSAKEEHEE

SEQ ID NO: 68305 - protein, 53 aa, Zea mays
  Coding DNA Sequence Number=SeqID_24930
MVGTSAVTARRQSWSVEHCTLQDRVDGVTWPTTLPPGWTVEWDAAPAGEEHEE

SEQ ID NO: 68306 - protein, 90 aa, Zea mays
  Coding DNA Sequence Number=SeqID_24931
MEERAEGLIGCERPKSGEDDLGSLVKFCRVRELGKLHKLLAKITEQLAWLGSDRSGLAMVAEARVAMAGGKELAGAKEGRLAGEGEHGVR

SEQ ID NO: 68307 - protein, 234 aa, Zea mays
  Coding DNA Sequence Number=SeqID_24932
  Gene Ontology: Mol. function=aldehyde dehydrogenase (NAD) activity; Cellular component=cellular_component; Biological process=metabolic process
  Homolog annotation: Hit_ID=Q69P84; Match level="QueryCoverage=58%, HitCoverage=27%, E-value=1e-48, Identity=72%"; Hit description =Aldehyde dehydrogenase
  Pfam annotation: Domain name=Aldedh; Domain location=3-222; Score= -251.3; E_value=0.00053; Accession=PF00171.13; Description=Aldehyde dehydrogenase family
  Subcellular localization annotation: CTP_CleavageSite=63; ConfidenceScore=5.73e-01
MALAASSPLHAVPPAPALHTPPEKRGGTPSTGCTAGSSLCRAHCLCLCRSAVQVTSARSPRLTASAVQVKHVSYLSLFEIIASINLKDIKKLMGGKILFGGSAIESEGNFVQPTIVEITRSAPVVKEELFGPVLYVMKFQTLKEAIEINNSVPQGLSSFIFTKWPDIIFKWLGPHGSDCGIVNVNIPTNGAEIGGAFGGEKAAGGGREAGSDSWKQYMRRATWREVLEVKFSKS

SEQ ID NO: 68308 - protein, 58 aa, Zea mays
  Coding DNA Sequence Number=SeqID_24933
MALGSRKEAPNGLLRPGCHSPCGHRDALARCRGRTASFTHDGNVITKLMRLKRIKSKL

SEQ ID NO: 68309 - protein, 53 aa, Zea mays
  Coding DNA Sequence Number=SeqID_24934
MANQIQELEELVGARENTIEVFEDQLINTQQQLEEANQHLDMHHQEIQDMLQG

SEQ ID NO: 68310 - protein, 176 aa, Zea mays
  Coding DNA Sequence Number=SeqID_24935
  Homolog annotation: Hit_ID=Q6QP51; Match level="QueryCoverage=91%, HitCoverage=59%, E-value=1e-14, Identity=39%"; Hit description =Putative growth-regulating factor 1
MTLRTSPTPSTTSPEQSHRRHFAAPLTDLTGIQRRLPDSDCRATRQTLAPEDDELRLARPQGSDSALAPKDDELRLARPQGSDSASTSKDGLRLARPRARTQPRPRTTDSASPDPQGSDSALTSDDELRLARPQGSDSASASEDRLDLGLGGASASPDLGLGPTTSQGGHHYPTPS

SEQ ID NO: 68311 - protein, 91 aa, Zea mays
  Coding DNA Sequence Number=SeqID_24936
  Gene Ontology: Mol. function=metalloendopeptidase activity; Cellular component=mitochondrial respiratory chain; Biological process =proteolysis
  Homolog annotation: Hit_ID=A2WZG3; Match level="QueryCoverage=60%, HitCoverage=12%, E-value=1e-19, Identity=76%"; Hit description =Putative uncharacterized protein
MAMLSRTTRVLRKGSLLRPLPGLDLPPCLPDNLSRSPTRITTLPNGLRVATEDVPGPSTCIGFFVDSGSIYESGETTGVSHLLERMAFKDT

SEQ ID NO: 68312 - protein, 80 aa, Zea mays
  Coding DNA Sequence Number=SeqID_24937
  Subcellular localization annotation: CTP_CleavageSite=44; ConfidenceScore=5.35e-01
MGEGLMAAASALRSSLLLFGPPEQKSSSSLLLERNRFTKRESPRAKVTSEPSEASGWPAEPSARAGLLEKTLATMARAWC

SEQ ID NO: 68313 - protein, 91 aa, Zea mays
  Coding DNA Sequence Number=SeqID_24938
MAVGALQKGGWAAVVRCKGGVGGGSALQRGCGGGGSAHGGGARVSGGVDDPDVRGLWLQESLPLCMLIPGFKGKLLGIFLGKALFSSDGLR

SEQ ID NO: 68314 - protein, 167 aa, Zea mays
  Coding DNA Sequence Number=SeqID_24939
  Gene Ontology: Mol. function=structural constituent of ribosome; Cellular component=ribonucleoprotein complex; Biological process =translational elongation
  Homolog annotation: Hit_ID=A3BJZ3; Match level="QueryCoverage=64%, HitCoverage=43%, E-value=4e-38, Identity=76%"; Hit description =Putative uncharacterized protein
MAILESVGCEVDNEKMELLLSQLSSKDITELIPAGREKFALVPCGGGGMTMISPDLFSNNLVASKTHAFFFSIGIWRIQVALFCMCMGGIMYFLEYEPDTMAPFLRGLIRRFLASKISNPSPLPPNRNASYSYLQTLNALEQSRTQPGVDNGLTTSEKYNLESIPRL

SEQ ID NO: 68315 - protein, 713 aa, Zea mays
  Coding DNA Sequence Number=SeqID_24940
  Gene Ontology: Mol. function=catalytic activity; Cellular component =intracellular; Biological process=guanosine tetraphosphate metabolic process
  Homolog annotation: Hit_ID=Q7XAP4; Match level="QueryCoverage=99%, HitCoverage=99%, E-value=0.0, Identity=81%"; Hit description=Plastid (P)ppGpp synthase
  Pfam annotation: Domain name=HD; Domain location=241-345; Score=37.6; E_value=4.6e-08; Accession=PF01966.13; Description=HD domain
  Pfam annotation: Domain name=RelA_SpoT; Domain location=435-545; Score=168.3; E_value=2e-47; Accession=PF04607.8; Description=Region found in RelA  SpoT proteins
  Pfam module annotation: Pfam domain module=HD::RelA_SpoT; Domain location=241-345::435-545
  Subcellular localization annotation: CTP_CleavageSite=65; ConfidenceScore=5.35e-01
MSVPAIAVYTSPPGAVYAPPELESSSRGSAPCAAAASPSAPSSHRHAAVAGGLSCLFSSPSAAPRATAHEELGALWHDRSDEPPSVAGGFGGGGYSYPQSSPSPLKLRDHLHRSPVSLFHTPASSPASRSPSVSWLAGRERERLFSSFVRNALGSCIDYAPVTSFPLGVRPAATGVDAAELAFELDENLSEAEPSCEPDAHELLAGAQARHHIFRDELVVKAFKEAERAHRGQKRASGDPYLQHCVETAVHLANIGANATVVSAGLLHDTIDDSFMDYDHIFRMFGAGVADLVEGVSKLSHLSKLARDNNTASRTVEADRLHTMFLAMADARAVLIKLADRLHNMNTIEALPLVKQQRFAKETMEIFVPLANRLGIASWKDHLENICFKHLNPEEHKELSSKLLMSFDEALLTSTLHNLDKSLRDEGISYHSLSGRHKSLYSIYSKMIKKNLTMDDVHDIHGLRLVVETEEDCYRALDIVHKLWPRVTGRFKDYICHPKLNGYRSLHTVIMCEGVHPFEIQIRTKEMHLQAEYGFAAHWRYKEGGCRHSFVLQMVEWARWVLTWQCETLSKERPSSLSSSVGIRPPCPFPLHSEDCSYSYSRQCNYEGPIFVIMLEHDKMSVQELPANSTVVDLMERVGANSPRWSPCSFPLKEELRPRVNHKPISDPNRKLSMGDVVELTPALPDKSLSEYREEIQRMYERGGFALATTPRS

SEQ ID NO: 68316 - protein, 394 aa, Zea mays
  Coding DNA Sequence Number=SeqID_24941
  Gene Ontology: Mol. function=transferase activity; Cellular component= microtubule associated complex; Biological process=microtubule-based movement
  Homolog annotation: Hit_ID=A2FD36; Match level="QueryCoverage=64%, HitCoverage=60%, E-value=4e-12, Identity=23%"; Hit description=Viral A-type inclusion protein, putative
  Pfam annotation: Domain name=zf-CCHC; Domain location=337-354; Score =25.1; E_value=0.00024; Accession=PF00098.14; Description=Zinc knuckle
MAVGRLLSHGAPDSPVRHRTLSEENDEKVAAIVGDFSSPPPSPSSTSHLCLMVRGERKVQNDIDIIDDSDSDSDEEFASPSYDELADLLKEYTQIIRKSKAKCDRLKNENESLNAKYDIVMKASDEMKEENKTMSSTVNELTTSLKDAKDKCDKLNEANRELQDRLVKIKEDYTQIKFDHDNLLVENELLSCKTHEAINPVVKIDVATSCDDLSQGEQTSLHAELTEKVEVLTLDNQKLKRCLTDATTRGKVAIENNDFNNELAVDNERLKNEVKKLKSENEHLATSVQKFNKGQYLQNKLLMNTVMKNNKSGIGYNAFVQKKATTQYKPKQTHKPIKCFECGNEGHFAHNCKAKPPTPLPKHSRPFAFNAHYVLRKVANRKVKVTESRLEGGG

SEQ ID NO: 68317 - protein, 457 aa, Zea mays
  Coding DNA Sequence Number=SeqID_24942
MVSPVSCKRVIRVEVRAPFVGGRLGAQRHAQKYMRQLARWLCDAWAWASKPARQKSEKRVHLARLHAACMAARPSRPLVWAKPGRAPPPAVTQDGDLRLDGGGKRAGLRPLPLPQPQGFSSPRLGRGECRVGVSPCAGGGPLLHSVMGGRAVVVRGAGSCSVPGLQTRVASEPLAAPASATAAGRGSSAGVTARAGHGLTSNSTAFCPSLPHEFWRGRGPSGSSTRPEVSAAAVRPPGAEVVVVAAAGAGNGAPFVGLPLLRRPSPSEWGSSPVDYLNRFTKRESPRVKVTRTPRPLFDEPRPGVAISVRTEAELARKWEPGWPEPSRVAHQRGLTSESTTRGLGSGWRPWKMLGRGPRGNRPSRLLGPDSRRSPRTASPSEAGSGLAEGVVDAEGASGPSVGNRDVCVGESCFSRKVMSEKVMSEVSVSRRRRSPSARSALAAYVYSVVSRIRFSK

SEQ ID NO: 68318 - protein, 65 aa, Zea mays
  Coding DNA Sequence Number=SeqID_24943
MAGWIELAGAKERWLAGEDCNLADGEYVLILEQGVAQEVVPEPAPEPATEDLPAPTVKGKPQFYA

SEQ ID NO: 68319 - protein, 167 aa, Zea mays
  Coding DNA Sequence Number=SeqID_24944
  Subcellular localization annotation: CTP_CleavageSite=36; ConfidenceScore=5.27e-01
MWLKLPPASSSSPSGSRLRQGLLQQPGCPVVVQGASLAEVQGKAASQTPPPAKVKGKSHAAPAPGVGVPAPRGGWGGFSEHYGGIGIAGKGGLTNSVRGIARTRVNGNGAATVNRCGPGKPEGEGANRGVSKVVGDKAELNDATDMARARRRPQNRRETMASGGGAP

SEQ ID NO: 68320 - protein, 175 aa, Zea mays
  Coding DNA Sequence Number=SeqID_24945
MVARLDGVGVLRQDKVEHTGRHEDVEKETTATGSKQRRRRADTKRTTADDRARASSNQLMVRAHAGLTKGRRTTRDAADRSWTQRAHPAREDGGNQSAHKEAAPTGHGAMGKEAGCRARLMATGEGAPAGRESRGGRGARAASPVARASAACCAATAMPSRTLPPSPMAHAGERA

SEQ ID NO: 68321 - protein, 215 aa, Zea mays
  Coding DNA Sequence Number=SeqID_24946
MTTAALSPLTEARRRQQGLDSPDSCPSARLQRSSDGHDITRTGCQNLSGCHDGMALLQKVGRAGKDGTTRISLSLSPTRTLGPPGSKRRQVATTLFVILLLFSLPSCLHLRATPFSAEGVGACAFSPYSSDISPDTDSRSGYCTSTRTVHIMRAPSFSSSSNIPFIFPAFALFSSPTCCPRPWSRSRVGHAPGLSPCVPSRRTWVVPAMLGLSRR

SEQ ID NO: 68322 - protein, 191 aa, Zea mays
  Coding DNA Sequence Number=SeqID_24947
  Subcellular localization annotation: CTP_CleavageSite=65; ConfidenceScore=5.04e-01
MVSPSGRNSASPVVGLNLGENSASPELGFGQLPGNNSPRIPQEATLTTELSPPCTTACLEAGSTKASGGTSVSPEPSLDLDNIDQRTPPTPPRRLLTMGLLQDQCQVCLTPYWVDYHVLFTILITVSTTTTKTTPPSGRIDALDLKRSSSHSNEGSFRRVVPLLVHGSHYPISSMFACLREEAEEIPVVAF

SEQ ID NO: 68323 - protein, 137 aa, Zea mays
  Coding DNA Sequence Number=SeqID_24948
  Subcellular localization annotation: CTP_CleavageSite=59; ConfidenceScore=5.52e-01
MMVLASVVSGTIIRGTPKTPNLSCAARVASTAVPLDRVRLTVAKPGLRRHKKLRLARPRARTRARPRKTTNSASPDPGLGLGLGPGRRRTPPRPTQGSDSTSTSEDRLDLDLGGASASPNPGLGPTTSQEGPSLPYP

SEQ ID NO: 68324 - protein, 245 aa, Zea mays
  Coding DNA Sequence Number=SeqID_24949
MELMRRDEWFAGQPLRVREPFEEQNTGAPSSRRGRGFSRCPRRGRSLAASPHRWSPKTVTTSPWVGRSKPGCGLCPSLSFKDVHHQCWGGECAELGSVSARAAARSFPQRSGGRAFAVRGAGSCRVPGSPAQAASAPLPVPPSATTARRGFSADEIAGAAHGLTSNSTTFCSSSPLEWGCGRGPYGSSIRPEVIAAAVWPLGAEVVVAVVEAGGGEPSVGLLLLRRPSNRGGLFVPAEVEPEFRL

SEQ ID NO: 68325 - protein, 282 aa, Zea mays
  Coding DNA Sequence Number=SeqID_24950
MAPAIVRPRPEASEGCPTVAPSGPKAPEGSPTAAKTTRCGGRDVQLPPVRALQERAATSRTAWRTFFTLEERVSASAWKRWSYRSQWGSIPRYPSQTTTKMVACVTELGLKLWSSTPVVVWERPHEATRRHPEPLLMETGEAHHITDEDITPIQPMHGLTTRARARHLNLHVHSNLVNYVLELTLGAMDVLMIRNLGEDQQGLEKGQDIKEENLGHSQQEKAKSDSTSSPPQSSGSVCTKTNAQEVEPSARLRRLLQNIWAPGPLLIRGSKFGPSEGYHNRP

SEQ ID NO: 68326 - protein, 293 aa, Zea mays
  Coding DNA Sequence Number=SeqID_24951
  Homolog annotation: Hit_ID=Q8S473; Match level="QueryCoverage=65%, HitCoverage=24%, E-value=3e-07, Identity=27%"; Hit description =Putative RIRE2 orf3
MSIPSRPIVVASGNLVRAGPDLSTWGGPTLTWTDTKGNPYFVLDDAEGEANLVGGLMAKSVAKSIFLRHERDSAEAADLSSLCVELKDEAAAASGRVVLLEGEAQSLREKVAPLEEEVWQLKENLRVLADERDESRRQATEASLCADSLARDLEDERAPEGFGHLHPDLSDAFSGRGPKDGRAEGVVRHGGRVQPRPPCCGCPLGGALAIVASHYEINLEHVCEGYVLLDERNLVEAEMQRLTDAVEELGSALACHFEDAVVPSVSSPPAGSYSIIGAPMTQLSFLIVMSLVP

SEQ ID NO: 68327 - protein, 146 aa, Zea mays
  Coding DNA Sequence Number=SeqID_24952
MTDQYTRMWWSTQKLRNFFPVNCVSLSVMMELGTPKQWMMSVKNATACSDLMLAWGLTSIHLENLSMATKLASSAGSQDLGGIGNRSWPVKPLPEGVSNEGSGHRVVPLSPIGFHLTVLVHDRWVCTTGKIPRGCVGTTPCHLQVA

SEQ ID NO: 68328 - protein, 170 aa, Zea mays
  Coding DNA Sequence Number=SeqID_24953
MVLGSTLLTKSWGLLLGGLGVYRGLALEARGSCLEAPNLTVDSTSLGGRRLRHGAKQDCGDNEVLAGPIKVYGENFRCSLFTPNLGYFHPEEPCSIGLKLTNKRKTKWSPMDPNEATKWRHSPPSDSGRNCQGSNPQAPRGPQVSMKMTISPPKIASLLDDPCALSQGSS

SEQ ID NO: 68329 - protein, 152 aa, Zea mays
  Coding DNA Sequence Number=SeqID_24954
MEIRCQSSDSEGHRTVRCDIGLSGATRGQSLQQSTSSNPNGQDVVAAHRTLSGGAPDCPCCRWEGESPSCPHPLNSRPHPLHVSDIVCLFLLSFIFPIFHFSLSYNRDDEEIRNVDAKPTQAADWGFATKKELELVIFLELLEVIHVASITS

SEQ ID NO: 68330 - protein, 122 aa, Zea mays
  Coding DNA Sequence Number=SeqID_24955
MGDDSSPARTRGSVRPQESKGEGRGSCCSATPWESFSAPRQKGQRARREVEAPWGGGEQSCLLQPWEENLPAAKRRGEGDSAEAGLRKGGAGRKGAAMRCERLLELRRRHGRSTAPWWLLLP

SEQ ID NO: 68331 - protein, 216 aa, Zea mays
  Coding DNA Sequence Number=SeqID_24956
  Gene Ontology: Mol. function=cation transmembrane transporter activity; Cellular component=integral to membrane; Biological process=cation transport
  Homolog annotation: Hit_ID=Q8FK36; Match level="QueryCoverage=99%, HitCoverage=20%, E-value=1e-117, Identity=99%"; Hit description =Cation efflux system protein cusA
MVGETVEGIARYPINLRYPQSWRDSPQALRQLPILTPMKQQITLADVADIKVSTGPSMLKTENARPTSWIYIDARDRDMVSVVHDLQKAIAEKVQLKPGTSVAFSGQFELLERANHKLKLMVPMTLMIIFVLLYLAFRRVGEALLIISSVPFALVGGIWLLWWMGFHLSVATGTGFIALAGVAAEFGVVMLMYLRHAIEAVPSLNNPQTFSEQKLG

SEQ ID NO: 68332 - protein, 106 aa, Zea mays
  Coding DNA Sequence Number=SeqID_24957
  Gene Ontology: Mol. function=2-succinyl-6-hydroxy-2,4-cyclohexadiene -1-carboxylate synthase activity; Biological process=menaquinone biosynthetic process
  Homolog annotation: Hit_ID=P17109; Match level="QueryCoverage=81%, HitCoverage=15%, E-value=2e-41, Identity=100%"; Hit description =Menaquinone biosynthesis protein menD [Includes: 2-succinyl-6 -hydroxy- 2,...
  Homolog annotation: Hit description=4-cyclohexadiene-1-carboxylate synthase (EC 2.5.1.64) (SHCHC synthase); 2-oxoglutarate decarboxylase (EC 4.1.1.71) (Alpha- ketoglutarate decarboxylase) (KDC)]
MQAVIARRDAFGEAQLAHRICDYLPEQGQLFVGNSLVVRLIDALSQLPAGYPVYSNRGASGIDGLLSTAAGVQRASGKPTLAIVGDLSALYDLNALALLRLVFCAA

SEQ ID NO: 68333 - protein, 62 aa, Zea mays
  Coding DNA Sequence Number=SeqID_24958
MAAVGALQRGSGAVVVHMGAGTRARGTAYCSFKGKLPGIFLGKGSGQSEEKLHYPMHAEDWV

SEQ ID NO: 68334 - protein, 309 aa, Zea mays
  Coding DNA Sequence Number=SeqID_24959
GLGTLQVVSELLGWPQDMEVRCQTSFCQNEDGFPKLLRACTVRLEIRSQPEYDGREFVEHGTEKCVVIEEQLLEDDPTVMYLTTYLLTLDTQYDFLARHHRQMIAREEDAEKRNRKLHVDLTTAQAHVAALESREVIAVEALKQAKDELVQKLMGAYLVTHNQRRALRIQEPAPSNPVQPIKAKDPQILEGHPVSTRGEKKAWELPEGAIVLEGIPVFPQAMDKQEHPEASQDPPPELFEPLTMKKIPAPSLEVKEEAASTPPAPPPSEELQEPVQLEEEFNPVLPSQSPPEEVINISSLLTHPGDISD

SEQ ID NO: 68335 - protein, 334 aa, Zea mays
  Coding DNA Sequence Number=SeqID_24960
MCAGRPRLGLSQLAHWTDYIERVYFGYFGEGQLRSSRWCTGLSNISNGRCRHFDPGGSLDRRVNCRRVSQPRWVGARRSTKGGEETGKKRGNPRPSCCPAPRSGALAVGGYKRPRGRERGTCASAHSPVRPTFSYESPGPSFYKHKERTQPWVGRGGGSSKVEVESVFRGRGRVRAPGRARRSLSSSGAEAESEPWGRARRSSSSFGAEAESEPWGRARQSSSSSGAEAESEPWGRARRSSSSSGAEAESEPWGRVRRSSSSSGAETESEPWGQARRSFLWRPRPDLAAVSLTLSSGTADGAMQATLSSCQVGQWSGEVTAVTSAMSTEERSSG

SEQ ID NO: 68336 - protein, 383 aa, Zea mays
  Coding DNA Sequence Number=SeqID_24961
  Subcellular localization annotation: CTP_CleavageSite=51; ConfidenceScore=5.26e-01
MDGPARLRPTKSSFRANSASVHTDTAASGSDSSKSGRGHNEQTLALKVPLQAELRFHLRSDNDFRSGRPNSSSDDLRVDAAATRPSPASPPKERGHAEGRGVGAGANRVFSNTVQGPPPTTRGLGPTRHASWPRAEEAKPPRAVRVTAQRLQALLHFRPDQRVKERTAMQAACNRTKGAHPFNFDASSMEAQAHTSCNRRAGYYVRETAPPFAPLPRLLDCGTSAATRGDPAHDPTVPTEHIGHGEETFSHGVKTTRLCSVPQTARARTTAAPRTTRPVALTLRQGRRHLWQAKQATLHPRHDDRVKKGTGKGDTPKGILLREGSGPRAPLLIRGSKAGPSEGFNSRLRALGLRAHYWSEVRRLGPSEGFNGRLRPLGLRAHY

SEQ ID NO: 68337 - protein, 110 aa, Zea mays
  Coding DNA Sequence Number=SeqID_24962
MSRADVLGGQLAEASGRPAEPSARASFVEETWRRWPGRGADVVLRSGDPPTVLPSEARSDFAEGGVDAEGAAAPPPSRIPLFEVVKKHERRSGRKTFSEENFDAEGVPPF

SEQ ID NO: 68338 - protein, 147 aa, Zea mays
  Coding DNA Sequence Number=SeqID_24963
MGRRETEHGGEEETGKKRGNTRPSCCPAPRSGALAVGGYKRPRGRERGTCALARSPARPTFSYESPGPSFYKHKEKAQVYNGDVALCADRGYQLRLGVLGVPLIMVPDSRLPSNGYDDVAGSEGHRTFTVHGSMPLQDRTITCSKSE

SEQ ID NO: 68339 - protein, 200 aa, Zea mays
  Coding DNA Sequence Number=SeqID_24964
  Subcellular localization annotation: CTP_CleavageSite=25; ConfidenceScore=5.20e-01
MPSFSNSNTRGVTVTPEARPAPTPACTRGVGLVFRRRLWSGAEEEATPIPLPCMLSCAHQEYKKDLQKVYARELEVHRREKKVTRMEEAVSQQEGLTTEFRAKLSALDQTLEEQRVQQNKDVERLQKLQQELEGKASDAALAEEKLKAKEQSLDKQETDLARRETDLNFREEMLTRRGEMLAEHELEAEKKEKELKEWIR

SEQ ID NO: 68340 - protein, 173 aa, Zea mays
  Coding DNA Sequence Number=SeqID_24965
MKTLTTFCVYHPLEMVMHPLGLFPAEKKDDPMWCNRVSHVKDVWAMYPNLVGRITVQCMSALYRLQALQSDAMALLANTAQTAKLTLDSREDFVVEIRDNTIDVLENQLHDVQRELEEANDHLDMHHLEMEANEAGSEGEEAPEELGPAPGANGTTSAMPPSPVSSVASTAQG

SEQ ID NO: 68341 - protein, 119 aa, Zea mays
  Coding DNA Sequence Number=SeqID_24966
MVVEALAAMAGGIELAGAKERWLAGEASSTRQRRERSSSNADWAQIFEIKATIPLRDLFLSGIKVNIPDLWLKEIQPDFAKLAAMALAGALTQRAHHLVTKGAREWLAMWLKTWSYPVV

SEQ ID NO: 68342 - protein, 202 aa, Zea mays
  Coding DNA Sequence Number=SeqID_24967
MAMMGSTSDKMYLCQDRTDVGLLTKDPLTGHMPHHGHKGSSSGTNDPIGDLEARVEQLRSELRHRNKAQEQDSHRIAELSAEVSRLQYEISERDTTIVWVVNSRSFPWDCEAKALTRVAELSASLESLQVYCNTLHEEVHVLYARLNPDVPSDIAVMGAGPSGTTNEGPDGELDLFRPPPSMNLANEQSPVAGNGATKDEED

SEQ ID NO: 68343 - protein, 53 aa, Zea mays
  Coding DNA Sequence Number=SeqID_24968
MVGTSAVTARRQPGSVEHCTIQEMVDGVTWPATLPPGWTVEWDVALAGEKYEE

SEQ ID NO: 68344 - protein, 95 aa, Zea mays
  Coding DNA Sequence Number=SeqID_24969
MVVMGSTSEKMYLCQVRWIRTTVGGPNDFGGSVIVTPNVGSGRDVGEGMDPHLGSPLSLRHRLMLAPLSPDPWLGHEKPLALSRQRLEADRRHHS

SEQ ID NO: 68345 - protein, 67 aa, Zea mays
  Coding DNA Sequence Number=SeqID_24970
MASPLQPPPSRASASASSANCNLADGEYVLIPEQGPVQEEDQEQASEAAIEDLPAAPAIEGKPRFYE

SEQ ID NO: 68346 - protein, 38 aa, Zea mays
  Coding DNA Sequence Number=SeqID_24971
MWKQKLILVNPKTMMRCQVRVKKLLKKAVNNRIREYYL

SEQ ID NO: 68347 - protein, 90 aa, Zea mays
  Coding DNA Sequence Number=SeqID_24972
MAMMGSTSDKMYLYKVCPSRPLSDEYYIHEEIILRKTKHLRTSDKQRPPSPSLGHHNTSDALLVRIGECGPSDLDLVIQGRSRPLKKHNH

SEQ ID NO: 68348 - protein, 62 aa, Zea mays
  Coding DNA Sequence Number=SeqID_24973
MPTVYSESLFVEVTAKFGKSESFTVKGFIRAKLLLRDRVILMEQKFGLIRCTETQKPMFAAQ

SEQ ID NO: 68349 - protein, 164 aa, Zea mays
  Coding DNA Sequence Number=SeqID_24974
MLELAFSSKEANRGEQWRQQGYVLGGNSSVDLASHGHYAGVFIGLQAVITSMPLQNRPVTQRRPRRARYNGPDHTWASEPNEAALRDGAAAGLRLVPNGAKGVPARFVSVRPATSAKASSEGWRFCLRPNKPLFALSPKGHCHGIIFSLRVGSKQFITGCFNGI

SEQ ID NO: 68350 - protein, 232 aa, Zea mays
  Coding DNA Sequence Number=SeqID_24975
MTVQRSNRISDCELYLNQILHYWSLERKLCQPLLITEKPNQCASKHIPNRLKKGHEQRGHLLSFSIFTVGRRSFLLVYYSTNVLLTITHSKKNLSYALAFGLSRPGCSTVILGRFSIILNDDASASYSNWCSEGFRMTDGCLKRFFVKHSLHLNHINEKIGAFVRSSLELKLGGIISSSFWKPNKHKFIWGGQDSKREEKIDENSGSNPIEVQTHSLESKREEKNDENRRIS

SEQ ID NO: 68351 - protein, 132 aa, Zea mays
  Coding DNA Sequence Number=SeqID_24976
  Homolog annotation: Hit_ID=Q6QP51; Match level="QueryCoverage=74%, HitCoverage=44%, E-value=4e-19, Identity=59%"; Hit description =Putative growth-regulating factor 1
MERGRKKVMIKKGRKWIIELGKGKISITFCFSMAKTDNKSRSTTEFGLGRNRKLRLARPQAPASGGSSALPDLRLWPREEVSASPDPQTRPRSREESRPRPTPASASREVSASPDLGLGPTAPTGDTSLPYP

SEQ ID NO: 68352 - protein, 48 aa, Zea mays
  Coding DNA Sequence Number=SeqID_24977
MASHLWHTAAVLVDQVSSDFNGNPERERRKTNEERKKRFGSKGSSMAQ

SEQ ID NO: 68353 - protein, 253 aa, Zea mays
  Coding DNA Sequence Number=SeqID_24978
  Gene Ontology: Mol. function=catalytic activity
  Homolog annotation: Hit_ID=A2Y3P0; Match level="QueryCoverage=40%, HitCoverage=35%, E-value=3e-12, Identity=38%"; Hit description =Putative uncharacterized protein
MAPHILCDDGGSQPSYGSKRTRRLDAVQSVCTALSIVKQEDLMVVVNVGDSRVVVGTASNDEEYRILWCNGQVYYLADEPDVHLVWQSSQKSSVLVISCTFDDYYIIDCDVISAPKPAARPPAFGGAHAAYTAPGPIDGGEGSARENPKKPPLNLYAGWDQLDGGLERPALQPATRLGWGPPPRYKAEPPRLLDGSGSGSDVQRVLGDIPRYAGHVRGNPREYVRVRTKKVDEHCFLLGIGPWPTQICLEASP

SEQ ID NO: 68354 - protein, 266 aa, Zea mays
  Coding DNA Sequence Number=SeqID_24979
MHRALPPFEPPDGVHQRRFALAVVGGARPHGDRRSSAIARLQGFSSCSPAAFPHQWSVWWGEASRAAASAPPSASRIFIILAEAEERTEWGVASAWVGDPFLPPMFAEERHPPALRRRPPVMRGKANCCSLDRVQLSVLHPGGGRAARGLATSRGRWRAAWSSLSRGPPGVEVVHTRGSGTGVPFNPQLLCDEPKLEAAVLAWTEVESARKETSSARELGQDIRWRGAGVLPWVEVLSPGSPFEAGPGSAEGGNNAEGAAAPPIDA

SEQ ID NO: 68355 - protein, 147 aa, Zea mays
  Coding DNA Sequence Number=SeqID_24980
  Subcellular localization annotation: CTP_CleavageSite=56; ConfidenceScore=5.48e-01
MAGSGLRRKLRLARPQAPASGGGLRLARPPDSASTSVSGGIASSPDPSLGLKRSLRLARPWARTDRTNRGYIITLSLASSGYKEQDRRPIWLTPATGLRRSSDGHAITCTGLKLSPDSHVGISTNGHRDGHLTKNKEDDDDEVVDRD

SEQ ID NO: 68356 - protein, 228 aa, Zea mays
  Coding DNA Sequence Number=SeqID_24981
KKEIGSQMEVRCQTSFCQNEDGFPKLLRACTVRLGIRSQPEYDGREFIEHGTEKCVVAVYIGSSPHHVEWSVTAAGHRFKDTCQVVARKALRALCQIYEEEVADTPLRFFPPFQRNRPAWMAMMCALEEDAEKLNRKLHVDLTTAQARVAALESREVIAVEALKQAKDEHVQKLMEAYLVTHNQHRALRIQEPAPSNPVQPRRTEDPQILEGHPVSTRGEKKAWGKEP

SEQ ID NO: 68357 - protein, 173 aa, Zea mays
  Coding DNA Sequence Number=SeqID_24982
MALGKEGNLGTGKDVFAECHCQGTRQRDWQRGPLEGSLPSASPPDTRQINLLCRVSPWALGEGSVTVTWRRDGDFSLPSAKWHSAKSLPSARQKVLGKDVVADVQFAERSLPSVTLGKAFAECKIAFAVCLRHTAKKLIPTDRKRCEKGFECVEMLRLMFGRLGGVFCIQCAG

SEQ ID NO: 68358 - protein, 69 aa, Zea mays
  Coding DNA Sequence Number=SeqID_24983
MDHAWLLPPPARPACDARKVDHLFRPRAILAPKSSLQSTTTSHLHQDQEAHAAESICRYKKSQEEQLDE

SEQ ID NO: 68359 - protein, 229 aa, Zea mays
  Coding DNA Sequence Number=SeqID_24984
  Homolog annotation: Hit_ID=A2WLA7; Match level="QueryCoverage=58%, HitCoverage=19%, E-value=5e-33, Identity=54%"; Hit description =Putative uncharacterized protein
MAAIYSIAFRYKYLWMFSICTNSCWCLTGGFTRPEDGENMNHVGKGNVDRWLHMLMDNQQEDHVAYHSSDEHDNDEENASDEQRTQSRVDEESCRNGITEYFDEIVEVEDEIVSDQGAERGRNSFGIKDREEKKIWFHRTDSTWGFRSLPSSPSMILGMRKAIQVAFSINCWQYDACLLPQRPAEARAQPREGEARVPEVQRHRAEASAAMRERSYEKSTSDRDDTKNQ

SEQ ID NO: 68360 - protein, 41 aa, Zea mays
  Coding DNA Sequence Number=SeqID_24985
  Subcellular localization annotation: CTP_CleavageSite=20; ConfidenceScore=5.02e-01
MAGSAAPAPCPVPARLGRPRARPASAAPGRFNRHPGRLFKV

SEQ ID NO: 68361 - protein, 144 aa, Zea mays
  Coding DNA Sequence Number=SeqID_24986
PSCRQWGSVYAARSAKVDLSLGEECGGYEIDGFGYDYGAAPGLVSLIGDLVELRPLSLHLCACRCRLCSQIGVEQPKVRHFGALLGEARSSPGKQGPQGSQRAPDIDLVADEQRLGGAQIRQILGEGSGASPETTWSQKEDLQR

SEQ ID NO: 68362 - protein, 102 aa, Zea mays
  Coding DNA Sequence Number=SeqID_24987
MAQSRSYAQRSFGVITEKETDLKGKRLFRPRWITIELLANVKGMFVLHNLRPRLIISRGRGTLKSPNSQQVTPISIKLQRPDGCDLVRDRSIRGTRSRLARA

SEQ ID NO: 68363 - protein, 334 aa, Zea mays
  Coding DNA Sequence Number=SeqID_24988
  Gene Ontology: Mol. function=helicase activity; Biological process =protein amino acid phosphorylation
  Homolog annotation: Hit_ID=Q8LML8; Match level="QueryCoverage=100%, HitCoverage=27%, E-value=1e-102, Identity=52%"; Hit description =Putative DNA helicase homolog
MHMVAFHERQMVERVVNRLGVDRSMLTTYFEANRLHEEVRGILYRDFPEWYTWQSDKGKVWQRRERDTGGQVGRIVSAHLAKGERYYLCVLLNHVTGASSYVDLRIVDGVTQPTFREAVERRGLLESNNTLDECLTKRALFHMPLALRRLFATILVHFEPSDVAVLWQKHKDSMSKDYQHRSQNKTHVEQMRVAYDKIMSVVDTDQGRLFFVDGPSGTVKAYLYRVLLATLRNQGKIVVATATSSVVASIMPGGRTAHSHFKIPLTIDDGAVCSFTKQSGTSEMLWKASLIIWDEASMTKRQAVEALDNSMREIMGHPGLPFGGKTIVFGGDFR

SEQ ID NO: 68364 - protein, 124 aa, Zea mays
  Coding DNA Sequence Number=SeqID_24989
MGKPVPSLLMLLLSRGRIPLDCPTRWQDGRPSHSSNHVVQRTCKNLCHNTMDQAVSLAARSRRFKSSFYPFKVMHKPGLAFQSWGRQVLWCRLWYWIRGYLLSNTLLWHEDVLSVSEVAIYRMQ

SEQ ID NO: 68365 - protein, 190 aa, Zea mays
  Coding DNA Sequence Number=SeqID_24990
MELQLHHRWRYLTKLKVVYPPQGFWRSHPPCISILLDLINIVICLARNSHNNKHTIMAFVYVLERVFNSRDAPTCLDIDVTVEETKEVWVIRDNPSIVQVAPSDLFFTVIVTTSVNRLRMKDTHYKIQKISRCLPREKLPTYLILVRVTCHALNLYVRVDRELLEKPFSMKYWIEYPVWRNCPNYSNLSA

SEQ ID NO: 68366 - protein, 47 aa, Zea mays
  Coding DNA Sequence Number=SeqID_24991
MGKPVPSLLMLLLSRVPALVPTITGMGDHVSGRVRGYVHYQVHPGGY

SEQ ID NO: 68367 - protein, 111 aa, Zea mays
  Coding DNA Sequence Number=SeqID_24992
MEANEDVDIEGGEEPASSLDTAGSGRPPSPESRRARRGQNERVPPPPPPPPTLQELMAQQNEILRQLAQRQPPPQHYGGGDHQRHPRGSHFIREFLSTQPTICFTRAEDPL

SEQ ID NO: 68368 - protein, 470 aa, Zea mays
  Coding DNA Sequence Number=SeqID_24993
  Gene Ontology: Mol. function=cysteine-type peptidase activity; Biological process=proteolysis
  Homolog annotation: Hit_ID=A7NW26; Match level="QueryCoverage=29%, HitCoverage=28%, E-value=1e-28, Identity=50%"; Hit description =Chromosome chr5 scaffold_2, whole genome shotgun sequence
  Subcellular localization annotation: CTP_CleavageSite=51; ConfidenceScore=5.08e-01
MGALTDSRKRLSADRCLSADHRLPYPSFPPPPLTPPSKRTKLATFPELDPSTSAVPPIRPSPQIIHSAAAASASFTPGPSSSSTIASTPLPHRRRLPPPPPLPRPIHGPQRILRVFRLGGAARTHAAGRSLFSPSSPLPCSLGFQQYVELVNSVSHPAPSTPAATTDATRQAVPLEVVAIEEEEEGEEEEEDEDERKQQDEEEVRGSVVVRRVPQYKELYEKSRKRDAKLKTLEFEVRLAQVGRLSLERLAEALPRITPKKEEVPEPFVPLTDEDEEMVRRALHGKNSRERLAVHEPSNIVITREILQCLNNQEWLNDEVINLYLDLLKERELREPRKFLKCHFFNTFFYKKLVNPISTKLRRPDGRDSGQGSAQRTRSHLARARPRAKTADPGRFTPRPRIPSSNGRTVDSPEAQLGAACPAPTAVPLARVRSTAAKSSLGRHRKLRLARPQGSTPVSASEDGLRLARP

SEQ ID NO: 68369 - protein, 148 aa, Zea mays
  Coding DNA Sequence Number=SeqID_24994
MTPPQYTIHQFEKHRVPRCRVRMTLEPHPLQSGWCSLDSESFGYRAEDTMEAIALHGLTTFCGFHPLELSTHPIGLFPVEKEDDPNVEGPSGACQGYLGYLPREELVVDLSTKMVEKDLQVEQLSNELQELEELVGTRENTSRFSRIS

SEQ ID NO: 68370 - protein, 177 aa, Zea mays
  Coding DNA Sequence Number=SeqID_24995
  Subcellular localization annotation: CTP_CleavageSite=77; ConfidenceScore=5.03e-01
MGAIPAKAPLKGHDPASPEPNLGQRQPTPEDSRLARGSPQATDAPSTRLRQNSALPALLRLPCHSPELGRQRLSPASCDIGSSALPDPRVHLLSRPRKMDFASPDPRARTQPRLTRRRTSPRPTPGLGLSLGSGRQWTSPRPTPGLGLNLDLGGIATSPKLGSRPTTSPGGPSLPCP

SEQ ID NO: 68371 - protein, 49 aa, Zea mays
  Coding DNA Sequence Number=SeqID_24996
MAVGASEALYAKAIGSLEDMVAGVTWPSILPSGWTIEWDPASAEEEHEE

SEQ ID NO: 68372 - protein, 35 aa, Zea mays
  Coding DNA Sequence Number=SeqID_24997
MAAAADDVANNARPRALLQHHFVPTPGEYQRPIGV

SEQ ID NO: 68373 - protein, 249 aa, Zea mays
  Coding DNA Sequence Number=SeqID_24998
MASWCLLWRSLSCWGIDCWRLLSCFLWTVLRPVVLFSLIEACTTSYLRWNCLAILVDCWGRKASCLVILTLVLISSLLVALTVLLLLRKLPLVLVLMLTLMLVTLLELLGQGTLLQGEKLLLPHYHQSLGHMVAIEVVPEFFPGDGFRVGMSGEAKVGVAAAAPATLLLGSDQLLGLLGSASGTSAQWSSGVAVATAAEMHLPGVPTAPTEHALHICACFQTSIESTHISDLTLQSFNIRKDIRKSPQH

SEQ ID NO: 68374 - protein, 160 aa, Zea mays
  Coding DNA Sequence Number=SeqID_24999
  Gene Ontology: Mol. function=aspartic-type endopeptidase activity; Cellular component=chromatin; Biological process=chromatin assembly or disassembly
  Homolog annotation: Hit_ID=Q8W1D1; Match level="QueryCoverage=35%, HitCoverage=3%, E-value=4e-11, Identity=57%"; Hit description=Gag-pol
MTIEQMFLMQTQAVQAIGQTLAAMDNFYRYHVPEGLMIVRKEKFLALKQGPLSVSEYRNKFMQLSRYAPEDVNTDAKSRDENGAGTRNGYRIRATHPSNSSKVTSISVSINTSTRGSFLSSSSTVRATNREEISTSVKITRQLAFLPQQSTRIAKQFQRK

SEQ ID NO: 68375 - protein, 227 aa, Zea mays
  Coding DNA Sequence Number=SeqID_25000
MPFAPPQGILASGGDPDGYGDDDDTSGSSSHGTELSEELEPKGWIARPITHDATRGCHFHDALDTLLRQAFDRHTWSIEYRCVVYQHHRELYPDQWEATCLVRRPDDDLRGAEAFSEHYSITERHAAEAAMQDAARRALLSIARCSAGLNSMVNLAVVLNTELDHTLDELGKVRVEVAELRAECTSRHYLDGGSPAPVGIQHPYRSPSRGRFDYGTPDCRTRIDLDP

SEQ ID NO: 68376 - protein, 34 aa, Zea mays
  Coding DNA Sequence Number=SeqID_25001
  Homolog annotation: Hit_ID=Q53QG3; Match level="QueryCoverage=79%, HitCoverage=9%, E-value=4e-07, Identity=88%"; Hit description =Ribonuclease
MAALVPEWATKEPCLMGIDEAGRGPVLVGQSEMR

SEQ ID NO: 68377 - protein, 141 aa, Zea mays
  Coding DNA Sequence Number=SeqID_25002
  Gene Ontology: Mol. function=hydrolase activity
  Homolog annotation: Hit_ID=Q53QH1; Match level="QueryCoverage=91%, HitCoverage=27%, E-value=9e-33, Identity=57%"; Hit description=Dcp1 -like decapping family, putative
  Pfam annotation: Domain name=DCP1; Domain location=19-140; Score= -8.4; E_value=0.00023; Accession=PF06058.4; Description=Dcp1-like decapping family
MPPPPQANGGKVTPNLAMDAEATRMLNLTVLQRLDPAVEDILITAAHVTLYDFNIDLNQWVSQRFSPLLPRSVIPSDLDLMRGLFFSLLALCRAARTWKGSLFVVKRNSQPRFQFIVMNRRNTGSIASALGTFGLWSIDHD

SEQ ID NO: 68378 - protein, 202 aa, Zea mays
  Coding DNA Sequence Number=SeqID_25003
MQAACNRTKGAHPFDFDASRMEAQAHTSCWPSKGIDSRLRRRARDDPGYVRYITKARATLPSSLETPCSTPSKGNMALFPPSPCGKETQGPSAPEDDELRLARPQGSDSASAPEDDELRLARPQGSDSASAPEDDELRLARPQGSDSASASADGLRLTRPKGSDSTSTSEDRLNLDLGGASAPPYPGLGPTTSQEGPSLPYP

SEQ ID NO: 68379 - protein, 146 aa, Zea mays
  Coding DNA Sequence Number=SeqID_25004
MDKQTNTSDMLDLAVDYIKDLQMQVKNSKASSLGIEKKWEWNNGIVLKHSNDREKGFKVVDLRRALLKIHTPKKYKQIFHAMVRERRTQTTTMSNNTRDTRFIPRFGHTTKVPYFLVEAPTKSRVSFNPNPPFADHKGQAHTIIFA

SEQ ID NO: 68380 - protein, 162 aa, Zea mays
  Coding DNA Sequence Number=SeqID_25005
MVGRPPLLSSDELFPLLPLYYRATLATPPTPARGATPGLALMAGDPTPPPNSAGSSPAGALPASPVPPPLVPLLSLVAPATLALVPRPPTPPAPTSPVPPPGPVSAGLADVRPTLVSLPLDASQTVVLSPDDALPLPRFSQWRHWTTSTESSCNACRGRPPR

SEQ ID NO: 68381 - protein, 189 aa, Zea mays
  Coding DNA Sequence Number=SeqID_25006
MTDESLVLNLLRGLSPRFDRVAPILTRMKPFPTFAEAKNDLLLEEFRLSTTATTAPATALYGAPRATPSDSGRFLFTALQPHRPLELCDRLLALGGLAATITRANAVAVDCRAAVVAFQPQQGLLPLSGSPTQPMWGPWTNGWDTQSLTSSFSMMTLAPPTSVSNWVADSGASNHTNPDAATPGVIEST

SEQ ID NO: 68382 - protein, 42 aa, Zea mays
  Coding DNA Sequence Number=SeqID_25007
MGAHGYEAAYLVKMKDEKASKATHYSVPESKEMRMSWTNFSD

SEQ ID NO: 68383 - protein, 186 aa, Zea mays
  Coding DNA Sequence Number=SeqID_25008
  Subcellular localization annotation: CTP_CleavageSite=60; ConfidenceScore=5.90e-01
MPPSPSPMSSSPSPMSSSPSPTLLRGVHGARAMSARHAIAEPKPKRRSLRAGRPPRRRPRAQRRRAPPPPPPPEMEKEPLDMVESSVRVIETHVDIIRSLVTDGVVDTSEPESVYTLKTTLFQIGDVCDMLEKCALSIKKYADSKRAKIIQDEALQYAEDDEAADDLEELPSPDLLTQADILEKIF

SEQ ID NO: 68384 - protein, 125 aa, Zea mays
  Coding DNA Sequence Number=SeqID_25009
MPNQREQYGDTVHLFIGMGHSPHCNLADGEYILVPEQGVAQEVVQEPAPEPAIEDLPAPALEGKPRYGGYKCGHYKTAFGVSEALYAKALGSLEDMVARVTWLSILLLGWIVEWDPTSAGEEHEE

SEQ ID NO: 68385 - protein, 130 aa, Zea mays
  Coding DNA Sequence Number=SeqID_25010
MRNLCYNRAAGEDYFRTGLTPRCSSDLRHPRVGLEQNRGAVNGSGTWTHAAAQSLVRAGEEGAARISRFVWRPWNHSRLREEEEDPMVPGPPGGGSNPNAGVPSHNADQWVTRVSLASKGLDTAQPQRSG

SEQ ID NO: 68386 - protein, 77 aa, Zea mays
  Coding DNA Sequence Number=SeqID_25011
MGALHVELCLCLGVGHWLLVAGRLGTGCWPPGAVPGCWQLLEAGAWMLEGGSAVRMDGWKYGMMDDLAFTALLGLIN

SEQ ID NO: 68387 - protein, 186 aa, Zea mays
  Coding DNA Sequence Number=SeqID_25012
MPQINIIDSWHLAGSNIKERVKEIKKLGGGRCYLLVPGRLVLGGVVDGCPVLSPLPVGRSTRPPECGVLPSRSAQVWSIRTMVHVKCEGHAVLTGIRDSTWCHRKGYVEAEQLRVERVAPIVNKMHTNMVQLPYLDHERVHKLLHALDQRDWEVKVLMIIELSNYETLIVHELFSKLKSNDINHHT

SEQ ID NO: 68388 - protein, 159 aa, Zea mays
  Coding DNA Sequence Number=SeqID_25013
MAIISKIWSQSVLEHDISLRCLVLDAVPDARARIGARPRTPRALVRASPRSCLPAHLKPPPWRASPHPVLTLAGQTPLLSSGELSSARHHRPSLGHCGQLTPAASKPRLPLDCNLADGEYMLIPEQGAVYEEDQEQAPETAIEDLPAAPAIEGKPRFYA

SEQ ID NO: 68389 - protein, 79 aa, Zea mays
  Coding DNA Sequence Number=SeqID_25014
MAGRRDGRVAAGASALHRGGLIRSKEVFAGRCLPPDHLDPGANRGTDRSSASSDSQDLGQIYSGFSMATSGSANDKVVV

SEQ ID NO: 68390 - protein, 309 aa, Zea mays
  Coding DNA Sequence Number=SeqID_25015
MGRGKPGCDLGPALSLKDVHHPCWGGERGEPGLYLPRGPAGHLFFQLLVVATILQLCGGDVLQPCRGRRTVAAQLGCNIPPSTSLSWRGRERGPAGALWSGPLFGFDGWFASLEREREREPSGGHVRPGTMAAATEVAGGSPGARRPAGSPESLGSVSLVARGFSCSVKGTPRPLFDEPRPGVAVSTRTEAELARKENLVGRSLFESSVSGTDAGVDLPRPRVGLMSSEGSWPRPRGDRPSRLLGPDSRRRPWRRWPRLGDDVVLQSRDPWTASPSEAGSDLAEGVVDAEGDAAPFSRQDPSLQDRIIL

SEQ ID NO: 68391 - protein, 164 aa, Zea mays
  Coding DNA Sequence Number=SeqID_25016
MTSATPASGGDTCFSSNFLSHDGLPSILWEVLNSTGYPTPPLYTVQLYEEHRPGWHSIDSETVGFRMDDTTEAAAMKTLTTFCGYHPLEMVMHPLGLFPAEKKDDPMWCNLVSLVKDVWAMYPDLVGRVTIQCMSVLYRLQALQSNAMAHLANIAQTTKLTLER

SEQ ID NO: 68392 - protein, 134 aa, Zea mays
  Coding DNA Sequence Number=SeqID_25017
  Gene Ontology: Mol. function=kinase activity
  Homolog annotation: Hit_ID=Q6QP54; Match level="QueryCoverage=31%, HitCoverage=14%, E-value=3e-10, Identity=80%"; Hit description =Putative kinase
MGVREVETPRPSCSSRAQVGRKERIQVYNGGWCDVVAVGGALELSGGTAVGVVESLLKVMMAPPVDVAGLRARLGDVEAPLRSGSNLSSVAVVESEPLGRARRRPSAEARAESEPWGRAKRSSSSSGAEPKSEP

SEQ ID NO: 68393 - protein, 183 aa, Zea mays
  Coding DNA Sequence Number=SeqID_25018
MFAECLTLGKTVFAECLAVPSALHSVNKIFTERRTLPRAALGKVDFAECPIKSTRQSRRHSAKSRIPVVLVYIQFNNRLMNNREKIKSKKITDVLLSSDTTEAQGFLQEGGDDCAQVVFRDEEEDEMEGTGIPWSVIGEAVGTEEQLEPRRSARVRELYEGEEFESEEEEYEDEDLCYSEDEI

SEQ ID NO: 68394 - protein, 256 aa, Zea mays
  Coding DNA Sequence Number=SeqID_25019
  Subcellular localization annotation: CTP_CleavageSite=67; ConfidenceScore=5.18e-01
MVTQDGDHQFDGGEKQARLRPLPRPQLQGSSSSLLGRRARRAGACLRVGWRPASSSGFWGWKPSSSSAEEAPSSHAGEGELLLPSPGCSIPSSVRATVASRIGGSHNTSYAARADGSEDLPVRFGAAGARWCDVGGQVDAAAGAEVVAAGESFSADETVSATRGPTSGSLALMSGSRPSSGDANESLPVVASALGPSLLLQRSLASHPEFVVPQALRCGGCSYPREWNQSSVCNGILSVGVYSLWLSGPEHLGIWA

SEQ ID NO: 68395 - protein, 140 aa, Zea mays
  Coding DNA Sequence Number=SeqID_25020
MQAACNRTTGMHPFDFDASSMESQAHTSCNWCAGYYVRRIAPPLAPVPRLLDCGVGAVTQGNPARGPTVLAKHAGHGDRERGYSERDPSDQRFKGWPLGRVRQPPQATRAPRPLLIRGSKASPSEGFDSRLRALGLRAHY

SEQ ID NO: 68396 - protein, 97 aa, Zea mays
  Coding DNA Sequence Number=SeqID_25021
  Subcellular localization annotation: CTP_CleavageSite=53; ConfidenceScore=5.40e-01
MALSPSSLRKGDEGAYDKSRVKAPSTQGTRSRLARAQPRARTVDQGEFKLRPRASSSNGRTFDSPEAQLGQASQRSNLGQIASPADRNAGAFNERIA

SEQ ID NO: 68397 - protein, 962 aa, Zea mays
  Coding DNA Sequence Number=SeqID_25022
  Gene Ontology: Mol. function=nucleoside-triphosphatase activity; Cellular component=integral to membrane; Biological process=cell division
  Homolog annotation: Hit_ID=Q8LBL6; Match level="QueryCoverage=17%, HitCoverage=28%, E-value=2e-65, Identity=73%"; Hit description=Cell division protein FtsH-like protein
  Pfam annotation: Domain name=AAA; Domain location=717-899; Score =154.6; E_value=2.6e-43; Accession=PF00004.20; Description=ATPase family associated with various cellular activities (AAA)
  Pfam annotation: Domain name=PPR; Domain location=408-442; Score =21.1; E_value=0.0041; Accession=PF01535.11; Description=PPR repeat
  Pfam annotation: Domain name=PPR; Domain location=445-479; Score =15.0; E_value=0.13; Accession=PF01535.11; Description=PPR repeat
  Pfam annotation: Domain name=PPR; Domain location=481-515; Score =29.1; E_value=1.6e-05; Accession=PF01535.11; Description=PPR repeat
  Pfam annotation: Domain name=PPR; Domain location=516-550; Score =20.8; E_value=0.0051; Accession=PF01535.11; Description=PPR repeat
  Pfam annotation: Domain name=PPR; Domain location=551-585; Score=7.7; E_value=0.95; Accession=PF01535.11; Description=PPR repeat
  Pfam module annotation: Pfam domain module=AAA::PPR::PPR::PPR::PPR::PP R; Domain location=717-899::408-442::445-479::481-515::516-550::551 -585
MSMIDVITRVDAICKKYERYDTDKHGDPFSRLYAAVDAGIDAAIEKSARAAKKKKNRAASVTLDADVRRTKARLLEVVVKLQKVAARKVNGLSPEEKVSRAGLVAALPHRIHAIPDSHGGDHNGRRGIEDKSEIGNRVRPFARLPPRSGISVRHQLLTSRLTIGGYGDVTVGIRGSRFSTFSSVSSLVLATMAEAAQRDEARWELVMKKLSCLVQKMESLVGGQADLAAAVAQQAAEDLPVLPQFVRSAGNTTTPVFDEGPVFDDELPIDFGSQGKTASMAAASAMEVPGSTPTPSVPLYDSVDIFHLNSEPVYDVYDDDEDGDSSQQAVVLAADKNYYPTAEEMYGPGMEALVMDEVEQPLEQPIVADALALLEEMRGKGYHADVMRYDAVKLFDEMARARVKPDERVYSLTIRALCKLRDADRTVQVLGEMMEVGFRPWVLTLTYNFVVAVLVKAGRMEEALKVKDQMLLVAGKKMDVVLATTLMHGYCLLGEVGKALDLFNEAVRDGVTATNVTYAVLIKGCDAEGMTDKAYELCRQMIEQGLLSSTHGFNLVITGLLRDKRWEDAISLLEVMVDIPSAGTAAKCEELDIMTECVAQCNLVTAVSSDFHPEFICLFVKKFGGSLAVSSKRVLFLSWGYMEEYEVLIPFQLLQVRESQVNDVCQDMGVGDKCLAAIHDFGDVQGVDEAKEELVEIVSCLHGSLNSKKLGAKLPWGVLLVGPPGTGNTLLAWAVAGEAGIPFFYVSASEFVEAFVGRGLARVRELFKEAKEAAPSIIFIDELDVMGGNRGRSSNDVRDQTLNQLIAEMDGFDSDMKVIAMAATNRPKALDVALCRPGHFSKKDRNGRRGIEDKSEIGNRVRPFARLPPRSGISVRHQLLTSRLTIGGYGDVTGGSATDQDAGWNARPGIELDDYSAERLEEGYFQTSEESEQFRREYEMRRMKQTGLPFPAAETAISPSEF

SEQ ID NO: 68398 - protein, 198 aa, Zea mays
  Coding DNA Sequence Number=SeqID_25023
  Homolog annotation: Hit_ID=Q5Z9G5; Match level="QueryCoverage=47%, HitCoverage=37%, E-value=2e-08, Identity=40%"; Hit description =Putative uncharacterized protein P0655A07.24
MSGEEFSVKSPGAPDSVRWHTGQSGAREQESPGRRGALEPADWRTWRGREEEEPQRPRRYSFRRHRSGAAVVLFMVLAVVVLLGVVAVLVVVLLLQPRAPYVAVRAASLYALVYGQTGTLDDMQGTSLGDAGSAAMEAALRDGVVLFRVEGEARTRWKVAGIVGVDQWTRLACQLRFFWPNDTVLPFRCSSKSKLLFF

SEQ ID NO: 68399 - protein, 36 aa, Zea mays
  Coding DNA Sequence Number=SeqID_25024
MAMMGSTSEKMYLCQDRTDVGFMIEDLLTGHMTHHG

SEQ ID NO: 68400 - protein, 98 aa, Zea mays
  Coding DNA Sequence Number=SeqID_25025
  Homolog annotation: Hit_ID=Q60EK4; Match level="QueryCoverage=44%, HitCoverage=8%, E-value=2e-07, Identity=59%"; Hit description =Putative uncharacterized protein OSJNBa0032D15.11
MSLTQLKGKCIAQPSQDNRDHMVKKLETGTTVACTKTLEENVKDLRIVKRKEQKKKINTSSKSLNHASIKGNIQGNPKLQLVLERYREIFQVLKRGVM

SEQ ID NO: 68401 - protein, 126 aa, Zea mays
  Coding DNA Sequence Number=SeqID_25026
MTQSNWSLGGQMLGRRRRRYPSLDAFANLAAPTEAKQLAVSTLRPTCCRTKAYDEVAPSRALVQREGPCGIRPIVTGPAWLLRVEVDLTNPNPTFAVAKLAVLTGLETKVASGPLHIFGNFHIFEP

SEQ ID NO: 68402 - protein, 86 aa, Zea mays
  Coding DNA Sequence Number=SeqID_25027
MGSVPGAINPSMKDLLRLTLVSYVRRSKLISGLGRVGGNRMGAGELPPWLWLRRHSAWIGEGDRSITVDLGRNGQGAVRAVRGYEP

SEQ ID NO: 68403 - protein, 902 aa, Zea mays
  Coding DNA Sequence Number=SeqID_25028
MGGTEEGPSQDAAPTAKRRKLGTTVGGVGVSDNFAVELMGTCAAPGGRMSSPELRESSARILEVTGGRWPKNLLIPWAEGEDMSTSRIARGLRIFPYGWNIAVVVSAVMNKDRQDAAQKRRAVIRIADPRHEAKKARGSAKAAGPGSSQPMPAAKPAAPGFGKSSASAKTAGVDGTKPPPARAAKVRELPSPGKRVADFGTNISVEDYFVGPGEGQMVVVPPLVATTLPSAVVRARVAAQDPWATFCASGEILTAAAAKDVAGTMLQRLRDASQRLSQQLSQAADFTDRVASGVLTADVAAKVERLRTQHADAVREKSAAESENRRLAEKVATLEAEKTHLRRQLVEERKEANQAIAEAQAVQAEAKVAQAEGSLASQRAEEWETRFNALRGHVDKAEASTRSEVERTLAQFVNSYRELGARTADFEVPDREAGLRFLEWLQEELLVLPTIIEGFMSFASLVTYEGAMNALSREGCRHYEVFDQLDESFERKIFKAEDPVVNQSAGALFDRMWGAHGREAVRERSDRAREQVKMERTEDIEDLGGLVGAPPEVAEGNPVLPLDAGEGPSVVPVPAMASEDPASAPAPTVEGAPEAVAEPAVEDLTAAAVPSQVQGFGPAHATATNNANFVAASIVVAKNDSDDSVSKFFESDASGSLDVWTEESSDEDLDYFAALDVAAAEASPRVMDDEVLPSPSAGRRQRRAVAKRRVSEVECGRLRVDGASKRELLSSPVGASVGEGELRNLFEGEELRTMLFNYREMGIIPKVEPIPAAPAGDFCTGSLLEKTSTFRTYCASPAAPVGDFCRESLLEKTSILRTYCAIPAAPVGNFCTESLLEKTSIWRTYCAIPAAPIGDFCTESLLEKTSIWRTYCAILAAPLGDFCTESPAAPLGDFCAECRTRG

SEQ ID NO: 68404 - protein, 313 aa, Zea mays
  Coding DNA Sequence Number=SeqID_25029
  Subcellular localization annotation: CTP_CleavageSite=61; ConfidenceScore=5.14e-01
MEKQKSLKSWLSNCLSLSTMSSGGTPNQQTMFCQKNFWAVFDVIVDTALTSIHLGPRPCVRAASPAVDFAQDLDAFGLGDTFKHGLADPLLVKLAVDECEFPASMFEALGLVDIDWMIVPLQEQGYWCPPVFGHDEVDYAVALAVIGYLEALWAADGWRADDMVEYVGGQGLASGGYLGQCVGLLILGSVHVLQGETFELPLETADSREVLHKCGVLRCVIFLDLAGDYLGVCSDDVDSKAKLRRAAYLCLTPVGEVMTASAPAPAWHHAPSQWMVHTFSADVSGYVIGPVQSTMKSARTCDLMAVLGSNVIW

SEQ ID NO: 68405 - protein, 387 aa, Zea mays
  Coding DNA Sequence Number=SeqID_25030
  Gene Ontology: Mol. function=kinase activity; Cellular component =ornithine carbamoyltransferase complex; Biological process=amino acid metabolic process
  Homolog annotation: Hit_ID=Q6QP54; Match level="QueryCoverage=26%, HitCoverage=36%, E-value=1e-27, Identity=64%"; Hit description =Putative kinase
MAPPVDVVGPRPRLGDVEAPPRSRLSLSSMAEVESEPLGWARRRPSAKARAESEPWVGRSGVSSSSGAKPKSEPWVGQSGVRRLPGLSPSPSPGSGGAEFAVFRGLARVRALGRAERSGVRRLPGLSPSPSPGSGEAELPMVHVARPDCLSASLCQVALQSERRRRRCLSVRPLYADGGYQLRIRRLEEVADTLLRFFPPFQRDRPVWMARMRALEGKQLLEDDPTVVYLTAYLLTLDAQYDFLARHHHQMIARAEDAEKLNRKLHVDLTTAQARVAALESREVIAVEALKQAKDEHVQKLMEAYLVTHNQRRALRIQEPASSNPVQPRRAEDPQILEGHPISIRGEKKAWELPEGAIVLEGIPVFPQAMNKKEHPESSQDPLPEFV

SEQ ID NO: 68406 - protein, 54 aa, Zea mays
  Coding DNA Sequence Number=SeqID_25031
MLDHLVGLLKLRVVRGVNLAIRDLQSSDPYVVIRIGKQVGMRRRGMGLLATQAW

SEQ ID NO: 68407 - protein, 73 aa, Zea mays
  Coding DNA Sequence Number=SeqID_25032
  Subcellular localization annotation: CTP_CleavageSite=41; ConfidenceScore=5.04e-01
MYLRCKHGRRALTVSEQSGPGGYFLVQTSRQASVFTSQQCRVYVPAGCPTPRPGRRGLPLEFQVYILGTQLLF

SEQ ID NO: 68408 - protein, 25 aa, Zea mays
  Coding DNA Sequence Number=SeqID_25033
MDRGHGYRGGLSRSCNDVGEIPGRF

SEQ ID NO: 68409 - protein, 190 aa, Zea mays
  Coding DNA Sequence Number=SeqID_25034
  Gene Ontology: Mol. function=peroxidase activity; Cellular component =ubiquitin ligase complex; Biological process=response to oxidative stress
  Homolog annotation: Hit_ID=A2ZK42; Match level="QueryCoverage=64%, HitCoverage=26%, E-value=2e-60, Identity=91%"; Hit description =Putative uncharacterized protein
MANLNITNILEKMIGKDKDYRYMATSDLLSELNKESFKADQDLDPKLTIIVQQLEDASGNVFGLAVKCWVGVSILQALFVKERNAVCDAIKEEHPNLSDEELYRYARLVTSAVIAKVHTVDWAVELLKTKTMRAGMHANWYGLLGKKIKDTFGHIGGPTLGGLVGLKKPINHGVPYSLTEEFTGVYRMHS

SEQ ID NO: 68410 - protein, 83 aa, Zea mays
  Coding DNA Sequence Number=SeqID_25035
MSRAPKEHAHVVAAGGVGGQLVQRQTVPPTDELAHLAVAVAGEVREDLVHAESLLQSLDRDDGELLPMAHMSGREVDTDMLMW

SEQ ID NO: 68411 - protein, 90 aa, Zea mays
  Coding DNA Sequence Number=SeqID_25036
  Subcellular localization annotation: CTP_CleavageSite=16; ConfidenceScore=5.61e-01
ENSAARPAPAAVPTTRAKPTKVKFSLGRNKKLRLARPQGSALGLGLGKESSPRSTLGLGPNLGLGGVAASPDLRLGSTTPRGMHHYPTPS

SEQ ID NO: 68412 - protein, 283 aa, Zea mays
  Coding DNA Sequence Number=SeqID_25037
  Gene Ontology: Mol. function=sequence-specific DNA binding; Cellular component=nucleus; Biological process=regulation of transcription, DNA-dependent
  Homolog annotation: Hit_ID=B0JD73; Match level="QueryCoverage=94%, HitCoverage=58%, E-value=1e-101, Identity=69%"; Hit description=Heat shock factor A4d
  Pfam annotation: Domain name=HSF_DNA-bind; Domain location=11-179; Score=202.0; E_value=1.4e-57; Accession=PF00447.8; Description=HSF -type DNA-binding
MEGSNSSSQPPPFLIKTYEMVEDPATNHVVSWGPGGASFVVWNPPDFSRDLLPKYFKHNNFSSFIRQLNTYGFRKIDPERWEFANDDFVRGHTHLLKNIHRRKPVHSHSPQTQVNGPLAESERRELEDEISRLKYEKSLLLTDLQRQSQQRCGISWQMQSLERRLAQMEERQRNIVASLRDILLPVGHGVVSWGSATGADHFSKKRRVPKMDFFVDEPKVEEQQVPFLQTVGAETPGMSPIRLLSAEPFEKMELALVSLESFLAEGNSAYVCCSRHVVRRWCC

SEQ ID NO: 68413 - protein, 183 aa, Zea mays
  Coding DNA Sequence Number=SeqID_25038
  Gene Ontology: Mol. function=nucleoside-triphosphatase activity; Cellular component=protein complex; Biological process=cell division
  Homolog annotation: Hit_ID=Q10LK8; Match level="QueryCoverage=79%, HitCoverage=12%, E-value=8e-57, Identity=79%"; Hit description=AAA -type ATPase family protein, putative, expressed
  Pfam annotation: Domain name=AAA; Domain location=2-161; Score=72.2; E_value=1.7e-18; Accession=PF00004.20; Description=ATPase family associated with various cellular activities (AAA)
MECGSSWRLPAVVVGILFCAALFSPPAVALNIAIQSAGDGVVDGMLGRRENPGEHEAMRKMKNEFMVNWDGLRTREKERVLVLAATNRPFDLDEAVVRRLPRRLMVNLLDASNRRKILSVILAKEDMADDVDLETIANLTEGYSGSDLKDLCVTAAHRPLWPRVARSAWARQRRLLKSAFIAP

SEQ ID NO: 68414 - protein, 103 aa, Zea mays
  Coding DNA Sequence Number=SeqID_25039
MAYEIARFTRGGGRPKSGEGDSAPPVRQCLGSSLEKLHRVLGKLSKGLVEAEGLLKWLAMVAGARVARAGGAGLAGAKGGVSGQRGLMGFADWIKRYGGMNWE

SEQ ID NO: 68415 - protein, 113 aa, Zea mays
  Coding DNA Sequence Number=SeqID_25040
MWHLPPALPNSLHSRAPTPDKWGPCVMHHPTSSLKPWPYTALWDPPGSLWAAASDSVFPALYSSVTNRAALAAIVGGAWATLSHPVSGPRGINYALCALLHFHDYLAPTLAIL

SEQ ID NO: 68416 - protein, 313 aa, Zea mays
  Coding DNA Sequence Number=SeqID_25041
  Subcellular localization annotation: CTP_CleavageSite=41; ConfidenceScore=5.03e-01
MFAECQGALGKEKRPLRRRVTKTAALPSVNGDTRQRSYLCRVSSRRHSAKRPSLLSASWDTRQRARQGGSPCQALYRVSQVALGKADLFAECPKWHSAKPTSLPSARDITLGKEPKPVPRISEHKWKNSSYKMEMAVKQYGHLQNLIRLLRIKLFERMRVDIVQGGPDIARLLDFSPTTDKRLFRRALKPATPLAPAGVLPNGVKNSLQQKALKSRRQFLEAPSFVTRLLWSEPGARVGLQRGAVQRLRSFAWVSGSACLTSWQPALRIVPLFVVHVEVPPRCAEIGVCRPAVSAKSFFGVVIRMAIDMDVLY

SEQ ID NO: 68417 - protein, 117 aa, Zea mays
  Coding DNA Sequence Number=SeqID_25042
MGGTGSQEVPLGDGTGSQDGGGWSSPTLTGAGLEIPSKTEGSKAPVGGGDHQRSVKRRQETQSLGHRHGRGEGKQELTGEKSPDEEGGQRRKKPCVAVVSNRATARFRTVGGAVWPG

SEQ ID NO: 68418 - protein, 204 aa, Zea mays
  Coding DNA Sequence Number=SeqID_25043
MQVACNRTKGAHPFDFDASSMEAQAHTSCNRRAGYYVRETAPPLAPVPHLLDCRTGAATRGDPAHGPTVPTEHIGHGSVSRGRRRDGRYGQKWADINGGSRRAEAAIKSTAGSRPLLEQQESPLPRREDDAPDRRHLWQAKQATLHLRHDDRVKKGTRKGDTPKGILIHEGSGPRAPLLIRGSKAGPSEGFDSCLRPLGLCAHY

SEQ ID NO: 68419 - protein, 171 aa, Zea mays
  Coding DNA Sequence Number=SeqID_25044
  Subcellular localization annotation: CTP_CleavageSite=24; ConfidenceScore=5.48e-01
MGAIPVKAPSTQGTRSRLARAQPRAGTVDQGRFTPHPRENSAACPALTAVPLARVRPTAAKASLGRHMKLRLARPQGSDSTSTPEDGLRLARPQGSDSTSTPEDGLRLARPQGSDSTSTSEDGFRLARPQGSDSTSTSDDGLRLARPPGLGLSLDLGGATTSPDLGLGPTT

SEQ ID NO: 68420 - protein, 98 aa, Zea mays
  Coding DNA Sequence Number=SeqID_25045
MQSQKNALLQYQITHLQNGTRLKTYLVPLLESPGLCQPPSDSPFHTGHEEDGVPGCSDADIDFLPAGYSDSTTAAAEETASGTAGAGSDADAGADDLA

SEQ ID NO: 68421 - protein, 60 aa, Zea mays
  Coding DNA Sequence Number=SeqID_25046
MPMDEQRANLQQSQGAVSVWGTGLSGGAPDSVRWGTGQCPVRQVASAEEAALGFFSGDFG

SEQ ID NO: 68422 - protein, 334 aa, Zea mays
  Coding DNA Sequence Number=SeqID_25047
  Homolog annotation: Hit_ID=A2YGC2; Match level="QueryCoverage=57%, HitCoverage=82%, E-value=6e-11, Identity=29%"; Hit description =Putative uncharacterized protein
MEMARIRCTAHKSVIPFLSSCLRERPLHRTVPGQSSHLERLHRRLHEEKEHRRQEQEQDQEQQDSSPLPQQEVEFERPPSPAPQPEMPPAPPQGIPAAREDPDGDEDDDDAGGSSSHDTEFLEEPEPEGWIARPITHDTVRGCHFHDALDTLLRRAFDRRTWSIEYRYVVYQHRRGLYPDQWEATCLVRRPDDDLRGAEAFSEHYFITERDTAEAAMQDVARWALSPYCSLFSGVADGLDLKYYPRRSTGSAGGVIVSPVGEGNPRLNSMVNLVVVLNTKLDHALDELGKVRAEVAELRAECAARHYLDGVLPPLSGFSTLTVHRPVVASTMIP

SEQ ID NO: 68423 - protein, 71 aa, Zea mays
  Coding DNA Sequence Number=SeqID_25048
FFMLPPMAENKMTYELATLAPLNAIAKEETSIVLAGVVISVTRTAKQNIEYVLANFDEDESGEESDEELEF

SEQ ID NO: 68424 - protein, 101 aa, Zea mays
  Coding DNA Sequence Number=SeqID_25049
  Gene Ontology: Mol. function=phosphoenolpyruvate carboxylase activity; Cellular component=cytoplasm; Biological process=carbon utilization by fixation of carbon dioxide
  Homolog annotation: Hit_ID=A2YUJ3; Match level="QueryCoverage=52%, HitCoverage=5%, E-value=7e-11, Identity=68%"; Hit description =Phosphoenolpyruvate carboxylase
MAQMVIPSIFTYGKICKVEIKKAAPNKSSNAPPPPPVYGRNARSSYGSASKDHPSADNYEFSKKVPSSKPYRIILDDVRDKLYNTHERACQLLSSGYADIL

SEQ ID NO: 68425 - protein, 200 aa, Zea mays
  Coding DNA Sequence Number=SeqID_25050
  Subcellular localization annotation: CTP_CleavageSite=58; ConfidenceScore=5.29e-01
MPVWLLLPWASLHDARDLAPVSQGGTLERVAIARLQGFSSSSPAASSCRWSPKTVTTSLMVGRSKLGCDLCLTLSLKDLHHPCWGEGRAESGLYLPLLPPASGGGNHPPTLRRRHPPAMPGKANCCCPARVQHSVLYPRFRGEDGIEDLPVRFGAAGARWCGVGGQVDAAVSAEVVVAGESFFADETVSATADRPLALWL

SEQ ID NO: 68426 - protein, 333 aa, Zea mays
  Coding DNA Sequence Number=SeqID_25051
MEAEKMDLRRQLAEERREANKAITDAQAAQAEAKVARVEGSLAHQRAEELEARFNALRSHVDKAESSTRAEFERTHAQFVDAYRELGFMSFASLVTCEGAMNALSREGCRHYEVFDQADENFKREIFKVEDPMVKQSTGALFDRMWGPHGREAVRDRSDRAIEQVLGSGPVHATATDNAIFVAASTVAADDDSFGSVSKCFESDDSGSSIAWTEESSDEDLYYFVALDVAAAEPSLHAEGSEELPGASTGYRRRRAVAKRRVSELSRSGRRYRSEVGRGRLRVDGTGKRELLSSPIGVSVGEGELRNLFEGEELRIMLLNYREMGIILKVEPM

SEQ ID NO: 68427 - protein, 385 aa, Zea mays
  Coding DNA Sequence Number=SeqID_25052
MALGTWMGVGRSMPSLGGQRVRSPAFALDLHGRDPAAFVREAKDGAARIVGRYVPRTEGLWSWDIRGSNVRLNRVFELNCLPYGGYPGEDAADRRGKKPVDLTEEGPSQEAAPATKKRKLALEGRMSSPELRESSARMLEVTGGRWPKNVPIPHAAGEDFFMSRMARDLKVFPYRRNIAAFVSVMMERDRQDAAQKRWAVVRIVDPMREAKKARGSAKAAASGGSKPVAAAKPAAPGHSKAAASVNAAAPGESKPPPGGLGKGRRPLSPARSIADFGTDISVEDYLVGSGEGQLTVVSPPVATTSPTTVVGVKGAAWDPWATFCASGEILSAAASKDMAGSMSQRLREALQQLSQQLKQAADFADLVASGALTADVAAEVERLRA

SEQ ID NO: 68428 - protein, 222 aa, Zea mays
  Coding DNA Sequence Number=SeqID_25053
MPDPELGVMGFIQRDDFFVTPYGLRQASSRRAPPALHPLQQKMIDLGYGFFFLCFLILKVTSLDLRESLVATHMELEVADDEVASLYTHLGADREERLFYVTNWVRLATHRGARHGVARALAFMQFRLGFELGTSDLSKDVTTGALKDIEDDFDMTTEVVVDILPLENGLAVLLPMACHIVISSRDPTPSSPLAAMDSSWEIEHPGPMFATGDFSGGAPSLL

SEQ ID NO: 68429 - protein, 37 aa, Zea mays
  Coding DNA Sequence Number=SeqID_25054
HYGIGGYEIDGFGYDYGAGEDEALEGDFQEFQDYDEF

SEQ ID NO: 68430 - protein, 640 aa, Zea mays
  Coding DNA Sequence Number=SeqID_25055
  Gene Ontology: Mol. function=nucleoside-triphosphatase activity; Cellular component=integral to membrane; Biological process=protein catabolic process
  Homolog annotation: Hit_ID=A7PJL7; Match level="QueryCoverage=96%, HitCoverage=94%, E-value=0.0, Identity=77%"; Hit description =Chromosome chr12 scaffold_18, whole genome shotgun sequence
  Pfam annotation: Domain name=AAA; Domain location=249-399; Score =236.5; E_value=6e-68; Accession=PF00004.20; Description=ATPase family associated with various cellular activities (AAA)
  Pfam annotation: Domain name=AAA_2; Domain location=246-356; Score= -41.2; E_value=0.015; Accession=PF07724.5; Description=ATPase family associated with various
  Pfam annotation: Domain name=AAA_5; Domain location=249-401; Score= -15.6; E_value=0.044; Accession=PF07728.5; Description=ATPase family associated with various
  Pfam annotation: Domain name=FtsH_ext; Domain location=77-223; Score =138.5; E_value=1.9e-38; Accession=PF06480.6; Description=FtsH Extracellular
  Pfam annotation: Domain name=Peptidase_M41; Domain location=406-616; Score=398.0; E_value=1.4e-116; Accession=PF01434.9; Description =Peptidase family M41
  Pfam module annotation: Pfam domain module=AAA::AAA_2::AAA_5::FtsH _ext::Peptidase_M41; Domain location=249-399::246-356::249-401::77 -223::406-616
  Subcellular localization annotation: CTP_CleavageSite=32; ConfidenceScore=5.37e-01
MAPPSMCLAAKGVLPFSALISSGVTQRPVSVTASLEHKTSDARRKFLKLALGNIGVGLPTLLGVKKALADEQGISSSRMSYSRFLEYLDKGRVKKVDLFENGTIAIVEAISPELGNRVQRVRVQLPGLSQELLQKLREKNIDFAAHSNQEDSGSLLFNLIGNLAFPLILIGGLFLLSRRAQGGLGGPNGPGFPLGFGQSRAKFQMEPNTGVTFDDVAGVDEAKQDFMEVVEFLKKPERFTAVGARIPKGVLLVGPPGTGKTLLAKAIAGEAGVPFFSISGSEFVEMFVGVGASRVRDLFKKAKENAPCIVFVDEIDAVGRQRGTADILDSALLRPGRFDRQVSVDVPDVRGRTEILKVHGGNKKFDSDVSLDVIAMRTPGFSGADLANLLNEAAILAGRRGRTAISSKEIDDSIDRIVAGMEGTVMTDGKSKSLVAYHEVGHAICGTLTPGHDPVQKVTLIPRGQARGLTWFIPMDDPTLISRQQLFARIVGGLGGRAAEEVIFGEPEVTTGAAGDLQQITGLAKQMVVTFGMSEIGPWSLMEGGAQSGDVIMRMMARNSMSEKLAEDIDSAVKQLSDEAYEIALRHIRNNREAIDKIVEVLIEKETLAGDEFRAILSEFVEIPVENRVPPATPAAALPA

SEQ ID NO: 68431 - protein, 107 aa, Zea mays
  Coding DNA Sequence Number=SeqID_25056
MASAWGTLWRSMFLVSKVMVDLDDVVVVGVVELESLGVADICCGFVGEDEGIQDDEWCPQSAADWRWCAPGTALQIGHSFRTADIALASFWVIVLDTKGSQLELVLD

SEQ ID NO: 68432 - protein, 175 aa, Zea mays
  Coding DNA Sequence Number=SeqID_25057
  Gene Ontology: Mol. function=phosphotransferase activity, for other substituted phosphate groups; Cellular component=membrane; Biological process=phospholipid biosynthetic process
  Homolog annotation: Hit_ID=A9P3Q5; Match level="QueryCoverage=100%, HitCoverage=98%, E-value=3e-69, Identity=64%"; Hit description =Phosphatidylinositol synthase 2
MPSVYLYIPNIIGYFRIIINFIAFAVCYSNKALFAILYFISFVLDGVDGWFARKFNQGLALLVCWPFSPSFTGKTSHKDVKHTGNWLLKLYYGYRPFMAFCCVSCEVLYIFLFLFADEESTSLLSVCKGILNQSPVVILVFVSTLVGWAVKQATNVIQMKTAADACVVYDLKRSK

SEQ ID NO: 68433 - protein, 40 aa, Zea mays
  Coding DNA Sequence Number=SeqID_25058
MEIEGFVGVVGGIEPKGDESGGGTVPQRFSGEGTGSRAIQ

SEQ ID NO: 68434 - protein, 70 aa, Zea mays
  Coding DNA Sequence Number=SeqID_25059
MDNDYVEVDVYNLELTSPTKDGGKDIFKFVEKVPLRALFDKKQKSWGKNEKDGTRGSGIQKKGNEEGKGR

SEQ ID NO: 68435 - protein, 164 aa, Zea mays
  Coding DNA Sequence Number=SeqID_25060
MNDEGLADFQRPGSRYTKATVTTRALLLKRACGELPWVAWPHLGYSRNNVDNQGHNCIYQKADDITEDDEVLGISVEDQLKLRALCIKNNHLQKQKEILASKRQRITMQAKVRQKILDEEQKAKELEQQIAHMQDKGHHQLQQNPIHIPVLTPATFQGLKYLDE

SEQ ID NO: 68436 - protein, 66 aa, Zea mays
  Coding DNA Sequence Number=SeqID_25061
MSEKSEAYFNNMAMFAFGGSILLVMELPLDAQSSGRRLDVDERVEQCRAVAGVLHVLARFVQVLQM

SEQ ID NO: 68437 - protein, 151 aa, Zea mays
  Coding DNA Sequence Number=SeqID_25062
MAAPRTARPVALTKRRERRRLWLRASLLIRGSKAGPSEGFNSRLRARGLHTHYWSEVRRLAPRKGSTTASGYSGSAPTTDQGFEGWPSKESHQREASSPRTPSTGDRVWQITRRYFWARLWASSRPLANGARTSAQITRQQLTGDTMFGAH

SEQ ID NO: 68438 - protein, 376 aa, Zea mays
  Coding DNA Sequence Number=SeqID_25063
  Subcellular localization annotation: CTP_CleavageSite=64; ConfidenceScore=5.18e-01
MSSRSLMHRVFPPFEPPDGGCPQSFRLVVGGTQLRGSWYLSAIVRLQGFSSCSPAAPLRRRSPKAVTTSPWMGRGKPGCDFGPALSFKDVHHPRWGGGQAEPELYLPRGFVDRPLLRRSRERALTGPAGGSDFDNTGLVDGGRRQPQRVGLVSLAPAPPRGGRCPTRPGGSEWGSAGGLTAPVVCAEVEAAREIPVADGITATIRALGLRLFVLVLAPRASAWARARPQQHSPVGCLNRFTKRDSPRAKATSEHGQRQSWLEKEDLVGRSLAGSSVSGTDAGVDLPRPRVGLKSSGGSWPRPRGDQPSRLLGPDSRRRPGRRWPRRDDEVVLKSGDPQTASPSEARSDLAKGVVDAEGAAAPFNRQDPSLQDRIIL

SEQ ID NO: 68439 - protein, 106 aa, Zea mays
  Coding DNA Sequence Number=SeqID_25064
  Gene Ontology: Mol. function=carboxyl- or carbamoyltransferase activity; Cellular component=ornithine carbamoyltransferase complex; Biological process=amino acid metabolic process
  Homolog annotation: Hit_ID=Q8SA97; Match level="QueryCoverage=80%, HitCoverage=19%, E-value=6e-13, Identity=41%"; Hit description =Ornithine carbamoyltransferase
MAPPIDVVGPRPRLGDVEAPPRSRSSLSSVVVVESEPWGRVKRSSSSSGAEPKSEPWVGQSGVRRLPGLSPSLSPGSGGVEFAIFRGLARVRALGRAKRSSPSSGA

SEQ ID NO: 68440 - protein, 156 aa, Zea mays
  Coding DNA Sequence Number=SeqID_25065
  Gene Ontology: Mol. function=kinase activity; Cellular component =ornithine carbamoyltransferase complex; Biological process=amino acid metabolic process
  Homolog annotation: Hit_ID=Q6QP54; Match level="QueryCoverage=58%, HitCoverage=40%, E-value=4e-17, Identity=46%"; Hit description =Putative kinase
MEHCPGLERLLETAHLELDGKLFVNTQQAPTWHANCRRFETGGPWADEVMMAPPIDVVGPRPRLGDVEAPPRSRSSLSSVVVVESKPWGRVKRSSLSSRAEPKSEPWVGQSGVRRLPGLSPSPSPGSGEAEFVVFRGLARVRALGRAERSSPSSGA

SEQ ID NO: 68441 - protein, 291 aa, Zea mays
  Coding DNA Sequence Number=SeqID_25066
MWDPAPESQGRTLERVGEDSACGVWGRTNATPWELVPLSHRSASRIFITQPGCTPPPAIARDGDLRLDGGGKRAGLRPLPLPQPQGFSSPRLGRGECRVGVGPYAGGGPLLHSVIGGKGGRRPWRWQLQRAWLSGASGFGAARGAGIRHGSLKSIRPEVSAAAVRPPGAEVVVVAAAGVGDSAPFVGLPLLRRPSPSEWGCSSSLVKETPRPLFDEPRPGVAISVRTEAELAREWEPGWPEPSWVVRQRGSTSELISRGLGSGRRPWKMLGRGPRGNRPSRLLGPDSRRSP

SEQ ID NO: 68442 - protein, 231 aa, Zea mays
  Coding DNA Sequence Number=SeqID_25067
  Subcellular localization annotation: CTP_CleavageSite=12; ConfidenceScore=5.09e-01
MSRPSVKGVNPAAAMPPSAVPVVPTKESSPPCDVETTVSETGGTGQELSVDDYLVGALPCLMPRRGYRLLAVVFAGHVASGALVDVSTSQLCYERKRLEGKNERLRMQHTEAIRDKSAAENKSQNCLDKEELDSLPSIVTGLMPYVSLVSCEGAANALTREGFRHFEAFDQSNDNFDAGVFQAMRDEEVEDLVGLESSMAQKDTEVETGAEEQSSLKECGAKDSVVARTSA

SEQ ID NO: 68443 - protein, 120 aa, Zea mays
  Coding DNA Sequence Number=SeqID_25068
  Subcellular localization annotation: CTP_CleavageSite=49; ConfidenceScore=5.61e-01
MAVKPTPMPSPTSPTPPRQQPPSSSLHPRHCQPRSLLLLVHVPYKCIIVSTNKTKTSPVLAQHTLHVMHVRTWIDDSFISIGHYRQKWYKLPEDGSYDLNARYVFEYNVNDVIVDAMYYA

SEQ ID NO: 68444 - protein, 178 aa, Zea mays
  Coding DNA Sequence Number=SeqID_25069
MRVGPRGVPKHQMALRVVEARSSSRTPSTQVEQLQQSLDVSFNEWCLDAAHILELLAEKKQPQKKLAEQKERLVATMRSWEAPFACEDHLRGRFQDLVLAYNDLEDYSNEMHEEVHQLYYQLHPNDAPGATEAEGGVVLVDGGEPDADLEEEAAPMLVPGVESPRGSDVSEIASDTEV

SEQ ID NO: 68445 - protein, 80 aa, Zea mays
  Coding DNA Sequence Number=SeqID_25070
MMDNIDRSWCSVDGSASTSEPRLGEGGAWAGRRPSQEKSVAHAGGGGVSAAGDAGVGESSGGGGVYRRRLWPGRPGTGDD

SEQ ID NO: 68446 - protein, 210 aa, Zea mays
  Coding DNA Sequence Number=SeqID_25071
  Homolog annotation: Hit_ID=A3AJE1; Match level="QueryCoverage=45%, HitCoverage=62%, E-value=4e-13, Identity=38%"; Hit description =Putative uncharacterized protein
  Subcellular localization annotation: CTP_CleavageSite=33; ConfidenceScore=5.16e-01
MTWNLRGTYLGAIDLGTEVVAAPTSASRSMAPRMSRRGKSAKQSLWKFRKDPLTGTAFDPLPLPSGVPVPMCFCGDPCKVDKSEDHDTYRQRYWMCANFAFEPTIAQRRMNLMTPPPLCDFEQWIDTEISGKDKKWLENLKKWDAEDKERMEKRREELAAEQQREDEHEMRRVAECSEEKEKKLERARRAKEAMENPNALRKGKWPRCTQ

SEQ ID NO: 68447 - protein, 112 aa, Zea mays
  Coding DNA Sequence Number=SeqID_25072
  Subcellular localization annotation: CTP_CleavageSite=87; ConfidenceScore=5.12e-01
MAKLSFLAELNFSYVELSQLQLNFNFNRGLGQVQPGSREVQPGSRASSTGVQRGSTGVQGKFSRGIFPGPHWSKPVEPVLGEVQPVSGSPDRSDLLTGRLTASVTPRRLNRP

SEQ ID NO: 68448 - protein, 53 aa, Zea mays
  Coding DNA Sequence Number=SeqID_25073
MGLGVCGSLCQDDDEEDGYDYAYGNGCQHCNHCSGEDEAVEGDFQEFQDYDEF

SEQ ID NO: 68449 - protein, 150 aa, Zea mays
  Coding DNA Sequence Number=SeqID_25074
  Gene Ontology: Mol. function=transferase activity, transferring nitrogenous groups; Cellular component=endoplasmic reticulum; Biological process=biosynthetic process
  Homolog annotation: Hit_ID=Q10P02; Match level="QueryCoverage=78%, HitCoverage=23%, E-value=2e-59, Identity=95%"; Hit description =Aminotransferase, classes I and II family protein, expressed
MAPGRRRPCFPWQHFLLPGGILHQFIGEIGVGSCGPRGFYGTIDVHLDCESKIAKFLGTPDSILYSYGISTIFSVIPAFYKKGDIIVTDEGVHWAVQNGLHLSRSIVVYFKHNDMASLASTLEKLTRGNKRAEKIRRYIVVESIYQAQCF

SEQ ID NO: 68450 - protein, 151 aa, Zea mays
  Coding DNA Sequence Number=SeqID_25075
  Subcellular localization annotation: CTP_CleavageSite=51; ConfidenceScore=5.20e-01
MAVATAAHFDWDSGRGSPQPGIKPRGLSAAPATSRRAHRAATVGGGDIIPRAAHRGSVGAGLPPSYLALESAALLRGHEGETKSTAWKYGDYYYHQFDEGSGMARTIRRRRLNSTMNLPFGAVRDLDTTIPVRLSHLSCLRPPRVIAHHSN

SEQ ID NO: 68451 - protein, 285 aa, Zea mays
  Coding DNA Sequence Number=SeqID_25076
  Subcellular localization annotation: CTP_CleavageSite=34; ConfidenceScore=5.24e-01
MPPFAGRVYSGVVVLAASLVFSSGPPALSLPSARAQLAPDPPSHDARFPVPRVPSLHCFLCSIFKHAALQIACCSSSPAMAAPGSPAFRPRLPPPTPVGQEPSCPLASLPPFPSSALSLSKPFYGARGFLLLHPQLACELLPPPCIHGSRRPSPWLALRPAVAPGSESLSWPSSLLHLCPLPALQLLHPWPCLLLVGARRGRRRLVAQPSCSSLLSCPWLLLHSLRAPARCPDGRLSFRVTPSSSSVSARCPASRSTARPDGIECLVIAGLVSPTIVALLFPATP

SEQ ID NO: 68452 - protein, 86 aa, Zea mays
  Coding DNA Sequence Number=SeqID_25077
  Subcellular localization annotation: CTP_CleavageSite=27; ConfidenceScore=5.67e-01
MASRSLISWSSSPSCGVGLMAFLFCFRASLRGSPSWLMSSVARAAPGAIAFFGGMTKENSANGSHDSHDPFDDRPPDCPVCQRSNG

SEQ ID NO: 68453 - protein, 489 aa, Zea mays
  Coding DNA Sequence Number=SeqID_25078
  Pfam annotation: Domain name=MAP7; Domain location=205-358; Score= -73.7; E_value=0.026; Accession=PF05672.2; Description=MAP7 (E-MAP -115) family
MPSSSSSAATTPTAEASSEDLSGTEAAAELRPVMNKDRQDAAQKRRAVVRLPEARPKRARGTAKATVPGGSQPTLAAKPAAPGSSKVPESAKAVSTGGTKSTPDGTTKVRELPSPGKRVADFGTSINVDDYLVGKPFFDRRYVAGSGEGQLVVVPPAVATTTSTAVLGVKGGALSAGGEISATTAVKVEADTVSRRLREASHQLSQAADFADHVASGAFTADVVAEVERLRAQHADAVREKSAAESKSRKLAEKVAAQEGEKTDLRRQLVEERREANQAITKAQAAQAEAKLARVEGSLASQRAKEWEAWFNALQARMERAKASTRLEVERTRKQLVNSYRELGARTADFEVPDREAGLRFLEWLQEELLALPTIVEGFMSFASLDSAGALFDRMWGPHGREAVRERSDRARDQMTRAENVEDFGQLNNAPAEAEVNPVVAEAEVDPAPPPKAGEGSLAAPASTVSGGGLSPATVPMAEGAPKAATEPA

SEQ ID NO: 68454 - protein, 214 aa, Zea mays
  Coding DNA Sequence Number=SeqID_25079
MGCTCVAFFLLSLEERDLVGVGALQSSLGFKDFHHAARLQSPADGEKGVHQPLRRRQTATCCLVGVWLAVFASPDGVVLPPVARTGVRTSLCAGAAAIRRCGLGAQVAAVVGAEAVVAIVVAGEPLGVCYLAAPLVWRSGKPPRAMPTSKSRYHSYPKITYPSVSYLSRKVMSKDSVIDTVERHAQTMALKQCAWAGGLETALDESVKNCKALA

SEQ ID NO: 68455 - protein, 46 aa, Zea mays
  Coding DNA Sequence Number=SeqID_25080
MDNIDEVTDKRVTTLREIEKDKIMVAKAYNKKVKAKSFQAKPCLRR

SEQ ID NO: 68456 - protein, 289 aa, Zea mays
  Coding DNA Sequence Number=SeqID_25081
MGLGEAETVFRDAVGHTLASGTSVGAGQAALFSCQAILALNALAIRSVGVAIWPRLLLREACPSRASGESKLYADGGYQLRIRRLEAPEPLHRARGRSGTDSAFYIRPYVAFPQGGGGECAMLPSMGTEHGVSGELQAGNPSGRPCPVRWGSARGPEARPKVPAGDLPDPVPWRRGPRARCLPPMGFRYKIVPLVSECPRVPRERSPSLGYVSNQLARRLLDAWAWVPKLTCQKLEKRVHLARLHAACMAARPFCPLVWAKMGVASPESQGRALERVGEDSACGAWGRT

SEQ ID NO: 68457 - protein, 295 aa, Zea mays
  Coding DNA Sequence Number=SeqID_25082
  Gene Ontology: Mol. function=oxidoreductase activity, acting on the CH-OH group of donors, NAD or NADP as acceptor; Cellular component =nucleus; Biological process=metabolic process
  Homolog annotation: Hit_ID=Q10DL9; Match level="QueryCoverage=89%, HitCoverage=87%, E-value=1e-126, Identity=85%"; Hit description =Dehydrogenase, putative, expressed
MGDGVAFEAARKIIMHPLYTPRSSPWLDLKVFYVRVSNCVVDESTPDHLTLNHIPLSPDTVIEVNGQRSSLHTEFISSSLRRDRVDKKTEEATFVSTDNIRMTGSARFQVFDKNDLLLTGDLDLCNANGVVGESKNSSKKWNMKCQSSTSCNGFLKGKLSNGSEYVQPMIEVYVAGTSSGTPIILTKTIQLISRRKSEMKLKLDSIPENETTEQQKEESAEDTLKVSEFQDSKSETDVDVDYNSLYSRQDFLEGEDGELSWFNAGVRVGVGIGLGVCVGIGLGRRPAGSYIPKHQ

SEQ ID NO: 68458 - protein, 123 aa, Zea mays
  Coding DNA Sequence Number=SeqID_25083
  Subcellular localization annotation: CTP_CleavageSite=25; ConfidenceScore=5.31e-01
MGLAPPRPRPHEPRALLAISPSLICAPTDPPSSTSPSLCARQSAAAVNPAVPSSVSGRRWSSAVSIATVSFAPTSATRNAHQFPLSLPISLCPRSPTVRRAAATVDPGHRRVSVAAEESPESA

SEQ ID NO: 68459 - protein, 54 aa, Zea mays
  Coding DNA Sequence Number=SeqID_25084
MGRGLLAAASTLRSVLPLFGPPEQKSSLPPLPEQAFPLGVGSFVPAEGEPEFRS

SEQ ID NO: 68460 - protein, 789 aa, Zea mays
  Coding DNA Sequence Number=SeqID_25085
  Gene Ontology: Mol. function=catalytic activity; Cellular component =nucleus; Biological process=metabolic process
  Homolog annotation: Hit_ID=A2XMF9; Match level="QueryCoverage=98%, HitCoverage=96%, E-value=0.0, Identity=76%"; Hit description =Putative uncharacterized protein
  Pfam annotation: Domain name=PPR; Domain location=115-149; Score =34.8; E_value=3.1e-07; Accession=PF01535.11; Description=PPR repeat
  Pfam annotation: Domain name=PPR; Domain location=185-219; Score =10.5; E_value=0.44; Accession=PF01535.11; Description=PPR repeat
  Pfam annotation: Domain name=PPR; Domain location=247-281; Score =22.8; E_value=0.0013; Accession=PF01535.11; Description=PPR repeat
  Pfam annotation: Domain name=PPR; Domain location=283-317; Score=9.0; E_value=0.66; Accession=PF01535.11; Description=PPR repeat
  Pfam annotation: Domain name=PPR; Domain location=318-352; Score=9.2; E_value=0.63; Accession=PF01535.11; Description=PPR repeat
  Pfam annotation: Domain name=PPR; Domain location=382-416; Score =38.7; E_value=2.1e-08; Accession=PF01535.11; Description=PPR repeat
  Pfam annotation: Domain name=PPR; Domain location=484-518; Score =45.6; E_value=1.7e-10; Accession=PF01535.11; Description=PPR repeat
  Pfam annotation: Domain name=PPR; Domain location=519-553; Score =15.0; E_value=0.13; Accession=PF01535.11; Description=PPR repeat
  Pfam annotation: Domain name=PPR; Domain location=555-589; Score=5.3; E_value=1.8; Accession=PF01535.11; Description=PPR repeat
  Pfam annotation: Domain name=PPR; Domain location=621-655; Score=7.9; E_value=0.9; Accession=PF01535.11; Description=PPR repeat
  Pfam module annotation: Pfam domain module=PPR::PPR::PPR::PPR::PPR::PP R::PPR::PPR::PPR::PPR; Domain location=115-149::185-219::247-281::283- 317::318-352::382-416::484-518::519-553::555-589::621-655
MATTAAAATATDHYARLLQLCRTAVNPSAGRAIHAHAVKAGLLVSTYLCNNLLAYYASVGVSRGCFREARCLFDDIPYARRNAFTWNSLLSLYAKSGRLPDAHVVFAEMPDRDAVSWTIMIVGLNRSGRFWDAVKTFLDMVSEGFAPSQFTLTNVLSSCAAMEACGVGRKVHPFVVKLGLSSCVPVANSVLYMYGKCGDAETARAVFERMQVRSVSSWNVMVSLYTHQGRMELAVSMFENMVERSIVSWNTIIAGYNQNGLDGMALKFFSRMLSASSMEPDAFTVTSVLSACANLRMLKMGKQMHSYILRTGMPCSSQIMNALISTYAKSGSVETARRIMDQAVVADLNVISFTALLEGYVKLGDTKQAREIFDIMNNRDVIAWTAMIVGYHQNGQNDEAMELFRSMILIGPEPNSHTLAAVLSACASLAYLDYGKQIHCKAIRSLQEQSVSVSNAIITVYARSGSVPLARRVFDQICWRKETITWTSMIVAMAQHGLGEQAVVLFEEMVRVGVKPDHITYVGVLSACAHAGFVDKGKRYYEQMQNEHGIVPQMSHYACMVDLHARAGLLTEAHEFIQRMPVAPDTVVWGSLLAACRVRKNADLAELAAGKLLSIDPHNSGAYSALANVYSACGRWNDAARIWKLRKDKGVKKETGFSWTHVRGKVHVFGADDVLHPQRDSIYRKAAEMWEEIKKAGFVPDLNSVLHDVDDELKEELLSRHSEKLAIAFGLISTPEKTTLRIMKNLRVCNDCHTAIKFISKFVDREIIVRDATRFHHFRDGYCSCKDYW

SEQ ID NO: 68461 - protein, 145 aa, Zea mays
  Coding DNA Sequence Number=SeqID_25086
  Gene Ontology: Mol. function=nucleotide binding; Cellular component =intracellular
  Homolog annotation: Hit_ID=A2XMG0; Match level="QueryCoverage=97%, HitCoverage=76%, E-value=5e-44, Identity=67%"; Hit description =Putative uncharacterized protein
  Pfam annotation: Domain name=DUF59; Domain location=41-106; Score =0.4; E_value=0.0009; Accession=PF01883.10; Description=Domain of unknown function DUF59
MTVGMINANPVVHERPERASHPHAADVLDPLDVFGRVLQSSPHTVRDIKDPEHPYSLEQLSVLSEESVSVDETLGRIQITFTPTVQHCSMATVIGLCLRLKLMQNFPPHFKPSSIYAIIYLCTNWQVDIKVAPGSLANEESEICF

SEQ ID NO: 68462 - protein, 782 aa, Zea mays
  Coding DNA Sequence Number=SeqID_25087
  Gene Ontology: Mol. function=RNA binding; Biological process=metal ion transport
  Homolog annotation: Hit_ID=A7P367; Match level="QueryCoverage=50%, HitCoverage=35%, E-value=1e-31, Identity=47%"; Hit description =Chromosome chr1 scaffold_5, whole genome shotgun sequence
MAWGEDEAIDPDVASTGVHVSERIGRDAISSLPPRPSSASGSASSPRAQKHTRADRIGGAMSHDELADKEPSSSEEFQLAPTDSKFRSLSPAPIPIPASPGIRSLVDSVTATCKLYIVPKSRPSSDGGLKRKRDAFNDDANPQKFIPSVPFEKPLKAGSGGAKAKSQKSNQTHPKTPIQLRHAACLARNPSPSHTTPHWSAAALPPLRVSASIIHRPAASTALRVYRAKHQPYRPPLCIGLRGIGNSTPHRRLHTGNSARVDSPHRVLHFCSNSGFGVLLLGAHDLAADRPSTQAVMKKIIDVPMSGGVEPEVDNDSHTDYRVRLYNGRRPWQYKLIIGWLEDGGSLWVRLTNVGATVTLFLVPDKNGVLADVVLGFDSLDPYLRHKDKIKVRYLELQDADETGNLEEWVMLTRVAKPDQLGLRFLGRPMVRPQRVEQSKASCFDVGAIVDAWWHGGWWEGIMLCQVGSGRLQVYFPGENRTAEFGEDELRCSLEWVGNKWNPLKGRKDVTSKLTSTADCGSECLIGKQDPLNFYVPKNSEPQLERHQYDKGGIEKSSVSTISRDQKRVLADLTNDLKLDNLRWRPRKRSRRSGSRKQSDTSSGSSSGDMDLFSPSPVEALFFGGSSAVIKDVKRLISTTQNQYTVSVSLHGLRPRFAVTTHWTWTCTDVTHLVHVLLQLRFAWCGELIRYARAVAAHYEWVMLTRVAKPDQLGLRFLGRPMVRPQRVEQSKASCFDVGAIVDAWWHGGWWEGIMLCQVGSGRLQVYFPGANRTAEFGEDEL

SEQ ID NO: 68463 - protein, 111 aa, Zea mays
  Coding DNA Sequence Number=SeqID_25088
  Subcellular localization annotation: CTP_CleavageSite=72; ConfidenceScore=5.29e-01
MSGAPGGLRLKLATFGNFQGRLGYNSPDCPMYTGQCPVRQGRSASGTRQLRETPTASPLKFTGLSGVHRTVRCDSSATAISAPTAICGAINARAARIDGRRAHGGTPDKEQ

SEQ ID NO: 68464 - protein, 345 aa, Zea mays
  Coding DNA Sequence Number=SeqID_25089
  Gene Ontology: Mol. function=nucleic acid binding
  Homolog annotation: Hit_ID=A2Y732; Match level="QueryCoverage=55%, HitCoverage=80%, E-value=6e-25, Identity=32%"; Hit description =Putative uncharacterized protein
MGNHGGGPGSGLAGDMAPMRSDDWPSWLPDGFNLEFRIFATKSRFPWFLHTELVDSDIMNYKDLLDEIMRKYPCSYGEKNASTKTCHISIAHYDPSTEPPAIPLWDVTYAKAVEIPCTSSMPAPTQSLDEPSQQPEDDDKYLQNPEPENEYVGVDEEGMYIDLGPQVQGNADQEDEYIPETNSNLDSNFESDGSDDEMVEDNVPPHTAEAVYDKAQFVEETRGPPKRKKKQVMPASTETSIVPVSAPRMVFPDLGLTPPVTKKRKSSSTTSKAAKKKKSSAMPVRLQTRKRIKKQKKRWQDMGRKIRESQKSSDLLQWELEAKPVEVAVLPWELEAKESSMSNWN

SEQ ID NO: 68465 - protein, 135 aa, Zea mays
  Coding DNA Sequence Number=SeqID_25090
MENPKIWVAMRQSLQPQPVKIYDYPKMSTTSSSSSYSSFPYFKHDSDRESNPKWNPIALMRRRLLHWDAEEWDFAVESEDDASITNGEEFELLLSEDCEESEYDLFPMDGANKSLESDEDDVFSEEEPPKDPLFI

SEQ ID NO: 68466 - protein, 77 aa, Zea mays
  Coding DNA Sequence Number=SeqID_25091
  Subcellular localization annotation: CTP_CleavageSite=25; ConfidenceScore=5.28e-01
MDFDLASLSPRTGPGPAPMSRTSCMCSYSSASPGAASSSGVETELSMHAGGARCDQYYPCLINDDNGDDHDVRSTLY

SEQ ID NO: 68467 - protein, 39 aa, Zea mays
  Coding DNA Sequence Number=SeqID_25092
MAKSSVVNAVVVGLKASDILLHHPYVPNSLYLGPDLMKN

SEQ ID NO: 68468 - protein, 98 aa, Zea mays
  Coding DNA Sequence Number=SeqID_25093
MAARAGAQLGPPVGTTWERRRGRGPTCQREGEANNVGWSERWLSMGGGRGSWWRGREAAKGQLAPARDATTAMRAHSARDETSRAGCEHSELRGRSGA

SEQ ID NO: 68469 - protein, 162 aa, Zea mays
  Coding DNA Sequence Number=SeqID_25094
  Homolog annotation: Hit_ID=Q7XGW8; Match level="QueryCoverage=48%, HitCoverage=5%, E-value=9e-07, Identity=34%"; Hit description =Retrotransposon protein, putative, Ty1-copia subclass
MGSVQEELEVEHHLRVGEGPRLSTELWCLALMWATLCVGAPTRISRDLAWFRIPRFCSRDLFVAKFRESFRSPNSPPLRCHCFLELDNELVRDLYSRLNLIINELNSIGFNKLGDADIVRNVIFLLTQQRYGNIITILHNMEDLSTMTPTIVIEKIVAFEMS

SEQ ID NO: 68470 - protein, 616 aa, Zea mays
  Coding DNA Sequence Number=SeqID_25095
  Gene Ontology: Mol. function=metal ion binding
  Homolog annotation: Hit_ID=Q2QZH2; Match level="QueryCoverage=80%, HitCoverage=81%, E-value=1e-100, Identity=43%"; Hit description =Expressed protein
  Pfam annotation: Domain name=VWA; Domain location=130-309; Score =40.4; E_value=6.5e-09; Accession=PF00092.19; Description=von Willebrand factor type A domain
  Subcellular localization annotation: CTP_CleavageSite=73; ConfidenceScore=5.11e-01
MGRFVYDCSSQDAKVTWTKALRKATPQKKTLCRSQVKINKYQAKSKKRRKVLSLADCPVEDTGLSGATRRTVRCTRNSSPTATAAAETVRVITTPVFPHIPRLQASKDFQVLVRIEAPPAAQPHRRVPVDIAVVLDVGGSTGTGTGTGTGTTRLDAVKKAVKFIIRQIHDDDRLAVVGPSNYRLVTGFLNTHDARRNVEKSVDQLEPRGEFTSGSGAGLEEAIKILERLPTSASRSSRARFVILVTDTAVAESGSRFISKLPRDFMLPVHTFGLGAAHDPRALFYIASESHGTYSFVDDQNTDGITGAIAVCLSGLKDVVAVGTRVRVEAPVGSGVTIEGIQSGGYSRTRDDKTYGEVALGVLYAGEVKSFIVHLSVPALSSTSAVVAGGCDEQQLLTASFVGHYTASAAAPDPPSPMVTQAILYVQRPPPEAFDVASGGALQRVPVPVVLNHIARFDVLEMVATFVDTDIIWRLSSIVTSEVATKLRIQWDKFLQARQFWSGLDLGVLNAEVRKMVSILEAAGSSGSSTSQSTATAYMLSWLSSYQMQRPTAMGSPGSVASAFVTVNMQLTLQQTTIVPTAAPLCICHEISNFYILELVVSLACLFVFVLVVASG

SEQ ID NO: 68471 - protein, 94 aa, Zea mays
  Coding DNA Sequence Number=SeqID_25096
MDARDRVYEGGPHRVQKNCACHLPDVGEPPGMLLEWTKRGSSVAVARNSREPNLMLLLGANVLPLAKADELAIKVKNVAWHTNSPYLARQLSWF

SEQ ID NO: 68472 - protein, 57 aa, Zea mays
  Coding DNA Sequence Number=SeqID_25097
MAEWSEREARLADHQRMAEMFQYMQSLGAAQGQSGAASNNPHEAYNPTQHQSNRRPQ

SEQ ID NO: 68473 - protein, 176 aa, Zea mays
  Coding DNA Sequence Number=SeqID_25098
  Gene Ontology: Mol. function=transcription regulator activity; Cellular component=nucleus; Biological process=regulation of transcription
  Homolog annotation: Hit_ID=A7QS45; Match level="QueryCoverage=73%, HitCoverage=36%, E-value=1e-13, Identity=41%"; Hit description =Chromosome chr5 scaffold_156, whole genome shotgun sequence
MKNRVMGGFPSDRVEVGGEVHHATRDYHKKMKSPLNLSKQGALSQFSEHGFSDDLTNNVHGIGHSKENITTNNVSRPFTSGFSIGSWEDSNSIEFSNLANKTGIHNNDDIIDNISNSYELQFGVAKEMAGLLQMQQDQVPFRVRAKRGCATHPRSIAERVNSLFIFLIMHSGIVPF

SEQ ID NO: 68474 - protein, 46 aa, Zea mays
  Coding DNA Sequence Number=SeqID_25099
  Gene Ontology: Mol. function=transcription regulator activity; Cellular component=nucleus; Biological process=regulation of transcription
  Homolog annotation: Hit_ID=A2X6Y1; Match level="QueryCoverage=76%, HitCoverage=20%, E-value=3e-08, Identity=74%"; Hit description =Putative uncharacterized protein
MRRQQTSTADMLDLAVDHIRGLQNELQALKKDKEKCSCRGNRPAGR

SEQ ID NO: 68475 - protein, 842 aa, Zea mays
  Coding DNA Sequence Number=SeqID_25100
  Gene Ontology: Mol. function=ubiquitin-protein ligase activity; Cellular component=ubiquitin ligase complex; Biological process =protein ubiquitination
  Homolog annotation: Hit_ID=A3AV39; Match level="QueryCoverage=86%, HitCoverage=91%, E-value=0.0, Identity=51%"; Hit description =Putative uncharacterized protein
  Pfam annotation: Domain name=Arm; Domain location=502-546; Score =15.0; E_value=0.14; Accession=PF00514.14; Description=Armadillobeta -catenin-like repeat
  Pfam annotation: Domain name=Arm; Domain location=548-586; Score=6.7; E_value=1.5; Accession=PF00514.14; Description=Armadillobeta-catenin -like repeat
  Pfam annotation: Domain name=Arm; Domain location=587-630; Score=4.2; E_value=3.2; Accession=PF00514.14; Description=Armadillobeta-catenin -like repeat
  Pfam annotation: Domain name=Arm; Domain location=631-670; Score=2.5; E_value=5.3; Accession=PF00514.14; Description=Armadillobeta-catenin -like repeat
  Pfam annotation: Domain name=Arm; Domain location=671-712; Score=0.2; E_value=10; Accession=PF00514.14; Description=Armadillobeta-catenin -like repeat
  Pfam annotation: Domain name=Arm; Domain location=714-754; Score=1.9; E_value=6.4; Accession=PF00514.14; Description=Armadillobeta-catenin -like repeat
  Pfam annotation: Domain name=U-box; Domain location=285-357; Score =69.4; E_value=1.2e-17; Accession=PF04564.6; Description=U-box domain
  Pfam module annotation: Pfam domain module=Arm::Arm::Arm::Arm::Arm::Ar m::U-box; Domain location=502-546::548-586::587-630::631-670::671 -712::714-754::285-357
  Subcellular localization annotation: CTP_CleavageSite=41; ConfidenceScore=5.41e-01
MARQLVFPWSSSASTRHPWTMVIVTGQTTSSWRRWRSEVLCCVSKNGQNLHGALCNELYTVIREVLDTIPPFETTSSGCSPGLLALSSLRIAVEKSKNLLQYCSETSKFYLITLIAQELEKAAFVLDQSEKEVGDEVNQLIQNESKSNGFLDENELELLHQIAVRVGITSSVAALTERRALRRLLERAHAEEDLKKESIAACLLQLIRKYSNIFKSETTDSTNSLCSSTPCSSRSNSGLIGMHRSLSSSTDLYGNCQSLEKQLPKVGSFSSKQMKGLSRSMPLPPEELRCPISLQLIYDPVVITSGQTYERACIEKWFDSGNTTCPKTRKQLSQLLRTPNYCIKGLIASWCEQNGVPAPSGPPESPELDHMRISCLESSTCVGTDGANTVLFEETAAKDDAKSDMEIFSRQNSGEATSKLRVDEVSPENCFTLQSSKEAAPETCGVVDSLDKGKGSHQDSKDDVPVSERCEQWLHVLNKNDAESMSERLKLVEQIRILLKNDDELRDYAGANGITEPLIHFLKMAIYRGDVRSQEVATMALFNFAVNNDRNKRLLLSAGVIPLIEQMIQERETCEAAIAMYLNLSCIPEAQAIIGSSVAIPFLVNGLGEGGSRSDTCRLDALLTLYNLSLHAPNIPSLMASGIIEGLRGVLTPSSPWTDKALAVLLNLAMTRRGKEEIAASAAMVGAIVLILDNGEPGEKEKAVSCLYVICSGDDGSSQTVLQEGVIPALVSVTANGTARARDKAQRLLRLFREQRQRELELEEMQPRVELHEVASQAAARQEEEEEEEEEMALAVTPAAAASKPRGGGKKPRLRRFGFGKGDNANSLRMVNCGELEGGYEA

SEQ ID NO: 68476 - protein, 48 aa, Zea mays
  Coding DNA Sequence Number=SeqID_25101
MAHRTVWCATGFCGGKVSASDQPGPIWQRVHRTVRCTPDSPVPQGQKH

SEQ ID NO: 68477 - protein, 140 aa, Zea mays
  Coding DNA Sequence Number=SeqID_25102
MSGGDGPPPVFDGDDFPYWKIRMEAYLEAIDIGVYKAATQGFPEPRDRTNLVGDEFNYEKWNAKAKNTLFRGLCIDVFNRILGKINAHEMYMHINDKEESSSKRKDLALKANHERKGKAKIQVEEESSSDDDLDANIALM

SEQ ID NO: 68478 - protein, 158 aa, Zea mays
  Coding DNA Sequence Number=SeqID_25103
  Homolog annotation: Hit_ID=Q6ZK44; Match level="QueryCoverage=18%, HitCoverage=7%, E-value=7e-09, Identity=93%"; Hit description=Kelch repeat-containing protein-like
MVRPAAKHLVALAVVAILGIGLVADYLWASSFSASACVAANDKLLVIGGQEGDFMAKPGSPIFKCVRRSEHPFPRVPALTMLAITISRGQQKSEADSRATVLLVSLLLGLVFFLLEIHIFFLESARELRENILRRGKRSKKDPKIQISRPTAANNKHK

SEQ ID NO: 68479 - protein, 91 aa, Zea mays
  Coding DNA Sequence Number=SeqID_25104
  Homolog annotation: Hit_ID=A3AYU9; Match level="QueryCoverage=35%, HitCoverage=14%, E-value=6e-10, Identity=84%"; Hit description =Putative uncharacterized protein
MEWEEAGRMPPNMYCCFTGLCEAASQGGAIPTDAAGGNNKVKVLGGDGKVWFAVDVEADSIAFQKRGYFDDTKLCSNFKSNDDLDLVDIQI

SEQ ID NO: 68480 - protein, 529 aa, Zea mays
  Coding DNA Sequence Number=SeqID_25105
  Gene Ontology: Mol. function=phosphotransferase activity, alcohol group as acceptor; Cellular component=cytoplasm; Biological process =metabolic process
  Homolog annotation: Hit_ID=Q6YX79; Match level="QueryCoverage=31%, HitCoverage=17%, E-value=2e-54, Identity=63%"; Hit description=GHMP kinase-like protein
  Pfam annotation: Domain name=FAD_binding_6; Domain location=137-219; Score=18.5; E_value=6.5e-06; Accession=PF00970.15; Description =Oxidoreductase FAD-binding domain
  Pfam annotation: Domain name=zf-C3HC4; Domain location=293-324; Score= 8.5; E_value=0.0097; Accession=PF00097.16; Description=Zinc finger, C3HC4 type (RING finger)
  Pfam module annotation: Pfam domain module=FAD_binding_6::zf-C3HC4; Domain location=137-219::293-324
MVAVADAGSPARLNPLPNTDAEEEEVLTITPTKCSTIYLNRGIYSVRNPILHRQHLLRDCDGNHVDILPTSEFDEGPIFDEEPCFHRNLLDSDPDSPYDWVVPVIAVHSSGYTEMSHSEADKVPATAALPNLREKICCRFVDRTKLSSHVRLIHFSLPSPDQALGIPIGTHVFDCTSVDGKPCMRSYTPTSKEDEVLATTPIRRDAVQHRQSWPPPVQYGILGDGVQVWLPPWPPPVWEFWLSLKITGPQMMHSVGYFGLPVMPATCITISEIVSGSSEQIFPEIFLQSLHECRVCLSENTGRSLLQLPCHHLFCLMCMKSNCRIHVIEADLTQVWLREDAVAYFKNMFDGGLRPTSNAFNKVIDGWVKVDMLNEAHGFFDMMPEKDIDDVTVVIFYFGGQHVGWEMKTEWLSNGWLCLVCGASDTQELPLHFIKLAKDTYTSDCMFKKIGYGTVSEALVYMLSLLFVRRDYCNEEPFFRNVLEHYQCGVEMIRRDLFIGHWKHYLQSAIPLQPCFDGLINVGKIWVNY

SEQ ID NO: 68481 - protein, 87 aa, Zea mays
  Coding DNA Sequence Number=SeqID_25106
MDDSDGCGVGGSVADSIVCLSSSGGSSAVDGASGVDGCLQNYSLALFMGYFAATNFTRYGFCGISTLDTSDQGVFLPRHIGGSLALE

SEQ ID NO: 68482 - protein, 144 aa, Zea mays
  Coding DNA Sequence Number=SeqID_25107
  Gene Ontology: Mol. function=peroxidase activity
  Homolog annotation: Hit_ID=A2XUV0; Match level="QueryCoverage=92%, HitCoverage=81%, E-value=2e-49, Identity=72%"; Hit description =Putative uncharacterized protein
  Pfam annotation: Domain name=DUF212; Domain location=7-143; Score =111.5; E_value=2.5e-30; Accession=PF02681.5; Description=Divergent PAP2 family
METAASAARLVNYPLVAALLAFAVAQSSKFFTTWYKDGRWDARQFIASGGMPSSHSATVTALAVAVAIQEGFHSATFATALVFACVVMHDAFGVRLHAGKQAEVLNQIVYELPEEHPLSETKPLREILGHTVPQVELNALNYLP

SEQ ID NO: 68483 - protein, 886 aa, Zea mays
  Coding DNA Sequence Number=SeqID_25108
  Gene Ontology: Mol. function=glucose-1-phosphate adenylyltransferase activity; Cellular component=chloroplast; Biological process =glycogen biosynthetic process
  Homolog annotation: Hit_ID=Q3SAE3; Match level="QueryCoverage=26%, HitCoverage=52%, E-value=1e-105, Identity=76%"; Hit description =Glucose-1-phosphate adenylyltransferase
  Pfam annotation: Domain name=CheB_methylest; Domain location=342-485; Score=-115.4; E_value=0.05; Accession=PF01339.8; Description=CheB methylesterase
  Pfam annotation: Domain name=Extensin_2; Domain location=1-321; Score= -134.7; E_value=0.05; Accession=PF04554.4; Description=Extensin-like region
  Pfam annotation: Domain name=NTP_transferase; Domain location=591 -825; Score=146.3; E_value=8.5e-41; Accession=PF00483.14; Description= Nucleotidyl transferase
  Pfam annotation: Domain name=Trehalose_PPase; Domain location=280 -461; Score=-65.0; E_value=0.014; Accession=PF02358.7; Description =Trehalose-phosphatase
  Pfam module annotation: Pfam domain module=CheB_methylest::Extensin _2::NTP_transferase::Trehalose_PPase; Domain location=342-485::1 -321::591-825::280-461
  Subcellular localization annotation: CTP_CleavageSite=68; ConfidenceScore=5.58e-01
MDANRPRKRRLLPPLPTPQPPPAPHAPPSSALPRVAATANPAPARRIRRESSSCTPAPAPPYSRPPASARNVASPRRQQRHKESRHLDSAATSPFPGYPRPPPRRVHVRDCSPPPQPRSGSSGGAGSSTTTPWASPDWLPSLPCAVGQSGGDDSGISIASAKLSEVRDLLRGALFLPLFEGLREERPVFCLSADPQDFNREGGAPVPLASCIVSDAWQPSDQAGMRERDLGGEPIHPRRSHHPHPAAFKSASTFCSPTPPAPLALPAVQHWRGPSPSVPLADVSFSSRHRQVTAPHPTPRLGSFWGRPRLTELAAPPPAGTTIVPHWTLSWCSTTWRTSTWTGGVGREPAASPPVVYTQHHNEADPDFGSCWYKEMLDHLDNVLDNEPVVVKRGQDIVEVNPQSISKGMVDSLLSSIVRTGTDLVDGMEDAAKVFDEMLTKGEEVPSAVMYNALINSYCTGANMEGLCADKTRQLVDITDWIVDTEITLLRDNNRPKPGGNVTFGELLKSSVLTEGVRVLMLVWNARTFVECPLKQYPWEQEHMASMKEYIARFGPGSAKLVRGMKQPWPPPRAVPPRLDYSDDEASIGSAGSAGTRLYPLTKKRAKPAVPLGANYRLIDIPVNSCLNSNISKIYVLAQFNSAFLNRHLSRAYGSNIGGYKNEGFVEVLAAQPSPDNPNWFQSTADAAHRETYADITVAALPMAEKRATAFGLMKIDEEGRIIEFAEKTKGEQFTEMMVDTTILSLDDVRAKEMPYIASMGIYVFSKDVMLQLLREQFSEANDFGSEVIPGATSIVKRVQAYLYDGYWEEMWAVLIRIFAHQEKVDWMYFVPFAGTTVGLVIYSYRGSRQNPKETARVTQAMDAEAAAANSTTQVPGAFGACLQFP

SEQ ID NO: 68484 - protein, 240 aa, Zea mays
  Coding DNA Sequence Number=SeqID_25109
MSGAPEDSGFKLVTFGNFQRPLRYNSPDCPVCTGHVRCSKEGRPQELASLGFSFQPLCYNSPDCPVCTELSGASAEQRLLQAPTATCSAVIARQRAQRSGTPILAHRTLYNTCPVRHRTSRRAQKSELQRSISNGTGDVAGAPDCPVCTGLSGTNDDSYQKLKEENERLKKSLTQLKGKCIAQPSQDNRDHMVKKLETGTTVACNTSLEENVKDLRIAKRKKQKMKFNTSSKSLNHASTK

SEQ ID NO: 68485 - protein, 51 aa, Zea mays
  Coding DNA Sequence Number=SeqID_25110
MEHERAQERAKPDNKAIEISSTNHHGLGCYRKSPLVFTLGQYCYIVNVMAE

SEQ ID NO: 68486 - protein, 182 aa, Zea mays
  Coding DNA Sequence Number=SeqID_25111
  Homolog annotation: Hit_ID=Q6Z7V1; Match level="QueryCoverage=42%, HitCoverage=10%, E-value=9e-24, Identity=70%"; Hit description=LMBR1 integral membrane protein-like
MEWSELVPSGDRMTPGSRGVERGVSSDIQGQPVERRRGGPSGSERLRGVEAAERGPHAAGEGGRAGSRRGTGRGSRPSAAGEGRERSSEQRSNTGIPPTGVSATWASMKIGFLNFKANLGSKKSLPLRQDPGFVLNFSVSSPESLDDIFQRLKRRPANVPVDYLDDDDNNNTQDMDLHFQDQ

SEQ ID NO: 68487 - protein, 243 aa, Zea mays
  Coding DNA Sequence Number=SeqID_25112
  Subcellular localization annotation: CTP_CleavageSite=31; ConfidenceScore=5.26e-01
MEDQLNNTLFQLSTYIAASRLPSREWIGLVVSALVASRSPSKRDVEVTSSPLVASPASARTGSAPIRGGQSRMPSTPSLRARTQVPRRKRRGAWHGEPATGNPDVLVVAPARPHALTRRRKAQRTEEPTDNWPGSGFQPGEYWVLVSYPSLVLQVGAGRGHWFFGADKWEQPQRGGGGRLYHERLCDQQSPWPMDHLPGCFIETFDPLPPHVDTPYPGFPCMFEMMHASIHRCPNTEWGKGQS

SEQ ID NO: 68488 - protein, 228 aa, Zea mays
  Coding DNA Sequence Number=SeqID_25113
  Homolog annotation: Hit_ID=A2Y5M6; Match level="QueryCoverage=19%, HitCoverage=8%, E-value=5e-09, Identity=64%"; Hit description =Putative uncharacterized protein
MSSSSEGPPPQVSLFSLLFSEIHGSRRGADNVEVIFPESHVVGGASASSVADSTEPASTSLAAADSSALTEKAIAALSPELRAQATDPKSRQGHRTLDGSLGGGQTLSHCKGLCSVSENISLGDRARADVVCATVAVIGPRGHPRPLRDHQGNHQDVGRSHRGGGRRAALRCSVSTVRLHDLDIFDAVKITLDTWPLELPGITNVVIEVAEAANPLTAIGDRILTPAI

SEQ ID NO: 68489 - protein, 97 aa, Zea mays
  Coding DNA Sequence Number=SeqID_25114
  Subcellular localization annotation: CTP_CleavageSite=56; ConfidenceScore=5.33e-01
MDLAAVSLTLSSGTAVGAGQAALFSCQSILALNAPVIRSVGVAIWPRLLLREDWASASRSFVLMGLPAEIRSLGDVSAGGTTDSLLQSVRWFEPGYR

SEQ ID NO: 68490 - protein, 94 aa, Zea mays
  Coding DNA Sequence Number=SeqID_25115
MEVAEVGASEFYRGGAIPGLRIARIHGTPASADHGFRLVVGEYIAGASIEHGCGVRDGAHIWAEFCCGKKYQGPTMPRMPGRAHAVVAGMATIT

SEQ ID NO: 68491 - protein, 170 aa, Zea mays
  Coding DNA Sequence Number=SeqID_25116
MVTSSLMVGESEPGCGLYPSLSLKDFHHQGWGGDCTVPGLRTRVASEPLAAPASATAAGRGSSADEIARAAHGPTSNSTAFCPSLPHKFGHGRGPPSSSIRPEVTAAAVRPPGAEVVVVAAAGAGDGVPFVGLLSLRRPSPMEWGCSSSLVKETPWPLSDEPRPGVAISA

SEQ ID NO: 68492 - protein, 59 aa, Zea mays
  Coding DNA Sequence Number=SeqID_25117
MAMRRSRTTRCPPRPNEAAEALSKPRYALLPRSDHDDNISAAAAAQWLLSGCRGGCDFV

SEQ ID NO: 68493 - protein, 132 aa, Zea mays
  Coding DNA Sequence Number=SeqID_25118
MEVAEVGASEFYRGGAIPGLRIARIHGTPASADHGFRLVVGEYIAGASIEHGCGVRDGAQIWAEFRCGKKFQGPTMPHFWPYTAAGLHHTAEGGAGAAIAAAESHSAEPSTPALWELEEVAGESTHSARDAA

SEQ ID NO: 68494 - protein, 98 aa, Zea mays
  Coding DNA Sequence Number=SeqID_25119
MEETLVSAPTTFPTRVSLPSCGRADTTTEAAAMKALTTFYGYHPLKMALQSDAMAHLTNLAQTTKLTLDSREGFVVEIWDNTIDILEIQLHDVQEELE

SEQ ID NO: 68495 - protein, 127 aa, Zea mays
  Coding DNA Sequence Number=SeqID_25120
MCLCLAPPISAPTALAVSPRTLSPKLEIIGDRRREQQNLTGDPESPSSDFFHPPANMDRPKYSPPTNSPAYARGPADSDHLRHRPIPRRDRRNLPDLPGRLTRAISPSIATSLTETPPFEGKPRFYA

SEQ ID NO: 68496 - protein, 141 aa, Zea mays
  Coding DNA Sequence Number=SeqID_25121
  Subcellular localization annotation: CTP_CleavageSite=15; ConfidenceScore=5.18e-01
MWGPSHSYSQQGGVRSGHNSPRRPIRYGSGLAFNRTERVSPGAADRGEDIVVSVDEFNERTFLFVGECYPGTHALRCIGGIDWDLLRVFGGLEIAGAGLVSIWGTLEGNLLELGQLLGCSQRRGKLTFGLLVGVGSLEEGE

SEQ ID NO: 68497 - protein, 230 aa, Zea mays
  Coding DNA Sequence Number=SeqID_25122
MKLWKETSRSSKTTTSSRRGWLDLDTLHESPSSPSYPPVLLSVRFAVPWPVPPAPPPGAPASGVAAGGEPDDGGGDDSSSHDTDFSANQEPEGWVARPITRDAARRCHFHDALDTLLRRALNRRTWSIEYRCVVYQHSRGVYPDRWEATCLVRRPENSLQGAEVCSEHYSISERVSAEAAMQDAARRALSHYCSVLGGVADGLNLKYYPRRPSGNTGGVIVSPVGEDNPR

SEQ ID NO: 68498 - protein, 208 aa, Zea mays
  Coding DNA Sequence Number=SeqID_25123
  Gene Ontology: Mol. function=kinase activity; Cellular component =ornithine carbamoyltransferase complex; Biological process=amino acid metabolic process
  Homolog annotation: Hit_ID=Q6QP54; Match level="QueryCoverage=26%, HitCoverage=19%, E-value=1e-10, Identity=64%"; Hit description =Putative kinase
MGSQSPMYMPSWLSERCCCPVHPEVGRGGDSSEVEAESEPWGRARRRPSSGVEAESEPWGRARRRPSSGVEAESEPWGRVRRSPSSEVEAESEPWGRARRSPSSEVEAESEPWGWARRSPSSEVEAKSEPWGRARQRPSSEVEVESEPWGRARRRPSSEAETGAEPWGRARWSFLWCPRLDLAAVGLTLASGTAVGAGQAALFSCQVS

SEQ ID NO: 68499 - protein, 57 aa, Zea mays
  Coding DNA Sequence Number=SeqID_25124
MESHDLRAERESQLMGGNETDGFGYDYGTGCQHCNHYSGEDEAVEGDFQEFQDYDEF

SEQ ID NO: 68500 - protein, 116 aa, Zea mays
  Coding DNA Sequence Number=SeqID_25125
MVRPEHSPPMSSPSCARGPTDSDHRQQRADHRHDRRDLPDLCGCFTGARSPPMSRLRHTAHKSVIPFLSSCLVECPLCRIVSGQSSHLERLYHRLREEQECQHQEVESARRPQQEV

SEQ ID NO: 68501 - protein, 94 aa, Zea mays
  Coding DNA Sequence Number=SeqID_25126
MEVAEVGASEFYRGGAIPGLRIARIHGTPASADHGFRLVVGEYIAGASIEHGCGVRDGAQIWAEFRCGKKFQGPTMPRMPGRAHAVVAGMATIT

SEQ ID NO: 68502 - protein, 175 aa, Zea mays
  Coding DNA Sequence Number=SeqID_25127
MRVMTRLRHTARKSVIPFLPSRLAERSLCRPVTGQSSHLERLHHRLHKELEHRCQELEQQGSSSMPQYELESVRHCSTVSPLEAPLGALAVEVATGGDPNDGDNDDSSSSHITDLLEEQEPEGWVARPITRDAAHGCHFHDSLDTLLHRALDWHTWSIEYHRMVYQHNRGLYPDR

SEQ ID NO: 68503 - protein, 149 aa, Zea mays
  Coding DNA Sequence Number=SeqID_25128
MARVACTLRGKRLDGGVFVLLVGVNSVWLSEVLRTMTSIGGPNTLGGSVISGDMARTKTTQRKSTGPQSVPRHQLASRHEGSSSGSNNTIGELEARVDRLRSELCHRCRERARDSRRIAELSTEVNRLQYEISERGTTVDWAVNSRSFA

SEQ ID NO: 68504 - protein, 67 aa, Zea mays
  Coding DNA Sequence Number=SeqID_25129
MPGVSAVSPLEIEVIGARNLLPGVFMMWSHHADAVTDGELGLDGCFSSMPPSWSAWPPVPRRRLVGL

SEQ ID NO: 68505 - protein, 256 aa, Zea mays
  Coding DNA Sequence Number=SeqID_25130
MDAQYDVTQEWLDRVKIARKGLRGTKRRFNRGPGQVQPGSREVQPGSKKSSAGSDLQSASLTGRLSVSLPQAVEPVLGAVQPVLVNFDQSAVSLRVSLAVRLADRLPDIDPRAIDLAMKIAERMFLKMKEDEAKNKIEEEENDRWRPNDESTSSQGSSFKSTSHMCFIANGSDSESESENEEEHESDSEDEDDLQKFFAQLSKKNRMSLLKLMKRAEEQKEMLHKQEDVLIEKIKDLEKLTKEHEKLKCSHDDLVQ

SEQ ID NO: 68506 - protein, 193 aa, Zea mays
  Coding DNA Sequence Number=SeqID_25131
  Gene Ontology: Mol. function=carboxyl- or carbamoyltransferase activity; Cellular component=ornithine carbamoyltransferase complex; Biological process=amino acid metabolic process
  Homolog annotation: Hit_ID=Q8SA97; Match level="QueryCoverage=30%, HitCoverage=11%, E-value=1e-09, Identity=55%"; Hit description =Ornithine carbamoyltransferase
MGGLSAAIVVVARRWKEYHVVAAVEGHELKSPEMEHRPGSERLLETAHLELDGKLFVNTQHAPTWRANCRRFETEGSLGPTSWATWRLLQSQSRVCLPWPRPSPSPWVGRGGGRSAEARAEFEPWGRAKQSSSSSGAEPESEPWVGRSGVHRLLGLSPSPSPGSGGAEFAVFRDLARVRALGRAERSSPSSGT

SEQ ID NO: 68507 - protein, 95 aa, Zea mays
  Coding DNA Sequence Number=SeqID_25132
MKAGEHREDKEGESFVRFGHGGGPDSFRITVKVRTCGETKRVGFGSHWPWDRRAELVEKGDQPPGTSNCITFESQRIGDASGGIRAVRLAAGRNP

SEQ ID NO: 68508 - protein, 129 aa, Zea mays
  Coding DNA Sequence Number=SeqID_25133
MEAYLVTHNQRRALRIQEPASSNLVQSIRAEDPQILEVFPQAMNKQEHPESSQDSPPELFEPLTMKKIPAPSREIKEAASTPPAPPPFEELQEPVPLEEEFDPVLPSQSPPEEVINISSLLTHPGDISD

SEQ ID NO: 68509 - protein, 220 aa, Zea mays
  Coding DNA Sequence Number=SeqID_25134
  Homolog annotation: Hit_ID=A2YHX5; Match level="QueryCoverage=57%, HitCoverage=37%, E-value=2e-58, Identity=63%"; Hit description =Putative uncharacterized protein
  Pfam annotation: Domain name=mTERF; Domain location=1-165; Score= -73.3; E_value=0.0025; Accession=PF02536.5; Description=mTERF
MARWLSRGSAKTNACLLHVVASQRTRVEINPSQAVIFLLTKGGVKQDDIGKVIALDPQLLGCSIAHKLEVSVKYFRSLGIYHFVLGQMIADFPTLLRYNVDILRPKYQYLRRVMVRPLKDLIEFPRFFSYSLEDRIEPRHRTLVANRINMKLRYMLTGSDEEFAQRVREAVERRARFEAGKAAGLETFSCSSETSSDAEATEAAACQNSTDVVGVLQKQA

SEQ ID NO: 68510 - protein, 54 aa, Zea mays
  Coding DNA Sequence Number=SeqID_25135
MPRLLDYRTSVAIRGSPARDPTVPIKCDDHRDRERGYFEKGSFSAKETGPEPSY

SEQ ID NO: 68511 - protein, 151 aa, Zea mays
  Coding DNA Sequence Number=SeqID_25136
MGKNNKRKREPTPPSEEFGDSEYSEEEFSSESEGSPAPVSPPASSDDSDDSQGIAAEVWTYIRAVERAGLEGSDESECSSDEEDSDGGDEGEDDDDDDDDDDDGDGGGSGSGRGGGDGSRDSTKGDSRGSTKGSSRGSTKGGGGGRGRASG

SEQ ID NO: 68512 - protein, 356 aa, Zea mays
  Coding DNA Sequence Number=SeqID_25137
MATTTVAKGDVGALEDPWSKFFAGGEIASAAAAKGVAASVAQQPKYVAAFAERIASGALTSEFSAERRRLEGRIERLRTQHTEAVMNKSAAENKSRNLLVKLTAADTEKEDLSHRLVEEREGTEKARAEAQAARAEADVVRAEASLALKRAADAESGVKSLGSYTEKTEASTCAGVERAHTMFVDAYRELGARIAPFDRSSEEVGLRFLGWLQEELESLSSIVMGLMSYASLVTCEGAANALSLEGCRHFEVFDRVTEDFDRGIFQVGDEVLKRSAGALYDRMWGPHGRDTVWERADRALAQMMNEEEVEDFDGLESSMTWTESAEAGVEGHSAPQAGPDEDSTAASAPAQVEGSR

SEQ ID NO: 68513 - protein, 336 aa, Zea mays
  Coding DNA Sequence Number=SeqID_25138
MVTTSFWVGKSKPGCDLGPTLSFKDVHHPRWGGGHAEPALYLPRGSAACRSRRPGFRRPLLPEGDRRAVCTGGPPMMPRAVRAAFVFWVGPAFALGRRPRAEADAPLVWEDLSGDLPGAGVPCRRRRGGGGSRSPRRRRDHCHHPRPGPPCRRACPRPSSVGGSEGKITAAPAHCRRSQNGRRRAARRSSVAPQAFPMEWGRSYPRRGNRSSVCNGISNAEPTPKSISRGLGSGWRPWEPVGRGPRGNRPSRLLGPDSRRSPWSASSSEAGSDFAEDAVDAEGATAPFSVKTRACRIRSSCSVCLLRPPRPEKHTLAVLAKLHLFFLLFRASGLCR

SEQ ID NO: 68514 - protein, 678 aa, Zea mays
  Coding DNA Sequence Number=SeqID_25139
  Gene Ontology: Mol. function=metal ion binding; Biological process =RNA-dependent DNA replication
  Homolog annotation: Hit_ID=Q5ZE21; Match level="QueryCoverage=92%, HitCoverage=74%, E-value=9e-30, Identity=23%"; Hit description =Putative uncharacterized protein P0410E03.2
  Pfam annotation: Domain name=DUF594; Domain location=596-653; Score =56.3; E_value=1.1e-13; Accession=PF04578.4; Description=Protein of unknown function, DUF594
MDPPGSNPDGVVNMTRAMQALSPLLKHPRATIVKVEGLVLAAAGLLLLQLFLGFYRRRWRSSVLSTVLRASSKLMEALIIYTLGAMQSSPIKNSSYPVWAAFLVMASAGTTAVQDYDFCGSFYNKYMEGGVDMIKYFFYWIMFGLLLDPNTYTFKTTLDLQRHLKNSRASSNCVMALFYFALFTKLCESIGLAAVGYKMQKSNLFFRPNPRKIRFGIQAVETEEYDPQSMKGNGYAVCYRPFGGGGLVTIDQLIARRFFGLVVQRPKTIPEIKDHDFVFKKLLPSEEHFKRAFRIIEAELGFCYDYFFTKYYYTFAATNQLPVPFLQSLALAKITLILTVGVFAVRNSLVLETPNPIIQVRISRADYIITLLLLVIALTVELVHAAFYLASDWAQVSLATMYVKRYWYEISPSIFATVIAFLRRVTFSGQLMRNRMKQHSLMRNGIKQQDPVEVSDAVKRAVARSLISTYGGNDPTKDDDAVETSQWQDQMPFHTYSCELKGLSQLEVMLIWHIATEHCDISSGPAPTNRTTRDDDRGVAVHLSRYCAYLIGSVPELLPYHEADIAELALKVVGEPTEQEDDARNIFHKGIELGKQLERMADGDRWKALQDFWAKTTIHAAKSHYTTKQHMQHLESGGEFLTHIWALLAHAGILYLNPVNNEDQEDQANLGSGPSAAA

SEQ ID NO: 68515 - protein, 293 aa, Zea mays
  Coding DNA Sequence Number=SeqID_25140
MVEMYQLSRSCVPPTTRRKDGGSPPSGGLGGGKTRCISEREDMVAFQGGHPPLKASSPYSRPQPSQAESSPTHSKVLPYGAGAGSHKSCKPTQGRRSQTAVRGAYDRPAVTSDPPLLPRPAGERVGGHAGGMQPRQVGALLRLPTRPAWRPRPMRHATGAPTASCMQLHRHLRHHRASSTAEPIPRLEATQCTTQQRQPGATVSAAKNGPAVMAAAGEQGPGKGDTPKRILPREGIRLRASLLIRGSKAGPPKGSTAASDRVGPTPTTGQRFEGRPPEGFHGRLRLLGLRAHY

SEQ ID NO: 68516 - protein, 182 aa, Zea mays
  Coding DNA Sequence Number=SeqID_25141
  Subcellular localization annotation: CTP_CleavageSite=73; ConfidenceScore=5.11e-01
MAALGPLRKQEDVSKDPTTPTAVPPPGSIAPPTATTSHQLGAKISPAATTASGSSPYAYKRKDQGPLREGWPRGDEDENRRSLGAARSLSRVDACNPLLQAHPTWARDEHEGYGIPTSLTLVSGRLALPPFALALALDPSGLGHAATFTRRPRDPPVSKRQQYPLRPKKPRTACAERSAGQS

SEQ ID NO: 68517 - protein, 634 aa, Zea mays
  Coding DNA Sequence Number=SeqID_25142
  Gene Ontology: Mol. function=metal ion binding; Biological process =RNA-dependent DNA replication
  Homolog annotation: Hit_ID=Q5ZE21; Match level="QueryCoverage=88%, HitCoverage=64%, E-value=5e-35, Identity=26%"; Hit description =Putative uncharacterized protein P0410E03.2
MTRAMQALSPWLKHPRRTIAQVEGLVLVAAALLLLQLFLGFFRRRYRCRNSFVNTVLGASSKLMEALIIYTLGTMQSSPIKNSSYPVWAVFLIMASSGTTAVQYYDFCDSVNNKCMEAVVTTIKYVFYYIMFLLLLNPNTYTLKAALGLSRHHKKPRASSSCVVALFYFALVTKAWESFIVVYLVYRKQKPIHLIPTKIRRRRTQKEGASARKATTETDSDPRSVKGYEYAVCYRLGGGGLVTIDQIWDRLNANSAACLKDLCLSYALFVQLKNRRFFGLVRPKTSSARKDHDFVFKKLLPSCEGDFKRAFRIIEAELGFCYDFFFTKYYTFVLGKIVLILIVGVFAVSNSLVLETPNPLIEVHISRGDYIITLLLLGIALIVELVHTAFYLASDWAQVALATMYVKKQWYEISTSIFGAVTTFLRRVTFSGQPTMMRNRMKQHSVILGQRQQPGPVEVSDAVKRAVARSLISTYGGKYEASQWQEQMPFDRYSWALKGLSQLEVMLIWHVATEYCDISGRPTRRDDDERGIAVNLSRYCAYLIVSVPDLLPYHKGDIEEMAKKVMEERTELSELGSEIYDEMKDLEGTGEEDDPRKIFQKGVKLGSFRNLPYARSNLARESQVLVVMDGGEKS

SEQ ID NO: 68518 - protein, 121 aa, Zea mays
  Coding DNA Sequence Number=SeqID_25143
MEKALAAPVTDVMTASSYIWLPRKRQLPNSNVGTKGATDYCRSHPPLLPQAIVLQLLIIGIGLPIIDLADPIHLTHKAKMDNAWQCSPSRLRLNRRTSPHNPNFPNNYVIGSRHRTLNGAQ

SEQ ID NO: 68519 - protein, 352 aa, Zea mays
  Coding DNA Sequence Number=SeqID_25144
  Gene Ontology: Mol. function=kinase activity
  Homolog annotation: Hit_ID=Q6QP54; Match level="QueryCoverage=22%, HitCoverage=28%, E-value=3e-24, Identity=71%"; Hit description =Putative kinase
MKSRMEPGLPSPEKSQQMLGSSSSSDPEGPYEGDVQQALRKRAGVVRSLGIGVPRGDGARLRLRREVDTRCAPRWGACAVDSLDSQRGAASCLALVALPSPPSAGKKAGQTRRLFFHHAGKTSSIPPPAGGLSTAIVVVARRWKEYHVVAAVEGHELKTPETEHRPGSERLLETAHLELDGKPFVNTQQAPTWRANCRRFETGGSLGRRVNVAACPSPDGSSARASAKGGRARRPETGVREVGIPRPSCSSRAQVGGLRAAVVTEHAGRHHCLSGGASEMGHRSCSLRPESARGRVMMAPSVGVVGLRPRLGDVEAPPKPRSSLSSMAEAESEPLGRARRRSSAEARAESEP

SEQ ID NO: 68520 - protein, 249 aa, Zea mays
  Coding DNA Sequence Number=SeqID_25145
MASEDLPVRFGAAGARWCGVGGQVDVTVGAEVVAAGESFSADETVSATHGPTSGSLALISGSRPPRGDANESLPAAAFVLGPSLLLQRSLVTSEVSVSRRRRSPSARSALPPEASLAQLKKNPRPLCDELEPEAAVSAWTEAELARKEASSAGAWPGRPLAGPTLKSGCRGHEPGWSSGDSWLRLRSGRSSRLLGPGSWRRPRRRWPRRGADIFLRGGDPSTVSPSEAGSDSAEGGVDTEGAAARPIDV

SEQ ID NO: 68521 - protein, 160 aa, Zea mays
  Coding DNA Sequence Number=SeqID_25146
  Gene Ontology: Mol. function=triacylglycerol lipase activity; Biological process=lipid metabolic process
  Homolog annotation: Hit_ID=A7NXM8; Match level="QueryCoverage=86%, HitCoverage=18%, E-value=9e-45, Identity=65%"; Hit description =Chromosome chr5 scaffold_2, whole genome shotgun sequence
MDALTNSNQKKVKDSWRIVNHRDIIPTVPRLMGYCHVEAPVYLKFGDAKDAPVNNSILDDEDQGDVIGEYTPDVLVTEFMKGEKQLVEKLLQTEINLLRSIRDGSALMQHMEDFYYVTLLEVFENYFCFSHTKLCQKLLKNVRSSYQVADTANDEYQLTA

SEQ ID NO: 68522 - protein, 499 aa, Zea mays
  Coding DNA Sequence Number=SeqID_25147
  Gene Ontology: Mol. function=triacylglycerol lipase activity; Biological process=lipid metabolic process
  Homolog annotation: Hit_ID=A7NXM8; Match level="QueryCoverage=84%, HitCoverage=70%, E-value=2e-70, Identity=38%"; Hit description =Chromosome chr5 scaffold_2, whole genome shotgun sequence
  Pfam annotation: Domain name=Lipase_3; Domain location=356-455; Score= -18.7; E_value=0.016; Accession=PF01764.16; Description=Lipase (class 3)
MSTVVKYKSYDDIEREKQWWRIPFVSDFLVKSSLGSALRMVLGSESINASQFVKSAFGQLSSFTYTYLPKPSSLESGVDVSKSDEESSDGPTNSNELQQQNIDSEIISDSHSHSEVQSPTAVVNSEGNSSSDMKKSDEYFWRALNNVLNQNVLQNFGFSLPEVKQLGGFDLLSSLGLKSRNIAEQEYLESGLAMADTSTNGGSETTSENTVGVENENRTLTTKEEVQSSFPDINKVSRDVLSQTENILGALMILSKNLSPHDQSVPTTGTNGKYDMIREEQGASAADSVQKADTVSSALLSIDAQEAEDMRRLFASAETAMEAWAMLATSLGRNSFIKSDFEKICFLDNISTDTQVAIWCDSSRRRLNPERLGGDFKQEVQVHSGFLGAYDSVRNRIMTLIKYAIGYDDEEDAENIPRWHVYVTGHSLGGALATLLALELSSSQMAKHHLVHCLWKQQRRGELHVIILREEKKSKRTKIQCLEGNQNQLDQIGTQPRPY

SEQ ID NO: 68523 - protein, 239 aa, Zea mays
  Coding DNA Sequence Number=SeqID_25148
  Gene Ontology: Mol. function=protein serine/threonine kinase activity; Biological process=protein amino acid phosphorylation
MDKCGQIERGHTIEREVGGREHASKTSLPTMMVGAMPVGAIDPQTVRWACGARSKFAEDAGWRHASKAAVADSSADTRDAVAAATRFACLITEETKKSNCAVASTRQPLRARSSPWVLGYGSDPVDADERRPRSASSEVSDKIESLAMYDWSGPLRTKARHNFYRLGEHERARLPLRRRHRPRKRPCDRPQIFLTKRATITGHEGRHSTRMTTSQQSNAKKGIKDLRYRYTEIQTYNLI

SEQ ID NO: 68524 - protein, 36 aa, Zea mays
  Coding DNA Sequence Number=SeqID_25149
MAKEGGSREKCAMLGCGRKEQKWLALRMQKQAFENK

SEQ ID NO: 68525 - protein, 241 aa, Zea mays
  Coding DNA Sequence Number=SeqID_25150
MVTTSLMVGRSKPGCGLCPALSFKDLHHPCWGGGRGEPGPAFAWVGVPLPPASGGGNHPLALQRRRPPAMSGKANCCCLARVQHSVLCPGDGGQPHRGVSQHVVRREGGTRVLGRSHSRFRDEDGTGAHGSASICAANLQAGPAVSSILNTGSFGTNSCADSVCPPRQPHPEHGGPRPGIFSTRDYPTIKRVHSNPNPPPSLCRDPTNHRAPPVWVRDIRCCGLSPALVIGVVRVVVGVRH

SEQ ID NO: 68526 - protein, 150 aa, Zea mays
  Coding DNA Sequence Number=SeqID_25151
MSRSRRQRCQHGQRQSWLEKRLRRPEPGRAVHWLDQRRSRVAEAMSRADVLGGQLAEATERPVEPSARVGFLEETPAAMAQARCRQVPSRWRSSDRVAVRENEEEIEVTEEKTPPPSESQAGNCFYFDICGSEPDSPTNEGKPRCICHLP

SEQ ID NO: 68527 - protein, 156 aa, Zea mays
  Coding DNA Sequence Number=SeqID_25152
MVKEDEKISKKTKSTPELKAAVSKKRKAEDPKPKITEAAEETPSTPAAADIAEILKWRWLWGIYSPQLPIQPLGQADVDGRPGQCPVRQPHHPNIRVLTILTVGALSSCGTGHSGAAPDRHYSLSGAPLTGGADSARTVLHCSSDFTAFAVDRCAK

SEQ ID NO: 68528 - protein, 146 aa, Zea mays
  Coding DNA Sequence Number=SeqID_25153
MQAACNCTKGAHPFDFDASSMEAQTSCNWRAGYYVRETAPPLAPVPRLLDCGTGTTTRGNPAHGPTVPTEHIDHGSVSRGRRRDGRYGQKWAGSNGGGTRKGDTPKGILLREGSGPRALLLIRGSKAGPSEGFDSRLRPLGLRAHY

SEQ ID NO: 68529 - protein, 193 aa, Zea mays
  Coding DNA Sequence Number=SeqID_25154
MKVELELSNLSDIVLTLRRLSVEPDPIERLRLTSVFQRMTAKKLALLHSEDTLFWIQLETSLPELANVSCKVKNPDSHSAEASSSIFEPLGHPKVAISTTGSYEACLWLILFLHPNLVIAQEQSNKLKSSEEAIASTRESILGKGNSSFGHALLSSLWPSWKLPDSREQQWALVPKAGSGEKAALGKSSAAYG

SEQ ID NO: 68530 - protein, 41 aa, Zea mays
  Coding DNA Sequence Number=SeqID_25155
MAPAANGRLREQQATRGQANGRMVTLDCPDHLFSPSRCSQA

SEQ ID NO: 68531 - protein, 209 aa, Zea mays
  Coding DNA Sequence Number=SeqID_25156
MDMTSELELCEIQDKKLSTWLVPQLRYTLSRARYPSTCKTNKHIQKITRKGIVDLDLLPPLNKRRRGGVEAVRRQSPVPYRGASHREAGEDAARAKAVHQSSTVESLSSQTPEAGRQNPQPLYLICPRPGVKIRRLGNGELMEGLRLSLEMKLSLSCRVGCGSSASAPGCVTQNTVCTLIAAVVVSSVERLDRKSVRSWWTDEEPGGWA

SEQ ID NO: 68532 - protein, 626 aa, Zea mays
  Coding DNA Sequence Number=SeqID_25157
  Gene Ontology: Mol. function=hydrolase activity, hydrolyzing O -glycosyl compounds; Cellular component=integral to membrane; Biological process=cell wall organization and biogenesis
  Homolog annotation: Hit_ID=Q7XUK4; Match level="QueryCoverage=97%, HitCoverage=97%, E-value=0.0, Identity=68%"; Hit description =Endoglucanase 12
  Pfam annotation: Domain name=Glyco_hydro_9; Domain location=111-589; Score=619.6; E_value=2.7e-183; Accession=PF00759.10; Description =Glycosyl hydrolase family 9
MHSVNHWGGSFDITTDVASEDDDCRNTDVDAGALSARQHHELDETQQGWLLSPEGAKKRSRHVDLGCVVVKRKVLRWAFWGLVAGFVLVGLPVTVYKSIPHRPPRPPPPDRYAEALHKALLFFNAQKSGRIPRNNGIPWRGDSGLKDGSDAKDVKGGLVGGYYDAGDNIKFHFPMAFSMTLLSWSVIEYSAKYKAVEEHDHVRELIKWGTDYLLRTFNSSASTIGHVYAQVGAAKIKSRTPDDHYCWNRPEDMAYPRPSLAVSSAPDLGGEIAAALAAASIAFRDDDDAYSKKLVRSAVTMFEFATRDWADEHATYSRHRPEVEPFYNSTSYWDEYVWAAAWMYYATGNASYVSFATDPRLAERARAFYDDVLDFSVFSWDNKLPGAGLLLSRLRMFLNPGYPYEQSLVRYHMETGLDMCKYLRRFGAFNFTGGGLALFNHGRGQPLQYVVANSFLAALFADYMEAINVPGWYCGPNFMPIEDLRAFAKSQLNYILGDNPRKTSYVVGFGNKYPRHVHHRGASTPHSRVKYSCTGGYRWRDTKKADPNVITGAMVGGPDRNDRFNDSRMAFGHTEPTLVGNAGLVAALVAITSSGRGVGAVDKNSMFSAVQPLFPATPPPPPVWKP

SEQ ID NO: 68533 - protein, 641 aa, Zea mays
  Coding DNA Sequence Number=SeqID_25158
MPSSSSSTDATPPAAASSEETLSNVMVEELRAGDSVEFGVSRMTSARIEDMQRLGYFGGGVARAPGTEEVPEPEGELVVFEAFFVAGLRLPAHRVFELNQLPYDGYPGQDEADRRGKKPAVETGGDPALVAAASSKKRKLVMDKDRQGAARKRQATVRVHEARPKRQRGTAKAEASGGGKPPLLAKVGASAPGKAPEVTVGAGGPKLTKVVPSVSGVAEAAKAARTLPPPGKRVADFGTEINVEDYLGGSDEGPLALVVPGVAIATAAPAPKAGGETLGAGGEVSALALVRDEAGVATRRLKGATEALSRATEALSQVADFTSRTASGALTAALSAEVERLRTQHADAVREKSASDSKCRKLAEKVAALEKEKADLRRQLAAERREANEAIAKEQAAQAEARLARAEGNIAKELAGELQRRLTALESRAEGAEAAMRAEAERTRTQLMTAYRELGVRTGDFEVPEREAGLRCLEWVQEELQELPTVLAGLMSFTSLVTCEAAMNALSREGCRHFEALDQADDDFGRDIFEVEDPVVKESAGALYDRMWGSYGCEVVRARAEAARAQAERGERVDDFGALNSALPDPETTPAEAATGVAPGTDPGDCGRCTRRPCTCCDRRRPSPKGGRRRARCPRSCCAER

SEQ ID NO: 68534 - protein, 313 aa, Zea mays
  Coding DNA Sequence Number=SeqID_25159
  Subcellular localization annotation: CTP_CleavageSite=68; ConfidenceScore=5.52e-01
MQAACNSAKWARFSDSQHAQHGGPGPRVMQPARRMLRACNSTATRATTVPPRLWSQYRGSRSSGHVVSQAHVPSGGSERTLSHGVKTTRLCSVPRTARACATAAPPTTRPVALTPWRDRRRLWQEKRATLRLRHNDRVKKAASDRVGPTPTTGQRFEDRPLGKGSTAASGYSGSAPITDQGGNDLVTESHRREASSPRTPSPGDRVRQITRSSPETPCSAPIEGNMALSPLLLAERRRRGVCKKVEYVPDRPLALCRGSGAALANPAPAEPLTASTYQPENLGPDRTPGLRPARMRDDQTSRSITRGIKTSEE

SEQ ID NO: 68535 - protein, 101 aa, Zea mays
  Coding DNA Sequence Number=SeqID_25160
MTEFGTPKRWMMFVKNATACSDLMLGLSGQMRLSCVELTPLVGAYNPSGVDHCGRPVEALSEGVPDKGSRCCMVRGLPVRVRRDPIPLSLDAQGLTVGGRG

SEQ ID NO: 68536 - protein, 410 aa, Zea mays
  Coding DNA Sequence Number=SeqID_25161
  Homolog annotation: Hit_ID=A2ZZV9; Match level="QueryCoverage=99%, HitCoverage=94%, E-value=5e-53, Identity=70%"; Hit description =Putative uncharacterized protein
  Pfam annotation: Domain name=DUF828; Domain location=61-251; Score =5.1; E_value=3.7e-09; Accession=PF05703.2; Description=Plant protein of unknown function (DUF828)
  Pfam annotation: Domain name=PH_2; Domain location=312-410; Score =5.6; E_value=0.00029; Accession=PF08458.1; Description=Plant pleckstrin homology-like region
  Pfam module annotation: Pfam domain module=DUF828::PH_2; Domain location=61-251::312-410
MEPERGLIAYEGPPPDSTDLLSSAWCSSAIQVLDTGGHKECSMALVEHPVMALGNDRNDVLAKSDRSLVVDNSSFSTAQWKYDDLKSWIWLQKAIHPELDYDLCLKKKWLPRKMTAWNGISLKKWVKERKQKRKEEARLQRAEVHAAVSVAGVAAALAAIAAENAAPRRAPGMRETALASAAALVAAQCARVAEAAGASRDQVAAAVDAARASTDDSSVITLTAAAATCMCLSFATRCRVPWLDTVSPKTLICDVRLTALRGAATLRGRRSGSGGHGQNERAEHAGPALSQDDLDFDFNHARSRAALAKGDEMFVAMPDGKWKLHTVSAASNKRGEIVLRIKKTNLVMAFSHAKESVIHDVQPCSPEKPSPHEGATYPVEVSTNKGKVELRTDDYGVYKRWVATLSHMLV

SEQ ID NO: 68537 - protein, 453 aa, Zea mays
  Coding DNA Sequence Number=SeqID_25162
MMTTSSMVGRSKPGCGLCPALSFKDLHHPCCGGGRAEPEFYLPHGPAGHLFLQHSGERALTGLAEGADFDNAGPVGRKRRQLQHAWLAGSAGSGAASGAISHHWGGAWLSAHRTGGYCVVRTGGSSKTSHAARAAFVFLDCLVLTPARCLRVEAGAAAIRWRSAGAQVAAVVGAEVVVARGGFSTDETVGATRRQTSGSLALTACPRPSCGDMGEGLPTAAFALRSSLLLFSCLRRRSLSLLLQWSPASHPELVIPQALRCGGCSYPREWNRSSVCNGTLSAGNPRLLCDEPEPKVAVSAWTEAESARKGASSAQEQVASQAEENPCGDPGCDGPSAVLASSFEVEILPPVSPSKAGPDPAEGGNDARVLLLPLSMSEPAGTDLFVGSRIACPSESYFSRKVMSEDPAIEVVEKRERHSGKRLFLRKILTQRGFPLLAPEGGSGFAEARLTLP

SEQ ID NO: 68538 - protein, 323 aa, Zea mays
  Coding DNA Sequence Number=SeqID_25163
  Gene Ontology: Mol. function=zinc ion binding; Cellular component =intracellular; Biological process=inflorescence development
  Homolog annotation: Hit_ID=Q8L4X3; Match level="QueryCoverage=92%, HitCoverage=91%, E-value=9e-86, Identity=59%"; Hit description =CONSTANS-like protein
  Pfam annotation: Domain name=CCT; Domain location=236-280; Score =90.5; E_value=5.5e-24; Accession=PF06203.5; Description=CCT motif
  Pfam annotation: Domain name=CCT_2; Domain location=233-260; Score =17.2; E_value=0.022; Accession=PF09425.1; Description=Divergent CCT motif
  Pfam annotation: Domain name=PHD; Domain location=21-68; Score=-6.4; E_value=0.074; Accession=PF00628.20; Description=PHD-finger
  Pfam annotation: Domain name=zf-B_box; Domain location=17-61; Score =41.7; E_value=2.6e-09; Accession=PF00643.15; Description=B-box zinc finger
  Pfam annotation: Domain name=zf-B_box; Domain location=62-104; Score =44.3; E_value=4.2e-10; Accession=PF00643.15; Description=B-box zinc finger
  Pfam module annotation: Pfam domain module=CCT::CCT_2::PHD::zf-B _box::zf-B_box; Domain location=236-280::233-260::21-68::17-61::62-104
MKGDEKSAGGAPAYWGLGARPCDACGAEAARLYCRADAAFLCAGCDARAHGAGSRHARVWLCEVCEHAPAAVTCRADAAALCASCDADIHSANPLASRHERLPVAPFFGELADAPKPFASSAAVPKAADDDGSNEAEAASWLLPEPDHGQKEGATTEVFFADSDPYLDLDFARSMDDIKTIGVQGGPPELDLAGAKLFYSDDSMNHSVSSSEAAVVPDAVAGAAPEVAVVCRGLEREARLMRYREKRKSRRFDKTIRYASRKAYAETRPRIKGRFAKRTPGAGADGEEPLEEHEEIYSSAAAAVAALMAPGGADADYGVVPTH

SEQ ID NO: 68539 - protein, 605 aa, Zea mays
  Coding DNA Sequence Number=SeqID_25164
  Gene Ontology: Mol. function=DNA binding; Cellular component=nucleus; Biological process='de novo' pyrimidine base biosynthetic process
  Homolog annotation: Hit_ID=Q5VS69; Match level="QueryCoverage=20%, HitCoverage=45%, E-value=7e-10, Identity=35%"; Hit description =Putative MYB29 protein
  Pfam annotation: Domain name=Pribosyltran; Domain location=474-603; Score=-13.8; E_value=0.059; Accession=PF00156.18; Description =Phosphoribosyl transferase domain
  Pfam annotation: Domain name=UPF0016; Domain location=182-224; Score=- 20.4; E_value=0.083; Accession=PF01169.10; Description=Uncharacterized protein family UPF0016
  Pfam module annotation: Pfam domain module=Pribosyltran::UPF0016; Domain location=474-603::182-224
MVSDAEGNSVADEQEVTPRENFVADEQEREETWELKLSPRAPAPANAAMDGGCSGFRLYPAWPPPRTSSRMPAHGRSASPSTNKHAPAPDSRSLSHALARPPPPRHAQTIVPPPAPSIPIPLRSSLQIRSPRPQCLASAALPLSHDPRDRNRGAPPPSSKMAPSLLGVTFPPSHFLFFIQGFTKSLAMTVLSEIGDKTFFPAAVRAIHSPTLSLGRSARSTPLICLTSMEVSDLPLPNSPQCPRPDVPLPRPSPACSSPPAARAPAALPLPRDALCSPSTPTPHARHPRCRDARLTPLPLRRRHVARIGMVVRIGATWELGRMREMQFILISPTIYMFILLSPSTLDGNGEQAAATLRSQRSPQHPRSWKVRRALPFFQRALIVIGRRLKHVSAQRLLYRGTARPPWDDTLAQSLSAGATNNCSGSTESPSGTWPTSEAVEQEIMVPSLRAYVHNSSSLHMTASFFSLLDSFHFCPSDTSAPSQLGNLASALTASKPFPSRHQRDTIPSLFKPFPTGDLSLPHFPTVHMSRGGFHQAEAPYQSALAARVVAWAIDFSFSFLIIEDLVTSGSSMLEIAAPLRVEGLVVADAIVVVNPEQGDRKNLS

SEQ ID NO: 68540 - protein, 526 aa, Zea mays
  Coding DNA Sequence Number=SeqID_25165
  Subcellular localization annotation: CTP_CleavageSite=32; ConfidenceScore=5.02e-01
MGEGLRSNRRLTSGSPPPALTTTTMTPAPDGRAAAAQASGWALLQSCPRPRRRSRGEDKYEEPEARSADGGGGPVGDEDFSSRLRLGTDGRGHQPSGRSPLKSSRTSGAPASTRTPTGGAAGSHDDDSYTLEVTTPAVDQPHVVEVQAARRAGGRPLPRTPWERVTREPVREVERRLSPAPTPARMMDILEAKGGTKIAARLAPPHPGAGGHRLGPTGERGGQPCRRHATAPSGCTSPTPDTPAWRPRPTRRATGAPDAACKQLHRLRHHRTSSIAEPIPRLEATQRATQRRQPDAAANTAKGGPTVMTMADAREQRSRRRPSSRPIRGQRESPLSRREDNAPVIRSSNGSRTRNGCPANYSPRRINSAAGQAALLAGKAGDASPSPKQPRQKRGSKASPRRVRSRLRRRARDDQGYVRYITKARAALPSSPETPCSVPIEGNMALSPLLLAERRRRGVCKKAESVPDRPLALCRGSGAAHANPAPAEPLTASTYQPENLGPDRTPGLRPAHMREQPDQPKHYARH

SEQ ID NO: 68541 - protein, 194 aa, Zea mays
  Coding DNA Sequence Number=SeqID_25166
MHGCTRRSTGTVALRCCSLQAVCQVAGWGAACEMLPPCQERKGGAAASWRWPTPTLRWDVAPGGVQLSEKRDLREQGDKASGAWRLAHRRKLRARGFWPRSMELTEREETIGQPANRKNGTCLAVGKRVGFSVSAVADRGSRRPGRERERGREEDAYILFYPFPGPSGNIMSCMATSALRYEAACVYWMPIERL

SEQ ID NO: 68542 - protein, 194 aa, Zea mays
  Coding DNA Sequence Number=SeqID_25167
  Gene Ontology: Mol. function=sequence-specific DNA binding; Cellular component=nucleus; Biological process=regulation of transcription, DNA-dependent
  Homolog annotation: Hit_ID=Q5KU24; Match level="QueryCoverage=32%, HitCoverage=19%, E-value=3e-10, Identity=56%"; Hit description=MADS -box transcription factor CsMADS1
  Pfam annotation: Domain name=SRF-TF; Domain location=9-56; Score =48.8; E_value=1.9e-11; Accession=PF00319.9; Description=SRF-type transcription factor (DNA-binding and dimerisation domain)
MGRAKVESKRIENRVSRHVTFFSKRRKGLLNLAVLCDVDVGVGVFSERGKVFQYPGLAGQAVLPPSPSSFGFLVKNNVAMAKTILAIVAIISLLVPPAAATDHDSYNAAPAPVPSSKFPTAAAAPTEYDAADEDKKKSILPIVLVVAIASLSMASLSGDSPVRAMAWKGPSSTPRAGSEEDHGSEVSQRRRAWR

SEQ ID NO: 68543 - protein, 54 aa, Zea mays
  Coding DNA Sequence Number=SeqID_25168
MQQVPQQPQPQSQMQMQMQMLQMLRDKCAKFMRGHPPVFAHSATPSPNRQSNHD

SEQ ID NO: 68544 - protein, 350 aa, Zea mays
  Coding DNA Sequence Number=SeqID_25169
  Subcellular localization annotation: CTP_CleavageSite=66; ConfidenceScore=5.19e-01
MKPKGCTTVGPPFRPLVSARMEDCFPAAFPHQWSSRMMTTSLVVGRSKPGCGLCPALSFKDLRHPCCSGGRVEPGFYLPHGPAGRLFLQHPGERALTGPAEGANFDNAGPVDRKRRVAVRPPHGRQSRREQVGHVCGPPRIADTAPPRGGRCWSVREDLSGDLPVQVGAAAIRRCGASAQVATVVGAEVVAAREGFSADETIDATCGRTFGSLALMACPRPSRGDVGEGLSTAAFALRSSLLLFSRPRRRSLSLLVQWSPASHLEFVVPQALWCGGSSYPREWNRSPICNGTLSMGNLRPLCNELEPEAAASAWTEAESTRKEASSAREHVASLVEEAQRRRQELGQVVR

SEQ ID NO: 68545 - protein, 148 aa, Zea mays
  Coding DNA Sequence Number=SeqID_25170
  Subcellular localization annotation: CTP_CleavageSite=81; ConfidenceScore=5.53e-01
MNMCELTLAVSHPSQVKNSAARPAPTVVPTTQAKTDNKSRSTTEFGLGRNRKLRLARPQALASGGGLRLARPPDSASTSVSGGIASSPDPGLGLKRSLRLARPWARTDRANRGYIITLSLACSGYKEQDRRPIWLTPATGNDGAPRAP

SEQ ID NO: 68546 - protein, 41 aa, Zea mays
  Coding DNA Sequence Number=SeqID_25171
MPAKVHRGGAFAAANEVAASVRVGEPGWDAGANAGATQGFF

SEQ ID NO: 68547 - protein, 110 aa, Zea mays
  Coding DNA Sequence Number=SeqID_25172
  Subcellular localization annotation: CTP_CleavageSite=36; ConfidenceScore=5.04e-01
MGTVARTSSSVAATVDRCWVDAGTSRHLDASTPRIAASPGMGATGLPATGGLSAISSVDGTATDGGSASHAHGSEGGVNVQDFLVHGAGGSGHLPGGGGGSGQNSHSPPE

SEQ ID NO: 68548 - protein, 188 aa, Zea mays
  Coding DNA Sequence Number=SeqID_25173
  Subcellular localization annotation: CTP_CleavageSite=90; ConfidenceScore=5.19e-01
MTLLALSPLRQQGDVSRILAALPAVLLQDSGAPPTATLSRVQGSSSAPTATLACAKGSTQTNKKSKKGFKQRSKENRRLPWSGAPPDSVRCTKEINSELDTFGFLKNALRYNLLDCPKSEQAPEGAPDSEQDLSDHAKKEVMTGKKPATSHGKAPSRESGTKHKEESPPRVKSHRSGDKKKKMKKVVY

SEQ ID NO: 68549 - protein, 147 aa, Zea mays
  Coding DNA Sequence Number=SeqID_25174
  Homolog annotation: Hit_ID=Q6QP51; Match level="QueryCoverage=45%, HitCoverage=30%, E-value=8e-10, Identity=55%"; Hit description =Putative growth-regulating factor 1
MSYPDTHASVGQAEVTAVTSPLFFTDRYDGKTAPLAPLRLSCQPPKRRLTTSHDQPPSSASGATGSFASPDLRLRPREEVSASPDLRLQPQEEVSASPDPRTRPRPRSREESRPRLTPASASREVSASPDLGLGPTVPTGDTSLPYP

SEQ ID NO: 68550 - protein, 224 aa, Zea mays
  Coding DNA Sequence Number=SeqID_25175
  Subcellular localization annotation: CTP_CleavageSite=36; ConfidenceScore=5.15e-01
MRPGRSPGAWSGFKLSSWFVDTVNSLAVAGCESSPRASTRSERTIKDFPDFYHTPLRRLALAVVGGARPHGDRRSSTIARLQGFSSCRPAAFPHQWSVWWGEASRAAASAPPLASRIFVILAEVVAAREGFSTDETVSAIYGRTPGSLALKACPCPSSGDVGEGLATAASALRSSLLLFSRPKRGSLSLLAYWSPASHLEFVVPTGPLVWRLFIPAGAESESRL

SEQ ID NO: 68551 - protein, 41 aa, Zea mays
  Coding DNA Sequence Number=SeqID_25176
MRLHILRDDVVLYPQRYEDRGPTDCIPVHTLSDICRMISIS

SEQ ID NO: 68552 - protein, 192 aa, Zea mays
  Coding DNA Sequence Number=SeqID_25177
  Subcellular localization annotation: CTP_CleavageSite=66; ConfidenceScore=5.60e-01
MSPPQGQARGCLGACWGKNKRRRPPAVAALAPPSPRSPRRAAPAFPRRARLAALAAPPERPRSPCRLSAPARTPPERASPPSSSRPCPACARPCPSRPPALAEPPVPRLSAPARPRRAARPRRREHAAARSPRALAALAAPPAREEGSPWPPSRRRESAVRPCRARHPSTPPSFPAIVKAVVNWFCIVKSAC

SEQ ID NO: 68553 - protein, 101 aa, Zea mays
  Coding DNA Sequence Number=SeqID_25178
MMHAPPILAAGEDCFRLTRLRWEQGKRSVFEEDEGEANTEAHELGQPLRERGTRSPCEFRDGQCAPAQSGEEDEQGTTTALWGRGAAIGKEPRHALWVSFR

SEQ ID NO: 68554 - protein, 280 aa, Zea mays
  Coding DNA Sequence Number=SeqID_25179
MLAPGTAGLTSRTSTTGESWDDGFYCVDLMAGHLEAMLVAIHFSPTDDHEASHCFVEIHGGGLPLHRFCWLLRFCLLGRWLRNEALQEFALPELVADGEAVILARRVHQLLEMVATIFHRWPGWPICGGDFFFIVPRTMVPSVPIGVLLMLPLLNVGLAGVTQVFSIAENCPHCIFLVGELGCYVEQVDSCSWSPSPKLVDECLVGSVVGEGACYVSVCGIEEFVSLLRKPLDVISNDFSTLLGAPYEVSRASWELVGALDVFDEGLPEVDPIVDGTASW

SEQ ID NO: 68555 - protein, 123 aa, Zea mays
  Coding DNA Sequence Number=SeqID_25180
MENPMSLVSVERTIRIEFMMENPLASDDVGARGLGNEIPGLRTGEGVGTQKPALPRVAIPYWLTTGVMGTSLVGSSMGIGPTSISETVRGCRWYTFKGATSGATTERVVQLRLMAGATTRGPV

SEQ ID NO: 68556 - protein, 362 aa, Zea mays
  Coding DNA Sequence Number=SeqID_25181
  Homolog annotation: Hit_ID=Q5Z9G5; Match level="QueryCoverage=24%, HitCoverage=35%, E-value=3e-12, Identity=45%"; Hit description =Putative uncharacterized protein P0655A07.24
MLGGLRNESASMLEKVEVASTSSFGADVDPRAIDLAMRIAERMFLKMKEDEVKNKIEEENDRWRPNDESTSSQGSSFKSTSHMCFIANGSDSESESEDEEEQESDSEDEDDLQQFFAQLSKKHRMSLLKLMKRAEEQKEMLHKQEDFLIRKIEDLEKLTKEHEKIKCSHDDFVKSPGLYLTTGSPDQAPVSRRASAATALSSRRIGDRGGGARRSLSVRGGTASGGTGRARRSGRRWCCSWCWRSWCCWAPWSSLWWCCCCSPRVPYVAVLRAYPFRVPARGVLPLAYVARAQGAPLGDAGSAAMEVALHDGVVPFQVDGEARTRWKVAGIVGVDQWMRLACQLRFFWPNGTVLPFRCISKS

SEQ ID NO: 68557 - protein, 62 aa, Zea mays
  Coding DNA Sequence Number=SeqID_25182
MPLALLYDANILDVFVPRVRQTFDTREEAYLFYLDYAKLAGFSVRTKRCNCNCWCGVIATPH

SEQ ID NO: 68558 - protein, 130 aa, Zea mays
  Coding DNA Sequence Number=SeqID_25183
MHLSYTLHSLDCNLADGEYVLIPEQGTVQEEDQEQASEAVIEDLPAAPAIEGKPRYGGYKCGHCTAAAGVSGALYAKAVRPGRERGINGDGCHVQGTIQEMVDGVTWPTTLPPGWTVEWDAAPAEEEHEE

SEQ ID NO: 68559 - protein, 447 aa, Zea mays
  Coding DNA Sequence Number=SeqID_25184
  Homolog annotation: Hit_ID=A3CJ03; Match level="QueryCoverage=23%, HitCoverage=37%, E-value=2e-09, Identity=33%"; Hit description =Putative uncharacterized protein
MAKAAMPSSGDNDKKGVEHRGTCWSIEGVEGPEAIVPGNHGPGMKILHRKVQRVKFNKTFVIRRSSPQSPWRTRGGRNRKGLRQSPELMQWWTQLMLNRPDRLGKVTRHRGVLGQSSEEHLMWCALGRLSVASSAIVGTSSSTTTSRGAPAMGVASGLGGTTSGHRDTSRGRGDGGSSGTGDESGGRRWRWLTGVDLLEDEIIVDVGEGGEHLRALEVDLHVGKFLIHATQHVQDEGTVVDDLTKITKSINHPLHLATIVTDGEIALHENTKLGVEEKGTSFVIAEELLLDGQPGTTRSTTRGASRLHQLGGECAQHPGQHDRIHAPPGWCGGAGVGENMWWEGGVVGDGRSTLKVEGRLAFPGEGVLSGVDPILGDDCLGQKLKLMGEGSQFTYTLKYPHSCATREKHKRGNKWVEAQIKPLPGFELETPGSDTISGQTNQFNPKA

SEQ ID NO: 68560 - protein, 157 aa, Zea mays
  Coding DNA Sequence Number=SeqID_25185
MADEEGTLHRTADLPERKPSSIMFGKAGAKQEIAQPPALQAKTTTCKPEAENSFTRRTPLKKLVITTTPFYPDVLFIGGEWNRPPSPMTNQLCLGKNLLSGKLVDEGTDTVTPGDIMKPENEIRRSLCREMRSQRWEKLQMNESSGREGIPADVIVG

SEQ ID NO: 68561 - protein, 43 aa, Zea mays
  Coding DNA Sequence Number=SeqID_25186
MAKVDALPKVLEVRVSDRLKQRGYATIRRLRLNLMGSRSNWYN

SEQ ID NO: 68562 - protein, 48 aa, Zea mays
  Coding DNA Sequence Number=SeqID_25187
MAIGGPKSFTKTAIGAFASAPLPAFGRQPLDRFQPVEDLEDSFLFAIA

SEQ ID NO: 68563 - protein, 160 aa, Zea mays
  Coding DNA Sequence Number=SeqID_25188
MEKSECHVHAYSEGEQELKFLGMQSLTTEIEAIASTRELEETITDKDSDIFQLETIIGNLQSSIETNGVAADLENEPPVRKKQRCMNPDDDALEGSCSRAQRNLPDQSDSDIHEIALHNEEEPQAERLPSANVNQMEQADVAANKEVSSGVTSSFGQVTE

SEQ ID NO: 68564 - protein, 607 aa, Zea mays
  Coding DNA Sequence Number=SeqID_25189
  Gene Ontology: Mol. function=cysteine-type peptidase activity; Biological process=proteolysis
  Homolog annotation: Hit_ID=Q5NKP7; Match level="QueryCoverage=100%, HitCoverage=100%, E-value=0.0, Identity=86%"; Hit description =Putative uncharacterized protein 9C20.3c
MKHVDRPPNNPKRITIQSSQECFSVDIPSAEQSNPCPEVGNPPNVDSQNLTNETVQIDSDEDDFMPALKKRNRLNVRCNPQDVIASINILNERQREAIRRKGFSTILDMTVDALCSRSHLQWLMDKLDPKDMTIRPGPGKELKITKDIVHLILGVPNHGGGKPLGIDEAVVASNLRAELGVSKDEFNVTFLHDRLRKGEDDDLSIRCFFLILFNRLLFPTASWGITYHEVLLTEEMHRFHEIDWCQLIFNDLCEAVKKWHNRITTNVSTTIYECSIVVLLYYLDHLHTAAAPQNNTGTPRIKFFDKNSIKALTKADKRKVRHGAEPFGHCEPECRTNIFDAPRPAPTPRPTFNIKLPSIKEMMSSKINNLPHRHRSKFTDILAAYDLEVDKSCIAIKDSIDKIIEKQYDIADKFIELIDEVLRAESDNLENETDEPHHPGNSADSAGHTVHATQPTPDMPSQASQLETQLGGTQFEEIHERQQHIRRVLETCPDESDVVTDQQRGEMATEEMEHNDSGPVFDQTPTPHALLNFEEQEHHSKNPQPFDQNVLQNCLHNTLPPLVNLDKCKSDNSRDLRAHALHQLTFHRMNKALPLPLDIQRFMFARN

SEQ ID NO: 68565 - protein, 153 aa, Zea mays
  Coding DNA Sequence Number=SeqID_25190
MGKSKKGGSSSHHSSDKRKREPSPPSEDFGDSEYSEEEFSSESEGSPAYASPSVSSDDSDDSQGIAAEVWTYIRAIERSGLEGSDESEISSDEEDSSDSSEEGSGGDGDDEGNDGDKGDGGKATAAAARTTAIAARTTAAATGPTAKRRWLKY

SEQ ID NO: 68566 - protein, 179 aa, Zea mays
  Coding DNA Sequence Number=SeqID_25191
  Homolog annotation: Hit_ID=A2X0W7; Match level="QueryCoverage=73%, HitCoverage=5%, E-value=4e-39, Identity=62%"; Hit description =Putative uncharacterized protein
KDVDLICYVVNFMRSSGKLMDDTNMMDIPIASKHVLSNRTNNKLVMAVKTSQNSNEGSTKELKAIVLELQQELQAKDVQISTISSDLSCQLKVAESSAKQFSVDIEDARMKLQNLEKEADVLQNQKKDLETQLNELKNMESMASEQRGRIEKLTDELSRKDSQRGRIEKLTDEYGINGK

SEQ ID NO: 68567 - protein, 327 aa, Zea mays
  Coding DNA Sequence Number=SeqID_25192
  Gene Ontology: Mol. function=receptor activity; Cellular component =integral to membrane
  Homolog annotation: Hit_ID=A2X6T3; Match level="QueryCoverage=72%, HitCoverage=44%, E-value=3e-97, Identity=67%"; Hit description =Putative uncharacterized protein
MRKTQQLQKMVRCMFSAVPCFDNFIKLLTESAHILFPPFFFGQNQAGWTCVLIIWLIIGIPGSIFAGLVYGFLAPIMATFDAIAEGKEKPFVHCFVDGTWSTITGSCTVVRDVKDLLFHSYFSLMDDLRLQKPPDGEPYEIRLLDIPGALIAAAFEFLLDGIMFTLIAFYKCPVMLFKGWKRLIQDMIGREGPFLETACVPFAGLAILLWPFAVVGAVLASVLSSVPLGAYAAVVAYQESSLILGIAYVFSLVSIFDEYTNDVLDMAPGSCFPREKQEGKRPSSRVTSFKNNIDDFNPFKVILLLLNSQAAMSLLRSVLMGVSWGIK

SEQ ID NO: 68568 - protein, 135 aa, Zea mays
  Coding DNA Sequence Number=SeqID_25193
  Gene Ontology: Mol. function=catalytic activity; Biological process =cellular metabolic process
  Homolog annotation: Hit_ID=A2XXW9; Match level="QueryCoverage=46%, HitCoverage=20%, E-value=3e-14, Identity=63%"; Hit description =Putative uncharacterized protein
  Subcellular localization annotation: CTP_CleavageSite=35; ConfidenceScore=5.03e-01
MQVAGAFVSTATHARVVAPPQAVDRSWAGIVPRPRGGGVWETLLSRWGRRGLGQCAGVGEIRGQKEQIESSVQGTLNAMRSCAKAGTVRRVILTSSMAGVYIRPDLLQLRGDRHVLDKESWSDFEYLRANRPSIN

SEQ ID NO: 68569 - protein, 104 aa, Zea mays
  Coding DNA Sequence Number=SeqID_25194
METQEIPVVPCTSSSNIATSTNEFVDNYIVVHLWTRPAGEQSKDQSCDTRSVHILKIAYQAKDGAKKIFKVLSVREKVKEAEEPKAREKVSFRALFKAKYKSWE

SEQ ID NO: 68570 - protein, 131 aa, Zea mays
  Coding DNA Sequence Number=SeqID_25195
  Gene Ontology: Mol. function=metal ion binding; Biological process =metal ion transport
  Homolog annotation: Hit_ID=A2XNE9; Match level="QueryCoverage=87%, HitCoverage=61%, E-value=1e-26, Identity=57%"; Hit description =Putative uncharacterized protein
MSHVPAAPRTHRHDGKKGRRQEEQQRRKAVVVGNAGGLVSPAGSSRYLLSDRFAATEEIQEVESAPAVDVKPKREEVVVLKVSLHCKACAGKVKKHLSKMEGVTSFNIDFCLREDDNFTFYCKLPKLHSFL

SEQ ID NO: 68571 - protein, 109 aa, Zea mays
  Coding DNA Sequence Number=SeqID_25196
MAPSGDGGAPVGRGQCGMGRLWLQQLVLGEVTRALSRVLLIHDIKINRSTTLKGKEKSEKEEDKEGCFFLIVVIPFDFAHPDGVPSGDSVCGLQNLRRLLYVCQVFLNF

SEQ ID NO: 68572 - protein, 103 aa, Zea mays
  Coding DNA Sequence Number=SeqID_25197
MGLLHPVTLGRPTAGRPRGESDIYITADERDQDLIGGAKPALPAPRKDMNHQRTNAGTGGLGKKCTPLGHQPPRSRSVPRGRVWTLDEILDSYAEDVSRKASA

SEQ ID NO: 68573 - protein, 46 aa, Zea mays
  Coding DNA Sequence Number=SeqID_25198
  Gene Ontology: Mol. function=DNA binding; Cellular component=nucleus; Biological process=regulation of transcription
  Homolog annotation: Hit_ID=Q5F4H1; Match level="QueryCoverage=71%, HitCoverage=8%, E-value=3e-10, Identity=84%"; Hit description =Putative uncharacterized protein nam2
MGVEWYFYCLRDRKYPVVLCTNRATAVGYWKITGKDFFYFLKKKLT

SEQ ID NO: 68574 - protein, 45 aa, Zea mays
  Coding DNA Sequence Number=SeqID_25199
  Gene Ontology: Mol. function=structural constituent of ribosome; Cellular component=ribonucleoprotein complex; Biological process =translation
  Homolog annotation: Hit_ID=P49690; Match level="QueryCoverage=93%, HitCoverage=30%, E-value=2e-15, Identity=95%"; Hit description=60S ribosomal protein L23
MEREDNARVIVNPKGEMKGSAITGPIGKECADLWPRIASAANTIV

SEQ ID NO: 68575 - protein, 214 aa, Zea mays
  Coding DNA Sequence Number=SeqID_25200
  Gene Ontology: Mol. function=zinc ion binding; Cellular component =intracellular
  Homolog annotation: Hit_ID=Q6H6E6; Match level="QueryCoverage=27%, HitCoverage=24%, E-value=6e-16, Identity=64%"; Hit description =Protein DEHYDRATION-INDUCED 19 homolog 4
  Pfam annotation: Domain name=Di19; Domain location=29-198; Score= -80.1; E_value=0.025; Accession=PF05605.3; Description=Drought induced 19 protein (Di19)
MWPAPGSEGRPSDSELSRSTAFRFFFVIWLSFWYYKYAYFFEMKDRFWYDDIEPKDVVCSNFPCPSCYEDRDVTSLCAHLEDEHPFESKIVDIINLGMMISNDEDDVRSDFHALTAMKIMMLLLSVPIWRMGAILHLKLCAPILDALPGCFGEMCHVCLENHRCIVWCNICVQNKQQASNQAPGEERVAVATVLVRAVGLGVCLEVGILRHLCI

SEQ ID NO: 68576 - protein, 291 aa, Zea mays
  Coding DNA Sequence Number=SeqID_25201
  Gene Ontology: Mol. function=zinc ion binding; Cellular component =intracellular
  Homolog annotation: Hit_ID=A3A037; Match level="QueryCoverage=30%, HitCoverage=7%, E-value=2e-33, Identity=76%"; Hit description =Putative uncharacterized protein
MRISRQLANPRPGCRRARRPRWSPSAPLRGGAHRLHRSGTMLSRPWRGHQGGHRPHIAAIMELDEVVVTTREDDDALLLDISYSYDSGHINQNLSRKCEALVVSGLAEYGDEIDGIAPADIMKQILKIPYSKAQVSIAVNRHDVDEGEKIFRRQGNQPKGSDPSIFLNFAVHSVFCFAIWLSFWYYKYAYFFEMKDRFGYDDIEPKDVVCSNFPCPSCYEDRDVTSLCAHLEDEHPFESKIVDIINLGMMISNAEDDVRSDFHALTAMKIMMLLLSVPIWRMGAILHLKLW

SEQ ID NO: 68577 - protein, 386 aa, Zea mays
  Coding DNA Sequence Number=SeqID_25202
  Gene Ontology: Mol. function=transferase activity, transferring glycosyl groups; Cellular component=membrane
  Homolog annotation: Hit_ID=Q9SUW1; Match level="QueryCoverage=62%, HitCoverage=52%, E-value=2e-60, Identity=51%"; Hit description =Putative uncharacterized protein AT4g22580
  Pfam annotation: Domain name=Exostosin; Domain location=142-386; Score=-40.6; E_value=1.2e-06; Accession=PF03016.6; Description =Exostosin family
  Pfam annotation: Domain name=Nodulin-like; Domain location=57-182; Score=-152.9; E_value=0.043; Accession=PF06813.4; Description =Nodulin-like
  Pfam module annotation: Pfam domain module=Exostosin::Nodulin-like; Domain location=142-386::57-182
MASYRPYALPPPQGGYPPQMNPYAPPLPPPQAPYNRMPTPPYHAGPPPPPPPHQPQFNFGPGPPQQHPRRLRCAFLFFIGNNGALISCVQNFPKSHGTIVGILKGLSGAILTQIYAIVHSPDDAALIFLVNQSIGLTWRRRIHIRGLPPHFNTDLLRHCGANALPLADPSAVATSVPPCESLADHGLGPRTHPRNRSWYRNEARLLEAFFHRRILERDCFADDPADVVFLPYYAALDALSYMIDPALLDESTRHGVALAEFLSSDQAHILSRRHGHDHFLVVAGSAWDYAQSPGVEPRLWGSTSLLRLPELANFTSLTLESRTWPWQEHAIPHPTSFHPSSLGHLRAWLARACRSCCATLMLFAGGASRPCRPLLGQTVLGYRWTV

SEQ ID NO: 68578 - protein, 762 aa, Zea mays
  Coding DNA Sequence Number=SeqID_25203
  Homolog annotation: Hit_ID=A3BQI5; Match level="QueryCoverage=23%, HitCoverage=17%, E-value=2e-13, Identity=30%"; Hit description =Putative uncharacterized protein
  Pfam annotation: Domain name=zf-CCHC; Domain location=112-129; Score =16.9; E_value=0.0042; Accession=PF00098.14; Description=Zinc knuckle
  Pfam annotation: Domain name=zf-CCHC; Domain location=93-110; Score =23.1; E_value=0.00049; Accession=PF00098.14; Description=Zinc knuckle
  Pfam module annotation: Pfam domain module=zf-CCHC::zf-CCHC; Domain location=112-129::93-110
  Subcellular localization annotation: CTP_CleavageSite=58; ConfidenceScore=5.36e-01
MPHAGAHSGTGGHLPGERRRSSLLPFSPPAGGRSLTSSSPGAPGCGSSAIGRGGTEKDADAADGWKTVESRRSRRLRLKAANFQRPAPTNLSGRCFNCFSPNHLVRDCRSRTRCFKCCGLGHRASRCPEAPDRAQFSTAVSKQTSVWSRLSYPSSGGLCQMRQSIHPAAPQKVWRRKTSMAAISGSQYLFQGMASDLVGGADAITIRGRSRRRHSHKRRKPPTPPRDDGSRIYMQPHLPSSGLVPPCLLGWNHAMTVVEEDLRLAVVVSVISNRDSVSKFKVASLLSPRLEITEDSIVLRRLSPNSFLLVLPSEDMAQRLDSRWSIQRAATFTVVCKRWSRFLNSSGRTLPQLVNLELDGIPVHVWETATVEHLINPFAWLFKVHSDTSGLSDLVSFRCSAWCIDTSMIPESRELWITEPLQAPTGDSQGVISLGYTVKIRWSIPPSAAAAPLVSASPLSPRDHDDGPRSYRRSRSHSPRGRPREDINASNLGELGQQRRSAKERLGPKCLDSKQTNPNPSELDNSVDGPCCDLNGEHRAGLETPHGDDSAPVHNEEQAQHAVFSDQMDYNPIGQQNFTRDLCLVPNLNHRVGLEAPFGEASASVHIENQCSDHTAEHRAGLENPHEDDSAPGAATSERRLIEAPNLLVYHRKKKHNKPLVEIAEETTENNTIPALQMDGVDPVTAKKEVFLKQIVNEVSGILPAPANPTPKPIISKRSTAVSLRRSRLIAGMGAEIGKQDLSSRATKKVMKALMVVGNWKR

SEQ ID NO: 68579 - protein, 313 aa, Zea mays
  Coding DNA Sequence Number=SeqID_25204
MGRGKPGCDLGPALSLKDVHHPCWGRERGEPGLYLPRGPAGHLFFQLLVVATILQLCGGGVLQPCRGRRTVAAQLGCNIPPSSSLSWRGRERGPAGALWSGPLFGFDGWFASLEREREREPFGGRVRPGTMAAAAEVAGESPGTRRRAGSPIVCASESCFSRKVMSEVSVSRRRRSPSARSALPLTRALARPWGSVTDAVEKARRTASAEELSNVKTCSVRGITYPSVSYLSQKVMSEVSVSRRRRSPSARSALAAYVYSVVFRIHFRSSRKVRKTFWQKGSFFEEKIRRRGGSPLLAPEGGSGFAEARPTLP

SEQ ID NO: 68580 - protein, 185 aa, Zea mays
  Coding DNA Sequence Number=SeqID_25205
  Subcellular localization annotation: CTP_CleavageSite=23; ConfidenceScore=5.18e-01
MSVSWSQGDRTRNPRGFGLASTRASAKAKPLGGSRLDPKGVRWESVGTSWSTGGDEVTSGTDCTVVSGKTLSIPPPAGGLSAAIVAVARRWKEYHVIAAVEGHELKTPETEHRPGPERLLETAHLELDGKLFVNTQQAPTWRANCRRFETGGSLGRQVNVVACPSPDGSARGRARRGEKGGRRRA

SEQ ID NO: 68581 - protein, 295 aa, Zea mays
  Coding DNA Sequence Number=SeqID_25206
  Homolog annotation: Hit_ID=Q84Z39; Match level="QueryCoverage=55%, HitCoverage=40%, E-value=6e-49, Identity=55%"; Hit description=Leaf senescence related protein-like protein
  Pfam annotation: Domain name=DUF231; Domain location=116-291; Score =30.9; E_value=2.7e-10; Accession=PF03005.6; Description=Arabidopsis proteins of unknown function
MASRMKILTSKPLQEPRNSVRSNEGDRKLYLPVPCSMLFDCEHMCFYFSNIEWAPDSALPCSGDHLDLFARTIGPTVICSWNQKKAHKFVDTLLGDATPKGYNLYAQMPQNANLKAHAKTYGPHEYRCDCDTLFTSGGVVVGAHNAPAGLNYTGVGYARPLRMVYRKAVERLSSESDGRPSDPARSTAPTACTRMEPYREGEKEVAWICKEVRDIVYDEAEAARARGASATRVEVLDVTKLATMHPDGHPGVYMNHDPFKHGVPDKIYSDCLHFCLPGPVDTFNEILLQILRKRR

SEQ ID NO: 68582 - protein, 859 aa, Zea mays
  Coding DNA Sequence Number=SeqID_25207
  Gene Ontology: Mol. function=NAD+ ADP-ribosyltransferase activity; Cellular component=nucleus; Biological process=oxygen and reactive oxygen species metabolic process
  Homolog annotation: Hit_ID=A2YB96; Match level="QueryCoverage=99%, HitCoverage=96%, E-value=1e-162, Identity=41%"; Hit description =Putative uncharacterized protein
  Pfam annotation: Domain name=PARP; Domain location=201-393; Score= -2.3; E_value=3.2e-08; Accession=PF00644.11; Description=Poly(ADP -ribose) polymerase catalytic domain
MASPQESNSLCLKRKLVDDCLSKDCKSRRVKSENEPSSDSFAKRCNCCCTRPNLANDCVNFLKSGAPNRVMYYKKGSWHNFPEQIMNSLIDEFKGNKSSVVSVMDDEPILVDFLSMTLVNLKTRKQRSVAWFDDTGKRFFPSLFFDEESDEMPKQDSGNVNNTAQGIMLDKVTSSPPEVVKQVVLESSPPVPQKPSTVDVLRKKITSVERGSEGFLFVQDLFLSGMNPFATPNNILHVHRYSPNDITAQCRFEAFERQMKSTKEARGDANVKYGWLGSRKSDIVRILINGLGTTANPVEKAGLSAGVYLSPENRAFTSVGLCDVDEKGVQYMLLCRMILGNVEAVEPGSQESFPSSEIYDSGVDDCSNPKCYVMWPSHLSTHIRLEYLVSFKLAPKVRNYLLDLKGLWFNPSLKELGTDICTLQPVMCETGEGPTSPWISFRVLFAVIQDNISSVARELIFHHYEELKESIITREEMVKKMIIVVGEKVLLEALKKLHYCPSLWYRPSVEAVSSDSVMAAPGKLSLDKAGGVFSLTLSVNHVDSHAPNGVSEQSTVLSTKGCETLAADMVPNGQDCPAPSGVPETSSSAVAMRGASTSVEPKRRDPPVQIVPPGSSATPCAKNQDSFVGRVTPIARDGLLRTICGSSSSPGGYASLAQANTSQTNGVSAPGVTPRGYESAVPSLSLGNSESTGVKQVNSAPRMTPEGQKFLSLGIAPRSPALRDLVKCQASSTLVAMPPAGLGKSRSMKIEGHDSLAPSVKEPKGNGGLAPSKTPKLHEPVIADMSIKSCDSLALGIAPNGHTHDGPASGSGEAKKEQAALVTGSQSKSSVPSLDASSHVTGAASALVALSTLREKGGR

SEQ ID NO: 68583 - protein, 286 aa, Zea mays
  Coding DNA Sequence Number=SeqID_25208
  Gene Ontology: Mol. function=heat shock protein binding; Cellular component=nucleus; Biological process=protein folding
  Homolog annotation: Hit_ID=A2X204; Match level="QueryCoverage=31%, HitCoverage=43%, E-value=4e-34, Identity=64%"; Hit description =Putative uncharacterized protein
  Pfam annotation: Domain name=DnaJ; Domain location=181-239; Score =38.6; E_value=2.2e-08; Accession=PF00226.22; Description=DnaJ domain
  Pfam annotation: Domain name=TCP; Domain location=63-190; Score=3.4; E_value=2.9e-08; Accession=PF03634.4; Description=TCP family transcription factor
  Pfam module annotation: Pfam domain module=DnaJ::TCP; Domain location= 181-239::63-190
MRSPCLTMDNAEQPLCTASKRWLRRSLSYIAAHAATHRLYGGMGMGFAGRGNENDRYRMAPAGETELPSNGSPPVGLHDRRMRLSVGVAREFLALQDRLGFDKASKTLNWLLAQSKPPIDCLVDAAEQVVVVTGGRPTLVKGREQGSNSSTCCLTVSRAGVLLPVFLAGRGVDEMQRRNAKILGVGKTTSQQEIKKAYHKLALRLHPDKNPGDEALVGEAANNLQEYFRTMYKKVTEADIEEFEAKYRGSDYEKTDLKDLYTKYKGNMNRNNYLLYHIVKSETVLL

SEQ ID NO: 68584 - protein, 306 aa, Zea mays
  Coding DNA Sequence Number=SeqID_25209
MADAQTRRPNKRGGGHGRKWPDRHPGRWLGNLRPQSASPTFPATPAIRATEHRAPAVRVHRRCENRRSKVPIYHLTIATRCGVVIGASEDILTRGEEMARPTHGVWWFSGAQRSPASNWLGSGHLTGLVTARNLTMCPPPPRPVVGTGTVHGGLPIFSAPCIPALSPRRRTVGAPSYHTPSHAMMLGKVIAALYFGGWGEGRCPGAKLARPRQTRMVATARDLRRRPRIELASASRQVMTTWSHGSATGVSLLCLRKTELGSPPGSDSSMRAEVGVQTRHGRLTKEAHMVEALRNKKKGRGAVGCA

SEQ ID NO: 68585 - protein, 82 aa, Zea mays
  Coding DNA Sequence Number=SeqID_25210
MKGSKRPVRNFIDRRPVHRVEGISCAVRYVQENEPTLQEISLTDNYPKETDVELLDTLKVEPSMVVEKVMVLENLLSLKTWF

SEQ ID NO: 68586 - protein, 232 aa, Zea mays
  Coding DNA Sequence Number=SeqID_25211
  Gene Ontology: Mol. function=metal ion binding; Cellular component =nucleus; Biological process=regulation of transcription, DNA -dependent
  Homolog annotation: Hit_ID=Q10A50; Match level="QueryCoverage=15%, HitCoverage=23%, E-value=3e-14, Identity=86%"; Hit description=Zinc finger, C3HC4 type family protein, expressed
  Pfam annotation: Domain name=zf-C3HC4; Domain location=60-93; Score =7.5; E_value=0.013; Accession=PF00097.16; Description=Zinc finger, C3HC4 type (RING finger)
  Pfam annotation: Domain name=zf-MIZ; Domain location=52-96; Score= -4.4; E_value=0.0048; Accession=PF02891.11; Description=MIZ zinc finger
  Pfam module annotation: Pfam domain module=zf-C3HC4::zf-MIZ; Domain location=60-93::52-96
  Subcellular localization annotation: CTP_CleavageSite=41; ConfidenceScore=5.18e-01
MDDDGGAFPSTSASAASRSLRRWFPFDPSPLPLVGPLLLVVVQELQRDTDSPTSKARIKYDEENLRSITKCEHHFHLCCILEWMERKDTCPVCDQNMATKFHTKSWQHTRFKGLFSIAYCSYIFTVIHISHGAAAYNREAARKSLLRKKAYIQQLESCRLKLSQMEQDMQRACSQARFLLLLFLCLLNCNRTPEGKDECGRATVEECVSIAGDDRFLDHIHWEGAGSKDQSA

SEQ ID NO: 68587 - protein, 127 aa, Zea mays
  Coding DNA Sequence Number=SeqID_25212
MGKWPTPYGRKPGTGTKEQPPHAVDMAPTSDTAIAYEVDAYRPVDMTVGARALHRRTAGRAPGGSDRLAAARTTDEAKDGGKKSFEVPIAREKVKETRNPKPGVKKKTCKVKVDQVKKSYGASRITT

SEQ ID NO: 68588 - protein, 60 aa, Zea mays
  Coding DNA Sequence Number=SeqID_25213
MDSNTTRNGTSIPTLVKCTTPTMLELLLEGHARLQRLQLLVRMRRVADLVISAPKFTALS

SEQ ID NO: 68589 - protein, 114 aa, Zea mays
  Coding DNA Sequence Number=SeqID_25214
MAASSAFSAKAGQTMSSLEALLDHQRKDVVNKKGEPELCQDEKLVDGVLDTTIISMLRTVTSTRHGAERPVAALKSPEESPIHARVDAAVESLASGDFGGTSCRGPNRNPITTP

SEQ ID NO: 68590 - protein, 77 aa, Zea mays
  Coding DNA Sequence Number=SeqID_25215
MGGTRLPTGQLTRRPLPLYLRCEQGARAQPYDLGRTAHIIAYINSRDNLGWHPTTLMDHPAHRRTSPAAHLVDDLLA

SEQ ID NO: 68591 - protein, 149 aa, Zea mays
  Coding DNA Sequence Number=SeqID_25216
  Gene Ontology: Mol. function=ARF guanyl-nucleotide exchange factor activity; Cellular component=intracellular; Biological process =regulation of ARF protein signal transduction
  Homolog annotation: Hit_ID=A3ALW0; Match level="QueryCoverage=57%, HitCoverage=25%, E-value=1e-26, Identity=57%"; Hit description =Putative uncharacterized protein
MALDASRLRAVGRTEAANVDNATPHGRKPFIAALPRRPCTSHAAPPPRRPTAGSEFENNLKVIKQCQAGSIFTESAKLPDEALQNLGRAVIFAAGFCWDILALLATVNLQCFATFWPPLLECFIAVSQLPLFAPRCPCTITAAPRHRLP

SEQ ID NO: 68592 - protein, 70 aa, Zea mays
  Coding DNA Sequence Number=SeqID_25217
  Gene Ontology: Mol. function=protein-tyrosine kinase activity; Cellular component=plasma membrane; Biological process=protein amino acid phosphorylation
  Homolog annotation: Hit_ID=A7QIW3; Match level="QueryCoverage=61%, HitCoverage=8%, E-value=9e-14, Identity=83%"; Hit description =Chromosome chr2 scaffold_105, whole genome shotgun sequence
MGVCVSKAACCRRELHNGVTNDRTDAGFAMENIVSEQGEKAPNVVYKGKLDAQRRIAVKRFNRSTWPDPH

SEQ ID NO: 68593 - protein, 92 aa, Zea mays
  Coding DNA Sequence Number=SeqID_25218
  Gene Ontology: Mol. function=protein disulfide oxidoreductase activity; Cellular component=outer membrane-bounded periplasmic space; Biological process=defense response
  Homolog annotation: Hit_ID=Q8H8S2; Match level="QueryCoverage=81%, HitCoverage=28%, E-value=5e-28, Identity=81%"; Hit description =Putative polyketide synthase
MAVATPGSASLWHSFCWQVLLDAARKVGIEGAEELFEDPTKGVDGVQEELKKYSSGISGVPHFVINDKYQLSGGQPPNLFMRAFEIATKDGA

SEQ ID NO: 68594 - protein, 163 aa, Zea mays
  Coding DNA Sequence Number=SeqID_25219
MDQQKEEANVVLFVGCLPKEYKAFAYLSGGAACHWYFNPSITEAHPYYARIHNENIAIKLPPLSNEPVTFPELPKRQHKNLKVLFDSDPFTLPVPKELLEKSCTSHLISYRHATYSPDLASIVSLKITSIVVYNQMSCVDLDKEHLIKSVIASHGRDVPLTSP

SEQ ID NO: 68595 - protein, 219 aa, Zea mays
  Coding DNA Sequence Number=SeqID_25220
MLGFGEEQGWMPEGNAIVKDDACYTCGACAYQLSLAEKDCDQENCTSYIKERKKSHTKEGILLGKFPKDPTHTVEHYKPGPRLDPTSLRAATKPRHFSSSAPAIAQLIHSSMNLRRILDNEGDSPSNTPLFLWIHRHQAPRMIKESSSFFLLLETLRLSLLHHSAKDSSSVVGVPDLDKSILILFFSGIRRRAAHLCINRRIRKGERTPLQHTHPNTRD

SEQ ID NO: 68596 - protein, 704 aa, Zea mays
  Coding DNA Sequence Number=SeqID_25221
  Gene Ontology: Mol. function=DNA binding; Cellular component=nucleus; Biological process=regulation of transcription
  Homolog annotation: Hit_ID=Q6ZI39; Match level="QueryCoverage=91%, HitCoverage=82%, E-value=8e-90, Identity=38%"; Hit description=Myb -family transcription factor-like protein
  Pfam annotation: Domain name=Myb_DNA-binding; Domain location=95-144; Score=29.8; E_value=1e-05; Accession=PF00249.22; Description=Myb-like DNA-binding domain
MKTPGIKEIGNKPSCARALISGSSQASGHRINLDTHVLNTRNEKIVRVPSEKQLAQSHRVTNVAGPVSNSKQLAHIGPSAGLLDPNGPSKKRKKPKAWSKEEDADLAAGVQKYGEGNWEDILHKCNFDNTRTPDQLSQRWALKRPGGSTKPASTKHASVGLEERSAALKALSLAVGPMRGSSALRSGAYPQSIQHKSTVFAPKMPELRSAVTPSPAPAVPVPVAMPLRVAAQVQAPPHQGHQAPAHAAPPKLLNASNKTRKKQAAQPNPTISPSSIQAAAIAAGGRLATASTAANFLKVAQSKNAVHIRSLGATSLKPSASFKASIVVEHGTQPGGSQHLEPLNASAVHDVSGVAAVNQSGPLAGACSETKKALSTALAPVPCDSEEKEDDSEFCVITIDDLFPEDAKQPETVDTKAKQPQTTGLKANQPENADPKVMQQETMDPKSKQSDTVEVEIVDPKDKDMLEFDQYVASQGGHLNTDDLNKSKCTNSVSQAQGLVGSQQKLIPADGKGSPVTVVGKGKPVTAGVAATGRKTKFPVSHLAAGTPRGIVDTVNANAPNKTLVRRAAIPAPVPAGCQVRKDAMNSKGNQMTPGNAGSGVPASSQTSVAAQAASKANLPSSSSQAKPNNMVVNGGNRLVVNPPSSSQASAAVNDANRAATPQSSNPVNGANNREVNPPPSSQASTAVNGAANKGNVPAAARPP

SEQ ID NO: 68597 - protein, 122 aa, Zea mays
  Coding DNA Sequence Number=SeqID_25222
  Subcellular localization annotation: CTP_CleavageSite=89; ConfidenceScore=5.65e-01
MSSPLPPPSSHHPPPPQSLGSYQPPGTQPQVPASQGTSALMLGDHTTTALAPTAPLGDAPTGPSRLQAFTPHEMTAAILELGQAVAGIRAFLAGPYTPPPPLPLSSQPSVPPTSYQYGMPPD

SEQ ID NO: 68598 - protein, 339 aa, Zea mays
  Coding DNA Sequence Number=SeqID_25223
  Homolog annotation: Hit_ID=A2YGC2; Match level="QueryCoverage=51%, HitCoverage=74%, E-value=8e-11, Identity=30%"; Hit description =Putative uncharacterized protein
MARIRCTARKSVIPFLPSRLAERPLRRTVPGQSSHLERLHRRLHEEQERRRQEQEQHDSSPSPQQEVESERPPSPAPQPEMPPAPPQGILGAGGDPDGDGDDDDAGGSSSHDTELSEEPEPEGWIARPITRDAARGCHFHDALDTLLRRAFDRHTWSIEYRCVVYQHRRGLYPDQWEATFLVRRPNDYLQGAEAFSEHYSITERDTTEAAMQDAARRALSQYCSLFSGVADGLDLKYYPRRSTVSAGGVIASPVGEGNPRLNSMVNLAVVLNTELDHALDELGKVWAEVAELRAECAARHYLDGGSPAPVGIQHPYRSPPRGRFDYGTPDYRTWIDLDP

SEQ ID NO: 68599 - protein, 144 aa, Zea mays
  Coding DNA Sequence Number=SeqID_25224
MHDFLLALTLLGCSGWLLGQEDGLPGCSDAGIDFLLAGCSDGTAAAKETASGTTAAGSNADAGAGAGRETPPSSLSSVPRAHGSDVIIPELLPSDGFRVGMGGEASGLALEAEAVVAAAAPATWLLRSDQLPGLLGSASITFAR

SEQ ID NO: 68600 - protein, 119 aa, Zea mays
  Coding DNA Sequence Number=SeqID_25225
MELKASSGGSLGLALLCKALFPMRAGQGAKARLREAVGQGVKRACAKRYPRSGPFDLNRTEGIRPGEGERLRAALLLSAAVSARPLKITRLSGVPLDCPMSPRSNGQLRQQSTAQQSDR

SEQ ID NO: 68601 - protein, 380 aa, Zea mays
  Coding DNA Sequence Number=SeqID_25226
  Homolog annotation: Hit_ID=Q7FZ76; Match level="QueryCoverage=10%, HitCoverage=8%, E-value=8e-07, Identity=70%"; Hit description=UMP synthase
  Subcellular localization annotation: CTP_CleavageSite=43; ConfidenceScore=5.41e-01
MSSADIPVFNTLQRLYTLPTSHDPFPVWVVQTRSSLPRRPQLLGSAIAQSLPFPTRLGRHRAITARPTRLDRHLRNRCHHLPSPRARRGHHHLPYPRAEAATSAITFIPHAPRPPSVPLPSFLTCAPPPPCVPFPCPSLTLCPATSAMTASPTSDIHGMAQSRPTPTSAFHGRARSTLLSSSSLHRRTRRSRSSPSSASISSPSSSSGRAPAASARRSPRPASSRKEKRRSRDKAVVGGSGGGCEDEHQSRLRRQQSSRSLWMRHVKVIVAVDVVVVVCHSASCYSRPSWRSSECENKKVQNLLVGDGGTRWLFPLGTTLGPSTSTTVTSGIICILDWADIINAHIVPGPGIVDGLKLKIPDGNDLGGLCEEDHGFFCFG

SEQ ID NO: 68602 - protein, 89 aa, Zea mays
  Coding DNA Sequence Number=SeqID_25227
MAIEIVREAKDRSSRDQGSSLVNAFRNGMPVWGGGEGAASPSSRVVRLALFEVTNVIGYATTTVALRGWANTHEGLQEGGEESWRGCMQ

SEQ ID NO: 68603 - protein, 57 aa, Zea mays
  Coding DNA Sequence Number=SeqID_25228
MAHRTLNSACPVHHRTVRCPEDRSSNGRNPMARDLVSRLIEKKSSLGLSDRLREGKG

SEQ ID NO: 68604 - protein, 87 aa, Zea mays
  Coding DNA Sequence Number=SeqID_25229
MKMVFPKLLRACIVRLEIRSQPEYDGREFVEHGTEKCVMIRDRPVWMARMRELEGQQLLEDDPTVVYLTAYLLTLDAQYDFLARRHR

SEQ ID NO: 68605 - protein, 82 aa, Zea mays
  Coding DNA Sequence Number=SeqID_25230
MDGLASTVYCDMLKPLGTWRMVVTEKDHLTAGDLVPRFTPVSRFTPSRTRITLLDEKSGTKDELKALFRLDRRVRLTHGRFR

SEQ ID NO: 68606 - protein, 272 aa, Zea mays
  Coding DNA Sequence Number=SeqID_25231
  Homolog annotation: Hit_ID=Q6JAD6; Match level="QueryCoverage=69%, HitCoverage=30%, E-value=8e-61, Identity=57%"; Hit description =Putative uncharacterized protein
MKKILAPSLEIKEEAASTPPAPSPSKELQEPVPLEEEFDPVLPPQSPPEESPACMRAQIQELFGFPELTTRLHSLCYDGSWRSPADFTPAVKYLYEFMRRTLLPWMGYREATTHIQLWLLGALVSHSVFDVVDFFIYEIKDTMLDGLRARHQLPYAHYLCHIFAQLISPPQFQVTLEASRLLFGFYRPTPEDTTPTLVDPLAPHFRDEDEVIHQFEVQGATADTSLDDEDLSPPHHVPPRSHDHEASGSSVAPSAAPPAIDLALAAILQSLT

SEQ ID NO: 68607 - protein, 138 aa, Zea mays
  Coding DNA Sequence Number=SeqID_25232
MPLLKEIVCNIQSHVAMIEVDMKPASAIIHWIVRVERRIVRCASSQRLVATSALSKRSSGAPDGPVPHTRQSGAPPEAEIRQSGDLLPSHCSLSGVHRTVRYTHGQKATSAFQMELQRFKLQPRFWFDSLRSEQVFEL

SEQ ID NO: 68608 - protein, 85 aa, Zea mays
  Coding DNA Sequence Number=SeqID_25233
MATNSAGKNVKKTWRIYYTQVATTPEGEPVMMEKEIADRPPGTSNCITFESQRIGALQVVSELLGWPQDVTLRLDPKVFESKLFS

SEQ ID NO: 68609 - protein, 240 aa, Zea mays
  Coding DNA Sequence Number=SeqID_25234
MGHGVASGLLLLMHGGDPVPGCLVGPTAAGPGRGQSVDCPARLAAGEDDDRRRRAAAALAFCQIVRKRDSAGAEGSALLLHGVVERTASMDREPSALRGRGTGRALDQGVSRQGTRGTLISLEKFLFSRNREEGLEIGAGAIDHSLGEAAGCRLEKDIAAPMAEIGGRRRDGGEKGAYASVHRSEGRKGRSVQGSPSAGQRKEQRKKAPWGEKRSLLLAYEEPRRWSRCYSMHRCHPWEK

SEQ ID NO: 68610 - protein, 211 aa, Zea mays
  Coding DNA Sequence Number=SeqID_25235
  Gene Ontology: Mol. function=protein serine/threonine kinase activity; Cellular component=cytoplasm; Biological process=protein amino acid phosphorylation
  Homolog annotation: Hit_ID=Q6ZI44; Match level="QueryCoverage=84%, HitCoverage=49%, E-value=3e-90, Identity=91%"; Hit description =Serine/threonine-protein kinase SAPK6
  Pfam annotation: Domain name=Pkinase; Domain location=4-201; Score =147.7; E_value=3.3e-41; Accession=PF00069.16; Description=Protein kinase domain
  Pfam annotation: Domain name=Pkinase_Tyr; Domain location=4-208; Score=-45.2; E_value=1.2e-09; Accession=PF07714.8; Description =Protein tyrosine kinase
  Pfam module annotation: Pfam domain module=Pkinase::Pkinase_Tyr; Domain location=4-201::4-208
MERYELLKDIGSGNFGVARLMRNKDTKELVAMKYIPRGLKIDENVAREIINHRSLRHPNIIRFKEVVLTPTHLAIVMEYAAGGELFDRICSAGRFSEDEARYFFQQLICGVSYCHFMQICHRDLKLENTLLDGSPAPRLKICDFGYSKSSLLHSKPKSTVGTPAYIAPEVLSRREYDGKPLFLGKVTAAFFVGIASACVLLPVCSVTLAIL

SEQ ID NO: 68611 - protein, 240 aa, Zea mays
  Coding DNA Sequence Number=SeqID_25236
  Gene Ontology: Mol. function=unfolded protein binding; Cellular component=endoplasmic reticulum lumen; Biological process=protein folding
  Homolog annotation: Hit_ID=Q5Z9N8; Match level="QueryCoverage=50%, HitCoverage=14%, E-value=4e-54, Identity=90%"; Hit description=Heat shock protein 90
MAVVGVSGALYAKAVYLARLKLDSNYGSPPKLSGPHAPILASMASDGYARVPAKKLQVNAEESSDDLANPPKVEEKLGVVPHGLSTDSEVVQREAESISRKTLRSSAEKFEFQAEVSRLMDIIINSLYNNKDIFLRELISNASDALDKIRFISLTDKEVLGEGDTAKLEIQEHELLESLVEADTRRQERAKKMEEKKVYLQLYEAMEALVTPNLYGNLVANTAAGIVGGMGIMPGGRDCS

SEQ ID NO: 68612 - protein, 302 aa, Zea mays
  Coding DNA Sequence Number=SeqID_25237
MAHNAGDGMVRGGAIDRAAQRPYVRLRPLAYVTGNKPRGSIGSPPERGAQAHRIKPGHVSVPDPCLGQGIPYPRTSLWVARTLLGGIRTPSKGPGMLTWESRTVFGGPGCAYRGLVLPRGGPEPTPKEDDKWARALVLRTRLLVLVEAKRRTTVGGGALFTRRFAFSSHRNRRAKCMTCGPRPPCQRLDRWLRRRRGGTLPRGGSTLLVQWFAFLTVGHGEDEGAHYRGAVACSLCDDSPSSHSKTSTPARVGAVGLVFPLLEVRGLVGAALFHRCLASRMFISLAVVESELSRGSASHMGW

SEQ ID NO: 68613 - protein, 496 aa, Zea mays
  Coding DNA Sequence Number=SeqID_25238
  Homolog annotation: Hit_ID=Q6Z9R1; Match level="QueryCoverage=91%, HitCoverage=74%, E-value=1e-115, Identity=55%"; Hit description =Putative uncharacterized protein P0461F06.38
MRVADGGGGGGAGETGAGLRGGVGGGAVVEDGHGEASGGFVRRGGRLGTMDPERDEMLTSSSSYGSTEPQEEEEEGAGALEAAKDNKRVHAPEAESAMPTSCLIERQDQRHHRLGAVLFQGRKGRAQRPASLDFGCPGVARSSTHSPGFPAAGVAVVNKGMGVSYPSHSRPDVLSSPGTPSCNRRGMAGVGYQQGPRSERVIPPWTGHTSHSGSGMVLPYSTGTGRTLPSKWEDAERWIFSPNPNPNNALGRSVPQLWRPKSKSGPLGPPGRFCGAYSCVSSSAQFLDNGRVGNLTVNAHYMAGMLLPEHICGGVMDWERDASGASGEDSSNGQGGCRPGQMNVRHPAMQPTRVSQQHGSAMESYQSLHASLQSIQDGGIESIKDSATSSAPIILRKDVATQTSPAISRSSSPSTRTSFSRSLSSQQVKELESCFSKLEVRDVQVDDRVTLTRWSKKHVTRGSEKNATNIIECKKKTVDSKSSAWEVTQTAKCISM

SEQ ID NO: 68614 - protein, 128 aa, Zea mays
  Coding DNA Sequence Number=SeqID_25239
  Subcellular localization annotation: CTP_CleavageSite=39; ConfidenceScore=5.21e-01
MGRAPVQPGARARALGAAPRIGRGGFPSSPAHRTGRGRRAAAHAEVLRRQVLDEELGKLPSGVTSILPNINPVAVEEEALMMMSPKVAEARRLKEEAEKRAMIHGDKKEEDPLITKSEMRNEMRSMIQ

SEQ ID NO: 68615 - protein, 95 aa, Zea mays
  Coding DNA Sequence Number=SeqID_25240
MASFLAGRHRLTATAAHDLVIGDARSSLVLLASRLVLLASSDRVVASQLDGWCSVRCWLLLGPWLRSVVSGAPAWKAVKLMDLDAAAEEDVLLFL

SEQ ID NO: 68616 - protein, 224 aa, Zea mays
  Coding DNA Sequence Number=SeqID_25241
MARSGLGALAAARPLPLHDMAPTQRGFGSRGHDAPAPFATPLVRCKRVENLDANECGVVGVFIAPTTTKWPLEGCSRMAHRTVRCATGHCPVVMRMMVLVVTLVMVVSIATTAQEKIKPWKETFRSSKITTSSRHGLAATPSRLPVKAAFIYVSFSHFDYCKDYVDVSDMARLRHTARKSVIPFLPSRLAERSLRRPVTGQSSHLERLHHCLHEEQERQQQEQE

SEQ ID NO: 68617 - protein, 309 aa, Zea mays
  Coding DNA Sequence Number=SeqID_25242
  Homolog annotation: Hit_ID=A2XKE0; Match level="QueryCoverage=60%, HitCoverage=74%, E-value=3e-15, Identity=32%"; Hit description =Putative uncharacterized protein
MSFGLSDGGGTVEGGLSGGGGGGRCGGEYWQLETQPAGSAPPNEPANSLGGRFPQMQVNDSGELDLDGGGTLRGGGVAFCPCVPGSARVVTDPLASSLFGGREEFCASFDLGAKVPGDGYFSNMILDENVEGDFDINSNTCPDNQSQSRQVGPTAPTSRPNHKRSKNFSDQEDEVLVSAWLNISMDHVNKLRIQPKWLAKVDDLATDKTSNKRQKTTRVGDANGTPPNETEECQVQVIENNQLTRPNGKKKAKAALLQEKKKSVTAAIEHLWVGKKESDAEKELKKRRGSIKRLHLKSIELTRKKHLSR

SEQ ID NO: 68618 - protein, 107 aa, Zea mays
  Coding DNA Sequence Number=SeqID_25243
MADRRGVPPGLDPARRGALPAARGGTLYPQVMLPICQGIATSHTPLPRRRGRVTLRGLYKVPLASENPLQFIGSSNAGIPCKTAIAAKSSRGPPYTDHSPTALAPFG

SEQ ID NO: 68619 - protein, 398 aa, Zea mays
  Coding DNA Sequence Number=SeqID_25244
  Homolog annotation: Hit_ID=Q67TQ0; Match level="QueryCoverage=100%, HitCoverage=98%, E-value=1e-110, Identity=55%"; Hit description =Putative uncharacterized protein B1342C04.33
  Subcellular localization annotation: CTP_CleavageSite=50; ConfidenceScore=5.59e-01
MASLTPAAHAAGLRRLSTRAAASPSSASASPRQGLHSFAPLAAAVLGHLRASGVAVLPGLTELELAHAEAEMGFAFPPDLRAVLAAGLPSGPGFADWRSCAGLRSAFDMPIVAASLQIARGALWPRCWGPRPADPDRALRLARSAIRRAPLLVPLFDRCFLPCRPCLAGNPVFFVTDDRVLCCGLDILHFVTRDSCFQPPDLRAPPPPVAQQQQYAGEAVATPCTRRSLDAACRGKAPRWIEFWSDAASDHRRRNSSFSDASTASSLSSGCASPPPARWPRNPHWVDSYLDRLGHVLRQGGWRDTEVTEMVEVAASGVFDGEEAAVPVVDSDAVLDALLLKADQCSDSLRRAGWSSEDVSDALGLDLRWCKERPRPAMLVPQEIAVKVERLAQSVARP

SEQ ID NO: 68620 - protein, 479 aa, Zea mays
  Coding DNA Sequence Number=SeqID_25245
MLTLSVRSRPPTTSAANLTDKVAALEREKVDLRRQLAAERREANEAIAKEQAAQADAKLARAEGNLAKELVEQLQGRLTALESRAKEAEAAMRAEAERTRTQLMDTYRELGARTGDFEVPDREPGLRCLQWAQEELLELPTVVGGLMSYASLVTCEGAMNALSREGCRHFEAFDQVDEDFERDIYKVEDPVVKESAGALYDRMWGLYGREVVRERAEAARAQAERGERVDDFGALDSVLPDLGSTLAEAVTGVDLEPILETAAIATAAPPSAATGEGDPDAPAAAVPSAEGSAAVAAETAAEAAAEPLAEPTAGAPAAPGPSQVQEFGPAHATATTEFLAASTAEGGNEYGGPVSEFFDFTDSGSSVEWTEESSEEDLDYFAALDVAAAEASPHTADASNVPGPSTGRRRRRAVAKRRVSAEEGARLRVSRASRQELLSSPAAAGVGERELRSLFAGEELRIMLFNYREMGIIPKIEPM

SEQ ID NO: 68621 - protein, 401 aa, Zea mays
  Coding DNA Sequence Number=SeqID_25246
  Gene Ontology: Mol. function=protein dimerization activity; Cellular component=nucleus; Biological process=regulation of transcription, DNA-dependent
  Homolog annotation: Hit_ID=Q53UC6; Match level="QueryCoverage=65%, HitCoverage=88%, E-value=1e-49, Identity=43%"; Hit description=BZIP transcription factor
  Pfam annotation: Domain name=bZIP_1; Domain location=218-275; Score =40.4; E_value=6.6e-09; Accession=PF00170.12; Description=bZIP transcription factor
  Pfam annotation: Domain name=bZIP_2; Domain location=218-275; Score =44.5; E_value=3.6e-10; Accession=PF07716.6; Description=Basic region leucine zipper
  Pfam module annotation: Pfam domain module=bZIP_1::bZIP_2; Domain location=218-275::218-275
MDLNECERRGPAGPDPLSRQGSIYSLTFDEFQNTLGGMGGGLGKDFGSMNMDELLRSIWTAEESQAMASASASASASVSALGAAVDGGAALQRQGSLALPRTLSVKTVDEPVAPRPIQAVSNGASIFFGNFGGANDAGAGAMVFAPVGIGDQAMGNGLMPGVAGMAGGAVTVSPVDTSVAQLDSMGKSDEDLSSPMAPVPYPFEGVIRGRRSGAGVEKVVERRQRRMIKNRESAARSRARKQAYTMELEAEVQKLKEQNAELQKKQAQEASMSFSLSGGGGTVEGGLSGGGGGGRCGGEYWQLETQPAGSAPPNEPANSLGGRFPQMQVNDSGELDLDGGGTLRGGGVAFCPCVPGSARVVADPLASSLFGGREEFCASFDLGAKGMKLCGDSELVVQLLA

SEQ ID NO: 68622 - protein, 240 aa, Zea mays
  Coding DNA Sequence Number=SeqID_25247
MKPWEEASRSSKTTTSSRRGRAGRGPLHHGAHAGVVATAGEAARRRGGCRLWQVIGAEVVAYTGEPLGAEVVASAGEPLGAEVAAAASEPSGASYPHDPTGVETSIPKKEFGNGPQEILGHPSQSGGACRPTVRDQAERLHSSGPPQETSFWVRDQAKQPHRLRTTPWNGLPFFRTGPQAVGPSCFRREVLNCKPGCSIRMSSYQQAGLMRADLTGLAYTYALSSYKREKNLTPQTCSYG

SEQ ID NO: 68623 - protein, 181 aa, Zea mays
  Coding DNA Sequence Number=SeqID_25248
MGSCAGSIDVCDDRIGRHGPGLCCACVRLRLASVVVVDWCLVVVVLGLGGRRLALAAPVPLAELPRLGAGAVVSRGGGGGLYFESHLEGVNRRNLKIINFGHALHPELGLEINISEFGVRKMVLLAQSMRITLGANSKQYEQKSFRERGETNRMVKINTSGHDDLFPEVRFQRTYSPLRRP

SEQ ID NO: 68624 - protein, 74 aa, Zea mays
  Coding DNA Sequence Number=SeqID_25249
MAKWWSSRDGEVTGEALGCDRGWDVVFYVRGDVVKLRGGGELTRVKGDGDASSIELRGEGGRVAEAGARRKGAR

SEQ ID NO: 68625 - protein, 130 aa, Zea mays
  Coding DNA Sequence Number=SeqID_25250
MCMMKGYHPYHHFSGMIRDSLVWEGPKGYDGWRHREDKEGKVLSWFGHGGGLVPSGIIAKAECMSIFGNKDEATGMGSSVVMEGTFVLKTSYCSEVEGFPFLLWSCALRLGVCKKLEYVWKEYCENGVEK

SEQ ID NO: 68626 - protein, 74 aa, Zea mays
  Coding DNA Sequence Number=SeqID_25251
  Subcellular localization annotation: CTP_CleavageSite=14; ConfidenceScore=5.15e-01
MRAYLYDRVPRFTPSMRRWSRAPTTSPASTTTPPTLPPMWLGIYHNGVGLERGSRRDVFMQLGCEQVVRELDDN

SEQ ID NO: 68627 - protein, 40 aa, Zea mays
  Coding DNA Sequence Number=SeqID_25252
  Homolog annotation: Hit_ID=A3ALG4; Match level="QueryCoverage=92%, HitCoverage=11%, E-value=5e-10, Identity=86%"; Hit description =Putative uncharacterized protein
MEGKEEGRIFVGGLSWQTDERKLEDAFGRFGKVVDAQQEA

SEQ ID NO: 68628 - protein, 760 aa, Zea mays
  Coding DNA Sequence Number=SeqID_25253
  Gene Ontology: Cellular component=mitochondrion
  Homolog annotation: Hit_ID=Q10G00; Match level="QueryCoverage=100%, HitCoverage=99%, E-value=0.0, Identity=70%"; Hit description =Expressed protein
  Subcellular localization annotation: CTP_CleavageSite=68; ConfidenceScore=5.35e-01
MMRWPRPPAARKFRVRLLVRRAEGLPPPSPSPSPSPSPATAASPEREPPGAAQPRAAVAAEVRWKGPRASALGSLRRAAVRRNRTREDAGAAWEEEFESVVTLAAASQREGAAFHPWELAFCVFSDINKGPKNKPSILGTASLNLADYALTAGETIEIILPLSIPGGAPERASSLHLTLSMVELRAFQETSDASQRSAATLPLSPSSGDSFPGGKDEVSVIKAGLRKVKILTDLVSTRRPKKTCQAGGEDKFCVNSDGAEYPCDTESLDDDLDDRVEEDEFGDSTIRKSFSYGSLQSVNYVGGLVYAHAKIDGEHEDWIYYSNRKTDVGFQVEKVLPSTTENGLLTAKRSILPWRKRKLSLRSLKAKGEPLLKKAYGEEGGDDIDNDRRLLTSSDESVSEGSRGDGSANTMVSEFGDDNFVIGNWELKEIISRDGRMKLSSQMFFASIDQRSERAAGESACTALVAVIADWFQANQNIMPIQSQFDSLIREGSLEWRNLCENETYRERFPDKHFDLETVLHAKIRPLTVSPSKSFIGFFQPEGDDDMSGFDFLNGAMSFDNIWDEIAQAAEFSSSDSPNLYIVSWNDHFFLLKVEHDAYYIIDTLGERLHEGCSQAYILKFDKNTTIHKVPGEKKSCSPDSSGPMKDSSGSESSTTDQDSGNDTEEEVLVSKGKESCKEYIKSFLAAIPIRELQADIKKGLMASTPLHHRLQIEFQYTQSSPKETASATQLLTMEAPFEFSWPEAPPTMEVTLTSAVSVV

SEQ ID NO: 68629 - protein, 34 aa, Zea mays
  Coding DNA Sequence Number=SeqID_25254
MARLAELQRLHLGLRLTSRLSFLYSMATQTRSSF

SEQ ID NO: 68630 - protein, 203 aa, Zea mays
  Coding DNA Sequence Number=SeqID_25255
MRNRIPKVTEAAVIEDFYRGSNDSAFIRAILQKVLTTSEHCFERRTFTSPLTSGPRTSSEERNLHHRHRGATQTSNPTGIGRKGLVRRSTLPNHPSLVPEGHPVEASGHWTTSSTPSARTIRTCATPYGTAGTSSTPSEMANRSSLYHLPHREEGLASPGSLSNQKGEGVEHSHALTGRSTSSSEAMGRKKTEDNRSSMTGRS

SEQ ID NO: 68631 - protein, 79 aa, Zea mays
  Coding DNA Sequence Number=SeqID_25256
  Homolog annotation: Hit_ID=Q7XBD4; Match level="QueryCoverage=59%, HitCoverage=5%, E-value=6e-08, Identity=58%"; Hit description =Cinful1 polyprotein
MNRVFDAIGFVYPDYRYPLRGQGKKRKDAASAALVEPVPKGKKMKGLILSNALRAQKNIEDEGYTMALNNLHSEDDVMI

SEQ ID NO: 68632 - protein, 80 aa, Zea mays
  Coding DNA Sequence Number=SeqID_25257
  Homolog annotation: Hit_ID=A3A3H6; Match level="QueryCoverage=50%, HitCoverage=10%, E-value=4e-12, Identity=87%"; Hit description =Putative uncharacterized protein
  Subcellular localization annotation: CTP_CleavageSite=46; ConfidenceScore=5.28e-01
MRSRLRSRVMDRSYSAGVRATPVVLNVPVCSRPVFGFFKEKKEAANAASARARLALARRTAAGTAPPAGGASARDLGSGN

SEQ ID NO: 68633 - protein, 437 aa, Zea mays
  Coding DNA Sequence Number=SeqID_25258
MAENDPVEEPEEFAGEAPEQQSVVMRLMVLVMIMVLVVSVATTAQAKMKLWKETSRSSKITTSSRCGLAATPSRLPVKAALSTFLFRTLIYCKNYMDVSDMARLRHTARKSVIPFLPSRLAERPLRRPVAGQSSHLERLHHRLREEQERRRQEQRSSSLSLHQEIESVRSCSPVLPLEPPPAPPLGAPASGVAAGGDPDDGGGDDSSSHDTDFSANPEPEGWVARPITRDAARGCHFHDALDTLLRRAFDRHTWSVEYRCVVYQHSRGVYPDRWEATCLVRCPEDSLQGAEACSEHYSISERDSAEAAMQDAARRALSHYCSVFGGAADGLDLKYYPRRSSGSTGGVIVSPVGEGNPRLSSTVNLAAVLNTELDHALDELSRARAEIALLRAERAERRFLDGGSPAPVGTQHPYRSPQRGHQSYGNPACKTKINLEP

SEQ ID NO: 68634 - protein, 185 aa, Zea mays
  Coding DNA Sequence Number=SeqID_25259
  Homolog annotation: Hit_ID=Q6J9V9; Match level="QueryCoverage=57%, HitCoverage=37%, E-value=2e-39, Identity=74%"; Hit description =Putative uncharacterized protein
  Subcellular localization annotation: CTP_CleavageSite=29; ConfidenceScore=5.48e-01
MMTASKKVAPSGVQQPPQSTRAPSPLLIRGSKAGPSEGFDSRPRSRRVRDDPGYVRYMAEARATLPRYPRTFSRPAGTICNGIPPEGGTEPSDPIEWVRVQQITCRDRLTPYPDTRASVGLGLNLSLGRRSPPRPTLGLGLSLGLGRESQPRPTSASASGEDSRHFSDGHVSACTGLKAILCQPR

SEQ ID NO: 68635 - protein, 236 aa, Zea mays
  Coding DNA Sequence Number=SeqID_25260
MTRRSRPRAPTDSVARGLVCPPHAALAEGHTPVAAPWWPGKTAQEASALRLWPLRAAPPGDLARALGLPVQPPGSRVVELAGRCEPSEHAPGDSPARASGQRARAANLAERHGQVPRLPTPSPLTPRASETCAPARLPTPRHGEALLDQGHGRHATSRPEAATAMPWLGLATPRPPTHHRRPHEAVRRRSRWPPGSEPPEATPAWGCAARGRALAAGWFGWPVRVSNPSRHPLWLC

SEQ ID NO: 68636 - protein, 126 aa, Zea mays
  Coding DNA Sequence Number=SeqID_25261
MAIAEHEYAHIGSCWVIQYCRDSLAHRKEVLTYFHFKKIPRYKINDILLRLVVTYTNHFVAHFVGLYRMIYYILKPELYVSSFIFPTGVFEMMTIDILLFFGLEVYGRTTAYHGSIEPPTIIYKDN

SEQ ID NO: 68637 - protein, 143 aa, Zea mays
  Coding DNA Sequence Number=SeqID_25262
  Gene Ontology: Mol. function=structural constituent of ribosome; Cellular component=ribonucleoprotein complex; Biological process =translation
  Homolog annotation: Hit_ID=Q9AR08; Match level="QueryCoverage=35%, HitCoverage=21%, E-value=1e-17, Identity=86%"; Hit description=9S ribosomal protein
MRRADEAARDAVCRGARTRTPRHRERDRSRDCELPAGTVCWKWKLRVLLWQSCGLVAWFSCASVLAHHNWVSQQIWRWLGFWTEIEEVISALLQGNPMWTEYCNVPLMTLGFENNYDVFVKVHGGGLSGVRPGAQAICLGVAR

SEQ ID NO: 68638 - protein, 465 aa, Zea mays
  Coding DNA Sequence Number=SeqID_25263
  Gene Ontology: Mol. function=transferase activity; Biological process= biosynthetic process
  Homolog annotation: Hit_ID=A2XMC1; Match level="QueryCoverage=80%, HitCoverage=80%, E-value=1e-178, Identity=82%"; Hit description =Putative uncharacterized protein
  Pfam annotation: Domain name=DUF616; Domain location=140-453; Score =536.8; E_value=2.4e-158; Accession=PF04765.4; Description=Protein of unknown function (DUF616)
  Subcellular localization annotation: CTP_CleavageSite=39; ConfidenceScore=5.37e-01
MPSSSSLIHGISISVSDDDEATGKVRVRVRRKRSRGPASASARRRRILFRAARLGVPLLLAALAVCLLLYESYRLTPSRSSTLPPPSFADISRLSRNARAADGARKSCLKFLDPEKLQNLELPEIPETNLSMKEVLYRSSLPHIVNDTPPHTENSRFNLFTGYQTLTEREESFKVNFLSIYISMKKSVTVHCGFYNENGGFRVSDVDREYMRSCEVVVATCAFGGGDDLHQPIGMTENSIRKVCYVAFWDEVTRAAQEEEGHTISEDLVIGLWRIILVSDLPFSDQRLNGKIPKLISHRLFPMARYSIWVDSKSQFRRDPLGVLEALLWRSNSSLALSEHGARSSLYDEAKAIVKKHKATPEEVEVQLDQYRRDGIPDEKRFNGKKALAEASVIVRNHAPLTNLFMCAWFNEVVRFTSRDQLSFPYVLRRLRPPGVHLFPVCARKDLVNSFGHKRKVKPLVKDTT

SEQ ID NO: 68639 - protein, 211 aa, Zea mays
  Coding DNA Sequence Number=SeqID_25264
MGAKREGAYGPRRRPQKERQLGLGNPNRPLPSQAAAASTWRRWARPLSSASSGGCTGSTGARPLGPSVQVGTHPQRHGVPATQAAWAQLSDDAGAAILACAGTAVGAAPASHGVDTGRGRWSPGTARSRTRLRPSRPKWRGGGWGAWAPWWRRRGIGSARADRLLPRRGGSDHGGARARGTRSATGEPGAALSVHGQLISHVRVLEFYFDS

SEQ ID NO: 68640 - protein, 190 aa, Zea mays
  Coding DNA Sequence Number=SeqID_25265
  Subcellular localization annotation: CTP_CleavageSite=67; ConfidenceScore=5.00e-01
MASTSVGGTGGVQYPLYNNTTISTTILFQLPITLSSLTVGRRRPLIDQLHGGRGPEKVQFATKGFSRFMRRSGFCPDRIRRLSIAELSSSTRARAFASLAHGTVTAWISFSDPHRRRPIPAAIRAAAVEIYTTSDQISLPENEEEVEVTEEKTPPPSEPQAGNCFYFDICGSEPDSPINEGKPRCICHHP

SEQ ID NO: 68641 - protein, 386 aa, Zea mays
  Coding DNA Sequence Number=SeqID_25266
  Gene Ontology: Mol. function=transcription factor activity; Cellular component=nucleus; Biological process=regulation of transcription, DNA-dependent
  Homolog annotation: Hit_ID=A3AN33; Match level="QueryCoverage=86%, HitCoverage=54%, E-value=5e-79, Identity=47%"; Hit description =Putative uncharacterized protein
MDGAADGSSGVPVQQQHHGGLFYPPVISSSLAPFCYALGGGQGGLATSAADGGEEFYAGLSSMPLKSDGSLCIMEALRRSEQERHGVAVSSVSPKLEDFLGASASTAMALSLDSPSFYYGGAHGHGGYLQPLQCSMVPVSLGDDVYGGCHAQMVDEQSAAAMAASWFSARGGGGCYDVNGAGAIEPSQGHPHALDLSMSSGTAHVAVPRRHQVSLVFSPFPDRPYAAAVAVPHESLTGRVRGFHRAKSRHRWTGRYEAHLWDNSCRKEGQTRKGRQGHMVQVEDYREQLEEMKNMTRQEYVAHLRRKSSGFSRGASIYRGVTRHHQHGRWQARIGRVSGNKDLYLGTFRAPLVGLIFQLRFWLMQKLCQTPLFQMTSPVKCFSKMN

SEQ ID NO: 68642 - protein, 147 aa, Zea mays
  Coding DNA Sequence Number=SeqID_25267
  Pfam annotation: Domain name=bZIP_1; Domain location=39-102; Score =41.2; E_value=3.6e-09; Accession=PF00170.12; Description=bZIP transcription factor
  Pfam annotation: Domain name=bZIP_2; Domain location=39-93; Score =23.2; E_value=0.00099; Accession=PF07716.6; Description=Basic region leucine zipper
  Pfam module annotation: Pfam domain module=bZIP_1::bZIP_2; Domain location=39-102::39-93
MDVTTCGFTPWGPESCPGLEQVMASTPAAAARHPDPEEEERRRRQRRKLSNRLSARRSRARKQQRLEELRAEAARLRGQKRELEARLQALARHGLAVRCQNARLRAEAAALARRLLAIASYAQQPQHKAGVAPAPAAALLGLASLTT

SEQ ID NO: 68643 - protein, 245 aa, Zea mays
  Coding DNA Sequence Number=SeqID_25268
  Subcellular localization annotation: CTP_CleavageSite=81; ConfidenceScore=5.00e-01
MDTPGLAADDGETQDPSGSGQASLGATAGLAKSMARLALTPPRSGLCSRELLLTLGASDDAFDTCALALPPVPAVSTDTVSCSRDRQQVLVLLPLPSAPLDSGRQRRLDLAAGVRHAAAGLHQRHGGATAFLPAPYLVAREQRAAVHDLVHVVARGVEVGDRVQAPELDGRHVVRLRRLLLRACTGTAPPQGPRQDRTATSEMRFFVGRQRSNGQAKRESDASHRACAANAKRQSRERPAARSQP

SEQ ID NO: 68644 - protein, 207 aa, Zea mays
  Coding DNA Sequence Number=SeqID_25269
  Homolog annotation: Hit_ID=Q10CY6; Match level="QueryCoverage=96%, HitCoverage=90%, E-value=4e-61, Identity=64%"; Hit description=Seed maturation protein
  Pfam annotation: Domain name=SMP; Domain location=124-206; Score =34.0; E_value=5.2e-07; Accession=PF04927.3; Description=Seed maturation protein
  Pfam annotation: Domain name=SMP; Domain location=7-65; Score=79.3; E_ value=1.3e-20; Accession=PF04927.3; Description=Seed maturation protein
  Pfam module annotation: Pfam domain module=SMP::SMP; Domain location =124-206::7-65
MHAQDKPVKFGDVLDVSGELDDQPVAPRDAARLQAAEQSVPGGTQKGGPAAVLQSVATVNARAGHVGRAQTACPVADAGATITETELAGRRVVTESVGGQVVGKMVTPAPVAMTDPPGALEKDAVTIGRALEAVGAMVGDRPVEQSDAAAVQNAREKLPADKGATWEDAERVVSAEIRNKLDMATTPGGMADAVTTAARLNQERPRP

SEQ ID NO: 68645 - protein, 299 aa, Zea mays
  Coding DNA Sequence Number=SeqID_25270
  Gene Ontology: Cellular component=integral to membrane
  Homolog annotation: Hit_ID=Q8LNN5; Match level="QueryCoverage=92%, HitCoverage=85%, E-value=1e-128, Identity=80%"; Hit description =Putative transmembrane protein
  Pfam annotation: Domain name=DUF1084; Domain location=11-295; Score =594.0; E_value=1.4e-175; Accession=PF06454.2; Description=Protein of unknown function (DUF1084)
MRGLLAVEAAGAASVPASVLHGAVDWWRDVNESPLWQDRIFHALAVLYGIVSAVALVQLIRIECRVPEYGWTTQKVFHFLNFLVNGVRSVVFVLRRNVQLVEPEIIQHVLLDMPGLAFFTTYALLVLFWAEIYYQARAMSTDGLRPTFYWINGVVYAIQVINVLCAVLWTLITSKVLIVYESAWQIILWLVLWWKPVRVMVILPKMFFAGVSLFAALGFVLYGGRLFLMLQRFPVDSKGRRKKLQEVGYVTTICFSCFLIRCVMLCLNSFDKEADLDVLNHPILNFLYYLNSPIATAAG

SEQ ID NO: 68646 - protein, 62 aa, Zea mays
  Coding DNA Sequence Number=SeqID_25271
  Subcellular localization annotation: CTP_CleavageSite=29; ConfidenceScore=5.10e-01
MRLGAPFIAPRQLGAVESKSGRPSLPSVVGGTGQHSAHRTLSSDRFVPNGRENDRWGEVVYL

SEQ ID NO: 68647 - protein, 154 aa, Zea mays
  Coding DNA Sequence Number=SeqID_25272
VRDLDRTIQIRPPDLNETKGYATFNLNRTPAIWRSRVFLLRPSPGNGGARAEGYYTQLGEYTKANTIRVIYQYVERPEHHPRPDAGWRQPMDSGEVSWLLCSLLRNPTECRRDTSPMHAEDQAMAESPWCLHDSLFLASSDTVGKLCFNGSKMQ

SEQ ID NO: 68648 - protein, 394 aa, Zea mays
  Coding DNA Sequence Number=SeqID_25273
MSSGRDLVEEFIGYGVWPLAHGWVLGEVCPRQMPTLGQQLVRSLAFSLDLGGRDPATFVREVEDRAVRIVGRYAPRTEGLRSWDIIGSNVRLNRVFELNRLPYVGYPGDDAATPADRRRRCALTWRMHVLPTLTRTSLWGIIMLDPWCNFCVSGEISSVAASKDVVGSMSQQLRHASQQLKHTVDFADHVASGALTSEFAVKIERLRAQHTDAVWEKSTVENKSYRLTERLAAAEAEKGDLRCQFAEERRDMNKAIADAQAAQAEAKLAWAEASLARQRAEELEARLNSLRNCMDKTEVSTGAEVERTHVQFVDAYRELGARTAAFKAPGREVGLRFLEWLHEELGVLPTIVTGLMSFASLVTCEGAVNALSREGCGHFEVFDQSDEGFEREIF

SEQ ID NO: 68649 - protein, 932 aa, Zea mays
  Coding DNA Sequence Number=SeqID_25274
  Homolog annotation: Hit_ID=Q336W9; Match level="QueryCoverage=92%, HitCoverage=76%, E-value=1e-177, Identity=45%"; Hit description =Expressed protein
MACNKNMFVKQGALSGSSDWLCDFNQTVALHFPDDLAEHIVGEATPYDIYSRNHFSNLFGLHSLRSESSNLTSEKHPGNWQESSETLTKDFGPSVFHQQQSAFVSKLLDHSGAEDTGPYPPRQDLNQYPFGSTYDKYMTQLSSCSTDTRPHIFSTQYVNSPEMANTTVPLMNDTIGESSFSFSHYMNPCRINLDYFDSVWNEQKGLGYQTTDKQHGKWSNPDDKATVGNYSLNSLGESHLNPEHLGNGRPMQGSSEMKHELGSFSSKVSSSESGFVQPRECSSEFPEVNNTSVDSPCWKGTPAQYQPSFGIIENNGAPPVVIGTVGYINSHQNQKLPELSFEYPWRFCEHQVSGSENDPFKAVKLPERCKISKDHKVLPIDVRVLNDMTTHASYLPDKQHPTTQKCNDSGEDSKNVITSSQQESSCSGRKPILLGEHGGSLTGSISELMSKSVMNPIAITPRVHTDHLTTGIPHGNIFSAAVEKEESTHKRGEDPSQCYPGVEGNMLNMSSESSSSNQAIFLKLMHNLSVVLLSTCKGGSSLQEDEEELLQSVIQNLTAASSKRSKVEQKNDDGLSNSSQMKFKDINYVRKHFWRSMHEDSEQENADSEFKATVSQVLTNHQEDKVLDNTEVPQASIYRNLWIEAEASACKLKYELQHALLKLETAKGLNDTIKAPDSLEDSKGSNSYIFSNKPQNHGKGTVSCAAAFQGHGGDSRDKQSPVVSRSIFNGVDADVFARFEVLQSRIDNINSLSEIDCGEQKEASKRPYAVEDTVMARLKVLKSRPDNITSLSQGSTKHQLDGSTNSADNVDDTVIARLGILESHPNNEALLGQESSKRQLDARTNREDGIDAAVMARLRILKSRPDNETSMGDANKEQQDACGEQLNGDDLGIVSNGAISNTLSEKCSKFTHSDDHLGEKNSVGVPDTFGDG

SEQ ID NO: 68650 - protein, 106 aa, Zea mays
  Coding DNA Sequence Number=SeqID_25275
MCAARAAGLQTGGAVVVHGAVLNLGVESQELGTGGIILNSSPLIWAPSWAAVPRAMVLLANPAPRSRMARTGGLLHPRGRGGATQFSRRMKEATWPFNRLSTTRIR

SEQ ID NO: 68651 - protein, 67 aa, Zea mays
  Coding DNA Sequence Number=SeqID_25276
MDSGEVSWLLCSLLRNPTECRRDTSPMHAEDQAMAESPWCLHDSLFLASSDTVGKLCFNGSKMQVSY

SEQ ID NO: 68652 - protein, 330 aa, Zea mays
  Coding DNA Sequence Number=SeqID_25277
MESHDLRAERESRLVGKVAMRLMVFGIDSGNGKWYSFRLERMARLRHTIRKSVIPFLPSRLTERPLCRPVTGQSSHLVRLHHHLHEEQERQRQEQEQQGSSFLLQQEIESEPEGWVARPITRDAARGCHFHDALDNLLRRALDRHTWSIEYRCVVFQHSRGVYPDRFDSTCLVHRPENSLWGAEVFSEHYSISEQDLAEAAMQDVARRALSHYCSVLGGVADGLNLKYYPHHPSGSTGGVIVSSVGEDNPRLSSTVNLAAVLNTELDHVLDELSRARAEIAQLRAERAERRHLDDGSPAPIGTQHPYRSPRRGHQSYGNPDCKTKINLEP

SEQ ID NO: 68653 - protein, 146 aa, Zea mays
  Coding DNA Sequence Number=SeqID_25278
MAGPARNTSRADPVSKRQARADWTSRHGAQFDVEETSTTGVRTLAANCGCDAIERHGAVELDERKGEQGGATKQGCGGETPRQCVGEELNRELHHGRSSSTREELGKALDQGEQGRRRAEARAVVRTKGRGDREERSARGKQGTPS

SEQ ID NO: 68654 - protein, 168 aa, Zea mays
  Coding DNA Sequence Number=SeqID_25279
MPSAPPQGIPAAGGDPDGDGDDDDAGGSSSHGTELSEEPEPDEWIARPITRDAARGGVADGLDLKYYPRRSTDSAGGVIVSPVGEGNPRLNSMVNLVDVLNTELDHALNKLGKVWAEVAELRAECAVRHYLDGGSPAPVGIHHPYRSPPQGLFDYGTPDCRTRIDLDP

SEQ ID NO: 68655 - protein, 124 aa, Zea mays
  Coding DNA Sequence Number=SeqID_25280
MCLVTSWLRVFLIAATLFFWSTVCLPYRGASFSLWVTQKERNHVTSGIGGRTPRDGASRAAYKILQDYLNRFPGEIATAMPGVFPRGDIFNPKWDQQKGRALTGGDSEEQHSDTEASSAMFAVM

SEQ ID NO: 68656 - protein, 97 aa, Zea mays
  Coding DNA Sequence Number=SeqID_25281
MQKLEMLICMRRFTSFMPSSIQSTRQDQKKQTPSQPMMEEGDHEAPLPPPPPFTPEQFFTQFLGAQRNMENLQQNMEVELRNIAKNNHHAQPHGQPV

SEQ ID NO: 68657 - protein, 489 aa, Zea mays
  Coding DNA Sequence Number=SeqID_25282
  Homolog annotation: Hit_ID=A3BB24; Match level="QueryCoverage=68%, HitCoverage=53%, E-value=2e-32, Identity=31%"; Hit description =Putative uncharacterized protein
  Pfam annotation: Domain name=DUF1618; Domain location=287-407; Score=- 6.9; E_value=8.5e-05; Accession=PF07762.5; Description=Protein of unknown function (DUF1618)
MERPWLILGRILYVNPPRDDDDMLEVEDAEEHAVVGEAQAEEDAQAQEEQHAAAVDAVVEAHDDQQAEVGEGGAEAEAEEEEQQAQLEESILNVNTDAAASEAAHAAHGAAEPDFTIWVAPPPWLTDLVAGPGSHPDPARPDMYPYIIASGRFCLLVHFSIAPFYGTNFEKEPNHSNLVVVRHFRRSDNGQIEARAVHVPDRPEDNVNIPALANIESVGLICNHETGHYLIAELVVPTDNQDESSVIYIRTEDGVWYSNYFAYPFWWESRRHWVPHGSVTIGNVVFWFDLSWGIIFCDDLTQPHEEQILSFFRLPRGCVLRDGHAPDLHYSRCVAVSENVLRYVQIIRKHDQAATVHMWYRNPERWITNYNESFDDIWDDESYIQTGLPRKSPGLVGVSPVDSNVVYFTLDQRLFGVDVPEHRVVDCAESVEPLNRTEMLDDSVSSRSLITWNLDADGAAIQISCVQMCCRNLLVMCSYMLQISTDRIA

SEQ ID NO: 68658 - protein, 87 aa, Zea mays
  Coding DNA Sequence Number=SeqID_25283
MDGARVPGRSSAKHRIRGSNEGAEQRRARPGEPKDAETERSVRPEESRERRAGELRGWGRGEPAEGARASRARRGELGRARDVNGPN

SEQ ID NO: 68659 - protein, 263 aa, Zea mays
  Coding DNA Sequence Number=SeqID_25284
MTASKKVRHIIRFRILFLFLFLSLTTGTGKGDTPKGILLREGNGPRAPLLIRGSKAGPSEGFNSRLRALRLRAHYWSEVRRPAPRKGSTAASGHSGSAPTTDQGFVGWPSKGFDSRLRRRARDDPGVRLTAAKSGLGRHRKLRLARPRARTRARPRKTTNSASPDLGLGLGLGPGRRRTPPRPTQGSDSGSAPEDDELRLARPQGSDSASASADGLRLARPKVSDSTSTSEDRLDLDLGGASTSPYLGLGPTTSQEGPSLPYP

SEQ ID NO: 68660 - protein, 134 aa, Zea mays
  Coding DNA Sequence Number=SeqID_25285
  Subcellular localization annotation: CTP_CleavageSite=37; ConfidenceScore=5.40e-01
MMVLASVAATLFAILFLFSLLSCLRLRATPFSAEGVRAGTSSLYSSNTSPDIGPRNDYCTSTRTFHSMRAPSFSSSSDVPFVFPAFALFFLPNLLPPPTVAAASRPTLVDAGFRDPCRHYHRVLVPCVLDSCMH

SEQ ID NO: 68661 - protein, 650 aa, Zea mays
  Coding DNA Sequence Number=SeqID_25286
  Gene Ontology: Mol. function=oxidoreductase activity; Cellular component=anchored to membrane; Biological process=electron transport
  Homolog annotation: Hit_ID=Q655L8; Match level="QueryCoverage=72%, HitCoverage=79%, E-value=0.0, Identity=81%"; Hit description =Putative multi-copper oxidase-related protein
  Pfam annotation: Domain name=Cu-oxidase; Domain location=302-457; Score=204.9; E_value=2e-58; Accession=PF00394.13; Description =Multicopper oxidase
  Pfam annotation: Domain name=Cu-oxidase_2; Domain location=540-642; Score=41.0; E_value=4.3e-09; Accession=PF07731.5; Description =Multicopper oxidase
  Pfam annotation: Domain name=Cu-oxidase_3; Domain location=176-292; Score=191.9; E_value=1.6e-54; Accession=PF07732.6; Description =Multicopper oxidase
  Pfam module annotation: Pfam domain module=Cu-oxidase::Cu-oxidase _2::Cu-oxidase_3; Domain location=302-457::540-642::176-292
MGVPDACALWRALIAVAGDRWREAAKFQSHVFLEHRTLSGVHRTLSVELERSAGRQRPQDTPTSSFFSAASPPTLFPLLCWVLRFALLAALRLSPISTRLVLAWLPLPTDSTGFKRPTSAETWPRACVRILRTRSPEPPGPIEFRLPMPALLLLLLLAAAPAPARAGDPYSYYDWEVSYISAQPLGVKQKVIGINGQFPGPPLNVTTNWNVVVNVRNALDEPLLLTWNGVQQRKTAWQDGVLGTNCAIPAGWNWTYTFQVKDQVGSFFYFPSTPLHRAAGGYGAITINNRDVIPIPFAFPDGDITLFIGDWYNRGHRELRSALDGGTLLGAPDGVLINGLGPYQYNESVVPPGIVYERINVEPGKTYRFRVHNVGVSTSLNFRIQNHNLLLVETEGSYTSQQNYTNLDIHVGQSYSFLVTMDQNASTDYYVVASARFVDAAVVDKLTGVAILHYSNSQGPASGPLPDPPNDQYDTAFSINQARSIRWNVTASGARPNPQGSFHYGDITVTDVFLLQSRAPELIDGKLRSTLNEISYIAPSTPLVLAQIFNVPGVFKLDFPNHPMNRLPKVDTSIINGTYKGFMEIIFQNNATNVQSYHLDGYAFFVVGMDYGLWTENSRGTYNKWDGVARSTIQGLRPEPDKIGHDPPSF

SEQ ID NO: 68662 - protein, 114 aa, Zea mays
  Coding DNA Sequence Number=SeqID_25287
MELSPEIAISRPETFPHCLTSATRTRGHGKSREANLTEFGGVEFPAHGEARLWQTSLLRRAIDRTASDPRLKSNAELRRGEPYDYGSLGSECHTTRILPNAACCVEGMRCGYAS

SEQ ID NO: 68663 - protein, 139 aa, Zea mays
  Coding DNA Sequence Number=SeqID_25288
MALPVDVVGPRPRPGDVGAPPKLGSSLSSVAEAEAEPEPLGRARRRLLGRGQSGVRALGSGEAEFVVFRPESEPWVGRSGVRRLPGLSPSPSPGSGGAEFAVFRVLARVRALGRAERSFLWRLRQGTAVGVAQAALSFC

SEQ ID NO: 68664 - protein, 293 aa, Zea mays
  Coding DNA Sequence Number=SeqID_25289
  Subcellular localization annotation: CTP_CleavageSite=2; ConfidenceScore=5.24e-01
MSSSSLMRRVFPPSKPPDGGYPPSFRLIVGGTQLRGSWYLSGIVRLQGFSSHSLVAPLRWWSPKTVTSSSWMGRGKPGCDPALSIGGVRHPRWGGGRGEPELYLLRGSVDHLLFQLLVVAIVLPRCDGDVLQSCRGRRTVAVQLGCNFPSFPSHSRRGRQRGSAGALGSGPLFGFDGWFASLERDREQELSGGRVHPGPQLLLQRSLASLPMFVTPQARGRSYPRGRNRSSVCKGTLNASVFVHRGCRGLNMDACASESCFSRKVMSEVSVSRRRGSPSARSALPLTRTFTRP

SEQ ID NO: 68665 - protein, 154 aa, Zea mays
  Coding DNA Sequence Number=SeqID_25290
MTVAGGREQRSRRQPGSRPIQEQQESLLSWREDGAPVIRPSNGSRTRNDRLANHSPRRINSAAGQAALLAGEAGDASPSPDRERGIPQKGSFPVKEPGSEPPLLIRGSKTGPPRGSTVASDRVGPTPTTGQRFEGRPPEGLHGRLRLLGLRAHY

SEQ ID NO: 68666 - protein, 207 aa, Zea mays
  Coding DNA Sequence Number=SeqID_25291
MDDDRPSLRSLSEGAGHRPRRGRPQLGTLPSLALVMKILEAEGGAEAAARLAFPHHQAGGTGKGGYPEKDPSLGRNQAPSLPTDQRFEGWPPEGFDSRLRSRGPYTHYWSELTGDTMFGAHRGQHGAFPLLLAKRRRRGVCKKAEPVPDRPLALCRGSGAALANPVPTEPLTASTYQPENLGPDRTPGLRPARMREQPDQPKHYARH

SEQ ID NO: 68667 - protein, 335 aa, Zea mays
  Coding DNA Sequence Number=SeqID_25292
  Gene Ontology: Mol. function=oxidoreductase activity; Cellular component=endoplasmic reticulum membrane; Biological process =metabolic process
  Homolog annotation: Hit_ID=Q2R5M5; Match level="QueryCoverage=81%, HitCoverage=82%, E-value=9e-87, Identity=62%"; Hit description =Oxidoreductase, short chain dehydrogenase/reductase family protein, expressed
  Pfam annotation: Domain name=KR; Domain location=59-251; Score=-68.9; E_value=0.0024; Accession=PF08659.1; Description=KR domain
  Pfam annotation: Domain name=adh_short; Domain location=59-235; Score= 86.0; E_value=1.2e-22; Accession=PF00106.16; Description=short chain dehydrogenase
  Pfam module annotation: Pfam domain module=KR::adh_short; Domain location=59-251::59-235
  Subcellular localization annotation: CTP_CleavageSite=25; ConfidenceScore=5.32e-01
MVSHSLSAWLMSSAPPPAWFAALVAVGMYTALRSAATFLAWLHRAFLRPGRDLAGRYGTWAVVTGATDGIGRAVALELARAGLHLVLVGRSPDKLARVAKELAAAAPACKVRSVAFDLAVTGDAARRGVARVAAAVEGRDVGVLVNNAGATYPCAAYFHEVEGPVWEAVLRVNVEAATRITRALLPAMAARGRGAVVNVGSGSSVVVPAFPLYAVYAASKAYVDQFSRSLSVEYKQYGVDVQCQIPLYVATKMSPVKGASPFIPSPEEYARAALRCVGYEARLDYYSLPDSTRDRALIYLSALFRTYANPWDQHDYAEGKISKGPSMKDIRKGSE

SEQ ID NO: 68668 - protein, 278 aa, Zea mays
  Coding DNA Sequence Number=SeqID_25293
  Homolog annotation: Hit_ID=A2WJL2; Match level="QueryCoverage=99%, HitCoverage=53%, E-value=1e-123, Identity=77%"; Hit description =Putative uncharacterized protein
  Subcellular localization annotation: CTP_CleavageSite=24; ConfidenceScore=5.03e-01
MGTPGFMDFRVVPLSTLFTYSCTNTSHGPSITLRCNGCRVPPRDHYVSWQFVDLLGQPATAVGFQFNLTARQHGNNQHMSFVSGTMNSDGYTDDVKLKTFRGRDSNVLKIQLFPQIYNNLGNLRLLQPLVQDFTQGSMFSDVSSLNSSLQNPRDGVVNTTLYISYLSDYIVEISNESVVGPVSVLASIGGLYAFSVAICLCLMSQCEARIKKLRDEDTRMLKILSKRRAQRNWDKLRKFVMYTWGLSNLDPSDRTCQQPEGSVMDSRHMRREAIRQGI

SEQ ID NO: 68669 - protein, 62 aa, Zea mays
  Coding DNA Sequence Number=SeqID_25294
MAHSGGDGMAWAGGGDGMARSQALGRVQNEILYVECYKKSWCMHMMSKMLHEMGSLGDNKGG

SEQ ID NO: 68670 - protein, 143 aa, Zea mays
  Coding DNA Sequence Number=SeqID_25295
MVLVEDLHGTYVDEVAKSKQSTVSTKTKKFKEIQFQKLQRLPDGCHPVFDNDHLCSINNHDLLPKMSTPSADLHLLPETGVENMRTPKSLHAELKRELSKLNTVLKLPCWCAASFLKYTELDHRESLALASDGLNYECNEAPS

SEQ ID NO: 68671 - protein, 188 aa, Zea mays
  Coding DNA Sequence Number=SeqID_25296
  Subcellular localization annotation: CTP_CleavageSite=34; ConfidenceScore=5.26e-01
MGVGLRSNRRLTSGSPPPALTTTTTTPAPDGRATAAQTSGWALLQTCPRPHRRSRGEDKYEEPEAQSADGGGDPVGDGDFSSRLRLDTDDRGHQPPRRPPAGGAAGSQADKPDALEVTTPAVDQPRVVEVRAARRASGRPLPRTPRERVTHEPAREVERRLSPAPTPARMMNILEAKGGTKIAARLAS

SEQ ID NO: 68672 - protein, 126 aa, Zea mays
  Coding DNA Sequence Number=SeqID_25297
MAERYQLPRSCVPPTMRRKDGGYPPSGGLEGGASGRRSGRRFAFAIITAPKKGPGKGDTPKRILPCEGTGLRAPLLIRGSKAGPPRGSTVASDRVGPTPTTGQRFEGRPPEGLHGRLRLLGLHAHY

SEQ ID NO: 68673 - protein, 157 aa, Zea mays
  Coding DNA Sequence Number=SeqID_25298
MSLCRSFIVDSFGAALERICRSIPVFSFHQCSLLPHRLFQAAIVPALQSGPSLHSFGSSISPLRPVTLDFSTPVVGPISAQPPVPPASSVTTAAVAVSVTAPAPADPTPQPTLESVPAPASTADPGSETDSDPQLAFALLPRPRPDAPSPPPTSSGL

SEQ ID NO: 68674 - protein, 326 aa, Zea mays
  Coding DNA Sequence Number=SeqID_25299
  Gene Ontology: Mol. function=protein binding; Cellular component =integral to membrane; Biological process=iron-sulfur cluster assembly
  Homolog annotation: Hit_ID=A2YPG3; Match level="QueryCoverage=97%, HitCoverage=50%, E-value=1e-105, Identity=62%"; Hit description =Putative uncharacterized protein
  Pfam annotation: Domain name=DUF1751; Domain location=58-154; Score =153.4; E_value=6.3e-43; Accession=PF08551.1; Description=Eukaryotic integral membrane protein
MNASAIPSPAGGGRFFTGFTKLCKGLAVIIFLVHILVHLFPSAATYLTLIPARCSLYRTIPFAWNLITACYIEQTIPGVIMSIVGLLLLGKVLEPLWGAKELLKFIFIVNLSTSACVFVTTIVLYYITQEETYLYTPVSGFYGVLSGLLVGIKQILPDQELNLFVLKISAKWIPSIVAFTSVVVSFFVKESISYLPIILFGIYMSWIYLRYFQRSLEVGLKGDPSDEFSFSSFFPVFLRPVLDPIASIFHKLFCGRSAKPEGTGQTLDGSQFPGLGSIEANRRRERGQRALEQRLAEKPAAVRNTEGTPPPKQQLEDAEDDASDEV

SEQ ID NO: 68675 - protein, 492 aa, Zea mays
  Coding DNA Sequence Number=SeqID_25300
  Gene Ontology: Mol. function=calcium ion binding; Cellular component =integral to membrane; Biological process=proteolysis
  Homolog annotation: Hit_ID=Q10L49; Match level="QueryCoverage=82%, HitCoverage=70%, E-value=0.0, Identity=91%"; Hit description =Expressed protein
  Pfam annotation: Domain name=AXE1; Domain location=81-344; Score= -219.3; E_value=0.043; Accession=PF05448.3; Description=Acetyl xylan esterase (AXE1)
  Pfam annotation: Domain name=Abhydrolase_1; Domain location=156-451; Score=-2.6; E_value=0.0085; Accession=PF00561.11; Description =alphabeta hydrolase fold
  Pfam annotation: Domain name=Peptidase_S15; Domain location=108-327; Score=-115.3; E_value=0.089; Accession=PF02129.9; Description=X-Pro dipeptidyl-peptidase (S15 family)
  Pfam annotation: Domain name=Peptidase_S9; Domain location=142-348; Score=-74.3; E_value=0.036; Accession=PF00326.12; Description=Prolyl oligopeptidase family
  Pfam module annotation: Pfam domain module=AXE1::Abhydrolase _1::Peptidase_S15::Peptidase_S9; Domain location=81-344::156-451::108- 327::142-348
MTYCATVKIEQQKGPRRENCHPFSLRVSLPESQARSPALSPSAEPEPGKGEGGYANARHPTPFTAAESIKKPAARRADYSPNDDLLEQEFMLKGRWFLRKDLEVKNGQGKKLQCSHYMPVVIPEGKALPCVIYCHGNSGCRADASEAAIILLPSNITVFTLDFSGSGLSEGEHVTLGWNEREDLKAVVNYLRTDGNVSCIGLWGRSMGAVTSLMYGAEDPSIAGMVLDSPFSNLVDLMMELVDTYKYPLPKFTVKLAIQHMRKIVKRKASFDIMDLDTIQVAKQCFVPALFGHATEDDFILPHHSDKIYESYIGDKNIIKFDGDHNSPRPQFYFDSITIFFHNVLNPPEVAEDHYFMTPHGSLGQGHWDTEQDIEYRFSQSPTGTANATTTEDAIAQLRSRRLMSRMEVPSGATTEDRTDRTEGFDSDLGPSSSSVSTATPPNGRNGRLLTPTSDDGEYVEYSFDSLSDMPHTVEDEDRWANIESGSGCLDH

SEQ ID NO: 68676 - protein, 254 aa, Zea mays
  Coding DNA Sequence Number=SeqID_25301
  Gene Ontology: Mol. function=phenylalanine-tRNA ligase activity; Cellular component=cytoplasm; Biological process=phenylalanyl-tRNA aminoacylation
  Homolog annotation: Hit_ID=Q652D7; Match level="QueryCoverage=45%, HitCoverage=20%, E-value=2e-43, Identity=67%"; Hit description =Putative uncharacterized protein P0463G11.14
MVLHGVDAKRMRFHTDLKNRRFDHIVFNFPRGGFRGKENDLRMIDLHKELVWGFFRNARHIVRQLGEVHVTHKSGEPYGSWDLEHLASESSFAMVDKVPFQREDYPGYNQKRGDGSEGSLGGVSMKELGLPVPGFYRTTDGKDTEEQSHCSPSWSSEGNLKYTLIFILELLPMAKLAKLWRELLTPTSKGGGGAGEGFDVTKSGDARVGLVGFPSIGKSTLLNKLTGTFSEDIESDDEDLDFEVDDGAEDEPKA

SEQ ID NO: 68677 - protein, 119 aa, Zea mays
  Coding DNA Sequence Number=SeqID_25302
MATEPAVQWAVVGYGLRPLEDSRVDLFPRGISNGTAVRRSLDLAAGSYEQQKKCSGTTSTLAKKMKLHEAKNKKLINYVDVLWCRGAPASGQHGVFRLHVKDYRLLRARELGEGSKKSS

SEQ ID NO: 68678 - protein, 55 aa, Zea mays
  Coding DNA Sequence Number=SeqID_25303
  Homolog annotation: Hit_ID=UPI00001971A6; Match level="QueryCoverage =54%, HitCoverage=7%, E-value=8e-07, Identity=76%"; Hit description =DNAJ heat shock N-terminal domain-containing protein
MYLGVPFVYEWVRNKGHSWKSQITTVKAVLIEEGKAGPVKKYDADAEAKGAPMEP

SEQ ID NO: 68679 - protein, 48 aa, Zea mays
  Coding DNA Sequence Number=SeqID_25304
  Homolog annotation: Hit_ID=A3A7Z9; Match level="QueryCoverage=85%, HitCoverage=14%, E-value=4e-07, Identity=52%"; Hit description =Putative uncharacterized protein
MASSKLTSDKDNPKKLQDRLKYVCGDKEGFANRAEAEAKRLPMHLLAF

SEQ ID NO: 68680 - protein, 66 aa, Zea mays
  Coding DNA Sequence Number=SeqID_25305
  Homolog annotation: Hit_ID=A7Q3J7; Match level="QueryCoverage=57%, HitCoverage=2%, E-value=8e-08, Identity=76%"; Hit description =Chromosome chr13 scaffold_48, whole genome shotgun sequence
MEAVELPLPAKVEFGKPSGSARNTEELTVLAMVAEKFGHQQLDLLPVGVSLVLRHGRPSYDKDGDG

SEQ ID NO: 68681 - protein, 448 aa, Zea mays
  Coding DNA Sequence Number=SeqID_25306
  Gene Ontology: Mol. function=triacylglycerol lipase activity; Cellular component=chloroplast stroma; Biological process=lipid metabolic process
  Homolog annotation: Hit_ID=A2Y7R2; Match level="QueryCoverage=100%, HitCoverage=98%, E-value=1e-146, Identity=62%"; Hit description =Putative uncharacterized protein
  Pfam annotation: Domain name=Lipase_3; Domain location=143-350; Score= 145.3; E_value=1.7e-40; Accession=PF01764.16; Description=Lipase (class 3)
MPGSIASRWRELHGKDSWKGLLDPLDMDLRASVIAYGELAQATYDGFNTEARSPHAGACLYGHADLLAASDSAGGGAGGISDRYRVTKFVYATSGLHVPDAFLLLPQPALGQQEPWCRESNWMGYVAVATDEGAAALGRRDVVVAWRGTVRSLEWVNDLDFTPVPAAPVLGSAAAAHPRAMVHGGFLSLYTSSNASSKYNKLSARDQASGSMSMTQFLPSLLLRRNHRFFEVLEEVRRLMELYKDEETSISVTGHSLGASLATLNAVDMVANGVNAPGAATATGTSGGSSSSPAQPQPQRAGCPVTAIVFASPRVGGPFFKAAFASFADLRALHVRNKGDVVPLYPPLGYVDVAVPLPIHTARSPWLRRPGTPQTLHNLECYLHGVAGEQGAAGGFRLEVGRDVALVNKGADALRDEYPVPARWRVALNKGMVRGADGRWALKDFEHI

SEQ ID NO: 68682 - protein, 177 aa, Zea mays
  Coding DNA Sequence Number=SeqID_25307
MGARRTQSDTGRQQFPCDEHAHRIGPLPYRLPPSTSRPALVGTPRMLALQLSERACTGTGPHPFVISPLPPHDELRREQSRGGGGGGRGEEEEEQTWAKEYMRLVLRERGADHAWITTGDSASDAIRPRPQRLADQVETGGGGNFRVVGSSRVEFDPPECATELWEQIGMEGYYLGL

SEQ ID NO: 68683 - protein, 220 aa, Zea mays
  Coding DNA Sequence Number=SeqID_25308
  Gene Ontology: Mol. function=thiamin pyrophosphate binding; Cellular component=cytoplasm; Biological process=fatty acid alpha-oxidation
  Homolog annotation: Hit_ID=Q9FNY6; Match level="QueryCoverage=44%, HitCoverage=17%, E-value=8e-33, Identity=73%"; Hit description =Oxalyl-CoA decarboxylase
  Pfam annotation: Domain name=TPP_enzyme_N; Domain location=111-220; Score=-58.1; E_value=0.0003; Accession=PF02776.9; Description =Thiamine pyrophosphate enzyme, N-term
MDRDLGPNPARYIGPCRPGTKIFRVVLRPHSHWCTVLPSSHRASASAAPVAAIRASTAAIRARNLLPPPPPPRSLAPAPCAHDGRRPSRGRGCTDGGDLDCGQAHACSSRRSCSSSTTSSPCALGTRHMFGVVGITVTSLAPHAAAAGVCFVAFRNEQSAGYAAAYDFLTGSPGAFLTVSGPGCVHGLAGLSKATAWSLLMISGSCDQADAGRGDFQELD

SEQ ID NO: 68684 - protein, 176 aa, Zea mays
  Coding DNA Sequence Number=SeqID_25309
  Subcellular localization annotation: CTP_CleavageSite=55; ConfidenceScore=5.59e-01
MAPQLPGSPAVQLGPAHPRSSRLQPPLPGRRRVPCARSWLGSNTSELSPCILPAVASMAPSSDFCLVACRFPVPWSRPAMSCQGCSCTRVLIPLLAIRPTVSSSPAMSSSITPSTGVSPSMSAQPLRIVGLIGTLLVHTSRVCDVVTCLLASSERLGEEIREGLYGKDNPYAVMPI

SEQ ID NO: 68685 - protein, 84 aa, Zea mays
  Coding DNA Sequence Number=SeqID_25310
MLHPLPLPVAGATGARQALLVVGEVVEAGTQHGSSSLISCEKQAIRIEFLNLASDRTCTHHNRNGRPRLRSHEEGNLLPGSLKY

SEQ ID NO: 68686 - protein, 121 aa, Zea mays
  Coding DNA Sequence Number=SeqID_25311
MGPAVAGPDGPSSRADGPRMCRSADLLPICGCSGWPGTSLSPLESAAPYAPRTGAVRQPNYPLNRPLRADFDEDITCNMSTTTPAAPPHQAPLPSLAGPITRAHARDLNFVMLLKNEGPEE

SEQ ID NO: 68687 - protein, 159 aa, Zea mays
  Coding DNA Sequence Number=SeqID_25312
MGKNNKRKREPTPPSEDFGDSEYSEEEFSSESEGSPAPIPLRESFDDSDDSQGLAAEVWTYIRAVERSGLEGSDESEYSSDEEDSSEEDGGGDGEDDDDDDDDDEGGGGGDGDGDGGGRGGSSGSKGDGDGSRGGSDGGSSSRGSNKGDSGGGSNRASG

SEQ ID NO: 68688 - protein, 129 aa, Zea mays
  Coding DNA Sequence Number=SeqID_25313
MEKLLRGVQSRAGGARAHGRRRAGDAMAGRGEVLAAHHGQQREGGRDGCHGSSFSAPRKKGREHVGRWRCHGKGRAELLASYAPAMEEKLLLAAVWEKEAEGCGGCKRIGVGVKNGQGQGKGSIFIDAC

SEQ ID NO: 68689 - protein, 225 aa, Zea mays
  Coding DNA Sequence Number=SeqID_25314
  Subcellular localization annotation: CTP_CleavageSite=90; ConfidenceScore=5.39e-01
MSITFVNGLWKSVEAPEVFSSLSRFPLLPSRRSFPAHSFGYTRPSSGSGFVLAVLHIHNSGSENTCSHNPLGKHCQIMFLRTFGGRRPPTAVSREEGKLRLNDAEPHVGVQRILCLGEQGWLRAQELLIGCRCRRSLMLASTMLLMVGLALQEVSHNFILLGHQLLHCGSWRRWRGNLLVLPAMLPSCHMKTKIVAIVIPSHNFERQAIISYGRKNAIIIILGSK

SEQ ID NO: 68690 - protein, 185 aa, Zea mays
  Coding DNA Sequence Number=SeqID_25315
MKTLMTFCGYHPLEIVMHPLGLFPAENKDDPMWCNRVSRVKDVCAMYPDLVGRVTVQCMSALYHLQALQSDAMAHLANIAQTTKLTLDSREDFVVDLSSELQVEIRDNTIDVLENQLHDVQRELEEANDHLDMHHLEMEANEAGSEGEEAPEELGPAPVPMGLPPRCPLHPHPVSLPPLRVDQSL

SEQ ID NO: 68691 - protein, 255 aa, Zea mays
  Coding DNA Sequence Number=SeqID_25316
MVPCRGSSTSSALARLVRPLATAGCGAWGGAGGKGRHGQELDGHGRSLRTSLNGARTWELGAAAGRPAMDNLRHGVQSRGGGARAHGRRRAGDTMDGRGEVLAARHGQQREGGRDGCHGSSFNAPRKKGREHAGRWRRHGKGRAELLASCAPAMEEKLLLAAVWEEAEGCGGCKRIGVGVKNGQGQRKGSIFIDAGELIGGEESGLSRAQLTNQIGGRPKTSEDDLGLPVKFCRVRGLEKLHKLMAKLTERLARF

SEQ ID NO: 68692 - protein, 66 aa, Zea mays
  Coding DNA Sequence Number=SeqID_25317
MTREKSMFSYEKNDDPQRAITFGDGNQAYLCTGGLVRHYTGGSRNRLWCTACDVKQHHRRSIKNRL

SEQ ID NO: 68693 - protein, 67 aa, Zea mays
  Coding DNA Sequence Number=SeqID_25318
MDARRPLRDEMEARMGVESLRNGLLEDLNMEKFEEKRLSDLGYLCGMMEALNVPLADTLVVAFWEGG

SEQ ID NO: 68694 - protein, 246 aa, Zea mays
  Coding DNA Sequence Number=SeqID_25319
MSTTRPGWHRSRTVARTTRRRGPRMDFTAHGAGRVRSRTHTGELSDGKKLNAWHQRAGTDKLQTTTLEEPHAERTQQPWEEERLGTGQQGSSAGEQRAGTIGHGLGAWRADRGRKRGRLGEESDCARRKLCWRRRTTSGHQRRAAGRTGRVVERHGNRGWAPSGREPERGWREKTRGEPGSRASARGTQREMRGHDKGKRSRRWISLQELSGGRKISTPARGSERWEDEDRLEVTQKKIRTPCGVT

SEQ ID NO: 68695 - protein, 157 aa, Zea mays
  Coding DNA Sequence Number=SeqID_25320
MSCAPAIVSANTKTPKGEKPTTKTGVYCSQGAHTSAVIKFLSVLTKPQWCKGWMELAEWQYRKYCTSDAKKALVEITGEKQGNNVDSEKTLEKLTDQPGNLIPIDVAEVPDLSASRDNSDLAEDDPCDPTTTSKPEAPMQSLNQLPVVTDLADARSA

SEQ ID NO: 68696 - protein, 43 aa, Zea mays
  Coding DNA Sequence Number=SeqID_25321
MGMKIDPNPYPNGHNTYLGAIAYGAELCYLGAIGYGAEQRVQK

SEQ ID NO: 68697 - protein, 98 aa, Zea mays
  Coding DNA Sequence Number=SeqID_25322
MVSESKETTLRFVNVSRMAKLQPDASLTLSFLLPLQMREAAMFFCGDPSTSQWVDQHHQHVEIHRARYFIKSLTIRSDVGRIRQEGDGNGHKPWEGSI

SEQ ID NO: 68698 - protein, 71 aa, Zea mays
  Coding DNA Sequence Number=SeqID_25323
MRFLQRRGLQLVCSSSLVPCVELLAVAQLAGAIINHVMRKMSQVDPKRGLIREVMRMMNLKTVKSSKCSVE

SEQ ID NO: 68699 - protein, 75 aa, Zea mays
  Coding DNA Sequence Number=SeqID_25324
MALIKDWVFFALESWDPTELMELGGRAAYHVKAVIIRDKENKQTRKASLTVKLPRCAKNWPKVLFGSHIYNVMGN

SEQ ID NO: 68700 - protein, 307 aa, Zea mays
  Coding DNA Sequence Number=SeqID_25325
MEEAIPAKRASVDAITTTTTCPRLPLVTHTLSGAVTPTRGRDTWNHSTASCLFFRHDDTAERRSRGEQIQISACPQTWGRRPRWSSTMALRGGRDSVIGGEWTMVHGFGTGRGEGRNRWSRGGGGPPRKMPLHEQLCVLSWMQGIVGEGQRGGYGVRERKENDGSGRRDSGDCWGGDRSGHGVEKRKIWEWVPGRMEWSGDRGGGQGSARRGTGCGNDGSGGTVRVDDVEAAKSAGSTRSEDHEKSREDASQKPYSPSPGAGSRGRRVPETRSPDRRCTSAVGMKRTEGGSTMKRGESKNWDDLDAG

SEQ ID NO: 68701 - protein, 246 aa, Zea mays
  Coding DNA Sequence Number=SeqID_25326
MSTTRPGWHRSRTVARTTRRRGPRMDFTAHGAGRVRSRTHTGELSDGKKLNAWHQRARTDKLQTTTLEEPHAERTQQPWEEERLGTGQQGSSAGEQRAGTIGHGLGAWRADRGRKRGRLGEESDCVRRKLCWRRRTTSGHQRRAAGRTGRVVERHGNRGWAPSGREPERGWREKTRGEPGSRASARGTQREMRGHGKGKRSRRWISLQELSGGRKISTPARGSERWEDEDRLEVTQKKIRTPCGVT

SEQ ID NO: 68702 - protein, 539 aa, Zea mays
  Coding DNA Sequence Number=SeqID_25327
MEVVELVPCARNKWGNWNEFWFYIAEGTIEDHEGLPVSEMCSHFYSAYPPFEVAEEDADEGALRCAAGLSSGRDLVEEFVAYGVWTLAHGWALGEVCPRQMPSHGGKLVRSPAFALDLQSRDPAAFVREAEDGAVRIVGRYVPRTEGQRSWDIRGSNDHLNRVFELNGLPYNGYPGQDDVDRRGKKPVVESGDDPAPAAAPSSKKRKLGTAMGGLGVSDGFARELMRTCAAPGGRMSSPELRESSARMLRVTGGWWPRNVPIPHAAGEDFFTSRMVREWKVVPYGRNIAAVVSAVMDKDRQGVAQKRQAVVRLHEARPKRKRGAAKATAPGGGQPPLAAKSAVPASGRVSEAVAAAGGSKTAKAASASGRVPEAVKSARGLPPPGKRVADFATDISVDDYLVGPDEGQLVVVPPAAATTAAAVMPKAKGGALSAGGEMPALAAVRDEAGAVSRRLEEMKEALSQAADFDGRAASGALTAVVSAEVERLRTQHADAVREKSAADSKCRKLADKVAVLEGEKTDLRRQLVEERREANEALA

SEQ ID NO: 68703 - protein, 144 aa, Zea mays
  Coding DNA Sequence Number=SeqID_25328
MLEQGIIRLNMSRFLAFVLLIKKMFKDKFPISIVKDHDSVFTSHMWHDLFMMVCKRLLLVQQYAKCYYDNCHRETRRDSISTDRHTRWSLGPRDHDWFLIRIMIDSCLEGFHKNKDSLLWNQMSILADLSNSLGVREAIWHCFS

SEQ ID NO: 68704 - protein, 150 aa, Zea mays
  Coding DNA Sequence Number=SeqID_25329
MVIMAHGAEDKTAQGWLSCGGVSILGEDGAVPNSTGADVMVEQGRTVAVGEHIDAVHGEGERADIRAPLAEGERARERKRLMSGAKRSAREGERSAGKRAGGPEWSKSGGGNVGAHERGKVLSKIGLAERGEGEGGSFEDSLYWYEVSYL

SEQ ID NO: 68705 - protein, 158 aa, Zea mays
  Coding DNA Sequence Number=SeqID_25330
MRKKHGFMPKIHTCSGPDIHNEQSPAFKVPLQTELRFHPRGYEQPPHRRACGATTSGRLASDLCSSSDGPRMDAAAGRLSFASPLKGREPDIRAKEPEAWSLDGGGDPVGGEDFFSRHHLRADDGSHLPTGRSPLGSSRTGSTGLRAEAPYRSKGRTA

SEQ ID NO: 68706 - protein, 172 aa, Zea mays
  Coding DNA Sequence Number=SeqID_25331
MGQRETEHEGGRRQAKGETRGLRVVLCPGRVGRGGGSSEVEVESVFRGRGRVQAPGRARRRPSSEAKAESESWGRARRSSSSSRAEAEPEPWDRARRSPSSEAETGAEPWGRARRSFLWRPKLDLAAVSLTLSSGTAVRAMQAALSSCQVGQWSGEVTVVTSALSTEERSSG

SEQ ID NO: 68707 - protein, 151 aa, Zea mays
  Coding DNA Sequence Number=SeqID_25332
MTAQERPGVTSHQTRGSPVTDCFTCKNRPKVIIKSQAEARVGPLVITEPPRWTRWSGLLLKENAMFAFLLASKSRRAAATRASSAAGGGGLAHTARPSSSRLGVISIGSACGIRICDDETVGVMTKNQQIWSSIHAKLVSEVGLWVSLFNS

SEQ ID NO: 68708 - protein, 791 aa, Zea mays
  Coding DNA Sequence Number=SeqID_25333
  Homolog annotation: Hit_ID=Q109A2; Match level="QueryCoverage=83%, HitCoverage=49%, E-value=0.0, Identity=65%"; Hit description =Putative uncharacterized protein
MVASIGSRSRLRAGKESMKSIGEETESTSRETEGSKFHRLKCTDEGEPCLDRIPNFHCKSLPSRYRDTNPEDGIMHKRGSMYQSSREVSRLRNLQGRSKLNYSSNKDTFMSFEVANLSSRPSTSGACSFPLRSNSCNTRSSMGTNHRIHQASREVMRFSLHEIPEDDLTLERPRRDCNLLKIDAVDSFLEKALEEDTTNGSCTNATPHWPEDSCSKVGGSYCQQPVGFCPDERDVVNLPKSLSTKVGVFDATCPSECVGNKKIRSSPFKKILDPIMKSKSQRNPSLLETEDSKSSSIPFGGKGRVLRKSLLSDISRAEQRLAPDCQTDGEAQKLTVTSSPTHLHAVIKLDPNNGAFGFAFSTKGPEELIYVNTWKAGDELNWIYTFHSSGKQTSTVGRTSKDRHGCLPPIVGQMHVSSFLYSSVGEDGILKTSATTEFVLYDIAHARRSSAVERIQCTDAIRPSFCNAVNNSMSGHTRNDLVQRQNTTRIDSDLSTSCLWSREDLHPHLEVAAIVIQAPLHKTKSKELKAGSSPGTIKAVTAGGAHGLPRDDEASPSPLLDRLKSGGACDCGGWDMSCPIVVLDNAYDGYWADSVMNESKAPMELFAQGNKEVLPALSMKADGNGHFSVDFHAGLSALQAFSICVSLLHCSEASSDIGIEKFKNKLYSSSLKILLKEELALAPEVWTECELKRLKMHRDEIKPFGIISISIPALVARLVGLLVAIALVGLTFRGIEVGLFGFRVAIATLHLPTPFLSAVPKGSSRSWNVEAEFVFLVRSDLQNEVLSVNPR

SEQ ID NO: 68709 - protein, 70 aa, Zea mays
  Coding DNA Sequence Number=SeqID_25334
MSPSSRPLLLLSSPQNSSRSELTVVHGAPCNLLPWLFNGMPVEILCCAQQPRHLRARLARCFVKPVDNTP

SEQ ID NO: 68710 - protein, 92 aa, Zea mays
  Coding DNA Sequence Number=SeqID_25335
MEQGLAQRTFAMGGAKSSQGETATGRGARLTSSLEEGARRKGRPVAMGLLCVGGCCCGAGRKKGASLLLAMEGSAQSCCVREKKAGEKGSGG

SEQ ID NO: 68711 - protein, 53 aa, Zea mays
  Coding DNA Sequence Number=SeqID_25336
MGLGVCGSLCQGGYEIDGFGYDYGAGCQHCNHCSGEDEAVEGDFQEFQDYDEF

SEQ ID NO: 68712 - protein, 109 aa, Zea mays
  Coding DNA Sequence Number=SeqID_25337
MAVGELCCRRAHQTVRYILLDLRFVKHYTHKEIMLQRMKVLNDRQLCCLVLDSQHSRTSDQHWRPPLVNSLPQPSTSIHLRHAAKEGNGARGCPAKTGHKSGRTLPMRS

SEQ ID NO: 68713 - protein, 127 aa, Zea mays
  Coding DNA Sequence Number=SeqID_25338
  Subcellular localization annotation: CTP_CleavageSite=35; ConfidenceScore=5.02e-01
MALLLARARWALGVAVAGQSWARLGGWRARKPGVGAARLGARERSRGWQGRGGSTAWRGWGRRPGRARLQVRGGEGKGRSLAAGTGRGAIWKKDEPAPKLWLKKLRLSTRTVEEDETDLKGKILLSP

SEQ ID NO: 68714 - protein, 137 aa, Zea mays
  Coding DNA Sequence Number=SeqID_25339
MERVEDVEDLGGLTGAPPESAEVNPVLPLDAGEGPSALPVLTVAGEDPVSAPVPTVEDTLKVVAEPAVEDPTPTVGPSQVQGFGPVHATAIDNANFVAASTVVAEDNSDESVSMFFESDDSRSSVVWTEESSDEDLD

SEQ ID NO: 68715 - protein, 178 aa, Zea mays
  Coding DNA Sequence Number=SeqID_25340
MDLRRQLVEERREANQAISEVQAAQAEAKVARAEGSLASQRAEEWEARVITLRDRVDKAEASTRSEVERTLAQLVDSYRELGARTADFEVPDPEAGLRFLEWLQEELLVLPTIMEGFMSFASLVTCEGAMNALSREGCRHYEVFDQSDENFEREIFKAEDPVVKQSAGALFDRMWGSL

SEQ ID NO: 68716 - protein, 141 aa, Zea mays
  Coding DNA Sequence Number=SeqID_25341
MTAVASGTKPPPGEAAKARELPSPGKRVADFGTNISVEDYFVGSGEGQLVVVPHAVATTASTTVVGVKGAAFCASGEILSAAAVKDVAGSMSRRLREASLQLSQQLSHVADFADRVASGALTADVAAEVERLRARHADAVR

SEQ ID NO: 68717 - protein, 199 aa, Zea mays
  Coding DNA Sequence Number=SeqID_25342
  Pfam annotation: Domain name=zf-CCHC; Domain location=40-57; Score =28.5; E_value=2.4e-05; Accession=PF00098.14; Description=Zinc knuckle
MDTQTEESSQIQLCEIQTPNHLSPPVGQAKLTRKELKARGACYYCKNEGHIIRECPKKRLDRLEKKAAKHDLSNSSEDPPVISGPALAFFPNRAMPWSRLGPAFRASAPARPSEPPRRPDAEPRPGLPRDRDAQRPTRPRQKQRHAARRRALGACAPSPRPEAVPNLGTLPRLFLLCVNGASIRLFLFLPINPSDDECL

SEQ ID NO: 68718 - protein, 126 aa, Zea mays
  Coding DNA Sequence Number=SeqID_25343
  Homolog annotation: Hit_ID=Q5NKP3; Match level="QueryCoverage=28%, HitCoverage=14%, E-value=2e-07, Identity=77%"; Hit description =Putative uncharacterized protein 9C20.7
MAVADVPSQESSVLGMSRAFDDYYIEDCGVILAPEVTQGRTDNNDQFDILATIGALNHPVYGDNADSQGNKRIPDDLGQPNPIELVEEYQEDLRMLEQGSMGYEHTWNKLAAARVSLRWRKQDWGK

SEQ ID NO: 68719 - protein, 119 aa, Zea mays
  Coding DNA Sequence Number=SeqID_25344
MAWSVRAQGRARRRLLLRPRPGSGEDAIPPEVEVEAEPWGRARRRPPSEAEAEAEPWGRARRSPPPEAEVEAEPWGRARRSPPSEAEVEAEPWGRARRSFLLRLRLNLAVAQPHWRVAQ

SEQ ID NO: 68720 - protein, 116 aa, Zea mays
  Coding DNA Sequence Number=SeqID_25345
MGKNNKRKHDSQGLAAKVWTYIRAVERSGLEGSDESEYSSDEEDSDGGGEDEDDDDDDGDDDDDGDGDGDGSGSGRGSGGGSKDGDGGGSRGSNQGGSSRGSTRGGSGGGSNRASG

SEQ ID NO: 68721 - protein, 216 aa, Zea mays
  Coding DNA Sequence Number=SeqID_25346
MLQAEVAFARVFRLCALLEGWFLLQAEVAFALHQRDFALEDLTEDLTVLGEVRAFQWGEAWGWLRLSFGPAGAKGVVFAGVGNFVFSGLLVGGLGEGEGLALPCGKQCCLRSLVSLRARNTRRPRRARYNGPDRTWASELDEAALWDAFVAGLRLVPIKRRVSLTALSVRAAAKQRRLRAKGSLEDMVAGVTWPSILPPGWTVEWDPTSAEEEHEE

SEQ ID NO: 68722 - protein, 142 aa, Zea mays
  Coding DNA Sequence Number=SeqID_25347
MALGEQAARPDSPGSPQLPRLRGQDPDVPAPDTDGTSLLEGWLDDPWPGLRSGLRPRRADISSSSSSSSPSSSSSSGVSGDGSLGSPSLSCRRQSLSKASRARVRSRARAFFASFFSFLFSTATLRAARSTASSGTGGREGL

SEQ ID NO: 68723 - protein, 216 aa, Zea mays
  Coding DNA Sequence Number=SeqID_25348
METLSAKDQQEFEEHKEQLIKEAQAKFLHNFKVDRNHKVVWNLGMTVTVGIGEYVDGRIRWVSQRRIRARVTMAVADKGEADVISNEDDSLGGTNTFNDDTLKDYQDPDENGGELDEDEDLDKLVDIDRPWTLERLITRVPDPKALVLEVPTSAAPTLAALALEFRPLEDLVPEYTTPIIYDVIIPSEVSCSDMEDILHDLPHSCTSTMCEHLARA

SEQ ID NO: 68724 - protein, 105 aa, Zea mays
  Coding DNA Sequence Number=SeqID_25349
  Subcellular localization annotation: CTP_CleavageSite=29; ConfidenceScore=5.25e-01
MAAPRLPPRRAAALAAQARRRGRARAAVQLSARAAGVYVREPSRLTAKASVTVRWAVGDERKGVGWPPRNPKFVAWDCYLGHAAPVKAQSNRPKDLFFLLVGYNE

SEQ ID NO: 68725 - protein, 415 aa, Zea mays
  Coding DNA Sequence Number=SeqID_25350
  Homolog annotation: Hit_ID=A5B1P9; Match level="QueryCoverage=62%, HitCoverage=16%, E-value=2e-08, Identity=25%"; Hit description =Putative uncharacterized protein
  Pfam annotation: Domain name=Spectrin; Domain location=185-293; Score= -5.8; E_value=0.095; Accession=PF00435.12; Description=Spectrin repeat
  Pfam annotation: Domain name=zf-CCHC; Domain location=105-122; Score =23.8; E_value=0.00038; Accession=PF00098.14; Description=Zinc knuckle
  Pfam annotation: Domain name=zf-CCHC; Domain location=314-331; Score =13.0; E_value=0.016; Accession=PF00098.14; Description=Zinc knuckle
  Pfam module annotation: Pfam domain module=Spectrin::zf-CCHC::zf -CCHC; Domain location=185-293::105-122::314-331
MEDLSMMTPTTVIGKIAAFEVSRKMCRGEEPTSSRPYAFACDERKSKKKALTPSSSSEKEEEEDNDDEKDNQPSTSSSEYEETIRRVGKVEDLLFNIDRKEQRKRGCFACGEKGHFRDSCPTMVEPKKEWSKGKALTSVKTWDDSLSKDEPSRTRSHQSLIMLITVITQVPYGKSSQNDYKGLLEKFEAFANLNCELSTKIEQLESSVTSTATDDGLIKKNEKLKAKLASSQEAIENLQEKMEILSIHNNELTTKLENIETCSDEVAKENEQLRQQVARLGKALYDKKGKAKQIRPPQDNTTAGVNKPMEGETVICRLCHMEGHKSFQCKAMVEDKQKQKLKQKPTSKISNTYIKKVDKKAATPYLIKKKKNGKVIAIKSNKQANKGKGAKCIWVPKEIISTMKSTKKVWIPKGK

SEQ ID NO: 68726 - protein, 165 aa, Zea mays
  Coding DNA Sequence Number=SeqID_25351
  Gene Ontology: Mol. function=binding; Biological process=metabolic process
  Homolog annotation: Hit_ID=Q2QT42; Match level="QueryCoverage=96%, HitCoverage=46%, E-value=2e-48, Identity=48%"; Hit description =Pentatricopeptide, putative, expressed
  Pfam annotation: Domain name=PPR; Domain location=100-134; Score =17.8; E_value=0.042; Accession=PF01535.11; Description=PPR repeat
  Pfam annotation: Domain name=PPR; Domain location=11-45; Score=37.9; E_value=3.7e-08; Accession=PF01535.11; Description=PPR repeat
  Pfam annotation: Domain name=PPR; Domain location=64-98; Score=2.4; E_ value=4; Accession=PF01535.11; Description=PPR repeat
  Pfam module annotation: Pfam domain module=PPR::PPR::PPR; Domain location=100-134::11-45::64-98
MDKYSCKHNVCTYNIRMSGYLNGEHVEKARTLWDEMIQEGVQPDITAYNTMINMKRKGFVLAPEVVEELLDGLCKNGRVEDGLSVLREEMKREEFVPTWRSYEVLIMGFCDGWKVEVAIRLQAEMAGKGFTAGSEVYYAFISAYEKSENYEMVEKLRKEMPAMGT

SEQ ID NO: 68727 - protein, 75 aa, Zea mays
  Coding DNA Sequence Number=SeqID_25352
MGELVHPNPQQSLAGVGAPSPDHHASWSRLMAAWFKNPARGCPSVVHHRSEGAAKAGVISGREMTSGPSDLNRWL

SEQ ID NO: 68728 - protein, 303 aa, Zea mays
  Coding DNA Sequence Number=SeqID_25353
  Homolog annotation: Hit_ID=A3ABZ8; Match level="QueryCoverage=25%, HitCoverage=20%, E-value=1e-08, Identity=41%"; Hit description =Putative uncharacterized protein
MVVFVMQQAVWNVDTNNEAVQGFRRSLHDEAAQHEESEVMDGEDDDDEDDDDEDDDDYDTKKNKGTAGGEGQQGKRPTKCKQQYCVLMLGVKMVATLRFLSFKKKHRGREVTVIDCTSPPAACGSPLAAAAVCSLQSLGAASPTKSELAEIVPQEKSPKGNASFFSFHSTNAAESKVFYLKMKGDYHRFPLTVSPLLEAGQAESLGTELLEMVPSREEEIKLKEYREDAVSTFVVDDYVRLEFKGSTFSGSWKSFSSPKISSTFLVVIAIVSNEIVMFERRIGRLSTLFLAMEEGFLALVSSL

SEQ ID NO: 68729 - protein, 154 aa, Zea mays
  Coding DNA Sequence Number=SeqID_25354
  Homolog annotation: Hit_ID=Q75LL8; Match level="QueryCoverage=33%, HitCoverage=43%, E-value=8e-21, Identity=88%"; Hit description =Expressed protein
  Pfam annotation: Domain name=DUF423; Domain location=31-116; Score= -44.9; E_value=0.052; Accession=PF04241.6; Description=Protein of unknown function (DUF423)
MGYSTFCSMTGLVNALKLIQPIKNKFLGVTYAGVAALGLGTYDAHMFCPKNPAYKEVWHTSSLYHLIHTAALLGAPITKRPNVVWHTTSLYHLVHTTALLGAPITKRPNVWRAPHYWNCALLWNVRKITFTVSTTVGKKLMAGSTSTVKKANNS

SEQ ID NO: 68730 - protein, 141 aa, Zea mays
  Coding DNA Sequence Number=SeqID_25355
  Subcellular localization annotation: CTP_CleavageSite=83; ConfidenceScore=5.16e-01
MALPPSSLRKGDEGAVRLTKAKSSLRRSRKLRLAQPGPQPQKEVPASFDPGLGLNLSLGRRSSPRPDPRARPQPRPQGSASTSASEDGLHLARPQGSALTSTSEGIASSPHLDLGLRRGLRLARPWARTDHATGGTSLPYP

SEQ ID NO: 68731 - protein, 385 aa, Zea mays
  Coding DNA Sequence Number=SeqID_25356
  Homolog annotation: Hit_ID=Q6QP51; Match level="QueryCoverage=63%, HitCoverage=75%, E-value=9e-11, Identity=29%"; Hit description =Putative growth-regulating factor 1
MEAQAHTSCNRRTGYYVRETAPPLAPVPRLLDCGTGGRKQQSSRLQAHVPSWDSERALSHGTGKGDTPKGILLREGSGPRALLLIRGLKAGPSKGFDSCLRALGLRAHYWSEVRRLAPWKGSTAASGHSGSAPTTDQRLAPEGFDSRLRACRARDDSRYVRYMAEARATLPRSRLCPLKGHDLASPEPSLGQRQPTQEDSRLARGAACPAPTVVPLDRVRLTAAKSSLGLDLRRRTPPRPTLGLELSLDSGRRSPPRPTLGARTQPRPRKTDSASPDPRAQTQPRLRKTVSASPDPRGSDSTSTSDDGLRLARPQGSDSASTLEDRLCLARPPGLGLNLDLGRRSPPRPTPGPRLSLDLGGASASPDLGLRPTTSQGGHHYPTPS

SEQ ID NO: 68732 - protein, 264 aa, Zea mays
  Coding DNA Sequence Number=SeqID_25357
  Subcellular localization annotation: CTP_CleavageSite=45; ConfidenceScore=5.50e-01
MAVRPFTRRSRRKWRSASIIWLQGFSSGSPTASPCRWSPKTVTTSSMVGRSKPGCGLCPALSFKDLHHPCWGGGRAEPELYLPHGFVGHPLLQHSGERALTGLAEGADFDNAGLVGRERHQLQRVGLAGSAGSGSAPGRCSPVREDPSGDLSVGIWLPSLALRWWWLKKSSSPTRSPLPSVLRASGSLALIACPRPSSGDVGEGLIAAASALRSSLLLFGHPERRSLSLLPEWAAARTWGFVAPQALQCGGFFVPVGVESEFRL

SEQ ID NO: 68733 - protein, 188 aa, Zea mays
  Coding DNA Sequence Number=SeqID_25358
  Subcellular localization annotation: CTP_CleavageSite=58; ConfidenceScore=5.12e-01
MPGSLAQLALALLPVPPPIARAERGYPPTVRAAVAPCAPGDRPRRRTPLRRRSCYWIVLSSLRHDAPARSRLRRRSLSLLLQRLPASRPEFVVSQALRCGGCSNPREWNQSSFCNGTLIAGVMSEVSISQRRRSPSARSALPLKASLAQLQNPRLLCDEPEPEAAVSAWTEAESARKGASPAQEQVAS

SEQ ID NO: 68734 - protein, 256 aa, Zea mays
  Coding DNA Sequence Number=SeqID_25359
  Homolog annotation: Hit_ID=Q6QP54; Match level="QueryCoverage=39%, HitCoverage=34%, E-value=3e-07, Identity=42%"; Hit description =Putative kinase
MEPGGGTAVGVVESLLTSSCFRKGAESRRLHRVCRAPSSPIWRSEPDGTPVLFPVARVSSGLGDVEAPPKPRSSLSSVAEVESEPPGRARRRSPADAGAESEPWGRAKRSSSSSGAEPKSEPWVGRGGDRRLLGLSLSPSPGSGGVRRLPGLSPSPSLGSGGVRRLPGLSPSPSPGSGGVRRLPGLSPSPSPGSGGVRRLPGLSPSPSPGSGEAELPMVPSTGPDCLSASLCRVAPQSERRRRRCLSVRPVSGAAK

SEQ ID NO: 68735 - protein, 160 aa, Zea mays
  Coding DNA Sequence Number=SeqID_25360
MVTSSLMVGESEPGCGLYPSLSLKDFHHQGWGGDVPGSRTRAASEPFSVPAFAAASGRGSSADEIARAAHGPTSNSTAFCPSLPHEFGHGWGPLGSSIRPEVSAAAVRPPGAEVVVVAAARAGDGALFVGLLSLRRLPPPSSGVVRTCGGGTGVPFVMAL

SEQ ID NO: 68736 - protein, 106 aa, Zea mays
  Coding DNA Sequence Number=SeqID_25361
MLHPAHGGVRICGGAITPAGSLSNGGVGLWWSKWHGTQHVASRKGCGGRRGSYPHDAAGSDQLFHKSRQVADDSVQAVAEVRDDRASPPVIEAKRQPEREIVGAAK

SEQ ID NO: 68737 - protein, 163 aa, Zea mays
  Coding DNA Sequence Number=SeqID_25362
  Homolog annotation: Hit_ID=Q75HJ9; Match level="QueryCoverage=30%, HitCoverage=6%, E-value=4e-14, Identity=78%"; Hit description =Expressed protein
  Subcellular localization annotation: CTP_CleavageSite=88; ConfidenceScore=5.33e-01
MAPAFPRRRPTSPDSPPHTAAAPMAHPPCSPPWPPGGGFGLPESPPNVSPPNQSEKSTGRSFCTSRTGEGRGARQHYVPAGRVSPGPMASAMSSRSRPAGHFGVFPVNAMAGTGGSDGGVQLADKLKIIKTDNFDPDAYVQSKCRAMDEKVRNPSALRFRLQC

SEQ ID NO: 68738 - protein, 185 aa, Zea mays
  Coding DNA Sequence Number=SeqID_25363
  Gene Ontology: Mol. function=RNA binding; Biological process =regulation of transcription, DNA-dependent
  Homolog annotation: Hit_ID=Q8W0R1; Match level="QueryCoverage=63%, HitCoverage=43%, E-value=6e-60, Identity=97%"; Hit description =Putative uncharacterized protein SB32H17.7
MISYAACLEGTDVVRLFDRRISARREPGFVFDKACLLSYNHMSFGGGPLEVGTEEEAEKLTSQNEKDSANEADVLSAPPKLVYNNFVLRLSRELLVAVASGWDKHVEIIDKIIPQAWKVGCLFLIFCVDSSNPFDMHQAFKLVIMFISLVQTYPYSVYEILRSSIVFIVTQPLCRCFDPRILTNK

SEQ ID NO: 68739 - protein, 212 aa, Zea mays
  Coding DNA Sequence Number=SeqID_25364
  Homolog annotation: Hit_ID=Q6J9V9; Match level="QueryCoverage=77%, HitCoverage=57%, E-value=1e-48, Identity=63%"; Hit description =Putative uncharacterized protein
MSLEYNVWTGIFELEPMAKRASFHLRHDDRVKKGTGKGDISKGILLSEGNGPPSPPTDQGFEGWPLGRVRQPPQSTRAPRPLLIRGLKAGPSEGFDSCPRARRVRDDPGYVCYMAEARATLPRYPRTFPRPAGTICNGIPPEGGIEPSDPVERVQVQQITCRLGGCSRNPATAKLLTASTNQPKNSEPDHAPGLRPGRMREQPGRPRHHEKH

SEQ ID NO: 68740 - protein, 449 aa, Zea mays
  Coding DNA Sequence Number=SeqID_25365
  Subcellular localization annotation: CTP_CleavageSite=47; ConfidenceScore=5.33e-01
MSLCSLVHRVFPPSKPPDGGYSPAAPLRRRSPETVTTSPWVGRSKPGCDLGPTLSFKDVHHPRWGGGRAEPELYLPREFVGRPLLRRLRERMFTGPAGGSDFDNAGLVDGGRRQPQRVGLVSLAPGAPSCRKAVAASCAREDRPRYRALPGRRSCSGAVLPLHRYGASTRRSVPHSSGRILVGICRRADDPCRRCRGGGGSRSPRCRRDHRHHPRFGPPALCTCPRPSSVGVGEGKVAAASALRPSLLQFGHPERGSLSLLPERATASRPSVFCCSAGPPPHRVGLFVPAEESLGSVSLVVRGFSCLVKGSPRSLFDEPKPGLAVSARTEAGLARKEDLVGQSLAGSSVSGIDAGVDLPRPRVRLMSSGDSWSRPRGDQPSRLLEPDSRRRPWRRWPGRDDEVVLQSGDPRTASPPEARSDLAEGVVDAEGAAAPFDRQDPSLQDRIIL

SEQ ID NO: 68741 - protein, 277 aa, Zea mays
  Coding DNA Sequence Number=SeqID_25366
  Subcellular localization annotation: CTP_CleavageSite=48; ConfidenceScore=5.11e-01
MRKKHSFMFKCPNVQASAAAKNKHSYSGYHYKRDSGSTPADSSSDGLKANATAERPSFTSPHRGRELAIKAKEPEAPSAGGTDGLVGGGNRFDRGSLTYGDHHLSTDDSGHLPTNTALASGGRPKAHRQVLTLVLATRTRTGPSQNTSTALAAYDMLCDPLVQPTTQGGRGCGRPAHGATDTRLGAPSSSARTMNVLEAEDRGRPRPGSLFPTMRPAVIILGDRRQGTAAGCVMKILEAERCLKSANPHEVALLQQRQGEGNAGAPHLGARKAEGRD

SEQ ID NO: 68742 - protein, 144 aa, Zea mays
  Coding DNA Sequence Number=SeqID_25367
MSWSRRQRCRRGQRRSRLEKRLRRPGSMWLPRPRRCSSGGGWSSREQDQSRSHAVEAVSRAEVLGGHMAEAMERLAGVSARAGALAESLAMRAQARCWRPPSRWRSFRPCRRLRLGQVPPRVETSPRVLLLPLPMSEPTGTVCL

SEQ ID NO: 68743 - protein, 187 aa, Zea mays
  Coding DNA Sequence Number=SeqID_25368
  Homolog annotation: Hit_ID=Q6J9V9; Match level="QueryCoverage=34%, HitCoverage=33%, E-value=3e-07, Identity=44%"; Hit description =Putative uncharacterized protein
  Subcellular localization annotation: CTP_CleavageSite=86; ConfidenceScore=5.56e-01
MQAACNRAKWALFSDFQHAQHGGPGPRVMQPARRMLRTSNCTATRATATPPRLRNQYCDSRQPYARPSSASLAQWGSERRFAFTVMTASKKGPGKGDTPKRILPREGTRLRASLLIRGSKAGPSEGFNSRLRARGLHTHYWSEVRRPAPRKGSTTASGYSGSVPTTDQGFEGWPSKGSQPPQTQSEG

SEQ ID NO: 68744 - protein, 585 aa, Zea mays
  Coding DNA Sequence Number=SeqID_25369
  Gene Ontology: Mol. function=lithium ion binding; Cellular component =integral to membrane; Biological process=calcium ion transport
  Homolog annotation: Hit_ID=Q8W0Q9; Match level="QueryCoverage=98%, HitCoverage=99%, E-value=1e-140, Identity=51%"; Hit description=K -exchanger-like protein
  Pfam annotation: Domain name=Na_Ca_ex; Domain location=135-275; Score= 103.5; E_value=6.7e-28; Accession=PF01699.15; Description =Sodiumcalcium exchanger protein
  Pfam annotation: Domain name=Na_Ca_ex; Domain location=433-576; Score= 87.9; E_value=3.3e-23; Accession=PF01699.15; Description =Sodiumcalcium exchanger protein
  Pfam module annotation: Pfam domain module=Na_Ca_ex::Na_Ca_ex; Domain location=135-275::433-576
  Subcellular localization annotation: CTP_CleavageSite=74; ConfidenceScore=5.36e-01
MTSVVLSPLQKQGDVSRIPAAPPAMLLQGSDTSPTATRAAEPDEGGTTVLGAAPSSSSSSFSSSSLFGKGRGSSCEELQSISGGEGRCAYLRAHSPCSPAGYVDYLRLFYCGFAGAPAAAACAALALWLVVLFYLLGDTASEYFCASLEGLSAALRLPPAVAGVTLLSLGNGAPDVFASVVSFASGDGGGAGVGVGLSSALGGALFVSTVVAGAVALAAVGARGGVVVEWRGFVRDICFLLLALCYLLAVLVSGETTVWVAASFVSLYAGYVVLVWTSHCCAEKGKPAAAAGLSAPLLHDDDDDGGGPSLPSHSSKTEGTSRARAMLHCVAGALCMPLYLPRRLTIPDIAGHRWSRPYAVASAALAPVLLAFTWTSQRHNPLSSHSLAVLAGGALLGLLLAALAAATTDARSPPRGRRRRVPWLAAGFVMSVLWAYTLARELVALLVAIGYVVGIKPSVLGVTVLAWGDSLGDLVSNVAMAVHGGPGGAQTAVSGCYAGPLFNTVVGLGLSLALAAGAQHPAPFAVPADAAAYEAVGFLGAALAWALFVVPVRGMRIDRVYGVGLIAIYLCFFAVRVLETLGLWS

SEQ ID NO: 68745 - protein, 52 aa, Zea mays
  Coding DNA Sequence Number=SeqID_25370
MQAACNCTKGVHPFDSDASSMGAQAHTSCNRDRERGYSERDPSPRRKRARAP

SEQ ID NO: 68746 - protein, 606 aa, Zea mays
  Coding DNA Sequence Number=SeqID_25371
  Homolog annotation: Hit_ID=Q6JAD6; Match level="QueryCoverage=73%, HitCoverage=69%, E-value=3e-80, Identity=77%"; Hit description =Putative uncharacterized protein
MPRTKNVSAPGGGDDEDPCRPFRQVKGKTVYLEQQEGHKKRRMDRAARAAAAAAAATEQAELGDQPQTPSDQIAYHVRCLASRPRSSSTTTASASTPTTTLPAPVTPVAPSTTSTTPASTAPPPAPVFAPPIPPARFREHDETEVRPLAADPRLFDLQRATAARVRRFRYVPVESWLPAQRDPAAVDLFSTRIQESFFRAQMSAQIALRVHRAFGPFQLFLLAAGADSEVHLTYLPGLLTLLTTSGSLCYGTSDPPRRPHDGVAPGTAHVAALFRSPFSVGSRRSPADYTTAAKFLFQLMRRTLLPRMGYREATTHIQLWLLGALVSHSEFDVVDFLICEIEDTVLDGMRARRQLPYAHYLCHIFAQLIWPPQFQGTLEASRLVFGPYRPAPEDPVPASAPVFDTQAEDAALHQFEAQDAAVDDDDDFGIPPSPPPPMPPCSHDHEAGSSRATLLPLLLLTLRLLRFYRLSLNSRLTWQPSRPARQQPISSYPRGCSRCFRPYRTDMILFSSSFSRIGLRAGHSWLLCYSILPPVPPASAVTTTVVAVSVTTSVPTASAAWPQFDSVPAPASTADPGSETDSDPQPAFALLPRLDAPPPPPPALDV

SEQ ID NO: 68747 - protein, 289 aa, Zea mays
  Coding DNA Sequence Number=SeqID_25372
MKSRMALGLPSPEKSQQKSGTSSSSDPEGPYEGDVQQAFRERAGVVRLLGIGVSRGDDARLRLKREVDARCAPRWGAGAVDSLDSRRGAASCLALVAPPPPSSAGERTGRARMLFFHHAGKTSSIPPPAGGLSAAIVAVARRGKEYHVVAAVEGHELKTPETEHRPGLERLLETAHLELDGKLFVNTQQAPTWRANCRRFETGGSLNRRVKCHCVPQPRWVGARPSAKGGERWPESGVREVEIPRPSCSSRAQVGCACSRGLQASTRERERAASRERLSRPRLRAANPL

SEQ ID NO: 68748 - protein, 210 aa, Zea mays
  Coding DNA Sequence Number=SeqID_25373
  Gene Ontology: Mol. function=aminoacyl-tRNA hydrolase activity; Cellular component=chloroplast; Biological process=translation
  Homolog annotation: Hit_ID=Q10LI6; Match level="QueryCoverage=42%, HitCoverage=48%, E-value=2e-41, Identity=92%"; Hit description=CRS2 -like protein, chloroplast precursor
  Pfam annotation: Domain name=Pept_tRNA_hydro; Domain location=67-210; Score=44.6; E_value=6.5e-12; Accession=PF01195.10; Description =Peptidyl-tRNA hydrolase
MGAAVQHYRLSLEVFDEMPKLRLYAKFSSEYLIFCCTARFKPILVLACTSSSYSSFSSSFSPIQPWLFVGLGNPGEKYQSTRHNVGFDMIDAFAQSQGIPLTTHYFKALFGEGMVDGVPVLLAKPQTYMNLSGESVGPLAAYYKLPLNRVLVMKYEIRPNPPKIILNPLQVMNPCQNPAAELLKKALLHLPKGQLIPIKHTSVALNAPST

SEQ ID NO: 68749 - protein, 105 aa, Zea mays
  Coding DNA Sequence Number=SeqID_25374
  Gene Ontology: Mol. function=protein kinase activity; Biological process=protein amino acid phosphorylation
  Homolog annotation: Hit_ID=A2XAK3; Match level="QueryCoverage=46%, HitCoverage=3%, E-value=2e-11, Identity=67%"; Hit description =Putative uncharacterized protein
MVLAQARRHPWPQFPRCCQLWLPRRRQLWLAGLRARWRWHITSKTYNLVLLDVDSHDRFLKSVCCKHDEVLLIIKVYFKRTGEPINLKIIASSGSQAPYPLMSSF

SEQ ID NO: 68750 - protein, 84 aa, Zea mays
  Coding DNA Sequence Number=SeqID_25375
  Subcellular localization annotation: CTP_CleavageSite=18; ConfidenceScore=5.28e-01
MVSAAGSSALPRSPVGVRAKSSAPSDPWATVRIRYRAVQIKEYPFAQAVLLKSPLRVEEPVAEDPGEQQIEVAEQELIEGKLCP

SEQ ID NO: 68751 - protein, 516 aa, Zea mays
  Coding DNA Sequence Number=SeqID_25376
  Gene Ontology: Mol. function=hydrolase activity; Cellular component =monolayer-surrounded lipid storage body; Biological process=lipid catabolic process
  Homolog annotation: Hit_ID=A2ZY29; Match level="QueryCoverage=68%, HitCoverage=31%, E-value=1e-170, Identity=84%"; Hit description =Putative uncharacterized protein
  Pfam annotation: Domain name=Patatin; Domain location=329-506; Score =66.3; E_value=1e-16; Accession=PF01734.13; Description=Patatin-like phospholipase
  Subcellular localization annotation: CTP_CleavageSite=59; ConfidenceScore=5.49e-01
MAVGRLLSHGAVRHRTLSSAPAMSASRWGSTVGALTCGASGLSGGAPDRRALNALQSIVALEVVVAPLTHRTLSGASPDSPVNYSGAASHFPEGGKFSLEFPGAPDTVRCMDFFIVYTSRTLSLVFTSTYTFIPTYRTSAAALRAALPVAAAWLHPRDNTRGILLAVCDVALLLRGRRGRAGLRARVQSAYRCKFWRNMMRAALTYEEWAHAARMLELEAAPRRASDADLYDEELVRNKLRELRHRRQEGSLRDIVFCMRADLLRNLDNMCNPELHKGRLQVPRLIKEYIEEVSTQLKMVCDSDSDELPLEEKLAFMHETRHAFGRTALLLSGGASLGSFHVGVVKTLVEHKLLPRIVSGSSVGSIMCSIVATRSWPELESFFEEWHSLKFFDQMGGIFPVVKRILTHGALHDIRHLQVLLRNLTRNLTFQEAYDITGRILVVTVCSPRKHEPPRCLNYLTSPHVLIWSAVTASCAFPGLFEAQELMAKDRFGQTIPFHAPFLLGMEERTVAPTRR

SEQ ID NO: 68752 - protein, 126 aa, Zea mays
  Coding DNA Sequence Number=SeqID_25377
MASGRTLLQPCPRLCRRSRGEDKYKEPEAQSADGGGDPVGNGDFSSRLYLGTDDRGRQPSRQIPTQILPDEWGTDPPRGGIVPVQRQGPPQTRTPPLTARDILGVLPWCTTRNASVHGMGSYLERP

SEQ ID NO: 68753 - protein, 151 aa, Zea mays
  Coding DNA Sequence Number=SeqID_25378
MGKSKKGSGSSPRSGDKCKREPTPPSEDFGNSEYSEEEFSSESEGSPAPVSPPASSDDSDDSQGIAAEVWTYIRAVERAGLEGSDESEYSSNEEDSSDSSEEGSGGDGGDGNDDGGDSDGGDGSGKGGDGSGKGSSGDGGSGGKGSSRGIN

SEQ ID NO: 68754 - protein, 86 aa, Zea mays
  Coding DNA Sequence Number=SeqID_25379
MTSIALELSTKAKKRQQDPGPHRQLRFYGAQAFLRRPQTIDQAKDGGKKRFEVPSAREKVKETRNPKPGVKKKTCKVKVDRVKKSY

SEQ ID NO: 68755 - protein, 290 aa, Zea mays
  Coding DNA Sequence Number=SeqID_25380
  Gene Ontology: Mol. function=protein binding; Cellular component =plasma membrane; Biological process=response to metal ion
  Homolog annotation: Hit_ID=A2WLM0; Match level="QueryCoverage=100%, HitCoverage=100%, E-value=1e-126, Identity=68%"; Hit description =Putative uncharacterized protein
  Pfam annotation: Domain name=Ndr; Domain location=21-248; Score =314.1; E_value=2.6e-91; Accession=PF03096.5; Description=Ndr family
MGDSSDSVSVDVERIFFGGKGHRVRTRHGPLSVSVYGDEDKPALVTYPDLALNQAASLLLHNFCVYHITPQGHELGAAPISADVHVPSVDDLADQVADVLDFFSLGSVMCLGVTAGAYVLTLFATKYRERVLGLMLVSPVCKAPSWSEWLYNKLLDDRQGTNVWRFLQAINRRHDLTESLEKLQCQTLIFVGENSQFHADAVHMTTKLDRRYCALVEVQACGSLVTEEQPHAMVIPMEYFLMGYGLYRPSQQESSPRSTLSPFCISPELLSPESMGVKLKPIKTRISRNV

SEQ ID NO: 68756 - protein, 574 aa, Zea mays
  Coding DNA Sequence Number=SeqID_25381
  Subcellular localization annotation: CTP_CleavageSite=32; ConfidenceScore=5.09e-01
MGEGLRSNRRLTSGSPPPALTTTTTTPAPDGRAAAAQASGRALLQSCPRPHRRSRGEDKCEEPEARGADGGGDPVGDGDFSSRLRLGTDGRAHRLPGRSPLKSSRHGSRPPTGGATGSQANGPDTLEVTTPAVDQPRVVEVRAARRASERPLPRTPRERVTREPAWEVERRLSPAPTPARMMNILEAEGGTKIVARFASPHPGTGGHRLGTLQGPPLRRGGWVPHVMRTGSEQKKPKRRAWRTQPSSGYKRPPTFAQTNGRKEWEAMQASCNRAKWTRFSDSQRASTEAQAHASRNRRAGCCMQATAPPLAPLSRLFGCRANAATRGNPAAPAWRDGQCGRKTGGAPGRRSGRRFAFAVITAPKEGPGKGDTPKRILPCEGTGLRAPLTDQRFKGWPSAGFNSRLRSRGPYTHYWSEVRRPAPRRAPRPPQATRAPRPLLIRGSKAGPRRVHSRLRHRARDDQGYIRYITKAWAALPSSPETPCSVPIEGNMAHSPLLLAERRRRGVCKKAESVPDRPLALCGGSGAALANPAPAEPLTASTYQPESLGPDRAPGLRPVRMREQPGQPKHYARH

SEQ ID NO: 68757 - protein, 108 aa, Zea mays
  Coding DNA Sequence Number=SeqID_25382
MVTGGRNTGRVGVIKNWEKHKGSFECPTQVPKCQMVDKVQIKYKGSPIHPPLGALTVARSVRAQGRARRRLLLRPRPGSGEDAIPPEAEAEAEPWGRARRRPLPEAEA

SEQ ID NO: 68758 - protein, 71 aa, Zea mays
  Coding DNA Sequence Number=SeqID_25383
MAGRADGHGRGRREGEGIGWEDRKWGDGDRIRKISYSKQVSGTIIRGTLKTPNSQLVTPISIKLQRPDGCD

SEQ ID NO: 68759 - protein, 179 aa, Zea mays
  Coding DNA Sequence Number=SeqID_25384
  Gene Ontology: Mol. function=carboxyl- or carbamoyltransferase activity; Cellular component=ornithine carbamoyltransferase complex; Biological process=amino acid metabolic process
  Homolog annotation: Hit_ID=Q8SA97; Match level="QueryCoverage=53%, HitCoverage=21%, E-value=2e-10, Identity=45%"; Hit description =Ornithine carbamoyltransferase
MALPVDMAGPCPRPGDVGAPPKLGSNLSSVAEAEPEPLGRARRRSFGRGQGGVRALGSGGAEFVVFRVLARVRALGSGGAEFAVFRVLARVRALGSGEAEFAVFRVLARVRALGSGGAEFAVFRVLARVRALGSGGAEFPMAPLAGPDCLSASLCQVALQSEWRRRRCPSVRPVSGAAK

SEQ ID NO: 68760 - protein, 179 aa, Zea mays
  Coding DNA Sequence Number=SeqID_25385
MALPVDVAGPCPRPGDVGAPPKLGSNLSSVAEAEPEPLGRARRRLFGRGQGGVRALGSGEAEFVVFQVLARVRALGSGGAEFAVFRVLARVRALGSSGAEFAVFRVLARVRALGSGGAEFAVFRVLARVRALGSSGAEFPMTPLAGPDCLSASLCQVALQSEWRRRRCPSVRPVSGAAK

SEQ ID NO: 68761 - protein, 63 aa, Zea mays
  Coding DNA Sequence Number=SeqID_25386
MQGSWLTAIAAKSTKDLPTLTTPLLPLPLSEHEWVKEVIKGTTCLALEIPVTRVILQILVTSR

SEQ ID NO: 68762 - protein, 90 aa, Zea mays
  Coding DNA Sequence Number=SeqID_25387
MTVGRRHLWFTRQSDDAPDSPVNFSHFAPPILESNQFAVGPAWAPDTVRCATGQSGSLEDMVAGVTWPSTLPPGWTVEWDPASAEEEHEE

SEQ ID NO: 68763 - protein, 39 aa, Zea mays
  Coding DNA Sequence Number=SeqID_25388
MALASCALPRVLETGISAELTVKSSLGILFDQKNFGYFL

SEQ ID NO: 68764 - protein, 150 aa, Zea mays
  Coding DNA Sequence Number=SeqID_25389
MLVDYTAVLDGPSVSVEGPTQQGVESVVEVTPASGVTSDGSSDPSLRLQLLRALRAVGLLQQPGCPMVVQGASLAEVQGKVASQTPPPAEARGKSHVAPAPAPGVGAPAPRAGDDAVSLGDWTDLTPCDAGDALPVEKAKRGSQTYVQCT

SEQ ID NO: 68765 - protein, 154 aa, Zea mays
  Coding DNA Sequence Number=SeqID_25390
MRARVLPGGWAPRVGDSDQQAGNGGSLTNGAAGRLGPLVSGGGRVLTDGALQAVTKSGERKGEADGRVLLVRTTVYLGSAHDRKWGREKRKSGGEFHLGWSRDEDEAGCNSGRAQSRTAAELYQRRIRAQGAWRRGSSGGLEEPACAAWVSGQR

SEQ ID NO: 68766 - protein, 493 aa, Zea mays
  Coding DNA Sequence Number=SeqID_25391
MEKDRQEAAQKRRAVVRIGDPFREAKVRAAAKSAAPGSSKPMPAVKPAAPGPSKASAGAKAAASGAGKLPSGGPAKGQRLPSPARMDGAAARVADFDTDICVRDYFLGSDGGQLAVVPPPVAATSPTAVVGAKGATRDSWATFCVSGEILSAAAAKDVAGSMSQQLRQWSQQLKHAADFADHVVSGSLTADFAAEVESLHAQHADVVREKSAAESKSHRLSEKVAAMEAEKADLRRQLAEERREANKAIADSQAAQAEAKLARTEGSLARQLAEELQARLDALRSRFDKVETSMRVEVERTHAQFVDAYRELGARTATFEAPDQEAGLRFLESMQEELGVLPTIVTSLMSFASIVTCEGAVNALSREGCRHLEVFDQSDENFEREIFKVEDPVLKQSAGVLFDRMWGPHGRETMGHAKGVEDLGGLDGALPKAADVDPVPPSDVGEGPSSTPAPTAAGEDPTPAPAPPCEDALKAVVEPATEDPAAAAEPSQV

SEQ ID NO: 68767 - protein, 88 aa, Zea mays
  Coding DNA Sequence Number=SeqID_25392
  Subcellular localization annotation: CTP_CleavageSite=73; ConfidenceScore=5.16e-01
MQGGADWTAGHGTTWAAGCSASGAARLGTAGALLGSEQQGRGSSGRVLLDGAGSTDVSRKTAGRGTGGAAGCSASGVLGSGQQGRCSA

SEQ ID NO: 68768 - protein, 38 aa, Zea mays
  Coding DNA Sequence Number=SeqID_25393
MGSHDPRAKRESRLMGKVKKKSSRRISQEFQDFDESED

SEQ ID NO: 68769 - protein, 270 aa, Zea mays
  Coding DNA Sequence Number=SeqID_25394
MAASGYSGSAPITDQGVRRLAPEGFTVASDTERGMTREGQRRLRHSNCSATQQSESDRQSGLAKGAIGSSAPPDPGLGLRLSPGRRRTPLRPTLGLGLGLRPGRRRTPLRPTPGLGLGLRPGRRRTPLRPTPGLGLGLRPGRRRTPLRLTPGLGLGLRPERRRTPLRPTLGLGLGLRPGRRRTPFRPTPGLGLRLRPGRRRTPLRPTPGLGLGLRPGRRRTPLRPTPGLGLRPGLCRTISASPDPGARARPRPRKTDSTSASEEPPRRPT

SEQ ID NO: 68770 - protein, 57 aa, Zea mays
  Coding DNA Sequence Number=SeqID_25395
MVKNFGSKTVQIAVNAVCRRKGEAQKIQRLTQRRSCEAGKLRHVRRKGNRLKDEKAI

SEQ ID NO: 68771 - protein, 289 aa, Zea mays
  Coding DNA Sequence Number=SeqID_25396
MPRAARAAFVFWGGPAFAPEWRPRAEAGAPLVWEDSSGDLPGGWWPPPSAPRRRRLEKSPSPTGSPPPSAPRASGSSYLSSPLERRRGRGQDCSSAHPEAYTAAARPSGAGVVVVVVRAGGGEPLVSLLLLRRPSPWSGVVRTCGGGTGVPFVMALRMPRQVSPVDYLKRFTKRESPRVKVTSEYEQRRSWLENGNLVGRSLAGLPVSGADAGVDQPRPRVGLAPLEDGWPRPRGNRLSRLLGPDSRRSPRTASPSEAGSDLAEGVVDAEGATAPFQREDPSLQDQMVL

SEQ ID NO: 68772 - protein, 348 aa, Zea mays
  Coding DNA Sequence Number=SeqID_25397
MTVAGGREQRSRRQPGSHPIQGQQESLLPRREDGAPVIRSSNGSRTRNGHPANHSPRRINSAAGQAAPLAGAAGDASPSPDRERGIPRKGSFSAKEPVSEPPPLLIRGSKGWPSKGFNSRLRSRGPDTHYWLAPEGFTVASDTERGMTRGDQVRQITRRYFWACLWAPSRPPTNGARTSTRIIRLQLTGDTMFGAHRGLGGCSRKPGSGQTVDSVNIPARELGPRPCTRATASSHEGTTRPAEALRKALRPRRSETTPPRPRGLHPAGALARTHRNKMQPRKAGPLAKKCDESLQASANTPFEARGLLSGTIIRGTLKTPNSQLGSDSGSAPEDGELRSARPQGSDSG

SEQ ID NO: 68773 - protein, 202 aa, Zea mays
  Coding DNA Sequence Number=SeqID_25398
MARLRHTARKSVIPFLPSRLAERPLHRTVSGQSSHLERLHHRLREEQERRRQHREQQGSSSPPQQEVESVRPRSSVAQLEAPPAPPRDVPAVGGAIGGDPDDYDSHHGTDSSEPQEAEGWVARPLPMTPLAVSLPRRTRHLAAPGFRPAHLVDRVSCVVYHHSRVEVPGPMGGYLPYFRRLEDDLPGVRMVVSEPLFPSLEV

SEQ ID NO: 68774 - protein, 311 aa, Zea mays
  Coding DNA Sequence Number=SeqID_25399
  Homolog annotation: Hit_ID=A2ZUR2; Match level="QueryCoverage=65%, HitCoverage=37%, E-value=1e-32, Identity=42%"; Hit description =Putative uncharacterized protein
MSPWMGAAALSPRDPSKFSQEEAPFPDQEPGGERGAPNMEEAYCPQEDRERNVNPGADQSAITPLRRSPRFHLEDKSLSKSLLPPNRCETSPNRKTKNAHRKDKNQESLKGNRGSAGFPPRKDISDVSNKKSDKQELKPIHCKVQTGKRKRGTERRLLSKKQSCQDPGPLPAYRQEIASCNESRKSTHRRIENDPSTEVKLKVGDVRLANIDENINKPSGTQREGIEIFCGPDDWTKEQDMALRKAYFSARPSPHFWKRVSKMVPNKKELLDDYISQTPRDILNPAVFSKSLLHHAAFPYPQGVKAAIDCP

SEQ ID NO: 68775 - protein, 119 aa, Zea mays
  Coding DNA Sequence Number=SeqID_25400
MARARAYKARSDCNLADREYVLVPEQGAAQEVAPDPAPEPAPEDLPATALEGKPRRLCPSRDLRRGLPFRLWWVQVRSLHDGSRGSLEDMVAGVTWPSILPPGWTVEWDPASAEEEHEE

SEQ ID NO: 68776 - protein, 279 aa, Zea mays
  Coding DNA Sequence Number=SeqID_25401
  Homolog annotation: Hit_ID=A2YGC2; Match level="QueryCoverage=56%, HitCoverage=71%, E-value=2e-10, Identity=28%"; Hit description =Putative uncharacterized protein
  Subcellular localization annotation: CTP_CleavageSite=57; ConfidenceScore=5.01e-01
MVVMRSMVLVMAMVLVVSIATTAQEKMKLWKETSRSSKTTTSSRHGLAATPSRLPVKAAEPEGWVARPITRDAARGCHFHDVLDTLLRRALNRRTWSIEYRCVVYQHSRGVYPDRWEATCLVRRPENSLQGEEACSEHYSISERDSAEVAMQDVARRALSHYCSVLGGVADGLDLKYYPRRPSGSTGGVIVSPVGEFNPRLSSTVNLAVVLNTELDHALDELSRARVEIALLRAEHAERRHLDDGSPAPVGTQHPYRSPRRGHQPYGNPDCKTKINLEP

SEQ ID NO: 68777 - protein, 745 aa, Zea mays
  Coding DNA Sequence Number=SeqID_25402
  Gene Ontology: Mol. function=oxysterol binding; Cellular component =Golgi apparatus; Biological process=steroid metabolic process
  Homolog annotation: Hit_ID=A3C765; Match level="QueryCoverage=97%, HitCoverage=98%, E-value=0.0, Identity=65%"; Hit description =Putative uncharacterized protein
  Pfam annotation: Domain name=Oxysterol_BP; Domain location=321-718; Score=255.5; E_value=1.1e-73; Accession=PF01237.9; Description =Oxysterol-binding protein
  Pfam annotation: Domain name=PH; Domain location=39-156; Score=41.5; E_value=3e-09; Accession=PF00169.20; Description=PH domain
  Pfam module annotation: Pfam domain module=Oxysterol_BP::PH; Domain location=321-718::39-156
MRAWEMHPLCCLAGEWPASGGGLAPGDRSPPAEDAGAAPAVAGVLYKWTNIGKGWRPRWFAIRGGVLAYSKIRRRVAAEPRPEAAGGVRLIGVARGAAGAAERPIGFVPLKISSFSESKSDDKRFYIITPTKTLQLRTGCANDRATWIEALVTARSEYSFNGDLSGDQNDASFSTEKLRNRLNAEGVGEAVIKDCEQIIHSEFSQYQTQMKQRCEEYLSFIGTLPQDVEQVTIMLYVFLVVNSVDSTVPEKPRLELFKHDCSSSGKCSEYSNTESSDDVGKQEISELSDGDEFHFYDTRQSFSEFASSPADPRKGCLNNGNEDHKSVESLTVDKAEKYMLSHSKRRLQLPEPIEKEKGVSLWSMIKDNVGKDLTRVCLPVYFNEPLSSLQKCFEELEYSYLLDRAYECGLRGNGLMRILYVAAFAVSGYASTDSRPCKPFNPLLGETYEADYPEKGIRFFSEKVSHHPMVMACHCEGKGWKFWGDSNLKSKFWGQSIQLDPNGVLTLEFDDGEIFQWSKVTTTINNLILGRVYCHHHGTMNISGNRRYSCKLTFKEQSFLDRNPRQVQGVVKDAGGSKVATLTGKWDESVHCVINNDASKVNSHGPHQSSGSTLLWEKNEPPVNPTRYNLSAFAITLNELTPELEEKLPPTDSRLRPDQRHLENGEYEKANAEKLRLETQQRMARKMQESGWKPRWFQRDSEDGTYRYVGGYWEAREQRTWVGCNDIFGNLSSSQKLPPSALYTS

SEQ ID NO: 68778 - protein, 301 aa, Zea mays
  Coding DNA Sequence Number=SeqID_25403
  Subcellular localization annotation: CTP_CleavageSite=32; ConfidenceScore=5.07e-01
MRLMVLVMPMVLVVSIATTAQEKMKLWKETSRSSKTTTSSRRGWLVLDTLHESLSSPSYPPVLLSIRFAVPWPEIESVRRCSPVLPLEAPPAPPLGAPAPGVAAGGDPDDGGGDDSSSHDTDFSADQEPEGWVARPITRDAARGCHFHDALDTLLRRALNRCTTVLGPSSIAVWSTSIVAGSTRTAGRRPAWCAVRRTVSRVQRPAQSTILSLSGTQLRRPCKMLHGVRFRTTARFSMSENRHRGGRRAQQEQAAQQEEVPQQQQLPPPPPMSIEQMFLMQTQAVQAIGQTLAAIQQQQQQ

SEQ ID NO: 68779 - protein, 156 aa, Zea mays
  Coding DNA Sequence Number=SeqID_25404
MGKNNKRKREPTPPSKEFGDSEYSEEEFSSESEGSPAPVPLRESSDDSDDSQGLAAEVWTYIRAVERSRLEGSDESEYSSDEEDSDGRGEDEDDNNDDGDDDDDGDGDGGGSGSGRGSGGDSKDGDGSGSRGGNRGGSSRGSTRGGSGGGSNRASG

SEQ ID NO: 68780 - protein, 114 aa, Zea mays
  Coding DNA Sequence Number=SeqID_25405
MALPVDVAGLCPRLDDVEAPPKPGSSLSSMAEAESEPLGRARRRSSAEAESEPLGRARRRSSAEAESEPLGRARRRSSAEAESEPLGRARRSSSAEAESEPLGRARRSSPSSGA

SEQ ID NO: 68781 - protein, 132 aa, Zea mays
  Coding DNA Sequence Number=SeqID_25406
  Gene Ontology: Mol. function=kinase activity
  Homolog annotation: Hit_ID=Q6QP54; Match level="QueryCoverage=53%, HitCoverage=24%, E-value=4e-20, Identity=71%"; Hit description =Putative kinase
MGLAGRHHCLSGGASQMGHRSCSLRPESARGRVMMALPVDVAGLCPRLGDVEAPPKPGSSLSSMAEAESEPLGRARRRSSAEAESEPLGRARRRSSEEAESEPLGRARRSSSAEAESEPLGRTRRSSPSSGA

SEQ ID NO: 68782 - protein, 79 aa, Zea mays
  Coding DNA Sequence Number=SeqID_25407
MGFGFGGVERWAPATSCAVGLSRRRYPAGPRLGEMDAGGLIWNHELGSSDRISCSNPRIDCGPWILDPKAVGAYRFIFW

SEQ ID NO: 68783 - protein, 137 aa, Zea mays
  Coding DNA Sequence Number=SeqID_25408
MTPRIEAELRSHCHHGAGSSQSHRIRHPSPHLLRAIKGADMASFMPVPLLIAVLCSAVLNVGVTWNWKHGKQQLPDRERALAVPKEKKSRRLLSGNAATKIQCKFSCGENVRFHPVPVPPLRKRQGNMPIAQPSLRG

SEQ ID NO: 68784 - protein, 307 aa, Zea mays
  Coding DNA Sequence Number=SeqID_25409
  Homolog annotation: Hit_ID=Q109A0; Match level="QueryCoverage=60%, HitCoverage=100%, E-value=2e-37, Identity=52%"; Hit description =Expressed protein
  Subcellular localization annotation: CTP_CleavageSite=89; ConfidenceScore=5.08e-01
MATAWVRSLSCRSSYAVTDAAIAPSPAKKPPPQPLPFSCASATAAAADVMDAVAYAHHQARRKKLGRERERRKETREPRPRPKKKPKPMATKDAAAAAGAPLSFMPSPAPGPPVSSAFLTMAELPEGHSSRRVVELIFASGWADAAGRPSPSPSPAVEALFRVHSAPRAVARFEEARQAARARGAAARCGADGNEMMRFQCRAPGGGVFGAGVATCRLGASVSAVRTFACSGAAHASAAAATATAGRRAMLVCRVIAGRVCPANHPSSRHAHGSAATAYDSVDMGNGELVVLDSRAVLPCFLIIYKV

SEQ ID NO: 68785 - protein, 72 aa, Zea mays
  Coding DNA Sequence Number=SeqID_25410
MTSSGLRSSGDERWHPNEYQRGGSGDQAIIGVGMSGEGFRSMMGTSKNPLRARLDHGLESWTWRWSIEPYRW

SEQ ID NO: 68786 - protein, 222 aa, Zea mays
  Coding DNA Sequence Number=SeqID_25411
MTKCFVEHEEASFQANTGILCKEMLRCERKEGKVFFAFGSKDTNFVHIKAIRTWIESPNLSDESISDTSGLTRNINQVRWQQAKAEGAISSELVPTELKTPFNHCTQWLPNSKHVFQRSLRDSCSFEFLSHPALRNKARGCILYPQVMLPICQGIATSHTPLPRKRGRATLRGLYKVPLASENPLQFIGSSNAGFLADRHRSKINQGPPYTDHSLTALAPFG

SEQ ID NO: 68787 - protein, 110 aa, Zea mays
  Coding DNA Sequence Number=SeqID_25412
MEKMAARGAGKADTRRFWREERATLHLRRNNRFRKGTGKGGYPERDPSPRRNRAPSPPLLIRGSKAGPPEGSTVASDRVGPTPTTGQGFEGQPPEGLHGRLRLLGLRAHY

SEQ ID NO: 68788 - protein, 477 aa, Zea mays
  Coding DNA Sequence Number=SeqID_25413
MKVADFADRVASGVLTADVAAEVERLRAQHEDAVREKSAAESKNRGLAEKVAALEAEKTDLRRQLVEERREVNQAIAEVQAAQAEAKVARAESSLASQRAEELEARFNALRSHVDKAEASTRSEVERTYAQFVGSYHKLGERIADFDVPDQEAGLRFLECMQEELLVLPTIVEGFMSFASLITCEGAMNALSREGCRHYEVFDQSDKNFEREIFKADDPMVKQSAGALFDRMWGPYGREAVRERSDQAKEQMERAEDVEDFGALAAPPEATEVNPVLPSDAGEGLLAMPVPIVAGEDPVSAHAPTVEDALKVQDFGPAHATATDNANFVASTVVAEDNSDDSVSKFFESDDSGSSIVWTEGSSDEDLDYFAALDAAVAETSLRVTGEDIPCASAGCRRRRAVAKRRVSELSRSDRRHGEVEGGRLRVDGTARRELLSSSAEASVGEGELRNLFEGEELRIMLYNYREMGIIPKVEPL

SEQ ID NO: 68789 - protein, 186 aa, Zea mays
  Coding DNA Sequence Number=SeqID_25414
MTFLAGSSLVETVVSVREEPEAGHHLRVEKAHGSLRSYSTEVEADDEGDEDDSHHRLGGSHNHYRDFGSRCHDGSSRAMKLKRYLTSERGYKVDGRRMWFWCLVGGRGGAQAQSHWSPHEGVGHSGKAEMVRKLDVEETKKENGRHPNGGDSEVPRRVTRHPILGSRGFTIYSKSKVTRDKAPHPA

SEQ ID NO: 68790 - protein, 164 aa, Zea mays
  Coding DNA Sequence Number=SeqID_25415
MTKDFTMTTELPPYDYMRGSFVAEEILNVEFFMTKVVMIVTIMILVSAAQKWHEVSLEAKQHEAVALKKAPNRDGMGRFRKEMERYLREAEVARVPTKTQFNLEGRVQPLSLVVALDRIHYMNKDMTLPWKPTLLASTTLADTSYKRRDEKKNNIIQRGRIGWG

SEQ ID NO: 68791 - protein, 127 aa, Zea mays
  Coding DNA Sequence Number=SeqID_25416
MAHRNDTGHQQTPTGSIRVGCTMGKTKDAELGAQRAGTGAGVLDGGKTQRRGGRRMQRLERELARDSATRRHDHTGASREVGRTAALEAGGARPSGWTGAWHRRTPKRTPGVPAPWEIRPGAGAEAS

SEQ ID NO: 68792 - protein, 124 aa, Zea mays
  Coding DNA Sequence Number=SeqID_25417
MIGKVGGMFSKIKLDGGSVKGLDGFNIGKDVPLPESLIIEKPYLDSLNQHTLESLFFSRVRKQQIFVAFALRWYQKKNTRNEVREERILHLEPLFKNFMGGVFTSLGIVIILLCTPWITLVCNK

SEQ ID NO: 68793 - protein, 145 aa, Zea mays
  Coding DNA Sequence Number=SeqID_25418
  Homolog annotation: Hit_ID=A9PEU5; Match level="QueryCoverage=55%, HitCoverage=39%, E-value=2e-34, Identity=81%"; Hit description =Putative uncharacterized protein
  Pfam annotation: Domain name=DUF640; Domain location=27-145; Score =140.9; E_value=3.6e-39; Accession=PF04852.3; Description=Protein of unknown function (DUF640)
  Subcellular localization annotation: CTP_CleavageSite=74; ConfidenceScore=5.16e-01
MDLSPNPESPGSGGDGGGGGGGAGGSSSGGASPSAGFGTPQTPSRYEAQKRRDWNTFGQYLRNHRPPLSLAQCSGAHVLDFLRYLDQFGKTNVHTPACPFFGHPNPARAVPPAPLRQVWGALVPLVGLPVGRVRHPQLQTAVTPL

SEQ ID NO: 68794 - protein, 96 aa, Zea mays
  Coding DNA Sequence Number=SeqID_25419
MVHASDGEVWKHFDIIHREKAEDARNLLIDELVPDMGTLSGGFFAECPRWHSAKVDSLLSAVGQTLGKGAICGLADAYACIYVASRYWLLLLPNKQ

SEQ ID NO: 68795 - protein, 20 aa, Zea mays
  Coding DNA Sequence Number=SeqID_25420
MALREIEKDKIIVAKVYSKK

SEQ ID NO: 68796 - protein, 98 aa, Zea mays
  Coding DNA Sequence Number=SeqID_25421
  Subcellular localization annotation: CTP_CleavageSite=27; ConfidenceScore=5.14e-01
MNHRATVGNTVLPKSTLRGNPRRRRDSASYSGSTGEEAFLENLRKSRNEAGNNATSSSPGKDYLLQIRNREFVCPKNPVVHLIHGKMDTNYKEKKQMR

SEQ ID NO: 68797 - protein, 103 aa, Zea mays
  Coding DNA Sequence Number=SeqID_25422
MNTVTSHYRGDFHTRIVYEFVFALVCEVTIGSFIPTIELKSLLFMILMFQMFDHFQHLRNEDSREKPRSETLAIHLGSEYGSSYPGLKGNRDSWVKMCHLCRV

SEQ ID NO: 68798 - protein, 150 aa, Zea mays
  Coding DNA Sequence Number=SeqID_25423
MGKNKKGGSSSHHSGDKRKREPSPPSEDFGDSEYSEEEFSSEFEGSPVYASPPVSSDDSDDSQGIAAEVWTYIRAVERSGLEGSDESEISDEENSSDSSEEESGGDGNNEGDDGDGGDGGDDSDGDNKGDGDGGKGDWRRRQGRRRQQQG

SEQ ID NO: 68799 - protein, 120 aa, Zea mays
  Coding DNA Sequence Number=SeqID_25424
  Subcellular localization annotation: CTP_CleavageSite=70; ConfidenceScore=5.13e-01
MTRQVHFQSIRDLKSKLQARPKIFGLIVSKSTQRLGACGGQISPGSTRRLEGLRKTLGPLLRKAIPSWAREESLAEWIDTRSDRLEPRRLIGFKHYPQHWSDSPAQHPQMSELNEDKSAG

SEQ ID NO: 68800 - protein, 206 aa, Zea mays
  Coding DNA Sequence Number=SeqID_25425
MPNTKAEWSSIYLTEEQYLEVNRLGIFDSTIDSRELRRRGRQSTSSSSQSSRSRSAAHEIELAVLRQQAEYHQSVLREQLEYQRQQSEYQRQQAEYQKKRDEYYASLQAQNQALLLQLAQQAGVPMPTYGMPPPDFALPMPMLPPPPPPPPPSQFPMGFQTPPASVAAPGNGSGSGRHNKFVGEHHFQHAESSRRRWLLEPSRRWI

SEQ ID NO: 68801 - protein, 208 aa, Zea mays
  Coding DNA Sequence Number=SeqID_25426
  Subcellular localization annotation: CTP_CleavageSite=61; ConfidenceScore=5.31e-01
MASAARLQGWSRQWTTWPGSSRRCYTSSAWEVTGSSADEVSSRANSASVHADTAVFGSGSSQSSRGCSGPDSHNEQTPTLKDAITKRNPGFHSRGYEQPPHRRACATTNSGWLAADHYSSDNDLRSGRPNSSSDDLRADAAATRPSPVSPLEGRGQEIKAKETKARSADGADDLVGGEAFSGVHHLSTGDGSHLPTGRSPLASSGVAD

SEQ ID NO: 68802 - protein, 99 aa, Zea mays
  Coding DNA Sequence Number=SeqID_25427
  Homolog annotation: Hit_ID=Q8SAB2; Match level="QueryCoverage=54%, HitCoverage=12%, E-value=3e-07, Identity=49%"; Hit description =Putative gypsy-type retrotransposon RIRE2 protein
MELPLDAQSSGRRLDVDERVEQCRAVVSVLHVLARFVPVLQMQHLREEEGGAPAPCDDEIVVLDSFYERGFGLPLHPFMRGLLFYYGLELQNLYPNMIL

SEQ ID NO: 68803 - protein, 25 aa, Zea mays
  Coding DNA Sequence Number=SeqID_25428
MTEDEAILNTTLNLTVSMLCQTHQM

SEQ ID NO: 68804 - protein, 169 aa, Zea mays
  Coding DNA Sequence Number=SeqID_25429
MQGLLCTPPRLLLAEEAAHAPHRKLLAQRLSLSTRLWKGDFRRRGGESTGGRSRPRRSRSTVKEDEVEVVSRQFRSRAKTKRPQIRFRRGYSFYLRKLEFLQQDALEAKVQAFPEIAKYDGDDISVEPASPSTPPTVTEPSVDEEEFYCPDVSDEWYFSDSDRSTRNSY

SEQ ID NO: 68805 - protein, 243 aa, Zea mays
  Coding DNA Sequence Number=SeqID_25430
  Subcellular localization annotation: CTP_CleavageSite=38; ConfidenceScore=5.56e-01
MGAIQVKAPFTPGARSRLARAQPRAGTIDPGGFTPRPRASSSNGRTFDSPEAQLGQASRRSNLGQIASPTDPESNLRRHRKLRLARPRGSAPSLDLERRSPPRPTPGLGLSLDLGRRSPPRPTPGLGPQPRPRKTVSASPDPRPRTQPRLRKTVSASHDPRARTQPRPRRSHHLARPWARTDHAIGGPSYAKVAAREDGLTDSLSLSLANAYNPLLQAHPPWAQDNTSRGTPRGRNTDSWHAR

SEQ ID NO: 68806 - protein, 64 aa, Zea mays
  Coding DNA Sequence Number=SeqID_25431
MDVLMIRNLGEDQQELGKGLGVEVEQQGAHNRKEIKQELALVVRSIAQCTVDNQRRSGAAIAGF

SEQ ID NO: 68807 - protein, 150 aa, Zea mays
  Coding DNA Sequence Number=SeqID_25432
  Subcellular localization annotation: CTP_CleavageSite=60; ConfidenceScore=5.33e-01
MPRPANRLGSGFIRGQVGSQTTTSSTPSLNHNHRQGRPPLLPRRHFLIASAINEAQRDLRVAAARALYRRRGPESGMWAGMSLGPPAADLGNPVWSHRPGQDEIARRNRTPAARPPFNVGRSFGASNEGLWLAMAPPWLDAGVHTADPGK

SEQ ID NO: 68808 - protein, 345 aa, Zea mays
  Coding DNA Sequence Number=SeqID_25433
  Gene Ontology: Mol. function=binding; Cellular component=nucleus; Biological process=activation of protein kinase C
  Homolog annotation: Hit_ID=A2XQM3; Match level="QueryCoverage=89%, HitCoverage=58%, E-value=1e-105, Identity=50%"; Hit description =Putative uncharacterized protein
  Pfam annotation: Domain name=PPR; Domain location=152-186; Score =41.5; E_value=2.9e-09; Accession=PF01535.11; Description=PPR repeat
  Pfam annotation: Domain name=PPR; Domain location=187-221; Score=6.7; E_value=1.2; Accession=PF01535.11; Description=PPR repeat
  Pfam annotation: Domain name=PPR; Domain location=20-54; Score=22.5; E_value=0.0016; Accession=PF01535.11; Description=PPR repeat
  Pfam annotation: Domain name=PPR; Domain location=253-287; Score =44.5; E_value=3.8e-10; Accession=PF01535.11; Description=PPR repeat
  Pfam annotation: Domain name=PPR; Domain location=288-322; Score =11.0; E_value=0.38; Accession=PF01535.11; Description=PPR repeat
  Pfam annotation: Domain name=PPR; Domain location=90-124; Score=20.1; E_value=0.0081; Accession=PF01535.11; Description=PPR repeat
  Pfam module annotation: Pfam domain module=PPR::PPR::PPR::PPR::PPR::PP R; Domain location=152-186::187-221::20-54::253-287::288-322::90-124
MWLIGRGSFLANNCSQGLLSTSAILAAIFTKTRNYKEALLLFAKMKNSGVVPDQLILATVLPACGHIRHLRIGKAIHSYMLVSDMIIGAHISSALISLYASCANMEMAEKLYNEMPRKDLVSSTAMVSRYARNRKVEIARSIFDGMPEKDVVSWSAMISGYVDSNQPNEALSLFNGMQECGIRSDEVTMLSVISACANLGSLNKAKWIHAFIKNNGLNKVLHICNALIDMFAKCGGINLALNVFNEMPLKNVITWTSMISAFAMHGDGKSSLRLFEQMKDEGAEPNEVTFLSLLYACCHVGLVYEGRLLFSSMVQQYGIEPKHEHYGCMVDLLEGLNLCKKQLIS

SEQ ID NO: 68809 - protein, 278 aa, Zea mays
  Coding DNA Sequence Number=SeqID_25434
MWQYIGGDDFNHHSIVNLMKEELKARVLAIIAGITSDFLDESGSLPFNQSRLSDLADPSYQREPALARPNPSLTLPHGADLSAPFPLAHAPRPLSAQWVPPVSANPWTPHVRPVPHNRPRARPCTRRGLHAHDARQGRAHPKPAISSCPHPTPSPLPHPCTHRAPAVTSHRVHTREVPPSSVVVSCLAAVESSSRLLPRRSPDTVDPKPHLIPTAVQRSRSPLSILVRHVAPNPPKPFPAPQGPRRARALVSVGAPPWARAAPQLAARETLPRLVVGS

SEQ ID NO: 68810 - protein, 156 aa, Zea mays
  Coding DNA Sequence Number=SeqID_25435
MEPSEEQELEGWVTRPITRDVARGCHFHNALNTLLRRAFDQYTCGVADGLDLKYYPHRSTSSTRGVIVSPVGEVNPRLSSMVNLVAVLNTKLHHALDELGKARAKIAELRAERAERRHQEDGSPAPVRTQHPYRSPPHGNYAYGTPDYRIWINLEP

SEQ ID NO: 68811 - protein, 78 aa, Zea mays
  Coding DNA Sequence Number=SeqID_25436
  Subcellular localization annotation: CTP_CleavageSite=24; ConfidenceScore=5.53e-01
MYSACARKRSGPYGPATSSSAPACSMAPKARSSRSLQSYDVSSGSGALYGTGGEELADFQAYAMPLDASRILIANNRE

SEQ ID NO: 68812 - protein, 590 aa, Zea mays
  Coding DNA Sequence Number=SeqID_25437
  Gene Ontology: Mol. function=transferase activity, transferring glycosyl groups; Cellular component=integral to membrane; Biological process=protein amino acid glycosylation
  Homolog annotation: Hit_ID=Q67X53; Match level="QueryCoverage=91%, HitCoverage=92%, E-value=1e-142, Identity=46%"; Hit description =Putative beta-1,3-galactosyltransferase
  Pfam annotation: Domain name=Gal-bind_lectin; Domain location=162 -354; Score=86.2; E_value=1.1e-22; Accession=PF00337.13; Description =Galactoside-binding lectin
  Pfam annotation: Domain name=Galactosyl_T; Domain location=396-549; Score=36.6; E_value=1.9e-09; Accession=PF01762.12; Description =Galactosyltransferase
  Pfam module annotation: Pfam domain module=Gal-bind_lectin::Galactosyl _T; Domain location=162-354::396-549
MWATKKLATTALLVLTSLLAARYLIEHTASSGMSSRYQILHLVHHLEWLKSPADAKETSPGVVITTAASSNTSSEPEDSASKNSSAAAQVFPWLDTWSQMTRLADIASGLPHATEAVDDGRTAWENLTASVHVHQRQRRRLCPYSVRDTPSNKPESGGGGGAFTVGVPCGLTVGSSATLIGTPGLLSGNFWIELVGTTTALPAGETETPAVPLHYGVRLTGDDGATRDRPPVLVQNAFSASSGWGAEARCSCTPGNAAAEGAPPAAVVDGLERCDAMADREEEEDKKHKHLHGGCFPFKQGYLAIATLRVGWEGFHMTVDGKHVTSFAYRAGLEPWYVTQVRISGDFKLASAILSGLPTSEDLENPNLESLKAPPVPNDRDVDLLIGVFSTANNFKRRMAIRRTWMQYDAVRQGAVAVRFFVGLTSVLPAKYLMKTDDDAFVRVDEIHSTVKQLNVSRGLLYGRINSDSGPHRNPESKWYISQEEWPEDKYPPWAHGPGYVVSQDIARTINNWYKASRLKMFKLEDVAMGIWVNEMKKGGLPVKYETDKRINIDGCHDGYIIAHYQEPRHLLCLWEKLLTTHQAECCSTK

SEQ ID NO: 68813 - protein, 356 aa, Zea mays
  Coding DNA Sequence Number=SeqID_25438
  Gene Ontology: Mol. function=binding; Cellular component=cytoplasm
  Homolog annotation: Hit_ID=Q5ZDR1; Match level="QueryCoverage=42%, HitCoverage=21%, E-value=6e-39, Identity=53%"; Hit description=RNA -binding protein-like
MSFRLITLLIKSELQTSQSRLVGRIDSVRVRLAMVNKGKGISLPRHVVLHVVHPQRPLLRSILSVHLTSSKSLVGITRVISEIHQERKAGERTSGAAGPSIDKMEKAPGEAFSRRNPSGPVNQTDSYAQQPHEIVSMSLKEIVGMQLLCCEVVEKTDAVVYRGKVSAHLSGSNCLGCAARSDLRKWAAAEKFQPSSKSSGHLNATGQKAHSLVDSEKPSNQRPAVIVKSHTTRLPVGNPDGTIIIRTDQYNIDDLRIDYMYAKFFVIKSIGEADVHKSIKYGVWSSSSSGNSKLDSAFRDADRISRRHSTKCPVFLFFSVSIYLLGRYPCDVSNEVRWRFTIYVPWHRTGTYLVME

SEQ ID NO: 68814 - protein, 251 aa, Zea mays
  Coding DNA Sequence Number=SeqID_25439
  Homolog annotation: Hit_ID=A3BPB8; Match level="QueryCoverage=45%, HitCoverage=33%, E-value=1e-13, Identity=47%"; Hit description =Putative uncharacterized protein
  Subcellular localization annotation: CTP_CleavageSite=42; ConfidenceScore=5.19e-01
MPASAIRVLAAALRPGMPPRSPRHLRPRPALHGRKGVIPGITSATAPTILALTPLSIEGRVPFQGLPLRQPPPFSPSSALRHPHPHPPPPSSSYAQVFGALLLPLPSPHIWIRGSLRLPRKGPTTRAPSSIRNKLKRPRLMSWSAVQIVGNFAPVGEQSPTSSSTTLAKAGGSKARVTEIFVVTVSGSKVPCLAFGTRKASFLLEVPLSVVASLFDEGHSGGHAVDIGIVIEEHLNPVVHACKGEPESCRD

SEQ ID NO: 68815 - protein, 387 aa, Zea mays
  Coding DNA Sequence Number=SeqID_25440
  Subcellular localization annotation: CTP_CleavageSite=71; ConfidenceScore=5.07e-01
MLDATKPKGCASAVQLHATCMAVCPFDRWFRRGWRSAWGGPWSMSVKTLSVTPEDASGGEPPLKRGRSPGRSMTSRGLAPFSHRSASRIFIRQPDCIPSPMVTQDGDHQFDGGEKQAGLRPLPRPQLQGSSSSLLGRRAGRAGACLRVGWRPASSSGIRGRKTSSSSAEEASSSHAGEGELLLSGQGPAFRPPSGRLWPAALGGSHNTSYAGRAVAAVVGTEVVAAGEGFSADGTVSATYAPGLWLFGFNGWFSSPARGRERGPSSGSVCPGAIAAAVLPSEMEVVAVLLVQWSPASHPEFVVPQALRCGGCSYPREWNWSSVCNGTLSTGFKNPRLLCDEPEPEAAASARTEAESAQKEASSAQEQVASQAEEVQQRRLELGQVVR

SEQ ID NO: 68816 - protein, 167 aa, Zea mays
  Coding DNA Sequence Number=SeqID_25441
  Homolog annotation: Hit_ID=Q6QP51; Match level="QueryCoverage=69%, HitCoverage=42%, E-value=2e-17, Identity=50%"; Hit description =Putative growth-regulating factor 1
  Subcellular localization annotation: CTP_CleavageSite=70; ConfidenceScore=5.01e-01
MAAADERKRRSNRLQAHVPSWSSRGALSHDENSAARPAPTAVPPARVRLATAKFMLRRNRKLRLARHQASASTSASDSASPYPRARPQPRPRKEDSTSPDPKARPQPRPRGVVSASPDPRARPQPRPRKESRPRLTPASASGGVSASLDLGLGPTAPQRMHHYPTPS

SEQ ID NO: 68817 - protein, 232 aa, Zea mays
  Coding DNA Sequence Number=SeqID_25442
  Subcellular localization annotation: CTP_CleavageSite=31; ConfidenceScore=5.48e-01
MDQAFSQGIKCWGIRRPQQGKRRPRASPSPRLSPKKPPAPTSGQELPSSPSSIPYASHRHVATPLWFDAPTLPPTAPLPPTAIAASTAITTASSTGATAPPLAATDTYTAYFRGRRPPLLAHAELEVGYLPSRAGDGGLSNAPLSPPTDVRPAMKRQGYLDAPLSPPTDVRPAMKRQEDENEDDEYEELHSHYKCSKIQDKSKPPQSRREALHASRVSASIKVKTTVLMQPR

SEQ ID NO: 68818 - protein, 122 aa, Zea mays
  Coding DNA Sequence Number=SeqID_25443
MGNERDTLPERLWRGVGLNEVVGITSFTVGDRRDPIPRLLSLSYRRRTLTFEDAVVRSGQQGVGVAGGLRHRARPENGGADFWDPGRPSPVRISGFLGSSADLLVLQGSREAERIARIVIRN

SEQ ID NO: 68819 - protein, 139 aa, Zea mays
  Coding DNA Sequence Number=SeqID_25444
MERVFAWVIEVEPLICSSEDDVDFSIDARECSASSPFLLLGLPRFSGSSSWWGRWKRLEGSAVTDRVLEISAVPEGVAHVLMVRTLCVEDVVQCTFASAGCPSGTRGGWSGGVDFFARSLLPTLVGLLVHMPVVQALLL

SEQ ID NO: 68820 - protein, 190 aa, Zea mays
  Coding DNA Sequence Number=SeqID_25445
  Homolog annotation: Hit_ID=Q7XBD9; Match level="QueryCoverage=24%, HitCoverage=2%, E-value=9e-07, Identity=57%"; Hit description =Putative gag-pol
MKDSGYHSVEASSSIFKSLRHPKIAICATGGYEASLRLIFLLHPDLVITRKKETKTRQAALLMPPPSKENRKKLVITTTPFYPNILFIGGRVESSPSPTTNQPCLGKNHLSGKLVDKGTDAVTPDDIMKPENETRCSLCHEMRSWRWEKLQMNESSGRGGITANVIVGELKSKLSKRRENVERTLSSDEI

SEQ ID NO: 68821 - protein, 472 aa, Zea mays
  Coding DNA Sequence Number=SeqID_25446
MGVTEEEPSQVVALAAKKIKLGTTVGVLGVSESFAMELMGTCAALGGRMSSPELRESSTRMLEVTGGRWPKNVLIPRAAGEDFFTSCMARDLKMFPYGRNIAAVVSAVMNKDRQDAAQKRRAIVRIVDPRREAKRARGSTKAAAFGSSQPMPAAKPAAPGPSKASVGVKTAASGGTKPPSGGSAKGRELPSPGRRVADFDTNISVEDYFVGSDEGQLVVVPPLAATTSGRRAADFADRVASGVLTADVAAKVERLRVQHADAVQEKSAAESKNCRLAEKVAAMEDEKTDLRCQLAEERREANQAIAEVQATRAEAQSGAGGEQSRQSTHRGAGGMEELLVLPTIVEGFMSFASLVTCEGAMNALSREGCRHYEVFDQSDENFGREIYKVEDPVMAHAEDVEDLGALVGTPSEAVEVNPVPPLDAGEGSSAAPVPTVAGEDPVSAPAPTTEDALKVVAEPAAEDPTAAAGPSQ

SEQ ID NO: 68822 - protein, 148 aa, Zea mays
  Coding DNA Sequence Number=SeqID_25447
MEQLTMFELARSQDFDEAIRFEPFIEHHGPKVIATHGAQRSARELHTGTRDALRLGNREEVGARGGAKAEQKKPTMETELGKIEVHAPGKQGRRERSLALARPAASRGARGAERDGEDLVGRRLEDEGWAWDEENLSSPVGEEDKEHA

SEQ ID NO: 68823 - protein, 81 aa, Zea mays
  Coding DNA Sequence Number=SeqID_25448
MAGYLHTIDNHFDDLFSHCTHLNSYVESLEQQIKELKEEKAALQDSLEMAEGEEANTREAYRTLKMDYARRLKKLALAKKI

SEQ ID NO: 68824 - protein, 69 aa, Zea mays
  Coding DNA Sequence Number=SeqID_25449
MAAPRPWILGGSLRAPGLAYGDLSIEYQGPQTLSPHHASIILVVDRIEKKRGRSGREPAAAAIPFAPRH

SEQ ID NO: 68825 - protein, 230 aa, Zea mays
  Coding DNA Sequence Number=SeqID_25450
MLSFNPYLLISLTLHINSHLWRRTGGPGGRAGHRDGNGAPFPDPRRGIHLLGDGDGEIILPAGKEMGKNQSPSGMAGPGTVYRRPYPLPVGDPILHVGPLTQCLKCPSVEYQILIARTPLARSPLLRPSLPSRTAVPCRRQPCSAIRPLLRCLLLARAVEPDVLLGLAPCIHEQIPRRPPPALEQILRRSGGQRPSSAPVLEHIPRQPGILRPRGSDRHRLLPPASSRRH

SEQ ID NO: 68826 - protein, 60 aa, Zea mays
  Coding DNA Sequence Number=SeqID_25451
MGKNNKRKREPTPPSEDFGDSEYSEEEFSSESEGSLAPIPLQVAAERLVDDVRVLEITAE

SEQ ID NO: 68827 - protein, 99 aa, Zea mays
  Coding DNA Sequence Number=SeqID_25452
MAGERLGGWAGRARTGLTGPGAAGAGERRCGHGAGTGHDRCFAVRSRPGAVKSGAATPRESAYGWGKGREMREGGWAAVAGDQGFGGRLGDDMAVTRMV

SEQ ID NO: 68828 - protein, 109 aa, Zea mays
  Coding DNA Sequence Number=SeqID_25453
  Subcellular localization annotation: CTP_CleavageSite=23; ConfidenceScore=5.11e-01
MARPWRPAVARGVLARPCSSAPVAMRLMVLVMTMVLTAVKRDPNSWMMWYSGPSGLWYLGPGFIGLKTYPYKHGLPFFLEVWLERIPKLSVLNLEKSRMGDQMGSSLLE

SEQ ID NO: 68829 - protein, 92 aa, Zea mays
  Coding DNA Sequence Number=SeqID_25454
MLRRRRSCRKKQLRLKLSKTQPFRTLNLNRVIQNRGRKIVERYLIGSARFRGFGLQALGQYNRGETEPADGLAYLGRRPNTYQPTVKSLGDL

SEQ ID NO: 68830 - protein, 890 aa, Zea mays
  Coding DNA Sequence Number=SeqID_25455
  Gene Ontology: Mol. function=protein dimerization activity; Cellular component=nucleus; Biological process=regulation of transcription, DNA-dependent
  Homolog annotation: Hit_ID=Q6K223; Match level="QueryCoverage=72%, HitCoverage=90%, E-value=0.0, Identity=66%"; Hit description=Auxin response factor 8
  Pfam annotation: Domain name=Auxin_resp; Domain location=456-539; Score=168.8; E_value=1.4e-47; Accession=PF06507.4; Description=Auxin response factor
  Pfam annotation: Domain name=B3; Domain location=303-408; Score =111.8; E_value=2.1e-30; Accession=PF02362.12; Description=B3 DNA binding domain
  Pfam module annotation: Pfam domain module=Auxin_resp::B3; Domain location=456-539::303-408
MTLKVRTGKIMVMYVEKKIIIGMHIDTRDTRAPPRSVTPRLCGCAEGTTRRGHGVRAVGAYEAGAWARGREGSETADHTAEWTTQRGRRGAWNGWSGGLRPRQVGGMAGDAEETTAQRRSEGIASTDSGDAAGVGQDEGSLSERTKGESPSTGGVGLGRACSEVPRTGRMGRRDDGWGRGEQCEGSVGRVHYGSDMLEGSGRERRGGGMTAPSVHTAFLISSRIIGHAEHALGLAGAADLSAARVPALVPCRVTAVRYMADPDTDEVFARIRLVPLRGGDADADAGGVEDDAAAADEQEKPASFAKTLTQSDANNGGGFSVPRYCAETIFPRLDYAADPPVQTVVAKDVHGAAWKFRHIYRGTPRRHLLTTGWSTFVNQKKLVAGDSIVFLRGDSGDLHVGIRRAKRGFCGAGGGGGDDSPAAGWDHYAGLMRGNVSPCAAAKARGKVRPEDVAEAARLAAAGQSFEVVYYPRASTPEFCVRAAAVRVAMRVQWSPGMRFKMAFETEDSSRISWFMGTVAGVQVTDPIRWPQSPWRLLQVTWDEPDLLQNVKRVSPWLVELVSSMPAIHLASFSPPRKKPRIPAYPEFPFEGQLLNPAFPPNPLPHGQHHHHFLHSHSHQHHHPPFFPFPAGSAPAAIQGARHAQFVPPFSELHLTHLQPSLLYPRLRRPDHVGPTTPIPARVSTDLTIGGAAAAARDDDDDDFPCAPPSTGANRQKPDAKPAGLVLFGRTILTEQQMSRSGATSPAATGNSSTCWNAEKGPNASEGSGGSGVIQTSPAKAASSERPPWLGGDGSQQQQASGELGLGLEPGQCKVFVESDTVGRNLDLAALRSFDELYGRLSGMFGVAGAELRSRVLYRGAAGDEPFSDFVRSARRLTVLTDAGSDNLGS

SEQ ID NO: 68831 - protein, 338 aa, Zea mays
  Coding DNA Sequence Number=SeqID_25456
MNKTPTFKVPSQTELRFRPRGYEQPPHRGACGATSSGRLASDLCSSSYGPRTDAATGRLSFASPLKGREPDIKAKESCGVRLFTNATPANAGRSKAHRQDTSSAELEDGFHHQKLEEEVASRPVREVEPRLASLSAPASMMNILEAEGGTKIAARLASPHPGAGGHRLGTGGASSRRSKRRFAFAIMTASKKGPGKGDTPKRILLREGNRPRASLLIRGSKAGPSEGYNICLRALGFRAHYWSEVRRLAPRKGSTAASGRSGSAPTTDQGGNDLVTESHQREASSPWTPSKGDRVRQITRRGSGAALTNPAPSKPLTASTYQPRTWDPTVHPGYGQLA

SEQ ID NO: 68832 - protein, 95 aa, Zea mays
  Coding DNA Sequence Number=SeqID_25457
  Homolog annotation: Hit_ID=Q8LMF2; Match level="QueryCoverage=60%, HitCoverage=6%, E-value=6e-07, Identity=43%"; Hit description =Putative uncharacterized protein OJ1325D05.18
MTRDDRRNCAYRFYWKGLGGEHPEDKPNLSISLFPYGDKQPPGTVLCGYYVCEWCRVTFHYMVNREDVPKSKINAEWLERDTVSVGVAKVVKDLL

SEQ ID NO: 68833 - protein, 188 aa, Zea mays
  Coding DNA Sequence Number=SeqID_25458
  Gene Ontology: Mol. function=sequence-specific DNA binding; Cellular component=nucleus; Biological process=regulation of transcription, DNA-dependent
  Homolog annotation: Hit_ID=Q6H6J2; Match level="QueryCoverage=89%, HitCoverage=27%, E-value=2e-49, Identity=62%"; Hit description =Putative homeobox protein
MYRGLRRWLAGEIMATASRASCWGESSSSVTVAAGGDVERSWESAFIQKHWSAQQLRHTEQQCWRPQRSLPEKSVAVLKAWMFENFLHPYPKDHEKDVLAARNSLTRNQAQIEIPPDSFQIRFFFGEMGFWNWFINARVRLWKPLIEEMYQDLKRSSGAGGGGHGPAMEPPQQHLSKRRICELEDGGQ

SEQ ID NO: 68834 - protein, 276 aa, Zea mays
  Coding DNA Sequence Number=SeqID_25459
  Gene Ontology: Mol. function=transferase activity, transferring hexosyl groups; Biological process=carbohydrate metabolic process
  Homolog annotation: Hit_ID=A5AJP8; Match level="QueryCoverage=14%, HitCoverage=23%, E-value=4e-09, Identity=72%"; Hit description =Putative uncharacterized protein
MGPHRFPFHAARAPKFGNAPFPPTSALDLAIACIISVADLESARSTTLIWKVPCQMIPTQIPQIVHPPSLKRSQLPDCYNHPTTTEILRSHSSSLYQKVMCLCWEITTTIASSTNNLKRWFPTVSAYRKNELVEELAERKHLFCARPQALGETIRTMDLETLVPYEPGAVLSTKKSTDGPALRPDGPRSGQSAAVGETVRASAEHIRVPSFLLCLSAFRTRGVPGPTSKLSPRAPAQMGRRETEHEGGRQPEGDGRERWNPAAFVFVPRPGRVRLQ

SEQ ID NO: 68835 - protein, 166 aa, Zea mays
  Coding DNA Sequence Number=SeqID_25460
MANSRSASLLRSRRFPALFTAHGESTAMGFRQAEEGAQVEVLYSPAGRYGRKWCGRAGAIVAREIGGVVRDASDRAGPPVRGKGPKRAPRMTDKRAPASSDPSARAEGYWQAGPTWQCHDVEDGLAQGRDECPSGQGVTLHKIVTAIGGGVSVAKAQRLWKAVVGP

SEQ ID NO: 68836 - protein, 270 aa, Zea mays
  Coding DNA Sequence Number=SeqID_25461
  Gene Ontology: Mol. function=kinase activity; Cellular component =ornithine carbamoyltransferase complex; Biological process=amino acid metabolic process
  Homolog annotation: Hit_ID=Q6QP54; Match level="QueryCoverage=27%, HitCoverage=26%, E-value=3e-18, Identity=65%"; Hit description =Putative kinase
MAPPVDVVGPCPSLGEVEAPPGSRSSLSSKVEVESEPPGRTRHRPSANARAESEPWGRAKRSSSSFGAELESEPWGRAKRSSSSSWAEPESEPWGRAERSSSSSGAEPESEPWGRAKRSSSSSGAEPESEHWGRAKRSSSSSGAEPESEPWGRAKRSSSSSGAKPESEPWGRAKRSSSSSGAEPKSEPWGRAKRSSSSSGAEPESEPWGRAKRSFPWPLGPDLPAVSLTLSSGSAVGAAQAALSSCQTGQWSGEVIAVTSALSTGGRVSG

SEQ ID NO: 68837 - protein, 123 aa, Zea mays
  Coding DNA Sequence Number=SeqID_25462
MGKGNKRKREPTPPSEDFGDSEYSEEEFSSESEGSPAPAVERSGLEGSDESEYSSDQEDSPEEDGEGDDDDDGGDGGDDGDGGSRGSNGGSRGGNGDDKGGDGGSSRGSNGGGSSKGSNKASG

SEQ ID NO: 68838 - protein, 622 aa, Zea mays
  Coding DNA Sequence Number=SeqID_25463
MRCSLAAVNNTALTLSDRVTERLKDLGFGLLPIMNIEVLEDRVLGAYLLSSVHDNPLCIEVGGRSLPITAQVVHLVTGLPMGNQKFPELGYHEMTSAKSRFRADCQNGMSAFKRLSTKEVLREGGAWAFAWTTFAARLAERASAAFGLRNVDVEIDERGGRVRLHPNTNNHQEYDDDWIVQCFLVLANNSLLLPTASLNISGADYTLVEEHSKGYDSCQKPTAEIRSAAEGARAGGRVLTGGPRGVSDRGGGRTDRAGPALGDTSADRRPRGAGRVCGKRYPRSGSCDQDRTGEIRPGRGERLWAALLLSALVRSPELRQARARVAPGSPGLGREGEDATANSMAGKRPRIRGQRGENDREKASGRPEELRDVENIVYSASRGLGVVDTRASHHVVVFVARGGSTSSIRGTHGRLRQKAAANRGSRPPTASDGRQPTGSADTGRATNSERGILYGVNSLESSLAGFASSLHDESSREAFRKALIEHDNSIRVALTNIEVIEKQIADSHVKLKKNKEVAPSDRPVTTVDDVTVEQVAHQAIDLAQTPQPTAEEEAAPSHQLTTEEEDAPSHQLETVGEPILAEEVLDLAASVESQEDTGTPDAPSAGAYTPHLEGGQTDADEP

SEQ ID NO: 68839 - protein, 77 aa, Zea mays
  Coding DNA Sequence Number=SeqID_25464
MARSVRAQGRARRRLLPRLSPEMRIKLKIMMMKIKKSHLNRRTMIKGEMLIIKTRKMMRDQDRHTQESTKQSNEITP

SEQ ID NO: 68840 - protein, 30 aa, Zea mays
  Coding DNA Sequence Number=SeqID_25465
MDGQSANQEQSQEAVSVWGTGLSGGAPDSV

SEQ ID NO: 68841 - protein, 812 aa, Zea mays
  Coding DNA Sequence Number=SeqID_25466
  Gene Ontology: Mol. function=phosphoprotein phosphatase activity; Cellular component=intracellular
  Homolog annotation: Hit_ID=A2YTF0; Match level="QueryCoverage=72%, HitCoverage=84%, E-value=1e-114, Identity=52%"; Hit description =Putative uncharacterized protein
  Pfam annotation: Domain name=Reticulon; Domain location=494-691; Score=-24.7; E_value=4.2e-05; Accession=PF02453.8; Description =Reticulon
MTQLGHRGVHISHAEDERQRYHVQQGQLACQNAKHSPSTRRAHRSLRSALLADPPYQKRSPSSPTPPSLTPSPVTSTNERIKVKGPLGFTTVKPAAPCSLQPTHHSRSNSEFECSRRQSRKGISEGTGTARSATTREHLDQEPPSASNQAQRRAQPDAQHNQQPGQHKAMQPGGAASSTATGGRRRVSVQSTRSAGATPASSVWEARMKMDEVRGGVKVFSAGAADEPADEEGVRVYRRLRRNQSEGGGAGAADTAAKKRRSWKASKPVTAIGDLRKSRSDAAAAVTTATTTATAVVARRAVARVSMPEKKVAPAPAAAAGEVKEVVVVEVHKAAAADAKNVARGPDEELDDDDDDHDDGAEVDDDDEQDLEPPTKGIKPTLSVEEERATNPEPVKPPPPGKKLASVVDLRAVNPEPMTPAPPPVEKKATPIVVHRMTNFELAQSFPEKKALPAVGPRIPKTEPASSPPGGEEYEEIQGRPSQPSRSQARMQNIVNLVMWTDVSKSALVFGLGTFLLVSSSYAKDLNFNTITAASYAGLIYLGLRFLRKSILSRGESVECDDDGGVGGDRCCYLVGEEDAVWLLRLVLPYVNEVLLNLRSLFSGEPATTMKLALILFAMARCGNFVTLWTLAKLVFFGVFIIPKVCSSYSTQLARYGRFWLERLRDAWESCTHKKAVVAAAFTLVWNVSSTASRVWAVFMLAVAVKCYHQRVGEFGWSSSSAGAQEQPADDDDEPPPPPPKHRAQDESSSPRQEFGAPPRHRRAPVSGEFARERLRARGGIQPRRSVFALNASTKPLEPTANEPRMELVGGM

SEQ ID NO: 68842 - protein, 82 aa, Zea mays
  Coding DNA Sequence Number=SeqID_25467
MNVCELTVVVSHPPIGQAQVPQDEAHGDVAIFTWSVITLLRLIHPDGDLPHEEVHLDDEIPSNASNIIVLGIQNNESFVFGK

SEQ ID NO: 68843 - protein, 387 aa, Zea mays
  Coding DNA Sequence Number=SeqID_25468
MVASHYEIILERVCEGYVFLDEPDLVDAKMRRLVDAVEGPESLLACHLEAEHLGDDEGSFPGRSGLVAPLVVLPTGNLGRITRSWWCWRLRSASKILAKGVADEGLGCRMVPASPRVDRAQQFLPLADGYTSLEDSPGAARYNSFSSPSSTKVFARRVRRRASAFCRGSSPRRRYSRYGALQSMTGAAPLLSLSICMASGPSNGDASWGAGSGTSLGTTEARILHDLVDDELGVSPNVEASDSYFNGNAQAIDQGLISDHVVGRGEVESYAIPQKVGHDLGLDGLSAGKRESFSHEFDRPFGYPARGFPALDDFPRGKDDTTVTGISEPLGMEHFLDESGRQKLVDLLPDVPLRLLIESTQVLPHRPGVGSDIQGVFGDFPRYARHV

SEQ ID NO: 68844 - protein, 330 aa, Zea mays
  Coding DNA Sequence Number=SeqID_25469
MEALVSSDGGSVETRPRVGLGKGADGGEEFGVRLPALKVGGEDLGRGWQPQRVGRKPRVGDRRGHGEASATCSTANPADDHSVNCGARQGELDHRLRKTSASFELGSNLDICIEGHPTSSNTGALRHPVSGLLPIPRSCCNHYDMGIPSPVARACGQLLGLGSQRKNGKFKLTDDVNSLSRDLANISVTPKAPAAAPTCHTSTLLVPPPLEWEVPTPHAIEKAIQATPDLPLSGQERSATPWQDMSGARGEPSVFNPIPFRPSFDTSSVTRLYVGLPFPSRCLDFEEEDGSGFGLDFFGLRDPESTLQFLYACDELLSDISKGYDIGEES

SEQ ID NO: 68845 - protein, 101 aa, Zea mays
  Coding DNA Sequence Number=SeqID_25470
MEPSRIPWRASLQWIHGLKVSSPLEDSRYEALNRQRGALSFFCQCTHVQLSKFNRIFGKPKEQPNSNALITLDKFCSVPHVAQSSMGMTDASHSLVQLFWL

SEQ ID NO: 68846 - protein, 197 aa, Zea mays
  Coding DNA Sequence Number=SeqID_25471
  Gene Ontology: Mol. function=sucrose synthase activity; Biological process=sucrose metabolic process
  Homolog annotation: Hit_ID=A5BYH7; Match level="QueryCoverage=65%, HitCoverage=18%, E-value=5e-45, Identity=63%"; Hit description =Putative uncharacterized protein
MASKLSFKRADSIAESMPDALRQSRYQMKKCFHRYVSKGRRLLKNQQLIEELDKSLDDKVEREKLVEGFLGYIICSTQEAVVLSPYVAFAVRMNPGIWEYVKVHSDDLSVEGITPSEYLKFKETLYDENWLIASASVYTSDRTGVTISQDRRGPIENGDALSEAGGHGGREHEAKADFQPIQLAAVGGEWMRLLEEC

SEQ ID NO: 68847 - protein, 561 aa, Zea mays
  Coding DNA Sequence Number=SeqID_25472
MSGLCGVFTATASFKAAYTCERDNSELIPTLAESQRGIGPGTTYATVVGPDAVGPVKQGGDPKTTPSTTDVPKQAINQRRLSRQQRREMGAHHANNQTNHLEFGAPFREKGIRPVPRSNGIFASKQELACILRGCSLRFILRDLRIPRLSENFADLCENKSVRQSEVANGEETAPARSNSIPTCAVCSASTEPPIVREGAGPKRGRLKSSPLLRLCFVALHKPHRQHGSAGDHGRRYLLLKMDGPRGWQPTSRLQATPVTMIGGGARAGRGKVRADDCSVRTHQGQLRAVSRCFPRTDEDDDESIRTISGMATLVSLGTTWDDNATMGMGTTRPHQVFCLHPDILRSASIPDGGRASASAFQDFRVVPPPFSPPCSRHHLPRIHTFLPPPPPLARDLPHHAPARTSTIFAAVHAAPFHPCLCRPRRPRPRPRISPTTKQGSSPRLPTSAAPSIVTYTSTSPSIHAKRDDLQSRDHCPCSSPPSLLHLVLLLRTSDPIAPLASSLPPPVAAAQISVARRDILSSAPSTPSQFCVASVMSLYGGQIDTWRNNRGEELLFTSSK

SEQ ID NO: 68848 - protein, 288 aa, Zea mays
  Coding DNA Sequence Number=SeqID_25473
  Gene Ontology: Mol. function=transcription regulator activity; Cellular component=nucleus; Biological process=regulation of transcription
  Homolog annotation: Hit_ID=Q5GAP8; Match level="QueryCoverage=53%, HitCoverage=58%, E-value=3e-80, Identity=94%"; Hit description =Putative uncharacterized protein
  Pfam annotation: Domain name=PPR; Domain location=205-239; Score =35.4; E_value=2e-07; Accession=PF01535.11; Description=PPR repeat
  Pfam annotation: Domain name=PPR; Domain location=240-274; Score=5.4; E_value=1.8; Accession=PF01535.11; Description=PPR repeat
  Pfam module annotation: Pfam domain module=PPR::PPR; Domain location =205-239::240-274
MALLRTVGGGGRSASIEPERRRAKRAAEEEEQQDGGRLGFYGARKAKFKQRRPPPPFIGRARLFGKPAIRQAATLRETRNPTVRRPSTVTSKTPAEPLRARAASPPSSDVFGTREQVPTAVRTFLDMWDGAGVWPNELTVSSVLPSCAALGALALGRKVEPYSRGRGMLRNVYVANALVEMYAKCGSIRRAWKVFRGMGTRRDLCSWNSMIMAFAVHGLWTEALALFHKLRMTGAKPDGITFVGVILACTHGGLVDEGKLLFNSMRGEFGRKPRKKIIRNMLGTALLS

SEQ ID NO: 68849 - protein, 74 aa, Zea mays
  Coding DNA Sequence Number=SeqID_25474
MEASCSSRCAYELRRANPTLHRTSLATDCNLADGEYILVPEQGAAQEVAPDPAPEPAPEDLPATALEGKPRFYA

SEQ ID NO: 68850 - protein, 300 aa, Zea mays
  Coding DNA Sequence Number=SeqID_25475
  Subcellular localization annotation: CTP_CleavageSite=70; ConfidenceScore=5.23e-01
MEETHLHVFDASCPRQSTLARAPARPAPRPSQASAMTRARAYKTLPDFGCTLPRTLKPHRSLARRRLPVRSESAAAQSLCHRRPASGAIPNSVQPSEKTVHTSVRLPERGIGVCFAGEASPRSPELSTPPEYVDRVNHSTILRFLVHTVAALPREAHHALGSNQFAVVWPVHSPPTRTPACACGPGDSGHPRRQAVPRRDRQSLPEPTPPFAGPPSPPQIALLTRPETRSPIPVMVGTSAVTARRPVGVSEALYAKAPCLWHNFTGSLEEMVAGITWPSTLPPGWTVEWDPASAEEEHEE

SEQ ID NO: 68851 - protein, 111 aa, Zea mays
  Coding DNA Sequence Number=SeqID_25476
MQYEGEWFYVRNQADSATCLTGREPVSTDDWNRGAEPSLKGKHQLFEIEARVKVVTALSSRFFKDEDFPNPLSRGISGGLGIGPLALSLPLLPKGSLFRQSVSAKGVTGRP

SEQ ID NO: 68852 - protein, 207 aa, Zea mays
  Coding DNA Sequence Number=SeqID_25477
  Gene Ontology: Mol. function=metal ion binding; Cellular component =cytoplasm; Biological process=protein amino acid methylation
  Homolog annotation: Hit_ID=A2Y648; Match level="QueryCoverage=45%, HitCoverage=13%, E-value=3e-14, Identity=43%"; Hit description =Putative uncharacterized protein
MQLVTEVLAFAVAQSIKVLTTRRSLRDDPNYDALIAALYPDIDKYEEEFQLFLLLLPVDGQTIPNLEKPYLSCRPTLSIKHLAHLSCEVEELDMYIRMDRHRVSVGSRPSSTGEAKSRPFDDLERLNEEKLVLELHPSFVSSNGDMGLWIRVCGLFRYAGRGVVYGINVPMGAAAGSVHEVRDYLKNMLPSSRYTLQGRAEFSDSTT

SEQ ID NO: 68853 - protein, 98 aa, Zea mays
  Coding DNA Sequence Number=SeqID_25478
  Subcellular localization annotation: CTP_CleavageSite=57; ConfidenceScore=5.01e-01
MADGPSRKLGSLTVLFGVGASAETWDPRHGYPKSAQSGFTGLSGGAPDSVRCARLALANRLLSGLRRRRTHRSRERINGVRLKFTGLSGGAPDCPVSE

SEQ ID NO: 68854 - protein, 57 aa, Zea mays
  Coding DNA Sequence Number=SeqID_25479
MESHDLRAERESQLVGGNEIDGSGYDYGTGCQHCNHCSGEDEAVEGDFQEFQDYDEF

SEQ ID NO: 68855 - protein, 837 aa, Zea mays
  Coding DNA Sequence Number=SeqID_25480
  Homolog annotation: Hit_ID=A2X9U7; Match level="QueryCoverage=67%, HitCoverage=44%, E-value=0.0, Identity=62%"; Hit description =Putative uncharacterized protein
MVVGKRLRCPRWLGAFGNFGSERSSTEPAVRVMWAQLCFSALHPPLATKQEECRDDRGSIDRVGQGGGESNRDRSNVMTNKYMANKWFWISVDYSCNIPNGFNPPAANSHGSLSEPLSPAASLQLPRSTTAPGPKTSLDHHPIYNLGAVWFTKCNKLSEKLSVWQSAVAFGGQKLPEAETNRAIVAYGEAQRKERKPSAKREWASYRWGAFSHIGPSLLRINAIACITWGRWNPHALAMFTEGLDRDALKWVREGQGAAALHSHDRMDALRAVRGAAGRGGLGMPTPEKFRSGHMPRGATVPLSRSSLRSDDGTAASGSDMDESSDNDEIEVCSGRYSVDSSPRRDDVTRRTAVPLYRYATMPGQQSYYSTDDGYSDLSSSRDTALPRAKAQPLGRPQARVVEYADEEYSVSPGTSEFSSQVEGQSNGVTSKGGYVSEYSHTGPARREANNLGPKNRAAAPARMRYQHDSHSAHVPAREDVKSTRKLFLGVTSLKTPKLDDFFHVQNGSSGDIPSAPPINDYDQDHQPVTHDDTRSCDNSNFTNGLSAKKDHREVNGGVNLADKNDSLQGPWYSVLAYDACVRLCLHAWARGCMEAPVFLENECTLLRNTFSLQNVLLQSEEELMSKRASELVSEGAASKPKKTIGKMKVQVRKVRMSVDMPSGCNLSSLPMVKLDSVRYRLSNVQSTLSSGWESVRRVRVLPQLPANSSFSKHSLAYMQASAQYIKQVSGLLKVGVTTLRSSSAYEAPQETYSCQLRLKSSPEDDVVPMQPGSGETHVFFPDSLGDDLIIDVSDSKGKSCGRVVAQVATMAEDHACTCGVIMCGVGVSTQQQQQQQ

SEQ ID NO: 68856 - protein, 598 aa, Zea mays
  Coding DNA Sequence Number=SeqID_25481
  Homolog annotation: Hit_ID=Q6K8D6; Match level="QueryCoverage=79%, HitCoverage=46%, E-value=0.0, Identity=91%"; Hit description =Putative uncharacterized protein OJ1175_B01.14-1
MKAQRIQQRNLVVHGSWKWLLTEFALYYGVSDAYTRLRYLSYIMDVATPTADWLNLVHGLLLPILMKSDGTATLSHQENRILGEVEEQIEQTLAMVCENYKSLDDSIPLGLAEDFRPPTGLAAAALEPAIKLYSLLHDVLSPEAQLRLCGYFQAAARKRTRRYMIETDEYVSGNSEGFRVDLVTVTTAYQKMKSLCNNLRSEIFTDIEIHNQHILPSFVDLPNLAASIYSVELSNRLRAFLVACPPAGPASPVADLVVATADFQKDLASWNICNIKAGVDAKELFHLYIVLWIEDKRRMLLENCRLDKVKWSGVRTQHMTTPFVDEMYDLLKKTLTEYEVIICRWPEYIFVLENAIADVEKAVIESLEKQYADVLAPLKDCIAPKKFGLKVVQKLTKRNSTVPYTVPEDLGILLNTLKRLLEVLRPRIESHLKSWSSCIPNGGNSAAIGEKLSEVTVTLRAKFRNYMQAVVEKLSENTSPSIRPYWQQGIMYFRSQTIGQVSSTAQHNAPSLAILRGNVGAVHPELDSMGEGPRCVIKLTALVTQNGLNGVIKLSGNTSEEVETESQKYQTPNAMQKSRNNESNHQESSDNIYNMRHW

SEQ ID NO: 68857 - protein, 158 aa, Zea mays
  Coding DNA Sequence Number=SeqID_25482
  Homolog annotation: Hit_ID=Q6K8D6; Match level="QueryCoverage=87%, HitCoverage=13%, E-value=6e-69, Identity=90%"; Hit description =Putative uncharacterized protein OJ1175_B01.14-1
MEQSGAVMVEVVTGAGGAETRMQNTTKLKKIIQDSKELVIESDIRSRMQALKDQLIEAINHVHKVSEVHVFLAICRGFWDRMGQDVLSFLENRKENKAWYKGARVAISVLDDTFASQLQQLLGNTVPPKDLEPPRSIVEVRSILCKDAPRQKNSSFYY

SEQ ID NO: 68858 - protein, 169 aa, Zea mays
  Coding DNA Sequence Number=SeqID_25483
  Subcellular localization annotation: CTP_CleavageSite=9; ConfidenceScore=5.10e-01
MPAPPPPPSAGKVTGQTRMLLSRNVGKTSSIPPPAGGLTADIVVVARWRKEYHVVAAIEGHELKTLEMKHRLGLERFLETTHLELDRKLFVNTQQSPTWRANCRRFDPGGSLDRRVNCRRVSQPRWVGARRNTKGGETAKGKPATFVLPCAQVGCACSRGLQASASESE

SEQ ID NO: 68859 - protein, 32 aa, Zea mays
  Coding DNA Sequence Number=SeqID_25484
GNEIDGSGYDYGTGEDEAVEGDFQDFQDYDEF

SEQ ID NO: 68860 - protein, 130 aa, Zea mays
  Coding DNA Sequence Number=SeqID_25485
  Gene Ontology: Mol. function=carboxyl- or carbamoyltransferase activity; Cellular component=ornithine carbamoyltransferase complex; Biological process=amino acid metabolic process
  Homolog annotation: Hit_ID=Q8SA97; Match level="QueryCoverage=100%, HitCoverage=24%, E-value=6e-26, Identity=51%"; Hit description =Ornithine carbamoyltransferase
MAPPVDMAGLRPRLGDAEAPPKPRSSLSSVAEAKSEPLGRARRRSSAEARAESEPWGRAKRIGVAQAALSFCQAGQWSGEVTAGLGRAGDMFAVGGGPRARRKSSELYADGGYQLRIRSLEGTPNYGPRQ

SEQ ID NO: 68861 - protein, 54 aa, Zea mays
  Coding DNA Sequence Number=SeqID_25486
MAATTPAADRRHLWQAKQATLHLRHDDRDKKGSGKGILRKGSFSVKEADPEPPY

SEQ ID NO: 68862 - protein, 142 aa, Zea mays
  Coding DNA Sequence Number=SeqID_25487
  Gene Ontology: Mol. function=catalytic activity
  Homolog annotation: Hit_ID=Q2QZ87; Match level="QueryCoverage=57%, HitCoverage=30%, E-value=3e-21, Identity=54%"; Hit description=ATP -citrate synthase, putative, expressed
MLFGKPEKSDLVALNLDFDQVKEFIKERLGIERGWATLSASQSVGGIEIEENWDKVKTIFLPTEKPTTSNSCAPLIATHPLEPQPPNMTVGGGRLFDGAPDSPVHTGQSGAPATSPVSLEIDRWSSDFWARLDVRWRTGHAL

SEQ ID NO: 68863 - protein, 259 aa, Zea mays
  Coding DNA Sequence Number=SeqID_25488
  Homolog annotation: Hit_ID=A2X9U5; Match level="QueryCoverage=47%, HitCoverage=62%, E-value=3e-19, Identity=50%"; Hit description =Putative uncharacterized protein
MTAPREQERSKSESTEAPRHHLSSNHQCTRIGSAPDSRDPNAQPGKGAVSRRNSDVSTSHKLPSRCGASRKRTAGAGLQEHQEPWRCTPPVGVLPQVLIPHSSSRLIETSKPNQDSVHRKKKEHREWSSGQTMELCVSTPPSSVRATAAPISFAPPRRGASASTAVPPHRRIPTRVSVSVWRCASAAVPGPVPSEEPASASYAVVVTDKPDTPADDKAEEVSAAPSGSAEAPMAELVPSEASSSPDDGGLDEILSKEGI

SEQ ID NO: 68864 - protein, 134 aa, Zea mays
  Coding DNA Sequence Number=SeqID_25489
MVSLTCGTRASALSSPQVFNQACHMLAWDAEFSARDPNQPARLMGGKPVIAHRSNPVTKKSSCAMGGALCVMGSGKTTSMTFYITRTSRSARSFVDSSTRVSSAFTPAMGHGKKGQRCRCMESGGGRCPLAVVL

SEQ ID NO: 68865 - protein, 99 aa, Zea mays
  Coding DNA Sequence Number=SeqID_25490
MEFPLQMLVCDLCLLNPTILAVAILPPGVEIIMPHLCDEKEKSNWKCLGSSSQESAESGSTGLSGGAPDSVRWCTRQCPVRQAGSSELAALENSPAMYG

SEQ ID NO: 68866 - protein, 54 aa, Zea mays
  Coding DNA Sequence Number=SeqID_25491
MADLGGCAANGGKEKEGIGKGVKREVTPEFVNMSKEILYPQIQGVTVSQVIGVE

SEQ ID NO: 68867 - protein, 178 aa, Zea mays
  Coding DNA Sequence Number=SeqID_25492
MAHGPKPLELGPLRFSFAWPSVQTGVPTCGPYLPVSRLRIRIGNLAVAWALHSLLFLFLAEDRGAGCCARPAIALSAAPARRSFKSGPYAHVLPSLRLVQPTRLTKVAGTRHRVGIVRVRSIRRKCNGIPGDCSSEYRGPPCARSSVDSALCRAISGMDPIPEFALVTAISRTHLIEV

SEQ ID NO: 68868 - protein, 270 aa, Zea mays
  Coding DNA Sequence Number=SeqID_25493
  Subcellular localization annotation: CTP_CleavageSite=17; ConfidenceScore=5.00e-01
MSRPEHTPPTSPTACARGQPYSGHHRRRLAPRRDCQDLTQPFTGPPSPPLFEEHRVPRCRVWMTLEPHPLQSGWRLLDSESFGFRAEDTIESTALHVLTTFCGFHPLELSTHPIGLFPAEKEDDPMWKDRVEHAKDVWALYPGQTAHLTVRCMNAMYRLQAVRGEAMSQLMGLVEYTKITLDNREDLVVEARENIIEVLEDQLQTTQQQLEEANQHLDLHHQEIQDMEAEGADEDVDIEGGEEQEPASSLDTAGSGGPPSPESSVASFAH

SEQ ID NO: 68869 - protein, 113 aa, Zea mays
  Coding DNA Sequence Number=SeqID_25494
MAHRTVRCTPDMSGAPATSPVPLDFDRWSICLVGPPGCPVHTGQVLFIVRCASMGVPDFCALLARIECACRQSLSVWKFLASASCPPTHLDLRVKFEIGHEIEDWIWDLMEIA

SEQ ID NO: 68870 - protein, 297 aa, Zea mays
  Coding DNA Sequence Number=SeqID_25495
  Subcellular localization annotation: CTP_CleavageSite=51; ConfidenceScore=5.36e-01
MSSSSLMRRVFPSSKPPDGGYPPPFRLLVGGAQPHGSWYLSAIVRLQGFSSAGPAAPLRRRSPRMVTTSFWVGKSKPGCDLGPTLSFKDVHHPRWGGGHAEPALCLPRGSAGRPFPRRLGVEALAGPADGADLDNVGLIDGGRRHLQRVEVVGRASGGPSCRRATAAPGRCPTRLGGFEWGSAGGLVSPAIGAEAEAAREVLVADGITATTRAPGHRAGVLVLAPQASAGARARSQQRQPTVAVVRTGGGEPLVSLLLLRRPSPWSGVVRTRGGGTGVPYVMALRMPVCLFIVAVGA

SEQ ID NO: 68871 - protein, 256 aa, Zea mays
  Coding DNA Sequence Number=SeqID_25496
MGISSPWAKRESRLMGKMMTLMMMVNDGDFIMFLVFLSKEMARLRHTARKSVIPFLPSLLAERPMRRTVSGQSSHLERLHHRLREEQERRRQHREQQGSSSPPQQEVESVRRRSSAPQLEAPPVPLRDAPAAGGGPGGDPDDDDSDHSTESSKPQEADGWVARPITRDAARGCHFHDALDTLLRQAFDRHTWSIEYRCVVYQHSRGRYPDRWEATCLVRRPEDDLRGAEAVSEHYSISERDTAKAAMQDAARRALS

SEQ ID NO: 68872 - protein, 67 aa, Zea mays
  Coding DNA Sequence Number=SeqID_25497
MAQGASRDAKDATGARNRQMAYFGARSTCDGGWLKSGDVDPASPGYALGNLATFCYLVQVVLVPAQG

SEQ ID NO: 68873 - protein, 458 aa, Zea mays
  Coding DNA Sequence Number=SeqID_25498
  Subcellular localization annotation: CTP_CleavageSite=54; ConfidenceScore=5.29e-01
MFQGPPLRRGGWVPHVMQTGSEQKKPNRRAWRAQPPSGYKRPSTFAQTNGRKRRAAMQAACSRARQLHRHLCHHRAPSVAESMPRLEATQRRQPDATVNAAESGPAVMTVAGGREQRSRRQPGSRPIQGQQESLLSRREDGAPVIRPSNGSRTRSGCPANYSPRRINSAVGQAVLLAGAAGDASPSPKQPHQKRDRERGIPRKGSFPVKEPGSEPPLLIRGSKAGPPRGSTVASDRVGPTPTTDQRLAPEGFTVASDAERGMTRAHRRHHVRCPLRRLGGCSRKPGSGQTVDSVNIPARELGPRPCTRATAYSHEGTTRPAEALRKALRPRRSETTPPRPRGLHPAGALARTHRNKMQPRKAGPLAKKCDESLQASANTPFEARGLLSGTIIRGTLKTPNSQLVTPISIKLQRPDGAQTRAKPRKTANSAPPDPGLGLGLSPGRRRTPLRLTQGSDSG

SEQ ID NO: 68874 - protein, 152 aa, Zea mays
  Coding DNA Sequence Number=SeqID_25499
MGKNNKRKREPTPPSEEFGDSEYSEEEFSSESEGSPAPVPLRESSDDSDDSQGLAVEVWTYIWAVERSGLEGSDESEYSSDEEDSDGSGEDEDEDDGDDDDDGDGDGSGGGRGSGGGSKDGNGGSSRGSNRGGSSRGSTKGGGGGSSSRASG

SEQ ID NO: 68875 - protein, 1345 aa, Zea mays
  Coding DNA Sequence Number=SeqID_25500
  Gene Ontology: Mol. function=ubiquitin-protein ligase activity; Cellular component=intracellular; Biological process=protein modification process
  Homolog annotation: Hit_ID=A2Y5I5; Match level="QueryCoverage=83%, HitCoverage=84%, E-value=1e-179, Identity=34%"; Hit description =Putative uncharacterized protein
  Pfam annotation: Domain name=HECT; Domain location=1008-1345; Score =293.5; E_value=4.3e-85; Accession=PF00632.16; Description=HECT -domain (ubiquitin-transferase)
MATIADEAADAGDAAAALAALCEVLAESGSASILATPHAGLATRLPALLAGGSGSQGDGVPLLAARAIAEACDTAPQWASHFARHGAVEALCDRLLAVDCVELAEEAPLLAALLELEPGRALLPIASWYCCCEEEAPLLAALLEFGAEADEVVGMVVVGLLGSSPKQLLRAGSGSARPDASPPCFRAVLGLHFRTLLVYVSLNDPLISYFLKLLLNRHLSFLSLRQCLWALNAISLECPHECLSRGVAAAVLQFLDFFSTSKQILESVVPCLVSIAVGACENDKYMSKLIYETNVVKATLTLMCNERWKSLNDATLEVGMLLELIYQLMPPLETSGQHLKLLTAKKKIIMRHRRYMTQLASTFALIVQVAKSAALSSICYCCVVVIGSFVKLCTPNFLVELQKTVNLSSLFNCLLAQKNQHVLFETLKISRILAKKDQHFFLESFTKEGVKHAIEYIVSQSKNTSHQNMKEFCLCFYMKTSSTVEACSIANNSVTELAKEIKKNFLSVKGSNKSPNRFGFTLKSVRDFFARLNLYSSTHLAENPDSCKQLFDLSRRLLSDELPVTSNFEFVQSGSIKCLSVYLSNGAYCNADLNDGPVLEQLSVVHSRLHKFANLALTPFNESSANPLGILVEKLLDTLHMCYGSFPVLLSYEQMPREDMMIPLRYPKAKKPTSLLLKFRRSQKERELYNYNGVLSVDLFSTPDSTEPILFPEIFRRTDQEPASENSNQDKNDDGNKSSRLEFFYNGVTLQPSVTFFESILHLMYKGQSDVWIDQSFWVEEHSITYRKRIKSNKEISSQSSYYTRLSHVHEILQRAWLKDPFFTAILNGKLPGNLDVSDLSYNLLFMLKVLEGVNRFSYQLLMDEQINKFAEGIQEDINDIEVAICPVPRHQFLSSLLINKLEMQMQDVLFDDGLIPSWCVYLVENCPFLLSLDTRWKYFCLTAHRSFFPDQINRYYPQTKKYRVARSAIIEGAVSVMTNHGPSNRTIVVEFEGEIGFGRGPTFEFYSTVSHELQRAGLGMWRGDSGEHGFVHAPFGLFPKPWPSSSQGIDFTNMLQKFKLLGNLVVRAVLDGRILDIPLSKAFYKIMLEQELDMYDILSFDPELGRTVIEFQALVSRKNFLETSSEESNPTAADLSYKNVKLEDLCLDFTLPGNPEYELVPGGSEKMVTLDSLDEYVSLVVYATLKSGIAKQIEAFKSGINEVFDLKALKMFTEEEMERILCGEQDAWDLKNLEDHIGFEDGYDMSSQPVIIFLEILREFGREEQRAFTQFSTGAPHLPLGGLASLDPKLTVVRKECNGNVDDELPSVATCWHCIRLPPYSSKEIMRKKLKYAITEGLGAFHLL

SEQ ID NO: 68876 - protein, 157 aa, Zea mays
  Coding DNA Sequence Number=SeqID_25501
MGKSKKGGSSSHHSGDKRKHEPTPPSEDFGDLEYSEEEFSSESEGSPVHASPPALSDDSDDSQGIAAEVWTYIRAVERDGLKGSDESENSSDSSEEGGGGDGGDGDDDGGDGDGGEGDSKGGDGSGKGGSGDGGDGSKGSSRGRNKGSSKGSNKASG

SEQ ID NO: 68877 - protein, 151 aa, Zea mays
  Coding DNA Sequence Number=SeqID_25502
MGKNNKRKREPTPPSEEFGDSEYSEEEFSSESEGSPAPVPLCESSDDSYDSQGLAAEVWTYIRVVERSGLEGSDESEYSSDEEDSDGGGEDEDDDDDDDGDGDGGGSGSGRGNGGGSKDGDGGGSRGSNRGGSSRGSTRGGSGGGSNRASG

SEQ ID NO: 68878 - protein, 206 aa, Zea mays
  Coding DNA Sequence Number=SeqID_25503
MANPPRTEFLRRKNPDRYEVEKFSFGNDGHVRAEWKANGGEDSEAERQELGHGKQRRLKVQLLWDILKPDTVSKSAQSSPGGYFQNPSMPRGNPAVISRTPVRHLITRPSSSNRLAQPAITRRCLQNTDFVFSRPALPLKLPTSLSSRSVLPPKRRLCVQSLGVTSKMLTSLSNHSALPLKRRYSVQSLGVVSTMLISRSVARRYL

SEQ ID NO: 68879 - protein, 30 aa, Zea mays
  Coding DNA Sequence Number=SeqID_25504
MKRWGEDRRRRRSLHDIDGYNVVVKQVKIM

SEQ ID NO: 68880 - protein, 1089 aa, Zea mays
  Coding DNA Sequence Number=SeqID_25505
  Gene Ontology: Mol. function=metal ion binding; Cellular component =membrane; Biological process=signal transduction
  Homolog annotation: Hit_ID=A2Y094; Match level="QueryCoverage=80%, HitCoverage=100%, E-value=0.0, Identity=71%"; Hit description =Putative uncharacterized protein
  Pfam annotation: Domain name=zf-C3HC4; Domain location=1035-1074; Score=11.8; E_value=0.0041; Accession=PF00097.16; Description=Zinc finger, C3HC4 type (RING finger)
MSSDLDKAVGWDLPRLELKAMVLRWDNKGATCLVPKEAATIQGLGEATCRALKTSRMSWDLDKDDKGNLNEVSGLESILGLEEDVEWNLDEVPGLEHCSDLDEDVEWDLDEVPGLETSSDLDDDAEWNLDEVLGVESSSDLEGDEWNLNEVRGLESSSSLDEDVELNLTEVPGLEPSSDLDEDVESNLDKVPGLESEEIEDHYEPTRHVFASSLMSTIATPPPPIAQEKAASRNKRKYRAEPPSAELGPYGLEYPLTADCMGFEFMSPEKAAMAAAVAAAEGVSLDLLQNSCEKCKDLHPTAEELLDCQRYVNWSDPNETQLEEILLKSLGTTFDNAVSLITTMGYSEAVARAAVVRAAAQYNWRESLAGFGEAAVEVLKTEGDMLPREGASVEDMRRIEQAVLGSMVMWVNEAQPLCTTGDVMFCLLMSDMNVANASAMDYNTSSLPSVAAQVIAQPDAGNYVTGSGSNLSVSITNPQTGVTFRGKLTPMPPGSYGAVKADSSMAPASLNVSSTKPSVPGKTQCVIPNIEPKEQPVPIHDHSEDQPFVAAATQSVKNDKPSPSKRGGSKRDSLHRQKLTSFDKSSRALGSKGSLRSGKHSYSASAVLERKCRSFSDSTTSNLKGASRVAKGFAASISGSEVSADLSFTGTLSPSPSFDAKIVSNSNPAPTASTDLSLSLPSSSDSLTPSSNHDSITEGVDSSSKINFSYDEEQKVWIPQDKKDKIVLILVQRQKELQAHMHDWTDWAQQKVMQVAHRLAKEKDELQSLRKEKEEADRLQEERHHLEESTRKKLLEMESAISRANAQLEKAEASARRREVENAQLTLQMEAAKRHAAESATNISELLKKDENSRKRSQRWESDRALLQEELAAQKSRLFRVQEQLQHAKELKGSSAVFTIYDDIFGLLHDFEYLQARWKQEEAAKTEAIALVTSVRKERGQIETSMRSEENLLHLKAANDAQRYKSEIRVLEQRIAQLKVSLDSSRVAAPKWGADNKSYALHLSEGRKNNNAQVLSNTAVPQGLDFDDIQRDRECVMCLSEEMSVVFLPCAHQVVCAKCSDLHEKQGMKECPSCRAPIQRRVRARPAGC

SEQ ID NO: 68881 - protein, 131 aa, Zea mays
  Coding DNA Sequence Number=SeqID_25506
  Gene Ontology: Mol. function=transcription regulator activity; Cellular component=nucleus; Biological process=transcription
  Homolog annotation: Hit_ID=A2YP73; Match level="QueryCoverage=98%, HitCoverage=27%, E-value=1e-08, Identity=36%"; Hit description =Putative uncharacterized protein
  Pfam annotation: Domain name=TFIIS; Domain location=63-131; Score =14.5; E_value=0.00035; Accession=PF08711.2; Description =Transcription factor S-II (TFIIS)
MRVPPSPPKPPACNQFAWLSLARPPLGADTRQGQSICLCNLDRAEVINNDGGVAQRNKSDDDMVVEALCVKWSLATAQEKSEAELLELLGRLGQLEFMEDAIRVTKIEMVVKPLRKHVSKKIRQLVCSLIE

SEQ ID NO: 68882 - protein, 312 aa, Zea mays
  Coding DNA Sequence Number=SeqID_25507
  Subcellular localization annotation: CTP_CleavageSite=66; ConfidenceScore=5.23e-01
MFDAHTGLAPTRAESGQLAVVPAVVSVGPTAVANVTRGGMGSSQDPWSKFCAGGEIASATTTKDVAASVAQQLKHAAAFAERIASGALTSEFSAERQRLEGRIECLRTQHTEAVRDKSAAENRSRNLLVKLTAAEAKNEDLSCRLAEEREGAEKARAEAQAARAEASLALKRTTDAKLGLKSLRGYVDNTEASTWLGSTESTRCSLTRTVCSAHEPPLLTNPAKRHFEVFDRVTEDFDRRILQVKDEMLNNEEVEDFGGLESSLTRTEDAGTGAEEQLAPQAGPREDPAAEAAPTGEDPAAAVAPSQVAGSR

SEQ ID NO: 68883 - protein, 78 aa, Zea mays
  Coding DNA Sequence Number=SeqID_25508
  Subcellular localization annotation: CTP_CleavageSite=58; ConfidenceScore=5.48e-01
MAAASCPSAQLLGRSSVPAREVPAAPFFFPEKGRPTPLSAPFRAEPSSSPMAAQPSSCCSNVKEEDDPLSMTCGPKAK

SEQ ID NO: 68884 - protein, 162 aa, Zea mays
  Coding DNA Sequence Number=SeqID_25509
  Gene Ontology: Mol. function=oxidoreductase activity, acting on the CH-OH group of donors, NAD or NADP as acceptor; Biological process =translation
  Homolog annotation: Hit_ID=Q8S484; Match level="QueryCoverage=32%, HitCoverage=18%, E-value=5e-11, Identity=66%"; Hit description =Putative NADP-dependent malic enzyme
MDVVVITLSRELSKLQPARATHGMLDHIMVENASVKVALNRIAVVSILDAHTLRPHLHGARYVAPPHPPAVARRPASRRQQPSLLTDGCKYFFTVALCSATISQQSRHAISLTITSCSLSAFARNLALHSVDIWPFLHSGISKMAGIYMHKWDNELCITVPN

SEQ ID NO: 68885 - protein, 78 aa, Zea mays
  Coding DNA Sequence Number=SeqID_25510
MGVDRADLRAEEEIRAATREGIARMGGGWIAPMETRISRCGTYPHVRAQQGPIRWGEEGGVHPRLSTPACAFDGSDRK

SEQ ID NO: 68886 - protein, 91 aa, Zea mays
  Coding DNA Sequence Number=SeqID_25511
  Subcellular localization annotation: CTP_CleavageSite=58; ConfidenceScore=5.50e-01
MAAASCPSAQLLGRSSVPAREVPAAPFFFPEKGRPTPLSAPFRAEPSSSPMAAQPSSCCSNVKEEDDPLSMTCGPKAKGNGASNSRFRNII

SEQ ID NO: 68887 - protein, 387 aa, Zea mays
  Coding DNA Sequence Number=SeqID_25512
  Gene Ontology: Mol. function=3'-5'-exoribonuclease activity; Cellular component=nuclear exosome (RNase complex); Biological process=RNA processing
  Homolog annotation: Hit_ID=A2X5Y3; Match level="QueryCoverage=41%, HitCoverage=42%, E-value=9e-67, Identity=75%"; Hit description =Putative uncharacterized protein
  Pfam annotation: Domain name=RNase_PH; Domain location=2-170; Score= -12.3; E_value=0.011; Accession=PF01138.12; Description=3' exoribonuclease family, domain 1
  Pfam annotation: Domain name=RNase_PH_C; Domain location=199-267; Score=44.5; E_value=3.6e-10; Accession=PF03725.6; Description=3' exoribonuclease family, domain 2
  Pfam module annotation: Pfam domain module=RNase_PH::RNase_PH_C; Domain location=2-170::199-267
MTAQEFEATRGRAETNVARREDISVPVPCRSRIVDTFSCFDFTTSAIRGGLELPVLPSSTTQGKWFPFLPLPRIPHPPPPLLGPRPRSRSSTGFPECSKDAWGRRPRAPSAPLLNHPGESRAVDMEFLCVVAGKHVWSVHVDLHILDDGGNLIDAANIAALAALSTFWRPECTVGGDDGQQVTVHDPEVRDPLPLTIHHMPIAVTFAYFGEGNIVVLDPTYKEEAVMGGRMAAIVNSNGDVCAIQKAGGEGLMSSVTMQCLRIASVKAADITSKIKKAVLIWDVEAQPNRHAVLGSSESRPDLILTGHKENAEFALAMCPAEPYVLSGDVEDEKMAAWKALAAMLLVQLFNTGKVLFSNVAVDGGMFVLALLTYRSFFAAPSSSLSV

SEQ ID NO: 68888 - protein, 145 aa, Zea mays
  Coding DNA Sequence Number=SeqID_25513
  Homolog annotation: Hit_ID=A2Y9E8; Match level="QueryCoverage=40%, HitCoverage=19%, E-value=3e-10, Identity=55%"; Hit description =Putative uncharacterized protein
MGDDGDWIGGDSGFGFSAMEVEVNRGFNSDAVLAMETIHSLSASKSSYPMADLTQLFMTATQEGKRSESQGQILRVITCLHRFEDTGYSFSVETAARVKVIDFGSALPWRVLDGKPYNNKCGVYSFGICLWEIYLFMGNLLLNYS

SEQ ID NO: 68889 - protein, 240 aa, Zea mays
  Coding DNA Sequence Number=SeqID_25514
  Subcellular localization annotation: CTP_CleavageSite=43; ConfidenceScore=5.11e-01
MDMTSHSSTGDRGQGKSADIWCKAEKRHLKRFSINLRRRLNRRAAAIKRRSVGASPTTEQVIAATFPLVSTLPEVTSIELQSEMEVLEALVVGQQPSIDESGSISRPLCSMSPTVLEEPDKQASKGCAFINLIMMEVPRTHGIRGSHRRLPTCSASGYHQDILGCRLPFKYEGQQHPSEAEKGANGGYTYINLATTKVVHTLRSDMIQVPTPNSSTTSSMVSWVAANGLRQALSLAIDKA

SEQ ID NO: 68890 - protein, 64 aa, Zea mays
  Coding DNA Sequence Number=SeqID_25515
MDVLMIRNLGEDQQGLGKGLGVEEEQQGHNNRKEIKQELALVARSIAQCMVDNQRRSGAAIAGF

SEQ ID NO: 68891 - protein, 515 aa, Zea mays
  Coding DNA Sequence Number=SeqID_25516
  Gene Ontology: Mol. function=oxidoreductase activity; Cellular component=extracellular space; Biological process=metabolic process
  Homolog annotation: Hit_ID=Q67XT4; Match level="QueryCoverage=98%, HitCoverage=76%, E-value=0.0, Identity=69%"; Hit description=MRNA, partial cds, clone: RAFL25-27-N17
  Pfam annotation: Domain name=UPF0061; Domain location=6-486; Score =302.2; E_value=9.7e-88; Accession=PF02696.5; Description =Uncharacterized ACR, YdiUUPF0061 family
MGMKNFYLLKLFERPDFPQFFSGATPLVGRFVIVTPSLNILTIWFWIASLPYAQCYGGHQFGVWAGQLGDGRAIALGEVVNSRGERWELQLKGCGKTPYSRFADGLAVLRSSIREFLCSEAMHGLGIPTTRALCLVETGKSVVRDMFYEHSGFISLNDSLLHVFLLFDACTGGNVLLGNAKEEPGAIVCRVAPSFLRFGSYQIHASRGKEDIEIVRRLADYTIHHHFPHLENMKKSEAWAVEVAERTAYLIARWQGVGFTHGVLNTDNMSVLGLTIDYGPFGFLDAFDPSYTPNTTDLPGKRYCFANQPDVGLWNIAQFTGPLSSAELISQDEANYVMERYGTKFMDEYQSIMTKKLGLTKYNKQLISKLLSNMAVDKVDYTNFFRLLSNVNADPGIPENELLVPLKAALLDIGKERKEAWISWVQTYIEELVESGVPDEERKAAMNSVNPKYILRNYLCQSAIDVAEQGDYEEVRRVLRVMHNPYDEQPGMEKYARLPPAWAYRPGVCMLSCSS

SEQ ID NO: 68892 - protein, 158 aa, Zea mays
  Coding DNA Sequence Number=SeqID_25517
  Subcellular localization annotation: CTP_CleavageSite=39; ConfidenceScore=5.12e-01
MAVAGGRKQRSRRQLSLRPIQGQQGNPLPRREDGAPGFRSSNGSRTRNGCPANHSPRRINSAGPGKGDTPKRILLREGNRPRASLLIRGSKAGPSEGFNNCLRALGLRAHYWSEVRRPAPRKGSTAASGHSGSAPTTDQGFVGWPSKGSQPPQTQSEG

SEQ ID NO: 68893 - protein, 274 aa, Zea mays
  Coding DNA Sequence Number=SeqID_25518
MAEDKAKLEEYYSPAMVQWRTRPTVNSDSAVRPQRYMAHGSASAINACATPAILPTARVTPAILPTARDPRHPPHRPPLPPAILGSTAPPPWHLRPPPAQSRPCAPKSHIPTLLPTPSMARDPPPHAVDGAHRSRWPRIHPTLLPHLLGPCCALTCGYVPHREIPVSIGAIQSPTHPRDPLSCCGADLLLGAQISAIHSHVAPMSPKGSTAAARRPQRYMAHGSASAINACATPAILPTARMTPAIVPTARDPRHPPHRPPLPPAILRYTAPPP

SEQ ID NO: 68894 - protein, 67 aa, Zea mays
  Coding DNA Sequence Number=SeqID_25519
  Subcellular localization annotation: CTP_CleavageSite=39; ConfidenceScore=5.01e-01
MEPGGGTAVGAVESLLTSSCFRKGAESRRRHRVGRGGCSSEAEVESVFRGRGRVRAPGSGEAEFVVF

SEQ ID NO: 68895 - protein, 67 aa, Zea mays
  Coding DNA Sequence Number=SeqID_25520
MEPGGGTAVGAVESLLTSSCFRKGAESRRRHRVGRGGSSSEAEVESIFRGRGRVRAPGSGEAEFVVF

SEQ ID NO: 68896 - protein, 376 aa, Zea mays
  Coding DNA Sequence Number=SeqID_25521
MTVAGGQEQQSRRQPSSRPIRGQRENPLSRREDNALVFRPRTARACATAAPPTIRPIALTPRRDRRRLWQEKQATLRLHHNSRLKKAASDRVGPTPTTGQMVRRPAPRKGSMAASGYSGSAPITDQGGNDLVTESHQREASSPRTPSPGDRVRQITRSSLETPCSAPIEGNMALSPLLLAERRRRGRLRGCSRKPGSGRTVDSVNIPARELGTRPYTRATASSHEGTTRPAEALHKALRPRRSETTPPRPRGLHPEGALARTHRNKTQPRKAGPLAKKCNESLQASANTPFEARGLLSGTIIRGTLKAPNSQLSETDRQSGPAKGIIGSSARPRARTRAKPRKTANSAPPDPGLGLGLSPGRRRTPLRPTQGSDSG

SEQ ID NO: 68897 - protein, 152 aa, Zea mays
  Coding DNA Sequence Number=SeqID_25522
MGKINKRKREPTPPLEDFGDSEYSEEEFSSESEGSPAPVSPPASSDDSDDSQGIAAEVWTYIRTVERSGLEGSEESEYSSDEEDSSDSSEEGGGGDGGDDDDGGDGDDGDDSGGGGDGGSKGGNGGSKGGHDGSSRGSNGGGSSKGSNKASG

SEQ ID NO: 68898 - protein, 155 aa, Zea mays
  Coding DNA Sequence Number=SeqID_25523
MDSRGKRWGSSIAGRPRRRRLPTAAARQEEEQGGRSAAAVRGRRSRGRCERESRGATPWTPASSLLELGPEDMPRPGWSRGGVGEEDPLSQPLARRNMEGATPWLALLPALAAAALTGVPMGAALRETVSAAWRIFRRFEVYIEFLRLFSDRGRR

SEQ ID NO: 68899 - protein, 277 aa, Zea mays
  Coding DNA Sequence Number=SeqID_25524
MSSIPPPAGGLSTAIVAVARRGKEYHVVAAVEGHELKTPETEHRPGLERLLKTAHLELDGKLFVNTQQAPTWRANCRRFEPGGSLDRRVNYRRVPQPRWVGARRSAKGGRSQRETGVRGGGSSEVEVESVFQGRGRVRAPGRARRRPSAEARAESEPWGRAKRSSSSSGAEPESEPWGRAKRSSSSSGAEPESEPWGRAKRSSSSFGAEPESEPWGRAKQSFPWRLGPDLAAVSLTLSSGIAVRAAQAALSSCQTGQWSGEVIAVTSALSTGERASG

SEQ ID NO: 68900 - protein, 59 aa, Zea mays
  Coding DNA Sequence Number=SeqID_25525
MEINRDRFCLSGMLKWFAQEVELHVDDEVMILNSMDASLVIPPVIFLWKDVHVSLYFDE

SEQ ID NO: 68901 - protein, 73 aa, Zea mays
  Coding DNA Sequence Number=SeqID_25526
MMSSNNGGDVGGPNGAWVWEWVEEGSRHDDEATLTGFLSSLMDYTPMNETGCCSYPEVLIRHFGGAFATPQRT

SEQ ID NO: 68902 - protein, 147 aa, Zea mays
  Coding DNA Sequence Number=SeqID_25527
MAASGRVVRGDGAAAGDSWVEAGSAVGEARAGFAAGEMAAVAGFAAGEAERRIDGSDQTAQWIVRGRAPDASNGGMPSAYPVPTRSSHAPDPVLVDHATNGTYDILCRHCKSASDTSCGVIVTATACRRAVDLVQAEAARGILSQWQ

SEQ ID NO: 68903 - protein, 174 aa, Zea mays
  Coding DNA Sequence Number=SeqID_25528
  Homolog annotation: Hit_ID=Q6F385; Match level="QueryCoverage=23%, HitCoverage=21%, E-value=1e-08, Identity=68%"; Hit description =Expressed protein
MTPASACAPPTTRPRRIHAEDALDGGSEAFHGLPYGVKATCCAEVEVGLNTVYRRCRSLDRSMGPLEIRMVSLDAAITTSPCSEPTRKRSCPCGIISGSATLTRIGQSFADSSSSVDSGSRDAEGLYLANDLDKRLLIYFPFMQVVKLHSVLFKGPKDDELQTMSAESRLEGGE

SEQ ID NO: 68904 - protein, 256 aa, Zea mays
  Coding DNA Sequence Number=SeqID_25529
  Subcellular localization annotation: CTP_CleavageSite=34; ConfidenceScore=5.10e-01
MASSAMPDPASDGGAVQGPLRESDPSRRLGRSPRQQGRTGRGIPTPPGYGYLTRHLDTGRLMLGLDSHNEQTHWHSKCHYERNSGSPSAGTNDPTPWGRPAEQQKTDERLTAARSNHDDNHLHPGQRSGLGSSFGAGVTTGGLSPAEDENQPFRQGDGGLGPLAPYLSRHGWRKSPWDSRTPFPPGAGGRKRQPTHAGAAPRLASSSILAWMTKILEAEGGVEAAAWPAFPTVELEVTILGDRRWRGAAGLHDENP

SEQ ID NO: 68905 - protein, 91 aa, Zea mays
  Coding DNA Sequence Number=SeqID_25530
MESSAKTRLPLHSNGIIYPSPSLHITLQIGIIFTHISFTNGEKNVKQGLEDSSNFSRGIEESALSTSPRWSTRARVSLPLGPRKNQVLTTR

SEQ ID NO: 68906 - protein, 30 aa, Zea mays
  Coding DNA Sequence Number=SeqID_25531
DAEVVTRMRGCGSPASRTRAAWGEQGRGGG

SEQ ID NO: 68907 - protein, 133 aa, Zea mays
  Coding DNA Sequence Number=SeqID_25532
  Gene Ontology: Mol. function=nucleic acid binding; Biological process= proteolysis
  Homolog annotation: Hit_ID=Q651C3; Match level="QueryCoverage=72%, HitCoverage=26%, E-value=6e-19, Identity=56%"; Hit description =Putative uncharacterized protein B1274F11.41
MGRAINKTIMVVELIKVLLMALVLANITYHLILIVTIITVKRRIVGLHQNTTTGSTDITDMWEPLEEGLLPLETTRHVSMITITLSKKELDTSSIGYAYCTLLSTAFNDFLCQFVLTKFYGFLCHELTSRCVK

SEQ ID NO: 68908 - protein, 54 aa, Zea mays
  Coding DNA Sequence Number=SeqID_25533
MEQLVTEFEALELPVTLCGTRLYDMLCHYGVMGATDDVVNVCFNTDSLEILKHL

SEQ ID NO: 68909 - protein, 121 aa, Zea mays
  Coding DNA Sequence Number=SeqID_25534
  Gene Ontology: Mol. function=metal ion binding
  Homolog annotation: Hit_ID=A3A7H7; Match level="QueryCoverage=30%, HitCoverage=10%, E-value=6e-08, Identity=70%"; Hit description =Putative uncharacterized protein
MASGVLSQLYHQGVEVDALVRVETDRMRATLQEARRRHARGVVAAVGRAADARLRAAEAELERARRRGAYLEVRLRHLAGEGQAWLGVARSHEAVAAGLRATLNKVLQHPAGEYKCFVAKN

SEQ ID NO: 68910 - protein, 107 aa, Zea mays
  Coding DNA Sequence Number=SeqID_25535
MERAQLLRLPTRGDKVRCTVTTLPDIASPWVESHARSIWETPTPSGGALCQPLGVRPGALSRRAKAGKKAPSCAPRRDGGFAGHGATVRAGDVAVGMVKGEKKGCDR

SEQ ID NO: 68911 - protein, 124 aa, Zea mays
  Coding DNA Sequence Number=SeqID_25536
MPRQHGRRWKNSAVALTPFSFDPPKTCNHFIVAGASPAPLFKLEEPRDFAVDNAMLRFTPAWVGRASSSAIHRIEDAGKFAFVGRAFSPPRRAPLDAETNGKLGRIIGRSTTTVKTIPEISEST

SEQ ID NO: 68912 - protein, 163 aa, Zea mays
  Coding DNA Sequence Number=SeqID_25537
MNKNTGIQSAITNGTPVPPPQVRTTPLDGGEPAEQQKTDGRLTVARSSSSDNDPLYGWPNCSGDGLRANAAATPPSPTPTLEGRGQGPSARRQIPTRILPDEQGTDLRVEAPYRCKGRTAPEHERCPSSARHLGRSSRAHGAAAAFRQEGAPGAKPTNPTRWG

SEQ ID NO: 68913 - protein, 806 aa, Zea mays
  Coding DNA Sequence Number=SeqID_25538
  Gene Ontology: Mol. function=calcium ion binding; Cellular component =nucleus; Biological process=regulation of transcription, DNA -dependent
  Homolog annotation: Hit_ID=Q5JJP3; Match level="QueryCoverage=95%, HitCoverage=96%, E-value=0.0, Identity=61%"; Hit description =Putative ethylene-induced calmodulin-binding protein 4
  Pfam annotation: Domain name=Ank; Domain location=441-473; Score=3.2; E_value=11; Accession=PF00023.21; Description=Ankyrin repeat
  Pfam annotation: Domain name=Ank; Domain location=474-506; Score =30.9; E_value=4.5e-06; Accession=PF00023.21; Description=Ankyrin repeat
  Pfam annotation: Domain name=CG-1; Domain location=13-131; Score =242.9; E_value=7e-70; Accession=PF03859.7; Description=CG-1 domain
  Pfam annotation: Domain name=IQ; Domain location=595-615; Score=2.5; E_value=23; Accession=PF00612.18; Description=IQ calmodulin-binding motif
  Pfam annotation: Domain name=IQ; Domain location=640-660; Score=21.4; E_value=0.0035; Accession=PF00612.18; Description=IQ calmodulin -binding motif
  Pfam annotation: Domain name=IQ; Domain location=663-683; Score=21.4; E_value=0.0034; Accession=PF00612.18; Description=IQ calmodulin -binding motif
  Pfam annotation: Domain name=Topo-VIb_trans; Domain location=492-621; Score=-107.1; E_value=0.072; Accession=PF09239.2; Description =Topoisomerase VI B subunit, transducer
  Pfam module annotation: Pfam domain module=Ank::Ank::CG -1::IQ::IQ::IQ::Topo-VIb_trans; Domain location=441-473::474-506::13 -131::595-615::640-660::663-683::492-621
MQQQQQGLDIGKLQEVVKTRWLKPQEVLKILQNHELFTISHKPPQKPQSGSWFLFNRRVLRYFRNDGFEWQKKRNGKTINEAHERLKVDNVDALNCYYARGDKNPTFQRRIYWMLDPAYEHIVLVHYRDVLEGSISVSARNDSSTLNQNGSASRAEVHSSPGWTSELIAHCTNSCSPGSAEEVSSQISASESDLIQHKAALRKLKMQLSLEDKEDCDVNAEDVPADNEPIILPVIQNEEPGTSRNHDDIFDVLDFSEDHINGTGTHPCHSAIDVLKNSDTWLEDDQLEAILHPACMTLTENQWFRIHEVSPESAFSYESTKVIIVGDFLCNPPHSSWQVLFGDVKPTKCMIDGNTNPCNEAQDVKLHQIPTKSSEELSLLLHYVHTLFDGHASGLFSNFSLPLQNLGCGIQSNQMDVMKKAYKQLDPENVNIDGDHLLPKQYRNIIHTVAALGYDLALKPLLSSGVPINYRDANGWTALHWAARFGREDMVVALLTAGAAAGALSHPTSEDPAAKTPASIALAYGFKGLSAFLSEAQLTTHLDSIESKENGKLDSREEGICRAVDRISDKSSHVHGGTDDQLALKDSLGAVRNAVQAAGRIQAAFRIFSFKKKKEMALGNRNSCCLSISEAGAVSHDMLEKAVLSIQKNFRCWKKRKEFLKMRNNVVRIQARVRAHQERNKYKELISSVGILEKVMIRWYHKGVGLRGFNSGAMTIDEEVDEDVAKVFRKLRVETAIDEAVSRVSCIIGSPKAMHQYRRMLNRYQQTKLIRSPQSSIGSDIPTVERQLFHAFGISFQMEQRSKKAS

SEQ ID NO: 68914 - protein, 106 aa, Zea mays
  Coding DNA Sequence Number=SeqID_25539
  Homolog annotation: Hit_ID=Q850V8; Match level="QueryCoverage=98%, HitCoverage=37%, E-value=2e-08, Identity=34%"; Hit description =Putative uncharacterized protein OSJNBa0037J17.18
MAVKQFLATTEIDIDEESITWMTGFKRYSATFAEFAAVNSLDYGTISARIDLYTEDNFEEFVQFYEPARLGIPRRFGETAGLRHHPAVINKIARVTILPKSGDEQN

SEQ ID NO: 68915 - protein, 116 aa, Zea mays
  Coding DNA Sequence Number=SeqID_25540
MSLIDDEKKLGDCQFDLWKQSYVPALKGKYSVRCANGSESPTVGFAKEEKKSAPDCPVRQATEGKNCLPGMLSTAPSCLGDIKGTPRRMEDDTKHSLSIPKHQDSNSAYLILCDSN

SEQ ID NO: 68916 - protein, 156 aa, Zea mays
  Coding DNA Sequence Number=SeqID_25541
MGKNNKRKREPTPPSEDFGDSEYSEEEFSSESEGSPAPVSPPASSDDSDDSQGIAAEVWTYIRAIERSGLEGSDESEYSSDEEDSDGGGEDEDDDDDGGDDDDGGDGDGDGSGSGRGSSGGGRDDDGGSSRGSNRGGSSKGSTKGGGGGSSNRASG

SEQ ID NO: 68917 - protein, 127 aa, Zea mays
  Coding DNA Sequence Number=SeqID_25542
MGIQDSVTEDVPRTGHPGFQEARRATADASTSTELATGCEAAVDGEPREPGASTAREPMAGEPSTTREPTTGESSTHEGTDGRRGEHPRGNRRGEKATGRGRSGQRRRRERDECTTGVRVRVTDFGS

SEQ ID NO: 68918 - protein, 530 aa, Zea mays
  Coding DNA Sequence Number=SeqID_25543
  Gene Ontology: Mol. function=structural constituent of ribosome; Cellular component=ribonucleoprotein complex; Biological process =metabolic process
  Homolog annotation: Hit_ID=A2WYI2; Match level="QueryCoverage=80%, HitCoverage=89%, E-value=0.0, Identity=76%"; Hit description =Putative uncharacterized protein
  Pfam annotation: Domain name=CBS; Domain location=178-307; Score =10.9; E_value=0.0041; Accession=PF00571.19; Description=CBS domain
  Pfam annotation: Domain name=CBS; Domain location=62-177; Score=92.0; E_value=1.9e-24; Accession=PF00571.19; Description=CBS domain
  Pfam annotation: Domain name=PB1; Domain location=395-480; Score =63.8; E_value=5.7e-16; Accession=PF00564.15; Description=PB1 domain
  Pfam module annotation: Pfam domain module=CBS::CBS::PB1; Domain location=178-307::62-177::395-480
  Subcellular localization annotation: CTP_CleavageSite=45; ConfidenceScore=5.29e-01
MDGGAGAGAGRRNVSSSSGSRRRVLPAENGHGHDAPPPSRRSSVSLSRGHSTSLTGERTVKRLRLSKALTIPDHTTVHEACRRMASRRVDAVLLTDSNALLCGILTDKDITTRVIARELKMEETPVSKVMTRNPVFVLADTLAVEALQKMVQGKFRHLPVVENGEVIAILDIAKCLYDAIARMERAAEKGKAIAAAVEGVEKHWGAAVPGPNNFIETLRERMFRPSLSTIISENPKVVTVAPSDMVLTASKKMLELKVMTQSPECATVDTPILDALHTMHDGKFLHLPVLDRDGNVVTVVDVLHITHAAIATIFVLPSYLLPLCTHFCWSEVGNSGAAGSEATSAMMQRFWDSAMSIGPIDDDDDSRSEGSTRVVSEATDIGRPAFFPASGLSNTFGFKIQDKQGRMHRFNCETSGLAELITSILQRVGDDIDRKHLPQILYEDEDRDKVVLSSDSDLIAAVDHARKIGWKSIRLHLDYAGVGRRKGGGGPSDLEYAGKDAAWASAYSAVAAGAALVAGLGVMAYLKRSG

SEQ ID NO: 68919 - protein, 73 aa, Zea mays
  Coding DNA Sequence Number=SeqID_25544
MSWSGQNFNSDLFRKGVTLQTSSSHVQDDRLSPIEDSAEECDALKWMKCPLRLGNYTTKDNASEQNTGQINGK

SEQ ID NO: 68920 - protein, 114 aa, Zea mays
  Coding DNA Sequence Number=SeqID_25545
MKPKEERNSICLEIAKFFYECGIPFNAANSSLLLYMSYVSLYLLGLSKTDERKKHKQGIHEGKNFDPLILEDFDWDNEWVDPLANSSHVSNALGVDFNLSWDAHGLNIDKFDDG

SEQ ID NO: 68921 - protein, 82 aa, Zea mays
  Coding DNA Sequence Number=SeqID_25546
MPPPIVVSSMLGCHPRPVEDVIALLLWRHRNGAVNNGVDEGDVAIVNYGAIDDERVYDGIGDDDGGMEMSRVKSSMAYESLI

SEQ ID NO: 68922 - protein, 186 aa, Zea mays
  Coding DNA Sequence Number=SeqID_25547
MGRITHAWASMLDEAAEWDDPVIGLRPATRETKRVWRRHRAKGGIFVFAPTLLYPLSWQSPSQIEESMCNMMNPNGDEVDDVNNKIPTPTVMNKKDESHGYLLNEMKNNKRTRRIFGYKIKPPQPQAKASKLMNTQTRESSQAQLFNMQTTDQPSSAGNQAKLTRREVKARGACFYCKEEGHFIRQ

SEQ ID NO: 68923 - protein, 83 aa, Zea mays
  Coding DNA Sequence Number=SeqID_25548
MSSAGGEDLPSNQTHRTRTTGRCRQCLHELTTPRPVARAPHSTGIQHLSASFLDRMQDQQQQMVLTEAQQRQDEFQRQILAQQ

SEQ ID NO: 68924 - protein, 134 aa, Zea mays
  Coding DNA Sequence Number=SeqID_25549
MAFGMKRVWTDGFAAGAVMKQSERREDDSALRSPEAALAVEDPTTEDLESDTTVTTQGRWNTIHRRELLPGGRTTSRCVSTAQQSFQSVLYTAPRGARSLKRTKLLVEAGADPNIPDKIRFCIPHSTRLSMANH

SEQ ID NO: 68925 - protein, 147 aa, Zea mays
  Coding DNA Sequence Number=SeqID_25550
MGKSNKRKREPNPPSEDFSDSEYSEEEFSSESEGSPAPVSPPASPDDSDDSQGIAAEVWTYIRAVERSGLEGSDESEYSSDEEDSDGGEDEDDDDDDGDDGGDGDGDGSGSGRGSGGGDGSKGSTRGGGSKGSTRVGGGGSSSKASG

SEQ ID NO: 68926 - protein, 88 aa, Zea mays
  Coding DNA Sequence Number=SeqID_25551
MPKLERAPAIHGGRLGMVKEQRQGRARSREGLQAAMEAERDGNEDDCSRASRGRRSRRARIAATAMQLDTIPPTAMQLNALELVYDVY

SEQ ID NO: 68927 - protein, 244 aa, Zea mays
  Coding DNA Sequence Number=SeqID_25552
MPSSSSSAATTPTAEASSEDLSGTVAVAELRPGDTVEFSVSRMSLVRVQDMQRLGYFGSGVGHVSGAEEIPEPEGELVVFEAFSSPAFVCPHIVLCRRFCRSSKSRFISSHRTPWWRRRKAEVEDHPGLPAAIMCSHYYVAYPPFEVAEDDENERALRIAARTSSGRDLVEEFIGYGVWPLVHGWALGEVCPREMPSLGGRKVRSSLFSLDVRGRDPAAVVREVEDGAARIIGRYVPKTEAQRS

SEQ ID NO: 68928 - protein, 303 aa, Zea mays
  Coding DNA Sequence Number=SeqID_25553
MELMGTCAAPGGRMSSPELRESSARMLEVTGGRWPKNVPIPRAAGEDFFTSRMARDLRVFSYGRNIAAVVLAVMNKDRQDAAQKRRAVIRVPDARREAKRARGSAKAAVPGGSQPMLAAKPAAPGSSKVSESAKAVGASGTKSAPDVATKIRELPSPGKRVADFGTNISVDDYLVGSGEGQLVVVPPAVATTTSTAVLGAKGGAFSAGGEIAAATAVKDEAGTMSRRLREASQQLSQQLSEHADAVREKLAAESKSRRLAKKVAALEGERTDLRRQLVEERREANQAIAEAQAAQAEAKLARA

SEQ ID NO: 68929 - protein, 165 aa, Zea mays
  Coding DNA Sequence Number=SeqID_25554
MARAEDVEDFGHLNSTQPEVEVNPVVAEAEVQDFGPAHATATANFVAASTVVAGNESNESTSKFSEFDDSGSLVVWTEESSDEDLDYFAALDVAAAEASPRVTDAEVLPGPSAGRRRRRTVAKRRVSEVDGGRLRVGRAGKRELLSSPVGASVWRNRPNYSNLSA

SEQ ID NO: 68930 - protein, 202 aa, Zea mays
  Coding DNA Sequence Number=SeqID_25555
MTSHESSEGGNAHSHTDGLAQEGFPCILWEVLQGAGYLVQLFEEHRVPRCRVRMTLEPHPLQLGWRSLDSESFGYRAEDTIEAIALLGLTTFYGFHPLELSTHPIGLFPAEKEDKPMWKDRVVHAKDVWALYPEQTAHLTQLEEANQHLDMHHQEIQDMEAEGADEDVDIEGGEEPEPVSSLDTAGSGRPPSPKSSVALFVH

SEQ ID NO: 68931 - protein, 179 aa, Zea mays
  Coding DNA Sequence Number=SeqID_25556
MGKEAWLRHAEKLRSEDRALRRYGGSTARELRGEGELGWEEWKTTRLSEGEDQWLQTNNLSDGKRRQQPTQNSTYFYDEQVLFLHAIAHPIFHRFHLLVAVHHCGLEVRGQVDGLATDIRTMHERLDSTATSTIARFNQLDLAQTETRTTLDTILALLDALTTKMEQDYGGDTEQELQR

SEQ ID NO: 68932 - protein, 213 aa, Zea mays
  Coding DNA Sequence Number=SeqID_25557
MGTAQQHANREEAESRAMTGMLQGVCCSTSWGVGGAAGALSAGHGEKGRSYCCKFLGAKEEEQGRLVSLNGERRAAALAGVEAWGCTERAPGRAPWWPRGGAELAPWLRESSGLSHGAGKCAGLGPRVGKKEGGRLEVRRPGGEEELLLAYTIGAEERQGAMGGRESISLHAGEEGPLLRVGEEARERRLWRLEKWRGGNAKLPSAREGHFYL

SEQ ID NO: 68933 - protein, 318 aa, Zea mays
  Coding DNA Sequence Number=SeqID_25558
MARLRHTARKSVIPFLPSRLAERPLRRIVSGQSSHLERLHHRLHEEQERQHQQREQQGSSSPPEQEVESVRRRSPVPQLEAPRAPPQDAPAVGGATGGGPGGDPDGDDDDGSDHSTEPSEEQEAEGWVARPITRDAARGCHFHDALDTLLRQAFDWHTWSIEYRCVVYQHSRGRYPDRWEATFLVRRPEDDLRGVEAFSEHYSISERDTAEAAMQDAARRALSQYCSLFGGVANGLNLRYYPRRPTGSTESVVVSPIGEDNPRLSHTVNLVAVLNTELDHSLDKLSRARAEIVELRAELAERRHQEGGSPAPVGTQHP

SEQ ID NO: 68934 - protein, 157 aa, Zea mays
  Coding DNA Sequence Number=SeqID_25559
  Gene Ontology: Mol. function=structural constituent of ribosome; Cellular component=ribonucleoprotein complex; Biological process =translation
  Homolog annotation: Hit_ID=O22424; Match level="QueryCoverage=35%, HitCoverage=21%, E-value=5e-10, Identity=60%"; Hit description=40S ribosomal protein S4
  Pfam annotation: Domain name=KOW; Domain location=88-120; Score=25.9; E_value=0.00015; Accession=PF00467.20; Description=KOW motif
MTRSHPSIDSEMVGVGFDGSKSALGRVTLEESHTIHEFATPCNVDGKVMTDKTYPAGFMVQALQGEANDTIKIDLETNKIMDFFKFNVSNVVMVTGGRNTGRVGVIKNREKHKGSFETIDVLLGAFCYVYFILFVVQENIEWNSNLVVTKVWRLEFI

SEQ ID NO: 68935 - protein, 145 aa, Zea mays
  Coding DNA Sequence Number=SeqID_25560
MTARSKPTPQIRFALISKWRIPKTQQDKFPSGGEASYAVAAHALFYEVERALSAYPCANQRACPHLRHDRGNRSVASAPAYKYRCALSLSLRAHCKPSLSEFTTTGVRHHPPCQPKGQPPWPAQHHLPTLTPLPVGVSLAPSDLG

SEQ ID NO: 68936 - protein, 134 aa, Zea mays
  Coding DNA Sequence Number=SeqID_25561
  Subcellular localization annotation: CTP_CleavageSite=18; ConfidenceScore=5.01e-01
MQPQPNQGLKADFHATNRANSKGSWKDNMVCTIQTTQVNTNYIPPPRQAPVYLVVVEEVPVDLHHLRVGNGVILEGSSEEILATPTSLSELLAFAVGASFGGDNLDDSSDDGEDDDDDDDDDEEENNNEEDNDE

SEQ ID NO: 68937 - protein, 81 aa, Zea mays
  Coding DNA Sequence Number=SeqID_25562
MAGKKDGAMYDNVDSGSKGKDGGGDGGKGGVDSSSSKGSNSGGDNDSRVKGSDSDDGNGDGGNGGGKGSNAGGKPANGLSS

SEQ ID NO: 68938 - protein, 305 aa, Zea mays
  Coding DNA Sequence Number=SeqID_25563
MALSPLLLAERRRRGVCKKAESVPDRPLAPVRRLGGCSRKPGSGRTVDSVNIPARELGPRPYTRATASSHEGTTRPAEALREALRPRRSETTPLRPRGLHPAGALARTHRNEMQPRKAGPLAKKCDESLQASANTPFEARGLLSGTIIRGTLKTPNSQLVTPISIKLQRPDGARTRARPRKTANSAPSDPGLGLGLGPGRRRTPLRPTQGSDSGSAPEDDELRFARPQGSDSASAERPPPRPTQGLRLGLGHGRQTRPRLRRSLHVAQPRAQACHVNRKRHHHPTPSRLGPQRTRPVSHLASSAR

SEQ ID NO: 68939 - protein, 211 aa, Zea mays
  Coding DNA Sequence Number=SeqID_25564
MKNASSRTTNSMWPHNIPSCSVNKTIVVIEGQRPIKNNPVPKRVYLWMPHVLARDLHPTPLGASPPPKASQPKSEHEQLPLLRTGSFSEQVLHLLLRCKHGERAYLWGIELSDLDDLDESGEEEDDDDDDGYDGGDEGAMDDNVDNGSKGKDGGGNGGKGGVDGSSSKGSNSGGDNGSRVKGSDSDDGNGNGNGGNGGGKGSNAGGKPPTA

SEQ ID NO: 68940 - protein, 406 aa, Zea mays
  Coding DNA Sequence Number=SeqID_25565
MHCALPPSEPPDGERPRCFRLAAVGGAQLRGGWHPSAIARLQGFSSGSSAASPHQWSPKTVTTSSMVGRSKPGCDFCPSLSFKDLHYPCWGGGRAEPELYLPYGPAGHLFLQHPEERALTGLAEGADFDNAGPAGRKRRQLQCVGLAGAAGSGSASGAPSHRWAECGYLPAVWAAVAPRAPGDRPRRRLLLGRRSRSWAVLPSLRHDATTRRSVLARPGGLEWGSAGGQVATVVGAEVVAAGESFPTDEGVSATLGPTSDSLALIACPRPSSGDAGEGLVVAASALRSSLLLFSRPGWRSLSLLTEWAAASHLEFVVPQALQCGRLNPRLLYDEPEPEAAVSAWTEAELARKGASSAQERGVDIFLRGGDPSPVSSFEAGPDPAKGGNNAEGVVVPSIDVSTYRGR

SEQ ID NO: 68941 - protein, 133 aa, Zea mays
  Coding DNA Sequence Number=SeqID_25566
MQVACNRTTGGHPFGFVASSMEAQAHTSCNRRAGYYVRETAPPLAPMSRLLDCGTGVATRGNPAHGPTASIEHNDHGDQERGYFERGPSPRRKRAPSPPTDQGFEGWPLGRTELRLARGPPKGSGRTLDSPEA

SEQ ID NO: 68942 - protein, 190 aa, Zea mays
  Coding DNA Sequence Number=SeqID_25567
  Subcellular localization annotation: CTP_CleavageSite=47; ConfidenceScore=5.51e-01
MPQFPLSLPNFLCPRSPAVLCAVAVVRHHRPGPSPRLRRHRGVPWVRLEATPVALRTRRALAPLVFGELPRRGCGRRRLCWLEKGTEAGRPIPAVHLRSDDPILNNPGPILAVRLESDGPRPLPPHPALPARPRLSASRARSARPAPLVSRPRPLCPPGPACQPPTPALPARPRLSAAHAAARSRARPQI

SEQ ID NO: 68943 - protein, 56 aa, Zea mays
  Coding DNA Sequence Number=SeqID_25568
MELENDPNRSTEYTPYLMVYGVEVVLGIDLEYGACGGTTQIILAHVPWSCLNAKHN

SEQ ID NO: 68944 - protein, 108 aa, Zea mays
  Coding DNA Sequence Number=SeqID_25569
  Subcellular localization annotation: CTP_CleavageSite=102; ConfidenceScore=5.70e-01
MARGPPSPLFSFSPLVLGRLGAPVAQPRTPARGPPGTFPRAAQPARAVAPLASCPLRAGPTEQTQPRHPQPPARSCRRERRPRLPGPTDLLPPTIPTEIPLSFDAAQG

SEQ ID NO: 68945 - protein, 49 aa, Zea mays
  Coding DNA Sequence Number=SeqID_25570
MGGGLLAAASALRSVLPLFGPPEQKSSSSPLLEQGCLCERELLLAEGDE

SEQ ID NO: 68946 - protein, 70 aa, Zea mays
  Coding DNA Sequence Number=SeqID_25571
  Subcellular localization annotation: CTP_CleavageSite=26; ConfidenceScore=5.11e-01
MRMQHLKRRHKKMHRSPILKNKRSPKKSAKKSKKWAVSQRLVAHRTLMSGKEEGVEANLEEFQDFDEFED

SEQ ID NO: 68947 - protein, 67 aa, Zea mays
  Coding DNA Sequence Number=SeqID_25572
MERGVAAITLEKTWSGLPLAATKRDCRASKLFARCAGGGHGGVVLLAKASWQWHGCFPNPSRLAKDT

SEQ ID NO: 68948 - protein, 483 aa, Zea mays
  Coding DNA Sequence Number=SeqID_25573
  Gene Ontology: Mol. function=nucleotide binding; Cellular component =intrinsic to membrane; Biological process=defense response
  Homolog annotation: Hit_ID=Q8H6U6; Match level="QueryCoverage=89%, HitCoverage=38%, E-value=1e-104, Identity=46%"; Hit description =Putative rp3 protein
  Pfam annotation: Domain name=NB-ARC; Domain location=159-462; Score =222.7; E_value=8.5e-64; Accession=PF00931.13; Description=NB-ARC domain
MADCHDAGRARLGARESPVTFRKGDDLGKVELLAQGTLYRKMTGVEAAAISAVASGILKIVGNKLAPLVIRKYSSIVGVEKDLQKLQLKAERNDASGDGDFVSRYMRRKPESFIFQCKAAKKIKAIKKRFAAIVKQRADINIIATSLTGSGHSISHMKKTAVGLPSVPTMDATLILGREMEKHQLISKLTETNDQQKTMIVSIVGLGGSGKTTLAKLVFNDGTTIAKHFKVRLWVHVSQEFGFESIVGKLFEAIAHGKSESHNLQHMVRRISDELTEKVFLLVLDDVWTKDRMELEQFMVLVRSGASGSRILLTTRNSDVAEAVESSYLINLPLLSLSDSWQLFIQSFGTTVEGLDREFLDVGNAIVNKCGGVPLAIKVIAGVLHDKKRIQEWQAIRDSNLFDAEGKERRVSACLRLSYLNLPSHLKQCFTICSLFPKGHKIDKERLIDQWIAHDMFASADAVDYLEYTGYECFSSLVQMSFL

SEQ ID NO: 68949 - protein, 138 aa, Zea mays
  Coding DNA Sequence Number=SeqID_25574
  Subcellular localization annotation: CTP_CleavageSite=24; ConfidenceScore=5.00e-01
MVRERRTLTNTMSKNTRDTRFIPRFGHTTKVPYFLVEAPTKSRVSFNPNPPFADHKGETRFTNLLSRRLDRIQNRLSREKIRLNRFSQKICNDFSDSSDCQTGQSRDGRGTVPKPVEPVLGPVEPVSKAEKQVLNFLK

SEQ ID NO: 68950 - protein, 96 aa, Zea mays
  Coding DNA Sequence Number=SeqID_25575
  Homolog annotation: Hit_ID=Q6QP57; Match level="QueryCoverage=28%, HitCoverage=8%, E-value=2e-07, Identity=92%"; Hit description =Putative zinc finger protein
MALATTANSTRDSSRENKCGENENQVSLFLGCIICIGDVILKNQYNNMDYLEGSLNELGSWCIRLQHRLVEGVLDKESLYLKTGGYKKLEWLSEGF

SEQ ID NO: 68951 - protein, 37 aa, Zea mays
  Coding DNA Sequence Number=SeqID_25576
MEMGAAPRRLAAWRVGAWAWPAVAMNSWAQEFGFNGR

SEQ ID NO: 68952 - protein, 78 aa, Zea mays
  Coding DNA Sequence Number=SeqID_25577
MALGKKKITKAEEAAQQDEPHLRLAAPRGRGVDRSGAVGQICGCDDARRREGGGHWPLGLPLRVESRRKKPACLGDEY

SEQ ID NO: 68953 - protein, 695 aa, Zea mays
  Coding DNA Sequence Number=SeqID_25578
  Gene Ontology: Mol. function=catalytic activity; Cellular component =endoplasmic reticulum membrane; Biological process=metabolic process
  Homolog annotation: Hit_ID=Q5W6W7; Match level="QueryCoverage=100%, HitCoverage=100%, E-value=0.0, Identity=75%"; Hit description =Putative long chain acyl-CoA synthetase
  Pfam annotation: Domain name=AMP-binding; Domain location=84-588; Score=232.8; E_value=7.5e-67; Accession=PF00501.19; Description=AMP -binding enzyme
MGEVSDDNSNMSFLKRIATSDVPLLKEYGVNGVVVALLLAVVTPVLLSMMFGKKTKQRAVRADVGGEEGFAMRNNRFSSLVEVPWEGAHDNVSSVRDGQQKMGHDLDSHAAIFSDTRAEWIIAAQGCFRQNLTVVTIYASLGEDALVHSLNETQVSTLICDSKQLKKIPAISYKLQSLRRIIYIEDEPVEAETLNQVKHLTTLSFTEVEELGKTSHVDARLPSGSDTAVIMYTSGSTGLPKWSKLSLDIAYKICIPNSDASALKCGVMITHGNMVATTAAVMTIVPNLGMNDVYLAYLPLAHVFELAGETVMLASGSAIGYGSALTMTDTSNKIKKGTKGDVSVLNPTLMISVPAILDRIRDAVFKKVGEKGGLTKKLFDFSYKRNIAAIEGSWFGSWAPERMLWDHIIYKPIRAMLGGRLRFVLCGGAPLSSDTQRFMNICLGVPVGQGYGLTETCAGAAFTEWDDTSVGRVGPPLPCCYVKLVSWEEGGYKISDSPMPRGEVAVGGHSITKGYFNNEAKTNEVYKVDERGIRWFYTGDIGQFHPDGCLEIIDRKKDIVKLQHGEYVSLGKVESALATSNYVENIMVYADPFHNYCVALVVPAHQALEKWAQNSGMNYEGFGELCQNDRAIKEVQQSLSKAAKAARLEKFEVPAKIVLLPEPWTPESGLVTAALKLKREQIKAKFKGDLDKLYH

SEQ ID NO: 68954 - protein, 154 aa, Zea mays
  Coding DNA Sequence Number=SeqID_25579
  Gene Ontology: Mol. function=structural constituent of ribosome; Cellular component=ribonucleoprotein complex; Biological process =translation
  Homolog annotation: Hit_ID=A2ZB00; Match level="QueryCoverage=59%, HitCoverage=59%, E-value=8e-24, Identity=60%"; Hit description=40S ribosomal protein S16
  Pfam annotation: Domain name=Ribosomal_S9; Domain location=37-131; Score=36.2; E_value=3.8e-10; Accession=PF00380.10; Description =Ribosomal protein S9S16
MGDQRADEQQKTQSSIDVGLQPAADNFFPCPPPPPASRQIHIANPNAAAAKTQQPPLQQCLAGRSRFKDVDMRVRVRGGGKTSQVFAIRQAVAKGLVAYYQNYVVEAAKKEVKDVFSRYQRTLLVADPRRCVWGMDIPGPTKEIKDLTKGPRTQ

SEQ ID NO: 68955 - protein, 69 aa, Zea mays
  Coding DNA Sequence Number=SeqID_25580
MPMWQPERSGHPAGVMSWLSEGDVGFPSEAEVESLPSVAVGRTPSQGGRGEGGKSSRPKAPGGSPKPLG

SEQ ID NO: 68956 - protein, 61 aa, Zea mays
  Coding DNA Sequence Number=SeqID_25581
MALEDLLGDTGIGYFYIVSSILHLGPHVGAKHPLAELSVWQGVALAIPRSDTSAQPYCPRP

SEQ ID NO: 68957 - protein, 249 aa, Zea mays
  Coding DNA Sequence Number=SeqID_25582
MDSRPRGSIGSLPERGSEVYMVWSRHVSALDPRLALIKAWVFFVPESWDPAEGGPYPTQRGLGPVPGVRYVPAEVLDPARRSGPDMQGSDTFPWGSRPTVDTLEDISFPGHVATLEPSMWWGQGTDSGPRAHLRGGYEPAAGARRASDWISRGASGRAFPEKGFTPRPAVTLSHSLQPLRPFVSEPSALLCTRVLLLSTAAVAMASLVRPEHFQTEEALDMVRRLLGWSAPVFDGRIRAGTTPLGDLAA

SEQ ID NO: 68958 - protein, 156 aa, Zea mays
  Coding DNA Sequence Number=SeqID_25583
  Subcellular localization annotation: CTP_CleavageSite=51; ConfidenceScore=5.02e-01
MRPVQPPGGGADRWATLVIPLSRALGKKLVTLLAGPTRQTYLPSHNNPRVSATEPWCCPGIPSSRIRLPKSKPKFVEDYLLGLPSSLRFSPSQPSPLISDAVEGSPHMGKAYKLGDIGRSELVDTASLATLLKSPRETQKPTRDPSLVDSESGEIL

SEQ ID NO: 68959 - protein, 55 aa, Zea mays
  Coding DNA Sequence Number=SeqID_25584
MVRVRLADGKKNLIREDSVQGDVIVDITPQLITLNQRSKSGKYHKNKHSRAQIII

SEQ ID NO: 68960 - protein, 238 aa, Zea mays
  Coding DNA Sequence Number=SeqID_25585
ITVGASPAPDRKMCVDSTRIRKGITARKPLRPCPPVFGAPHHVRRDLRPHPHLQVIQPHPNRDKPEESARKSPIRRPPLPLSVSSKSSRLQPSIRPATSTTESQAGMECEPEELRWAASASWRGSSWGAPPSAAPPMTSTSRIVSNRRSARHLHHRIPGRHGVRARGAPLGGVGIVEGEQLGRPAIRCTTDDVYFVDRLQPSIRPPPPPPNPRQAWNADELVMAAATKAADSGERLRS

SEQ ID NO: 68961 - protein, 226 aa, Zea mays
  Coding DNA Sequence Number=SeqID_25586
MGRSKPSYDLGPALRFKDVHHPCWGGERGEPGLYLPRGSAGHLLFQLLVVETILQLCGGGVLQPCRGRRTVAAQLGCNIPPSSSLSWRGRERGPAVKGTPRPLFDEPKPGVAVSTRIEAELARKEDLVGRSLAGSSVSGTDAGVDLPRPRAGLMSSGDSWPRPRGDQPSRLLEPDSWRRPGRRWPGRDDEVVLQSGDPRTVSPSEARSDLTEGVVDAEGAAAPFNR

SEQ ID NO: 68962 - protein, 82 aa, Zea mays
  Coding DNA Sequence Number=SeqID_25587
MTKPDPGNRRNEAAKKITATNSRGHTGLLGPIRRSTIHRTQAKLHGQRRAPKLHGGDAITFSQHRHTRNFVMADEKLGRGKA

SEQ ID NO: 68963 - protein, 335 aa, Zea mays
  Coding DNA Sequence Number=SeqID_25588
MDAQYDVTQEWLDRVKTSRKGLQGTKGRNRRTIKEGPKRRLVFAKAYYQGGSKKKLQLNFTSTVCSAAVELFQLQLNFTSTVSSAVVEPFQLQLNFTSTVSSTTVELSQLQLNFNFNVNLSDYTPVELASGPVETVQQSTVRLADSKGRIRVQRDPALCGCLNDVDPRAVDLAMRIIESMFLKMKEDEAKNMIEEEENDRWRPNDKSTSSQGLSFKSNSHICFVANGSDSESEDEEEHESDSEDEDDLQQFFAQLSKKNWMSLLKLMKRAEEQKEMLHKQEDFLIRKIKDLEKLTKEHEKLKCSHDDLVQRYPVIVDAARSSVRYDNLIEWRSRR

SEQ ID NO: 68964 - protein, 61 aa, Zea mays
  Coding DNA Sequence Number=SeqID_25589
MEFANNTLISLLGMILSERKDPRIASFSAMTMDQKTGASVHGWTVRLGWPDHLHEHRTVCA

SEQ ID NO: 68965 - protein, 883 aa, Zea mays
  Coding DNA Sequence Number=SeqID_25590
  Gene Ontology: Mol. function=identical protein binding; Cellular component=extracellular region; Biological process=negative regulation of catalytic activity
  Homolog annotation: Hit_ID=Q6ZKR5; Match level="QueryCoverage=86%, HitCoverage=96%, E-value=0.0, Identity=77%"; Hit description =Putative subtilisin-like proteinase
  Pfam annotation: Domain name=PA; Domain location=380-486; Score =103.6; E_value=6.2e-28; Accession=PF02225.13; Description=PA domain
  Pfam annotation: Domain name=Peptidase_S8; Domain location=135-628; Score=50.9; E_value=4.3e-12; Accession=PF00082.13; Description =Subtilase family
  Pfam annotation: Domain name=Subtilisin_N; Domain location=39-122; Score=64.7; E_value=3.2e-16; Accession=PF05922.7; Description =Subtilisin N-terminal Region
  Pfam module annotation: Pfam domain module=PA::Peptidase _S8::Subtilisin_N; Domain location=380-486::135-628::39-122
MPLQLMPPHYYPVLLPLLVLAAVAGVSAGGGGDGDVVERTYIVRVDADAKPSVYPTHAHWYEAAVLAAAGDGSEWPEGGPLIHTYSAAFQGFSARMSPAAAEALASAPGVAAVVPERVRQLATTRSPRFLGLLSSPPSALLAESDFGADLVIAIVDTGISPAHRSFHDRGLGPVPGRWRGLCASGPGFPPSSCNRKLVGARFFSKGYEATSGRMNETAEVRSALDTDGHGTHTASIAAGRYVFPASTLGYARGVAAGMAPKARLAAYKVCWVGGCFDSDILAAFDAAVADGVDVVSLSVGGVVVPYYLDAIAIGAFGATEAGIVVSASAGNGGPGGLTVTNVAPWMATVGAGSMDRAFPANVRLGDGQVLDGVSVYGGPALESGKLYELVYAGASGGGASSASDGYSASMCLDGSLDPAAVRGKIVVCDRGVNSRAAKGDVVRRAGGVGMVLANGAFDGEGLVADCHVLPATAVGAAAGDRLRKYIASATKQRPATGTILFEGTHLGVHPAPVVAAFSARGPNPQSPEILKPDLIAPGLNILAAWPSGVGPAGIPSDGRSTEFNILSGTSMACPHVSGLAALLKAAHPSWSPAAIKSALMTTAYVRDNSNGTVADESTGAAAGAFDLGAGHVDPMRAMDPGLVYDIGPSDYVSFLCNLNYTERNIRAVTRRPADCRGARRAGHAGNLNYPSLSATFVAAGAAAAAAASRTHFIRTVTNVGGGSAVYRASVTAPEGCNVTVQPRRLAFRRDGQRLSFAVRVEAALGGRMEPGSSLVRSGALTWSDGRHVVRSPIVVTVQAPLQKFSRAGGGKQVASAESVESALSKGADVGKLMAPDEMVLARAGAEQQAGGEYPPCGLLQHCQLSQQMTVASVFLHRKEHCHI

SEQ ID NO: 68966 - protein, 61 aa, Zea mays
  Coding DNA Sequence Number=SeqID_25591
  Homolog annotation: Hit_ID=Q5NKP3; Match level="QueryCoverage=98%, HitCoverage=23%, E-value=5e-18, Identity=76%"; Hit description =Putative uncharacterized protein 9C20.7
MAPSHRPTHHPPEAQPPTQESSVLAMSCAFDDYYIKDYGVILAPEVTQRRTDNNDHSSSLG

SEQ ID NO: 68967 - protein, 53 aa, Zea mays
  Coding DNA Sequence Number=SeqID_25592
MTGRRGPHWQWFIAQENKVCEGDEWGRGAGALLLELGYAGALGSAYAYPDGAA

SEQ ID NO: 68968 - protein, 53 aa, Zea mays
  Coding DNA Sequence Number=SeqID_25593
MSKTPAEPLRARAASPPSSDVFGTSRWFDEDKTGRDTLRFVQHQTKACGDVSP

SEQ ID NO: 68969 - protein, 93 aa, Zea mays
  Coding DNA Sequence Number=SeqID_25594
MNPLDPPPVRIDQVVAAQMMEEGADTAAPLVTLAHLVFLRDEPLPVGPSSSGRRLRGYGRPHQQLSAPGRNSHAEMTPHHHREPVDISGARGP

SEQ ID NO: 68970 - protein, 301 aa, Zea mays
  Coding DNA Sequence Number=SeqID_25595
  Homolog annotation: Hit_ID=UPI000069EFA8; Match level="QueryCoverage =55%, HitCoverage=51%, E-value=2e-07, Identity=24%"; Hit description =UPI000069EFA8 related cluster
MEALPADDQRPFKDLVMRDEKEVMRQWNEERDKEEAELLHKLTERHKEAAEKYLSHFTVDRHQKIIRQGEIDMEYLLPPLQDPAVSAPDLSLTTFMDQRGDRLKQYVDESIKMHIRSYEKSTAPSFPSPTATRHATGSGCGRTVRASSQTLRPHCGPSDPTQACTQIAQVAPCMVGSSGYNLRKFGPVVDHPVHYVGPSGYVTDRSIPYVGPSRYVADCPVPYTGPSGYVADRPIPYAGPSGYGMNRPAYYTGPSDSTRVHAQTAQVAPYMTEPSGYSPGPFGPIADRPALYDERSGYETT

SEQ ID NO: 68971 - protein, 131 aa, Zea mays
  Coding DNA Sequence Number=SeqID_25596
MGSHLDLDDDGEGTVCRGEHSVGVIAAASPLNLLSTGAGEDGVEAEEDEQDARRVSGCEESVAAAMEVGLRIASRGERGAEGRTSGAAMARWRRMSQGIQDLIGACATGVLETRDARSGERRERRGGGERP

SEQ ID NO: 68972 - protein, 54 aa, Zea mays
  Coding DNA Sequence Number=SeqID_25597
MAWDVPVIFLVHLSWASTMVVYYQGTRADGIKEVILSHAHALSLIAAGEVFWLS

SEQ ID NO: 68973 - protein, 228 aa, Zea mays
  Coding DNA Sequence Number=SeqID_25598
  Gene Ontology: Mol. function=oxidoreductase activity, acting on the CH-CH group of donors; Cellular component=peroxisome; Biological process=fatty acid metabolic process
  Homolog annotation: Hit_ID=Q9LLH9; Match level="QueryCoverage=24%, HitCoverage=8%, E-value=2e-16, Identity=69%"; Hit description=Acyl -coenzyme A oxidase 3, peroxisomal precursor
MEGGLGSTPSRLLGMCPCAGARPSTATASPSGYAVGRHPPLLRFSIINGRNQGVHAFVAQIMDEDGTVLPNIHIADCGHKIGLNGVDNGRICLDLCHLGQQNPCYSPPHKSIIRGNLQYAYLSALRRLSLDPGNQTFLQRDVQGLRNLRYSAWLLCFYDLDKYSYFFLEIFSAMICPVCRGIYNCSICRTKKGWFPTGSACRKAVGLGYKSVAHFLIAKHNNKQVPLI

SEQ ID NO: 68974 - protein, 89 aa, Zea mays
  Coding DNA Sequence Number=SeqID_25599
MAHRAAGTEGGTDIEVEEARRPGSTMYSTSGSEAEDPNTHEVTDITEPIDEGVDDDDSGGSESEVEGFMLDLAYDNNDGDKEGREEGGK

SEQ ID NO: 68975 - protein, 215 aa, Zea mays
  Coding DNA Sequence Number=SeqID_25600
MHDLLLALTLLGCSGWLLGQEGGVPGCSDADIDFLPAGCSDGTTADAETASGTTTAGSDTDPGAGDLACIAEKLVPVLTDRQGILLQGEKLLLPYYHQSLGHMVATEVVPEFLLGDCFRVGMGGEAPVASGLAPEVEVGVIVATPAALLLRSNQLLGLLGSASGTSAQWSSGVAVATAVELHLPGVPAVPAEHALHLGTYSQTYVERTHKSDLTL

SEQ ID NO: 68976 - protein, 197 aa, Zea mays
  Coding DNA Sequence Number=SeqID_25601
MHQGSLCKGYVVYPWPFTLVVKIRRTLVTFMMMVNNDGDNSDPWYFLLEEMARLKCTARKSVIPFCLLAWRSTLCVARCREQERRCQEQEQQYSSPSPRQEVESAKQPSPAPQPEMPPAPPQGIPATGGDPAGDGYDDDVGGSSSHGTELSEEQEPKDGLLAPSLATPLAVVTSTTLSTPCCVGPSTDTLGPSSTIV

SEQ ID NO: 68977 - protein, 300 aa, Zea mays
  Coding DNA Sequence Number=SeqID_25602
  Subcellular localization annotation: CTP_CleavageSite=76; ConfidenceScore=5.29e-01
MAGGIELAGAKGKWLAGEGTGSCSVTKVPVSECLVPRSSCAKTMPNEFGLSSNFSRTCSREFGTTLIFGSPGFEFRKAENADDLWEEVWHLRETLGDTGVSQTTRRKDCGHPPSGGSEGGNTRCIREREDMVAFRGGHPPFKGDSPYLRPRPSWAESSPTRSKVLPLRRGGWVPRVMQAGPEQKKPNRRARCMQPPSGYKRPSTFAQTNGRKGRQPCRRHANRAKWAHFSDFQHAQHGGPGPRVMQPARRMLRASDCTATRATTAPPRLRNQCRDSRRPSTRPSSASLARRSMRPKMDRQ

SEQ ID NO: 68978 - protein, 155 aa, Zea mays
  Coding DNA Sequence Number=SeqID_25603
  Gene Ontology: Mol. function=kinase activity; Cellular component =ornithine carbamoyltransferase complex; Biological process=amino acid metabolic process
  Homolog annotation: Hit_ID=Q6QP54; Match level="QueryCoverage=50%, HitCoverage=27%, E-value=8e-13, Identity=52%"; Hit description =Putative kinase
MAPPVDVVGPRPRLGDVEAPPRSRSSLSSVAMVESEPLGRARRRPSAEARAESEPWGRAKRSSSSSRAEPKSEPWVGRLTLSSGTAVGAAQAALSFCQRFGQGCFLAKTGPQASRKCVHRWRGASGETEILRGRLPLPEARLGRGVIESLEWTDP

SEQ ID NO: 68979 - protein, 138 aa, Zea mays
  Coding DNA Sequence Number=SeqID_25604
MALHVLTTFYEFHPLELSTHSIGLFPADKEDDPMWKDRVEHAKDVWALYPGHTAHLTVRCMSVVYRLQALRGEAMSQLMGLVESTKITLDNWEDLVVDLSTELVEKDLQVEQMANQIQELEGQVEARENTIEVLEDQL

SEQ ID NO: 68980 - protein, 64 aa, Zea mays
  Coding DNA Sequence Number=SeqID_25605
MAGDEIHTTVDGAEDPDHDEAWFHCGPTAVQTLTCGGAGVAKAVPLPAPSGTSSPSQFSFRRLA

SEQ ID NO: 68981 - protein, 421 aa, Zea mays
  Coding DNA Sequence Number=SeqID_25606
  Gene Ontology: Mol. function=DNA binding
  Homolog annotation: Hit_ID=A2XPW1; Match level="QueryCoverage=66%, HitCoverage=82%, E-value=8e-88, Identity=63%"; Hit description =Putative uncharacterized protein
  Pfam annotation: Domain name=Remorin_C; Domain location=300-411; Score=147.5; E_value=3.8e-41; Accession=PF03763.4; Description =Remorin, C-terminal region
MAPRTVVPIVVSAKPYQLVGQFGNLAQWKCSGGPRPEPAVKRIWQFQVNLSKEKCRGNSEKSDAEFFQVWINLGSGAQTRSHELRLHHQQGRQRGGRMARRIKRWLGPRRRRPSGTTRRNGLWACRTATRTEPTGARVKPRSSNADDRRLLGSASQNGRVSCSSVDGALEYSMVVAAPSTPPQAAEGGGDMEETKKIDCMVQLHDSPQAVMRSVCLRDMGTEMTPIASKEPSRTPTPRRACTPVALSPMASRSSTPVRRRQEGPVGVTTAIVAGTLTEQVAAADEVACVGDERPVAGHVPSVNSLESRAAAWDEAERAKFMARYKREEVKIQAWENHEKRKAETKMKKMQMKADQMKARGQEELSNRLATTRRMAEEKRASAEAKLNERAARTSEKANYIRRTGHLPSSFKISCLCGSSFE

SEQ ID NO: 68982 - protein, 145 aa, Zea mays
  Coding DNA Sequence Number=SeqID_25607
MGKNNKRKREPTPPSEEFGDSEYSEEEFSSKSEGSPAPIPLRESSDDSDDSQGLAAEVWTYIRAVERSGLEGSDESEYSSDEEDSDGGDEGEDDDDDGDDDDDDDGDGDGSGSGRGGGDGSRDSTKGSSRGSTKGGGGGRGRASG

SEQ ID NO: 68983 - protein, 118 aa, Zea mays
  Coding DNA Sequence Number=SeqID_25608
MDKICRFGPLRSPRKNDLTNYWALGPFVRPFTSLVDPGDIYPPQAPDLWVDLEVINSKIQGPKNDSLPSFLALITRPTKVWLCACALEVGILDCKTPEFIECTGGAPNGCSPRPLSRF

SEQ ID NO: 68984 - protein, 137 aa, Zea mays
  Coding DNA Sequence Number=SeqID_25609
MDESLISGAISEGTYHVGVSSVGSFVVFLGEPLDVTPETLPTLLGTPLEVLGSPRAFIVVLEVSDEGLPEVGPVMDGGAWLVLKPAPHPLSEVNGEELDNEMVFFDSRHAESKAGNVCPRGLGGLCPLLQDEVVRGL

SEQ ID NO: 68985 - protein, 189 aa, Zea mays
  Coding DNA Sequence Number=SeqID_25610
  Gene Ontology: Mol. function=structural constituent of ribosome; Cellular component=ribonucleoprotein complex; Biological process =translation
  Homolog annotation: Hit_ID=Q10L93; Match level="QueryCoverage=59%, HitCoverage=49%, E-value=4e-54, Identity=92%"; Hit description=50S ribosomal protein L6, putative, expressed
  Pfam annotation: Domain name=Ribosomal_L6; Domain location=99-174; Score=108.8; E_value=1.6e-29; Accession=PF00347.14; Description =Ribosomal protein L6
MTSPLSKNTFGKAICKQAQHEGEQCPVLFTLTGIHSHVTLEFLPSVKPKRNHSMVFLIQSHLMSSMSSKYPGTNIQCRTLTDNIIVGVSKGFDKKLQLVGVGYRAAVEGNDLVMNLGFSHPVRMAIPEGLAVKVEENTRITVSGYDKSAIGQFAATIKKWRPPEPYKGKGIRYMDEVVRRKEGKAGKKK

SEQ ID NO: 68986 - protein, 77 aa, Zea mays
  Coding DNA Sequence Number=SeqID_25611
MTDKWEPLSLQMLEYSPNDEDMWELDLRGGSDGGERRARAAVGVVERDVEEEDSDSPSPEMSVDEPNSGQVGARSAR

SEQ ID NO: 68987 - protein, 66 aa, Zea mays
  Coding DNA Sequence Number=SeqID_25612
  Subcellular localization annotation: CTP_CleavageSite=55; ConfidenceScore=5.16e-01
MEPGGGTAVGAVESLLTSSCFRKGAESRRRHRVGRRGSSSEAEVESVFRGRGRVRAPGSGEAETAG

SEQ ID NO: 68988 - protein, 287 aa, Zea mays
  Coding DNA Sequence Number=SeqID_25613
  Subcellular localization annotation: CTP_CleavageSite=60; ConfidenceScore=5.53e-01
MVAFQGGHPPFKGGSPYLRPQPSWAESSPTHSKVLPYGAGAGSHTSCKPAQSRRSQTAVRGAYNRPAVTSDSPLLPRPTGERGGQPCRRHATAPSGRTSPTPNMPSMEAQAHASCNRHAECFVHATTPPLVPLPRLLDCGTNTATRGDPAAPAWRGGQCGQKWADNNGGGGTSGRRSGRRFAFAIMTASEKGPEKGDTLKRILPREGTRLRASLLIRGSKAGPSEGFDSRLRSRGLYTHYWSEVRRPAPRKGSTAASGYSGSAPITDQGFEGWPPKGSQPPQTPSEG

SEQ ID NO: 68989 - protein, 66 aa, Zea mays
  Coding DNA Sequence Number=SeqID_25614
  Subcellular localization annotation: CTP_CleavageSite=55; ConfidenceScore=5.13e-01
MEPGGGTAVGAVESLLTSSCFRKGAEFRRRHRVGRRGSSSEAEVESVFRGRGRVRAPGSGEAETVG

SEQ ID NO: 68990 - protein, 170 aa, Zea mays
  Coding DNA Sequence Number=SeqID_25615
  Homolog annotation: Hit_ID=Q6J9V9; Match level="QueryCoverage=65%, HitCoverage=30%, E-value=8e-15, Identity=48%"; Hit description =Putative uncharacterized protein
MQAACNCTTGTHPFDFNASSMEAQAHTSWTEKGDTTKRILLCEGSGPRALLLIRGSKAGPSEGFDSHPRAIGLRAQYWSEVRRLAPRKGSTAASGHSGSAPTTDQGFEGWPPEGFDSRLKTRRARDDSGYVRYMAEARATLPRGSGAALAKPGSGQIVDSVNIPARELGT

SEQ ID NO: 68991 - protein, 161 aa, Zea mays
  Coding DNA Sequence Number=SeqID_25616
  Subcellular localization annotation: CTP_CleavageSite=45; ConfidenceScore=5.47e-01
MVAPPPPPSVGKVTGQTRMLFFRHAGKTSSIPPPSGGLAAVVVVVARRRKKYHVVVAVEGHELETPETEQRPGLERLLETTHLELDGKLFVNTQQAPTWRANCRRFDPGGSLDRRVNCRCVSQPRWVGARRNTRGNKKGNHGSCCPTPRADALAVGGYKRS

SEQ ID NO: 68992 - protein, 112 aa, Zea mays
  Coding DNA Sequence Number=SeqID_25617
  Gene Ontology: Mol. function=metal ion binding; Cellular component =nucleus; Biological process=ubiquitin-dependent protein catabolic process
  Homolog annotation: Hit_ID=A2XGS9; Match level="QueryCoverage=94%, HitCoverage=34%, E-value=1e-55, Identity=96%"; Hit description =Putative uncharacterized protein
  Pfam annotation: Domain name=Sina; Domain location=2-105; Score=48.4; E_value=2.5e-11; Accession=PF03145.7; Description=Seven in absentia protein family
MKMLNMVFSCFGQYFCLHFEAFQLGMSPVYIAFLRFMGDDAEAKNYSYSLEVGGTGRKMVWQGVPRSIRDSHRKVRDSYDGLIIQRNMALFFSGGDRKELKLRVTGRIWKEQ

SEQ ID NO: 68993 - protein, 122 aa, Zea mays
  Coding DNA Sequence Number=SeqID_25618
MSVLLFLDVRSQSNSFKTGTSIRGSRAIEKAYVESAKLLCPACPLHYSNRARRRWTRGHRRWCRISRDSGRDAREMLHDLTKSEYELSLTNLVKKAGGGGGGAMPRAQDEGKDPERRTASNN

SEQ ID NO: 68994 - protein, 180 aa, Zea mays
  Coding DNA Sequence Number=SeqID_25619
  Subcellular localization annotation: CTP_CleavageSite=48; ConfidenceScore=5.02e-01
LLLPYADAAHCLSIISPRQQQGGKDVVPFLVAAIPLLSCFWWSMPLVPAASSSLPLPWMSTTSPCFLLLPWISSPFCCPPSSPSRSRFLLHVASAACAACPQQRGQRKLGVADAAWLVRPWRGQANASAWPCVCPRHGIALASGTACAAPTRPLCDPSAAAASPSTCLAASSSTHPSSLR

SEQ ID NO: 68995 - protein, 181 aa, Zea mays
  Coding DNA Sequence Number=SeqID_25620
LLLPYADAAHCLSLISPRQQQGGKDVVPFLVAAIPLLSCFWWSMPLVPAANSSLPLPWMSTTSPCFLLLLPWISSPFCCPPSSPSRSRFLLHVANTACAACPQQRGQRKLGVADAAWLVRPWRGQANASAWPCVCPRHGIALVSGTACATPTRPLCDPSAAAASPSTCLAASSSTHPSSLR

SEQ ID NO: 68996 - protein, 309 aa, Zea mays
  Coding DNA Sequence Number=SeqID_25621
  Homolog annotation: Hit_ID=Q6QP51; Match level="QueryCoverage=52%, HitCoverage=59%, E-value=3e-17, Identity=42%"; Hit description =Putative growth-regulating factor 1
MAGERLLRRAGGCPSPECRRKKRVAGPRGGRAQLAPPSSPARMMKILEAERWLKGANHHKVALLQQQQDEANAGAPHPRARKVEGVPTLCRGGWVPHVMGAGRKQKKPNRCTRSRASDTFDRQSGRRFTSAMMTVSKKAGPSEGFDSRPEHSGSAPTTDQGFEGWPLERVRQPPQSTQKSHQREASSPRTLSNGSGSGKSPAGQGFVYPRDEISPRPSPASGGNCSPGRSYVSPEGLLRQWAHPQLARGPARAGFVEKQPWPNRLSNRPYRMRIQCEDRLSPYPDTHPGKADNGKFSLRRNRKLRLARP

SEQ ID NO: 68997 - protein, 339 aa, Zea mays
  Coding DNA Sequence Number=SeqID_25622
  Homolog annotation: Hit_ID=Q8H6I5; Match level="QueryCoverage=17%, HitCoverage=5%, E-value=4e-07, Identity=56%"; Hit description =Putative RIRE2 orf3
  Subcellular localization annotation: CTP_CleavageSite=22; ConfidenceScore=5.12e-01
MVVPRAGRPRPGFPAPGGRTTRCTPRGRYSCSGTVPFSFLWQERECLPVHFGAAAAHWCSVGGQVVAVVGAEAVVAIGEAVSAEEVASADETVSATCAPGLRLFGFNGWFSSPMRGRERGSFSSSVCPEAITAAVLPPETKVVVAADEAVAGEPPGVCYPAGPLAEEVQQRRLELGQVVRERDQSQSHTAEAESRAEVLGGQPAEAMERLAGVSARAGTLVENLVVRAQARCWRPPSRWRSFRPSRRPRLGQDLPRVETSPRVLLLPLPMSEPAGTVCLKVPRPSVSYFSQKVMSESKRHESRSGRKDFSEENFDAEGVPPLLAPEGGSGFAEARLILH

SEQ ID NO: 68998 - protein, 65 aa, Zea mays
  Coding DNA Sequence Number=SeqID_25623
MAKVASLRSLPELGLGRVEAEFRSLGGTPNYGPRQPPTDHFKVWEPKQHTKTYCRYFQVLKHPSA

SEQ ID NO: 68999 - protein, 344 aa, Zea mays
  Coding DNA Sequence Number=SeqID_25624
  Subcellular localization annotation: CTP_CleavageSite=35; ConfidenceScore=5.69e-01
MSSSSSSSSSSSSGVSGDGSLGSPSLSCLRRDPPRGSVHRVLRDRWQGRLMTPQLLETDGNLDCENQGQSDTRKKKERTLTRDMHLHSGCIKGWVRAPASSLPTVPATRLWRSSAERGTEDICEPSKSTPDTISESSNRRSVKGSTLRRWMAATTPTTERSHETACWHSEPPLMEGDETQHIPQRRGRGGPARRDHPLWLRVTREGTEQAIGNKGLQIVHRDGGERPQVARRNDGYPVGHRQAKGVAAERTRAGDTFGRRGGRRFTSAMMTASKKVCHIVQFRILFLFPFLSLATETGKGDTLKGIFLREGSGPRALLLIRGSKAGPSEGFDSHPRALGLRAHY

SEQ ID NO: 69000 - protein, 75 aa, Zea mays
  Coding DNA Sequence Number=SeqID_25625
MDSSCHPAADNQGHLNSARNGSHLRRDSNGADLQPCPQDEVTAMVTRDSGTADAAGFDSSRICALPGRRILRRAS

SEQ ID NO: 69001 - protein, 121 aa, Zea mays
  Coding DNA Sequence Number=SeqID_25626
MGKAKRDREEGSCKTDTPHAHPRGGGARARVPGSDRRCWSWSAVGFRTPRPPDHTHREIYELGLPDNGHKHNYLYELHLDTAAISSFVPNSTGCLDPLPLDVKVDDACRLGNCHSDVEVVN

SEQ ID NO: 69002 - protein, 241 aa, Zea mays
  Coding DNA Sequence Number=SeqID_25627
  Subcellular localization annotation: CTP_CleavageSite=22; ConfidenceScore=5.53e-01
MAPPVDVVGPRPRLGDVEAPPRSRSRSSMSSWSRSSLSPWVGRGGDRRLKSGLSPSPGIGRSGVRRLPGLSPSPSPGVGRIGVRRLRLPGLSPSPSPGLGGAEFVVFRAEPESKPWVGWSGVRRLPGLSPSPSPGSGGAEFPMVPEAGPDCLSASLYRVAQQSERRRRRCPSVRPGCFLAKTGPRASREFVRRWRGASGETEILRGRLPLPEAGLGRGVIESLEWTDPWLSRTHQAFAALC

SEQ ID NO: 69003 - protein, 350 aa, Zea mays
  Coding DNA Sequence Number=SeqID_25628
  Subcellular localization annotation: CTP_CleavageSite=48; ConfidenceScore=5.02e-01
MAGESKLGCGLCPSLSLKDFHHQCWGGDCRVPGSRTRVASEPLPAPPSATTAGRGSSADEIAGAAHGLTSNSTAFCPSLPHEFGHGRGPHGSSIRPEVIAAAVRPPGAEVVVVAAAGAGDGEPFVGLPLLRRPPQSSGVVRTCGGGTEVPFVMAPWMPVFCSLWLSGPERESLGSVGLAVRGFSCLVKGTPRPLFDEPKPGVAMSARTEAELARKEDLVGQGLAGSSVSGTDAGVDLSRPRVGLMSSGDSWLRPRGDQPSRLLEPDSWRRPWRRWPGRDDEVILQSGDPRTASPSEARSDLAEGVVDAEGAAAPFNCQDPSLQDRIILYLWTFSSVTELSVRARVAFHGR

SEQ ID NO: 69004 - protein, 91 aa, Zea mays
  Coding DNA Sequence Number=SeqID_25629
MAEVKRRPLRLPKGESARTLHLWVSQAQLRYNSPDCPNLRPLCDEPKPEAVMSAWTEVESARKEASSAREHVASLAEEVQQRRLELGQVVR

SEQ ID NO: 69005 - protein, 125 aa, Zea mays
  Coding DNA Sequence Number=SeqID_25630
MEDEPEAEMDLLGFVMKSSSGWWMGRAWANTKTCQAALQASTVVKGGGCGRARRRLLLRPRPGSGEDAIPHEVEPWGRARRRPPSEAEVEAEPWGRVRRSFLLRLRLKLAVVSLTLVGGIAVGAE

SEQ ID NO: 69006 - protein, 69 aa, Zea mays
  Coding DNA Sequence Number=SeqID_25631
MQAACNCTTGTHPFDFNASSVEAQAHTSCNQHTGYYVRKTPPPLAPGPGKGILRKGSFSVKEAGPEPSY

SEQ ID NO: 69007 - protein, 257 aa, Zea mays
  Coding DNA Sequence Number=SeqID_25632
GGCACSRGLQAFARERERERLSVSPSSRAATFPYEGPGPSFYRCKEKAQGNDVPPCSVVGPSPRPGEVVTPPRSRLSPSPGVGRGKDRLPRSRLSPSPRVGRGGDRLPRSRLSSSPGLGEAETVFRGRGGGRAPGSGEAELPMAPKAGLGCCQPHPSGWHSSRSRAGGAVFLSVGEAIWPRLLLREACPSWASGELKVRPLLEEALRRGVNPPGSIIPARGWARARRDRAPGVDGALTCIAPIRPLQLVLMVVTSRV

SEQ ID NO: 69008 - protein, 82 aa, Zea mays
  Coding DNA Sequence Number=SeqID_25633
MEHKNRSSQAHSKIPLQRFEMGEARDVCEREGGVSWVRNGVQIVLTTLGREVRQTVCQSDCQTDLQTGQVDQDRLNRPGGGG

SEQ ID NO: 69009 - protein, 163 aa, Zea mays
  Coding DNA Sequence Number=SeqID_25634
MSTPIRQGAYKGKTMTHDWLMVTITLNQGQSVALPKVAIGRDGPTKGATTNIGSVSRAGQCQDLHGSGANISYDSINLATTKVACRSWEILTRTFHMLRKGSILAPRLNLLATRFMVFRVAANDLRQVLSLAIAKAERDAAYPSSQMHNKAQAVLGQPHTFHL

SEQ ID NO: 69010 - protein, 37 aa, Zea mays
  Coding DNA Sequence Number=SeqID_25635
MRLGWWPMVTTTLFARGNALIKALPKINGKSLEPSFL

SEQ ID NO: 69011 - protein, 61 aa, Zea mays
  Coding DNA Sequence Number=SeqID_25636
MAISAVGGVAGAGLRGKICPVSVATTLTPRYHIDDAAVFFFLTDSFCNHVEAKQDGSLFEP

SEQ ID NO: 69012 - protein, 42 aa, Zea mays
  Coding DNA Sequence Number=SeqID_25637
MAQLLSDGSRPGKVFKDKDVNSMAKALKEYNGEAEYYLGHCK

SEQ ID NO: 69013 - protein, 155 aa, Zea mays
  Coding DNA Sequence Number=SeqID_25638
MVQRVTRSTCSDGVTNSGERDCTILVGLVLGSSSGKLHGLRGKLSEGSDRAEVGGKGFGHGGCPRTALAGHGEVTGAAGKLGRVRRGAGEATGKMAMHEGGLYSRSRARYGRGHGGGRPRAGGARGSGQCALGRSDKCSSGFDLGLASYEECRLE

SEQ ID NO: 69014 - protein, 417 aa, Zea mays
  Coding DNA Sequence Number=SeqID_25639
MEKDHQDAQRKKRKAPLRLVDPCRDAKVVRLNVKGAAPPVTMTPPAVLAIAMKLPSPPRVTETTVSGTEGTGQELSMDDYLVGRVAMFDAQTGLPPTGAEAGQLALVPFTVPADLVGTAKGDTGTSLDPWSKFCATTDGGGELASAVAASGVTGSVARQLRYVSFFAEFGKLRCQVTTFVDQVALGALTLQLISERKRLVGGVELIRRQHTEAITDKSAAENKSRNLLEKIEDDVFKRSAGALYDRMWGPHGRGVIRERVDRARAQAMRDEEVEDLAGLESSVARKDAAVEAGAEELSLLQEGGAEGPAAAGASTQVEKMSVAAQVPATRPVQANLDDNTNDDMLVCGNVVILSSDASEESDVGSWSSEGEELGSLFAWIDDESSEDDLDYFVALDLAVAESPLKVAPLRQRRLRSG

SEQ ID NO: 69015 - protein, 408 aa, Zea mays
  Coding DNA Sequence Number=SeqID_25640
  Homolog annotation: Hit_ID=A2XFR6; Match level="QueryCoverage=35%, HitCoverage=41%, E-value=3e-27, Identity=45%"; Hit description =Putative uncharacterized protein
MDPGTHMMVRTLQTTRVNTSYAPQPRQIPVYPVVVEEVPADLPPVRVENVINLEDSSEEQLPTPTPLAESLAFAAGSSTSASSAPAFQAPAPGGDDPDDSRDGDDEDDDDEDDFEGEHINEEADYAQQDNFMGFGPVVEHYTSMFETGHFPNLLQEVLHALGTYVHPLYETRQVSEPPRACYYITRIHFRVMDAEWVLRVPRVNTRLGPNLVRVFSFVTRWSCSGNGSRAKRVRGSGILGNGLRARVLCPVLDAGDRGFRTLSAHESLIPLSTYVASVSDAARRTLWSLSHTYRQQLQNTRFMHLSQRLRGESQTNIVPGEAGEDRLNTLAGVVAGLNTDLDSATLDLYRVHLELENAHARIAALEAQLQGLDPPEAQVPAMALSPPRKRLRYGEPGSVTRLLKSFES

SEQ ID NO: 69016 - protein, 164 aa, Zea mays
  Coding DNA Sequence Number=SeqID_25641
NRGGRKGGGAYRWRDCSGEVVEDVGEVSGITTVCGSPSERGSQDAREDMGARNWSETHWIAQSTRGGGRPKSGEVDLGPPVKSGWVRGLGKLHGLLAELAEALARLEDGWSGLATMAEALAAMAGGIELAGAKERGLAGEEIWSQEIRSVSLPKPEANPRFCRV

SEQ ID NO: 69017 - protein, 200 aa, Zea mays
  Coding DNA Sequence Number=SeqID_25642
  Homolog annotation: Hit_ID=Q6QP51; Match level="QueryCoverage=31%, HitCoverage=37%, E-value=4e-13, Identity=53%"; Hit description =Putative growth-regulating factor 1
MEIGLFTGGCFATASGNNISTGRLLKKIAYRNKICTSGFLKQPSVEIILALAGFLRKLPVDWGTDRSLENNAIHPVPTTVPTTRVKLTAVSHDLPRVQPRAQQGAPPRPTPGLGLGRRSPPRPTPGLGLSLSVGRSHIIARPRASASGGVTSSPDLGPRPQEDSHPRPTSASTSGEVPASPDLDLGPTTLQGIHHYPTTS

SEQ ID NO: 69018 - protein, 428 aa, Zea mays
  Coding DNA Sequence Number=SeqID_25643
MGKPPMGEPMKGRRLPSLSRTNEAAERVADFDTDICVGDYLVGSDVGQLAVVPPSVVATSPAGAVGAKGASQDPWSTFCASGVIPSAAAAKDVAGSVSQQLRQASQQLLQQLKHAGDFADHVASGALTAEFAAEVECLRAQHADAVQEKSAAESKNRRLTERLAAMEAEKGDLRRQLVEERREANKAIADAQAAQADAKLARAEGSLACQRTEELEARFNSLHNRMDKAEASTRAEVERTHAQFVDAYRELGARTAAFEAPGQEAGLHFLEWLQEKLGVLPTIVTGLMSFASLDTCEGGHKCFVPRGVEDPVLKQSAGVLFDRMWGPHDREKVWERSERAIDQMAHAEEVEDLGKLDSTLSVASGVEVAPPSDAGEGPSTAPATTAPTRAREDLARAPGQTGGDASKAMVETAVEDPAAATRPLQVAE

SEQ ID NO: 69019 - protein, 39 aa, Zea mays
  Coding DNA Sequence Number=SeqID_25644
MGTNGHLDLDMGARTAKAMSEGWRLRLRPNICPPRDQFD

SEQ ID NO: 69020 - protein, 273 aa, Zea mays
  Coding DNA Sequence Number=SeqID_25645
  Subcellular localization annotation: CTP_CleavageSite=51; ConfidenceScore=5.32e-01
AVRAWVLGHAAGNARIARLPGSGLAGPQPGSLVGCSRSAAALGTDAGLARSCARVKAENRLLRRRVGRRHNDSRRRRGRHRYVPSAAAGGLLHTGQISDEQEQGGQTSSERFEKAVRVFAERGKIKFKTRRPPSPFIHRARRFGKPANQQYGVNQRSCQKPPRNYFERGQRLRHLATSSAPDDLVELVPRRANVGAKAKTPPFAHGLRRPRCTKEEKTTGRLTLRLMRHRTKTCDEAVSSCDLVQHGGLRVIRPIDAGHSDTYTYPRTVPLRG

SEQ ID NO: 69021 - protein, 23 aa, Zea mays
  Coding DNA Sequence Number=SeqID_25646
MVQYGWEEGDDKGFPLASQLFKF

SEQ ID NO: 69022 - protein, 34 aa, Zea mays
  Coding DNA Sequence Number=SeqID_25647
MDPSEDGDNIDIEEDNATIRPTKPSHMNFGCARS

SEQ ID NO: 69023 - protein, 177 aa, Zea mays
  Coding DNA Sequence Number=SeqID_25648
MAPSVDVAGLRPRLGEVEALPKLRSSLSSVAEAESEPLVGRGGGRRLRPGWSPSPGVGRSGVRRLPGLSPSPSPGAGGAEFAVFRDLARVQALGRAERSSPSSEAEPESEPWVERSGVRRLPGLSPSPSPRSGGAEFPVVPSAGPDCMSASLCQVALQSARRRRRCPSVRPVSGAAK

SEQ ID NO: 69024 - protein, 203 aa, Zea mays
  Coding DNA Sequence Number=SeqID_25649
MNKNTGIRSAITNGTPVPPPQVRTTPLHGEGPAEQQKTDERHAVTRSSSSDDDDFCPGGSNSGSADLRADAAAKRPPPMPKLVRQGRAEGRRVGGRSVADPGYRASGRTSSSCRGRRRRRERLRSHSRPRSRHGAAAGATDDDRPSLQSPSEGAGYRPRRGRPQLGTLPSLVLVMKILEAEGGAEAAARLTFPHHQAGGLHLG

SEQ ID NO: 69025 - protein, 167 aa, Zea mays
  Coding DNA Sequence Number=SeqID_25650
MRLGPRSAEPTEDANETRRRITGAAEVRRTYHDAGRRRNAGGAMGSRRRRDGLAAAGERRVGYNPREVGAASNRSQVTGASGVKCADGFQRKRVVEKRREKRRVWLQLLLLAARSRPEAEPNSHIKSRRLKLSMAQISSSVGAVVFLVAAPENKDPMTLSVSSNGIY

SEQ ID NO: 69026 - protein, 97 aa, Zea mays
  Coding DNA Sequence Number=SeqID_25651
MILLMDAQYDVTQERLDRVKIARKGLRGTKRRIEPYHAGNQSLAEAWPSAPVGLDTDGLATNHRGSDQNIFGQPIAAQQLARTQPVHPMVQQDDFVE

SEQ ID NO: 69027 - protein, 156 aa, Zea mays
  Coding DNA Sequence Number=SeqID_25652
MMVLTSVATTLFAILLLFSLPSCLHLCAIPLSAEGVGACASSPYSFDTGPDTDSSSGYCTSTRTFHIMRTPSFLPSSDIPFVFSAFTLFFPPNLLPPPTVAAASRPTLVDAGTAQVGHAPGLSPCVPSRRTWWRLPCLGYLADEESRSKILDNQGP

SEQ ID NO: 69028 - protein, 319 aa, Zea mays
  Coding DNA Sequence Number=SeqID_25653
MLDDGHEQSVDDAGKLLVGTFRWAPGAHRAHGQRRGNCEEEFVDTSASGCTGHAGSLAGRPAAAPHCHVALLGLAGRAGAAACRRFCAKPRKWGGRGACIMGEQGENMGKRDMAGWVPQRRWRWATAHARSRHGRADGDAGEAAARTGGPRGRGLGSTVAGLTEWPAAQEGRREEKRGRGLGGPRRGAGPRSRQPRRASRLGETRQAPASCRCFPSSPVFVVTFDKPQGAKDHWLLHKEAQKLLCVRAHQTVRCTIRQSGAPLDSLVHHWQSSSNGAFPAFPWWDTMSRCFTSSPLTPAVSMFRQWLTVPLSPRAKSGV

SEQ ID NO: 69029 - protein, 104 aa, Zea mays
  Coding DNA Sequence Number=SeqID_25654
MHRQSKTGCEKCLKDHQISLRFRDLFGPQNTPHVADKITQMFHLMHAPQGDLQHPELHRMPGNSSVINTGSLTVFFDDGVLDDVVATDDDEEDNITYRLRRYRL

SEQ ID NO: 69030 - protein, 119 aa, Zea mays
  Coding DNA Sequence Number=SeqID_25655
  Gene Ontology: Mol. function=oxidoreductase activity, acting on paired donors, with incorporation or reduction of molecular oxygen; Biological process=carotenoid biosynthetic process
  Homolog annotation: Hit_ID=Q6YUT9; Match level="QueryCoverage=56%, HitCoverage=55%, E-value=3e-25, Identity=83%"; Hit description =Phytoene dehydrogenase-like protein
MNDRVSQEYSNYGDIAAGLRVFVEQLNEKNRGFEDYVSQIDAIDQQVTEFEAVVSMLDKHVALLEKKAVLGKTGQNLRSDPIPTSGHTSQGVTVELKSFGILLQLQAPVPGLLGYCVMM

SEQ ID NO: 69031 - protein, 139 aa, Zea mays
  Coding DNA Sequence Number=SeqID_25656
MDMWLRSGAQGLTALGGATPIRCGEVTGDGVGAGSKGFEVTGVGQDRRGGPDELTSGAPAVRIGLGTRERQRVRSVRIGITPVSNPGHEEGKSGVIRPRQAQRGRGILQTKAGARRGAESTNHRADAENWRGEALASTN

SEQ ID NO: 69032 - protein, 54 aa, Zea mays
  Coding DNA Sequence Number=SeqID_25657
MASVNPAVAEAEAEAVGRRDELSESLAELFTNVSLMVRGELQLQTLLEKNGSII

SEQ ID NO: 69033 - protein, 44 aa, Zea mays
  Coding DNA Sequence Number=SeqID_25658
MAQRLTRFACSGGRRGSGENDPALLAEAFLGLCSEQSRPQDWSV

SEQ ID NO: 69034 - protein, 257 aa, Zea mays
  Coding DNA Sequence Number=SeqID_25659
MASPTPADGGDTRLSFDYLSREGFSSILWEVLCSAGYPTPPVYMVQLYEEHQVPRCRVWLTLESHPLQPGWRSLDAETVKFRADDTTETATLKALTTFCGYHPLEMMMHPLGLFPAEKRDDPMWCNRVSHVKDVWAMHPDQVGRITIQCMSALYRLQALQSDAMTHLTGLAQTEKTTLDDREDFVVDLSSELVEKDLQVEQMSNRIQALEHQVEIRDNTIEVLENQLHDVQEELEEANTHIEMHHQDMNAMEACSEE

SEQ ID NO: 69035 - protein, 140 aa, Zea mays
  Coding DNA Sequence Number=SeqID_25660
MDRHAPWLEHMGARFSKRGDEESEDQLGEVLGITTARISTDGIFYCLTPARSRSGRLPDAKTGPKFSKECCRKPFSHDVGELVRGGHMENPNFTKGHLFADEVNVDLDVLRSLVVDGVGRHVDGADIVAEDNCGRRQLDV

SEQ ID NO: 69036 - protein, 66 aa, Zea mays
  Coding DNA Sequence Number=SeqID_25661
MGLGVCGSLCQDDDEEDGYDYAYGNGKLYSFRLERVALGVIYAQVKKENGVEADLREFQDFDEFED

SEQ ID NO: 69037 - protein, 55 aa, Zea mays
  Coding DNA Sequence Number=SeqID_25662
MVPLPPIASSPSDNNPMTLTPFSICNYQILVITILPSKCIERMLALLRQQAARGS

SEQ ID NO: 69038 - protein, 68 aa, Zea mays
  Coding DNA Sequence Number=SeqID_25663
MGLGVCGSLCQVWVGYEIDGSGYDYGAGYIELITWVNARLSGRGRHRCLHPSATANSHTAHFLRYNGT

SEQ ID NO: 69039 - protein, 122 aa, Zea mays
  Coding DNA Sequence Number=SeqID_25664
  Subcellular localization annotation: CTP_CleavageSite=37; ConfidenceScore=5.14e-01
MQPRKAGPLAKKCDKSLQASANTPFEARGLLSGTIIRGTPKTPNLSWPRLRPRDTIPPSPSPASGKDSRPQRIHVCTRVPSNNGCATDSPEAQLGQASRRSNLGQIATPTDRIVGAFNARVA

SEQ ID NO: 69040 - protein, 197 aa, Zea mays
  Coding DNA Sequence Number=SeqID_25665
  Subcellular localization annotation: CTP_CleavageSite=46; ConfidenceScore=5.03e-01
MLPTSSAAAIAAAFGHPGCGGLPSGSCKRRTLRFGGGHAGEEAIPTCHDRRGGEVGWRSNPKFRKQGVYPIFVFNFLPAQDGIGVKSLEEEQGLGPEAQEEEHNITIISVKGSSLQVTMIQLHSDTQDVAAFHQAPASVEPYASVEATPEKKPYPPATVAEEVRLAGARTRYHIPLAVADVPVQGESATEDPPLCVA

SEQ ID NO: 69041 - protein, 134 aa, Zea mays
  Coding DNA Sequence Number=SeqID_25666
MGKSKKGGSSSHHSGDKRKREPSPPSEDFGDSEYSDGGVLLRVRGVTGLRLSPGKGIAAEVWTYIRAVERFGLEGSNESEISSDEEDSSDSSEEGSGGDGDDEDEGDGDSGKGDGGSGKGSSGRGRASGKAPLA

SEQ ID NO: 69042 - protein, 230 aa, Zea mays
  Coding DNA Sequence Number=SeqID_25667
MDLARSLMEGRHILGVRMQLLLRRRSWWAASGVWRDGQGDTNAERQRSEERADLESESEERTQRHGAVDGPSMGDKELGDEVGRRQMLDKAGESERTWTNDCVELKKPFGTKGNMHEQDPKFGIISCGAELTRLGATDLGVEFIDTAAHVPYRALTAANPPALPAPRPAARPLTLPTAAPPSPSPTAARQRRLPHKDARELSKRLIDEIDVFDGVPLGLIYSTVRRYMRI

SEQ ID NO: 69043 - protein, 229 aa, Zea mays
  Coding DNA Sequence Number=SeqID_25668
MGNGHEPVQGRPPNDGIKGEVDLCDIELDVFRAEVSLRPKCNRERYAPEGIYRLWAHPGEWARGPQPGPRDLQLLECCMVDDIEVSPSVNQHVVQPHVGDNRGGDEWQYAGPRHVVGAVGCPEGDGGAPPPLVWSSFGDPRDHQKNLPSQRLDTPVGDELPASAVHYIQLLAVVVVVAGVRISDENVFKVSLGQLLAKVLSLHSRGFFVGPLLARPVARHPWRTACAAR

SEQ ID NO: 69044 - protein, 196 aa, Zea mays
  Coding DNA Sequence Number=SeqID_25669
MTRKEKGLVKKKEHLDQREEVISAFHNKLKAYNMMLEKQRHEQAAVEAKLQQELDDKASNIARIEESHMAKDASLEKQATDLAWQEKDLAFREEMWERRNKLLVEFELEAEEKEKRLEGKERELEELLKRRRRPRAPGGGASISDALLVLDSTVERLRRLDQILGTRLEAEGPVADTEDAAREGVQDVVDVVVGRF

SEQ ID NO: 69045 - protein, 509 aa, Zea mays
  Coding DNA Sequence Number=SeqID_25670
  Pfam annotation: Domain name=Transposase_28; Domain location=1-130; Score=-65.5; E_value=0.097; Accession=PF04195.3; Description =Putative gypsy type transposon
MAMLVRPDHFQTEEELDTVRRLLGWGMPVFAERIRAGTTPLGDLATGEFVLFVSYLFYGLALPISPFFLLLLEVWEGQRPPWAYYFQTRSDPTVTYIATLGGARWENWRSVWVIASAEANDRLALPGDGPRLDRKGITGEAFIPKALIPPQGISPLCDNPRLRSAVLARLPTLDESGVAIRQTGRWDPHQGIHIPGVSVRGSQPADVGSRAPPAAPSSSDKGKGPASGSAAPGATGSSEGVRRHRLRRADGSFISDLPLDSDSPQKRQKTAGGTREAELQGQRQQQQQEWQQQQQQRQWAPRFQGHWKVLIRSLPIRASSSSVFKDAPPPPVAMPVGGSGSQQHTSAGNVAGDPSAATTASPASVSNTPPAAAEEVPAAFAPTMRGDAGAEVAPSGPQDLPATIEAMLSGSQVPAGGPEAAVPPTATVDPTAAILLNTPLAVGVGGVSSSIPPPTPEEPEVILGRPLRFGIEPEAMPTPLPQVLSRSHQALWEIEAVILREWEALETEH

SEQ ID NO: 69046 - protein, 196 aa, Zea mays
  Coding DNA Sequence Number=SeqID_25671
  Gene Ontology: Mol. function=ARF guanyl-nucleotide exchange factor activity; Cellular component=intracellular; Biological process =regulation of ARF protein signal transduction
  Homolog annotation: Hit_ID=A3ALW0; Match level="QueryCoverage=43%, HitCoverage=25%, E-value=2e-26, Identity=57%"; Hit description =Putative uncharacterized protein
MKESPRTLWLKFTELSGVHRTVRCANSVISAQSTGDAWPEPTVTRPHWTVRCAKWTAAAMVGFAKQGKKSRTIHVRHSRPPAPPLHQPRRATASPPPPPGSEFENNLKVIKQCQAGSIFTESAKLPDEALQNLGRAVIFAAGFCWDILALLATVNLQCFATFWPPLLECFIAVSQLPLFAPRCPCTITAAPRHRLP

SEQ ID NO: 69047 - protein, 113 aa, Zea mays
  Coding DNA Sequence Number=SeqID_25672
MDLDAAVEEEERRLEDHNEVQDARYFLGFGDTHGDPIEVDTVVSSQIGTGTRSTSPPVPDPSQADPDASGTKMKKRSKWWNDFDELTKTVDGKKVSVGEREMCPWAISKYFGD

SEQ ID NO: 69048 - protein, 115 aa, Zea mays
  Coding DNA Sequence Number=SeqID_25673
MGNSKEGGSSSHHSGDKQKHEPSPPSEDFGDSEYSEEEFSESEGSSAYASPPGIAAEVWTYIRAIERSRLEGSDELEVSSDEEDSLDSSEEGSGGDSDDEGDSGSGRASGKVPLA

SEQ ID NO: 69049 - protein, 42 aa, Zea mays
  Coding DNA Sequence Number=SeqID_25674
MMMDLSKALIGSTSEKMYLCQDLVDVGLMIEDPLTGHMPRHG

SEQ ID NO: 69050 - protein, 571 aa, Zea mays
  Coding DNA Sequence Number=SeqID_25675
  Gene Ontology: Mol. function=heat shock protein binding; Cellular component=chloroplast inner membrane; Biological process=amino acid metabolic process
  Homolog annotation: Hit_ID=A2Z0Q5; Match level="QueryCoverage=43%, HitCoverage=97%, E-value=5e-82, Identity=61%"; Hit description =Putative uncharacterized protein
MAPPVDVVGPCPSLGEVEAPPRTRSSLSSKVEVESEPSGRTRRRPSADARAESEPWGRAKRSSSSFGAEPESEPWGRAKRSSSSSGAEPESEPWGRAKRSSSSSGAEPESEPWGRAERSSSSSGAEPESKPWGRAERSSSSSGAEPESESWGREKRSPSSSGAEPESEPWGRAKRSFPWSLGPDLAAVSLTLSSGSVVGAAQAALSSCQIGQWSGEATFALNAPAIWSVGVAIWPRLLLGEDWASGEPKLCADGGYQLRFRSLEGHGFNPTSCTVFLTFYADLIKWIDGFPPHPTATPTPPRRVVAAADMQAAAAFNQAAFTVRSLHRPPRPLHLAVAEDAFAGIRGAPLTRPRCCGSLSVGVGSYDSEHTPVFPRQQSWDPYKLLGVDQDASEEEVRSARNFLLKQYAGYEESEEAIEGAYDKIIMNSYTDRKKSKFNLKSKLKEQVEGSPSWLKALFGYFEVPSLEIISRRFAFFAFFAGWSIATSAETGPAFQLAMSLASCIYFLNEKMKNLVRASTTGFGIFVGGWILGSLLVPVIPAFVIPPTWSLELLTSLTAYAFMFVGCTFLK

SEQ ID NO: 69051 - protein, 153 aa, Zea mays
  Coding DNA Sequence Number=SeqID_25676
  Gene Ontology: Mol. function=oxidoreductase activity, acting on single donors with incorporation of molecular oxygen, incorporation of two atoms of oxygen
  Homolog annotation: Hit_ID=Q7EYC9; Match level="QueryCoverage=44%, HitCoverage=21%, E-value=1e-15, Identity=61%"; Hit description =Putative 2-oxoglutarate-dependent dioxygenase
MDDPVQPMTTASSPAQAASPTACGCRGMVEKMTLEGLGVWDERSVGSHLESLTQGVRLSRYGAPLDKGTGMSMKEHRDDTMVTGIVQHDVEGLELQCRPRTGAGPTTLATRTRSPSSPASSSGYGQRQPRCGRWTSSSSTVTDFCGTRTTPAH

SEQ ID NO: 69052 - protein, 121 aa, Zea mays
  Coding DNA Sequence Number=SeqID_25677
  Subcellular localization annotation: CTP_CleavageSite=79; ConfidenceScore=5.50e-01
MKLQEPSFQAKNLGGLGNFSPESRHRRTPRLCSPVVRLRHGSSGFTFSGDGAVVMVVRHRTRVGWRKGKDLGPLMRICSAEIRSGEERNLAVGWDKQTTEDPGAQQIEVAEQELIEGKLCP

SEQ ID NO: 69053 - protein, 72 aa, Zea mays
  Coding DNA Sequence Number=SeqID_25678
MAGGREQRSRHQPSSRPIRGQQENPLSRREDNAPDRRRFRREQWATLRLHRNNCDKKAGTGKGGYPEKDPSS

SEQ ID NO: 69054 - protein, 118 aa, Zea mays
  Coding DNA Sequence Number=SeqID_25679
  Subcellular localization annotation: CTP_CleavageSite=15; ConfidenceScore=5.31e-01
MAGGPSRPLMATAVSKGKKRGRRNGRSDAPLTPRMNGRVVSGLQGAVGIGRLGGWGWVLGGAASRRRGSSLAHGTDAQGISGSIYTRHLVCMFDVVVRSRCTHCGTSNGVGDEELDQR

SEQ ID NO: 69055 - protein, 411 aa, Zea mays
  Coding DNA Sequence Number=SeqID_25680
  Gene Ontology: Mol. function=transferase activity
  Homolog annotation: Hit_ID=A3A9P7; Match level="QueryCoverage=92%, HitCoverage=97%, E-value=1e-54, Identity=39%"; Hit description =Putative uncharacterized protein
  Pfam annotation: Domain name=Transferase; Domain location=46-411; Score=-137.4; E_value=0.00028; Accession=PF02458.6; Description =Transferase family
MDGGAFTIVVYNAIGGADDGTCVHMEPTPAAPRIHLQSPQTAVPTRAVEPGRTRRITVAAPPLPPAALQRRTRVVLYYRADAAGADGRASVRLWEEAMWAKESLSEAVADHPEMGGRLRRHADGSWEVKLNDAGVRFTEATAEATLDEFLATAQDKDRAPSWEAALAPWADVNAEDPDVSALVYVQLTRFQGDGGFAVGVSCSLMLSDPLSLARFLASWARTHARMKAQNDAAAHPLMQYASYFRRPDARAARALVKSVPLDAFASADAAETVLFRARPTMLPAGAGAPPAPDHRALAVACVAQARERLGDGKVVPPQFPLVVFDCEGGVSVETCAAAAYGQPPSPSGGGRYKIDVALWEELGLEELVLRDSKPLHVSYSILGAGCDGLAVAMPAGAAGELLVAATVPKPK

SEQ ID NO: 69056 - protein, 300 aa, Zea mays
  Coding DNA Sequence Number=SeqID_25681
  Subcellular localization annotation: CTP_CleavageSite=22; ConfidenceScore=5.13e-01
MPCSDMSSLLPLLNPLSACFIRRSMRGSSPCLVGILGGFWPPEAEAAAKRLASRLASSGRASHRSRPRSGNQKLPDRRVRWKPGYSRGFPPPPDRRVVSKPQLSASAAASSSATSGRGPRPQSPPRHSLLRILPAPPPVRPQGWTPPVSELVVFADHGELGVCLCCITTSTPTKMDSADSIADKAIGRMQEIANKIFSVARETIRPGRGLTSFDATKLRVALEDIACMLEQDSLVLQENLDIVNNVNNPGDSSYEPSTLSSPPPADDDLTPDWDFAEHFKNFWGVEYDSDQMPSFSDNEV

SEQ ID NO: 69057 - protein, 135 aa, Zea mays
  Coding DNA Sequence Number=SeqID_25682
  Gene Ontology: Mol. function=sequence-specific DNA binding; Cellular component=nucleus; Biological process=regulation of transcription, DNA-dependent
  Homolog annotation: Hit_ID=P24345; Match level="QueryCoverage=40%, HitCoverage=20%, E-value=3e-12, Identity=58%"; Hit description =Homeotic protein knotted-1
MAGTELSENEEQRRMTMRGYTREEGARLIFEDSQGRRREGALIVGGDVEAIKAKEVEARQRPALGGLAAEPETELDQFMEAYHEVVEPQLNSFSISGRSMRNTLSSEGWRSTTPTNISQRWAKMAAWRMEWGVRC

SEQ ID NO: 69058 - protein, 135 aa, Zea mays
  Coding DNA Sequence Number=SeqID_25683
  Gene Ontology: Mol. function=racemase and epimerase activity, acting on carbohydrates and derivatives; Cellular component=soluble fraction; Biological process=carbohydrate metabolic process
  Homolog annotation: Hit_ID=Q6ZDJ7; Match level="QueryCoverage=41%, HitCoverage=13%, E-value=4e-24, Identity=91%"; Hit description =Putative UDP-glucose 4-epimerase
MWFLLWAAPNQWSFSSLSYSCLRNIQWLPQKAQCQAPFQFVIGYLSIPVFHTCKYFNPVGAHPSGYLGEDPRGIPNNLMPYVQQVAVGRRPALTVLGNDYATRDGTELRRRLMSKREGPSKSIVQDIEHALIISK

SEQ ID NO: 69059 - protein, 680 aa, Zea mays
  Coding DNA Sequence Number=SeqID_25684
MEVVELVPCARNKWDNWNEFWFYIAEGAVEDHEGLPVSEMCSHFYSAYPPFEVAEEDADEGALRCAVGLSSRRDLVEEFVAYGVWPLAHGWVLGEVCPRQMPSHGGKMVRSPAFALDLQSRDPAAFVREVEDGAVRIVGRYVPRTEGQRSWDIRGSNDRLNRVFELNRLSYNGYPGHDDVDRRGKKPVRVDEDMRGPGGKDVFARAPGVFGADAEVMDKDRQGAAQKRQTVVRLHEARPKRQRGAAKAAAPGGGKPPLAAKSDVPASSKAPEAAAGAGGSRPAKAVPASGRVSEVAKAARGLPSPSKGVTDFATDISVDDYLGGSDEGQLVIVAPAAVTTAAAVVPKAKGGALGAGGEMSALAAVRDEAGAVSRRLKEADDFADRTTSGALTAVVSAEVERLRTQHADAVREKSAADSKCRKLADKAEANLARAEGNLARERAEQLQERLSALESRVERAEAAARAEAERTRKQLMDSFHELGARTGDFEVPDREPGLRCLEWVQEELQALPTIVEGFMSYASLAARGERVDDFGALNSALPDPEPIPAEAVSRAALEPPPEIVEGAPDALAAAAAGGDPPPETAEGAPDAPVAAAPRAEDPATVVAERQRRRRWRLPRRLGLRRWRSGSVEWTEESSEEDLDFFAALDVAAAEASPHAADAEDGWPAGTVVFASRRKYR

SEQ ID NO: 69060 - protein, 63 aa, Zea mays
  Coding DNA Sequence Number=SeqID_25685
MARVACTLHGKRLDGGVSVLSVDVNLIWTDWQTGSDRGEQCRNRLNRFLNCCTDFEKTEVKPG

SEQ ID NO: 69061 - protein, 106 aa, Zea mays
  Coding DNA Sequence Number=SeqID_25686
  Gene Ontology: Mol. function=serine-type peptidase activity; Cellular component=phosphopyruvate hydratase complex; Biological process =proteolysis
  Homolog annotation: Hit_ID=A2WVG2; Match level="QueryCoverage=67%, HitCoverage=13%, E-value=5e-22, Identity=76%"; Hit description =Putative uncharacterized protein
MAVTITWVKARQIFISRDNPTVEVDVGLSDGSYARGPYPAAHPLHRYYRESMPFGSKAKAYIDSKSLAYLTAKQALAYFAVLLTDLKRNLSAEGSPVVLFGDSYGG

SEQ ID NO: 69062 - protein, 159 aa, Zea mays
  Coding DNA Sequence Number=SeqID_25687
  Subcellular localization annotation: CTP_CleavageSite=44; ConfidenceScore=5.60e-01
MAAAGKQKQRSNRLQAHVPSWGSRRALSHGVKTTRPCSIPRTARATAAPQTTHPVALTPRQGSRHLWQAKRTTLYLRHNNRVKKGTGKGDTPKGILLCEGSGPRALLLIRGSKAGPSEGFDSHPRALGLRALLLVRGSKAGPSEAFDSRLRPLGLRAHY

SEQ ID NO: 69063 - protein, 39 aa, Zea mays
  Coding DNA Sequence Number=SeqID_25688
MTPEEILGKFVLGTFGIRRYLRTQVGITVNQNNTKVYPS

SEQ ID NO: 69064 - protein, 38 aa, Zea mays
  Coding DNA Sequence Number=SeqID_25689
MGVLHLLLTPMGVLHLLLTPMGVLHLLPTPMGIGGWDG

SEQ ID NO: 69065 - protein, 73 aa, Zea mays
  Coding DNA Sequence Number=SeqID_25690
  Subcellular localization annotation: CTP_CleavageSite=52; ConfidenceScore=5.44e-01
MDSASPDPKARPRPRPRKMVSASPDPRARPRPRPQKESRPHPTPTSASGGVSASHDLGLGPTTPQGRSSLPYP

SEQ ID NO: 69066 - protein, 163 aa, Zea mays
  Coding DNA Sequence Number=SeqID_25691
MVPAQGVALANKAVMTGGAQMHALTYREALSRAALSKALLTLLAINTHDLLAHIASFDYRPGMIDELDAQMGFVVGGTILMLLTVVFYEIQILGASRHRSHPSHNQEPTSVPSSRCAQRQQVLARHHCRKRRTQSRDVPRLKGPTSKLWVPGPPHESARRADG

SEQ ID NO: 69067 - protein, 421 aa, Zea mays
  Coding DNA Sequence Number=SeqID_25692
  Pfam annotation: Domain name=zf-CCHC; Domain location=347-364; Score =11.9; E_value=0.024; Accession=PF00098.14; Description=Zinc knuckle
MEDLSTMTPIIVIGKIAAFEMSRKMGRQEEPTSFRPYARKGKKKAPLQVSQVKKRKKKTVMIVKIINHQHHPPRTKKQSDVSERSRIFSLTLIGKNKEREDASYAGKRANSGTTVQIWSYPQRGGATARRLQVSKLVMTLQAKMNLQGRAATDPHHDHHGDHTSALWQEAQLKTLKNKLIISQDDYKCFLEKFKTFANLNYELSTKIEQLESNAPSLATDDSLIKKNEKLKAKLASTQEAIENLLGKMEIISIHTNELTIKLENIGSTPGASLVEIPEFIKKDSSTSCFDLIDYSNPCNQVLVKNVIIETCSDEIAMENEQLEQEVARLGKDNTTTGVNKPVEGETVICRLCHMEGHKSYQCKAKTGDKQKQKLKQKPTSKISNTYINKVDKKVATPYLFKKKKNGKVIAIKANKQANKGK

SEQ ID NO: 69068 - protein, 193 aa, Zea mays
  Coding DNA Sequence Number=SeqID_25693
  Subcellular localization annotation: CTP_CleavageSite=85; ConfidenceScore=5.51e-01
MAGAAATSPMVLAAPLFKLATPPRSPLRDPASPLAHALDFPGAAPCSIRASLAPAWNSPSLRAELGLCSSASLALRQPPALSHPVSMSVPTRCLRIVIARTKESPREDVKRLDGGVREVRVAPSKRSTNCLNRKIITDIVDSSQLLERCLIRYRVALFKLVIFLSLCIHVHNASHLGMIINRVTRKATQVDPG

SEQ ID NO: 69069 - protein, 102 aa, Zea mays
  Coding DNA Sequence Number=SeqID_25694
MPPNCDRADKRIPKRRCPKIGCWCLIHYHVALFRLAIFLSLCIHVHNASHLGTIINRVTRKATQVDPRIMRRLDISARRRRQSDQPEDGQTKQVSEQRRVVK

SEQ ID NO: 69070 - protein, 114 aa, Zea mays
  Coding DNA Sequence Number=SeqID_25695
MREPRAREEGSSLAELEGRGQLSETMAGSKHEEGARAQGTGTEPRELRAERRGSSMAGSRRWARGKSGSRMRHWRAGQGGGHGSFKVERGARQGEDKKAGEGGGLRKKIRGREC

SEQ ID NO: 69071 - protein, 262 aa, Zea mays
  Coding DNA Sequence Number=SeqID_25696
EQEQQDSSPSPQREVESERPPSPAPQPEMPHAPAQGIPAAGGDPDGERDDDVAGGSSSHDTELSEESEAEGWITRPITREATRGCHFHDALDTLLRWAFDRHTWSIEYRCVVYQHRRELYLDQWEATCLALSQYWSLFSGVADGLNLKYYPRRSTDSAGGVIALPVGEGNPRLNNMVNLAVVLNTELDHVLDELGKVQAEVAELRDESAARHYLDGGSPAPVGIQHPYRSPPRGRFDYGTPDYRTRIDLDPWIDRVGVFNNA

SEQ ID NO: 69072 - protein, 168 aa, Zea mays
  Coding DNA Sequence Number=SeqID_25697
MHDFLLELALLDCSGWLLGQEDELPSCYVAGIDFLLAGYSDSTPAAAEETASGTAAAGSDADAGAGDQPILSKLVLPFGIRVDIFWGITRQLQKHVHVLADGQGTLLQGEKLLLPHYHQSLRHMVATEVVPEFFPSDGFTVGMCGEALVAPRLALEAEAVLTLVAPAA

SEQ ID NO: 69073 - protein, 99 aa, Zea mays
  Coding DNA Sequence Number=SeqID_25698
MAGKGSAGRSMVAGDRVAAGTLSAGQTPVVSGAGFWELRAQEGSRVYSSLAQDCNLIEGEFILVPEQGGAHKVAQDLAPEPTLEDLPALALEGKPQFYA

SEQ ID NO: 69074 - protein, 106 aa, Zea mays
  Coding DNA Sequence Number=SeqID_25699
  Homolog annotation: Hit_ID=A2XB09; Match level="QueryCoverage=65%, HitCoverage=44%, E-value=1e-27, Identity=88%"; Hit description =Putative uncharacterized protein
MELSSFGAWLKFISHLRYIWESEELRRAMEPVDLIRRVKEIEQEAYGEHGMATDEDPKQTAAVDLSKRLKDLRAGNDGSSQKVSHPGFKEQSRVHLIHAPRRQHIQ

SEQ ID NO: 69075 - protein, 103 aa, Zea mays
  Coding DNA Sequence Number=SeqID_25700
MKYSKIQDDDPIYVAGIGGDRNLRRYPRCNVTDGLVGLAAQLERPKDFWPIHSFAAAAWSVSVSANHPDCHLAEFTPEKSLGIAVIFASKGSKSKSDVGPKGV

SEQ ID NO: 69076 - protein, 113 aa, Zea mays
  Coding DNA Sequence Number=SeqID_25701
MGKPIPSLLMLLLSRGRVPLDCPTRWQDGRPSHSSNHILQRTLTALVPTITGMRDHVSGRVRGYVHCQVHSVGCWAHASLRRRSCVKKQLRLKSSPGNGRRFLFIELRRCKPT

SEQ ID NO: 69077 - protein, 67 aa, Zea mays
  Coding DNA Sequence Number=SeqID_25702
MEPGGGLPAADRSGVLLDLWLGAGRRRRWEVGWFFGGYGCWSDLAAILPPGWTIEWDPASAEEEHEE

SEQ ID NO: 69078 - protein, 116 aa, Zea mays
  Coding DNA Sequence Number=SeqID_25703
  Gene Ontology: Mol. function=structural constituent of ribosome; Cellular component=ribonucleoprotein complex; Biological process =translation
  Homolog annotation: Hit_ID=A9P9W9; Match level="QueryCoverage=60%, HitCoverage=31%, E-value=5e-15, Identity=61%"; Hit description =Putative uncharacterized protein
  Pfam annotation: Domain name=Ribosomal_L30_N; Domain location=14-78; Score=45.5; E_value=1.9e-10; Accession=PF08079.3; Description =Ribosomal L30 N-terminal domain
MSSTEAKAVAVLESVLRLEKWAAYKKALADRKKALENRKIIFTRSKQYAQEYDTEEKELVQLKHEARLKGGFYVWHGGEGQRKRLHDSKTKKEKKMIRKFNLKEHNACAATFYACL

SEQ ID NO: 69079 - protein, 145 aa, Zea mays
  Coding DNA Sequence Number=SeqID_25704
  Gene Ontology: Mol. function=RNA binding; Cellular component=nucleus; Biological process=rRNA processing
  Homolog annotation: Hit_ID=A2Y0X0; Match level="QueryCoverage=57%, HitCoverage=34%, E-value=4e-27, Identity=68%"; Hit description =Putative uncharacterized protein
  Pfam annotation: Domain name=Fibrillarin; Domain location=41-145; Score=-17.9; E_value=5.9e-07; Accession=PF01269.8; Description =Fibrillarin
MVVGATVATDLVVVEVREEKGGRGGRTPRGGRGGGMNGESKAVVVVHKHAGVFISKSKEDALCTKNIVSGDSVYGEKRASIQGVEPPFRSKLATIVLGGVDNIWIAPSTRVLYLGVASGTIVSHMSDIQNPFPFIVHMCNDRKKR

SEQ ID NO: 69080 - protein, 200 aa, Zea mays
  Coding DNA Sequence Number=SeqID_25705
  Subcellular localization annotation: CTP_CleavageSite=55; ConfidenceScore=5.31e-01
RRQRPAPVFPAIQLAGDRSKPPQAPPRGETLVPVPNFPYCALCSANFTFAGARPRQSTVLARWLADLAQSRSPELVPGSPLSLLKPPKALVRLKSPPHGRNRSPELLWPARDSLTVVLPSLPMGFMASSSPLSSPLRQPQLRRLHRRGEERRRFAHVCFHRSNFPRPILIAQHRPRDTTSCRGDAGNMDDFKEFQEYDEF

SEQ ID NO: 69081 - protein, 132 aa, Zea mays
  Coding DNA Sequence Number=SeqID_25706
MGSSRVSKRIYHVSVCYDSTQTQDKSIHDGRHGHDEGCRCSEATLKGSFDSIAEKGTDLKGKGLFSPHRFIYKSIVNYLRISPQHWRPPRVNAFFDHLRQALTFDMPPKKVSALGATALQPLDPNQEIQSIT

SEQ ID NO: 69082 - protein, 246 aa, Zea mays
  Coding DNA Sequence Number=SeqID_25707
MHQGSLYKGYVVYPWPFTLVVKIGSVQPRLERDDDLWMARIRCTARKSVIHFLPSRLAERPLCRTVPGQSSHLERLHRRLHEEWERRCQEQEQQDSSPSPQREVESERPPSPAPQPEMPPAPPQGITAAGGDPDKDEDNDDAGGSLSHNTELSEEPEPNGWIARPITHDAALGCHFYDALDTLLRRAFDRHTWSIEYRCVVYKHCRGLYPDQWENSEIQTLSQRSGMFTLILNSNPNGPIDKIVSN

SEQ ID NO: 69083 - protein, 123 aa, Zea mays
  Coding DNA Sequence Number=SeqID_25708
MLVDHTTILNGPSVSVEGPTQQGVESIVKMTTASGVTSDGLGDPSFRLLLLQELRAMTQTATVVVVSVSVRVSSSSRDALWWYRGHLWLRRRGGLPPRLHLLLRRGGRVLLLLLLASALLLLV

SEQ ID NO: 69084 - protein, 637 aa, Zea mays
  Coding DNA Sequence Number=SeqID_25709
  Gene Ontology: Mol. function=oxidoreductase activity, acting on paired donors, with incorporation or reduction of molecular oxygen; Cellular component=chloroplast; Biological process=carotenoid biosynthetic process
  Homolog annotation: Hit_ID=Q84VG9; Match level="QueryCoverage=76%, HitCoverage=100%, E-value=0.0, Identity=91%"; Hit description =Lycopene beta-cyclase
  Pfam annotation: Domain name=DAO; Domain location=216-503; Score= -20.4; E_value=0.00024; Accession=PF01266.15; Description=FAD dependent oxidoreductase
  Pfam annotation: Domain name=Lycopene_cycl; Domain location=216-614; Score=629.1; E_value=3.8e-186; Accession=PF05834.3; Description =Lycopene cyclase protein
  Pfam annotation: Domain name=Pyr_redox; Domain location=216-352; Score=-10.6; E_value=0.044; Accession=PF00070.18; Description =Pyridine nucleotide-disulphide oxidor
  Pfam module annotation: Pfam domain module=DAO::Lycopene_cycl::Pyr _redox; Domain location=216-503::216-614::216-352
MDGGCCVGSGVRATERNGDGSGRAPREAWSTGWARAGTAQAMPPALGTQGRGGGCATAWAWARSKGGGSAGVASVGKREAGARRGHGRPKVIFKKHLRCLGEECHNGIGSTVVPPLKAAAAYHHRLRLRIARLRRARIPPTFHQASTMATTALLLRTHHHPCKPPAPRASVLCRATAGMAGPASAAALRSLAPPTRPELLSLDLPRYNPAPARPVDLAVVGGGPAGLEVAQRVAEAGLSVCAIDPSPAVVWPNNYGVWVDEFEAMGLSHCLDTVWPSASVFIDEGGAKSLDRPYARVARRKLKSTMMDRCVANGVVFHQAKVAKAVHYDASSLLICDDGVAVPASVVLDATGFSRCLVQYDKPYNPGYQVAYGILAEVDAHPFDIDKMLFMDWRDSHLPEGSEIRERNRRIPTFLYAMPFSPTRIFLEETSLVARPGLAMDDIQERMAARLRHLGIRVRSVEEDERCVIPMGGPLPVLPQRVVGIGGTAGMVHPSTGYMVARTLATAPIVADAIVRFLDTGTGNGMGGLAGDALSAEVWKQLWPANRRRQREFFCFGMDVLLKLDLEGTRRFFDAFFDLEPHYWHGFLSSRLFLPELLMFGLALFGNASNSSRLEIMAKGTVPLGKMIGNLIQDRDG

SEQ ID NO: 69085 - protein, 130 aa, Zea mays
  Coding DNA Sequence Number=SeqID_25710
MFTSLVREQGGKEEVQEWANEIVGDTHIGKRRQDLVYQIGKEKRVKITDQIEEDEDNDDNTTHPSAGDDGNHGDAGLYGEGGSGAGDWRSIGGPHYGYEQVSAALTYHYDRLKQYHDPYNMPQYYHNDSS

SEQ ID NO: 69086 - protein, 143 aa, Zea mays
  Coding DNA Sequence Number=SeqID_25711
MNNRFTKIREQGSKGKKSNPLVLEELLWENEWVQESEEDEELWSAVDEVLGATQATQGRNLPRASAARGGRTYSETYVRSRKRQKVAVAQDLQQGDGSDSDSHNENDHQKQTQNDQDAAGKAIDEEEESVAASDQFKLDDDLI

SEQ ID NO: 69087 - protein, 106 aa, Zea mays
  Coding DNA Sequence Number=SeqID_25712
MGMGSRLGRKNRAKAGKTDEADAKGREKRSRMANEVAATKVRTIIIVQRSADRRAMPGPELRAAGIEPSGPVPGSPFGHLYAERLGLGLDLDLDPTCSPTNQPAYV

SEQ ID NO: 69088 - protein, 143 aa, Zea mays
  Coding DNA Sequence Number=SeqID_25713
MRVQDHGGVIAPLSIGDDGLICAVNKMQYHKTIDKRKGPYKFSKVLQTVVEARRGLGSTVAELLRCGEKADEHGPREIEGKGANRGVSWVAGEEAELTGATNATGARRRPPNGRQTTMELHRVSETGISIVLTVKSGLGILFD

SEQ ID NO: 69089 - protein, 219 aa, Zea mays
  Coding DNA Sequence Number=SeqID_25714
  Homolog annotation: Hit_ID=A2YGC2; Match level="QueryCoverage=71%, HitCoverage=70%, E-value=5e-08, Identity=28%"; Hit description =Putative uncharacterized protein
MEEQEPEGWIAWPITRDAARGCHFHDALDTLLRRAFGRHTWSIEYRCVVYQHHRGLYPDQWEATCLVSHQDDDLQASEAFSEHYSITERDTAKAAMQDVARHALSQYCTLFSGIADGLDLKYYPRRLTGSARGVIVSPVGEGNPRLCSMVNLVAVLNTELDHALDELGKARAEIVELRAECAVRHHQEGGSSLLSGFSTLTARRPVVIVVMAPLTTGPR

SEQ ID NO: 69090 - protein, 102 aa, Zea mays
  Coding DNA Sequence Number=SeqID_25715
  Homolog annotation: Hit_ID=Q7XBC6; Match level="QueryCoverage=52%, HitCoverage=2%, E-value=8e-07, Identity=53%"; Hit description =Putative copia-type pol polyprotein
  Subcellular localization annotation: CTP_CleavageSite=46; ConfidenceScore=5.20e-01
MGTNGHLDLDMGGKSVDQKVYRSMLGAFGIRRSSKTGFNSISGSIMCEQVNSTPVLFTLTWHSLFASHLYCHLLPIEGMSFITFVCKPLRPKGNNALEDEGL

SEQ ID NO: 69091 - protein, 198 aa, Zea mays
  Coding DNA Sequence Number=SeqID_25716
MDESCTQLLSSDPMINLNTTVFFSLCSFPVCEESPQLRVSRPYNKNQYEAHDRPLALLEPLAHRTFVRSTPDSPKWPKAHFPFNHDFDKLASSSSDEELERRFEEKLNGLCFIADTAGGLYTMALGDDAVGGDGKYIGDDSASEVSHSNDDLVTEVEELNAALENQDMLLKLAARERKEFKFKYESTLVNLSLLELQL

SEQ ID NO: 69092 - protein, 204 aa, Zea mays
  Coding DNA Sequence Number=SeqID_25717
  Gene Ontology: Mol. function=catalytic activity
  Homolog annotation: Hit_ID=A7P2T6; Match level="QueryCoverage=41%, HitCoverage=14%, E-value=1e-32, Identity=78%"; Hit description =Chromosome chr1 scaffold_5, whole genome shotgun sequence
MESHDLRAERESRLVGGYEIDGFGYDYGAASPLQPNRMLAEYVDVYSPLLYTPNPPHPQVVSIATTAQAKMKLWKETSRSSKTTTSSRCGLAATPSRLPVKAAVIYVSFPHFDLFVHLIGRRVCKIGRSSGHTTGTVMAYALEYNYQKGISFFTDLLVVSENRQTFDLEGDSGSLIILTSQDSEKPRPIGIMWGATANRGRLNA

SEQ ID NO: 69093 - protein, 72 aa, Zea mays
  Coding DNA Sequence Number=SeqID_25718
MVGTSAVTARRPVGVSEALYAKAVSPDLLTGNRWGRLMYLLELVDGVTWPSSLPPGWTVKWVIASAGDDQEE

SEQ ID NO: 69094 - protein, 38 aa, Zea mays
  Coding DNA Sequence Number=SeqID_25719
MAPRARVPGTPCGTIEQLEREPTRQCGIRARGKKKDIR

SEQ ID NO: 69095 - protein, 325 aa, Zea mays
  Coding DNA Sequence Number=SeqID_25720
  Gene Ontology: Mol. function=hydrolase activity, hydrolyzing O -glycosyl compounds; Cellular component=cell wall; Biological process= carbohydrate metabolic process
  Homolog annotation: Hit_ID=Q10SX3; Match level="QueryCoverage=68%, HitCoverage=84%, E-value=3e-90, Identity=62%"; Hit description =Glycosyl hydrolases family 16 protein, expressed
  Pfam annotation: Domain name=Glyco_hydro_16; Domain location=107-253; Score=167.3; E_value=4.1e-47; Accession=PF00722.12; Description =Glycosyl hydrolases family 16
  Pfam annotation: Domain name=XET_C; Domain location=276-325; Score =66.6; E_value=8.1e-17; Accession=PF06955.3; Description=Xyloglucan endo-transglycosylase (XET)
  Pfam module annotation: Pfam domain module=Glyco_hydro_16::XET_C; Domain location=107-253::276-325
MVKGGHAMHVLNAEENDQHLTTGLMAFSPPIKRLAELDTFNISTRSPSPLRMARPCDLPPVRQAAALLLACALALLAVQLRPCRAQQQQQPPSPGYYPSGMFRPLGFSEAYRTLWGAQHQTLSPDGKSLTLWMDSSSGSGFKSARAYRNGYFGASVRVQPGYTAGVNTAFYLSNSEEYPGHHDEIDMELLGTVPGEPYTLQTNVFLVDDVPVRRYERKAEATFPDREMWAYGSIWDASDWATDGGRYRADYRYQPFVSRFAGLRVGGCAADASADCQPVPASPAAPGTAAISAQQEAAMRWAQRNSMVYYYCLDSTRDRALYPEC

SEQ ID NO: 69096 - protein, 115 aa, Zea mays
  Coding DNA Sequence Number=SeqID_25721
  Subcellular localization annotation: CTP_CleavageSite=34; ConfidenceScore=5.47e-01
MAELALASCSPWAWVPILSLLPKCSSRARPTSPRCAAPRRNAAVPASPGFLAATAARMPSARHNVKGDVLLQHVVTLAGCSLFLAQPRSRCRRPSLVVDAALRALPVRQNAEPCV

SEQ ID NO: 69097 - protein, 76 aa, Zea mays
  Coding DNA Sequence Number=SeqID_25722
MEILNSHYGIIKHLINSLKLGVEITELHVHVTPHLLKPRSDRVLDSLLHASKVRIKVPKGSTQNCCYYGGGGGGIC

SEQ ID NO: 69098 - protein, 366 aa, Zea mays
  Coding DNA Sequence Number=SeqID_25723
  Gene Ontology: Mol. function=carboxyl- or carbamoyltransferase activity; Cellular component=ornithine carbamoyltransferase complex; Biological process=amino acid metabolic process
  Homolog annotation: Hit_ID=Q8SA97; Match level="QueryCoverage=30%, HitCoverage=20%, E-value=1e-21, Identity=53%"; Hit description =Ornithine carbamoyltransferase
MEPGGGTTVGAVESLLTSSCFRKGAESRRRHRVRGAPSLPIWRIRGRVMMAPPVDVAGLCPRLGDVEAPPKPRSSLSSVAEVESEPLGRARRKPSAEARAESEPWGRAERSSSSSGAEPKSEPWVGRSGVRRLLGLSPSLSPGSGRAEFAVFRDLARVRALGRAERSSPSSGAEPESEPWVGRSVVRRLPGLSPCPSPGSGGAELPMVPSAGPDCLSVSLCQVAPQTEWRRRRCPFCQAGQWSGEVTALYADGGYQLRIRSLEGTPNYGPRQFSSCLVLFIIGPRLRVLDSFMVYPWMLRFGGGPPSVGDGPNAFPFKPLDLKSSHYTAEAMKESKAVVVPRTICYQNKKDESGWWPRLLKKDLCS

SEQ ID NO: 69099 - protein, 448 aa, Zea mays
  Coding DNA Sequence Number=SeqID_25724
  Gene Ontology: Mol. function=pyridoxal phosphate binding; Cellular component=chloroplast; Biological process=threonine biosynthetic process
  Homolog annotation: Hit_ID=A7P5Z1; Match level="QueryCoverage=73%, HitCoverage=61%, E-value=1e-94, Identity=58%"; Hit description =Chromosome chr4 scaffold_6, whole genome shotgun sequence
  Pfam annotation: Domain name=PALP; Domain location=163-443; Score= -29.6; E_value=1.5e-06; Accession=PF00291.16; Description=Pyridoxal -phosphate dependent enzyme
  Subcellular localization annotation: CTP_CleavageSite=38; ConfidenceScore=5.52e-01
MAATTHAASMSFLLSHPQSRSATPSCHLPLHLAARRVRCATDAAALSPAVNTKHRRTADENIHEEAARHPALKQGLSAWYEPFPPAPNGDPNERYSLDEIVYRSSSGGLLDVWHDMEALARFSGAYWRDLFDSRIGRTTWPYGSGVWSKKEFVLPEIEPDHIVSLFEGNSNLFWAERLGRDHQGRMNDLWVKHCGISHMGSFKDLGMTVLVSQVNRLRRAPLSRPIAGVGCASMGDTSAALSAYCAAAGIPTIVFLPTNRISLEQLIQPIANGATVLSLDTDFDGCMRLIREVTAELLSSSLCIIFTAFLEQKLVEFDRTERLNHFVLTDSDIAVVDDLGHIFEKYPHFHLAVTFRNNKEQPLNSGFVAVRGTRDGITKAVEFLKQVLGTYSLRYIKASRMLGDQLALAWVVKSHLPLALGKFSKHEAFTGEVNGTSVLVGVSRPGGP

SEQ ID NO: 69100 - protein, 103 aa, Zea mays
  Coding DNA Sequence Number=SeqID_25725
MACRIGRERESDCAPVRILNERVMDRHPAGSPAMPRCGHRQRRRYQAWAMGVEYGPSIPDEGLRFDPGFWFGLNSSRPSDVDPGAWSKIQRQGLHNSSLKGFI

SEQ ID NO: 69101 - protein, 109 aa, Zea mays
  Coding DNA Sequence Number=SeqID_25726
MQSKPRTRVLGRWRDLRRGKSAFCCDPVIQLRRPQRNVRWMFPSPPHEVEDDPGLLGPPARGARRQVDRYGEQSASEADESDPPTEVHAARGIEAELRKIPLTIGPTRR

SEQ ID NO: 69102 - protein, 233 aa, Zea mays
  Coding DNA Sequence Number=SeqID_25727
MAVGEVLVPCSCDVVAVGGALEPCRSTAVGAVGVVGPSPRPGEVVTPPRSRLSPSPGVGRGKDRLPRSRLSPSPRVGRGGDRLPRSRLSSSPGLGEAETVFRGRGGGRAPGSGEAELPMAPKAGLGCCQPHPSGWHSSRSRAGGAVFLSVGEAIWPRLLLREACPSWASGELKVRPLLEEALRRGVNPPGSIIPARGWARARRDRAPGVDGALTCIAPIRPLQLVLMVVTSRV

SEQ ID NO: 69103 - protein, 144 aa, Zea mays
  Coding DNA Sequence Number=SeqID_25728
MVFEVASVSTPLCSTAPEVTTIDLQPHIVAFEVATVSQNPSTGEVDRTGQPLCSMHDGGGPLATMSTPIRQGAYKGKTMTHDWLMVTITLNQGQSVALPKVAIGRDGPTKGATTNIGSVSRAGQCQDLHGPLRRPTTRPHIAKA

SEQ ID NO: 69104 - protein, 460 aa, Zea mays
  Coding DNA Sequence Number=SeqID_25729
  Homolog annotation: Hit_ID=Q6J9V9; Match level="QueryCoverage=24%, HitCoverage=27%, E-value=2e-11, Identity=44%"; Hit description =Putative uncharacterized protein
  Subcellular localization annotation: CTP_CleavageSite=68; ConfidenceScore=5.51e-01
MQAACNCTTGTHPFDFNASSVEAQAHTSCGRKQQSNRLQAHVPSRSSRGALSHGVKTTRPCSVPRMARATAAPQTTRPVALTPWQGRRHLWQAKRVTLHLRHDDRVKKGTGKGDTTKGILLCEGSGPRALLLIRGSKAGPSEGAGPSEGFDSRLRALGLHAHYWSEVRRLAPRKGSTAASGHSGSAPTTDQGFEGCPPEGFDSRLRTRRARDDSGYVRYMAEARATLPRSIQCKDRLTPYPDARSSVDRAEENGAACPAPTAVPPARVRLTAAESSLRRHRKLRLARPRGSAPASTSENGLRLAQPRARTQPRPRKTVSASPDPRARTQPRPRKTVFASSDPRARTQPRPRRSHHLARPWARTDHATGGYIITLPLASSGYGEQDRRPIWLAPGSSAPPTATTSHEQGTNTSPTAMSAWPSYGKVAAREDGLTDSLSLSLSLANAWTPWGRNADNSTYAY

SEQ ID NO: 69105 - protein, 72 aa, Zea mays
  Coding DNA Sequence Number=SeqID_25730
MSLSEAGSDSAEGGVDAEGAAAPPTDDLFVGSRIVYPSESYLSREVMSEESLGSVGLAAYVYSVIFRIPLSK

SEQ ID NO: 69106 - protein, 206 aa, Zea mays
  Coding DNA Sequence Number=SeqID_25731
MDSSCHPAADNQGHLNSARNGSHLRRDSNGADLQPCPQDEVTAMGQQADSVPVVEDAEQTDLHRDPGTAGTQSARHLARRSTGEHAAHRDGRIRGRIGAAGSARTGTAAAKAGSAAARDRTAGSAAPRAQRLRGGRIRDGGWIRDGAEAGAAGSATEQRQGQSDPRRSRGRGSRIRDGAEEGADPRLRRSARRSRGRGSRIRDGGG

SEQ ID NO: 69107 - protein, 26 aa, Zea mays
  Coding DNA Sequence Number=SeqID_25732
MPKPIKTPMGTNGHLDLDTGGDPLLI

SEQ ID NO: 69108 - protein, 43 aa, Zea mays
  Coding DNA Sequence Number=SeqID_25733
MTTDGPLELLHMDLFGPIAYISIGVRKITNPRDIEGILETSSK

SEQ ID NO: 69109 - protein, 116 aa, Zea mays
  Coding DNA Sequence Number=SeqID_25734
  Subcellular localization annotation: CTP_CleavageSite=48; ConfidenceScore=5.23e-01
MNRWIPRWCTQVVVAKRMDVRSQRTGSSSRSSCSCRPNEQELEIMRMREEMRQQREFMEACNAHNQAMYQVTPEAGGSGSDPAVGTGFVDSLFAFPPPGGEGGSGQSSNHPSGGYL

SEQ ID NO: 69110 - protein, 221 aa, Zea mays
  Coding DNA Sequence Number=SeqID_25735
  Subcellular localization annotation: CTP_CleavageSite=44; ConfidenceScore=5.14e-01
ALGHRPSRLGLPDGIEQRKNAQLGRNKSACPTRVVRSGRVRISRAAPRAQTHRPRSGKPVPSLGASIGRSSGDQAAPAPGRPSGEPPLPLPCPARPRPRARSGEPPRARSGEPSPVPASATRPPGSPASRSAPAPRPAPRLGRPWWPGVLPRRGEPRSPARARPRFNCPGPGSAAPAPPRPGGYEIDGFGYDYGVVFFSFGKGEDEAVEGDFQEFQDYDEF

SEQ ID NO: 69111 - protein, 824 aa, Zea mays
  Coding DNA Sequence Number=SeqID_25736
  Pfam annotation: Domain name=MAP7; Domain location=374-514; Score= -84.0; E_value=0.095; Accession=PF05672.2; Description=MAP7 (E-MAP -115) family
MQVVELVPCARNKWGNWNEFWFYVVEGTVEGHEGLPVSEMCSHYYSAYPPFEVTEEDADEGALRCAAGQSSGRDLVEEFVAYGVWPLVHGWALGEVCPRQMPFHGGREDGAVRLVGRYVPRTEGQRSFDIRGSNDRSNRVFELNQLPYDGYPGQDDADHRGKKPVVETGDDSAPAAAPSSKKRKLGTAMGGLGVSDSFARELMRTCAAPGGRMSSPELRESSARMLRVTGGCWPRNVPIPCAAGEDCFTSRMVREWRVFPYGRNIAAVVSAVMDKDRQGAAQKRQAVVRLHEARPKRQRGTAKAAASGGGKPPLAAKSGASASSKAPEATAGAGGSKSTKVVPPVSGVAEVAKAARALPLSGKRSDEGQLAIVAPAAAIATAAIVPKARGEALGAGGEVSALAVVRDEAGTATRRLKEVTEALSQERREANEAVAKEQATQAEARLARAEGNLARERAEHLQERLTALESHVKGAEAAMRAEAERTRTQLMDTYRELGARTGDFEVPDREPGLRCLEWVQEELQEHPTVVGGFMSYASLVTCEGAMNALSREGCRHFEVFDQADEDFERDVYKVEDPVVKESAGALYDRMWGPHGREVVRERAETARAQAARGERVDDFGALNSALPDPEPTPAEAVSGVALEPTPETAEGAPDAPTSAAACEDLPPKVQDFGPAHATATTEFLAASTAEGGNEYGGSASEFFDFTDSGSSVEWTEESSEEDLDYFAALDVAAAEASPHAADAQDVPGPSTGRRRRRAVAKRRVSTEEGARLRVSRAGRQELLSLPAATSTGEGELRSLFAGEELRIMLFNYREMGIIPKVEPM

SEQ ID NO: 69112 - protein, 47 aa, Zea mays
  Coding DNA Sequence Number=SeqID_25737
MRVVMRRMVMIMTMVMVAFGAIYAQVKKENGVDADLREFQDFDEFKD

SEQ ID NO: 69113 - protein, 200 aa, Zea mays
  Coding DNA Sequence Number=SeqID_25738
  Subcellular localization annotation: CTP_CleavageSite=38; ConfidenceScore=5.03e-01
MFIVLARVEGGPSWGPAFRMGWRPASSFSIRGRRAFTSLAEDANFGYAGPAGCRHRQLSRAWLLGLDGFGAASGAASCRLVGVWLSVHHTGNDRAVRRTDGNRTGGLDKKYHLKNYKTNRTGLWGRTPLGWRTRSFPAGGRGALLGLVLVVGLGPDPGFPSAFYVGALVFGCDHFCMILSEVWSRGESRRVSGGRQTSAS

SEQ ID NO: 69114 - protein, 636 aa, Zea mays
  Coding DNA Sequence Number=SeqID_25739
  Gene Ontology: Mol. function=pyruvate kinase activity; Cellular component=chloroplast; Biological process=glycolysis
  Homolog annotation: Hit_ID=Q8S7N6; Match level="QueryCoverage=79%, HitCoverage=88%, E-value=0.0, Identity=91%"; Hit description =Pyruvate kinase
  Pfam annotation: Domain name=PK; Domain location=86-428; Score=464.8; E_value=1.1e-136; Accession=PF00224.12; Description=Pyruvate kinase, barrel domain
  Pfam annotation: Domain name=PK_C; Domain location=453-557; Score =20.3; E_value=5.5e-07; Accession=PF02887.7; Description=Pyruvate kinase, alphabeta domain
  Pfam module annotation: Pfam domain module=PK::PK_C; Domain location =86-428::453-557
  Subcellular localization annotation: CTP_CleavageSite=37; ConfidenceScore=5.24e-01
MAAAAEIGGFAAARVAVATLRPAAHPAPAAAPQQPRRAVAAQSLRTTATEALTADLAGTTNGAVHARMNSKATSEITSQAVTANSRRKTKIVCTIGPSTNTREMIWKLAETGMNVARLNMSHGDHQSHQKVIDLVKEYNAQNTDGNVIAIMLDTKGPEVRSGDVPEPIMLKEGQEFNFTIKRGVSTEDTVSVNYDDFINDVEAGDILLVDGGMMSLAVKSKTTDTVKCKVVDGGELKSRRHLNVRGKSATLPSITEKDWEDIKFGVENGVDFYAVSFVKDAKVIHELKDYLKSANADIHVIPKIESADSIPNLQSIIAASDGAMVARGDLGAELPIEDVPLLQAEIVQTCRSMEKPVIVATNMLESMIDHPTPTRAEVSDIAIAVREGADAIMLSGETAHGKYPLKAVKVMHTVALRTESSLYNPTTSPSLVASAQGLQNEDFSPSQLSKMFGSHATMMANTLRTPIIVFTQTGSMAVLLSHYRPSSTLFAFTNEERVKQRLALYQGVIPIHMQFSDDAEETFSRAISSLLKAQYVKKGDYVTLVQSGVTSIWREESTHHIQVRKVQPFLCFCASCQGDNLGSGCGDPADWARNTPAVPRITTIREKCTNHDNVPAASFGFPARLQTRASPPRFLL

SEQ ID NO: 69115 - protein, 325 aa, Zea mays
  Coding DNA Sequence Number=SeqID_25740
MATARGMDPFLKADFPTYAPKRHGQGLLRCVLGFPPYDTGARPHVSYRLTRSAKKKTATQGACNRPAVMCPFVFAATSGQKDEPPHEERATAPRLYAPSSSPKPAVKKANRHAGSVQPPRGCAPPQLRCNRWSNLDVMQPAHQLLGAQEQQANRQSDSSPTCRLASSPKAGPGATFDTLNQGGTARQGKMMHPRMHHWVRTSTDEYRTPVRTTRTHYYDLGLPRRQAGPYPTCSRYPRRWKPVAAAWLVARDISQRAEPDSSPLADDVRVILQMAHLSSLLSNSRPCQAAHCAHHPLYKKLPLHAEETQISDVRTREDCTSGEYL

SEQ ID NO: 69116 - protein, 411 aa, Zea mays
  Coding DNA Sequence Number=SeqID_25741
  Gene Ontology: Mol. function=protein transporter activity; Cellular component=type II protein secretion system complex; Biological process=protein secretion by the type II secretion system
  Homolog annotation: Hit_ID=P45758; Match level="QueryCoverage=100%, HitCoverage=82%, E-value=1e-172, Identity=76%"; Hit description =Probable general secretion pathway protein D precursor
  Pfam annotation: Domain name=Secretin; Domain location=110-356; Score= 349.9; E_value=4.3e-102; Accession=PF00263.12; Description=Bacterial type II and III secretion system protein
  Pfam annotation: Domain name=Secretin_N; Domain location=16-79; Score= 42.1; E_value=2e-09; Accession=PF03958.8; Description=Bacterial type IIIII secretion system short domain
  Pfam module annotation: Pfam domain module=Secretin::Secretin_N; Domain location=110-356::16-79
MIADSSRPGVGDELVTRIVPLENVPARDLAPLLRQMMDAGSVGNVVHYEPSNVLILTGRASTINKLIEVIKRVDVIGTEKQQIIHLEYAPSQEKLATVIARLDIRRAQVLVEAIIVEVQDGNGLNLGVQWANKNVGAQQFTNTGLPIFNAAQGVADYKKNGGITSANPAWDMFSAYNGMAAGFFNGDWGVLLTALASNNKNDILATPSIVTLDNKLASFNVGQDVPVLSGSQTTSGDNVFNTVERKTVGTKLKVTPQVNEGDAVLLEIEQEVSSVDSSSNSTLGPTFNTRTIQNAVLVKTGETVVLGGLLDDFSKEQVSKVPLLGDIPLVGQLFRYTSTERAKRNLMVFIRPTIIRDDDVYRSLSKEKYTRYRQEQQQRIDGKSKALVGSEDLPVLDENTFNSHAPAPSSR

SEQ ID NO: 69117 - protein, 134 aa, Zea mays
  Coding DNA Sequence Number=SeqID_25742
MESPTAGGRRSSVPKARSGPSLTESTVGDGGGVERGGGSIRQRTTASVGGRSAAGLAVAWRLQGVHSAAPRISQRAGTAPWWRGSDPGAATASPDARGAAPRRCTPTSATVVGSGRIAAADAGGGRLRWRWSGS

SEQ ID NO: 69118 - protein, 209 aa, Zea mays
  Coding DNA Sequence Number=SeqID_25743
MQGPLLAGGRAPRRAMPWLRSCAPLEPASCARAYRARAPATAAGATLSLPHGRLPRPQPSGRSRAPSGLVSRRGRITAPRGDAPGRETPGTTLPRQSRPERICLCAPPGTAHRAVEAGGRRGRTARAWQAGPRPRAPGQEPPRPGPCSRTEAASLAGAALPVCSCEPMGLTTEPRPRLAGVGRGARADGAGVAAPRGAAPVTPVPRRRA

SEQ ID NO: 69119 - protein, 99 aa, Zea mays
  Coding DNA Sequence Number=SeqID_25744
MAAYDPSAGRQAGVNNSSASELRRTTTAMPGRQAALLPYCTSIGMQVQTIMKHIIVELYHNAQWQMEINRDKDKSQGHPLLQSSEVYIQEFPRGVSLGK

SEQ ID NO: 69120 - protein, 188 aa, Zea mays
  Coding DNA Sequence Number=SeqID_25745
MAHLQAGTPNQLMLSPGHPRATMIQVFPQPEMWQHACWGKGKDATLRSRPSLQSLDRIGVQMGQVKMVEIKEAAEKGRNGKAKAAEKERGINNRLMGILSWNSKPMANPPRIEFPRRKNLDGHEMEEFGLRDDGHVVTCERQLAVGVDWWNHHSRRTRGFPLGRHLDSTGEQNRRRIAERIWKQESKN

SEQ ID NO: 69121 - protein, 442 aa, Zea mays
  Coding DNA Sequence Number=SeqID_25746
  Gene Ontology: Mol. function=phosphoprotein phosphatase activity; Cellular component=cytoplasm; Biological process=protein amino acid dephosphorylation
  Homolog annotation: Hit_ID=A2YE92; Match level="QueryCoverage=42%, HitCoverage=60%, E-value=1e-72, Identity=72%"; Hit description =Putative uncharacterized protein
  Pfam annotation: Domain name=Metallophos; Domain location=62-232; Score=71.3; E_value=3.2e-18; Accession=PF00149.19; Description =Calcineurin-like phosphoesterase
METFISSLWYDPLMDNQNSGINQPMSLNINKGGSDPLQFMLQVRALCEKAKEILMEESNVQSPVTICGDIHGQFHDLAELFRIGGKCPDTNYLFMGDYVDRGYYSIETVTLLVALKVRYPQRITILRGNHESRLLTCHIVSSINLPAGLIDPGEICAAAALRSDHEAVITRIQVSFINQGSATLLPIEGNYSRGNLMLQRIKTYIAFLEQKLVEFDRTERLNHFVLTDSDIAVVDDLGHIFEKYPHFHLAVTFCNNKGQPLNSGFVAVRGTRDGITKAVEFLKQVLGTYSLRYIKASRMLGDQLALAWVVKSHLPSALGKFSKHEAFTGEVNGTSVLFLPCVVYNWTPPEGAGQFHGIPLDVKNSSIIQYDNDPIRFGGGPPSVGDGPNAFPFKPLDLKSSHYTAEAMKESKAVIVPRTICYQNKKDESGWWPRLLKKDLCS

SEQ ID NO: 69122 - protein, 151 aa, Zea mays
  Coding DNA Sequence Number=SeqID_25747
MSLCNDRNGSFCSVKGNLVISLYRQPSMKFTRDRDSTSLEDRFVRISAHPKANFCVETHPASGRRATFHFSSMSRLLSPLAQSRSSTPPPRFRSPEHAATRVARRCRLRRLPLLEHAPAPLAWRLESPEHVAFSGLESPSMLSPQSLRLLR

SEQ ID NO: 69123 - protein, 58 aa, Zea mays
  Coding DNA Sequence Number=SeqID_25748
MKDAKPIKTPMGTNRHLGLDMGGISIDQMNESPREHVLEKSNGAPDQSYTQRLDEIDQ

SEQ ID NO: 69124 - protein, 109 aa, Zea mays
  Coding DNA Sequence Number=SeqID_25749
MAMELFDQVPNSRRGVNVSEAGLTKSIPIQNPLHPSDQLMGHHAGRDGIAGRPVDHLLPAGLSDPRAAGGGAARWPRTPPRLTRTTPPVAVFSEEFHATSADPHRVSRG

SEQ ID NO: 69125 - protein, 167 aa, Zea mays
  Coding DNA Sequence Number=SeqID_25750
MWSGVPIGSVHVAIRQQTLTIIRTDSRLGKSSLHLLDAKHPPERSNERAPTACKPASQLWRRQPQPPRERANRTGGGLGCSLLRLLTLLLNHDGYGYGYLRSWPPARAHSWRKERERKARQAPDTDRMVSLQLSAGVVTDLLGRILTSLPNYYPEATAAMKPAATTR

SEQ ID NO: 69126 - protein, 118 aa, Zea mays
  Coding DNA Sequence Number=SeqID_25751
  Homolog annotation: Hit_ID=A2Y847; Match level="QueryCoverage=50%, HitCoverage=6%, E-value=6e-21, Identity=81%"; Hit description =Putative uncharacterized protein
MDRSRAWWEQCSSADYPKANFRSAFRMGRATFAMLCDALGATVAKEDTALHAAIPVRQRVAAAAPGCRAKENATGMEENATEMEENATGMASDGELTATALGTEPGFNETNTALNLLM

SEQ ID NO: 69127 - protein, 109 aa, Zea mays
  Coding DNA Sequence Number=SeqID_25752
MKFDADAVDYLFPMFGDVMEAHRGAGSAVGGGWGGCERVKPRRPSAAAGCRDVELEYDDAVALAKSMSVLIAAAAAAPEPKTARWGRLIPWKIKALRNRPAGDRRDSVR

SEQ ID NO: 69128 - protein, 741 aa, Zea mays
  Coding DNA Sequence Number=SeqID_25753
MNKTPALKVPLQMELRFHLCRYEQPHTIGGPVEQQKADGWLIAARSNNDDFCSEGPNSSSDDLRADAAAIGPSPTSSLERQGRAEGRRVGGQSVGGTGYLVDGETSSGCRGGRRRRKRLQSRSGQRAGHAAAASATNGEHPSPRSLREGAGRCPRRDRPQLGALPSPALMMNILEAEGGAEAAARLASPHPGAGGHRLGAKEAKPPRAVRATAQRLQAFLHFRPDQWVKGRTAMQAACDRAKWAHPFDSNTPSTGAQAHTSCNRRAGCYMRATAPPLTPLPRLLDCGTSTATRGNPVYDPTVPARRIGHGSVRCRRRSDGQYGQKWVDNNGGGRRAEAAVTSSAKLTSHPGTQGNPLKWTGGTFGRRSGRRFAFAIMTASKKAGPSEGFNSRLRALGLRAHYWSEVRRPAPRKGSTAASGHTGSAPTTDQGARSTQGTQSRLARAQPRARAVDPGGFTSRPRAPSGNGHTFGLPEAQSSPRSNLGPIATPTDRFAGAFNAKGSDSGSHPEDDELRFARPQGSDSGSAPEDDELRLARPRAQTRAQPRKTTNSASPDPGLGLGLSPGRRRTPPRPTPGLGLGLSPGRRRTPPRPTQGSDSGSAPEDDELRLARPRARTRAQPWLQPTVSTSPDPGARTRPRPRMTDSTSTSEEPPPRPTQGSDRPRHRRGHHYPTWLWLRGTRPASHLVRPGKQVMMAPHMLMTTATLSPLTEARRRQQGLDSPDSCPSARLQRSSDGHDTT

SEQ ID NO: 69129 - protein, 524 aa, Zea mays
  Coding DNA Sequence Number=SeqID_25754
PTRRATGAPDAACKQLYRLCHHRASSIAEPIPRLEATQRATQQRQPDAAANAAKSGPAVMTVAGAREQRSRRQPSSRPIRGQQENPLSRREDNAPVIRSSNGSRTRNGRPASYSPRCINSAAGQAALLAGAAGDASPKQPRQKRLRASLLIRGSKTGPPEGVNSRLRSRGPYTHYWSEGSDSGSAPEDDELRSARPRAQARAQPQKTTNSASPDPRARTPPWPLPNNLRLARPRSSGSASAMEDRLDPGFGGASTSPDLGHRPATSTGSAIITLPRADSGRREQDRSLTEAGGRQQGPNRSDSCPSARLSCSSDSHDTTPAGCQDLSGCHIGMAFLEKVGRAGTRTGQALSWGRSLPSPAWTLVTPYCKRTRPGRGTNTKAAGFPPLSSPSPATSLPPFALAHALDPSGLGHAAHSLVGLRDPPVSRRRQVQSVNGCFELIDGAAAHDGIVRIYHVHDIKGYLLTSGIGCYTEGERQLYFADGEGALAAEAIQRVVRRLKQAVDYAHAIEGVKEDDVRLTAVVN

SEQ ID NO: 69130 - protein, 122 aa, Zea mays
  Coding DNA Sequence Number=SeqID_25755
  Homolog annotation: Hit_ID=Q5NKP3; Match level="QueryCoverage=49%, HitCoverage=24%, E-value=3e-15, Identity=70%"; Hit description =Putative uncharacterized protein 9C20.7
MGSEKSGGEDTEEQGAAHLEKTGGNDVHAQEALALASLIDDEKKLGDCQFDLYKQSYVAASAAVYDRLRRSRRLDTVQSGCPALSIVKLGNFMVVANVDDSWLVVGTASDDIAITSSSSTST

SEQ ID NO: 69131 - protein, 249 aa, Zea mays
  Coding DNA Sequence Number=SeqID_25756
  Homolog annotation: Hit_ID=A2WLN5; Match level="QueryCoverage=19%, HitCoverage=16%, E-value=3e-08, Identity=56%"; Hit description =Putative uncharacterized protein
MAHIHTSWSQGNPNSRGDRFFIEAIESVDECFPSVMKSTAPHTATTSREESHAAAAAAATPANVVPLGEASVPRFAHGTGNVIIIRATVSASSLAVDPVAAGSNVERYEIWHGSTTKRHTVTLPQFMLRETEGAFASGWWRTSGVAVGGAGPAVAVARRAPCRAGSGGRCGRASMVEGGNCEEAKEATIGSPTYLGDVEGVDGNGGHDGGAGRHQSPLGESGESPSLTPWLADHVESGGRGRDRKEEGR

SEQ ID NO: 69132 - protein, 561 aa, Zea mays
  Coding DNA Sequence Number=SeqID_25757
MPSSSSSADATPPAAASSEETLSDVMVEELRAGDSVEFGVSRMTSARIEDMQRLGYFGGGVARAPGTEEVPEPEGELVVFEAFFVAGLRLPAHRVFELNQLPYDGYPGQDEADRRGKKPAVETGGDPALVAAASSKKRKLVMDKDRQGAARKRQATVRVHEAQPKRQRGTAKAEASGGGKPPLPAKVGASAPGKAREVTVGAGGPKLTKVADFTSRTASGALTAALSAEVERLRTQHADAVREKSASDSKCRKLAEKVAALEKEKADLRRQLAGERREANEAVAKEQAAQAEARLARAEGNIAKELAGELQRRLTALESRAEGAEAAARAEAERTRTQLMTAYRELGVRTGDFEVPEREAGLRCLEWVQEELQELPTVLAGLMSFTSLVTCEAAMNALSREGCRHFEALDQADEDFGRDIFEVEDPVVKESAGALYDRMWGSYGCEVVRARAEAARAQAERGERVDDFGALNSALPDPETTPAEAATGVAPGPTPETAEDAPCAPAPAAAGEDLPPKVAEGAPDAPAAAVPSAEDPAEVGAGAAAEASAEAPAAAGPSQVA

SEQ ID NO: 69133 - protein, 69 aa, Zea mays
  Coding DNA Sequence Number=SeqID_25758
  Subcellular localization annotation: CTP_CleavageSite=34; ConfidenceScore=5.28e-01
MSFVKTNTLGSKRLVMKTPGGTIVRVNAIFTMVSASSLPRLGDVVQLKAIEFVFKSLYLPTDSSSAHLI

SEQ ID NO: 69134 - protein, 116 aa, Zea mays
  Coding DNA Sequence Number=SeqID_25759
SSVDYLNRFTKHESPRVKVTRPMPELIIRGLRSGWRPREMVGVGAKAKTPPFARGLRCSRWSDRDKAGRDTLRRTRHFDEGLRRRPPTARPRSVPRPTCDLAHCNGPRVAASVLRA

SEQ ID NO: 69135 - protein, 63 aa, Zea mays
  Coding DNA Sequence Number=SeqID_25760
MTPAAYVRGQGSSDHLRRRPAHLRDRRDLPDVIDHHTGALLPPGNLEKPYKNNPKVKTPPPLG

SEQ ID NO: 69136 - protein, 164 aa, Zea mays
  Coding DNA Sequence Number=SeqID_25761
MVQRLTRSMCAGGFLNSGEHDCAIPVMRVLGSSLSKLHGLTRKLSEGLDRTEEDGKGAGHGGCSRVALAGRGEVAGAKGWLGKVRRADDPAAKASDCQRGGRRQKFLQAVLQDDSTLHSNSREIHRNFLNYHWVDKNLLWQRDVVGVDSGGLKSANHLQEKLAT

SEQ ID NO: 69137 - protein, 200 aa, Zea mays
  Coding DNA Sequence Number=SeqID_25762
MAGFHHSLRLGTVIRFGILEFMSVSIEYDMILLPPIPLECPSTCRRPSHRRRQRWGNCDRATHGTSCPSRAPGMADGIESLSRDLANTSIAPGALPATPAPTFLEPPTLFLYACDEMLSESSEGYSTGGEGYDPTRECLHINSKILDRGDHLNMLREGDQPLPHKADEVKTPPGTRVAHLEQLRELHDKIKEEQQWLQQL

SEQ ID NO: 69138 - protein, 56 aa, Zea mays
  Coding DNA Sequence Number=SeqID_25763
MQYKGSSSLISCEKQTIRIEFLNLARQGIHPGSKFIDHHRSRYQDEYNQCLTSREC

SEQ ID NO: 69139 - protein, 156 aa, Zea mays
  Coding DNA Sequence Number=SeqID_25764
MARQHQIRVGSRTTTKGVSDPEGSKKATWCFGYDKTTEGVTSSLLLGKGPSSSPSFEKNTFRILALVVMRKPLRTGDIPSRKDSRAAGTPTPQGYGDDQAYTVGGGPVGGTAAVGDGGGGTALTSKWRASKVPDPSTVSFNLRISALASSGSSGRT

SEQ ID NO: 69140 - protein, 271 aa, Zea mays
  Coding DNA Sequence Number=SeqID_25765
MHRVLPPSKPRMGSARVAFVLLSLEERNFAKLVPFSHRSASRIFIRQPGCIPSPMVTQDGDHQFDGGEKQAGLRPLPRPQLQGSSSSSLGKRSSWVGAGGSEPLGILSSRRPSNVGGCSYLRGWNQSSVCNGTLSAGVCSLWLSGPEHRGKPRLLCDELEPEAAVSAWTEPESARKENFVGLGAGGDPPTVSPSEAGLDSAEGGVDAEGAAAPPIDDMFVGSRIVYPSESYFSRKVMSEDPTIEVFKKHERCSGRKTFSEENFDAEGVPPF

SEQ ID NO: 69141 - protein, 72 aa, Zea mays
  Coding DNA Sequence Number=SeqID_25766
MVKLQAAQTRPRFADGVLAETQTMSGAPSTPPAATSTTEFGGEDRRDFCAVGPHGGQGETERLRGNGSANAG

SEQ ID NO: 69142 - protein, 248 aa, Zea mays
  Coding DNA Sequence Number=SeqID_25767
  Homolog annotation: Hit_ID=Q6J9V9; Match level="QueryCoverage=51%, HitCoverage=35%, E-value=6e-21, Identity=48%"; Hit description =Putative uncharacterized protein
MQAACNCTKGMHLFDFDASSMEAQAHTSCNRHAGYYVRETAPLLAPIPCLLDYGTGAATRGDPAHGSTVPTEHIGHGAGDTFSRRSGRRFTSAMMTASKKVRRVVQFRILFLFPFLSLATGTGKGDTPKGILLRKGSGPRALLLIRGSKAGPSEGFDSRLRALELRAHYWSEVRRLAPRKGSTAASGQSGSASTTDQGFEGWPPKGFDSRLRTRRARDDSGYVRYMAEARATLPRYPRTFPRPAGAIL

SEQ ID NO: 69143 - protein, 184 aa, Zea mays
  Coding DNA Sequence Number=SeqID_25768
MAEAEGHADHQFPRVSDEANHSLGFVPVHARPRRIPPGVCPKGHTMRTCQVTIQKQKEIAEAETFEAQKMFLRECRAKNYDLKLQKVAPKGAQRLDTKSISSNTLLNESVLRHEANFEKRNYIRLAIEGTSFFMKHEKKGRCFFAEGSKMFINDFVDNGVSNAYYIQCFLHVRISQEVEWLRQR

SEQ ID NO: 69144 - protein, 137 aa, Zea mays
  Coding DNA Sequence Number=SeqID_25769
  Subcellular localization annotation: CTP_CleavageSite=9; ConfidenceScore=5.09e-01
MVAPPPPPSAGKVTGQTRMLFFRHAGKMSSIPLSAGGLTAAIIVVARRRKEYHVVAAVEGHELETPEMEHRPGLERLLETTHLELDGKLFVNTQQGPTWRANCRCFDPGGSLDRRVNCRCVSQPQMGRRETEHKGEQ

SEQ ID NO: 69145 - protein, 72 aa, Zea mays
  Coding DNA Sequence Number=SeqID_25770
MVKLQAAQTRPRFADGVLAETQTMSGAPSTPPVATSTTEFGGEDRRDFCAVGPHGGQGETERLRGNGSANAG

SEQ ID NO: 69146 - protein, 99 aa, Zea mays
  Coding DNA Sequence Number=SeqID_25771
  Subcellular localization annotation: CTP_CleavageSite=19; ConfidenceScore=5.15e-01
MARVAPTTSDADPHTDVTVVTSRTSLTTPSELFCRRLKVKKNRKCDLNNEPEDCNLADGEYVLVPEQGAAQEVALDPAPESAPEDLPATALEGKPRFYA

SEQ ID NO: 69147 - protein, 155 aa, Zea mays
  Coding DNA Sequence Number=SeqID_25772
MATDRIKYHNLTRSIRGIDYGGEAYRRQKSSDGVVSDVREVTTVTSVCGGHARNELENGAEATWSTCAGGFLNSGEHDCAIPVMRVLGSSLSKLHGLTRKLSEGLDRTEEDGKGAGHGGCSRAALAGRGEVAEAKGWLRMVRRGTEEATGKAAEH

SEQ ID NO: 69148 - protein, 141 aa, Zea mays
  Coding DNA Sequence Number=SeqID_25773
  Homolog annotation: Hit_ID=A2XFR6; Match level="QueryCoverage=64%, HitCoverage=26%, E-value=3e-12, Identity=40%"; Hit description =Putative uncharacterized protein
MTMRTSTKKPTVFKHDYFMGFGPVTEHYTSMFETGHVPNLLVMDAGDRGFKTLSAHEFLTPLSTDTASVSDAARRTLWSLSHTYRQQLHDTKYRHLFLCLSGGSLTSIVPGGAGEDRLNTLAGVVAGLNTDLDSATLDLSR

SEQ ID NO: 69149 - protein, 105 aa, Zea mays
  Coding DNA Sequence Number=SeqID_25774
MKFNNQKFTGDRQVTKGNARDVVIQNLETCGMTMSQPPAPIFTILKGTDIQQTTLKATHRYNTIFNTIREHSTTFNIIKIQFLSSFTVIQQQHMKNTKGKQIETN

SEQ ID NO: 69150 - protein, 170 aa, Zea mays
  Coding DNA Sequence Number=SeqID_25775
  Gene Ontology: Mol. function=drug transporter activity; Cellular component=membrane; Biological process=multidrug transport
  Homolog annotation: Hit_ID=Q5GAV3; Match level="QueryCoverage=90%, HitCoverage=11%, E-value=2e-21, Identity=45%"; Hit description =Putative integral membrane protein
MSSTSIDSTLILVLESQTRSLLFELDKRLQAIDPNGNPVSGCWNSVPPNRSDQCLISPLLCVDVEAHLTAAYSETDLKLLQIEAATNSRMVAPESSVRSVEAWRPRVDSTIDALRLSLDYVATKVSKMEIQWSRDPRADGYNKPGVLRAHGSVPGRPPVTAAYSTLRGNQ

SEQ ID NO: 69151 - protein, 95 aa, Zea mays
  Coding DNA Sequence Number=SeqID_25776
  Subcellular localization annotation: CTP_CleavageSite=86; ConfidenceScore=5.25e-01
MGSRCVLFSPDDEAQSAGTQMRWWRSITCCIWQTCGRRSSAAAVNPAVPSSFLGRRRSSAVSVATVSFAPPRRSATVAPGHRRTIAAAEASPTRL

SEQ ID NO: 69152 - protein, 132 aa, Zea mays
  Coding DNA Sequence Number=SeqID_25777
MTKDFAMTTVLPPYEDIVARSSSGTALDLNAYHTWGDEVACRMVATGTLQLYCQRRSIIECKVTMVKIVVPFIFIDWILLTKLHVLGPLVLVILSEMTHFLSCFVNLPLKVPDLLVQFLLMKCWASGLSSGS

SEQ ID NO: 69153 - protein, 66 aa, Zea mays
  Coding DNA Sequence Number=SeqID_25778
MARPDRKRVRVCPGRLPSCAKPLIWSTSTVGNTVVGVRGVDTVVLGVEKKFTPKLQDSRLVSPPSH

SEQ ID NO: 69154 - protein, 53 aa, Zea mays
  Coding DNA Sequence Number=SeqID_25779
MARVACTHRAKRLNGGVSVLSVGKEYRYRTCQVIRCIYEVVRDPLDKDNCRWA

SEQ ID NO: 69155 - protein, 287 aa, Zea mays
  Coding DNA Sequence Number=SeqID_25780
  Homolog annotation: Hit_ID=A2YW28; Match level="QueryCoverage=75%, HitCoverage=38%, E-value=3e-52, Identity=54%"; Hit description =Putative uncharacterized protein
  Pfam annotation: Domain name=Ndc80_HEC; Domain location=1-206; Score=- 63.1; E_value=0.045; Accession=PF03801.4; Description=HECNdc80p family
  Subcellular localization annotation: CTP_CleavageSite=66; ConfidenceScore=5.11e-01
MRRGGGRRFPKPSLAPSTAAEATPALDASVIRNLDSAFSRRDSDANSLCSSRPASTVGAILNFSDRATQVAALRVVNTFLAPAVTLRGPLPAARDIQAALRLLVDRLHLPRNDATFDDDLIQDLRLLGCPYKVTRSALKAPGTPHSWPVLLSVLHWLTLLCHSQGDDPDAPSGPSDDLLLYITQSYSHFLSGDDAAVETVDEEYASKARMTGEAYVATARALEKEAEELETQDLLKQVDAQPVNVKDVDRMRREMQAIEDDIANAEKGKTALEDKKLPIGTPKNNQC

SEQ ID NO: 69156 - protein, 106 aa, Zea mays
  Coding DNA Sequence Number=SeqID_25781
MPPRTRKTVRKSTGPIGVPRHQLAPRHEDSSSGSNDPIGDLEARVNQLQMELQHRTNIWVADGDRINELRSDIRHLRDQLVDRDLALDWAVQSRLLACAKEARAQA

SEQ ID NO: 69157 - protein, 95 aa, Zea mays
  Coding DNA Sequence Number=SeqID_25782
MAERYQLPRSCVPPMTRRKNCECPPSRGSEGTGKGDTPKGILLREGNGPRAPLLIRGSKAGPSEGFNSCLRALGLCAHYWSEVRRPAPRKGSTAA

SEQ ID NO: 69158 - protein, 629 aa, Zea mays
  Coding DNA Sequence Number=SeqID_25783
  Gene Ontology: Mol. function=binding
  Homolog annotation: Hit_ID=Q6YT02; Match level="QueryCoverage=99%, HitCoverage=100%, E-value=0.0, Identity=73%"; Hit description =Putative armadillo repeat containing protein
  Pfam annotation: Domain name=Arm; Domain location=177-217; Score =22.5; E_value=0.0016; Accession=PF00514.14; Description =Armadillobeta-catenin-like repeat
  Pfam annotation: Domain name=Arm; Domain location=218-258; Score =22.2; E_value=0.0019; Accession=PF00514.14; Description =Armadillobeta-catenin-like repeat
  Pfam annotation: Domain name=Arm; Domain location=397-437; Score=6.9; E_value=1.5; Accession=PF00514.14; Description=Armadillobeta-catenin -like repeat
  Pfam annotation: Domain name=Arm; Domain location=486-526; Score=3.9; E_value=3.5; Accession=PF00514.14; Description=Armadillobeta-catenin -like repeat
  Pfam annotation: Domain name=Arm; Domain location=532-572; Score =21.9; E_value=0.0024; Accession=PF00514.14; Description =Armadillobeta-catenin-like repeat
  Pfam module annotation: Pfam domain module=Arm::Arm::Arm::Arm::Arm; Domain location=177-217::218-258::397-437::486-526::532-572
MDDLKASLARPIQLAEQVIKWADEAQTCRQECQDLKAKLERLSTLLRQAARADLYERPARRILEDTDKALDKAAALLERCCGHGFVRRVFTIIPAGSFKKASYLLDNSLGDLTWILRVSNYAASDEDDEDDHIGLPPIAQNEPILFLIWEQIAVLQYGGLEARADAAASVVSLARDNDRYGRLIIEEDGVPPLLRLIKEGRADAQESAALAIGLLGRDPECVDLMILAGVCTSFVKILKDAPMKVQGMVAWAVSELSANHPKCQDAFLQHNVIRLLVSHLAFETVQEHSKYAVASKMSIHSVVMDKKSNDSTHDPSGSGEQAAAAKPNVGGGGTGASSSSLTVPGPSGRPVGMAGTRLHNASISATSTRGREYEDPEIKAYLKAHAARALGTLATGNPAICKNITESRALLCFSILLEKATGDVQYNSAMALVEICRVAEQNAELRRSAFKPTSPSARAVVDQLLRVVEKADYDDLLVPCITCLGCLSRTFRATETRVIGPLVRLLDERETDVSLEAAAALAKFACMDNYLHVDHCKSIIGHGGAKHLVQLVYFGEQVVQTAAVVLVCYLAHNVPDSEELAQAEALMVLDWAWKQGYMSQDPVIESLLPEAKIRMELYQSRIAKGGYYY

SEQ ID NO: 69159 - protein, 60 aa, Zea mays
  Coding DNA Sequence Number=SeqID_25784
MGPGTAAKRCESRVQGRAMQAHQRRRPVTAYLRQDFPLFLHSEADRVTVTHGLDEMTVSD

SEQ ID NO: 69160 - protein, 38 aa, Zea mays
  Coding DNA Sequence Number=SeqID_25785
TLWFPGGYEIDGSGYDYGSGEDEAVEGDFQEFQDYDEF

SEQ ID NO: 69161 - protein, 114 aa, Zea mays
  Coding DNA Sequence Number=SeqID_25786
  Subcellular localization annotation: CTP_CleavageSite=47; ConfidenceScore=5.71e-01
MASASSLFSSAHRTLSQSTALSAPRPPGLVVPVGILARSARMGRRPPCTHARRGAGGLAGSGEGYAIAAHLDAGVALLDTCNAIAARLHRLHRLSHPVSEGKPNANHHTSETSI

SEQ ID NO: 69162 - protein, 319 aa, Zea mays
  Coding DNA Sequence Number=SeqID_25787
  Gene Ontology: Mol. function=molecular_function; Cellular component =anchored to membrane; Biological process=biological_process
  Homolog annotation: Hit_ID=A2YXU0; Match level="QueryCoverage=76%, HitCoverage=69%, E-value=1e-128, Identity=88%"; Hit description =Putative uncharacterized protein
  Pfam annotation: Domain name=Thaumatin; Domain location=35-243; Score= 322.8; E_value=6.2e-94; Accession=PF00314.8; Description=Thaumatin family
  Subcellular localization annotation: CTP_CleavageSite=37; ConfidenceScore=5.48e-01
MASRAHLPGSPASIAVLILSFFQGSVCGITFTFTNRCGDTVWPGLLSGSGTPPLETTGFALAPGQSRSLYAPQGWSGRFWGRSGCAFDASGKGSCATGDCGSGEVECRGAGASPPATLAEFTLDGDGGKDFYDVSLVDGYNLPMLVQPAAAGCPDTGCLVDLNERCPDELRADGGRACRSACEAFGSPEYCCNGAYGNPNTCHPSQYSQLFKSACPKSYSYAYDDATSTFTCNHTDYTITFCPESTPSSDRSKHSSRRPSHEQLEDSVWLASLKASGASSMKITSWWSAPTVFRSGLAIAVATLLGAQIAPDHPVVGLL

SEQ ID NO: 69163 - protein, 163 aa, Zea mays
  Coding DNA Sequence Number=SeqID_25788
MTAVVLFFPWDTGLPHLLAPNLLTGGKGADLVIRGDVVLNRKNRSTTEWRQGWCPWRRHPMIARGHRIPAFQSQHTEVERRKKKVITGDSLIEIPRLQQRLPLWCHTDVSDDRLKLLLEAFDDLVLPFGRQQIKDFKCNGWLGPLGTDPLRHDPFKAQSVRPD

SEQ ID NO: 69164 - protein, 190 aa, Zea mays
  Coding DNA Sequence Number=SeqID_25789
  Homolog annotation: Hit_ID=Q2R4V1; Match level="QueryCoverage=36%, HitCoverage=5%, E-value=4e-07, Identity=40%"; Hit description =Retrotransposon protein, putative, unclassified
MEEEVAVAVSPTGSVRWSPHALVLQIYRPTLSMVGSPKARWPAMETSTTTEVSCEERIKVEDVPALRCHDVPELSLPCSDAATTSYILRPSDKRSHEVGLLVGLVPHIIENGCVCLQYALQYADGIVFLLQANPIYARNLKFVLVLFEHMSGLKLTFAKKKSARKKLEERATISEKWLVISSFELGGGLQ

SEQ ID NO: 69165 - protein, 177 aa, Zea mays
  Coding DNA Sequence Number=SeqID_25790
MTNWSLLSVLLCVTSGAEMMPRTTVPTTLGWATIRSAPRLISEGSDSGLAPEDDKLRFARPQGSDSGSAPEDDELRFARPQGSDSGSAPEDDELRFARPQGSDSALASADGLRLARPRGSDSTSALEDRLDLDLGGASTSTNPGLGPTTSQEAPSLPYPKLTQATGNKTGVPSGSLR

SEQ ID NO: 69166 - protein, 111 aa, Zea mays
  Coding DNA Sequence Number=SeqID_25791
MGVPDLCARWRAFNVSQEYHVVAAVEGHELKTPETEHRPGLERLLETAHLELDEKLFVNTQQAPTWRANCRRFEPGGSLDRRVNCRRVPQPTWVGARRSAKGGREAGGRQA

SEQ ID NO: 69167 - protein, 263 aa, Zea mays
  Coding DNA Sequence Number=SeqID_25792
MSAFRDRGVPKPTSECAACPSPDGSSAWASAEGGEARRPEPSVREVEVPRPSCSSRAQAGRRGVSSEAEVESCLQLPWPSPSQGVGRGGSRPAEARAESEPWGRARRSFVVFRVLARVRALGSGGAEFAVFRVLARVRALGSGGAEFAVFRVLARVRALGSGGAEFAVFRVLARVRALGSGGAEFAVFRVLARVRALGSGGAEFAVFRVLARVRALGSGGAEFAVAPLARPNCLSDSLCRVALQSEWRRRRCPSIRLASGAVE

SEQ ID NO: 69168 - protein, 175 aa, Zea mays
  Coding DNA Sequence Number=SeqID_25793
MDFYDLCDKFHQGDVCLKSMNGSFIILVPKKDNPQKEAPPRPTLGLGLNLDAGRRTLPHPTLGLGHNLGLGRRSLPRPTLGLGLNLDAARQTPPRPTPGLGHSLGLGRWSPPRLTQGSDSTSISEDGLRLARPQGSDSASTSEDGLNLDLGGASASPDLGLGPTTSQGGPSLPYP

SEQ ID NO: 69169 - protein, 360 aa, Zea mays
  Coding DNA Sequence Number=SeqID_25794
  Homolog annotation: Hit_ID=Q6QP51; Match level="QueryCoverage=48%, HitCoverage=62%, E-value=4e-08, Identity=34%"; Hit description =Putative growth-regulating factor 1
MEARAHTSCNRRAGYYVRETAPPLAPVPCLLDCGTGAATRGDPAHDPTVPTEHIGHGSVSRGRRRDGRYGQKWADNNGGGRRAEAAVKSSASSRPLLGQRENPLPRREDDAPVFRSSNGSRTHNGCPANHSSRRINSAAGQAAPLAGEAGTGKGDTPKGILLREGSGPRAPLLIRGSKAGPSEEFNSRLRALGLRAHYWLAPEGFDSRLRSRRVRDDPGYVRYITKARATLPSLGRHRKLRLARPQGSGSTSTLDDGLRLARPQGSDTASASEDGLRLTRPQGSGSTSTLDDGLLLARPQGSDTASASEDGLCLARPRARTQPRPRKTDSTSPDPRGRTQPRPRKTDSTSTSEEPPPRPT

SEQ ID NO: 69170 - protein, 67 aa, Zea mays
  Coding DNA Sequence Number=SeqID_25795
MARNTPQERSGKEIGWTTAAAPDGVGGWANGDSRWELLIWSPIPGFSKLSTLNFKIPSNQASKLRFQ

SEQ ID NO: 69171 - protein, 178 aa, Zea mays
  Coding DNA Sequence Number=SeqID_25796
MDKGCTQPLSSDPMINLNTTAFFLIVFLPFARNLHKLEPLALTIKITKKGKEFGKTTKNKKGLFPLRGGDFERLLSFAGLREACDWKSTFSGLDSKAKIGNFHLKERSFRTIVFHRPLNCARAGLRARETHHYLLSIGSEDSFGINVLLESSYETNNIQELFRTEQVVDQRSRSREAS

SEQ ID NO: 69172 - protein, 766 aa, Zea mays
  Coding DNA Sequence Number=SeqID_25797
MGGLGVSDSFARELMRTCAAPGERMSSPELRESSARMLRVTGGCWPRNVPIPCAAEEDCFTSRMVHQWRVFPYGRNIGAVVWAVMDKDRQGAAQKRQATVRIHEARPKRQRGTAKAAASGGGKPPLAAKAGASAPSKAPEATAGAGGSKSTKVVPPASGVAEASKAARALPLAGRRVADFGTDITVDDYLGGPDEGQLAIVAPGAAIATAAIVPKARGEALGAGGEVSALALVRDEAGVATRRLKGVTEALSQATEALSQVADFTSRTASGALTAALSAEVERLRMQHADAVREKSASDSKCRKLADRVATLEKEKADLRRQLAGERREANEAIAKEQAAQAEAKLARAEGNIAKELAGHLQERLTALESRAKGADAAIRAEAERTRTQLMATYRELGARTGDFEVPEREPGLRCLEWVQEELQELPTVLGGLMSFTSLVTCEGAMNALSREGCRHFEAFDQADEDFGQDIYKVEDPVVKESAGALYDRMWGLYGREVVRERVEAARAQAERGERVDDFGALNSALPGPEPTPAEAATGVALEPTPETTEDAPGAPTSAAAGEDLPPKVAEGAPDAPAAAVSSAEDSAAVVAEAAAEPTAEAPAAAGPSQVQDFGPAHATATVEFLAASTAEGGNEYGGSVSEFFDFTDSGSSVEWTEESSEEDLEYFAALDVAATEASPHAADAPDVPGPSTGRRQRRAVAKRRVSAEEGARLRVSRAGRQELLSLPAAAGAGEGELRSLFAGEELRIMLFNYREMGIIPKVEPM

SEQ ID NO: 69173 - protein, 56 aa, Zea mays; identical to SEQ ID NO: 63810
  Coding DNA Sequence Number=SeqID_25798

SEQ ID NO: 69174 - protein, 139 aa, Zea mays
  Coding DNA Sequence Number=SeqID_25799
MTVAGGREQRSRRQPSSRPIRGQQENPLSRREDNAPVIRSSNGSRTHNGRPANRSLRRINSAAGQAALLRFEGWPPEGFRQPPQIAWALHPLLVRGSKAGPPKGSTAASGYSGSAPITDQGFEGWPPKGSQPPQTPSEG

SEQ ID NO: 69175 - protein, 143 aa, Zea mays
  Coding DNA Sequence Number=SeqID_25800
  Subcellular localization annotation: CTP_CleavageSite=30; ConfidenceScore=5.06e-01
MEGRVTTGQSHAPPLGWSLRHAGLGPRVIRSATPWGLASFRHYSTSRFFIMQPGCSPPPAATHEDDHQLCGGEKQVGLRLPSCPQLQGCSSSSLGREARRARVLPPTWASGPLLSPAFEGGEGFTSHAKEANFGYAGPARCRR

SEQ ID NO: 69176 - protein, 154 aa, Zea mays
  Coding DNA Sequence Number=SeqID_25801
MDYVMGHKQRAFACAGSGDQNLHTCQHRTPAYPEVLLVPGPCRGSDLPRGSGPLRSQPQTRRRRTRKNRRRCDFYRRLSAVNRRPGAVYRPLRRCPPSSPQIPSPTGSIAKPAVNRPRGEETCRMKIEIEKEIEIESGCTERRCGGQITNWSRN

SEQ ID NO: 69177 - protein, 198 aa, Zea mays
  Coding DNA Sequence Number=SeqID_25802
MGDTRRLFASSLEERNSVGVGTFQPSFGFKDFHQPARLYPPPPPPRRRSPETVTTSTWVGRSKPGCDLGPTLSFKDVHHPRWGGGRAEPELYLPHEFAGHPLLRRSRERALTDPAGGPDFDNAGLVDGGRRHPQRVELVGLAPGGPSCRRAAAAPCAREDRPRCCALLGRRSCSGVVLPLHRDGAFTRRLVPHSSGRI

SEQ ID NO: 69178 - protein, 52 aa, Zea mays
  Coding DNA Sequence Number=SeqID_25803
MAPKRKASSSSVVVIPPIDPNSQLPFAEYSTVERQGIPGLSVSRPSRLNSGY

SEQ ID NO: 69179 - protein, 211 aa, Zea mays
  Coding DNA Sequence Number=SeqID_25804
  Subcellular localization annotation: CTP_CleavageSite=26; ConfidenceScore=5.32e-01
MSSRFLMHRVFPPSKPPDGGYPPSFRLVVGGTQLRGSWYLSAIVRLQGFSSASPAAPLHRWSPETVTTSPWVGRNKSGCDLGPTLSFKDVHHPRWGGGWAEPELYLPRGFVGRPLLRRSRERALTGPAGGSDFDNAWLVDGGRRQPQRFGLVGLAPGAPSYRKAAAAPCAREDRPRCRVLPGRHSCSGVVLPLHRYGASTRRSVSHSSGRI

SEQ ID NO: 69180 - protein, 151 aa, Zea mays
  Coding DNA Sequence Number=SeqID_25805
MGKNNKRKREPTPPSEDFGDSEYSEEEFSSESEGSPAPIPLRESSDDSDDSQGLAAEVWTYIRAVERSGLEGSDESEYSSDDEDSDGGGEDEDGDNNDDDEGGGGGDGDDSGSSGSKDDDGGGGRGGSGGGGSSRGSNRGGSGGGSNRASG

SEQ ID NO: 69181 - protein, 202 aa, Zea mays
  Coding DNA Sequence Number=SeqID_25806
  Homolog annotation: Hit_ID=O48967; Match level="QueryCoverage=99%, HitCoverage=38%, E-value=1e-36, Identity=49%"; Hit description =Putative uncharacterized protein
MVQIVEHHDFIPEDFPMEEEAASSTPRASSRPAPGAAVVRSARQHTPVRTSRASRAAPGALSAARELLRHPPSSMASPGAMKQWRDNVDRLLGMARSGSARHRPRSSWRQHEASVLVRSPSVRAAPTEDLQAELNLRRAGEDAPVSLERPDDLRAELNRRHTGEDARVSLERARERWQNIEGRNLDYDFAAVAPQTPTGTRI

SEQ ID NO: 69182 - protein, 289 aa, Zea mays
  Coding DNA Sequence Number=SeqID_25807
  Gene Ontology: Mol. function=pseudouridine synthase activity; Biological process=pseudouridine synthesis
  Homolog annotation: Hit_ID=A7Q499; Match level="QueryCoverage=57%, HitCoverage=34%, E-value=7e-25, Identity=41%"; Hit description =Chromosome chr9 scaffold_49, whole genome shotgun sequence
MARPSLGRLLWASDSSRPLHVDGSGAATWPEKMIYSEDPTGANRTLRMGSGPLHVGSGPLTAGSQDSGIENAQALIKARRGSRADTPSPDAATWHGARDVSQRAEPDVRPPGYAASAFIADKARRLSIPLAGGGDQSVPQAACLSIPLADGQDPLPGRKVAPRRVTAVSWVKHYFADVPQEAVQAHFNRRMVFSECYDHKVSADSIRTQKHHLKKIKHNDAMEPGMRIHLPVSVAESDIKKRYETIPTATLHPNKDEIEYLRRLVIYRVFFSFVGCIANVDSRYIDYIQ

SEQ ID NO: 69183 - protein, 197 aa, Zea mays
  Coding DNA Sequence Number=SeqID_25808
  Subcellular localization annotation: CTP_CleavageSite=82; ConfidenceScore=5.26e-01
MAAAGITAGPWGCSARRVQGGRGGSWLGASAAFRRRRVLWAGQPGLSPVLIPWQVLLARFALVKRCVGGVGATAVGAEEDVRASSAAARPVARAGAGWWWRQGAQRQLASVAACARAIGGYALALARAGVTHTTRCCPVLCAHPEGVAADAVLRLLQQPARRCPSIGVHAGCQGGGDGGSWPDVGAGGLLGQKDRRW

SEQ ID NO: 69184 - protein, 139 aa, Zea mays
  Coding DNA Sequence Number=SeqID_25809
MEAYLVTHNQRRALRIQEPASSNPVQPMGAECNTLNLGRVPPVGAPAFRAPAPFSLCSPGPTCRRPLSPRALAPSLSLCSRARGVSPVFLAAPPPLTIAARAVSSSPVELRRALSPAATVDPSLRRVPVAAEESPEPAL

SEQ ID NO: 69185 - protein, 108 aa, Zea mays
  Coding DNA Sequence Number=SeqID_25810
  Subcellular localization annotation: CTP_CleavageSite=32; ConfidenceScore=5.09e-01
MGLPLSPSPSPAPALRTAPSATVLLAACLAPCAGERRQGEIVLLLALESGDRERASRRPPLDRDERAAAHSRRWTGIARVARFRSLLTGSWARGPWAVSLLPSARPGD

SEQ ID NO: 69186 - protein, 199 aa, Zea mays
  Coding DNA Sequence Number=SeqID_25811
  Homolog annotation: Hit_ID=A2Y1F6; Match level="QueryCoverage=18%, HitCoverage=12%, E-value=1e-08, Identity=75%"; Hit description =Putative uncharacterized protein
MQAGNLYTGYQPGPEPNLAVVFRIASLLIRDIRKESESRKLAWHNWSWKEYSEEPFLEPHIPYQYQATSRQALPAGRTIRDLEQRLGFLPTEPDGLCTVDQGYLVHMHPGFVSGLSDGFPKIAGSRATRGMWAHQLQYPFNACCIELLFKTVEIFKVVAFTAGLQEYASLVLDRLDPYGEVFVHRLYHGACTTPVTGGS

SEQ ID NO: 69187 - protein, 469 aa, Zea mays
  Coding DNA Sequence Number=SeqID_25812
MTVAGGQEKRSRHQPSSRPIQGQRENLLSRHEDDAPVIRSSNDSRTRDNRPANNSPHRINSTAGQAALLAGEAGDASPSPNQAPSLLTDQRFEGWPPEGFNNRLRSRGPYTHYWSEVRRPAPRRVPRPPQATRAPRPLLIRGSKAGPRRVHSRLRRRARDDQGYVRYIAEAWAALPRLGGCSRKPGSGRTVDSVNIPARELGPRPYTRATASSHEGTTRPAEALREALRPRRSETTPPRPRGLHPAGALARTHRNKMQPRKAGPLAKKCDESLEASANTPFEARGLLSGTIIRGTLKTPNSQLAVRPCQRLHGKLRSARPRARTRAKSQKTANSAPPDPGLGLGLSPGRRRTPLRPTQGSDSGSAPEDDELRFARPQGSDSALASAERPPPRPTQGLGLGLGHGRQTRPRLRRSLHVARPQARASHEDVSKDSTAPTVVPPPGSAAPPTATTSHQLGVKISPAATSACT

SEQ ID NO: 69188 - protein, 434 aa, Zea mays
  Coding DNA Sequence Number=SeqID_25813
  Gene Ontology: Mol. function=protein binding; Cellular component=cell wall; Biological process=carbohydrate metabolic process
  Homolog annotation: Hit_ID=A3BA26; Match level="QueryCoverage=93%, HitCoverage=55%, E-value=0.0, Identity=73%"; Hit description =Putative uncharacterized protein
  Pfam annotation: Domain name=LRR_1; Domain location=127-154; Score =8.2; E_value=9.3; Accession=PF00560.24; Description=Leucine Rich Repeat
  Pfam annotation: Domain name=LRR_1; Domain location=183-204; Score =3.1; E_value=81; Accession=PF00560.24; Description=Leucine Rich Repeat
  Pfam annotation: Domain name=LRR_1; Domain location=224-246; Score =6.7; E_value=18; Accession=PF00560.24; Description=Leucine Rich Repeat
  Pfam annotation: Domain name=LRR_1; Domain location=280-306; Score =2.0; E_value=1.3e+02; Accession=PF00560.24; Description=Leucine Rich Repeat
  Pfam annotation: Domain name=LRR_1; Domain location=308-331; Score =7.4; E_value=13; Accession=PF00560.24; Description=Leucine Rich Repeat
  Pfam annotation: Domain name=LRR_1; Domain location=336-359; Score =1.9; E_value=1.4e+02; Accession=PF00560.24; Description=Leucine Rich Repeat
  Pfam annotation: Domain name=LRR_1; Domain location=364-386; Score =5.0; E_value=37; Accession=PF00560.24; Description=Leucine Rich Repeat
  Pfam annotation: Domain name=LRR_1; Domain location=396-418; Score =4.2; E_value=51; Accession=PF00560.24; Description=Leucine Rich Repeat
  Pfam annotation: Domain name=LRR_1; Domain location=99-121; Score =7.0; E_value=15; Accession=PF00560.24; Description=Leucine Rich Repeat
  Pfam module annotation: Pfam domain module=LRR_1::LRR_1::LRR_1::LRR _1::LRR_1::LRR_1::LRR_1::LRR_1::LRR_1; Domain location=127-154::183 -204::224-246::280-306::308-331::336-359::364-386::396-418::99-121
  Subcellular localization annotation: CTP_CleavageSite=53; ConfidenceScore=5.06e-01
MATNSLFQRTVIWKVVQNMIPGKKKDHGSGKHAPSGIMWSFAAGSNLATSTLSAEKESRKNLNKFYKELRTLKTVNMAGRQFGDEGLFFLAESLAYDKSAEEVDFSGNGITAVGIEAFDGVLQINTTLKTLNLSGNDIGDEGAKCLSDILVENVGIQKLLLNSINIGDEGAKALSNMLKKNKSIRILQFSNNAIEYSEIHLHGNGIGNEGIRELMSALSAHKGKITVVDIGNNNISPEGLHPVAEFLKRTKSLQWFSLYMNDISDEGAEKVAEALKDNKTISTIDLGGNNIHSKAVSAVAETLKDNAVLTTLDLSYNPIGSDGVKALCDVLKFHGKIQTLKLGWCQIGMEGAECIADCLKYNTTLSTLDLRANGLGNDDDGAFALAQALKANEDLAVTSLNLANNFFTKFGQVALSEARDHVYEMTEREIDIYF

SEQ ID NO: 69189 - protein, 281 aa, Zea mays
  Coding DNA Sequence Number=SeqID_25814
  Subcellular localization annotation: CTP_CleavageSite=72; ConfidenceScore=5.62e-01
MAPCQNYIHVQASTAIMNKNTGIQSAITNGTLVPSPRVRTTPRNRGTRGAIAGRRAARRRPIRQQRQPPPPRAAKQFRQRLRGRCYDRRALTRRGREPAIQAGRRRPRATGGVGNFIGREAISGCRRLEARRQVFALVRTAQSVGAALAVRSTTVVRTEGVVLRPSRVMAAHLSRHGWRKSPRNWRMPFFPRRQGKKRAADPRGGSPPTRLILHLGLDDENPRGRGRGRGRSPARFPPPSSWRSPSWVTAGGGVQPGCMMKILEAERWLKGTNSHGVAFLQ

SEQ ID NO: 69190 - protein, 508 aa, Zea mays
  Coding DNA Sequence Number=SeqID_25815
  Gene Ontology: Mol. function=ubiquitin-protein ligase activity; Cellular component=ubiquitin ligase complex; Biological process =protein ubiquitination
  Homolog annotation: Hit_ID=Q67VC1; Match level="QueryCoverage=93%, HitCoverage=94%, E-value=1e-155, Identity=62%"; Hit description=Arm repeat-containing protein-like
  Pfam annotation: Domain name=Arm; Domain location=195-235; Score =22.5; E_value=0.0016; Accession=PF00514.14; Description =Armadillobeta-catenin-like repeat
  Pfam annotation: Domain name=Arm; Domain location=236-276; Score =29.4; E_value=1.3e-05; Accession=PF00514.14; Description =Armadillobeta-catenin-like repeat
  Pfam annotation: Domain name=Arm; Domain location=277-318; Score =19.3; E_value=0.014; Accession=PF00514.14; Description=Armadillobeta- catenin-like repeat
  Pfam annotation: Domain name=Arm; Domain location=371-415; Score=1.2; E_value=7.7; Accession=PF00514.14; Description=Armadillobeta-catenin -like repeat
  Pfam annotation: Domain name=U-box; Domain location=34-115; Score =39.7; E_value=1.1e-08; Accession=PF04564.6; Description=U-box domain
  Pfam module annotation: Pfam domain module=Arm::Arm::Arm::Arm::U-box; Domain location=195-235::236-276::277-318::371-415::34-115
  Subcellular localization annotation: CTP_CleavageSite=15; ConfidenceScore=5.39e-01
MATGTGRPWWAPAPPAAARSAPLFPSPPSSFTADPPAEFLCPISGTLMADPVVAPPGQTFERACIQACAALAFSPPTVAVDLSESHSCSSAPLVLIPNVALRNAILNWCDRLALPHPSPMSPDTAHDIVRRLMPQDRQRSSLAQRPQPQVQQQPSSRQRGDALEEEIMAALGTEGATPAEQASAMALLRQATRENREVRRQLCTPRLLAALRPMLLSADADVQVNAAAAVVNLSLEPENKVRIVRSGAVSPLVDVLRGGHTEARDHAAGAMYSLAVEDENRAAIGVLGAIPPLLDLFAGAAAHRARREAGMALYHISLSGMNRPKIARAPGAVRTLLAVAAAEARRDRASDADAAALRRLAAMILANLAGCPDGRAALMDGGAVAAVVRLMRCGSAAPGSTEEEYCISTLYGMSRGSMRFRGLARAAGVEAALQPVAEGGGGVRRDLARRTLRAMRGEDDEAPAMDSGLLGRQWDDGSVVSEGLVSIRRPPPHRSNHAGPSGSNTTQF

SEQ ID NO: 69191 - protein, 98 aa, Zea mays
  Coding DNA Sequence Number=SeqID_25816
  Homolog annotation: Hit_ID=A2X9G2; Match level="QueryCoverage=64%, HitCoverage=78%, E-value=8e-23, Identity=73%"; Hit description =Putative uncharacterized protein
MQRNNSFGTSWADQWDYGGDPSPRAPRDGGVGEKTKAAAATGMRKVKEGTSQGFQWIKDKCQRKNGGGNKKQQGSETEGDTFMKPPLFVPRVGIPSVG

SEQ ID NO: 69192 - protein, 292 aa, Zea mays
  Coding DNA Sequence Number=SeqID_25817
  Gene Ontology: Mol. function=RNA-directed RNA polymerase activity; Cellular component=integral to membrane; Biological process=DNA recombination
  Homolog annotation: Hit_ID=P0AG72; Match level="QueryCoverage=100%, HitCoverage=61%, E-value=1e-158, Identity=97%"; Hit description=DNA recombination protein rmuC
  Pfam annotation: Domain name=RmuC; Domain location=1-255; Score =383.2; E_value=4.1e-112; Accession=PF02646.7; Description=RmuC family
MAQEAINLTRALKGDNKTQGNWGEVVLTRVLEASGLREGYEYETQVSIENDARSRMQPDVIVRLPQGKDVVIDAKMTLVAYERYFNAEDDYTRESALQEHIASVRNHIRLLGRKDYQQLPGLRTLDYVLMFIPVEPAFYWRLTASPELITEALKNNIMLVSPTTLLVALRTIANLWRYEHQSRNAQQIADRASKLYDKMRLFIDDMSAIGQSLDKAQDNYRQAMKKLSSGRGNVLAQAEAFRGLGVEIKREINPDLAEQAVSQDEEYRLRSVPEQPNDEAYQRDDEYNQQSR

SEQ ID NO: 69193 - protein, 570 aa, Zea mays
  Coding DNA Sequence Number=SeqID_25818
  Gene Ontology: Mol. function=protein transporter activity; Cellular component=type II protein secretion system complex; Biological process=protein secretion by the type II secretion system
  Homolog annotation: Hit_ID=P45758; Match level="QueryCoverage=97%, HitCoverage=98%, E-value=0.0, Identity=76%"; Hit description =Probable general secretion pathway protein D precursor
  Pfam annotation: Domain name=Secretin; Domain location=293-512; Score= 244.1; E_value=3.1e-70; Accession=PF00263.12; Description=Bacterial type II and III secretion system protein
  Pfam annotation: Domain name=Secretin_N; Domain location=136-208; Score=56.5; E_value=8.9e-14; Accession=PF03958.8; Description =Bacterial type IIIII secretion system short domain
  Pfam annotation: Domain name=Secretin_N; Domain location=212-291; Score=45.0; E_value=2.6e-10; Accession=PF03958.8; Description =Bacterial type IIIII secretion system short domain
  Pfam annotation: Domain name=Secretin_N; Domain location=71-134; Score=18.4; E_value=0.027; Accession=PF03958.8; Description =Bacterial type IIIII secretion system short domain
  Pfam module annotation: Pfam domain module=Secretin::Secretin _N::Secretin_N::Secretin_N; Domain location=293-512::136-208::212 -291::71-134
MKGLNKITCCLLAALLMPCAGHADNEQFGANFNNADIRQFVEIGSHHLGKTILIDPSVLGTISVRSDELVTQIVPLENVPARDLTPLLLKMMDAVMLCNVVNNHRSKVLILTGRASTINKLIEVIKRVDVIGTEKQQIIHLEYASAEDLAEILNQLISESHGKSQMPALLSAKIVADKRTNSLIISGPEKARQRITSLLKSLDVEESEEGNTRVYYLKYAKATNLVEVLTGVSEKLKDEKGNARKPSSSGAMDNVAITADEQTNSLVITADQSVQEKLATVIARLDIRRAQVLVEAIIVEVQDGNGLNLGVQWANKNVGAQQFTNTGLPIFNAAQGVADYKKNGGITSANPAWDMFSAYNGLAAGFFNGDWGVLLKSRPDVPVLSGSQTTSGDNVFNTVERKTVGTKLKVTPQVNEGDAVLLEIEQEVSSVDSSSNSTLGPTFNTRTIQNAVLVKTGETVVLGGLLDDFSKEQVSKVPLLGDIPLVGQLFRYTSTERAKRNLMVFIRPTIIRDDDVYRSLSKEKYTRYRQEQQQRIDGKSKALVGSEDLPVLDENTFTVTPLRHRHGEAS

SEQ ID NO: 69194 - protein, 109 aa, Zea mays
  Coding DNA Sequence Number=SeqID_25819
MPEPNFISLVPFAASAKRMRVPALAGPDLIGVDLGDFSMAAGKQPTTGVVGNGKRTGAPERIERSRGYLGREGDRAEDQGEERRQIIPQRSSSAGREERRERSSSADPF

SEQ ID NO: 69195 - protein, 57 aa, Zea mays
  Coding DNA Sequence Number=SeqID_25820
MAPRVASALLFVVAVLVASAAAQESMAPASAPAPGPVAGAASAPASAVAVINRPIRK

SEQ ID NO: 69196 - protein, 209 aa, Zea mays
  Coding DNA Sequence Number=SeqID_25821
  Homolog annotation: Hit_ID=Q8H6I4; Match level="QueryCoverage=22%, HitCoverage=1%, E-value=2e-07, Identity=54%"; Hit description =Putative gag-pol polyprotein
ELFSWAELQLNSTSAVNLFDHTPAELASGQLSWVCQSDWQTGRQELSGAVQPPPLGGSTGFDVDPRAIDLAMRIAERMFLKMKEDEAKNKVEEENDRWRPNDESTSSQGSSFKSTSHMCFIANGSDSESESEDEEEQESDSEDEDDLQQFFAQLSKKHRMSLLKLMKRAEEQKEMLHKQEDFLIRKIEDLEKLTKEHEKLKCSHDDLVQ

SEQ ID NO: 69197 - protein, 103 aa, Zea mays
  Coding DNA Sequence Number=SeqID_25822
MGGRGDGTVSMGPHARESKRDETTSVTDRGGEPTTDEVLKDREGMVAWPEPGEHGGGANLVGGTLGGANHGEVAGSAARWSPVGSWRERFRGKVRWLVLEVTQ

SEQ ID NO: 69198 - protein, 434 aa, Zea mays
  Coding DNA Sequence Number=SeqID_25823
  Gene Ontology: Mol. function=potassium ion transmembrane transporter activity; Cellular component=integral to membrane; Biological process=potassium ion transport
  Homolog annotation: Hit_ID=A3AXC6; Match level="QueryCoverage=28%, HitCoverage=16%, E-value=1e-30, Identity=64%"; Hit description =Putative uncharacterized protein
  Subcellular localization annotation: CTP_CleavageSite=67; ConfidenceScore=5.86e-01
MASALLTWTATWQASVPSPSLPARVSLRPSSRAASASPASSPRRLALSLFCALPSQPPPSLPLYQALAARLSVVVFVYVKYLPVSFHMFRCVVRYGYKDLHKRDEDFEKVLFDCILFFVRLESMMEGYSDSDEFSVPEQTPGSGRAAFLGVGERTCATVCSNGDLSFSSQDLVVPAAVQSPRAPTGLPLLQCSASARQGTSGGTVGDELGMMPSRRRARSASTSSPSQEVVRRKRTSSRAATRSFLPHFLRHFETARRRHAVSPPRAGPARSAHAPRPVSSLPPSATDRTLCHLLRPRSRPPPLVIIVDVLQSGPLPPSAIGRALRHLLRPGRALRRPSSSPASSGRAPAPFSSAVRRPPSPFSSRLSTISEPSLVNELGAVDLGAEVGAEINGAYLGAKIYGAEENCTSMILRRRKKRSKMDQLQENLLTKAK

SEQ ID NO: 69199 - protein, 211 aa, Zea mays
  Coding DNA Sequence Number=SeqID_25824
MVTSSLMVGESEPGCGLFPSLSLKDFHHQGWGGDCTVPGSRMRVASEPLAAPASATTAGRGSPAGEIAKAGHGPTSNSTAFCPSLPHKFGHGRGPPGSSIRPEVSAAAVRPSGAEVVVVAAAGAGDGAPFVGLLLLHRPTPMEWGYSPVDYLNRFTKHKSPCVKVTSESGDPWTASPSEARSDLAEGVADAEGATAPFQRQDPSLQDQSVL

SEQ ID NO: 69200 - protein, 138 aa, Zea mays
  Coding DNA Sequence Number=SeqID_25825
DRGGGLPWLEPGEHGGGGNLAGGALGGTDHEEVASSAVVWSPMRPLGVTGKAKVVPRVRGEVMKGGEEGRLVGSDEAHNGSDNGGTVVAMGWVSEDGGVRDTVRCPGQGTNELATLGFSERRSTIIHRTVRCAPDSVR

SEQ ID NO: 69201 - protein, 501 aa, Zea mays
  Coding DNA Sequence Number=SeqID_25826
  Homolog annotation: Hit_ID=A2WQE8; Match level="QueryCoverage=52%, HitCoverage=69%, E-value=3e-61, Identity=47%"; Hit description =Putative uncharacterized protein
MTTQGGLQPTSNEANLCTNDNGSQLGTRIVDEIMAGKNVFFDLPDKLTGEIWTLKFHCIGAQPGKEIVTVNIDKAYVAFYNVVYIKSKLGYSGRDFLFYKKRCGIDRSRLLALDYIHQEEAMLSDNMDERKISFVLTKDPPSGLEVSITPIKCPRQRTNVDEETIEVSIDAYKEWLAILQHDNPETVLYERQSNDDLILSDEEIHGSSKPTANWPSHARRHRKRDPDVIGIYVDNDGVFKKEGHGTLKGIAVATKRIKNGDHKLKIEFSSKLGGPVGPNTRTFVDEIVLFTKKNAPLIGVKKWKDIELNVRSSIASDVLRRWEFPSNEDAHEKIWSIAKERYKGRRSTLSSTYKAYNSYAERMKNKPKDVDIVEWHYMMLYFGSETFQKISSRNSENRQKQRTKHIMGSRTFSQISFQQEKATEKIVEKMYQTERFDLTREEENAIFQTTFKETIGCKANRLHGHGYLSRYPTRSQVMESKFLEQARATVATNQKNIELES

SEQ ID NO: 69202 - protein, 124 aa, Zea mays
  Coding DNA Sequence Number=SeqID_25827
  Subcellular localization annotation: CTP_CleavageSite=31; ConfidenceScore=5.47e-01
MPPHPSCSKTSKSAPYPARPSPEPPTPTCSRCQLAIPRRPCVRRVDPERWGWEVPEVRAGEVIRSASSFSSSVGFYTLQDEEEEGDEGRVPEAWEHTYAALGQAIDEGKSDWDALFEPYPFFES

SEQ ID NO: 69203 - protein, 141 aa, Zea mays
  Coding DNA Sequence Number=SeqID_25828
MHISYSLHSLDCNLADGEYVLIPEQGAVHEEDQEQAPETAIEDLPAAPAFEGKPRYGGYKCGHCTTAAGVSGALYAKAVRFRIWLMTTDQAKDGSKKSFEVPSAREKVKETTNPKTRVKKKTCKVKVDRVKKSYGASRITT

SEQ ID NO: 69204 - protein, 94 aa, Zea mays
  Coding DNA Sequence Number=SeqID_25829
MAHQIARSTRGHGRPKSDEDDLGSPVKFCRVQELGKVHGLLAKLTEWLAWLGSDWRELAKVAEARVVMAGGGAACLRRSPVNLARAGLESARGG

SEQ ID NO: 69205 - protein, 170 aa, Zea mays
  Coding DNA Sequence Number=SeqID_25830
  Gene Ontology: Mol. function=citrate CoA-transferase activity; Cellular component=citrate lyase complex; Biological process=acetyl -CoA metabolic process
  Homolog annotation: Hit_ID=P75726; Match level="QueryCoverage=96%, HitCoverage=32%, E-value=5e-86, Identity=99%"; Hit description =Citrate lyase alpha chain (EC 4.1.3.6) (Citrase alpha chain) (Citrate (pro-3S)-lyase alpha chain)
  Pfam annotation: Domain name=CitF; Domain location=1-169; Score=60.0; E_value=1.2e-23; Accession=PF04223.3; Description=Citrate lyase, alpha subunit (CitF)
MRSRDIRADFALGGITATMDDLHEKGLIRKLLDVQSFDSHAAQSLARNPNHIEISANQYANWGSKGASVDRLDVVVLSALEIDTQFNVNVLTGSDGVLRGASGGHCDTAIASALSIIVAPLVRGRIPTLVDNVLTCITPGSSVDILVTDHGIAVNPARPELAERTHPQKH

SEQ ID NO: 69206 - protein, 79 aa, Zea mays
  Coding DNA Sequence Number=SeqID_25831
MMKAVYGKVMSSQHGSYYDWRTPPIDPQALYANGGKPHERYSMFNNVINSSEVGIRREVHRDLLLVAPVAPPRDPIEVE

SEQ ID NO: 69207 - protein, 35 aa, Zea mays
  Coding DNA Sequence Number=SeqID_25832
MTSINARLKGLIVSLIIVHDKIILLIGTKSDHPGK

SEQ ID NO: 69208 - protein, 51 aa, Zea mays
  Coding DNA Sequence Number=SeqID_25833
MAMMGSTSDKMYLCQIFKDPLLVSIFANSLDSWLSLTLTPLSQHIIESLFF

SEQ ID NO: 69209 - protein, 171 aa, Zea mays
  Coding DNA Sequence Number=SeqID_25834
  Homolog annotation: Hit_ID=Q7XBD9; Match level="QueryCoverage=60%, HitCoverage=8%, E-value=6e-08, Identity=32%"; Hit description =Putative gag-pol
MAVIFKNKITLSLGAMFCFGTISCIADIKGTLHHIADPPEKRPSSGIPREAEASLRATPLLTARGKMAPRKLGLKSPRRMEGQSVGGRLESLPVSDDEPARGGAPSVMPGDGETDAGMCGGIMKLGNGTQHNLYPRTKLRKWEKHLMNEYTEKDATPAAVIAKRLKSESEN

SEQ ID NO: 69210 - protein, 59 aa, Zea mays
  Coding DNA Sequence Number=SeqID_25835
MEGIELAPHYIGIGRLASRYTAPRRTTVVLVVFGIFAGAISCNHCKNQALEPCLWKGGK

SEQ ID NO: 69211 - protein, 320 aa, Zea mays
  Coding DNA Sequence Number=SeqID_25836
MPVFVTWSSLESRVMGALGVLGRHGWLDKVRGSVENTKAGIKSGQGHRRVVARRWRHLYPVRNHAQQRARQGKGEGGGGLLPQGGPQGPLDCSRGTTVARIDDGGTEAAWRRAGAKGSHLANKKRQNIRFNHRAKGQPKAPLAWRTGLSGVPPYMSGAPEDPDFKLVTFGKFQRQLRYNSPDCPVYTGHVRCSKEERPPELASLGNSSQLLRYNSPDCPVYTGLSGVTAGQRLLRRQRLPAGAINARQRAQRSDTPMLAHRTIYSTCPVHHRTSRRAQKSELQRSDSNGTGDMAGAPDMSGVHRTVWCAIEQTTSTNGQV

SEQ ID NO: 69212 - protein, 78 aa, Zea mays
  Coding DNA Sequence Number=SeqID_25837
MKAVAHPGIIDSDESNGSEEESFEELEQDSGDDGKGNDNDDDSNKDDNDDNYNGGGGDCASKGKCSTDRNAGGKAPPA

SEQ ID NO: 69213 - protein, 83 aa, Zea mays
  Coding DNA Sequence Number=SeqID_25838
MARRSGEERAAWRRQWFGGGCGRVVGLVRERLRVLRVAQGERAGDIVDRDLVERAEARRNTREFIQVRAARMRNTLRPVDAQY

SEQ ID NO: 69214 - protein, 247 aa, Zea mays
  Coding DNA Sequence Number=SeqID_25839
MACFWPGLTWPNPRPNSEDGYKSSIRKMRKQKRKESDLIPFCRRLPYEGAIQLANAERRRPCADGGQQFMFRVQEMGAIARLSRDVHMEVDEELPADLTGGSKQAATTTPFYLALDHTASATSSPPPAEAPPLSCAANSERGSEIIKIFGDPDVVDIVFTCGADILAMCDVTCDCFANATYMEREGRRTSSSLRRSQQISTEDNIVVVLLMNIVEIATVIRVDCLGFEVPVCAELQCISQDFLFLKG

SEQ ID NO: 69215 - protein, 263 aa, Zea mays
  Coding DNA Sequence Number=SeqID_25840
  Homolog annotation: Hit_ID=A2Y8F3; Match level="QueryCoverage=26%, HitCoverage=9%, E-value=9e-19, Identity=67%"; Hit description =Putative uncharacterized protein
MEILEEGEWGHSWRPAAFEGEPMDRVRLVAPPRATKKIDAAAANRHPQLRALVGRPQPPSQPRAQAGRPPTPSQPRGQKQGPFVASVRRALTCIPIPSPSSSDSSDDCSSGSRRHGHHDAHATTASSSTSVSDATARPLPPAPAYDVNKSMLRSLYAVQTPKRSQQLEIEVVAEKPRRLIMADGGGGGDAKPEAALASEGFGRGDKGPERCCSIDDEHGELAKAYAPTLRPPRLLMDGVVRPRWVAVVGRAHAGAARVTLERR

SEQ ID NO: 69216 - protein, 118 aa, Zea mays
  Coding DNA Sequence Number=SeqID_25841
  Homolog annotation: Hit_ID=Q6QP51; Match level="QueryCoverage=93%, HitCoverage=40%, E-value=3e-09, Identity=40%"; Hit description =Putative growth-regulating factor 1
MRLTAAESSLGRHRKLRLARPWASASGEVCASPDPRARPPPRPRKMDSASPDPRARARPRPRRTVSASPDPRARPRPRPQKESRPHPTPTSASGGVSASPDLGLGPTTPQGGSSLPYP

SEQ ID NO: 69217 - protein, 69 aa, Zea mays
  Coding DNA Sequence Number=SeqID_25842
MQMGLCFDADEELTPNGYYSMPNTDIILLYALRRTLLAGFEVAITAKPKRSDGGTGALFLSVPPHDANW

SEQ ID NO: 69218 - protein, 161 aa, Zea mays
  Coding DNA Sequence Number=SeqID_25843
  Gene Ontology: Mol. function=receptor activity; Cellular component =endoplasmic reticulum
  Homolog annotation: Hit_ID=A2YX85; Match level="QueryCoverage=40%, HitCoverage=25%, E-value=3e-15, Identity=59%"; Hit description =Putative uncharacterized protein
MEENSETFVLHSKQERKDKVKPMHIIDVPGHARLKPKLDEVLPKAAAVVFVVDAQDFLSSMQAAVEARTRAKPRKTANSAPPDPGLGLGLSPRRRRIPLRPTQGSDLGSAPEDDELHFARPTPPWPQPTASASPDLGARTRPRPRKTDSTSTSEKPPHRPT

SEQ ID NO: 69219 - protein, 126 aa, Zea mays
  Coding DNA Sequence Number=SeqID_25844
MTLTGFSRKMATALLIWPLTGTVRGVFIGMPLQIRHVMRSGHAGPVTMGRITRGPPSWTSPHGGVTAVAGLRLMSYGAKGVPARFVSVGPTTAVKASSEGWRLCLRPNICPPRDQFDKVIWCRRRR

SEQ ID NO: 69220 - protein, 97 aa, Zea mays
  Coding DNA Sequence Number=SeqID_25845
MELPLDAQSSGRRLDVDERVEQCRVVIGILHVLARFVLVLQMQHLRGIHTYREEASRTELLGSRRRLGKGERRYGGLLTPRPIINPKAQSNFGFDPN

SEQ ID NO: 69221 - protein, 328 aa, Zea mays
  Coding DNA Sequence Number=SeqID_25846
  Pfam annotation: Domain name=BTAD; Domain location=144-244; Score= -26.6; E_value=0.041; Accession=PF03704.8; Description=Bacterial transcriptional activator domain
MDKDRQGAAQKRQAVVGLHEARPKRQRGAAKAAAPGGGKPPLAAKSAVPASSKAAEAAAGAGGSKSAKTVPPSSRAPEVAKAARGLPSPGKRVADFATDISVDDYLGGSDEGQLVIVAPAAATMAAVVVPKAKGGALSAGGEMPALAAVKDEAGAVFPPLKEMKSAKSGGGLRRTERAAQLEERLNALQSRVERTEAAARAEAERTCKQLMDSYHELGARTGDFEVPDREPGLRCLEWVQEELQALPTIVEGFMSYASLVTCERAMNALSREGCRHFEVFDQADEDFERDIYKVEDPIVKESPGAIFDRMWGPHGRFFSERAETARAQ

SEQ ID NO: 69222 - protein, 347 aa, Zea mays
  Coding DNA Sequence Number=SeqID_25847
  Gene Ontology: Mol. function=DNA binding; Cellular component=nucleus; Biological process=regulation of transcription
  Homolog annotation: Hit_ID=Q5F4H5; Match level="QueryCoverage=96%, HitCoverage=100%, E-value=1e-142, Identity=77%"; Hit description =Putative uncharacterized protein nac4
  Pfam annotation: Domain name=NAM; Domain location=23-153; Score =281.2; E_value=2.1e-81; Accession=PF02365.6; Description=No apical meristem (NAM) protein
MAADQQPQLQEEMNDAAGGGLRLPPGFRFHPSDFEIVSFYLTNKVLNTRFTCTAITEADLNKIEPWDLPSKAKMGEKEWYFFYQKDRKYPTGLRANRATEAGYWKATGKDKEVYNAAEGVAVLVGMKKTLVFYRGRAPRGDKTNWVMHEYRLEGSGRLPAGLASATGSAAANAAAALKASAYKTTGIKKTTAAPAYQVAMAGAEMDQNQNNFPGIPFPMPMQFPMLPDFSLDPVPPYYPNAAGAGMSMLPMAAGIGGGAGGFQLNGAALFGNPMAAPQPMSFYHQMGAAGTACAGGFDVSAPESRPSSMVSQKDDQANGAEISSMMSVAGPGPATTTTIEMDGVWKY

SEQ ID NO: 69223 - protein, 199 aa, Zea mays
  Coding DNA Sequence Number=SeqID_25848
  Subcellular localization annotation: CTP_CleavageSite=22; ConfidenceScore=5.11e-01
MGHSISSFDSPRLDDNPPPPVRSSSNQGPSHDISLWSVTEQLVGFDAAESSPRNPLPAPQGWPLFARRGTRVSTRLQALSTAPAYKHHRQREKKVSGHRHLVLAQPLAVRVAIRELREHACEANPSPIWQEASWSGGNSSPEPGGDAEFLSLRGPARASSQPPGGSDRTVRDGSSFIKSETSDSDPMAALAYRFTRRPI

SEQ ID NO: 69224 - protein, 55 aa, Zea mays
  Coding DNA Sequence Number=SeqID_25849
MGEGRWASRVRGSKGARGLGRGRRTRERGRVHGGEIVGKRVFNSNSNQVSNSNQI

SEQ ID NO: 69225 - protein, 154 aa, Zea mays
  Coding DNA Sequence Number=SeqID_25850
MPRRRRDLAAVAPSSLHFPLGGAAARRKKLRHKVDVERGPHEFYTQGSGQSPTQSQPRDPRCFVEPPARFPALAAWLALTVKRSITEEIGEEDSDPGAPPPREKRRARKGALADSRAPPFSGRRTTWVKWAATGIRIPPVCGCQVRNGEGNGPK

SEQ ID NO: 69226 - protein, 35 aa, Zea mays
  Coding DNA Sequence Number=SeqID_25851
  Homolog annotation: Hit_ID=A2ZNA8; Match level="QueryCoverage=91%, HitCoverage=11%, E-value=2e-13, Identity=93%"; Hit description =Putative uncharacterized protein
MAWDKDHGGVRDGTSLVLWEWCEGDNQRWKTVPWY

SEQ ID NO: 69227 - protein, 296 aa, Zea mays
  Coding DNA Sequence Number=SeqID_25852
MKLWKETSRSSKTTTSSRWLDLDTLHESPSSPSYPPALLSVRFAVPWPQEIESVRSCSPVLPLEAPPAPPLGAPASGVAAGGDLDDGGGDDSSSHDTDFPADQELEGWVARPITRDAARGCHFHDALDTLLRQALNRRTWSIEYHCVGAEACSEHYSISERDSAEAAMQDAAWRALSHYCSVLGGVADGLDLKYYPRRPSGSTGGVIVSPAGEDNPRLSSTVNLATVLNTELDHALDELSRARAEIALLRAERAERRHLDDGSPAPVGTQHPYRSPRRGHQSYGNPDCKTKINLEP

SEQ ID NO: 69228 - protein, 88 aa, Zea mays
  Coding DNA Sequence Number=SeqID_25853
  Pfam annotation: Domain name=zf-CCHC; Domain location=19-34; Score =10.7; E_value=0.037; Accession=PF00098.14; Description=Zinc knuckle
MTLTKENDKQQASCQVERRVCYKCGEKGHLLKRQLIKPRMEARRASRYQVHGRRSKRLRNPKPRVKKKACKVKGDRVENSYGTSRITT

SEQ ID NO: 69229 - protein, 142 aa, Zea mays
  Coding DNA Sequence Number=SeqID_25854
  Subcellular localization annotation: CTP_CleavageSite=73; ConfidenceScore=5.19e-01
MAHGRNLFSGEKFTEHQGLPSPANTADRFPEGLQMARTRSRLRNTATTTDARRRSTPNAFGSARRAFLEMMLRVDRVGVLYRAKATKIGGMVATVSEFAGRSGHGTRAAKAARIKDIFKAFIGLGKKSRVLVVTLGSDKYSV

SEQ ID NO: 69230 - protein, 169 aa, Zea mays
  Coding DNA Sequence Number=SeqID_25855
MESWGNNGGTGTRQTMVAELRLCENHSGERGPAEPRREGAHRRVSQAADSEAELTVALDGARTRRWPHNRRWSVAGGGGALCTHGQSEREGERAWQRAQMGEGLKRGMGAQKGRGGSDVAKERADVGASTAGRSWAREVFLVAARELAPRHVATAPTHHSPASPTPPSP

SEQ ID NO: 69231 - protein, 247 aa, Zea mays
  Coding DNA Sequence Number=SeqID_25856
  Subcellular localization annotation: CTP_CleavageSite=22; ConfidenceScore=5.45e-01
MASATRPRLGRPPPRPGRPGPCSAAPDRLGRLSRPPWRSPPRIGSPRPGPAVLAPARPPTLRPRPNRPAPGLGRPCPAVPRLGRRPPGSTDRPVPRPDRPVPRLGRPWPDRPRAPARPPRAPARPTPARPPPCPGSAAPALGLGRAPARAPCLPARPAVPCLRRPSAWPRARPSVPSARGLELGQRTAPTRARLVRGTLSVVLRVRVLAQRSGVVRRARDATRSALLRSRHDRLPPSPVYPPVSYMR

SEQ ID NO: 69232 - protein, 68 aa, Zea mays
  Coding DNA Sequence Number=SeqID_25857
MALYGYTMSMMSNMTDEAEVPDLSASRDNSDLSEDDPCDPTTTSKPEAPMQSLNQLPVVTDLADARSA

SEQ ID NO: 69233 - protein, 190 aa, Zea mays
  Coding DNA Sequence Number=SeqID_25858
MAKNFGSKTVQIAMNVVVTSHLLVCLYSTAAFENKSPTGLVRIANSDRYCFNEAKAAACSGPHAKSFAPWSVLRKGRLRSADLEMNLLRATNLPAKSCVPHVRKRFSEVSQMVLLASAGDDDVVHIRKYVSADLALEHRFGESRECGPGVLKSLRHSDEAIRAEGCYETGAGLVFLFHIYLMVAGETIKE

SEQ ID NO: 69234 - protein, 124 aa, Zea mays
  Coding DNA Sequence Number=SeqID_25859
MSANVCKCKDDFCLHTSKDMKPHRTPPRATYDAKNVPGIGCKPNGSNHHCIYLPLPEVRANPKYDPEAHHLGFSPFPSSLLPSTKTIEDSHHDDDDPSGKDWHLGRRGLRGGAARVWWLQELRE

SEQ ID NO: 69235 - protein, 173 aa, Zea mays
  Coding DNA Sequence Number=SeqID_25860
  Pfam annotation: Domain name=MAP7; Domain location=6-161; Score= -75.7; E_value=0.033; Accession=PF05672.2; Description=MAP7 (E-MAP -115) family
MAPKRASSKAAPSVDDAAKAALLAEKKGKALVDTTHQEACEDDALSKRQRNEQLTPEGSLRTCSSGGQPQPPPGFAPPEGANATEDGEVIGISVEEQLQLRALRIKNHNLEKQKEILEAKRQRASAQAKVRQMIRDEEQKAQELEQEIALVIPKNVDKENIVDLPILCAIYSS

SEQ ID NO: 69236 - protein, 65 aa, Zea mays
  Coding DNA Sequence Number=SeqID_25861
MAQVLPDTRVSATSHGDPSELKGEISQFARVPLVTRIDSWSNADDEHLRLSAAASLPLSWMAQAA

SEQ ID NO: 69237 - protein, 57 aa, Zea mays; identical to SEQ ID NO: 45068
  Coding DNA Sequence Number=SeqID_25862

SEQ ID NO: 69238 - protein, 84 aa, Zea mays
  Coding DNA Sequence Number=SeqID_25863
MSLRYDRIYTPSALKIERPRLSVNVAILAKGRYLRTQVGITADQNNTKIDTAPKVNSTLVLFTLIWHSLLRHACTFISFKLKLQ

SEQ ID NO: 69239 - protein, 40 aa, Zea mays
  Coding DNA Sequence Number=SeqID_25864
MGKPVPSLLMLLLGRGITFITFVRNPLYPEGNNASKDEEL

SEQ ID NO: 69240 - protein, 136 aa, Zea mays
  Coding DNA Sequence Number=SeqID_25865
MRLEFVGVLGRAWASTSSRRDVGTQSMARQSWSEGHRGLGREAWRVGSDVRRGEHREARRPASREMRLIAGMAPRHGYDGIGDDRAGVPDLSVSGDNSDLVEVDPHDPTTTSEPEAPMQSLNQLPMVTDLADARSA

SEQ ID NO: 69241 - protein, 111 aa, Zea mays
  Coding DNA Sequence Number=SeqID_25866
  Subcellular localization annotation: CTP_CleavageSite=47; ConfidenceScore=5.38e-01
MDRVSLSVVLKFLPQTVSTSPGQASRANDYSAVSKPDSSPPTSSLACARRLAYSDHLRRRSAHRLDRQDLHYTLNHFTGVISPPAENLGNLYLEKYSIKFSQTSFTGFKIL

SEQ ID NO: 69242 - protein, 94 aa, Zea mays
  Coding DNA Sequence Number=SeqID_25867
MAWRLTRSTFVGERKESGEGDSGSPVRLCRVRGLGELHGFQAKLTEQLAQPGSGWSELAAVAEARVAWREVARHVQGKVRVRIPMPSSGMRKRG

SEQ ID NO: 69243 - protein, 168 aa, Zea mays
  Coding DNA Sequence Number=SeqID_25868
  Gene Ontology: Mol. function=protein-tyrosine kinase activity; Cellular component=integral to membrane; Biological process=protein amino acid phosphorylation
  Homolog annotation: Hit_ID=Q10C82; Match level="QueryCoverage=40%, HitCoverage=8%, E-value=6e-10, Identity=52%"; Hit description =Leucine-rich repeat transmembrane protein kinase, putative, expressed
MAVRRGIPALELPITVAGFLKLVELCKGLVVLPCLASSVEVYGLHDPLADGNFSIGVVVTTLSRLPNLMVLTLSWLGLWGPLPGKLGRLASLEIVNMSGNYLFGEVPRGVSRLAGLQTLYTMLRGILNWLNGDFSSHIMIGPDQIEALYQYAKFQFECGNYSGAARVM

SEQ ID NO: 69244 - protein, 67 aa, Zea mays
  Coding DNA Sequence Number=SeqID_25869
MPRSRIRLVLHDTRINPKQIRVFLLDATELVMPPTTFPQQQGGDARAFPRVDKEVNIIFGGHSSQEN

SEQ ID NO: 69245 - protein, 178 aa, Zea mays
  Coding DNA Sequence Number=SeqID_25870
MQYNGSSSLISCEKQTIRIEFLSLQVTALVPTITGMGDHVSSRVRGKVCGQADPLVQALVLDPGLPPEQLLALSRGLNQKMAQRLTWSTCAGGVLNSSEHDCAFSMAGVLGLSLGKLYGLLGKLPRGLDQAKEDREWFGHGGCPRAALAGRREVTGAMGELQGVWRGAKDATGKTAGL

SEQ ID NO: 69246 - protein, 532 aa, Zea mays
  Coding DNA Sequence Number=SeqID_25871
MDKDRQAAARKRQATVRVHEARPKRQRGASKAEASGGGKPPLPAKAGASAPGKAPEATVGAGGPKLSKVVPSASGVAEAAKAARSLPPPGKRVADFGTEIDVEDYLGGLDEGPLALVVPGAAVATAAPAPKAGVETLGAGGEVTALALVRDEADAATRRLKGAMEALSQVADFTSRTASGALTATLSAEVERLRTQHADAVREKSASDSKCRKLAEKVAALEKEKADLRRQLMEERREANEAIAKEQSAQAEARLARAEGNVAKELAGELQRRLAAFESRAEGAEAAARAEAERTRSQLMTSYRELGVRTSDFEVPEREAGLHCLEWVQEELQELPTVLAGLMSFTSLVTCEAAMNALSREGCRHFEALDQVDEDFGRDIFEVEDPVVKESGGALYDRMWGSYGREVVRARAEAARAQAERGERVDDFGALNSAPPEPETTPAEAATGVAPVQDFGPAHATATTGFLAASTAEGGNECGGSVSEFFDFTDSGSSAEWTEESSEEDLDYFAALDEAAAEAALHAADAPRRARS

SEQ ID NO: 69247 - protein, 222 aa, Zea mays
  Coding DNA Sequence Number=SeqID_25872
MAVGRDVNGDPIPANPWGIPLLGYGYGTKIVPMGMDMGQNLYPLDRENESDVREQLLTIEEKHSAHNACRSDVMTGVDLGNGAAPVQVARVIATGTLETNWWRWRPDWRWRMPESEPARPSRRLLPCALAEFVEPEGVESDRRLNGGSRTAGNIGNAAAQGWGPIEDPKPEWGWVWDKFCTHDGYEDGDGSNMMGMDIGCYNPMRNSPLTSLAVGNKRIINS

SEQ ID NO: 69248 - protein, 23 aa, Zea mays
  Coding DNA Sequence Number=SeqID_25873
MGKPVPSLLMLLLCRGFRNHYAK

SEQ ID NO: 69249 - protein, 337 aa, Zea mays
  Coding DNA Sequence Number=SeqID_25874
MEKDRQDAAWKRRAVTRVGGPFREAKKARGGAKSAAPGSSKPPPAAKPAVPGPSKSSASARAVASSVGKPALGRAHEGAKATVAGLKQDHGARSDAGQLAVVPTPVAATSPTVAVGTKGASQDPWSNFCTSDEISSAATAKDVAGSVSQQLRHASQQLKHAAAFADHVASGCPDFGVCCRNRAPPGIAYGCCSGEVGCGKQKPQADGEAAQAEAKLAWAKASLARQRAEELEERLNGLRNRLDKTEASTRAEVERTHTQFVDAYQGLGARTVTFEAPGQEVVLRFLGWLLEELEGCGHFEVFDQSDEGFERKIFQVEDPVLKRSAGALFDRMWGPHG

SEQ ID NO: 69250 - protein, 119 aa, Zea mays
  Coding DNA Sequence Number=SeqID_25875
  Homolog annotation: Hit_ID=Q7XBD3; Match level="QueryCoverage=21%, HitCoverage=5%, E-value=6e-07, Identity=96%"; Hit description=Zeon1 gag protein
MDEYIRADNDFRQRREEAYRFSEMTRASEEESTRGTSDQFTTLRVMTEKVNCRGRSILHKLRSSSKALSGRQLQEAEAPGASEEDMGISPGRSTAYFVVKTRATIQERVKLPSKSRKRS

SEQ ID NO: 69251 - protein, 136 aa, Zea mays
  Coding DNA Sequence Number=SeqID_25876
MVRGAHGIVAAIHGATPEHIRAGGWHGRRYGDGRGQEEGTLYGPLDSAASMKMVAEARLGLLIAILMLIPGLPKMDREQNLSRIDEAKGIIDKMKVKFPDKFEGWKEVKEVGELRGAREDARLLLKATSCHPILVW

SEQ ID NO: 69252 - protein, 122 aa, Zea mays
  Coding DNA Sequence Number=SeqID_25877
MTRLEQSRSLAVAHLEHVMSVPPKPDLALFLLVHGRLDGVIVRAMQNEVVAAARLLNGRFRHAVVGRAGGGGMGMGNVTQRCGNGKQRRGHGCGTHLLDDCTTRDMGMGMVEPGMAAYPLPS

SEQ ID NO: 69253 - protein, 109 aa, Zea mays
  Coding DNA Sequence Number=SeqID_25878
MEVESVDGVAGGVNRLRPKPIRCLGRQLDRSHFFLLPPLCLDLCFPTPNADPSRLDVQELRYVVHRAPMPKDLAGVAGCRSHGHPWIRIVEVSAMGQELDVKVPLLHDE

SEQ ID NO: 69254 - protein, 256 aa, Zea mays
  Coding DNA Sequence Number=SeqID_25879
  Homolog annotation: Hit_ID=Q6QP54; Match level="QueryCoverage=39%, HitCoverage=34%, E-value=2e-07, Identity=42%"; Hit description =Putative kinase
  Subcellular localization annotation: CTP_CleavageSite=55; ConfidenceScore=5.05e-01
MEPGGGTAVGVVESLLTSSCFRKGAESRRRHRVCRAPSSPIWRSEPDGTPVLFPVARVSSGLGDVEAPPKPRSSLSSVAEVESEPPGRARRRSPADAGAESEPWGRAKRSSSSSGAEPKSEPWVGRGGDRRLLGLSLSPSPGSGGVRRLPGLSPSPSLGSGGVRRLPGLSPSPSPGSGGVRRLPGLSPSPSPGSGGVRRLPGLSPSPSPGSGEAELPMVPSTGPDCLSASLCRVAPQSERRRRRCLSVRPVSGAAK

SEQ ID NO: 69255 - protein, 338 aa, Zea mays
  Coding DNA Sequence Number=SeqID_25880
MGAGTHTSYELIRSTKKANCRMRDINRWSKGWTAMRQASNCTAIVRPFGSVHIRWTSAKEAGPHVMTQQCQLKVTAMGRSAAGDRERGHYGMDPSWRRKRALSPPTDQGFEGWPLGRVSTAAPEHSDFKPITDQGFEGWPLGRENSVARSAPTTVSATPATTDNKSRSTTEFSLGCNRKLRLARPHAPASGGGLRLARPQAPASGGGLRLARPPDSASTPVSGGIASSPDPGLGLKRSLRLDRPWARTDRANRGCIISLFLACSGYKEQDRRPIWLTPATGLRRSSGGHAITCTGPKLSPNGHVGIGRRAKGGVFAFTPTFALQGASSTKLAGAEDCR

SEQ ID NO: 69256 - protein, 76 aa, Zea mays
  Coding DNA Sequence Number=SeqID_25881
MTYFFSGLINLLLKIGEAKHLFLFPLDLLMNGFEVPDFLVQLLLLSASPSPEDFFGGMTKVTACRRWSNEFTGAGR

SEQ ID NO: 69257 - protein, 168 aa, Zea mays
  Coding DNA Sequence Number=SeqID_25882
  Gene Ontology: Mol. function=nucleotide binding; Cellular component =intracellular; Biological process=small GTPase mediated signal transduction
  Homolog annotation: Hit_ID=Q336M3; Match level="QueryCoverage=95%, HitCoverage=97%, E-value=6e-84, Identity=85%"; Hit description=ADP -ribosylation factor, putative, expressed
  Pfam annotation: Domain name=Arf; Domain location=5-151; Score=271.2; E_value=2.1e-78; Accession=PF00025.12; Description=ADP-ribosylation factor family
  Pfam annotation: Domain name=MMR_HSR1; Domain location=18-129; Score=- 10.6; E_value=0.01; Accession=PF01926.14; Description=GTPase of unknown function
  Pfam annotation: Domain name=Miro; Domain location=19-129; Score =11.5; E_value=0.00084; Accession=PF08477.4; Description=Miro-like protein
  Pfam annotation: Domain name=Ras; Domain location=19-153; Score= -78.0; E_value=0.0017; Accession=PF00071.13; Description=Ras family
  Pfam annotation: Domain name=SRPRB; Domain location=15-157; Score= -58.9; E_value=0.0028; Accession=PF09439.1; Description=Signal recognition particle receptor beta su
  Pfam module annotation: Pfam domain module=Arf::MMR_HSR1::Miro::Ras::S RPRB; Domain location=5-151::18-129::19-129::19-153::15-157
MGQAFRKLFDAFFGNKEMRVVMLGLDAAGKTTILYKLHIGEVLSTVPTIGFNVEKVQYKNVVFTVWDVGGQEKLRPLWRHYFNNTDALIYVVDSLDRERIGRARAEFQAIINDPFMLNSVLLVFANKQDMGTCALKGDGLYEGLDWLATTLDEMRASGRLTSASSSAS

SEQ ID NO: 69258 - protein, 610 aa, Zea mays
  Coding DNA Sequence Number=SeqID_25883
  Gene Ontology: Mol. function=transporter activity; Cellular component= membrane; Biological process=oligopeptide transport
  Homolog annotation: Hit_ID=Q7XBS5; Match level="QueryCoverage=90%, HitCoverage=94%, E-value=0.0, Identity=65%"; Hit description=POT family protein, expressed
  Pfam annotation: Domain name=MFS_1; Domain location=61-533; Score= -17.7; E_value=0.073; Accession=PF07690.7; Description=Major Facilitator Superfamily
  Pfam annotation: Domain name=PTR2; Domain location=123-529; Score =321.2; E_value=1.9e-93; Accession=PF00854.12; Description=POT family
  Pfam module annotation: Pfam domain module=MFS_1::PTR2; Domain location=61-533::123-529
MSPPPPGGSNGRRHQQQRQEAVSSMESGGGASGAATKRFTWKGPVIVLGKESDPDPWPSIPSVFELLESIAFSGVALNLVVYLATVLHGSTAFNAAHVDTWNGTTFIVPVIGAFLADSYWGKYRTILASIVFYLVGLVLLTVSAAIPSLRPATACQMGESCAPATKTQFSVFFAALYLTSIGTGGVKSALLPFGAEQYDDDAGRPERKQAFFSWFFAAINLGIFVAGTLVSWLEQNVSWALGFGIGTACLFVAALAFAAGTPCYRVQMPTGSPLKDIIRVFVAAFRKRDVRMERDEGAAVLLHEDEAEDEDEDGDSAGQQQRLARTKGLRCLDKAAAIIVMDGDKERESEWSLCTVSEVEGVKILVRMLPIWMTCVLYAASLGQMTTTFIQQGMAMDTRLGGRFKVPVASLVSVEVVFMLLWVALHDAAIIPAARRLTGRPGGLTQLQRMGVGRFLVVLALGTAALVERRRLRAIHGGSGPMSIVWQVPQFVLVAGSDVFCGIAQLEFFYGEAPAAMRSICSAFSFLALSLGFYVNSLVVTLVAAVTKRPGWLATDLDTGHLDYYFWLWTIISVANLLLYMVLAARYTPKQVAAAVVEPMRPSNSGGSDE

SEQ ID NO: 69259 - protein, 56 aa, Zea mays
  Coding DNA Sequence Number=SeqID_25884
MDGHDSRQNVQPFERNVRNKPYKVDAGRYTQCSLLNGHRKKNSSTRRPGKKTKNRM

SEQ ID NO: 69260 - protein, 85 aa, Zea mays
  Coding DNA Sequence Number=SeqID_25885
MGRTAYEPSLALRGTKPCGLRGLGRPILEVIEGSLSRLTKVKRGTWAFARTTSAAWPAGPAGAAFGLWNVEEFKPWAFDKKDLPI

SEQ ID NO: 69261 - protein, 233 aa, Zea mays
  Coding DNA Sequence Number=SeqID_25886
MVTSSLMVGESEPGCGLCPSLSLKDFHHQGWGGDCTVPGFRTRVASEPLAAPASATAAGRGSSAGEIARAGHGPTSNSTAFCPSLPHEFGRGRGPPGSSIRPEVSAAAVRPPGAEVVVVAAAGAGDGAPFIGLLLLRRPAPIEWGCSYLRRGNRSSVCNGTLNASVFVHRGCRGLNMTDAGVDQPRPRVGLAPLEDGRPRPQGSDLVEGVVDAEGATAPVRRQDPSLQDQSVL

SEQ ID NO: 69262 - protein, 127 aa, Zea mays
  Coding DNA Sequence Number=SeqID_25887
MAHRRAWSTRTGRRPKSGEVDFGLPVKFCRVRGLGKLHGPLADLAEALARLGGGWSGLATVAEALAAVAGGKELVGAKEGWLAGDGERGGKRYGARKSGLSPCSNPRQIQGFVVSRARVPMPSSGTR

SEQ ID NO: 69263 - protein, 67 aa, Zea mays
  Coding DNA Sequence Number=SeqID_25888
MSLSSKESTSLLSVMSHMEALRAEPVAEGEMPASSVRLVSKLKRRLLFKVNLTSSGRNVKSSGDAVN

SEQ ID NO: 69264 - protein, 82 aa, Zea mays
  Coding DNA Sequence Number=SeqID_25889
MTEMHCPTLTGLHERAFPAFYGRCTFDPERSFGLENSFLVFPKMSEGKKIPADTKLSLDDDKNLGFLIAMAETIRRNHQGDS

SEQ ID NO: 69265 - protein, 67 aa, Zea mays
  Coding DNA Sequence Number=SeqID_25890
MAMASTGRGEAASSARHPHPSPKLTRPTTSDGGKFDLAEMLEDADKTYLHSPRIVVQTTTRMFNSTT

SEQ ID NO: 69266 - protein, 177 aa, Zea mays
  Coding DNA Sequence Number=SeqID_25891
  Subcellular localization annotation: CTP_CleavageSite=43; ConfidenceScore=5.03e-01
MANWSWLLVLLCVTSGAVMTPQSLIYFTNLGSGEGRHGRNRTRLQRRPSVGTGNFHQASQITNIALPGGLRSEPSGIARRSKSSVAERPLPQTTFSASPYQVRPPSSSPCNRPLRVALVGFDFGRSEAGAFTLAMVYVVDCWGAGRSTVGGSMKAVDLQILMGGSGLDDDILSFNNI

SEQ ID NO: 69267 - protein, 201 aa, Zea mays
  Coding DNA Sequence Number=SeqID_25892
  Subcellular localization annotation: CTP_CleavageSite=82; ConfidenceScore=5.85e-01
MSRPRPTAVSASQAARPPTPGSSATTTGAAPARLRPCALAQARSHGYSPFTSVRRGFFPITVGRTFLVSIPNEGISRRPSLAAAAAASQTCGDQLPWATTDGTHIICTAATCRWLAVAPALLAPGCHEQPARQPAACSSDPFQAAALEKFEMTSSQPSLSSFRRPTQADETHKAGTSQGLKSSAKTEAGLKISLNMDAYSP

SEQ ID NO: 69268 - protein, 450 aa, Zea mays
  Coding DNA Sequence Number=SeqID_25893
MGGSEPGSFAEKDPFRATGAPVARRVGLGSKLACQKSEKRVHLARLHAACMAARPFCPLVWAKMGGRLVGSSHLPSPRMGGIRRLSASSLEERNSMGVGTFQPSFGFKDFHHAAWPHPATGGHPRWPRWKMRRVGGLPPRGSAAPFFPLRLGVKGVLEPHGDFLQPCQDMQGARGPGSPSPCLNGWFSSSAGGSPSAVTPPPKLLPKPLRRLGQGWWSSRLERAAASRPSFFSYSAGLPLRRGVVRTCGGGNRSSVGCGISTKSRLFDYLNRFTKHELPRVKVTGEPTPKSVSRGLGSGWRPWKPIDRGPRGNRLSRLLGPDSRRSPWTAAPPEAGSGFAEDVVDAEGATAPFGVKTRACRIRSSCSVCFLRPPRPEEHTLAALAKLRLFSSCFEHLDSVGNRDVCVSESCFSRKGRVRYPYPRGVGIPRLGRPCRLRVLSPVHEALSPT

SEQ ID NO: 69269 - protein, 104 aa, Zea mays
  Coding DNA Sequence Number=SeqID_25894
MACEATDTCGPSDHGCGGYSTVRGTWRAEAKERTWLVHIGRRREQRDMADRFGENLQARGGGENELGTRKGWRVAFFDMAAMAGAMAGTKRLRRCSLAETDAGV

SEQ ID NO: 69270 - protein, 150 aa, Zea mays
  Coding DNA Sequence Number=SeqID_25895
MGKSNKRKRESTPPSEDFGDSEYSEEEFSSESEGSPAPVSPPASSDDSDDSQGIVVEVWTYIRAIERSRLEGSDESEYSSDEEDSSDSSEECGGGDGGDDDDDGGDGDDGDDGGDGGSRGGNGGSKGGNGGSSRGSNGGGSSKGSNKASG

SEQ ID NO: 69271 - protein, 152 aa, Zea mays
  Coding DNA Sequence Number=SeqID_25896
MALAWLGRGAGHAGARASVPWRGQEASNTWRDRKHANLAMNPAQTSSWHLGLSHMCGTFGGRDPRDLSSGVVDHGPERVSALERLRPGSSFVCPDRDFSFLLSKRSHGLTDLAPRKALKTASASAAGAVTPQVLLRVSTQGYTIFELLSHVG

SEQ ID NO: 69272 - protein, 210 aa, Zea mays
  Coding DNA Sequence Number=SeqID_25897
  Subcellular localization annotation: CTP_CleavageSite=35; ConfidenceScore=5.63e-01
MARARAYKALPGFDCSLPRTLKPHRSLARRRLPVRSVSAAAQSFCHRRPANRTIPNSVQPSEKTVHTSVKLPERGIGVCFAGEASPRSPELSTPPEYVDRVIHSTILRFLVHTVPTLPREAHRALGLNQFAVVWPIKENRKRGINNEPESTPIFVRILIQDCNLADGEYILVPEQGAAQEVAPDPAPEPAPEDVSATALEGKPRFSTKTY

SEQ ID NO: 69273 - protein, 107 aa, Zea mays
  Coding DNA Sequence Number=SeqID_25898
MAFTVAAPPAIIGHALRDSPRCGLTLKHVACPGDRSMAAKVIRSTDEQGRYDKLSHGRTTVMARWPPINRGLPPPRFNATSQKSFTVAADDPSRAAVASLSPARPFL

SEQ ID NO: 69274 - protein, 113 aa, Zea mays
  Coding DNA Sequence Number=SeqID_25899
MAIWLALATVTAHPGNNSRVFPMIYFGLALTLKHVARPGDRSTAAKVIQSTDEQGRYDELSHDRTTVMARWPPINRGLPPPRFNATSQKSFTVAVDDPSRAEVASLSPVRPFL

SEQ ID NO: 69275 - protein, 152 aa, Zea mays
  Coding DNA Sequence Number=SeqID_25900
MVQRLTWSTCSGGVPNSGEHDCAIPVAGVLGSSSGKLHCLLGELSKGLDRAEEGRKGVGHSGCPRAALAGRGEVAGAMGELREVWRGARGFACGRALSVPPRVSPRRTRGGLLLPGFNGRFNHLSVQILAKPRGSLGAILSIGPKGFEFGIK

SEQ ID NO: 69276 - protein, 59 aa, Zea mays
  Coding DNA Sequence Number=SeqID_25901
MGLKTLSTKPSKEKDSQGYTGFMGIKIIHLHVGPSISSRGEAYAQRHLVVDSALVLRIT

SEQ ID NO: 69277 - protein, 200 aa, Zea mays
  Coding DNA Sequence Number=SeqID_25902
MEIEAEKRERCELRERGERLGAVRNRGSGRIFHGRAGEQPRQAAASDQPQSCSPAAPLPPECAAATAQSAARPPQHPDAAVGPHSPYRSSCRTPLMQGDGFTADSGVQILSCPGPWGSATRRHSQAPGGGASRAIGQRHMSIFLNDQQINADQQINAAPQTLSSISTGYPIPDGYPVGMGTGPFFYPIGLVKSNLEACVF

SEQ ID NO: 69278 - protein, 133 aa, Zea mays
  Coding DNA Sequence Number=SeqID_25903
NRGGRKGGGAYRRRDCSGEVVEDEGEVSGITTGGSRDAREDMSARNLRKTHWIARSTRDGGRPKSGEVDLGPPVKSGRVRGLGKLHGLLAELAEALARLEGGWSGLATVAEALAAMAGGFELAGAKGKWLAGE

SEQ ID NO: 69279 - protein, 141 aa, Zea mays
  Coding DNA Sequence Number=SeqID_25904
  Subcellular localization annotation: CTP_CleavageSite=40; ConfidenceScore=5.39e-01
MVQWITRSTHSGGVVNSGDRGLASPAKQASIPRSGSFTEVCSVVSGGRTGLGKAGLAGLRRQGLGGRGHAANGQTTGPFGTAPAPDSKRGSGGAVPNGRIRRISSSRESGSGAKEAGAGALPNGPLDRMALGAYRFAVRQS

SEQ ID NO: 69280 - protein, 181 aa, Zea mays
  Coding DNA Sequence Number=SeqID_25905
  Gene Ontology: Mol. function=ubiquitin protein ligase binding; Cellular component=cullin-RING ubiquitin ligase complex; Biological process=ubiquitin-dependent protein catabolic process
  Homolog annotation: Hit_ID=A2YWT5; Match level="QueryCoverage=31%, HitCoverage=8%, E-value=4e-22, Identity=92%"; Hit description =Putative uncharacterized protein
  Pfam annotation: Domain name=SNARE; Domain location=121-181; Score =20.4; E_value=0.0047; Accession=PF05739.10; Description=SNARE domain
MEQCVARLDVAMFNAILHESASEIPTDPISDPIVDPKVLPIPAGDLSFGSRAQLNNSTVHGACRDDVCLWLTELQPTMEGALARTATIPVFYTQLRCQQLCSAEWRIIVTSSKTSSPGRAKKDDALSNLCSTLGQLKKMAVDMDIEIDRQNKVLVPFSDDVDELNFRLKGVNQCGRQLLGK

SEQ ID NO: 69281 - protein, 222 aa, Zea mays
  Coding DNA Sequence Number=SeqID_25906
  Homolog annotation: Hit_ID=Q6Z371; Match level="QueryCoverage=13%, HitCoverage=3%, E-value=4e-07, Identity=86%"; Hit description =Putative uncharacterized protein P0519E02.19
MPHSSPHAKVVLLAPCCVRICDDRLADHYFSTAARRLLNHRCATQSSRGVSDSSQDVSQEQKQKPEPNPTESSQRLRQFPIAPFFRRSSSFEMATSRGELADNLKIFKTDNFDLDVYVQSKCQTMNEKTPQVHGIFNSSSEADYICTNSGGPAGLESNKGRKGGARDRRPKSTSQMNVTFSTRTSCRSNLILPFLLWWDQSDTKWPRTTDDDDDMATIAALR

SEQ ID NO: 69282 - protein, 131 aa, Zea mays
  Coding DNA Sequence Number=SeqID_25907
MGFAPIPAVTEPPKSLGPPTVVLVHRTSDNPAGAPDHLTSSVSDEVFISEKLRRYELINTQLGISDHTTYVALNPCICQLTTRVFKTRSGSRQLRAQIHHRLASCHEGYTLLILVLVCPRQSLPMMRHVTS

SEQ ID NO: 69283 - protein, 174 aa, Zea mays
  Coding DNA Sequence Number=SeqID_25908
MELLLACRGRAGDMATRGSSRPWKIPAHIQEQREETVGEKMEDAAAGMPSAGSIGPAMGERGARRGNRHGCWPCFLRVAAARGTRSRGRLEIRRRHGRQGGASAPRKKEQGRQLAARHGGEHGGEGSSLVAVAAVKQGGRSWRLEIFEGWEWKIAKGKGRGVHIYRGALGLWFP

SEQ ID NO: 69284 - protein, 184 aa, Zea mays
  Coding DNA Sequence Number=SeqID_25909
MSAASSWRPRSWIPPCSTLLLPQAPPAVLLIMLPLENATGTSCRLEFVYHMFSKMCEPVIDPAMSSRRFCRSDFVSPPASSDDSDDSQGLAAEVWTYIRVVERSGLEGSDESEYSSDEEDSSEEGGGGDGGDDDDNDEGDGDNGDDDGDGGSRGSNGGSKGGIGGSSRGSNGGGNSKGSNKASG

SEQ ID NO: 69285 - protein, 254 aa, Zea mays
  Coding DNA Sequence Number=SeqID_25910
  Subcellular localization annotation: CTP_CleavageSite=58; ConfidenceScore=5.46e-01
MEPSSFSAAAAAPFPFSPLWCAAPSLPLNAADRTAPLLLHSSPSNIFGAQFDALSICVASLRTRALCRAIPLLQPSLVHAQRRTALLHVPLRACQAFGEMSRWGAAQRTARRGAHRKRNPVFCVEKKASSSTLLDVRSDAQIRIAIVVTNTEWVCLCVSGKADMGPMAAVEKSHRRRPIRATIGAGVEMFGRQASSPEDLFPPDRTAAVEGTNPGCHAVIPPSGRVRSPAPLSSVRPRHHGFDGLPAMVERGKL

SEQ ID NO: 69286 - protein, 43 aa, Zea mays
  Coding DNA Sequence Number=SeqID_25911
MSISAITLRQSGAKLQVSQNQLVELLLTLSKSSQYHRDYKVKD

SEQ ID NO: 69287 - protein, 655 aa, Zea mays
  Coding DNA Sequence Number=SeqID_25912
  Pfam annotation: Domain name=MAP7; Domain location=342-497; Score= -81.4; E_value=0.068; Accession=PF05672.2; Description=MAP7 (E-MAP -115) family
  Pfam annotation: Domain name=TSC22; Domain location=350-410; Score =1.7; E_value=0.025; Accession=PF01166.9; Description=TSC-22dipbun family
  Pfam module annotation: Pfam domain module=MAP7::TSC22; Domain location=342-497::350-410
MEVVELVPCARNKWGNWWDFWFYVSEGTVEDHPGLPVAVMCSHYYVAYPQFEVAEDDEDKGALRCAARMSSGRDLVEEFIRYGVWPLAHGWALGEVCPREMPSRGGQRVRSPAFALDLHGRDPSTFVREAEDGAARIVGRYVPKTEGLRSWDIRGSNDRLNRVFELNCLPYGGYPGEDTADRRGMKPMGVTEEGPSQEAAPATKKRKLGTVVGGVGISDSFVVDLMGTCAALGGRMSSPELRESSARMLEVTGGRWPKNVPIPRAAGEDLFTSHMARDLKQADASCETGRPQAWQGAGEYEACRHWREQATPRLGRGATGCCPASGGDHFANGDGGGEGCLTGPVATDFADLVASGALTMDVAAEVERLRAQHVDAVREKSAAESKNRRLREKVAAMEAEKTDLQCQLVEERREANKAIADAQAAQAEPKVARAEGSLACQRTEELEARFNALRGLVDKAESSTRAEVERTHVQFVDAYRELGARTADFEVPGQEVGLRFLEWLQEELLVLPTIVTGFMSFASLVTCEGAMNALSREGCRHYEVFDQADENFEHQIFKVEDPVVKSRWGHFLIGCGMAHAEDVEDLVGLDGALLEAAAVDPVPPLDAGEGTSAIPTSVVASEDPAPAPAPTGEAAPKVVAEPAAEDPAAAVGPSQ

SEQ ID NO: 69288 - protein, 193 aa, Zea mays
  Coding DNA Sequence Number=SeqID_25913
  Subcellular localization annotation: CTP_CleavageSite=69; ConfidenceScore=5.19e-01
MGVPGPPLCRVRTTHSKVPGFWDKEFPGLAQGQAGVRSRHVSGPYRVRFRSPLRRRPDAATWPTVRDISQRAEPDVRFLGRASSAFIADKTRRLTGDVPPWHLMYHVHSTGMDVPPRHLMCPVHSAGRQRPDHSAGGVPVYSVGRQYTRAAECTMLIITLRVHSTIQSENFLSDNYVNGNMENHPGKQCYHKG

SEQ ID NO: 69289 - protein, 157 aa, Zea mays
  Coding DNA Sequence Number=SeqID_25914
MGKNNKRKREPTPPSEDFGDSEYSEEEFSSESEGSPAPVSPPASSDDSDDSHGIVAEVWTYIRAVERSGLEGLDESEFSSEEEDSDGGEGEDDDDDDDGDDDDGGDGDGDGSDGGSGGGDGSKGSTRGGSSTGSTRGGSSKGSTRGGGGGSSSKASG

SEQ ID NO: 69290 - protein, 182 aa, Zea mays
  Coding DNA Sequence Number=SeqID_25915
MVTIEGDVEAIKAKEMLVKLTRKMELQLSSLSTPERSLRNTVSSKCWRKKRRPHGHLTEVGKDGCLKDEAGREVLRLEAELLQQQHVERRDRQRQPVGEVGDEEHELPGGEIAKGRGADTDRSGAPHPSRLRTKLSATSDWKHLGGSSKAMAATTVEECGELEGKRVQRVNRVTVALGGTPF

SEQ ID NO: 69291 - protein, 70 aa, Zea mays
  Coding DNA Sequence Number=SeqID_25916
MERIASTCKRADRGPFNWSHASSWHTLESLFLSRVRKRQIFVAFALRWCQMRKNKTEVREDSVLHLGSFA

SEQ ID NO: 69292 - protein, 169 aa, Zea mays
  Coding DNA Sequence Number=SeqID_25917
MALGEAVELGGWRSNSLATDNNPGAALDGVRDVCAVGTLNAEAAHPCQWSGQGTLNAEAAHRQSGVGHVAALGLRLSGERKHSRDLAVSGPDPAQGGPGPVLGGSSTFPWGSGPTVDILEYIVFAGHVATREPSTWWGRALFTTRLEVVIWAPRLHTVVRGTPVLGYRQ

SEQ ID NO: 69293 - protein, 149 aa, Zea mays
  Coding DNA Sequence Number=SeqID_25918
  Homolog annotation: Hit_ID=Q6QP51; Match level="QueryCoverage=42%, HitCoverage=29%, E-value=5e-13, Identity=58%"; Hit description =Putative growth-regulating factor 1
  Subcellular localization annotation: CTP_CleavageSite=69; ConfidenceScore=5.77e-01
MQVACNRAKWARPSDFQRTQHGSPRPRVMQPARRSLRASNCTATRTTTTPPRLWNQYRDSRRPCVRPSSASLARRDRERGYPEKGPSPRRKHAPSLPTDQRFKGWPLGRVQQPPQSAWAPHPLLVRGSKAGPSEGFNGRLRPLGLRAHY

SEQ ID NO: 69294 - protein, 344 aa, Zea mays
  Coding DNA Sequence Number=SeqID_25919
MAPEVISFPLLAVEFYACLPPGGCSHARPCSNSHPESSSWLVVVTISPCCHSRTYCRVRPAPLCTLYFLAELVPARRDRVQLSQLVVLPCARKFSVGRARSSLFAIKSPVRCPHRRNYLAVRSGIGCCRPRHKVHERSLLGSFHHGQFFHASNPYCLPRVRSLFVHRVLRVLAFIVESSNPSSPARSPLRQLAPDTISSPFRASSSNPKNQVKTKLAARYSPSPRQLSGSENHYRSHGFELAIETGSDSGSAPEDDELRFARPQGSDSALASADGLRLARPKGSDSTSTSEEPPHRPTQGTDQPRQQEAPSLPNPKLTQATGNKTGVPSGSLRQTSNDGAPHAL

SEQ ID NO: 69295 - protein, 105 aa, Zea mays
  Coding DNA Sequence Number=SeqID_25920
MTCDASSLFSATTLVMMALILLIGDGNTTCHAVRYLAHAPPPVAPFAVPNIPVVPKPPIVPMATLSLMLAIPTISMVGVVPQIYVVLNIAALPPMTVVVPPSCQK

SEQ ID NO: 69296 - protein, 184 aa, Zea mays
  Coding DNA Sequence Number=SeqID_25921
NRGRRKGGGAYRRRDGSSEVVEDAGEVSGFTMDAREDMGARNWTETHRLALSTRASERPKSGEVDLGLPVKSGLVRGLGKLHGPLAELAEALARLGGSWSGLATVAEALAAMAGGNELAGAKERGLAGEGSCSVTKVSVSECLVPRSNCAKTVSNEFGLSSNFSRTCSREFGTTLIFGSSSFEF

SEQ ID NO: 69297 - protein, 122 aa, Zea mays
  Coding DNA Sequence Number=SeqID_25922
MTTNKVLLQPSNTCMNDFATNSALQRRGDDSAEEGRRLCSRGRPAALCSRGDRRLSAAEKGRRLLQQRRGDGGAIAAREEGWRLQDDLFVGDYCYKLKGMSDSLADMGTSGPSFDAPLPILP

SEQ ID NO: 69298 - protein, 311 aa, Zea mays
  Coding DNA Sequence Number=SeqID_25923
  Gene Ontology: Mol. function=sequence-specific DNA binding; Cellular component=nucleus; Biological process=regulation of transcription, DNA-dependent
  Homolog annotation: Hit_ID=A7X9Y3; Match level="QueryCoverage=83%, HitCoverage=88%, E-value=3e-33, Identity=40%"; Hit description=WRKY transcription factor WRKY1A
  Pfam annotation: Domain name=WRKY; Domain location=115-166; Score =1.5; E_value=0.00049; Accession=PF03106.6; Description=WRKY DNA -binding domain
MAEAVESGGRALLVSELGRVQDLVSQLELQLRAPADADSVDLCRCLVQQIVALTDRSIGMLHSSPDLAPSPLTATGSPISSDAASDHHPFRPAGASPKKRKATARWTSQQVRVSADDGHSWRKHPRAYYRCTHRNSQNCLATKPGAARRRPPRALRRRLPRRAHLQGPPPPAAGPKRAQQHNPHAQAALQGLAARLTVATTTTDNAAGLPPMTPESCPVRGASSPWSLASPVGSDFNGCLHQGISPCPVPGYRDWTSDVDLQEVVSSAFAAVSSVAPLPVPDDEFMPLECVEYVFDQNFDIDTAMPSLYYP

SEQ ID NO: 69299 - protein, 59 aa, Zea mays
  Coding DNA Sequence Number=SeqID_25924
MDVADVVAFGGATARGTTSLMSPDCGVILAPEVTQRRIDNSDQFVILATVRVAFVPVCL

SEQ ID NO: 69300 - protein, 123 aa, Zea mays
  Coding DNA Sequence Number=SeqID_25925
  Subcellular localization annotation: CTP_CleavageSite=26; ConfidenceScore=5.13e-01
MASSSDAVSRTTRESSTLATTMRPPCLTMDSAVQLLWTASKRRLRGSLSYTAAHATTKISGEEEEDETLVRCDAPLGRRRRGWRPGKPAAKRFGGHRRLTKQAKERRVEKDNEANEWVLHGIE

SEQ ID NO: 69301 - protein, 297 aa, Zea mays
  Coding DNA Sequence Number=SeqID_25926
  Homolog annotation: Hit_ID=Q3I0N3; Match level="QueryCoverage=15%, HitCoverage=25%, E-value=1e-09, Identity=68%"; Hit description=P23
  Subcellular localization annotation: CTP_CleavageSite=58; ConfidenceScore=5.28e-01
MLTHPTSHRPPCTPSCSTGDRQQSLPKVLDVPNLKKLCGRFVSTTPCPRRFDLRLHIRCEHEAGKTESSSSSPHTTTSMTPTVGHRPIRTSGLPSCSCANACHAIAPTPCPVECSTPIDLPDVCLLFSNLFLQCTSVARCRESAPRNSGVLIRHNSEMFHIAAFFGLTRWSKRWDGFVVQASIARTCNCIYALLQQQHRDIEFMEWVFLTIELPDAKGVKQNLKPKGQFNLLAKGTDDSPYEFNLELFDVIYLIHVECSISGFDCIGLPICRRAKKLSQEPYANRSRKLRTVGGQGS

SEQ ID NO: 69302 - protein, 177 aa, Zea mays
  Coding DNA Sequence Number=SeqID_25927
MARASSTRSCGNCRSRDGVIACVPVQRDVRAGCLGQGVVGRWTRKKRGRAKIVALTSLLHARMWAGAVWVCAATTQAHRRLGKGAAGRGALAAATGQMHARVVGVRGGPWGGLREEMAARVGPRKGSWAAGGEKARAQERKKGKEEGRAAEQAGWAGAAAGPPREMGERMAGGGVSG

SEQ ID NO: 69303 - protein, 263 aa, Zea mays
  Coding DNA Sequence Number=SeqID_25928
MPARDAPAPPQGIPAAGGDPDGDGDDDDAVGSSSHGTERSEKPEPDGWIARPITRDAARGCHFHDALDTLLRRAFDRHTWSVEYRCVVYQHRRGLYPDQWEATCLVRRPDDDLQGAEAFSEHYSITERDTAEAAMQDAARRALSQYCSLFSGVADGLDLKYYPRRSTSSAGGVIVSKVGEGNPRLSSMVNLAAMLNTELDHALDELGKVRAEVVELRAKCAARHYLDGGSPTPVGIQHHYCSPSRGHFDYGTPDCRTQIDLDP

SEQ ID NO: 69304 - protein, 25 aa, Zea mays
  Coding DNA Sequence Number=SeqID_25929
MGIGCLRDKNLNKDYGVVPYSRMIG

SEQ ID NO: 69305 - protein, 131 aa, Zea mays
  Coding DNA Sequence Number=SeqID_25930
MEVAPSRPGKGKMQGVGRPTMDEENAELEDRGASVSKEAEGEGRTPWRGACCCMPWGAPCCCLGAMGKQEGGASSRGRWREELLLLHAPKDREEWKWRVGERKERGGLLFIELELWTCQVAVSSGRSYNVY

SEQ ID NO: 69306 - protein, 238 aa, Zea mays
  Coding DNA Sequence Number=SeqID_25931
MAADSLPTGGGIDDVFPAWWKNNLRAHPDLFPADGGGGGATKAMQEAAPRRLSSESIAPAPQQGAHRASTSRLRRRRAPSPRNTPIPGKRTTPARLRKACWTSPSYLRRRCSQSRRDFITARRPRDCNLADGEYILVPEQGAAQEVAPDPAPEPAPEDLPATALEGKPRRLPSSRDLRRGLPFRLWWVQVRSLHDGQSGSVRHCSLEEMVAGITWPTTLPPGWTVEWDPASAEEEHEE

SEQ ID NO: 69307 - protein, 160 aa, Zea mays
  Coding DNA Sequence Number=SeqID_25932
  Homolog annotation: Hit_ID=Q6JAD6; Match level="QueryCoverage=88%, HitCoverage=18%, E-value=9e-13, Identity=38%"; Hit description =Putative uncharacterized protein
MQDSLQQQLLQDWAKNRAFMTLMLQHTCVSIPTVQLAPPPPLQAPVVPAIQLGPPLPTVGPSSSPLRAVTLVFTSPVFSSVCPQPPVPPASAVTTTAVAVSMSTSDLAAPVAQPQSESVSAPASTADPGFETDSDPQLAFALLPRPRPDVPPPPPPSSAV

SEQ ID NO: 69308 - protein, 167 aa, Zea mays
  Coding DNA Sequence Number=SeqID_25933
  Homolog annotation: Hit_ID=Q6JAD6; Match level="QueryCoverage=84%, HitCoverage=19%, E-value=8e-50, Identity=70%"; Hit description =Putative uncharacterized protein
MRYREAATHIQLWLLGALVSHSDFDVVDFFICKIEDTVLDGLHARRQLPYAHYLCHIFAQLIRPPQFQGTLEASRLLFGSYCPACEDPVPAPAPVFDTQAEDTALHQFEAQDAAVDDDDDDDFGIPPPPPPPMPPRSHDHEAGSSSGAAPPAIDPALAAILQTLTQQ

SEQ ID NO: 69309 - protein, 212 aa, Zea mays
  Coding DNA Sequence Number=SeqID_25934
MNSDILSLKTESHPMVIRVDPYSSVENSDPFLNISAAGSQKSEKSRQIGEKSGKVQKPVHSQSNLCKHLGPEEGLLNPGAEEIDCSRVPLSRYPGLHGYVSEPTYPYSCSTLKIKYLGSAASGRTSVSSRSQKRAGGIGGAEVGAGGGAVEAGVVEVVDGAAGVTGAGKVGGGVEAVVGVEERGREARRRTRRRKWNLGTRLGDDRSKQGIE

SEQ ID NO: 69310 - protein, 154 aa, Zea mays
  Coding DNA Sequence Number=SeqID_25935
MEGGAHREEEAEEPTQKRVMGARRRRSPPAAAAPLPPFPAAAPTSPCASRQASSFPLPCSLCCSPSIQAARARTRLASGQRPDCLNALEADPDAQARPRAATRADSAKVQRHDPDRAPGSAKRDTEPLRQAPETDRLDPSHQEPKRPRPFFCSH

SEQ ID NO: 69311 - protein, 164 aa, Zea mays
  Coding DNA Sequence Number=SeqID_25936
METVLVKAVRPVAVALLATAYAGGTGAAAPAGGTGGALLGATLVDGPTRLGAPCPARGCGDRGAALGGERGGAGGALDGRWSGVEVEKRGGGGEGFGGEPINKVCGSVECLNPVDRRKTRLKQDQQAVSVWGTGLSGGAPDSVRCARLPRPEDAALGNLPTTYG

SEQ ID NO: 69312 - protein, 243 aa, Zea mays
  Coding DNA Sequence Number=SeqID_25937
  Gene Ontology: Mol. function=enzyme inhibitor activity
  Homolog annotation: Hit_ID=Q7XG96; Match level="QueryCoverage=76%, HitCoverage=86%, E-value=5e-33, Identity=46%"; Hit description =Pectinesterase inhibitor domain containing protein
  Pfam annotation: Domain name=PMEI; Domain location=53-237; Score =106.3; E_value=9.6e-29; Accession=PF04043.6; Description=Plant invertasepectin methylesterase inhibitor
  Subcellular localization annotation: CTP_CleavageSite=79; ConfidenceScore=5.02e-01
MAAQQPRALTVHHHTRRHLVLIVLTVAATAAARAASAHHTAAPAPRAAESPSPAVASFVRARCAATLYPALCYDCLLPYASEVQENPARLARVAADVAAARLHALCARVKDILRHGAPEPNEGGGGGRPSEAAALRDCASTISGAADLARQSSAELTKLEMDLDAAASSAAGGGTSDRRKARWEVSNAKTWLSAAVTNEGTCADGLAEAGAADSPAGKEVAAGVAAVQQCTSNALALVNGIPL

SEQ ID NO: 69313 - protein, 71 aa, Zea mays
  Coding DNA Sequence Number=SeqID_25938
MAPRAGLGRCQSHSVEWHSSQSGAGGTVLLSDRSVERRSDCGHFGSVDWRACARIKLCADGGYQLRFRSLE

SEQ ID NO: 69314 - protein, 118 aa, Zea mays
  Coding DNA Sequence Number=SeqID_25939
MEEVVTELQAKLSAFNEILEEQRVQQTAVVERIQKWERELEDKASSIALAEENLKEKDASLDKRATNLAWREKDLAFREEMFERWDKLLAEHELEVEKEKKLEERVCQFQAAQAAPDP

SEQ ID NO: 69315 - protein, 237 aa, Zea mays
  Coding DNA Sequence Number=SeqID_25940
  Subcellular localization annotation: CTP_CleavageSite=59; ConfidenceScore=5.25e-01
MAPSAPAAAPHPLDKGKGVAGSSSAPGGTAPTGHSSQTPPEASEDCWWGRGGRLPSPGHAEARKSSTTTTIGSAATTTTTTIGCQGFLPLCSQGRASPASGCCHRDSATGPPGSSWGSGSSGANVKRRHSGGGGPNCTDGYHSLNDGDVVEYTIDSGEGGPNYARPAIEGDAGGASSSILPPTPEETEVIFGRRLQSGAEPEAAPVPLPWVLSRAHQALHETEVAILREWEALEAEH

SEQ ID NO: 69316 - protein, 388 aa, Zea mays
  Coding DNA Sequence Number=SeqID_25941
MNKTPAFKVPLQTELRFRPRGTDAATGRLSFASPLKGHEPDIKVKEPEAGPNSSPSPAWLEDASSAELGDGFHHQKLEEEVASRPMRELEPRLASLFAPARIVTTGEGVQSGCMMKILEAERWLKGTNFHEVAFLQRQGGRIAGVPHPGARKPSWAESSPTRSKVLPLRHGGWVPRVMQTGLGQKKPNHRVRCMQPPSGYKHSSTFRLDQRVKGRAAMQAACNRAKWAHPSDFQRTQRGGPGPRVMQPARRLLRASNCTATRTTTTPPRLRNQYRDSRQPCVRPSSASQARRDSERNLSHGVKKARPCSIPRTARARNGRLANHSPRRINSAAGQAAPLAAASERVGSTPTTGQRFEGRPLGRVHSRLRHRARDDPGYQGSGYAPEVR

SEQ ID NO: 69317 - protein, 463 aa, Zea mays
  Coding DNA Sequence Number=SeqID_25942
  Gene Ontology: Mol. function=oxidoreductase activity, acting on paired donors, with incorporation or reduction of molecular oxygen; Cellular component=chloroplast; Biological process=carotenoid biosynthetic process
  Homolog annotation: Hit_ID=Q2R2A6; Match level="QueryCoverage=95%, HitCoverage=75%, E-value=0.0, Identity=84%"; Hit description =Carotenoid isomerase, putative, expressed
MTYAVIQGNLNLITQALEAVGRKMEVLPDPSTVHFHLPGDLSVLVHRKYEDFINELISKFPHEKEGIIKFYGTCWKIFNSLNSLELKSLEEPLYLFGQFFQKPLECLTLAYYLPQNAGDIARKFIKDQELLSFIDAECFIVSTVNALQTPMINASMVLCDRHFGGINYPVGGVGGIALSLADGLVEKGSEIRYKANVTNVVLENGKAVGVRLSNGKEFFAKTVISNATRWDTFGKLLKEKELPEEEKNFQKNYVKAPSFLSIHMGVKASVLPAGTDCHHFVLEDNWNNLEKPYGSIFLSIPTVLDPSLAPEGHHILHIFTTAGIEAWEGISRKEYEEKKEMVANEIIRRLEKKLFPGLQDSIVLKEVGSPKTHRRFLARNDGTYGPMPRGKPKGLLAMPFNTTSIDGLYCVGDSCFPGQGVIAVAFSGIMCAHRVAADIGLEQKSPALDAGLLGLLRWLRTLA

SEQ ID NO: 69318 - protein, 275 aa, Zea mays
  Coding DNA Sequence Number=SeqID_25943
  Subcellular localization annotation: CTP_CleavageSite=85; ConfidenceScore=5.60e-01
MDAPSSSAAMPASGSGPHQHTSAGSATGDLPTAIAAPSVLAPSPSSAAAEGVPAGSAPNAQDDAGAEVASSSPQDSPVTVEATLSSSQVSAGGSEAAVPPAAVADPPTAIPPDAPPEVGVGDASSSVPQPTPEGLEVILGRPLRSGVEPGATLTPLPQVLIHAHQALQETEAAIRREWKALETEHQRLGDWCSQLESDIARVEGNLKAKEASLAKRTTDLAWQEEDLAFREEMWARRNKLLDELELEVEEKVKCLEGKVRALEGQVRQFQAVQAT

SEQ ID NO: 69319 - protein, 249 aa, Zea mays
  Coding DNA Sequence Number=SeqID_25944
MAAGGEGTPTDAEEEEALAGKAGPTRQSLLPPLRNEAARSSPRGPRLPRAGSSPGTSELRNDRAPTRFNDRVSVTPTPLTASRSLELKSATAVVELSPPRAKCRSPSICPPLSVRVHLRDPLKPAQGSPGLVFVPGALNCSSVSNWTREPRHHVVGLVLATKGWYDRSGEFASLSPFPRCSFARFRLVGHRFADSGEGATAVYAAPPLCRARGRRWTRRRSSVARRPRLEVGYRFGGTWSVPHDLDPTR

SEQ ID NO: 69320 - protein, 147 aa, Zea mays
  Coding DNA Sequence Number=SeqID_25945
MAVRRGILASDVITFVLLFNWVGIYLYLVIANKILTNFKSNAQLQPFPLIYLNQDTNTKKINLIKERIRVNVKEATLANEEKLLGALKLIENKKLKKNFLYPFLANLEDEIIFRGVGFVTLKNVIKRIEIISIVCGLYYSLHVINPS

SEQ ID NO: 69321 - protein, 411 aa, Zea mays
  Coding DNA Sequence Number=SeqID_25946
  Pfam annotation: Domain name=AUX_IAA; Domain location=34-156; Score= -102.7; E_value=0.041; Accession=PF02309.7; Description=AUXIAA family
MADLHFSLGRRCPPLVRARAGELAPWPRLLASRLGYEDTTLALTLRLPGSDSGRSSSLAAPSAAPSPKARVVGWPPVRSYRKNALADSSKANRAANFVKVVVSRRSSASAPPAPGSHRRSLPQRVFFPSRAVPSCFLRTRRAELAPDLCSSLARRVLPCTCPWRPSSQPARPPVLCVARCSSSHGAQPPSRLTGSPSAAPSFFLPQLPRFSLHLPPFSVACPAELPCAPGFSPSLLEFGQARAAPWRPASSVLSLDAHSVPSNSCAVPCSGSMAAPNSLRALAYNSTAHLPTCHGHRALLPDFCSPRALISLFASAHNSPREGARGELATGEALGCFTLLASLAVIKQSRITVDKGPYDKMVENECVMGFPGIALFSPILMGLRGVPFRYLVKVFAGEKEGQRGDTREEEK

SEQ ID NO: 69322 - protein, 212 aa, Zea mays
  Coding DNA Sequence Number=SeqID_25947
MATSNTTVLYRRSPPMTLGMTEPGGEPMVGCLRRLTLNGELQGARRWICDEGLKGRRYNENMYSTGVEFVLLLLGLIAPMVLSAGSCAAIPLVWRMPGTTNCSVPYGVWVTIETSILRSLRLELYGPTGQRGYVSDVVLDRDPLVLLPWSRHGLVMICPIVLSWLKSIGSTLPFSRGVRLRDDCRLVGLLGRHVGWQPRLTRLFGRQVWEAF

SEQ ID NO: 69323 - protein, 290 aa, Zea mays
  Coding DNA Sequence Number=SeqID_25948
  Gene Ontology: Mol. function=microtubule motor activity; Cellular component=microtubule associated complex; Biological process =microtubule-based movement
  Homolog annotation: Hit_ID=Q8GZX4; Match level="QueryCoverage=38%, HitCoverage=16%, E-value=6e-29, Identity=47%"; Hit description =Putative uncharacterized protein OSJNBa0090O10.9
  Pfam annotation: Domain name=Kinesin; Domain location=48-270; Score= -190.7; E_value=0.012; Accession=PF00225.14; Description=Kinesin motor domain
  Pfam annotation: Domain name=SWIB; Domain location=217-274; Score =4.6; E_value=0.0072; Accession=PF02201.9; Description=SWIBMDM2 domain
  Pfam module annotation: Pfam domain module=Kinesin::SWIB; Domain location=48-270::217-274
MDATGIRGGGKAKNGVTRRKVGEPSKKSAWSNMIKAVQGLVAQCEDLKLKCYEEMDKRKKLYNIVQETKGLNANGGTTKKTFKFDRVFTTNDDQGIGKTFTMEVNESNSGVNYRTLEELFNIAEERKGSVTYALSVSVLEIVLVTLKRFPFYFRAGELQRNGLSATGALGRLHHRAALRPVAAVPNWLTPTRSCITSFTDYEFTVYLHLVGKLQPHCNKVYKRFAMRKNKFMGSNKNQAKKTDINCDTTLKSLFGGRDKVGMLEISKLLSPDFPKISKLPWSMEPGMSLW

SEQ ID NO: 69324 - protein, 156 aa, Zea mays
  Coding DNA Sequence Number=SeqID_25949
  Gene Ontology: Mol. function=microtubule motor activity; Cellular component=microtubule associated complex; Biological process =microtubule-based movement
  Homolog annotation: Hit_ID=Q8GZX4; Match level="QueryCoverage=41%, HitCoverage=5%, E-value=5e-17, Identity=75%"; Hit description =Putative uncharacterized protein OSJNBa0090O10.9
MDATGIGGGGKAKNGATRRKVGEPSKKSAWSNMIKAVQGLVAQCEDLKLKCYEEMDKRKKLYNIVQVTKGIYYPEFIRFFCRCRPLSKDEVSSGLNANGGTTKKTFKFDKVFTTNDDQDILDIEAAKNSVRFWFPHPCPGTTIRAYVGLLYPCERA

SEQ ID NO: 69325 - protein, 128 aa, Zea mays
  Coding DNA Sequence Number=SeqID_25950
MRGIVLSLGNAFNGPFILVVLALSTWSGLVGLFVLVGCGCKRQMLLDPGKVSPLGYLQLRKLYARLLLLPMWAMGNQPNSGQIAGYKVKLLQNGHLTCFNWSPKELDGSDLCPKVYKTENGSLTFKGL

SEQ ID NO: 69326 - protein, 132 aa, Zea mays
  Coding DNA Sequence Number=SeqID_25951
  Gene Ontology: Mol. function=nucleotide binding; Biological process =catabolic process
  Homolog annotation: Hit_ID=Q1EP28; Match level="QueryCoverage=59%, HitCoverage=9%, E-value=5e-36, Identity=93%"; Hit description =Dynamin family protein
  Subcellular localization annotation: CTP_CleavageSite=33; ConfidenceScore=5.69e-01
MAASSLSSPAASRTPNLKSAVAPSPSPSTRRAPADAASASITAESKARFEAYNRLQAAAVAFGEKLPIPEIVVIGGQSDGKSSLLEALLGFRFNVREVEMGTRRPLVLQMVHDPTALEPRCRFQGLKIFRTY

SEQ ID NO: 69327 - protein, 120 aa, Zea mays
  Coding DNA Sequence Number=SeqID_25952
MARRGNVAAGWGMIKVDESRERTSWLGWPRRWFQVEAEAVVTWVEGVATRDVGVVVSGEATNQEKVLYDVVDNKDVVEVTGRVDPLPTMMEEGKVGLWGWGEETVPGSGVVWYEAPQSAT

SEQ ID NO: 69328 - protein, 783 aa, Zea mays
  Coding DNA Sequence Number=SeqID_25953
  Gene Ontology: Mol. function=nucleotide binding; Cellular component =cytoskeleton; Biological process=catabolic process
  Homolog annotation: Hit_ID=Q1EP28; Match level="QueryCoverage=89%, HitCoverage=85%, E-value=0.0, Identity=68%"; Hit description=Dynamin family protein
  Pfam annotation: Domain name=Dynamin_N; Domain location=36-212; Score= 39.6; E_value=2.5e-09; Accession=PF00350.14; Description=Dynamin family
MASGNGTMTLPWMRAAISCATGAPAPDLECRYAHPHNSVSIDLDNKVTACADSLRNNCFRGMTCRYYHPPPHIQEYEPISPFLVEEDSEEYGSPMVVATAIADLIKQRTESHLRKIQAAVSSKPIVMRAEYAHCPNLTIIDTPGFVLKAKRGEPESTPDEIRSMVKSLATPPHRLVLFLQQSSVEWCSSIWLDTLKEIDPTFRRTMIVISKFDNRLKEFTERWEVDAFLSASGYLGDNIHPFFVALPKDRGTISNEEFRRQICHVDIDVLRHLRDNVKGGFNEEKYGSHIGFSCLRKYLESELQKRYKEAAPATLALLEQRCTDVSMDLTRLDSKLQATSDVSQLRRSAMLHAASICTHLHALLDGSADPDPEIWGKTTEEEQMHSAIGSWPGINTPVKPANSSLKLYGGAAFERVMHEFRCATYSMECPQVSREKVANILLAHAGRGGSSRLTEAAAEIARAAARSWLAPLIDTACDRLAFVLQSLFDLAMERNRDKDSQHHQNVEDMDSYVGFLAALRCSYYKFVKELSKQCKQIVRHHLDSVTSPYSHICYDNDFLSDVGSVANPMSRFSHFTGVTSFDLADSGSALEEAQENLPPRDQQHSTPPTSKGNESKEVLRESQLTVPETPSPDLPSDIHGGRKKENGIPNDGGPRKRHARMAAYTNRNHHNSMIVGDDMGSKSGSSYSTICAISAQYFAKMREVLIERNVPSALNSGFLTPCRERLFLALGFELFAVSDDKFMDMFVAPGAVDAIQNERNSLLKRQKILLSCLHEFKNISRAL

SEQ ID NO: 69329 - protein, 154 aa, Zea mays
  Coding DNA Sequence Number=SeqID_25954
  Homolog annotation: Hit_ID=Q5JNJ3; Match level="QueryCoverage=77%, HitCoverage=86%, E-value=8e-10, Identity=37%"; Hit description =Putative uncharacterized protein P0481E12.25
MDEFQEADILWPDTEDELAPFAPMDTEELCEAAGSVSSVAPVFGRRFEVFFLSGAGPSSLSADGDDGEEWQEADVLWPEPDTADERRGSGGSVWPFSGSSSFSGRAGRRVKPAAATRDGWTTGPAASSPINIPANIAPRAPPRCQFRTVMNRRS

SEQ ID NO: 69330 - protein, 162 aa, Zea mays
  Coding DNA Sequence Number=SeqID_25955
  Gene Ontology: Mol. function=microtubule motor activity; Cellular component=microtubule associated complex; Biological process =microtubule-based movement
  Homolog annotation: Hit_ID=Q6H831; Match level="QueryCoverage=42%, HitCoverage=28%, E-value=3e-19, Identity=68%"; Hit description =Kinesin motor protein-like
MACGAVANIVKSSLGPVGLDKAIKQKQQSLSLEAHDYANAIPDLSNMIKAVQGLVAQCEDLKLKCYEEMDKRKKLYNIVQETKGLNANGGTTKKTFKFDRVFTTNDDQVAQCEDLKLKCYEEMDKRKKLYNIVQETKGLNANGGTTKKTFKFDRVFTTNDDQ

SEQ ID NO: 69331 - protein, 144 aa, Zea mays
  Coding DNA Sequence Number=SeqID_25956
MEVGCEGWGGWEWNNELVVGVVWKEAPESTTQSVVVRGGGGGEVTKYRVPDWIEGHEHAPDELAVVEEDAHSCESGGRGKAHGDRCRRVVSLLGRGTVTRCREARTGQPGAKQQERGSSRQELLDDTVATCASRKGAAGGGGGA

SEQ ID NO: 69332 - protein, 127 aa, Zea mays
  Coding DNA Sequence Number=SeqID_25957
  Subcellular localization annotation: CTP_CleavageSite=54; ConfidenceScore=5.17e-01
MGSGVGRGCGPGCEAAWRWAASGSTPGLLGSLARVRPGSRPGGGRPRRAWAGIRRSARTAARPQPGQVAGQRAAPGAAAAPGGASGRELGDGRLGGGEGEVPSVGAGGWERAGWERPNLIPYWSVKP

SEQ ID NO: 69333 - protein, 416 aa, Zea mays
  Coding DNA Sequence Number=SeqID_25958
  Homolog annotation: Hit_ID=A2WV16; Match level="QueryCoverage=70%, HitCoverage=77%, E-value=1e-115, Identity=70%"; Hit description =Putative uncharacterized protein
MPFIITCPFSSDDTPSPKRRLVPLPLAICLLCSPCVEPSRLGGLMVPDPPSPLQRNKQPAKQMSKSSSHRPSKSSTPSHAPGRLTLSLTSPFASPLLLLLTAAAAAAVFLYSLTAARSYGARGEAPPLSSPTVETMERARAIWELPAAGPARAVLFVAHGCRCRPENFWPPSPRCPGCVGLPEDVAITDRALRRRFAVLAVASAGECWSPGKEVDVAKRVIRSWAAKNGLEGLPVVALGASSGGYFVSRLAAKMSLAAVVIMIAEGAFGSSAGALPAVYPPAMFIHMPKDKRRAVLVDKNSKMLMKNGVEVKELQSLELPLTPTLLSERIPGLDRGLSERIWTVFREEAFVDDKGYMKEDGRETPWKDALVKRGLWEEVSALADHIQEELNLAYGYHEMTSLHADEMFDWVDKHLR

SEQ ID NO: 69334 - protein, 150 aa, Zea mays
  Coding DNA Sequence Number=SeqID_25959
  Gene Ontology: Cellular component=nucleus
  Homolog annotation: Hit_ID=A2WV17; Match level="QueryCoverage=96%, HitCoverage=95%, E-value=2e-20, Identity=46%"; Hit description =Putative uncharacterized protein
  Pfam annotation: Domain name=DUF584; Domain location=2-146; Score =106.7; E_value=7.2e-29; Accession=PF04520.4; Description=Protein of unknown function, DUF584
MEEFQEADMLWPDVALAHNHGYHRPADSSHGRCRQHLTDQPQQPRPGAAVVHPLQSSPVRIPSMPPMGPRPTSRGSWTRSYKEEEDDDDDGAEEVGVVPPHVLAARRCGEERRVASSVCVGHGRTLKGRDLRAVRNAVLHMTGFLSSSDK

SEQ ID NO: 69335 - protein, 96 aa, Zea mays
  Coding DNA Sequence Number=SeqID_25960
MALVAHLRACYPCAEAQGRIYDRGCLGCSPGRGPVTGERFRAQLCLVPITQPRTTAPNLNQPPAVEDRRRSSRPPGRQPWRTGRDPGGWTVVDLWV

SEQ ID NO: 69336 - protein, 139 aa, Zea mays
  Coding DNA Sequence Number=SeqID_25961
MGKSNKRKREPTPPSEDFGDSEYSEEEFSSESEGSPTVVSPPASSDDSDDSQGIAAEGSDESEFSSDEEDSDGGEDEDDDDDDDDDGGDDDGDGSNGGGGSGGKGSTRGGSSTGSTRGGSSKGSTRGGGGKGSSSKASG

SEQ ID NO: 69337 - protein, 371 aa, Zea mays
  Coding DNA Sequence Number=SeqID_25962
MPGKANCCCPARMQHSVLCPRFRGEDGSEDLSVRFGAARARWCGVGGQADAVVGADVVAAGESFFAVEAVSAAYGPTSGSLALMSGSRPLSGDANESLLVAASVLGPWLLLQRSLASRPELVTPQALQCGGCSYPRGWNRSSICNGTLSAGVCSLWLSRPEHPKPEAAVLAWTEAELARKEDFVGRSLAGPSTGGTDAGVELPRPRAGLGSSEDSWLRLRGGRPSRLLRPDSWRRPWRQWPGRGADVVLRSGDPPTALPSEARSDFAEGGVDAEGAAAPLPSTSEPAGSVHLVVCDSAIDIVEKARKIVSAEEFLSVKTCSVRGIAYPSVSYLSQKVMSEVSVSRRRRSPSARSALAAYVYSVVFRIPLSK

SEQ ID NO: 69338 - protein, 208 aa, Zea mays
  Coding DNA Sequence Number=SeqID_25963
MGDTRRLFASSLEERNSVGVGTFQPSFGFKDFHQPARLFKDVHHPRWCGGRAEPALYLSRGFVGHPLPRRSRERALTGPAGGPDFDNAGLVDGRRRHLQRVGLVGLAPGGPFCRRAAAAPAGGRESLVSLLLLRRPSPIEWDYSPVDYLNRFTKHESPRVKVTSESGDPWTASPSEARSDLVEGVVDAEGATAPFQRQDPSLQDQSVL

SEQ ID NO: 69339 - protein, 118 aa, Zea mays
  Coding DNA Sequence Number=SeqID_25964
MGRLKGKCALGPFLSILVIECQRKCFCVDLCNVVYKVQIMSKVLETRKIELEMRWLCSAKVCSVWEHRTVRWCTGQCPVLQAGSSELAALGNSPATYGYNSPDCPVCTGLSGVHRTVR

SEQ ID NO: 69340 - protein, 152 aa, Zea mays
  Coding DNA Sequence Number=SeqID_25965
MTDTGLILGEPSSYLLFTIFFSLTLSFSLFFPLEDSIKEYYHHTEEETKDYEPCTTVFNPRITKHCDLRGEGVENGVACDLAEGIVSGATWQQVRWRGDGVAGDNGGGCAAKGAWAALIPGFKGKLHGIFLGKGSSQSEEKLHYPMHAEDWA

SEQ ID NO: 69341 - protein, 167 aa, Zea mays
  Coding DNA Sequence Number=SeqID_25966
  Gene Ontology: Mol. function=zinc ion binding
  Homolog annotation: Hit_ID=Q9ST50; Match level="QueryCoverage=53%, HitCoverage=10%, E-value=3e-10, Identity=37%"; Hit description =Transposase related protein
MAPAWLMWIVRWRGSAPWILAPTPGVGCTRVRGMDNFMSLYLGGNVEEDPYENAKFVDMRHVPVLFVGRPSLSDVFTKAKQKLGYHEDDDTTVDGVLNIGHPPNVIRRFIPIDSQMDWDNYVTWATKTQLQLMEVVVRSVVVDRPPEDYDRAVDDVPTVPDAQSGPN

SEQ ID NO: 69342 - protein, 106 aa, Zea mays
  Coding DNA Sequence Number=SeqID_25967
MEGTKDEGPGGRWGAGTGRRATGGSLPQRSNPAEQMGGGSHVAWRLDFACQASSKRKCGMFGLMGQMGQDCYLRKLGTKSEANLGPNTQHSSQKPWRPYLPNRKWM

SEQ ID NO: 69343 - protein, 132 aa, Zea mays
  Coding DNA Sequence Number=SeqID_25968
  Homolog annotation: Hit_ID=Q10LL9; Match level="QueryCoverage=37%, HitCoverage=13%, E-value=2e-16, Identity=85%"; Hit description=Brix domain containing protein, expressed
MVSLPSDIDKLNRASRKSAVRLQEIGPRMTMRLVKVEAGLCSGDVLYPWPVEKEVVGKKGTETGEVEGQEDDSEATDESEDEMNLAEKLSVLQCAATFGGQKLPEAETNMAMMSYTTTKALFGYAGTDSGLA

SEQ ID NO: 69344 - protein, 317 aa, Zea mays
  Coding DNA Sequence Number=SeqID_25969
  Gene Ontology: Mol. function=strictosidine synthase activity; Cellular component=endoplasmic reticulum; Biological process =biosynthetic process
  Homolog annotation: Hit_ID=A3BQ52; Match level="QueryCoverage=93%, HitCoverage=90%, E-value=1e-131, Identity=72%"; Hit description =Putative uncharacterized protein
  Pfam annotation: Domain name=SGL; Domain location=16-290; Score= -89.0; E_value=0.00027; Accession=PF08450.3; Description=SMP -30GluconolaconaseLRE-like region
  Pfam annotation: Domain name=Str_synth; Domain location=141-224; Score=99.1; E_value=1.4e-26; Accession=PF03088.7; Description =Strictosidine synthase
  Pfam module annotation: Pfam domain module=SGL::Str_synth; Domain location=16-290::141-224
MGRMASLLLAVALALLLPTSFCAAEPIKTTPTLWSFHLPLPDGVIGAESLAFDRRGQGPYAGVSDGRVLKWGGSALGWTTFAHSANYRKIPLCTASVVPSEQTESMCGRPLGLQFFAMTGDLYIADAYMGLMKVGPNGGEAQATGDVYFTDSSAIYPRRFNTEIMMNADATGRLLKYDARTKRVTVLKADLPYPNGVAVSNDRTHVVVAHTVPCQAFRYWLKGPKAGQYELLADLPGYPDNVRRDARGGYWVALNQEKARLDATAPPAKHLVGVRLAVDGAAVEELTAAKGVTLSDVAEKDGQLWLGSIELDYVGLV

SEQ ID NO: 69345 - protein, 60 aa, Zea mays
  Coding DNA Sequence Number=SeqID_25970
MGTQIHMSPAASREISVEGEIATASNLHAHRWAVEISSVAVGDAEELGDGVNFTSEDHRR

SEQ ID NO: 69346 - protein, 831 aa, Zea mays
  Coding DNA Sequence Number=SeqID_25971
  Gene Ontology: Mol. function=nucleotide binding; Cellular component =small subunit processome; Biological process=rRNA processing
  Homolog annotation: Hit_ID=Q10LM2; Match level="QueryCoverage=98%, HitCoverage=96%, E-value=0.0, Identity=67%"; Hit description=Utp14 protein, expressed
  Pfam annotation: Domain name=Utp14; Domain location=99-791; Score =586.3; E_value=3.1e-173; Accession=PF04615.4; Description=Utp14 protein
MPKKVAMRRGKPAPDQGKRRRHGPRLSKVMLRELDAMGPGPARGSDGEEDGSDAVAEDVYEYEEGVPEEEAGKNGRYDTVAKYEYNFDSDASDADEDVPSEEGEDMDEDDNDDGDDEEKQIRILQETTGMPREAFDGKKRKQPSELHLQHGDGDGPVTIHDLLDNVQGKPGYSKIRKRLQQQEKKPMVVLAPLPKVERDKIERSVTFQKSKNELTKWEGIVKSNREAPVLYFENDTNLGVNTVAAIASEFKPRTEFEKKIAEITQSTEIIEAHKNDGAKILELNKIDAEDVREHQNRLAKMRSLLFRHEMKAKRMKKIKSRTYHRMLKKDKLKAASADFEADPEAVTDHARKQEFKRAEERMTLKHKNTSQWAKRILKRGLSVQDEGTRAAIAAQLQQNTLLTRKMNSMKDDSSSEESSDDDDDESDSEAKILNRGKEKILKALEEDNEIPNSGVFSLPFMERAMKKREEATYEEARQALEEYDDSLKKLEDNNTEQNEDKVKVSGKRTFGPTKNTHEELVKRKKLQDTENSSDSEYDSEPAQPLSNNEVTMKHDDTQFGSALLDDEPQNDIYRVKSDKGKDHSNANDITNKSKIPVPSIVDPQPKQQDHNSDSDSEEEMVEGNLTIPDRKESYELPSQADLIRQAFAGDDVEAEFEKDKMDVLNEENPEPEKPALVPGWGQWTDIQQKKGLPSWMIKEHEVAKRNREEALKRRKDSKLKHVIISEHVDKKTEKYLVRKLPFPYTSKDVYEQSIRMPIGPDFNPAISVSALNRPAIVKKPGVIIKPIQYEEVNPHEKLDEPKRVIQRATPNRNAKKAFAKQGKSVTSQKRK

SEQ ID NO: 69347 - protein, 42 aa, Zea mays
  Coding DNA Sequence Number=SeqID_25972
MYIGLWLLSAGQDYHKTRVVTLVGAPDKLSLDLQHKRQRKEN

SEQ ID NO: 69348 - protein, 82 aa, Zea mays
  Coding DNA Sequence Number=SeqID_25973
  Gene Ontology: Mol. function=transcription elongation regulator activity; Biological process=regulation of transcription, DNA -dependent
  Homolog annotation: Hit_ID=Q65X55; Match level="QueryCoverage=79%, HitCoverage=5%, E-value=4e-26, Identity=90%"; Hit description =Putative uncharacterized protein OJ1123_F01.12
  Pfam annotation: Domain name=KOW; Domain location=31-62; Score=21.2; E_value=0.004; Accession=PF00467.20; Description=KOW motif
MNAVAPAPPLPCPTSSAEGPYRSTREQLFSIGQMLRIRKGPLKGYLCRVVRIFRNDVTVKLDSLLKIVTVQADLLSVPANRG

SEQ ID NO: 69349 - protein, 394 aa, Zea mays
  Coding DNA Sequence Number=SeqID_25974
  Gene Ontology: Mol. function=4-alpha-glucanotransferase activity; Cellular component=cytoplasm; Biological process=carbohydrate metabolic process
  Homolog annotation: Hit_ID=Q69Q02; Match level="QueryCoverage=54%, HitCoverage=25%, E-value=2e-94, Identity=72%"; Hit description =Putative 4-alpha-glucanotransferase
  Pfam annotation: Domain name=Glyco_hydro_77; Domain location=175-394; Score=-222.9; E_value=0.0023; Accession=PF02446.8; Description=4 -alpha-glucanotransferase
MERKGGCCLAPRYAATAAAQQAGAAWQMGRIMLKFRPIAPKPAAMAPAPAPAPVTGPAVSAGKGKRKAACGGGGRRGRKPKKAAKVAMVTAAPAATAAAQDVGDCRKHCDKEKSSSSPSSSSSGTSSVDSSPPPRPQQRQLATLPLMPETAADKAVACPAIPETRLHYRRIRPCRSCPKLLVDWAVNLGFHLVQLLPINDTSVHGMRWDSYPYSSLSVFALHPLYLRVQALSDAIPVLRYTFVMLSNLFIEEIQQAKKHLDKKDVDYEAALSTKLSIARKIFNLEKEKVLNSSSFQQFLSENELDKLISEGTLHHDVIRFHYYVQYHLYIQLSEAATYARKKNVILKGDLPIDVDRNSVDTWVYPTLFRMNTTTGAPLDYFDKNGQNWGFPTYN

SEQ ID NO: 69350 - protein, 113 aa, Zea mays
  Coding DNA Sequence Number=SeqID_25975
MGVPDFCALLTRIECACSLQVAHNIIASKCHLEERRQNTFTQQMIGCSQYHLHSTVIWRDVDSIKYIDQTKTQECAFGVHFDYQHYWRQKKDSIENAHKFITPKKQLAISLSK

SEQ ID NO: 69351 - protein, 323 aa, Zea mays
  Coding DNA Sequence Number=SeqID_25976
MSSSSLKRRVFPSCKPPDGGQPGCSLPPVATQDGDLQLLDGERQTRLWSRPQRRLLVVAIVLPRCDGVVLQSCRGRRTVAVQLGCNIPSSPSHSGRGRQRGSTGALGGGPLFGFDGLFASLEWDREQEPSGDCVHLGPWLPLQRSLPRRPEVASGPTPKSISRGLGSGWRPWKPVDRGPRGNRLSRLLGPDSRRSPWTAAPPEAGSGFAEDVVDAEGATAPFGVKTRACRIRSSCSVCFLRPPRPEENALAALVKLRLFSSCFKHLDSVGNRDDPLSEVAKKHERNPAKKRSFFEEKFDAEGVSPLLAPEGGSGFAEARPTLP

SEQ ID NO: 69352 - protein, 98 aa, Zea mays
  Coding DNA Sequence Number=SeqID_25977
MGKPGPSLLILLLCRVTVLVPTITGMGDHVSGRVRDKVCGQVHSGIRTLILISSLSRRPRIPMDPCPPTIIIVLSRWIQSIPDLARVLEKSLDFYRDP

SEQ ID NO: 69353 - protein, 63 aa, Zea mays
  Coding DNA Sequence Number=SeqID_25978
MSDDLVVPVHFEVGQELCFRLLDHPLLVLLELELLVSRQGAAEDRRRRLDLAPGRDPVGEERS

SEQ ID NO: 69354 - protein, 220 aa, Zea mays
  Coding DNA Sequence Number=SeqID_25979
MDHITHWNTLQPQKLTPYPPSFLPFFATVGFQMDRLPPVPPADTLIAGPCPSALHLADSARPASGAPGFVSLSHGSHRVSFTLLNGRRFLRCRPSPQIPRDHAQVDSSARPQIFPMGILARLYIYPSWHPLHPSFGACTCTSCPVAGAGSFGTRCKPYSPPYRINHDSWPREKAGELWVLVHCGGQISPGSTRRIEVLTKGPKTPYFVRSSPRGPGRNDQ

SEQ ID NO: 69355 - protein, 145 aa, Zea mays
  Coding DNA Sequence Number=SeqID_25980
MNKNRNLQNGIGIQMGQIQAIEIKETAEERRNGQAKSADKKRNVNDEFVGIFCRNSDPTANPPRAELLRRKNPDGNEMKKVGFRDNRHMVTCEGQLTVGIDGGNDCDGRTRSFPLGRHLNLASERSGSDIAGKERKPGCKKLSKN

SEQ ID NO: 69356 - protein, 149 aa, Zea mays
  Coding DNA Sequence Number=SeqID_25981
MGKSKRGGSSSHHSGDKRKREPTPPSEDFGNSEYSKEEFSSEFEGSPGPTSPPASSDDSDDSQGIAAEVWTYIRAIERAELEGSDESEYSSDKENSSDSSEEGSGGDGGDGDDDGGDGDNGGGSGRGGDDSGKGGSGGGSSKGSNKASG

SEQ ID NO: 69357 - protein, 358 aa, Zea mays
  Coding DNA Sequence Number=SeqID_25982
  Gene Ontology: Mol. function=histamine receptor activity; Cellular component=integral to membrane; Biological process=G-protein coupled receptor protein signaling pathway
  Homolog annotation: Hit_ID=A2Z9N3; Match level="QueryCoverage=95%, HitCoverage=73%, E-value=1e-145, Identity=76%"; Hit description =Putative uncharacterized protein
  Pfam annotation: Domain name=DUF1234; Domain location=189-357; Score=- 82.6; E_value=0.023; Accession=PF06821.4; Description=AlphaBeta hydrolase family of unknow
MGAAARSALASAGRAANEAVSFVVFLLLDALEALLCVAYRVADYVAEGAWRPCYCARPSPASSSGPAGGKIVVSERGGSKVVSMLSATRLHLEDISDTLYARRRSVLAVAGAAFSSPRRAAAGVTVHSAPIVQMMLRGKAGGDGSNKYPSPRWSDCHCANCNPADTGRLFVHVEAPPAGDGGVATEEDVLFIHGFISSSGFWTQTVLPHVSPEARSRRRLFAVDLLGFGRSPKPADSLYTLREHVEMIERSVIERHGVKSFHIVAHSLGSILALALAVRYPAAVKSLTLVAPPYFPVPRGEVGTQYVLRTVAPRRVWPAIAFGASVACWYEHLSRTVSIVLCKHHRLWELAFRVFTLY

SEQ ID NO: 69358 - protein, 1815 aa, Zea mays
  Coding DNA Sequence Number=SeqID_25983
  Gene Ontology: Mol. function=oxidoreductase activity; Cellular component=nucleus; Biological process=electron transport
  Homolog annotation: Hit_ID=Q336Y0; Match level="QueryCoverage=99%, HitCoverage=95%, E-value=0.0, Identity=65%"; Hit description=Amine oxidase, flavin-containing family protein, expressed
  Pfam annotation: Domain name=Amino_oxidase; Domain location=711-1196; Score=321.4; E_value=1.7e-93; Accession=PF01593.15; Description =Flavin containing amine oxidoreductase
  Pfam annotation: Domain name=DAO; Domain location=703-1097; Score= -37.0; E_value=0.0029; Accession=PF01266.15; Description=FAD dependent oxidoreductase
  Pfam annotation: Domain name=HI0933_like; Domain location=702-940; Score=-273.5; E_value=0.063; Accession=PF03486.5; Description=HI0933- like protein
  Pfam annotation: Domain name=Pyr_redox; Domain location=703-782; Score=-6.6; E_value=0.019; Accession=PF00070.18; Description =Pyridine nucleotide-disulphide oxidor
  Pfam annotation: Domain name=SWIRM; Domain location=473-564; Score =58.5; E_value=2.2e-14; Accession=PF04433.8; Description=SWIRM domain
  Pfam module annotation: Pfam domain module=Amino_oxidase::DAO::HI0933_ like::Pyr_redox::SWIRM; Domain location=711-1196::703-1097::702 -940::703-782::473-564
MDDTLATIRMKLKKRKKGKDSNDFDAVAECGPEVPALVQQEGERAVVDIGDGVADEKSNLNVVKLEGSDVSGNCAQGLDDLGLKDSLAVLFTRPGRKSRQVSEEAEGMEVSCPHDEDGLNKGSGLAPDTASKGIKRRRRRTKEEMKNASVQDQKASLPRKAKTNGSKSTKLYKVGAGPGQALGGLSSVSPQLEKSGKENAVDDGSFYQSLGEVLLQDVEASKVLKDGSITSFNGVTDHFEISAWASNHPGLESRSGNLDEKTPRTAEHTTNLGVSDAHTRSQTLGKESSDDVDCSQGKSPTSTIKRKIGLKPKQVPGKSVRRKEEVLSVDADNKPTDTTEIIEASTTPVIEENLDQLPVMAPKDSCSSHDIVGNSPMCLGADMAAPVKYVDIVDVATPLDYEDKENTSKVKRVTRGSKKRKHGDMAYEGDVDWETLMQEQGLFSNPSAGFPDQSIKTKNKIKTSEVYEGGGDTGVAAVRAGLKAKTITPIEKIKFKEVLKRKGGLQEYLECRNMILSRWSKDVKHLLDLADCGVSDVPLKDELPHQALTRAVFLFLDQYGYINAGIASDKVAKGHNDTPYEVIEVPKLNESHQMESVNIQNSVVSVSQKNEDFEHGTSTECCRTLLPHLMSEEHPMEKNILDVSTEVRNASLPSSNLDIQFTSYMNSSVGKVEAPHQQEALEIENSGNNCQSDRAEFAVHGKRIIIVGAGPAGLTAARHLQRQGFLVTVLEARERIGGRVYTDRTSLSVPVDLGASIITGVEADIATERRADPSSLICYQLGLELTTLNSACPLYDVVTGDKVPDSLDEDLEAEYNGLLDEMALLFAHNGDSAIGLSLEDGLEYALRKHRATQPMDSVDQDGHLRFMTNSRAVDISVSASIGKEIDHCGKNDKIDVLSPLERRVMNWHFAHLEYGCAATLKSVSLPYWNQDDVYGGFGGAHCMIKGGYDTVLRSLAKGLDIRLNHVVTEVLYGSEELGDSCKDGKYVKVSTSTGSEFTGDAVLITIPLGCLKADTINFSPSLPDWKVSSINRLGFGVLNKIVLEFPEVFWDDNVDYFGATAEETDLRGQCFMFWNLRKTAGAPVLIALLVGKAAIDGQSISSGDHVNNAMVVLRKLFKNASVPDPVASVVTNWGLDPFSRGAYSYVAVGASGRDYDILGRPVDNCLFFAGEATCKEHPDTVGGAILSGLREAVRIVDLLNTGSDYIAEVETLQTYQMQTDSERNEVKDMSNRLEACELSTALSKNSSDAMYPIVSKESLLQEMFFSAKTTSGRLHLAKELLKLPTDVLKSFAGCKEGLSTLNFWILDSLGKNATQLLRHCVRLLVLVSTDLVAVRLSGIGKTVKEKVCVHTSRDIRAIARQLVSVWIEVFRREKDSNGGLKLLRRMPSIESSKTKSKDLQSGKPTLRVPNGTLDNNKVVSQRQRTRFASSQSPPKINKKYDNKEMKLETVTAAMSDGKLLSQKQQHGIESKVEECGIPMSEEEAAAFAAAEAARAAAIAAAQSWPFILSQFHYLPLRIWKFYASLVVIKKVVLVELVEGWVFFASLVAYYMAYASVEAEISVPRELPKIPSFQSFVMRDHHLDESDARKRTLKDDFGRLECISENDSKNGEVKDLPENTKYADGDSLKMSHDNFTQQSHSNETACLANAQDHSTDTVVVDGRFTRAWVDTDTICIDGVKDPLAIERWQAQAMEADKEFYSRIRIPDEDDSSSQKHTCRSSASQGADSKPASERQSRGVEHIKQGLVNFIASLLMPLYRGKKIDREGYKTIMRKSVNKIIDTCSEGEKSMTTLEFLDDKRKIKACFAQFLNGRFLA

SEQ ID NO: 69359 - protein, 146 aa, Zea mays
  Coding DNA Sequence Number=SeqID_25984
  Gene Ontology: Mol. function=hydrolase activity; Cellular component =integral to membrane; Biological process=G-protein coupled receptor protein signaling pathway
  Homolog annotation: Hit_ID=A2Z9N3; Match level="QueryCoverage=72%, HitCoverage=22%, E-value=1e-49, Identity=84%"; Hit description =Putative uncharacterized protein
VRTYLMDGFFCHTHIASWHTLHNIICGSAGKIDGWLEVVRDQLACDVTVYHGSDDELLPVQCSHAVKAKVPRAQVRVIDGKDHVTIVVGRQKDLARELEEIWDRRRELKPAHSIQALAILGVPSILPVPTPPLRQVPDQSPGQAAV

SEQ ID NO: 69360 - protein, 132 aa, Zea mays
  Coding DNA Sequence Number=SeqID_25985
MNALVGSLVSQDFVGEIEVNERESVRGYIKDPPKAGSHWEKRSKNWLNRFSDWLNRFLPGRSWFTDLLSRKLDRFQNRLSRGKIRLNRFSKKICSDFSDSSDCQTDDAIWMLNDGCNKAIGAAWYYDIWLKF

SEQ ID NO: 69361 - protein, 140 aa, Zea mays
  Coding DNA Sequence Number=SeqID_25986
MGKNNKRKREPTPPSEEFGDSEYSEEEFSSESEGSPAPVSPPVSSDDSDDSQGIAAEVWTYIRAIERAGLEGSDESECSSDEEDSDDGDEGEDDDDDDDDDGGGSGSGRGGGDGSRDNTKGGSSRGSTKGGGGGRGRASG

SEQ ID NO: 69362 - protein, 155 aa, Zea mays
  Coding DNA Sequence Number=SeqID_25987
MRNRQQQCRWMSSWRHHRLLHPLQQQFVVVPQPRAETVVVGTIYARRGQPPRAINASRKRIIFTGHLPGRLTSTPSYGEESLMALRPSYGGCCHVGQWGKRGDDVGDPRRAWARLGPDVLAIDMARRRWPRHACKSARRSSLGMATGTFYPRARG

SEQ ID NO: 69363 - protein, 212 aa, Zea mays
  Coding DNA Sequence Number=SeqID_25988
MPKDGLAGAGAVWEKRWATSDGRRRCTVWCSARDRDRAARTNAKRKPLIPDPPCSRSPQLLCSTGFGFSANARRLAPRCPRPRGVAGCVRAWRRKGQRRLRRTDCCATRQSEADRQSGPASGTIGSSASPDLGLGLGLSPRRRRTPLRPTQGSDLGSAPEDDELRSTRPRARTRAKPRKTANSAPPDPGLGLGLSPGRRRTPLRPTQGSDSG

SEQ ID NO: 69364 - protein, 294 aa, Zea mays
  Coding DNA Sequence Number=SeqID_25989
  Gene Ontology: Mol. function=hydrolase activity; Cellular component =mitochondrion; Biological process=metabolic process
  Homolog annotation: Hit_ID=A2XFB9; Match level="QueryCoverage=93%, HitCoverage=88%, E-value=1e-118, Identity=72%"; Hit description =Putative uncharacterized protein
MERGTFNCVAEVLIERLLRFTNLLVGGGVPEHRRALELSQLLGVNISPTQVVHGHSPYRELVKRFEDDLIVAVGKGEPAVVMSAYGFRKVLSIDEYASYYKDIDPLAPFKTWKVGQTDSHMSAKVHPSYDVYSERVKGVFVVSDPVDWGRDLQVLCDILSTHGLPGTEKGDQPPLYFAADDLEYQAAFPSERLGMGAFRIALESIFNEINDHPLKYTSYGKPNPFVFKNAANILEKLVMSMYPNSQTPMEGKDYQFSTIYMVGDNPKVDINGAMKVVDTVEDAINYILEKERIQ

SEQ ID NO: 69365 - protein, 679 aa, Zea mays
  Coding DNA Sequence Number=SeqID_25990
  Gene Ontology: Mol. function=Rab GTPase activator activity; Cellular component=intracellular; Biological process=regulation of Rab GTPase activity
  Homolog annotation: Hit_ID=Q10N37; Match level="QueryCoverage=58%, HitCoverage=73%, E-value=1e-143, Identity=67%"; Hit description=TBC domain containing protein, expressed
  Pfam annotation: Domain name=TBC; Domain location=361-574; Score =40.6; E_value=1.6e-10; Accession=PF00566.9; Description=TBC domain
SHSLKPLRPPPPPGRAATCDAGAGRHEVFHESLRPPPATTARAGSSAAAAAIMGAAAAAFDSECKRDAYGFTVRPQHLQRFREYAKIYKEEEEERAHRWRDFLDRLAESANVPTTPSVSPYAATDDGASGAGQTQGNNGIGIHCDDEEVGSENAEDNNKFESPKEADASGESREPNGKPGDLKDVTKLDKVQEETGSSSTQAIKDLEGLMEASGDFEELRDLNGIPEELEEENNGNLEKLVELFLDKGLLDELKPIKVESQWRVRAALSIIDKMMSSRVVKGGNGANDIHRKDGPQLTSIEEEGMTAEVSHDGYPAEVEESCVAEKVELGQETTDDSTGTALDRDNDGSYFLWREELESLVRGGVSARRITGYYNNLLDDRTAILDEKDPVDPVVNEQRSAPRKATQPEKWKGQIEKDLPRTFPGHPALDEDGRNALRRLLTAYARHNPSVGYCQAMNFFAGLFLLFMPEENAFWALVGVIDDYFDGYYTEEMIESQVDQLVLEEVVRERFPKLGPALVTTKDAGDAITLLQSLAGSTFDSSQLVLTACMGFQSVGEMGLQELRKKHRPEILTAMEERSKDRGSWKDKKGLATKLYSFKHDPSFVCSPVKSKEGLDGSKVNGETGPANLKTYLSTSSILDTDLDQGVDLQDQVSWLKIELCKLLEEKRSADLRFGLYFS

SEQ ID NO: 69366 - protein, 85 aa, Zea mays
  Coding DNA Sequence Number=SeqID_25991
MGKNNKRKREPTPPSEEFGDSEYSEEEFSSEPEGSPAPVSPPASSDLALPSKLKHWSISYQSGQNSKCRIIQKPQKYGECISMAR

SEQ ID NO: 69367 - protein, 298 aa, Zea mays
  Coding DNA Sequence Number=SeqID_25992
MAERYQLPRSCVPPTTRRKDCGHPPSGGSEGGKTRCIREREDMVAFQGGHPPFKGDSPYLCPQPSWAESSPTRSKVLPLRRGGWVPRVTQVGPGQKKPNRRARCRQPSSGYKRPPLLPRPAGERAGSHAGGMQPRQVGAPLQLPTRPAWKPTPTRHATVAPVATCKQLHRHSRHHRASSIAESVPRLEATQHATQQRQPGATGLGKGDTPKRILLREGNRLRASLLIRGSKAGPSEGFNSRLRARGLHTHYWSEVRSPAPRKGSTAASGHSGSAPTTDQGFEGWPSKGSQPPQTQSEG

SEQ ID NO: 69368 - protein, 148 aa, Zea mays
  Coding DNA Sequence Number=SeqID_25993
MAALSPLMEARGRQQGLDSPDSCPSARLQRSSDGHDTTRTGCQNLSGCHDGIELQRGRDVENPNITGDDTLTDEVQVDHHVLVDEGGTLEGTVKLLEKLAQLGGLCHAVGHSAVLGLCDGARDDGSSLGGPGDKVGAQEHGTTGSGPA

SEQ ID NO: 69369 - protein, 249 aa, Zea mays
  Coding DNA Sequence Number=SeqID_25994
  Gene Ontology: Mol. function=zinc ion binding; Cellular component =nucleus
MGRGAVAKGEEKRGGGGGGRLHMRGGATDAEFLAVKLYFLRYAYDPPSDLKDPSSTFSPCASGESQEGADTTQNMNDTDKNNSEREESDLALEKESATFTSQKQHLEELSDAKETFIGGPEAEAKSNSTKDSDNPIAKVGSSIASDKMRDGCNANAIPCPATSNHTTEPSSVASQEASPASTKDTAIPEQVERPSSEELLADVSLPQGKVEPKKTEPAPAASSNIQQHGCKQAGNGNTGTSFNLIHYFS

SEQ ID NO: 69370 - protein, 118 aa, Zea mays
  Coding DNA Sequence Number=SeqID_25995
  Subcellular localization annotation: CTP_CleavageSite=34; ConfidenceScore=5.02e-01
MGARTSGAAGGGPYGELDLFGAPPSMNLMPSRTRAQDGTRTSRGGEETLNLPPIPPTLAKAIAALVNAPADNTCFLLEMAGNQFHQQGGKGHGAKIRIDSVYRDPEAHVRCPSIERSC

SEQ ID NO: 69371 - protein, 42 aa, Zea mays
  Coding DNA Sequence Number=SeqID_25996
MAEPPGAGAPFPSDPWRDVPLPHPWRLGQAASSLLPSLFPSA

SEQ ID NO: 69372 - protein, 234 aa, Zea mays
  Coding DNA Sequence Number=SeqID_25997
  Homolog annotation: Hit_ID=A2XFR6; Match level="QueryCoverage=61%, HitCoverage=41%, E-value=2e-24, Identity=42%"; Hit description =Putative uncharacterized protein
  Subcellular localization annotation: CTP_CleavageSite=58; ConfidenceScore=5.61e-01
MTLVTMMKTTKKKKMMRKTSTRKPMKNSRTTMWGYGLSLNITPRYSRQGTSLTCCRMFCMHWEPTSDPCMRQVDCRSLLGLATTSLDRGFRTLSAHESLTPLSTYVALVSDAARRTLWSLSHTYRQQLHNMKYMHLPLRICGESQTSIVPGGAREDRLNTLAGVVVGLNTDLDSATQDLSRVHLELEDAHAMIVALESQLDGRNPPEVQVPAMALSSPRKRIHYGEPRSITRLL

SEQ ID NO: 69373 - protein, 141 aa, Zea mays
  Coding DNA Sequence Number=SeqID_25998
MGLTTNPSDREKGDKNCATAVIRDMRASMGPRQMFPRITGIQGGYPFHQFGKRMIEALVISRRGTNIVMESPSLWSGKRAARFTLVGVGLGHQCVQIGQLRRVAPPRGNAAPLACALEVGEDPIDVDFNCVAEIRLLHTDS

SEQ ID NO: 69374 - protein, 59 aa, Zea mays
  Coding DNA Sequence Number=SeqID_25999
MGLKTLRRSEVKGKDSQGYAGLWELSLSGIGPTKAKLTRDEACGQLKGPRSSSPHRFGP

SEQ ID NO: 69375 - protein, 167 aa, Zea mays
  Coding DNA Sequence Number=SeqID_26000
  Subcellular localization annotation: CTP_CleavageSite=58; ConfidenceScore=5.01e-01
MPPCGFHGAQQMQPWPSPLVQAPLSHQIHGAMFLFPIHGVSSPSLHGRRPKLQPLLLLSAPRQQKIPKCRRPGQAASSLLPSLFPSAQASSVPSTSRSSHDGSSRSHMDSLRVAPSACSTYRSNSDALRCAARDRSGHPTSICTVPVAMPSIRGELLAVPRFSCSMK

SEQ ID NO: 69376 - protein, 242 aa, Zea mays
  Coding DNA Sequence Number=SeqID_26001
MPPAPPQGISAARGDPDGDDDDAGGSSSHDTELSEEPKLEPEGWIARPITRDTTRGCHFHDAFDTLLCRAFDRHTWSIEYHCVVYQHRRGLYPDQWEATCLVCCSNDDLRGAEAFSEHYSITERDTAEAAMQDAARQTLSQYCSLFSRVADGFDLKYYPRRLTCSAGGVIVSLVGEGNPRLNSMVILADVVNTELDHALDELGKMSKNRGRSARRAQLEKQAPEEDAAQQQQLPPPPPMTVE

SEQ ID NO: 69377 - protein, 135 aa, Zea mays
  Coding DNA Sequence Number=SeqID_26002
MAHTKTTQRKSTRPHGVPRHQLVSRHEASSSGSNDPIGELEDYEAKALAHVAELSASLENLQVYCNTLHEEMHVLYDRLRPNVPPDVAAMGAGPSGTTNGGSDRGIDLFGAPPSMNLADERSPEAGSGTTKDEEE

SEQ ID NO: 69378 - protein, 91 aa, Zea mays
  Coding DNA Sequence Number=SeqID_26003
MKGPCTPTCCTLLYASFFCLLLSSLEVESPVIESTSFITEGWLLCRAIVTVVEVTSPEVGANVGHLFSNATDQEQGVFALRTFGEEEDPQH

SEQ ID NO: 69379 - protein, 185 aa, Zea mays
  Coding DNA Sequence Number=SeqID_26004
  Subcellular localization annotation: CTP_CleavageSite=89; ConfidenceScore=5.13e-01
MAAQGAGRAVSSSLAKSLELRKPKREARSGAKNRRQTLSRVYKDQGETGSNVPPGPDAGFKNAKRNSRPSNGSRTRNGRPANHSPRLINSAAGQAALLVGEAGRHFAFAVITAPKKGPGKGDTPKRILPREGTRLRASLLIRGSKAGPPKGSTAASDRVGPTPTTGQRFEGRPPEGFHGRLPRPP

SEQ ID NO: 69380 - protein, 115 aa, Zea mays
  Coding DNA Sequence Number=SeqID_26005
MEEGSADEVAPRDSGPESVRSGGYPPQITSWVLHEIMKKSEKDIHDAREAAKKAEEAAERERQIAELPPPPEPFDPLADPETKKAIEIINMAESIVDKVVNKLLNEVAEKVLKED

SEQ ID NO: 69381 - protein, 129 aa, Zea mays
  Coding DNA Sequence Number=SeqID_26006
MMENFGSKTVQIAMNAVVTSQLLVSLYSAAVDRKDQTVTLQGGTDTRSEIGSFLRNELREGVFWTFGFPKLKRLFSRVKLVTKNDLAPRKGLLLGSCFGAPKVSHEEAASAEVVSKRWPEVPFYGASAF

SEQ ID NO: 69382 - protein, 131 aa, Zea mays
  Coding DNA Sequence Number=SeqID_26007
MCPDGSVKIPRRKGSGFLGSDPPLIAVKDEVKVPEANRCLKDPISVVAGHLETRKFIENAQAPYIACQLSMFRSSAPINGVLGGRKIYTGSGRTSLHPVFGGSCYQHLCCPMLVVGVISGREREESLPSLL

SEQ ID NO: 69383 - protein, 122 aa, Zea mays
  Coding DNA Sequence Number=SeqID_26008
  Gene Ontology: Mol. function=carboxyl- or carbamoyltransferase activity; Cellular component=ornithine carbamoyltransferase complex; Biological process=amino acid metabolic process
  Homolog annotation: Hit_ID=Q8SA97; Match level="QueryCoverage=90%, HitCoverage=21%, E-value=7e-09, Identity=38%"; Hit description =Ornithine carbamoyltransferase
MALPVDVAGLRPRLGDVEAPPKPRSSLSSMAEAESEPLGRARRRSSAEARAESEPWGRAERSSSSSGAEPRVRALGRAEQSSPSFGPSPSPGSGGAEFAVFRDLARVRALGRAERSSLSSGT

SEQ ID NO: 69384 - protein, 134 aa, Zea mays
  Coding DNA Sequence Number=SeqID_26009
MPGKANCCCPARMQHSALFLAFTVRTAARICRCALERPAFADSPVDYLNRFTKHESPHVKVTSEPRPRVGLAPLEDGWPRPQGRDDDVILQSGDPQTASPSEARSDLAEGVVDAEGAAAPFQRQDPSLQDQSVL

SEQ ID NO: 69385 - protein, 302 aa, Zea mays
  Coding DNA Sequence Number=SeqID_26010
MVTSSLMVGESKPGCGLCPSLSLKDFHHQGWGGEEGRPSSVAPAAAPCLALGREWLRSRSQRRRLPRQLEEVLPPALIAKAGHGLTSNSTAFCPSLPHEFGHGRGPPSSSIRPEVSAAAVRPPGAEVVVAAAAGAGDGAPFVSLPLLHRPTPIEWGYSSVDYLNRFTKHESPRVKVTSEESLGSVGLAVRGSSSIVKGTPRLLFDEPRPGVAISVSGWRPWEMVGRGPRGNRPSRLLGPDSRRSPWQRLPGRGDDVVLRSGDPRTASSSEARSGLAEGVVDAEGVAAPFQRQDPSLQGQSVL

SEQ ID NO: 69386 - protein, 130 aa, Zea mays
  Coding DNA Sequence Number=SeqID_26011
MNNFNSSFMVKQRSKIKAGINSEATGKELTVDDVHRSIVHDTGRPAAALCRRRAIAPNPKLPHGCRCFVYLLLNLVIPQSHKSSPEDAPFNEIMRGAVRGSSLSEFPARGAFRDEDDEGKGAGRFRIYIC

SEQ ID NO: 69387 - protein, 184 aa, Zea mays
  Coding DNA Sequence Number=SeqID_26012
MPAKIHRGSERNFIPLPQDTTTSARAVQRDRRAQRARLAEALRLKMDQVLVPLVEYSNNLLYSKYSRREIQGCLEFFGFLVIVGPVGAFKQGEQDDDEFQDLHESYRKGATKQNLLCSSSTWFILVATSQIDDGTLLILFVGTYVFIKSWRNKNKNIALVTVLGIVPNQKVEPGQKQKRNDPRS

SEQ ID NO: 69388 - protein, 246 aa, Zea mays
  Coding DNA Sequence Number=SeqID_26013
MHSAKREPLPSVCEYTRFWAASGRQKLKLKPNAQLLARLLGEALGTDTAALPPSRRFRREANGAPSVRTERIAAGVRRLSYQVEVKVFGSKFNWDSRVYSIDCQSEYLYDCSCNPIFVEYLNGSDSIADKAIGRMQEIADKIFSVARQTIRPGHGLSSFEATKLRVALEDIACMLEQDSLVLQENLDNVNNVNNPADSSYEPSALSSPPPADEFLSPDWDFADHFANFWGLEYDSDHMPSFSDNEV

SEQ ID NO: 69389 - protein, 113 aa, Zea mays
  Coding DNA Sequence Number=SeqID_26014
MANTLNTEGGIGITARTGGASGRRSGRRFAFAEITAPKKGPGKGDTPKRILPREGTRLRASLLIRGSKAGTPKGSTAASDRVGPTPTTGQRFEGRPPEGFHGRLRLPGLRAHY

SEQ ID NO: 69390 - protein, 117 aa, Zea mays
  Coding DNA Sequence Number=SeqID_26015
  Subcellular localization annotation: CTP_CleavageSite=20; ConfidenceScore=5.50e-01
MNKNTGIRSAITNGTPVPPSAGGASGRSSGRRFAFAEITAPKKGPGKGDTPKGILPREGTRLRASVLIRGSKAGPPKGSTAASDRVGPTPTTGQRFEGRPPEGFHGRLRLLGLRAHY

SEQ ID NO: 69391 - protein, 199 aa, Zea mays
  Coding DNA Sequence Number=SeqID_26016
  Homolog annotation: Hit_ID=Q6QP51; Match level="QueryCoverage=19%, HitCoverage=17%, E-value=5e-10, Identity=78%"; Hit description =Putative growth-regulating factor 1
MMTVSKKGFEGWPLGRVRQPAQSTRALRPLLIRGSKAGPSEGFDSRPRARRARDDSGSDFVTESHQREASSPQTLSNGSGSSKSLAGFVVKQPWPNRLTNRPYRRRTQCEDRLTPYPDTRASIGKVEPQAQQEAPPRPTLGLGLGRRSPPRPTPGLGLNLGLGRWSPPRPTLVLGLNLGLGRWSPPHPTPGLGLNLSLG

SEQ ID NO: 69392 - protein, 266 aa, Zea mays
  Coding DNA Sequence Number=SeqID_26017
  Gene Ontology: Mol. function=carboxyl- or carbamoyltransferase activity; Cellular component=ornithine carbamoyltransferase complex; Biological process=amino acid metabolic process
  Homolog annotation: Hit_ID=Q8SA97; Match level="QueryCoverage=53%, HitCoverage=20%, E-value=3e-10, Identity=36%"; Hit description =Ornithine carbamoyltransferase
MALPVDVAGLRPRLGDVEAPPKPRSSLSSMAEAESEPLGRARRRSSAEARAVSEPWGRAKRSSSSSGAEPEPEPEPEPWGQAKRSSSSSGAEPEPEPWGRAKRSSSSSGGVRRLPGLSPSPSPVSGGAEFAVFRVLARVQALGRAERSSSSSGAEPESEPWVWRSGVRRLPGLSPSPSLGSGGAEFVVFRGLSPSPSPGSGEASYGAFGRAWLPVSITLSSGTAVEVAQAALSFGQTGQWSGEVTAVTSALPEGARQDKGVRPPLR

SEQ ID NO: 69393 - protein, 54 aa, Zea mays
  Coding DNA Sequence Number=SeqID_26018
MTGPVEPPPYNPGDLIASLTGRLQLKKLNSAEVKFSSKAQLQLKKFSCFSARTL

SEQ ID NO: 69394 - protein, 91 aa, Zea mays
  Coding DNA Sequence Number=SeqID_26019
MNGGREIADEAIRQNEEETHRASGEARRVAEAAERERRIVELSPPLGPYDPKAGPSLKGALDVIRIANEAVDEAVNRLLNEAAQKILKEDE

SEQ ID NO: 69395 - protein, 245 aa, Zea mays
  Coding DNA Sequence Number=SeqID_26020
MNKRPAFKVPLQKELRFHLRRYEQPHTSGGPAEKQKADERLTVARSSSSDNDPRYGWPNYSSDGLRANAAATLPSPTPTLEGQGQGPSAHRQIPTRILPDERSTDLRAEAPYRCKGRTAPEHERRPGSARRLGRSSRAHGATTALAAGGGAGSQAGEPNALKLTTPAVDQPRVVEDRPSRRASERPLPRTLKERLAHEPAREVELRLSPASAPARMMNILEAEGGTKIAARLASPHPGAGGHRLG

SEQ ID NO: 69396 - protein, 588 aa, Zea mays
  Coding DNA Sequence Number=SeqID_26021
MPSSSSSADTTPPAAASSEETLSSLMVEELRAGDSVDFGVSRMTSARVEDMQRLGYFGGGVARAPGTEEVPEPEVMDKDRQGAAQKRQAAVRLHEARPKRQRGAAKATAPGGGKPPLAAKAGASAPSKAPEATAGAGGSKSTKVVPPASGVADASKAARALPLSGKRVADFGTDITVDDYLGGPDEGQLAIVAPGAAIATAAIVPKARGEALGTGGEVSALALVRDEAGVATRRLKGVTEALSQATEALSQVADFTSRTASGALTAALSAEVERLRTQHADAVREKSASDSKCRKLADRVAALEKEKADLRRQLAGERREANEAIAKEQAAQAEAKLARAEGNIAKELAGHLQERLTALESRAKGAEAAMRAEAERTRTQLMDTYRELGAWTGGAAGTPRCRGGFMSYASLVTCEGAVNALSREGCRHFEVFDQADEDFERDVYKVEDPVVKESAGALYDRMWGPHGREVVRERAELARAQAARGERVDDFGALNSALPDPEPTPAEAVTGAALEPTPETAAIATAAPASAAAGEDLPPKVAEGAPDAPAAAAPSVEDPAAEAVETTAEVAAEPTAEAPAASGPSQVA

SEQ ID NO: 69397 - protein, 456 aa, Zea mays
  Coding DNA Sequence Number=SeqID_26022
AWAAASPSLLAPPSAAPPIHLSFGAVPYRHTNAPHLARDDDGGARLYGGLWDPFDAQGGPLIPLRARGGCTQEHRRLPRLGNWNGGHQVDYLTATLPDCHHDTLTGQLGTSGSRLVESPRGEPALDDDAGSGWLVGDLALIDFIKEIPCEPRVEVVLIDDAFVERKSMECLFQPNAYLGDEVFIPINIQETHWYLVVINARNMEIQIKGLQRQIDMISQLKELKDHRWPDLQVASRTLKEIEMTYAKQTDRYKHMSYKRFTEAIISKKYKIAYNKKRYVWAKDIFKWEHTIRNGVPIDLRGGLQVKLVTFGKIQRRSAIIHRTVRCTPDSVRCSKEERLWNSPASGICSAIMHQTCPVYTGLSGEPAEQRLLRANGHLQAHLMRARSAQKSGTRETVHRTIYSSCPVYTGQPGGPRSQKLQRSKPNDLVTWLAHRTSPVCTGLSGAPYDSQPPPNG

SEQ ID NO: 69398 - protein, 158 aa, Zea mays
  Coding DNA Sequence Number=SeqID_26023
  Subcellular localization annotation: CTP_CleavageSite=85; ConfidenceScore=5.67e-01
MGAIQVKAPSTQGTRSRLARAQPQVGTVDPGGFTPRPRASSSNGRTFDSPEAQLGQASRRSNLGQIASPSNRIAGAFNARIAWVRLTAAESSPRRHRKLRLARPQGSDSTSTPEDGLCLARPQGSDSTSTPEDGLRLARPQGSDSTSTPEDGLRLARP

SEQ ID NO: 69399 - protein, 339 aa, Zea mays
  Coding DNA Sequence Number=SeqID_26024
MDGSNHPRGGKPSVSQLLQGLQKGLEILLSLTRGPIAPVATGGSHHSLRKRWEPPIVVPEVKPSALPPLVRRHKDDGDVLLRTCLPQLEDAATGPHRHADSLFPRRRGKRLRREEMGPQIPVGVNPQKSFANRCEDGCLRDRVGVEIVQLHPIEMQNRPHETACWHSEPPLMERDETQHIPRRRGRGGPARRDHPLRLRVTGEGTKQAISNKGLQIVHRDGGERPRVARRNDGYPVDHHQAKGVAAEWTRDLERGYSKRDPSLRRNRLRTRRARDDSGYVRYMAKARATLPRGSGAALTNPAPAKLLTASTYQPENSKPDYAPGLRPVRMREQPDRPRH

SEQ ID NO: 69400 - protein, 147 aa, Zea mays
  Coding DNA Sequence Number=SeqID_26025
MGKNNKRKREPTPPSEDFGDSEYSEEEFSSKSEGSPAPIPLRESSDDSDDSQGLAAEVWTYIRAVERSGLEGSDESEYSSDEEDWDGGGEDEDDDDDDDDEGGGGGDGDGSGRGGSSGSKDGDGGGSRGGSGSNRGGSGGGSNRASG

SEQ ID NO: 69401 - protein, 23 aa, Zea mays
  Coding DNA Sequence Number=SeqID_26026
MEEDDLLGEDLVDYEASPERPEN

SEQ ID NO: 69402 - protein, 251 aa, Zea mays
  Coding DNA Sequence Number=SeqID_26027
  Gene Ontology: Mol. function=transcription regulator activity; Cellular component=nucleus; Biological process=regulation of transcription
  Homolog annotation: Hit_ID=Q6Z9R3; Match level="QueryCoverage=100%, HitCoverage=100%, E-value=2e-40, Identity=43%"; Hit description=BHLH protein family-like
  Pfam annotation: Domain name=HLH; Domain location=168-215; Score =28.2; E_value=3e-05; Accession=PF00010.17; Description=Helix-loop -helix DNA-binding domain
MDLDMLNSHPEAQLELMNAMLQLEQLAGFPLHDHGGAIMMAVPSTPPSPPPPPGMQQQAATHHHHLSSVPRHMSAGATANNNGRAGVYDDHQYPRQVRVTAASSSSCSCNDGGSSGEISATAAAAVGSSSSSSAMREMVFRVAALQPVNIEPEMVRPPKRRNARISTDPQSVAARVRRERISERIRVLQRLVPGGTKMDTASMLDEAIHYVKFLKTQVQSLERAAAADARRPVPDNGGAAPYSSARINGQW

SEQ ID NO: 69403 - protein, 134 aa, Zea mays
  Coding DNA Sequence Number=SeqID_26028
MAGAVRAQPLTGAASMRTTASARSGANWASLSDGEAIPVCHRFWRRPLPCAGVRADDMHRQLLLCPTAACPARILSVRRNSFITLFGAVGKRWYEIIVDNSLIRGQILEPIASLALLLEDKLTTGAVYTSTVDI

SEQ ID NO: 69404 - protein, 155 aa, Zea mays
  Coding DNA Sequence Number=SeqID_26029
MKTGKCRGLAIKLSQTQNVPAADSGLITVKYRGSYAKCRGRREMNQYALIATRSPISGREEPKPKEVGARVQAEEDGMHRSFDCTPMRPATGDEERGRSAPRSYPQTWKASLPASPAAPHGAVASCNDSPRKEEDQTDRWGPHDGVTRKESAAAV

SEQ ID NO: 69405 - protein, 189 aa, Zea mays
  Coding DNA Sequence Number=SeqID_26030
  Subcellular localization annotation: CTP_CleavageSite=51; ConfidenceScore=5.60e-01
MGTIQVKAPSTQGTRSRLARAQPRAGTVDLGGFTPRPRASSSNGRTFDSPEAQLGQASRRSNLGQIASPTDRIAGAFNARIACYLILTRVPQLTGPNPRRHRKLRLARPQGSDSTSTPEDGLRLTRPQGSDSTSTPEDGYGEQDRRPIWLALGPLGVETPTVGAPGRGLLRVDEQLPVKLQMGSLQQPL

SEQ ID NO: 69406 - protein, 193 aa, Zea mays
  Coding DNA Sequence Number=SeqID_26031
  Subcellular localization annotation: CTP_CleavageSite=62; ConfidenceScore=5.11e-01
MAPRVPCDDGGSQLPYGSRGTSAKTRPLRQLSLRQAPLLLRQPRHHTSRHSATPPIVHLDPLLMTIKGRTRAFLEKVGRAGPRTGQALSWGRSLPSPAWTLVTPLLQAHPTWARDEHEGRGISTSLTPVSGHLAFPPFALAHALDPSGLGHAAHSLVGLGTPRSRNRRQVLIISSPQHAKGPSHWYGLQLLCW

SEQ ID NO: 69407 - protein, 99 aa, Zea mays
  Coding DNA Sequence Number=SeqID_26032
MDRGLILNFCGVSYAKRYREGVLCSVGRWIKTLWCRLDSRYPEPVRDICPRIRDAWLRFNYVDNDLGPSILIGRSKAFPPNRHPKPNLSRPSCINDWTN

SEQ ID NO: 69408 - protein, 293 aa, Zea mays
  Coding DNA Sequence Number=SeqID_26033
  Gene Ontology: Mol. function=catalytic activity; Cellular component =membrane; Biological process=cytoskeleton organization and biogenesis
  Homolog annotation: Hit_ID=A2XN41; Match level="QueryCoverage=26%, HitCoverage=18%, E-value=1e-24, Identity=69%"; Hit description =Putative uncharacterized protein
MNGLAKDVPTVNGMHEEPTTAHPRLLMPPTVHLKIFFELILKSLTCMHSHSRTVTEIFNFSQDDLLTEDMMILDTHGEVFIWIGQYVESKEKQKAFDIGQACHRWDASAGREDVETLAQCQWMIACGEWPPLAVAYDHVEGSTMEAGGMQVLVDQMMAATESSRFHVSLKKDDVHIRRLIINQVLPPSASLCRFCAAKWRKLEHKMLDNFFSVLSCVISVPFYTGFLPLLFWSGHDRLARQMTLLMAFCDYLGNSVKIFVTLCPDIRRTWQSYSCCGFISSSLTPNLLRVFQQ

SEQ ID NO: 69409 - protein, 278 aa, Zea mays
  Coding DNA Sequence Number=SeqID_26034
  Gene Ontology: Mol. function=carbonate dehydratase activity; Cellular component=extracellular region; Biological process=one-carbon compound metabolic process
  Homolog annotation: Hit_ID=A2YW42; Match level="QueryCoverage=91%, HitCoverage=92%, E-value=1e-115, Identity=75%"; Hit description =Putative uncharacterized protein
  Pfam annotation: Domain name=Carb_anhydrase; Domain location=43-270; Score=93.2; E_value=8.2e-25; Accession=PF00194.12; Description =Eukaryotic-type carbonic anhydrase
MSPARLAAVAAAVLLAAALLRVVPGARGQEETEHEEEFSYVPGDEHGPEHWGSIKAEWAACGAGRMQSPIDLSHERVSLVRSLGYLSHSYRPAEASIVNRGHDIMVRFEGDAGSLVINGTAYYLRQLHWHSPTEHTVDGRRYDMELHLVHESAENKAAVIAVLYEIGGHDDALLRQLEPAIRRVADVRDREMRVGVVDPRRARGRASVYYRYVGSLTAPPCTEGVIWTIVKRVRSVSKHQLELLREAVHDDMENNARPLQEANHRDVSMFRPKPNKQY

SEQ ID NO: 69410 - protein, 372 aa, Zea mays
  Coding DNA Sequence Number=SeqID_26035
  Gene Ontology: Mol. function=kinase activity; Cellular component =outer membrane-bounded periplasmic space; Biological process =proteolysis
  Homolog annotation: Hit_ID=Q67UY9; Match level="QueryCoverage=73%, HitCoverage=66%, E-value=5e-99, Identity=62%"; Hit description=1 -phosphatidylinositol-4-phosphate 5-kinase-like protein
  Pfam annotation: Domain name=MORN; Domain location=132-154; Score =21.0; E_value=0.0043; Accession=PF02493.11; Description=MORN repeat
  Pfam annotation: Domain name=MORN; Domain location=155-177; Score =35.5; E_value=2e-07; Accession=PF02493.11; Description=MORN repeat
  Pfam annotation: Domain name=MORN; Domain location=178-200; Score =33.1; E_value=9.9e-07; Accession=PF02493.11; Description=MORN repeat
  Pfam annotation: Domain name=MORN; Domain location=201-223; Score =25.7; E_value=0.00017; Accession=PF02493.11; Description=MORN repeat
  Pfam annotation: Domain name=MORN; Domain location=224-246; Score =35.7; E_value=1.7e-07; Accession=PF02493.11; Description=MORN repeat
  Pfam annotation: Domain name=MORN; Domain location=247-269; Score =32.5; E_value=1.5e-06; Accession=PF02493.11; Description=MORN repeat
  Pfam annotation: Domain name=MORN; Domain location=270-292; Score =33.6; E_value=7e-07; Accession=PF02493.11; Description=MORN repeat
  Pfam module annotation: Pfam domain module=MORN::MORN::MORN::MORN::MOR N::MORN::MORN; Domain location=132-154::155-177::178-200::201 -223::224-246::247-269::270-292
VIHAVLDDQEPDDKKAQAPPRALLRRAHHRLRPCPTQSLLLLLFLPPLALAALLLRGGDGGRHLALLAAAAGLALAADAAAAAARFRGARPRGPAYVQWFIGEGDGEEQQQRDNVRAEVREGVEFYSNGDRYEGEFRGGRCSGSGVYSFFGKGKYEGEWADGKYDGHGVESWARGSRYRGQYRQGQRHGYGVYRFHSGDCYAGEWAGGQSHGVGAQTCSDGSTYAGEFKCGVKHGLGCYHFRNGDRYAGEYFADKIHGFGVYSFANGHSYEGSWHEGKKQGLGTYAFRNGDERAGEWDSGVLKKSLPLSDPAVQRALQAARRAADGAFHLPRVEEQVNGAVMAANRGATAARVAAIKAVQNRVDGKFCFIDV

SEQ ID NO: 69411 - protein, 155 aa, Zea mays
  Coding DNA Sequence Number=SeqID_26036
MGKNNKRKREPTPPSEDFGDSEYSEEEFSSESEGSPAPIPLRESSDDSDDSQGLAAEVWTYIRAVERSGLEGSDESEYSSDEEDSSEEDGGGDSEDDDDDDEGGGDGDGDGSGRGGSSGGKDGDGGSSRGGSGGGDSNRGSNRGGSGRGSNRASG

SEQ ID NO: 69412 - protein, 125 aa, Zea mays
  Coding DNA Sequence Number=SeqID_26037
MDGPEGIFPLVMSEGDAQRVDMATVRGGVAAAAKFGDKFRALGSIPGHDSFTHTIDERGRTPTTQYQPPIIGAGARRRRDGEPHRRRIADDLAPPAPMDLDECLLHTLVYFHGQVLWAVFALSRD

SEQ ID NO: 69413 - protein, 238 aa, Zea mays
  Coding DNA Sequence Number=SeqID_26038
MGTLLGGLFAECPRGHSAKVESLPSATGQTLGKSRWFYLHKDDRRLPVFTHRVVLGAEERWSALSTALASAGRLDCYSAVLLYCESATADADGRPAAPARRAAAPASGLQAPAALGEQEQASLLLGAGRADGDGRTGGGAVPWWPPVPLCVRARAGALAAAACFSLDRRLRLDEITPEASVESSRMALVALSTVELLRRVRGTVGKGLRGFRTVRPPVLEDAAAREVHWLAVEEKKRK

SEQ ID NO: 69414 - protein, 502 aa, Zea mays
  Coding DNA Sequence Number=SeqID_26039
MGSGAPVLIPRAVRNSREGRYNGGATTAEPKRQRGAAKAAAPGGGWTPLAAKSGVPASSKAPEVTAGAGGSKSAKAVSPSSGVAEVAKAARALPLSGKRVTDFATDISVDDYLGGSGEGQLAMVVPAAATTTAAAVPKAKGGALSAGGEVSALAVVMDEAGAASRWLKEVTEALSQVADFASRTASGALTAAVAAEVERLRTQHADAVREKSAADSKCRKLADKVATLEGEKAALRRQLAGERRETNEALAKAQAAQTEANLARAEGNLARERAEQLQERLTALESRVERAEAASRAEAERTRQLLEELQALPTVVEGFMAYASLVTCEGAMNALSREGCRHFEVFDQVEEDFEQDIFKVEDPVVKESAGAIFDRLWGPHGREVVRERDETARAQAARGERVDDFGALNSMLSDPEPTPAEAVPGFALEPTPETAGDASGAPASAAAGEDLPPEVAEGAPDASAAAAPSAEDPAAVAAEITPEATAEPTAEAPAMSGPSQVA

SEQ ID NO: 69415 - protein, 978 aa, Zea mays
  Coding DNA Sequence Number=SeqID_26040
  Gene Ontology: Mol. function=nucleic acid binding; Cellular component= nucleus; Biological process=RNA interference, production of siRNA
  Homolog annotation: Hit_ID=A3AQP5; Match level="QueryCoverage=90%, HitCoverage=100%, E-value=0.0, Identity=78%"; Hit description =Putative uncharacterized protein
  Pfam annotation: Domain name=DUF1785; Domain location=317-369; Score =91.7; E_value=2.3e-24; Accession=PF08699.1; Description=Domain of unknown function (DUF1785)
  Pfam annotation: Domain name=PAZ; Domain location=370-508; Score =153.0; E_value=8e-43; Accession=PF02170.13; Description=PAZ domain
  Pfam annotation: Domain name=Piwi; Domain location=616-938; Score =440.0; E_value=3.2e-129; Accession=PF02171.8; Description=Piwi domain
  Pfam module annotation: Pfam domain module=DUF1785::PAZ::Piwi; Domain location=317-369::370-508::616-938
MSAAQVVSQEQIFLTKKAFLFSYSLGKKLDKLNVASDKTVQQIRVPNVSLLLKERLSILLGLYNRFVCQMCPCYSRRSYGTSRCCLFYLEMGSHDGEDEELPPPPPVPPDVIPIKAEDAVGESPANHILKPKRLLMDRPGIGRKGQPTQLYSNHFKVAVKSTEDVFFHYYVNLKYEDDRPVDGKGIGRKVIDKLQQTYRAELSNKDFAYDGEKSLFTVGGLPQKKNEFTVVLEDVSTGKTAANGSPGGNDSPGGGDRKRVRRPYQTKTFKVEINFAAEVPMSAIGQVIRGEESENSLEALRVLDIILRQHSAEQGCLLVKQSFFYNNPSCFVDLGGGVMGCRGFHSSFRGTQSGLSLNVDVSTTMIVKPGPVIDFLLSNQNVNDPSRIDWQKAKRALKGLRIRTTPANSEFKIFGLSERICKEQTFPLRQRNGSNGDCDTIEITVYDYYAKKGIDLKYSGDFPCINTGKAKRPTYFPIELCSLVPLQRYTKALSTLQRSSLVEKSRQKPEERMTVLNDALQRSNYDSDPMLRACGVSVAPKFTQVEGRILQAPKLKAGNGDDIFSRNGRWNFTNRQMEEPFDVFEESPSMRRAPVSRRVDDMFGQIKSKLPGAPRFLLCLLPERKNCEIYGPWKRKCLAEFGIVTQCLAPLRVNDPYLLNLLMKINAKLGGLNSLLQVEASSSIPHVSQVPTIILGMDVSHGHPGQDRPSVAAVVSSRQWPLISRYRASVHTQSARLEMMSSLFKPRGTDDDGLIRESLIDFYTSSGKRKPEHIIIFRDGVSESQFTQVINIELDQIIEACKFLDEKWSPKFTVIVAQKNHHTKFFQTASPDNVLPGTVVDSKVCHPKNFDFYMCAHAGMIGTTRPTHYHVLHDEIGFSADEMQEFVHSLSYVYQRSTTAISVGRPLESKAILCSTGTAVAPVCYAHLAAAQVSTFLRLEEMSDASSSQGGGHTSAGSAPVPELPRLHDKVRSSMFFC

SEQ ID NO: 69416 - protein, 46 aa, Zea mays
  Coding DNA Sequence Number=SeqID_26041
MAVMGATSKKMYLCQVKKQQIFVAFVPRWCPKKKIKTESSGGSVLL

SEQ ID NO: 69417 - protein, 337 aa, Zea mays
  Coding DNA Sequence Number=SeqID_26042
MQDSSILDQTRGRLFFGPEFIQEAEEQVRIIRENLRKCLRVPEEQLPLEELSVQGDLTYTDPPAEAGADDWGPVVSGHSCARSRHNHLGHRRMTRAAAALLPLPVGPPCQPDSFNRTVVFPADQLYLSRALGLLLPRPGLSVSVGPAVRPLHALSPFHLLHLRSDAKRNLRGICAAQTAWPRSAELLLASPPVNKLGPSLAHKFVSHCIPWTRQSGNLLIAKLSHRRSRGRTDGRRGGSSPTSLVRLRGCAGGLRRVVGSALVGGSGAMVDQGHCDSSPELCKSSSSCAAADSLGAYYSSEFGALIAGLAIVGYGLRRVGAAPLLGMVQWMAWLGHR

SEQ ID NO: 69418 - protein, 145 aa, Zea mays
  Coding DNA Sequence Number=SeqID_26043
MAAAVDPRRHRWFAFGGVPGDFAGSWGARWWEVVDQWLTGAIAIRRRNCVNRRARALPQTAWAHTIPRFVLIGVWSIDRWFGHRRLWPPPGGGGAIARHGPVDGVARPPLDFDPASRVRSDWRWDIDRRSAKQRFRLDHVYPSST

SEQ ID NO: 69419 - protein, 506 aa, Zea mays
  Coding DNA Sequence Number=SeqID_26044
MPFHGRRVVRSPAFALNLQNRDPAAFVREAEDGAVRLVGRYVPRTEGQRSWDIHGSNDRLNRVFELNQLPYDGYPGQDDVDRRGKKPAVETGDNPAPAAAPSSKKRKLGTAMGGLGVSDGFTRELMRTCAAPGGRMSSPELRESSARMLRVTGGCWPRNVPIPRAAGDDFFTSRMVREWRVFPYGQNIGAVVSAVMDKDRQGAAQKRQAAVRLVEARPKRQRGAAKAAAPGGGRPPLVAKSGVPASSKAPEATAGAGGSKSVKAVPPPSGVAEVAKAARALPLSGKRVADFATDISVDDYLGGSGEGQLAMVAPAAATTTAAAVPKAKGGALSAGGEVSALAVVRDEAGAASRRLKEVTEALSQVADFASRTASGALTAAVAAEVERLRTQHADAVREKSAADSKCHKLADRVATLEGEKADLGRQLAGGEEGDQRGPRQGAGCAGKRLIWHGAEGILGQGARRAATEAAHRPEEPREEGRAMSRAEAERTRQLLIDTYRGWAREP

SEQ ID NO: 69420 - protein, 374 aa, Zea mays
  Coding DNA Sequence Number=SeqID_26045
KPVILKVPEPRDPDFAALEWGAGGVARHSPLSGRGLWHMPPLVTCEGGDERALPAKGCRHFEVFDQDDEDFERDIFKVEDPVVKESAGAIYDRMWGPHGREVVRERAETARAQAARGERVDDFGALNSALPDPEPTPVEAVSGVALEPTPETAEGAPDAPASAVAGEDLPPEVAEGAPDAPAAAVLSAEDPAAVAAETTAKATAEPTTEAPATSGPSQVQDFGPAHATATTKFLAASTAEDGNECGGSATEFFDFADSGSSVEWTEESSSEDLDYFAALDVAAAEALPHTADAGDVPGSSTGRRRRRAVAKRRVSGAEGARLRVSRAGRQELLSLPAAVSTGEGELRSLFVGEELRIMLFNYREMGIIPKVEPM

SEQ ID NO: 69421 - protein, 52 aa, Zea mays
  Coding DNA Sequence Number=SeqID_26046
MKDVPGSVVQQLKHVKDEVLKRSTRALYDKMWGHHGRDTVQERSNRALDPGA

SEQ ID NO: 69422 - protein, 257 aa, Zea mays
  Coding DNA Sequence Number=SeqID_26047
  Subcellular localization annotation: CTP_CleavageSite=53; ConfidenceScore=5.03e-01
MMRVMDKLKGKKRVDHGDSSRSRSTRGSGGGDTSSMLFQGSTVSRQRLEQLLGCMEEQGHEMAGHSAPGQEREVVGHSAPGKEHEVAGHLALEQEREAIGSSGPMLEQDHNALEQELKAVDHNAPRQEDKLAGQGSLMRDDDDYWEDYDGEADGEADAEVVTTQATNFRNNLHPLTTCYWMLLEGLEGVTLFRKKPRCGAASVRRYDLPNPTPPPTAAAAVAVFDPSLGTTTIFDHMLFVVSYLPRPYQQQHERSTR

SEQ ID NO: 69423 - protein, 107 aa, Zea mays
  Coding DNA Sequence Number=SeqID_26048
MCRRQLEYEQKPKNVLILLTLKFLVALSVSKVVMNVSLNRAWNPGIVSRVHEVAKFLNSELQDNAGYNEAGSLTMLRARLRYYLQNPLSCSHRDSKKHQSHGAKPEA

SEQ ID NO: 69424 - protein, 151 aa, Zea mays
  Coding DNA Sequence Number=SeqID_26049
  Homolog annotation: Hit_ID=O48967; Match level="QueryCoverage=60%, HitCoverage=19%, E-value=5e-26, Identity=67%"; Hit description =Putative uncharacterized protein
MTRALLLPAQAETRRYHVDCDVPSQHLMCRVHSPGRRHPGHPADGVPIQSIVKQYARAASMMVQIVEHRAETLVDFLVEEEDASSTPQVPNRPVPGTAAVHAARQHATAQTSRTPSRAAPGALSVARELLQHPPSSTASPGAMKQWQDDVD

SEQ ID NO: 69425 - protein, 208 aa, Zea mays
  Coding DNA Sequence Number=SeqID_26050
MQEGNANYMEGGLTFDYAAWSLAHECLRTGLSPTRWPATVKSSAEWRNSLDPCRGPEVDAYAGPMTAAISRYQPWGCSATGLTRARLDGVDAREDSDARPYSREGTATVRERGGLHACPGQSAGSPKSSAKYVTSSGKRTTRQWGPPSVPTRPDVNTTGTRVPPRSHCVLGIRSVEAGLRAPPGSRREGEAPGFDTQLNSFQPCTFYA

SEQ ID NO: 69426 - protein, 79 aa, Zea mays
  Coding DNA Sequence Number=SeqID_26051
MGPGSFAIQRWTRLWPVLGDAGLRATGIARRSLCAAVDPLSSVGELATSSTADEQATVDTEVQQIEIAEQELIEGKLCP

SEQ ID NO: 69427 - protein, 218 aa, Zea mays
  Coding DNA Sequence Number=SeqID_26052
MDTRWRSSVSEMMDIWLPAKGNWLLGSIGGITTADELAVFLLGAISILPASRAGGEWRRGFGSGKARTRARKAKAAKSAALMGYSRARYRFKKCPVITGRLFPKPQHATWKPGSCLQNTGAPPHHSAIVLKVARAACYHSASPPKRRFRVQSLGITSKMPTSPSSRSALPPKHRLRVQSLGITSKMPTSPSSRSVLPPRRRFRVQSLGITSKNADVAF

SEQ ID NO: 69428 - protein, 133 aa, Zea mays
  Coding DNA Sequence Number=SeqID_26053
MGKNNKRKREPTPPSEYSEEEFSSESEGSPAPMPLRESSDDSQGLAVEVWTYIRAVERSGLEGSDESEYSSDEEDSDGGGEDEDDDDDDDDDDDDDSDGGGSGSGRGSGGGNKDGDGGGSRGSNRGGSSRASG

SEQ ID NO: 69429 - protein, 84 aa, Zea mays
  Coding DNA Sequence Number=SeqID_26054
MARHSVPTHINCPHRFPGNRKGLTALAYNASDVAEVPDLSVSRDNSDLAEDDPCDPTTTSKPEAPMQSLNQLPVVTDLTDARSA

SEQ ID NO: 69430 - protein, 132 aa, Zea mays
  Coding DNA Sequence Number=SeqID_26055
MLPEPGIELYLTGDTGSTSPDFTRSSAYVDRAPRPEHTPPISPTTCARGPTNSGHHRQRAIPRRDCKDFPELTSPFVGPPSPPEKYCNLADGEYILIPEQGVAKEVVQEPAPESAIEDLPALALEGKPRFYA

SEQ ID NO: 69431 - protein, 63 aa, Zea mays
  Coding DNA Sequence Number=SeqID_26056
  Homolog annotation: Hit_ID=Q2QRT1; Match level="QueryCoverage=61%, HitCoverage=4%, E-value=4e-07, Identity=66%"; Hit description =Retrotransposon protein, putative, Ty3-gypsy subclass
MVTPGQRYCESESGRAATPLIPNMYQDECPSGQGVTLHKIVTAIGGGVSVAKAQRLWKAVVGP

SEQ ID NO: 69432 - protein, 81 aa, Zea mays
  Coding DNA Sequence Number=SeqID_26057
MLDRYQDDRDDNSTRGHRYPWVSYPMGMDTAEVPDLSASRDNSDLSEDDPCDPTTTSKPEAPMQSLNQLPVVTDLADARSA

SEQ ID NO: 69433 - protein, 119 aa, Zea mays
  Coding DNA Sequence Number=SeqID_26058
MNKECTEGSEMGTAAHSALGLGGARARGRGRRRLASGTGTEALGLGDGDGDARARRWSRRRSGSEMGTGTAELGSRTARRGGRPARRRWRLGSGSATAWRALTARRRGRERRLSISLAA

SEQ ID NO: 69434 - protein, 97 aa, Zea mays
  Coding DNA Sequence Number=SeqID_26059
  Subcellular localization annotation: CTP_CleavageSite=26; ConfidenceScore=5.09e-01
MAKPSHATPPGPLLWKQQPTRPSIPVAGMKAKSHHQPNQGGTCKNYATSKAGYTNTQLDLPGLTALAYNAPLTPAAAVQWPHLYPPYLEWETKSQDK

SEQ ID NO: 69435 - protein, 541 aa, Zea mays
  Coding DNA Sequence Number=SeqID_26060
MTCRRCADRRREARSGEPDAAKGVAVATARAGTQTDGGAREEELGMCSSPVPRDGSGQTCWRRRSTRGELGLQEQQGEEVDGYWMRETRGSRLVLGACTWRFSAGEVRQGEGATGAWGADHEEKGRSCYSPGGTTAVHPSRGVGLGDPALVMKWWPDTAWGRSSSHVKAGGHGYCRAPWSGGEMLLAQRTATSYWPGAGSGRLALSAGEEDREMAVTIIRTLTQETERINMNQQEAPIGVGEFLRDFGVPVVLWRLLQEVGYTEAPKYQWSRTVLRGQPWYEVVVRIPERARKPSWPYWMFHAEGMTPWEGAQVAALEVLTTICYQKREEIQATSMRLFPAVALSDPLVYHHQARLMESIPIGQDSVESASARVLMAVLELQLTRGHSRQKWQQLYTGSYAAFKMMEMAKNSSCTQAQERLEETRVQAEQVIGLEHQVTELQMQHQADQNRIKELEHQLTNAHSKLKILSQQQEEICLYAVAIREDLKETMSFISHQDQAIKELNRAHPMEFQVAQRLVNHLQQAVHRLNAAFDPTPVSVD

SEQ ID NO: 69436 - protein, 273 aa, Zea mays
  Coding DNA Sequence Number=SeqID_26061
  Gene Ontology: Mol. function=transcription regulator activity; Cellular component=nucleus; Biological process=regulation of transcription
  Homolog annotation: Hit_ID=Q9FTQ1; Match level="QueryCoverage=80%, HitCoverage=83%, E-value=3e-51, Identity=53%"; Hit description=DNA binding protein-like
  Pfam annotation: Domain name=HLH; Domain location=82-131; Score=54.2; E_value=4.6e-13; Accession=PF00010.17; Description=Helix-loop-helix DNA-binding domain
MDDIGSVPFADAGLLDGFYGGSHGHGGDYGLLASQLGAGAGASSTSPAILDGSVPLVDAAASAEEATRRKGDHLQDDKAAMALKSHSEAERRRRERINAHLATLRTMVPCSDKMDKAAVLAEVITHVKKLKSTAAHIRDRCAAVPADADDVVVELVHGGAAPPSAGGGVLVRATLSCDDGADVFADVRHALRPLRLSVVGSEVTTLGGRVRFTFLITSSTCGDVGAVVVDSVRQALQSVLDRANSALEFAPRASLLNKRRRVSTFESSSSSSA

SEQ ID NO: 69437 - protein, 65 aa, Zea mays
  Coding DNA Sequence Number=SeqID_26062
MNSVPDGIVQLILSMLHNAHDMAAYAYITGASETVEMAGSITCLRELVIYYPVGVSRQGGPQADE

SEQ ID NO: 69438 - protein, 761 aa, Zea mays
  Coding DNA Sequence Number=SeqID_26063
  Gene Ontology: Mol. function=binding; Cellular component=cytosol; Biological process=protein folding
  Homolog annotation: Hit_ID=Q5QNE5; Match level="QueryCoverage=84%, HitCoverage=100%, E-value=0.0, Identity=74%"; Hit description =Tetratricopeptide repeat protein-like
  Pfam annotation: Domain name=TPR_1; Domain location=323-356; Score =23.9; E_value=0.00061; Accession=PF00515.19; Description =Tetratricopeptide repeat
  Pfam annotation: Domain name=TPR_1; Domain location=481-514; Score =4.4; E_value=1.6; Accession=PF00515.19; Description=Tetratricopeptide repeat
  Pfam annotation: Domain name=TPR_1; Domain location=527-560; Score =7.6; E_value=0.65; Accession=PF00515.19; Description=Tetratricopeptid e repeat
  Pfam annotation: Domain name=TPR_1; Domain location=561-594; Score =32.9; E_value=1.2e-06; Accession=PF00515.19; Description =Tetratricopeptide repeat
  Pfam annotation: Domain name=TPR_1; Domain location=595-628; Score =9.7; E_value=0.36; Accession=PF00515.19; Description=Tetratricopeptid e repeat
  Pfam annotation: Domain name=TPR_2; Domain location=284-322; Score =2.1; E_value=16; Accession=PF07719.8; Description=Tetratricopeptide repeat
  Pfam annotation: Domain name=TPR_2; Domain location=323-356; Score =23.6; E_value=0.00071; Accession=PF07719.8; Description =Tetratricopeptide repeat
  Pfam annotation: Domain name=TPR_2; Domain location=357-387; Score =4.2; E_value=9.1; Accession=PF07719.8; Description=Tetratricopeptide repeat
  Pfam annotation: Domain name=TPR_2; Domain location=433-466; Score =8.0; E_value=3; Accession=PF07719.8; Description=Tetratricopeptide repeat
  Pfam annotation: Domain name=TPR_2; Domain location=481-514; Score =13.4; E_value=0.64; Accession=PF07719.8; Description=Tetratricopeptid e repeat
  Pfam annotation: Domain name=TPR_2; Domain location=527-560; Score =13.3; E_value=0.67; Accession=PF07719.8; Description=Tetratricopeptid e repeat
  Pfam annotation: Domain name=TPR_2; Domain location=561-594; Score =21.9; E_value=0.0024; Accession=PF07719.8; Description =Tetratricopeptide repeat
  Pfam annotation: Domain name=TPR_2; Domain location=595-628; Score =12.0; E_value=0.95; Accession=PF07719.8; Description=Tetratricopeptid e repeat
  Pfam annotation: Domain name=TPR_4; Domain location=323-348; Score =11.6; E_value=1.6; Accession=PF07721.5; Description=Tetratricopeptide repeat
  Pfam annotation: Domain name=TPR_4; Domain location=357-382; Score =9.0; E_value=3.3; Accession=PF07721.5; Description=Tetratricopeptide repeat
  Pfam annotation: Domain name=Thioredoxin; Domain location=679-758; Score=6.0; E_value=6.7e-05; Accession=PF00085.11; Description =Thioredoxin
  Pfam module annotation: Pfam domain module=TPR_1::TPR_1::TPR_1::TPR _1::TPR_1::TPR_2::TPR_2::TPR_2::TPR_2::TPR_2::TPR_2::TPR_2::TPR _2::TPR_4::TPR_4::Thioredoxin; Domain location=323-356::481-514::527 -560::561-594::...
  Pfam module annotation: Domain location=595-628::284-322::323 -356::357-387::433-466::481-514::527-560::561-594::595-628::323 -348::357-382::679-758
MKDQDNADASSASASADGTEEAGLCFGRAARVLLGKSTPLARARAAPPTHPTTPPRASSSFLASSLPSSLFRFRFPRSPSGHPHPLTAPPCRTSSPAHSPPSTRRAARSSAARSPQVLGGMSHRPPAPMPDTLSDAFAAAVLLSSTDKPDTLPPGRLSPVSPLPHSSKHGHHHPTPSSSSGSSGSVSRAPLAPASGLASRRSHSGEIPLPSEAPPRHRRTGSGPLIFTSGACSSSATSPLTNALPAGNICPSGRLAKPLPSPCPVATPPPRASRHDVLGSGTANYGHGSIARHVGPPTPRRKGCFEGALRLYDRALALCPDNAACRGNRAAALIGLDRLGEAVKECEEALRIDPSYGRAHHRLASLHIRLGHIEDALKHLSLATPQPDLLELHKLQTVEKHLGRCLDARKAGDWKSVLRESDAAIAAGADSSALLLAARAEALLRLNLLDEADLAISSASKLDYTSSCSSDTKFCGFLANAYLFYVHAQIDMSSGRFDHAVSSIDKARIIDPGNTEVVNMHNKVKSVARARSLGNELFNSGKFSEACVAYGEGLKQHPMNKVLYCNRAACRFKLEQWEKSIEDCNEALKIQSNYTKALLRRAASYGKMERWVESVKDYEILRKELPGDAEVAEAYFHAQVALKSSRGEEVSNMKFGGEVETIIGMEQFQMATSLPGVSVIHFMTPSNQQCCKVSPFVNTLCARYPSVNFLKVDVNESPAVARAENVRTIPTFKIYKNGIRVKEMICPSQQLLEYSVRHFGI

SEQ ID NO: 69439 - protein, 274 aa, Zea mays
  Coding DNA Sequence Number=SeqID_26064
  Gene Ontology: Mol. function=transition metal ion binding; Biological process=electron transport
  Homolog annotation: Hit_ID=A7PJE4; Match level="QueryCoverage=99%, HitCoverage=73%, E-value=1e-102, Identity=64%"; Hit description =Chromosome chr12 scaffold_18, whole genome shotgun sequence
  Pfam annotation: Domain name=DUF455; Domain location=6-248; Score =103.6; E_value=6.1e-28; Accession=PF04305.5; Description=Protein of unknown function (DUF455)
MGALVLSTADPLAKARRTHAAFSRWAAGLPIGQATAPDHPARPDKPLVVTQKEITTHKEMGVPLNAYMLHNLAHVELNAIDLAWDTVVRFAPLRDTLGDGFFADFARVADDESRHFRWYSQRLGELGFSYGDMPVHNLLWRECAKSSSDVSARLAVIPLVQNLDRKPEVSMLDQDIVARVAEEELAHVSVGLYWFLKVCQMMGREPGDTFKDLIKEYSVVLKGPFNYPARDEAGIPREWYDEKFKQEAAQKLSEVHDRLACIVEMEKESASLND

SEQ ID NO: 69440 - protein, 48 aa, Zea mays
  Coding DNA Sequence Number=SeqID_26065
MELDPAAEDDAEEYRLEAHNEEQDARAFLGIGNDDAPVAGTGESRLEG

SEQ ID NO: 69441 - protein, 119 aa, Zea mays
  Coding DNA Sequence Number=SeqID_26066
  Subcellular localization annotation: CTP_CleavageSite=80; ConfidenceScore=5.57e-01
MTNSLVMTNSRMITNSWMTNSADQLYEVHRMTNSPMMTNSPMMTNSWMMTNSLVMTNSPMMTNSPMKTNVPMTNSDDQLSANQLRPTSSPLSNSARQRSKSSTTDPRHLRLDVSPSSHV

SEQ ID NO: 69442 - protein, 447 aa, Zea mays
  Coding DNA Sequence Number=SeqID_26067
  Gene Ontology: Mol. function=hydrolase activity, acting on ester bonds; Cellular component=extracellular region; Biological process =lipid metabolic process
  Homolog annotation: Hit_ID=A2WM20; Match level="QueryCoverage=87%, HitCoverage=95%, E-value=2e-84, Identity=72%"; Hit description =Putative uncharacterized protein
  Pfam annotation: Domain name=Lipase_GDSL; Domain location=71-434; Score=106.3; E_value=9.6e-29; Accession=PF00657.13; Description=GDSL- like LipaseAcylhydrolase
MSTVTTASSPPTYAYKWQRLFAERCNQARIGVSGIPGVTHLIRNAKGGGVRRLPPLSATRHHGCSQSYNAIYSFGDSIADTGNLCTGSGGCPSWLTTGQPPYGNTHFGHPTGRCTDGRVILDFLADHFGLPLLPPSKAIGAGDVRKGANMAIIGATTMDLEFFNKHGLGSSIWNNGPLGTQIQWFQQLMPSICGADCQSYFNSSLFVVGEFGGNDYNAPLFGGKAMAEVRSYVPEIVDRIASGVETLIGLGAVDVVVPRGAADRVLPAVPDAVPGLEQGRRLRRGRLPQELQQPLQLPQRAAEAGGVRAAEQARRRRPAHVRRLLRAGRGHGPVAGELRYVRTHARTRVEVGDSKLIDDGSIDWACVSSVMEHAGLQYGLRVCCGAGGQGSYNYYNKARCGMAGSSACGDPEKYLVWDGIHLTEAAYRSIADGWLKGTYCSPGILRR

SEQ ID NO: 69443 - protein, 131 aa, Zea mays
  Coding DNA Sequence Number=SeqID_26068
  Homolog annotation: Hit_ID=A2X462; Match level="QueryCoverage=68%, HitCoverage=61%, E-value=8e-08, Identity=42%"; Hit description =Putative uncharacterized protein
MRRPHAAAAATALAALLLLVLCLAAALTRHGSGICQQAGRTPTRKMLLAMTISFDDDDAAASPSPSGHHRHPHHHHQHQHHHHHHAGRRRWNRRQGTIPPPSDDAGEAQAVDPRYGVQKRLVPSGPNPLHH

SEQ ID NO: 69444 - protein, 387 aa, Zea mays
  Coding DNA Sequence Number=SeqID_26069
  Gene Ontology: Biological process=intracellular signaling cascade
  Homolog annotation: Hit_ID=Q5QNK9; Match level="QueryCoverage=89%, HitCoverage=86%, E-value=1e-135, Identity=68%"; Hit description =Putative uncharacterized protein P0515G01.44-2
  Pfam annotation: Domain name=DUF231; Domain location=223-380; Score =221.9; E_value=1.4e-63; Accession=PF03005.6; Description=Arabidopsis proteins of unknown function
MARRRAALAALLVLLLLAACTAAAAAVTVSRKQRQRHHPGGASASAARSCDPFAAAGAWVEDGSYPLYDSARCPFIRDEFACARFGRPDTAYLRYRWAVGRAVRAPRFRRGPRCSGCGRGKTAMFVGDSLALNQYESLLCMLHAAAGPAARTTLSPPSGKIDPSSTVRFEDYNVTVVYYLTHYLVDLVTEPHTGRRVLKLDAIDQARDWLAADVLVFDSWHWWPRTGATQPWDYIQVGDTVVKDMDRTQAFAKALHTWARWVDANLVQTDTKVFFQGISPSHYRGQDWGASPKKTCMGETRPLNATGPYPGGPIPQQAILRGVLAAMAKPVYLLDFTYLSQLRKDAHPTKYDGGIFGGDCTHWCVAGLPDTWNVLFYAALTAGQGHN

SEQ ID NO: 69445 - protein, 753 aa, Zea mays
  Coding DNA Sequence Number=SeqID_26070
  Gene Ontology: Mol. function=molecular_function; Cellular component =endoplasmic reticulum membrane; Biological process=intracellular protein transport
  Homolog annotation: Hit_ID=Q6Z0Y9; Match level="QueryCoverage=35%, HitCoverage=98%, E-value=1e-141, Identity=80%"; Hit description =Sec13p
  Pfam annotation: Domain name=DJ-1_PfpI; Domain location=364-529; Score=39.2; E_value=1.5e-08; Accession=PF01965.15; Description=DJ -1PfpI family
  Pfam annotation: Domain name=DJ-1_PfpI; Domain location=591-738; Score=64.5; E_value=3.6e-16; Accession=PF01965.15; Description=DJ -1PfpI family
  Pfam annotation: Domain name=WD40; Domain location=1-39; Score=25.2; E_value=0.00024; Accession=PF00400.23; Description=WD domain, G-beta repeat
  Pfam annotation: Domain name=WD40; Domain location=173-215; Score =39.0; E_value=1.7e-08; Accession=PF00400.23; Description=WD domain, G-beta repeat
  Pfam annotation: Domain name=WD40; Domain location=222-260; Score =10.8; E_value=1.5; Accession=PF00400.23; Description=WD domain, G -beta repeat
  Pfam annotation: Domain name=WD40; Domain location=45-85; Score=45.1; E_value=2.5e-10; Accession=PF00400.23; Description=WD domain, G-beta repeat
  Pfam annotation: Domain name=WD40; Domain location=93-133; Score =32.7; E_value=1.4e-06; Accession=PF00400.23; Description=WD domain, G-beta repeat
  Pfam module annotation: Pfam domain module=DJ-1_PfpI::DJ-1 _PfpI::WD40::WD40::WD40::WD40::WD40; Domain location=364-529::591 -738::1-39::173-215::222-260::45-85::93-133
MPPHKIETGHQDVVHDIAMDYYGKRLATASSDNTIKIIGVSGTSHQQLATLSGHQGPVWQVAWAHPKFGSMLASCSYDGRVIIWKEGSKPDEWALAHTFAEHKSSVNSIAWAPHELGLCLACGSSDGNISVFAARSDGAQDLLASLSMFRNSLSGGCDNTVKVWKLNNGSWRMDCFPALQMHKDWVRDVAWAPNLGLPKSTIASASQDGTVVIWTAAKEGEQWDGRVLYDFRTPVWRLSWSLTGNILAVSDGNNNVTLWKEAVDGEWQQATYLNHRAAPPPLPRHSGERAGADRWRLPLPSRRYALVSGFLVRTGTTPPSHGGLLRVDVPCRTVPAQVLVPIAAGSEPAEAFVPIAVLRRAGADVTVAAAGAGTGLRVHAMYGVTVVADASVADCADASYDLVVLPVRTRRQPETLARPMTLNDAQGGVPGADNLGGCAALEGIVRRHALGGGLCAAHLRRAAAGAGALGPARRRQGDDVATAHPEFVDKFPAEVAGVDANVVVDGRVVTGRGPAAAMEFALALVDQLYGKGKVDEIAKPMMVRYEPGYAFEELNPVQWRCSGTPRVLIPVANGSEEMEVLVTVDVLRRAKADVVVASAEEVVVARHGTRIVADALLQDAAGQQFDLIVVPASGRQLLCSSGGMPGVKTTLADKVELMALLKEHAAAGRAYGAIGAATAQVLEPHGLIGGSMKATTCASRADRPSECGSRVVVDGNLATSGSTGTAMEFALAVVEKLLGPEAAREVAEALLFV

SEQ ID NO: 69446 - protein, 159 aa, Zea mays
  Coding DNA Sequence Number=SeqID_26071
MGKSKKGGSSSHHSSDKRKREPTPPSKDFGDSKYLEEEFSSESEGSPVHSSPPASSDDSDDSQGITAEVWTYIRAVEHAGLEGSDESEYSSDEENSSDSSEEGGGGDGGDGDDDGGDGDGGKGDGKGGGGDGKGGSGDGGAGSKGSSRGSNKGSSKASG

SEQ ID NO: 69447 - protein, 202 aa, Zea mays
  Coding DNA Sequence Number=SeqID_26072
  Gene Ontology: Mol. function=RNA binding; Biological process =regulation of transcription, DNA-dependent
  Homolog annotation: Hit_ID=Q651X9; Match level="QueryCoverage=28%, HitCoverage=10%, E-value=1e-18, Identity=72%"; Hit description=SunL protein-like
MEIPSLGGWTVILKVFSRVFRVTGVLLYLTSRRGKLKEKGLAESGQESETNSLPLPKIEGDDRAQSRALFIMYSYHFWMLRKWILFHGKDEALRLISWNNSDPHLSNVLANGEHIKRIYKDAEHADIADINTLTDEVEVYLHALRALVLHGIGGEVDRADVVSVDWADTCETGVKLLKQLSELGCLGHAIGHNALTVFSRVK

SEQ ID NO: 69448 - protein, 79 aa, Zea mays
  Coding DNA Sequence Number=SeqID_26073
MAQWHIFLSLGQQGSNDVAIGKQLPAQERQGFGFWEEQMAAIFCAARPAVFGGGEIGRLDEERLDSRNMEEIIPLKLAL

SEQ ID NO: 69449 - protein, 62 aa, Zea mays
  Coding DNA Sequence Number=SeqID_26074
MDLKSLYKKEIDLQIELENEQQEKREHRQELDNLKMESETSRVKHSEDITRNVCPPSPVPEL

SEQ ID NO: 69450 - protein, 156 aa, Zea mays
  Coding DNA Sequence Number=SeqID_26075
  Homolog annotation: Hit_ID=A2ZBC8; Match level="QueryCoverage=80%, HitCoverage=32%, E-value=1e-31, Identity=53%"; Hit description =Putative uncharacterized protein
MGRRKRKTGDRHGRVKPSVELEGSEDPDQIQMGDLEIVCGGDGDPLMQETEHLDPTRIVGDELDEGQVRSAYLVACHWDWSRNSMPYAVYKMGVATSFPSRVKRKRLHRVTCLATVAGGMTFTSLRWTLHPKKVELFPKEAHLNLRTYQTENLSSL

SEQ ID NO: 69451 - protein, 291 aa, Zea mays
  Coding DNA Sequence Number=SeqID_26076
  Gene Ontology: Mol. function=small conjugating protein ligase activity; Cellular component=plasma membrane; Biological process =regulation of protein metabolic process
  Homolog annotation: Hit_ID=A0EVF8; Match level="QueryCoverage=40%, HitCoverage=48%, E-value=6e-43, Identity=77%"; Hit description =Ubiquitin conjugating enzyme 2
MQFLPFRCVTQVEHLQTRTTGYGSSNPLFGGASSNKNNRIFFFLHAIPGMLLALVLFFDNRKFKDVNFPPAMSPPKRVWYWLGSCTRCWDLVLVSSTALLYLVMSMSTGLANMSLKHNSILTGLLSFMMDDALTTGSIKTSDAEKRRLAKASLAYNCESKNCPHFRKLFPEYVEKYNQQLQLENTAAEPVPQENPAPAPSPAAQQAPTVANRAQPLAEARRDKNQKKAVPFWMVLSAKTNLNVEQVFFSIARDIKQRLSETDSKPEDRTIKIKAEGEADAAEAQKSACCDS

SEQ ID NO: 69452 - protein, 165 aa, Zea mays
  Coding DNA Sequence Number=SeqID_26077
  Gene Ontology: Mol. function=catalytic activity; Biological process =metabolic process
  Homolog annotation: Hit_ID=Q75LI3; Match level="QueryCoverage=76%, HitCoverage=48%, E-value=2e-37, Identity=60%"; Hit description =Expressed protein
MCLDLYKEYGTTMAGLKALGYEFDNDEFHATVHDDMLEKMVTETIFYQPKTWLPQVFTNSDKAHAEEALCRLGLQGCFDGVICFETLNPCNGPSAFGMLFPDETFPDLADLNESDGFRPISPILCKSASPPLKPFPVKKQTIVRDHSDTCRTMRRPFHLQNLMLF

SEQ ID NO: 69453 - protein, 408 aa, Zea mays
  Coding DNA Sequence Number=SeqID_26078
  Homolog annotation: Hit_ID=Q2QQ41; Match level="QueryCoverage=42%, HitCoverage=60%, E-value=7e-12, Identity=27%"; Hit description =Putative uncharacterized protein
  Subcellular localization annotation: CTP_CleavageSite=25; ConfidenceScore=5.12e-01
MEGLLPNPADGRWRMGGGTHLPSPRCAPSSSATARGSPKQHGARVEGVGRRCAAAINALLPIWSAILAHLPSTTPHRPRQPLPTYKNNRFGWCKVILHCDGNANSELGVDMLVCIGGLYWGIKFICILPVLMEPVVLNRERAATDRLKRMPMLFDDYRDEDFYGLPRKYSIVARVEVKFPIEPRFRDRQHFVLSDINGAKIEAITYMYETVKHFDNLLHEKHVYKMHNVKFSLHPGEFNFRHLNGSMELYLDQQTIVEPYTVPIQMAPFPKQILLNLADVAELPNRTLVDIMAIVVHFDTIHRTMWGPFRKIVIMDARGYLHIIKVWGDLLNKNALRWVLAKEDYGIIIGTMFRRFRRQECLESSDHTAIHFNLFHHNTHHFGPIQKALVARNNRQFVVTFLEEQRRR

SEQ ID NO: 69454 - protein, 194 aa, Zea mays
  Coding DNA Sequence Number=SeqID_26079
MGSTVRGSYAIVLGQRSIGRPGDLYTKGGLYNKVDDQGIGQPRDRDFPFISADETRQGSTTRALQSSISFRKLATVSVKGNIGISRPKCHRSMIDPRTSLFHSSSTALALLENGRGSYAIVPGQRGIGRLGDLYTKVDDDGSFPVLATARFRGLGGWHQAWIAAGFRCASGLSLIPRANANHPTKIHGDPQGRI

SEQ ID NO: 69455 - protein, 91 aa, Zea mays
  Coding DNA Sequence Number=SeqID_26080
MATHKGERRVANRKVPVQAGDLRALGPWHHLREAREVGQEYPNKRKLPFLALESSFKIVIDSFGKGAYFNIRVVRDGRCPNCNVWSNFEQS

SEQ ID NO: 69456 - protein, 204 aa, Zea mays
  Coding DNA Sequence Number=SeqID_26081
MEGRGMSIIKDGAKAMIVTDKGENATKVRIGKTPFSNRDGKDDISKGRHKITSWKDLEITKVQDKHHGKDQGMTRVKVITDKHNQGCILDKICEASKKGKQSMVKGEAIKGEIGNSPLLNWVKRKGRLLKDKFKDRRLEILDNRHNVITKVRSRDEKGKHKKDESMRDFKEMSIPIPRDKKLPKDSDLTTEEERVSKDRKIRDI

SEQ ID NO: 69457 - protein, 307 aa, Zea mays
  Coding DNA Sequence Number=SeqID_26082
  Subcellular localization annotation: CTP_CleavageSite=62; ConfidenceScore=5.34e-01
MVRIWFSFQNRDHLFTPSRCSQSHQGIDPAGFCSSQSTPVLVIQWHSTTSRRSSLSHVTDLRGASIPNPARSTTLPRIESLGFSEFPSYINACPSLLNPHHTKSPNHSNIRFINSSFPSDVEATISGRGKGGKVGKGGAKRHRKVLSDNIQGITKPAIRRMARRGDVKRCYLTPQPREFSEPARYNSQDCTVYTGQCPVLQEDAALELGSLGKLQRLLRYNSPDMSGVHRTVRCNSGATAISAPTATCSAFIARQRAQKSGVPILAHRTLYSTCPVRHRTSRRALKSELQRSEPNGFGDVAGAPDMS

SEQ ID NO: 69458 - protein, 40 aa, Zea mays
  Coding DNA Sequence Number=SeqID_26083
MVGLQVVMRMMVFDYDYGNGKEEGVEADLREFHDFGEFED

SEQ ID NO: 69459 - protein, 307 aa, Zea mays
  Coding DNA Sequence Number=SeqID_26084
  Subcellular localization annotation: CTP_CleavageSite=85; ConfidenceScore=5.31e-01
MAPRILCDDGGSQPPYGSKRTSPGPAVLARAAAAPTPASTAPLALPPRHQPSRPAPPAAQRPSPNPSTRSTQAAPCTVATPSMLSAADAPHVAHVFPQPPMSLPLPCHARKKPPSPVHVEFLCGSSFPLMASLLHPWPAPWARPTFFSPEQAWPYLAPVRVPASFPSVARVARPARRPGMWRGQSWPARGGQGEPTPSVAGMPSPMRRTVKPFVHDFVLPAKAGSCVSIEEEHRKSHHPDLLWLRPLRLLIAICFRASRDRRSSFDDQVIKLSEFYEVEEPEHLFGEGKCSMTHYVPFTYNSLSRIT

SEQ ID NO: 69460 - protein, 149 aa, Zea mays
  Coding DNA Sequence Number=SeqID_26085
  Gene Ontology: Mol. function=kinase activity
  Homolog annotation: Hit_ID=Q6QP54; Match level="QueryCoverage=49%, HitCoverage=26%, E-value=8e-15, Identity=56%"; Hit description =Putative kinase
MGHRSCSLRPESAQGRVMMAPPVDVAGLRPRLGDAEAPPKPRSSLSSMAEAESEPLGRARRRSSAEARAESEPWGRAKRSSSSSGAEPESEPLGRARRRSSEEARAESEPWGRAKRSSSSSGAEPESEPWVGRSEILPLLGLIPLTDHG

SEQ ID NO: 69461 - protein, 294 aa, Zea mays
  Coding DNA Sequence Number=SeqID_26086
RNRESQRAQPQKIRMVGFHVLFFNRHTGTSLRRENEIAHKGLDSPLRRGGHASNGGGGLTLATMGRPGLAAPHAGALSWPCNAGRAGEARRRADRGWIWPCLLLQGPRAGLPALAGRAIALAGHATACTGAPSSTDGTKNRGRGGRLAGISQGPWGRGCWCSRPGAVHGQAVGALLATSRGGATQGPIRTGGTRKGASRAQASLVAIWTARSWQDWARARAPKGLPAVTPCGAVRRREGEPHRKGLGAGRLTGENKVSRAQGAGQGRSNGAIRGKLDPQRNLTCTGLGGFLRAW

SEQ ID NO: 69462 - protein, 99 aa, Zea mays
  Coding DNA Sequence Number=SeqID_26087
  Subcellular localization annotation: CTP_CleavageSite=43; ConfidenceScore=5.75e-01
MASSPVLVVSPILLPPPSAYKRARSSPVFATQLQPSPLPSSPSYSSKRCRAPCLAPLWPKLRHTLAITRHHFASPVVAGNLTGGFAAAGTRHRAVDRPP

SEQ ID NO: 69463 - protein, 62 aa, Zea mays
  Coding DNA Sequence Number=SeqID_26088
MGSSAEGATWDWETSWEDARHGSLAGRGEEEDEGAERSEGKQGIRALQQGGKQSLRLNHTYF

SEQ ID NO: 69464 - protein, 117 aa, Zea mays
  Coding DNA Sequence Number=SeqID_26089
MAPCSVYCLSRAWNTCWRSAPPCTDVVPSSSHRLDLVVHAAVLSLSICSPWHGHGTSLAPCASDRWVASCSVLVPLIWSSGAGSSLVLVGLAIVVVIASPVVSLRRSLPVLEPCHWQ

SEQ ID NO: 69465 - protein, 216 aa, Zea mays
  Coding DNA Sequence Number=SeqID_26090
MKGSWEEGSASGCISKKNRAATAHGGRRCGGATDCSVAQRATVPVGDDGVRFSLAKGVAAGGRERGGCRRGEEEDEVAVQPGHYGTILILFFLYKFGQSGNRYSMVSRTSWAHAPSTAGASEEAPQFLLTKLPRLALLSPHSSPTTPLYLIRGKQGSGSLESGQAVRMASLTEQVKKDELLRTAVGFGLQLCQQICGASICFNELQPVTKKALAYL

SEQ ID NO: 69466 - protein, 440 aa, Zea mays
  Coding DNA Sequence Number=SeqID_26091
  Homolog annotation: Hit_ID=A2Z9S8; Match level="QueryCoverage=69%, HitCoverage=92%, E-value=2e-84, Identity=54%"; Hit description =Putative uncharacterized protein
MGLAGRHLSRNKVLFFSGALFISLAVGIHLSPYPPSLSLPHLASFLLLPHPGSASASSGSSCVQFLHRVSWSDAAGAADNGSGGGKARAWSWPPSLASACGRGCSCSRFSASCSTRPRRRPPSRSSSAATATTALPSPRGTFPWTSSGAPFESNLTRLLREDLRLAPRLPDVLVLGSGLWHMLHVTDAASYGDALASVAGAAKSLRSQLPEPPPHMFWLGLPHLVNHMLNTDAKRAHMNGTMVHAYDREVDRRGVLRGEGGSFLLLDVGKLTQGCGQQCTADGMHYDGDVYDAVMHIMLNALLLYTGDIVDIALLYQRFENVSEWRHASCSKQVAYLLVDEDHMSMEKLILILGIINFSQTGDTLLLLVHDRDAAPRSQLVFFSIGGLLPSRPKALLCLLTTTPSPLVPVPVPSKLIVSYSQWLVELNCSVTFTACYVKL

SEQ ID NO: 69467 - protein, 156 aa, Zea mays
  Coding DNA Sequence Number=SeqID_26092
  Subcellular localization annotation: CTP_CleavageSite=27; ConfidenceScore=5.54e-01
MQAACNRAKWACPSDFQHTQHGGPRPRVMQPARRSLHASNCTAARTTATPPRLRNQYRDSRQPCGPGKGDTPKRILLREGNRPRASLLIRGSKAGPSEGFNSRLRARGFCAHYWSEVRRPAPRKGSTAALGYSGSAPTTDQGFEGWPSKGSQPPQT

SEQ ID NO: 69468 - protein, 356 aa, Zea mays
  Coding DNA Sequence Number=SeqID_26093
  Subcellular localization annotation: CTP_CleavageSite=65; ConfidenceScore=5.08e-01
MASLGQPDHFQSEATLNLVRGLLGSSGSSFSTSPPLHPPGGHLRPPLRDVRGGGPLHFPLPPFLRADEAEFGRVLHLHPRRRKVGELARRLGDRQRRSQRRLVLPSNGPTVDHKLWRTQPSLSPGLLPVLDNIETLATGGLTSMNVVDDFLKRRVMPLQRRPCRAAGSPARMISLEERTKAASHQFASKQSELERDRKDYKKDLQKVYARELEVGRKEKRLAKKEEALNQREEVFIELQAKLSALNEILEEQRVQQTPAVERLQKLQRELKGKARDASLAEEKLKEKGESLDRRETDLARREADLARREKDLAFKEEMLERREKLLAKHELEAEEKERTLEERVRRFQAAQAALRP

SEQ ID NO: 69469 - protein, 133 aa, Zea mays
  Coding DNA Sequence Number=SeqID_26094
  Homolog annotation: Hit_ID=O48967; Match level="QueryCoverage=86%, HitCoverage=35%, E-value=8e-29, Identity=46%"; Hit description =Putative uncharacterized protein
MSASVRSPSVRAAPTEDLRAELNRRHAGEDAPVSLERPDDLQAELNRRRVGEDARVSLERARECQQNVEGRNLDLDFFAVAPQTPRGARIQVYVIAITAAGGDTAVMATYFHVALSGPAQTWLMNLTPGSIYS

SEQ ID NO: 69470 - protein, 67 aa, Zea mays
  Coding DNA Sequence Number=SeqID_26095
  Subcellular localization annotation: CTP_CleavageSite=55; ConfidenceScore=5.08e-01
MEPGGGTAIGAVESLLTSSCFRKGAESRRRHRVGRCGSSSEAEVESVFRGRGRVRAPGSGEAEFVVF

SEQ ID NO: 69471 - protein, 116 aa, Zea mays
  Coding DNA Sequence Number=SeqID_26096
MSGVPTTSSMPLDSDRWSFCLLGPPGCPPLRFPEAGEFRRPLFLGAPDTVRCTPDSPVNYSGVPLEIPEGGKFELESSGAPDTVRCTPDSPVPQTRGAFGCPFAPLLNPIFDLFIG

SEQ ID NO: 69472 - protein, 63 aa, Zea mays
  Coding DNA Sequence Number=SeqID_26097
MTTPPTTRPVALTPRRDRRRLWQEKQATLRLRHNNRAKKRDRERVIPRKGSFPVKEPGSEPPY

SEQ ID NO: 69473 - protein, 327 aa, Zea mays
  Coding DNA Sequence Number=SeqID_26098
  Subcellular localization annotation: CTP_CleavageSite=18; ConfidenceScore=5.25e-01
MSSRSLMHRVFPPSKPPDGAYPPSFRLIVGGTQLRGSWYLSAIVRLQGFSSHSPVAPLRWWSPKTVTSSPWMGRGKPGCDLDPALSVEGVRHPHWGGERGEPGLYLLRGSAGHLFFQLLVVANTLQLCGGGVLQPCRGRRTVAAQLGCNIPPSSLHSRRGRQRGPAGALGSGPLFGFNSWFASLEREREREPSGGRVQPGTMAAAAEVTGGSPDSPVGCLNRFTKRESPRVKVMSEPKPQVGLAPSEDGWPRPRGDRPSRLLGPDSRRRSWRRWPGLGDDVVLQSGDPWTVSPSEARSDLAESVVDAEGAAAPFQRQDPSLQDRIVL

SEQ ID NO: 69474 - protein, 55 aa, Zea mays
  Coding DNA Sequence Number=SeqID_26099
MVMNLDVAVDGEVGAGGGGAAEGLGVVVGDRRLPDTRLSRASGPRGVYKAIGQGY

SEQ ID NO: 69475 - protein, 258 aa, Zea mays
  Coding DNA Sequence Number=SeqID_26100
  Gene Ontology: Mol. function=kinase activity; Cellular component =ornithine carbamoyltransferase complex; Biological process=amino acid metabolic process
  Homolog annotation: Hit_ID=Q6QP54; Match level="QueryCoverage=30%, HitCoverage=27%, E-value=4e-17, Identity=62%"; Hit description =Putative kinase
MAPPVDVVGPRPRLGDVEAPPRSRSSLSSEAEVESEPLGRARRRPSVEARAESKHWGRAKRSLSSSGAKPKSEPCVGRSRPESEPWVGRSGVRRLPGLSSSSSPGSGGAEFAVFRGLARVRALGRAKRSFLWCLRPGLAACQPRSVEWHSSRSGAGGAVLLSGRSVERRSDCGHFGSVDWRTCVRIKVSSHLCIKCSCDLVGWCGDLARVASWRRLGLGRAGSMFVTGGGLRRDLRADGGYQLRIRSLEGTPNYGPRH

SEQ ID NO: 69476 - protein, 211 aa, Zea mays
  Coding DNA Sequence Number=SeqID_26101
  Subcellular localization annotation: CTP_CleavageSite=50; ConfidenceScore=5.27e-01
MAPRTLYDDGGSQPPYGSKRTSARTQQLRQLSFPPGFSAPPTATTPHEPEVAEKRNHQLHVDLTIAQALPTALESREVIAFEALKQAKDEHVQKLIEAYLVTHNQRRALRIQEPASSNPVQPMRAEDHQILEGHPIFIRGENKAWELPEGAIVMEGMPVSPKAMDKQEHPKSTQDPTPKFFEPLTMKKIPTPSLEIKEEAASTPPAPPPSE

SEQ ID NO: 69477 - protein, 210 aa, Zea mays
  Coding DNA Sequence Number=SeqID_26102
MSRMGLRKNSKHPESIDVVLFTAQHKAASRAETSGLLLTARKAGRRKQQGEGGRPSTLAAVMGKLESVVPPARRCGRAGEGRRAAGRPMGGKQQGSEGRHGWGRVEQGARWWPCCREAGKKKGRGRHGRSFCAASIAGEVELAPMGEEGQGTPWEEAAARLLQGRRVGEAERREEEATAGSAFTRGARPWLPYTREAREEGAMGGPLLLR

SEQ ID NO: 69478 - protein, 207 aa, Zea mays
  Coding DNA Sequence Number=SeqID_26103
MRNRIPEVAKAAMIEDFYRGSNDSAFVRAILQRAPTTSEELFREANLYITTDERAQDHGVTWTSKPTSVGRRGLEKRSIALDHPSLMPEVHPAEASGHWTTSLMPSARITRICATPYGTAETSSILSGMSDPSNLYHLPRREEGQVNLDDLSNKKVVAEPPKLLGPHAPVLVLKTSDGYACAPDNLTGSVRLPQGHWIYHLQPGPQD

SEQ ID NO: 69479 - protein, 47 aa, Zea mays
  Coding DNA Sequence Number=SeqID_26104
MTATRRDPNAARRLHVAQRRTRSRGWAWHGERQERTPAREPSTGRNS

SEQ ID NO: 69480 - protein, 143 aa, Zea mays
  Coding DNA Sequence Number=SeqID_26105
MDPGVAPARVPVRLALPRLPNAFPRAQPHARGGDEDDGYDYAYGTVTGQSSHLERLHHRLHEEQERRRQELEQHGSSFSLQQEVESVRSCSPVLPLEVPPAPPLSAPAAGVATGGDPDDGGSDNSSSHITDLSEEQELEGWVA

SEQ ID NO: 69481 - protein, 237 aa, Zea mays
  Coding DNA Sequence Number=SeqID_26106
  Gene Ontology: Mol. function=structural constituent of ribosome; Cellular component=ribonucleoprotein complex; Biological process =translation
  Homolog annotation: Hit_ID=Q5I7K6; Match level="QueryCoverage=99%, HitCoverage=100%, E-value=4e-85, Identity=65%"; Hit description =Ribosomal protein L7
  Pfam annotation: Domain name=Ribosomal_L30_N; Domain location=15-85; Score=102.9; E_value=9.6e-28; Accession=PF08079.3; Description =Ribosomal L30 N-terminal domain
MQMSSEASKVAVPESVLRKRKREEQWATEKKEKALVKKKKSIESRKLIFTRAKQYAEEYDAQEKELVQLKREARLKGGFYVSPEAKLLFVEDLAASAIEADVFTNIFNGVFLKVNKATIDMLRRVDPYDAYGYPNLNSVRELIYKRGYGNLNKQRIPLSNNQVIEEGLDKQKIICVEDLVHEIMTVGPHFKEANNFLWPFKLKAPLGGLKKKRNHYVEGGDAGNRENYINELIKRMN

SEQ ID NO: 69482 - protein, 198 aa, Zea mays
  Coding DNA Sequence Number=SeqID_26107
MSCSALAYLNSMPQRFDAKTAIGGRIGAAEAIDEETMKAVVNMSTVWMSGKTKHINIDSRGSTQLNITIRTGHTEISEAYKIEEVVAYQMEEEGGRIGAAEAVGEETMKVAVNTSTVWISGKTKHINIDSRGHTGISEAYQTEEVVSYQMEEEVSVERHAMGHEDPGIAGEGIIASGAGQGDDGDCLAGGQARERRRS

SEQ ID NO: 69483 - protein, 264 aa, Zea mays
  Coding DNA Sequence Number=SeqID_26108
MKSRMALGLPSPEKSQPESGSSSSSEPGGPGAEADDWGGGDEANGWGGGDEANGWGSDEEDIWSGGVDVDGRGGVGVLRGNDARLCLRREVDARRVPRWGAGVVDSLDSRRGAASFLAMVAPPPPPSAGKVTGQTWMLLFRDAGKTSSIPPPTGELKAAIIVVARRRKEYHVVAAVEGHELETPEMEHRPGLERLLETTHLKLDGKMFVNTQQAPTWRANCRRFDPGGSLDQRVNCRCVSQPRWVGARRNTRGNVGDLFSNAMN

SEQ ID NO: 69484 - protein, 47 aa, Zea mays
  Coding DNA Sequence Number=SeqID_26109
MAMMGSTSDKMYLCQVRKQQTFVVFVLRWCPKKNLSSEAAGGCWPPT

SEQ ID NO: 69485 - protein, 205 aa, Zea mays
  Coding DNA Sequence Number=SeqID_26110
MNENGDLQDRIGIQMGQVKMVEIKEAAEKGRNGKTEAAEKEGSINHGLMGILSWDSNPMANPPRTEFPRRENPDGHKVEKFGLRDDGHVVTCERQLAVGVDWRNHHGRRTRAFPLGRHLDFTGEQSGRRIAERIQKQELGHGKQRRLKAQHLWDIPEPDTVSKSDQSAPGGYFQNTSVPRHHPAVISRTPVRHIITRLLSSKWPA

SEQ ID NO: 69486 - protein, 108 aa, Zea mays
  Coding DNA Sequence Number=SeqID_26111
MGSLRSTTEVLAMNVPRILQQHGSSSLISCEKQTIRIEFLSLQVTALVPTITGMGDHVSGRVRGKVCGQVHSVMVSSVGLNYDSGLIISKNFVKITGMIDFYPVNYIE

SEQ ID NO: 69487 - protein, 76 aa, Zea mays
  Coding DNA Sequence Number=SeqID_26112
  Subcellular localization annotation: CTP_CleavageSite=54; ConfidenceScore=5.09e-01
MAPRVLRDDGSSQPPTEARRRQQGPVSPNSCASTGLKRSFDGHNATSTGLQHLSDSHVGMSFFAFYFGGISVDFSL

SEQ ID NO: 69488 - protein, 311 aa, Zea mays
  Coding DNA Sequence Number=SeqID_26113
MAAPRTTRPVALTLRQGMRHLWQAKRTTLHLHHNDRVKKGTGKGDTPKGILLCEGSGPRALLLIRGSKAGPSEGFESRLRALGLRAHYWSEVRRLAPQKGSTAASGHLGSAPTTDQGFEGWPPKGSTAASEHAERGMTLGTSDTCPRLGLRSRGTLGHFRDQQERFCNGIPSEGGIEPSDPIKRDRENSAACTAPTAVPPARVRLTTAKSGLRRHRKLHLARPQGSDSTSTSDDGLRLARPQGSDSISTSDDGVRLVRPQGLDSTSTSDDGLRLARPQGSDSAPTSEESPPRPTLGSDRPRQRGGTSLPYP

SEQ ID NO: 69489 - protein, 98 aa, Zea mays
  Coding DNA Sequence Number=SeqID_26114
MAFGPLDREQRATIRSGVPLRPLDFPEIGAQSRARLKHINELVKIFTAYFIYMLGVMLILAIYVCIGLMRVDEQATGETEVQQVEVAEQELIEGKLCP

SEQ ID NO: 69490 - protein, 116 aa, Zea mays
  Coding DNA Sequence Number=SeqID_26115
  Subcellular localization annotation: CTP_CleavageSite=13; ConfidenceScore=5.12e-01
MTTPLDALLTLSVAMADLHSPLVDAGTISWRCLTPFSFLCSLLSWPLAVRALTPAPCSKNAARSRLQTSSLGQRVSPSPAPATSFTARRLPPPPRSTSAGMQRSPSICAAPDAIVS

SEQ ID NO: 69491 - protein, 878 aa, Zea mays
  Coding DNA Sequence Number=SeqID_26116
  Gene Ontology: Mol. function=signal transducer activity; Cellular component=nucleus; Biological process=G-protein coupled receptor protein signaling pathway
  Homolog annotation: Hit_ID=Q2QMS5; Match level="QueryCoverage=84%, HitCoverage=82%, E-value=0.0, Identity=74%"; Hit description=Extra -large guanine nucleotide binding protein, putative, expressed
  Pfam annotation: Domain name=FYVE; Domain location=194-255; Score= -12.9; E_value=0.025; Accession=PF01363.12; Description=FYVE zinc finger
  Pfam annotation: Domain name=G-alpha; Domain location=442-864; Score =9.3; E_value=1.2e-19; Accession=PF00503.11; Description=G-protein alpha subunit
  Pfam module annotation: Pfam domain module=FYVE::G-alpha; Domain location=194-255::442-864
  Subcellular localization annotation: CTP_CleavageSite=82; ConfidenceScore=5.24e-01
MAAGASDYSFAAEYVGPPLPYTLPRAIPLDLSRIPLAALSSSPPASPSASSSPLPVVRPLTPSSLCNAIHAHAHPAPRSAVPAPAGGGAVVDSPTSVIENHHAAAHHSAELPSSPSDDEAAGDGDGDGGSEALPLKPRHHPPVVTFAETSGSLLQSSDDEDEYEEEDDDDDDADAGETRPRAAAGQSSGSLSPAHWRGGRTRGCYRCGKGGGFWGRDKESCLACGARYCVGCVLRAMGSMPEGRKCLECIGRPVAESRRDALGRGSRVLRRLLSAAEVELVMRSERECAANQLRAEDVYVNGSKLSPEELVVLQGCPCPPSRLRPGFYWYDKVSGFWGKEGHKPHCIITANLNVGGSLDQKASNGNTGILINGREITKSELQMLKLAGVQCAGKPHFWVNADGTYQEEGQKTVKGKIWDKPIVKLLSPVLSLPTPNKAANQSSEDAVDIVNRAIPDYLEQRTTQKFLLVGSGASTILKQAKFLYKTGKPFSVDEREDLKLIIQSNIYNYLGILLEGRERFEEESLADRRKTSQCDPSSSGCCEPGLCDEVTEYSLIPRLKAFSDWILKAMALGNLEDIFPAASREYAPLVDELWKDPAIQATYRRSELPFLPPAASYFLDKAVDISRTEYELSDMDILYADGITSSDGVASTEFSFPQLSLGGLGVDEPDAQDTLLRYQLIRINSRGLHGNCKWLQMFDDVRLVIFCVAASDYDEYYEDANGTIVNKMIESRQLFESITLHPTFEQADFLLLLTKFDLLEQKISSSPLTSCDWFSDFTPLISRNLLNGGGGGGRRTARSSTGATLPQMAAHYMATKFKRLFESMTGRKLYVSYVNALDQESVRSAIRYGREVVKWEEEKPVFGASETVYSEEPSSFTA

SEQ ID NO: 69492 - protein, 141 aa, Zea mays
  Coding DNA Sequence Number=SeqID_26117
MVVVVGAGARKLVNDLPKQQMLQVDYPRILVYRESSTKQVDSSSEAPSHLRKPISFFPSLAEIIIGLDVLIHFLKQLLQSLRGFPGEILSRRSWPKPLKQGLNDDFIGHRGRLCSQMQEPSDIHLEVFLVVLRALEQKLEQ

SEQ ID NO: 69493 - protein, 96 aa, Zea mays
  Coding DNA Sequence Number=SeqID_26118
MAPFEAYMGDVSNSLNWFEPGESAPTDQNDRSRGIPPPVISPAVIRVADVKIRVRGGVITSRADKLTDDRRLPAVRRVAQPFHRVAITRYYCQINA

SEQ ID NO: 69494 - protein, 165 aa, Zea mays
  Coding DNA Sequence Number=SeqID_26119
  Gene Ontology: Mol. function=carboxyl- or carbamoyltransferase activity; Cellular component=ornithine carbamoyltransferase complex; Biological process=amino acid metabolic process
  Homolog annotation: Hit_ID=Q8SA97; Match level="QueryCoverage=100%, HitCoverage=24%, E-value=6e-15, Identity=39%"; Hit description =Ornithine carbamoyltransferase
MALPVDVAGLRPRLGDMEAPPKPRSSLSSMAEAESELLGRARRRSSAEARAPESEPWVGRSGVRRLPGLSPSPSPGSGGAEFAVFRPESELWVGRSGVRRLPGLSPSPSPGSGGASYDQSVERRSDGVSLRLCPEGACQEKLYADGGYQLRIRSLEGTPNYGPRQ

SEQ ID NO: 69495 - protein, 207 aa, Zea mays
  Coding DNA Sequence Number=SeqID_26120
  Pfam annotation: Domain name=zf-CCHC; Domain location=35-52; Score =26.4; E_value=0.00011; Accession=PF00098.14; Description=Zinc knuckle
  Subcellular localization annotation: CTP_CleavageSite=6; ConfidenceScore=5.42e-01
MPSSVRSTGDSTDTHTHQATSTGTPARPTGQKTNPTCFKCSQIGHYANACPVGNSSAPAQNKQQTPGKGFSIARVNQPPQPSASFSHTAASRSFSSMAGAQEAAGSFMHASAGAPSPSRGPAPAELLSMALAPCRRAVGAPFSSFSTSCAQEQKLLGSTPTPSSSPAPLLLHGSELPPPLARRPLSVPPAAGASMANVGDLFSNAMN

SEQ ID NO: 69496 - protein, 53 aa, Zea mays
  Coding DNA Sequence Number=SeqID_26121
MVGTSVVTTRRQPGSVEHCTMQDLVDGVTWPTTLPPGWTVEWDVAPAGEEHEE

SEQ ID NO: 69497 - protein, 142 aa, Zea mays
  Coding DNA Sequence Number=SeqID_26122
MAGVGRSTRAGGDARRRRGDRPGHGDIVQSNGSERSTGCQRSYERKELVGDSLDSSVHARRRKTEVRLGTGSCSVTKVPVSECLVPRLSCAKTVSNEFGLSSNFPRMCSSFEKQRTQRIFEKRSKIQKFRNLNFSKGSLIKG

SEQ ID NO: 69498 - protein, 77 aa, Zea mays
  Coding DNA Sequence Number=SeqID_26123
MAADDAPPPTVVSAVSPLASSTEGLGSVFHCTLLCSSIQAHNYPLDMGMVEFGIRGYGYGYNKWAGGQWVSGGYGCG

SEQ ID NO: 69499 - protein, 112 aa, Zea mays
  Coding DNA Sequence Number=SeqID_26124
MAATSHRTPRPIPALLLRGWMELGCIRRDPWTLCTESATIGGYLVSRIYRRRGQIAAALPYSLDGIPVRAIQGYNDVQMKVPSDLGQNHSVKKRKEYEGWRKAEAMRRGASA

SEQ ID NO: 69500 - protein, 569 aa, Zea mays
  Coding DNA Sequence Number=SeqID_26125
MEVVELVPCARNKWGNWWDYWFYVSEAEVEYHLGLPAAIMCSHYYVAYPPFEVAEDDENERVVWIDARTSSGRDLVEEFIGYGVWPLAHGWALGEVCPREMPSLGGRKVRSPLFALDVRGRDPATVVREAEDGSVRIVGRYVPKTEAQWSWEIHESNDRLNRVFELNRLPYGGYPGEDVVDRRGKRQVAVTEEDPTQEVAPATKKRKLGTMVGELGVSDSFAMELMGTCAAPGGRMSSPELRESSARMLEVTGGRWPKNVPIPRAAGEDFFTSRMARDLRVFPYGQNIAAVVSAVMNKDPQDAAQKRRAVVRMVDPVREAKRARGSAKAAASCSGKPVSAAKPATPGGSKASTGEKAVAVGGTKPLPGGPSPAKLPPPGKRVADFGTNISVDDYLVGSGEGQLVVVSPSVAATSPSAVVKAKGSMQDPWAAFCGSGEILTAAAARDVAGTMSQRLREVSQQLSQQLKQHADAVRDKSAAESKNRRLAEKVATLEAEKTDLRRRLAEERREANQAVAEAQAAQVEAKVALAKGSLASQRAEEWEARFNALRSHVDKAETSECSEVVRTHA

SEQ ID NO: 69501 - protein, 105 aa, Zea mays
  Coding DNA Sequence Number=SeqID_26126
MAPKRASSKAAPSIDEAAKAALLAEKKGKALVDTTHQEACEDDTLSKRQRNEQPTPEGSLRTCSSGGQPQPPLGFAPWEGADATEDGEVIGVSAEEQLQLRAFWS

SEQ ID NO: 69502 - protein, 210 aa, Zea mays
  Coding DNA Sequence Number=SeqID_26127
MARVVCTFRGKRLDSGVSVLSVGVNPVWSEETWWRVDICKGGAQGRTPSVKSWEDVGLPLEKQYTFIREGFFPPGVWAQDSQRIAELSANVRRLQDELSKRDLAVDWAINSCSVAWDREAKARARVTELSAALDSLQVYCNTLHEEVHVLYARLHPDVSPNATAIGAGPSGTANEGLDEELDLFRPPPSMNHADERSPAAGNGAAKDDED

SEQ ID NO: 69503 - protein, 60 aa, Zea mays
  Coding DNA Sequence Number=SeqID_26128
MIMCAWLSEWLRMGRRWFNAMGRSTIGGTSQSTLRQHMLEQEDKPLDGWVFLILRLIPES

SEQ ID NO: 69504 - protein, 245 aa, Zea mays
  Coding DNA Sequence Number=SeqID_26129
MVTTSLMVGRSKPGCGLCPALSFKDLHHPCWGGGRAEPELYLPHGPAGHILHQQSGERALTGLAEGADFDNAGPIGRKRRQLQHAWFAGSAGSGTASGATSHRWAERGYLPAVRAAVAPRAPGDRPRSRAVLGRRSCSWAVPPSLWHDASARRSVLTRPGGLEWGSAGGQVATAVGAEVVAAGEGFPADQTVSATRGPTSGSLALIACPRPSSGDASEGLVAAASALRSSLLLFGYPERRSLSLL

SEQ ID NO: 69505 - protein, 141 aa, Zea mays
  Coding DNA Sequence Number=SeqID_26130
  Homolog annotation: Hit_ID=Q6QP51; Match level="QueryCoverage=34%, HitCoverage=22%, E-value=5e-17, Identity=83%"; Hit description =Putative growth-regulating factor 1
MHPFDFDTSNVEAQAHTSCNRRAGYYVRKTTPPLAPVPRLLDCGTGAATRGNPAHGPKVPTKHIGHRDRERGYSERDPSPRRKRALSPPTNQGFEGWPLGRVRQPPQSTRAPRPLLIRGSKAGPSEGYDSRLRALGLRAHY

SEQ ID NO: 69506 - protein, 525 aa, Zea mays
  Coding DNA Sequence Number=SeqID_26131
  Subcellular localization annotation: CTP_CleavageSite=76; ConfidenceScore=5.12e-01
MDKDRQGAAQKRQAAVRLVDARPKRQRGSAKAAAPGGGKPPLAAKSGVPASSKAPETAAGAGGSKPVKAVPPPSRVAEAAKAARALPSTDKSVADFATDICVEDYLGGSDEGQLVIVAPAAATAVAAATPKAKGGALSAGGEVAALAAVKDEAGAASRRLKEVVESLSQVADFANRTASGALTAVVSAEVERLRTQHADAVREKSAADSKCRKLADKVAALEGEKADLRRQLAGERRETNEALAKAQASQAEAKLARAEGNVARERTEQLQERLIALESRVEQAEAAMRAEAERTRTQLVSTYRELGARTSDFEVPDRESRLRCLEWVQEELQELPAVLGGFMSYTSLVTCEGAMNALSREGCRHFEVFDQADEDFDRDVYKVEDLVVKDSAGALYDRMWGPHSREVVRERAETAMAQALRGERVDDLGALNSVLPDPEPTPAEAVSGVALEPTPEAAEDAPDAPTSAAAGEDLPPKVAEGALDAPAAAAPSAEDPAAVAAETTAETAAEPMAEASAAPGPSQVA

SEQ ID NO: 69507 - protein, 127 aa, Zea mays
  Coding DNA Sequence Number=SeqID_26132
MYPGSGNVRPYFQQRRDEAYITPTEVPAVGITRTVGEGKSPGVHIKCKCPLLAFGCAFSSSPETGSVETDRPIVECGDLGRDGNLHEEEDPRGGVSVMTTFMRKTPSEGLERGGDLASYPWGLCLGH

SEQ ID NO: 69508 - protein, 286 aa, Zea mays
  Coding DNA Sequence Number=SeqID_26133
MRRRSSALKSEATNRGSTSSSAEPPRICHQYGPSATCSTANPAGDHSANCGTHQGKLDHRLEKTSALPEQGSNLDVCNEGLPTSPSTGTLTHPISRPFTHTEALLQLLRLGTVIKFGSLEFMSLGIEYDMVLLPLVPLKRLSTRRCPSRRRRQRWNDINYATHGTPCPGDTPEMVDGIDSLASDLANISIAPEAPSAALASTLLVPPPPVWDVLAPRDVERDIPATPHLPPVGREEPTIPWQDMTGARGEPSVFNPIPFQPSFDTSSITRLYIGLPFPSGCLDSKE

SEQ ID NO: 69509 - protein, 37 aa, Zea mays
  Coding DNA Sequence Number=SeqID_26134
MASVESHPWLRMKGNDVLHRKIVVPCSVRLKGLSSKH

SEQ ID NO: 69510 - protein, 123 aa, Zea mays
  Coding DNA Sequence Number=SeqID_26135
  Homolog annotation: Hit_ID=A2Y7J5; Match level="QueryCoverage=50%, HitCoverage=28%, E-value=2e-13, Identity=64%"; Hit description =Putative uncharacterized protein
MSRAFDDYYIEDCGVILASEVTQRRIDNNDQFVILATVRVAFVPPKTFKESGKGTYQHKFTMSGMASDDSPAQVNVEGDVSEKKVEVQDQNEVGGMPSRQEEEAAIKKKYGGILPRKTPLISK

SEQ ID NO: 69511 - protein, 177 aa, Zea mays
  Coding DNA Sequence Number=SeqID_26136
MTDSRRTRVDERRSARGCDHGRGQQVGEEEQGEDREDERDVRRRRKRWCAHDVKRPRGHAIATARVGVGAGVGRIRGGGACFYALCREWGGAEVECEGREKRIRMANEVVATETRTIIIVRRNYADLVIWNYVSHTCIYYLLYIANYLITILIHEYELIMELSFALAAQVYYVWDGI

SEQ ID NO: 69512 - protein, 175 aa, Zea mays
  Coding DNA Sequence Number=SeqID_26137
MGLGTGERPDAEPGTGAEEVRETSIPSSARKGGCRAAERRGAARRGCRAGGAPVRRQARDGTDWWGARKGNGERGADGYGAEGSVWIRGRRNNPRVVDVGDNHEAPLLNDGQRGVAALDRVQAAASRELVVHSGACDHVRLLLEVELTVAKLLLVIDERQQRECLLLMEFVRGLK

SEQ ID NO: 69513 - protein, 117 aa, Zea mays
  Coding DNA Sequence Number=SeqID_26138
  Homolog annotation: Hit_ID=A5ATI8; Match level="QueryCoverage=49%, HitCoverage=50%, E-value=2e-17, Identity=74%"; Hit description =Putative uncharacterized protein
  Pfam annotation: Domain name=Lg106; Domain location=1-72; Score=75.9; E_value=1.3e-19; Accession=PF07844.2; Description=Lg106-like protein
DHERAYFDSADWALGKQGGVPNKPKGPLEALRPKLQPTQQNARARRTSYASADSDGTPPFLYYLIGNLSAFIFPVCTIDDCFFPPSVADTLNLSPEDLVPQGEPSQQGEPVEDKNKE

SEQ ID NO: 69514 - protein, 110 aa, Zea mays
  Coding DNA Sequence Number=SeqID_26139
MVSSDDSDDSMGLSATERSYIWSVERTGLGGSDDSKEVSSEEAEDSSDSEEGSNGEGDGDGDESDGGSSRGGDGSSDGDGGDGSSDGDGDDGSSRGGGDDGDAGGNVLPA

SEQ ID NO: 69515 - protein, 268 aa, Zea mays
  Coding DNA Sequence Number=SeqID_26140
MGRKKGKRGEEKRAAVSGAATWDPGGGCGRMREEGEEGDPGAARLAGVTPGGVYLLPGSLLLVFVWLLVRVPSRCWWYGICTSNEVLNPLIRGDGSPPSVRLRPKRQVEPGPILRLYGVVARFGVSSSVVRMSGKKGVGVAVCFFSSSFEGDGIGVIARYAFPSPFGMFIFLRRVICVHSLVGEVDNGVRRVGEVVVDWPSTLRGLLRPDLRGTTPYRLVSGGMARGFTAAPFGAPEENFFLGGVAMWCRVPSTSATQEMVPKQKNSS

SEQ ID NO: 69516 - protein, 458 aa, Zea mays
  Coding DNA Sequence Number=SeqID_26141
  Subcellular localization annotation: CTP_CleavageSite=36; ConfidenceScore=5.45e-01
MPPPPLSTRDPPQPNLSARVHVQLQTPRNPRPTGLCAMPSDPWSRAQPCQLLLREQPCIYLHASAASTPFGRMTERGAPRHIHYHSLRVNLIRHASSRLHRPDTEATKRELQEGHDGSPRDCSQRNATRGLYDSISSAARMKGMTSGARAPGTSSPASAIPSGSLRNASVCASASCLRLAALIAVELDGPASIATRVIVMLLLMMMMMGAGRSAAAAIYTPLERMETDGGMGPSSRAATLPYEGPGPSFYRCKEKAQGNDGPPCDVVGPSPRSGEAATPPRSRLSPSPVIGRGGDRRPRSRLSPSPGVGRGGGRLPEPWLSPSPGSGETEFPMAPEAGLSCCRPHSGEWHSSRSRAGGAVFLSGQSAKGQSDCGHFGLVDCRACVRIRCQAIFALNAPAIRSVGTTIWSRLLLREACPSWASGESRVRPLLEEALGRGVNLPWSYYSYSRLGLGRGEI

SEQ ID NO: 69517 - protein, 229 aa, Zea mays
  Coding DNA Sequence Number=SeqID_26142
  Pfam annotation: Domain name=SlyX; Domain location=104-171; Score= -5.7; E_value=0.031; Accession=PF04102.3; Description=SlyX
MGQGTLASTNQVLLRVFSCEFFGLLNHHEDSDNFLWLASPGDGDAPLGLFPAEKKDDPMWCNRSDAMTHLSNIAQTTKLTLDSREDFVVDLSSELVEKDLQVERLSQRITTLEQQVEIRDNTIDILENQLHDVQRELEEANDHLDMHHLKMEANEAGSEGEEAPEELGPAPGANGTTSVMPPSPASSVASTAQEALRYNSPDYPVHHRTVSGAPGKSDSELASFGNLLR

SEQ ID NO: 69518 - protein, 264 aa, Zea mays
  Coding DNA Sequence Number=SeqID_26143
  Homolog annotation: Hit_ID=Q336N9; Match level="QueryCoverage=91%, HitCoverage=73%, E-value=1e-117, Identity=83%"; Hit description =Expressed protein
  Pfam annotation: Domain name=NERD; Domain location=2-94; Score=-11.0; E_value=0.057; Accession=PF08378.2; Description=Nuclease-related domain
MRRQGRELLAAAVLAGEVMVVAIKNLSGFVEADKDGNWSCPTDKKHKHEIFPNPVLEVNRLAANLQSYLEQRGAKLPDGHIIGRVVLPNPNCRPSYTISTQPEVMLYDQWKDLKTDSKTGLSAWIKGAFTGSRSDMQDSVLQNLHFILSSSPMWDRLELKGDKNVLGEFIEFKGRHEDVQLLKILKRSKVSRFIIQKSTLFGGFGRSRVQILYSPRDYRAEGTSSSELKEISVKQYTEIVFQPLRSKKARKFKLSNVVSVTLSA

SEQ ID NO: 69519 - protein, 100 aa, Zea mays
  Coding DNA Sequence Number=SeqID_26144
MEAMERGHVSSNGSQPPMQTLAAIGAARLSPRYVGKRRRGLYPSRGLGWDPCRDWVIQRSPKGWGSFFLCGDVNMENYFRRVNRDENGKHSPSLSLAGTR

SEQ ID NO: 69520 - protein, 226 aa, Zea mays
  Coding DNA Sequence Number=SeqID_26145
  Subcellular localization annotation: CTP_CleavageSite=40; ConfidenceScore=5.48e-01
MAPPCDVVGPSPRSGEAATPPRSMLSSSPGIGRGGDRRPRSRLSPSPGVGRGGDRLPEPWLSPSPRSGETEFPMALEAGLSCCRPHSGEWHNSRSRAGDAVFLSGQSAEGRSDCDHFGLVDCRACVRIRCQAIFALNAPAIRSVGAAIWSRLLLREACPSWASGESRVRPLLEEALERGVNLHWSYCSCPRLGLGRGEIVSLAWIEPRPKLRPSGLCSFVLMVVTS

SEQ ID NO: 69521 - protein, 177 aa, Zea mays
  Coding DNA Sequence Number=SeqID_26146
  Homolog annotation: Hit_ID=Q6QP51; Match level="QueryCoverage=24%, HitCoverage=20%, E-value=1e-14, Identity=84%"; Hit description =Putative growth-regulating factor 1
MQAACNCTKGAHPFDFDASSMEAQAHTSCNRRAGYYVRKTAPPLALVPRLLDCGNGTATRGNPAHDPTVPTEHIGHGDREMGYSERDPSPRRKRAPSPPTDQRSEGWPLGRVRQPPQSKQAPSPPTDQRFEGWPLGRVRQPPQNAWAPRPLLVRGSKAGPSEGFDSRLRPPGLRTHY

SEQ ID NO: 69522 - protein, 111 aa, Zea mays
  Coding DNA Sequence Number=SeqID_26147
MDKTYTCPLQRWTLRPKYTNRTVARSLQGKTIDSLHHVGCCNHGPHFGARDGPACYRPSPTWLAGRQVVPRPLPRHVGQSDMTRFASRASWVGPNMGCAGSGWAGPFGHLY

SEQ ID NO: 69523 - protein, 254 aa, Zea mays
  Coding DNA Sequence Number=SeqID_26148
MQTDLRHEEGEPPHKERATAPRLCAPSFPGQPAVRKTNRRTRSMQPPRGCAPLHLRRNQRSKRRTATQEAYNCPAVVRPSALLQPAVQHGGLGPLVMQPARRLLSAEKSYRRSRQCHVFSGPSRRTEKISFQNQCSDSRHLAHGPTVTLSMKVTGQSTVGIGVVVGMTVGGPAVIASTGAQEQQANRQSDSGPTCRLASSPEAGPGATVGTLNQGYPLLQYEDAVHVRRLQVTRRTAPNPTTWAGLRAPRGKER

SEQ ID NO: 69524 - protein, 100 aa, Zea mays
  Coding DNA Sequence Number=SeqID_26149
MGLGVCGLLCQGGNENDGFGIDSGNGKRYSFRLERVVSIATPAQERMKPWKETFRSSKITMSSRCGLAATPSRLPMKAACTYVSFLHFDYCKDYENVSDI

SEQ ID NO: 69525 - protein, 312 aa, Zea mays
  Coding DNA Sequence Number=SeqID_26150
  Homolog annotation: Hit_ID=A2XFR6; Match level="QueryCoverage=55%, HitCoverage=49%, E-value=9e-11, Identity=28%"; Hit description =Putative uncharacterized protein
MARISHLERLHRRLHEEQERRRQEQEQEQQDSSPSPQQEVESERPLSPAPQLEMPPAPPQGTPAAGGDPDGDGDDDDAGGSSSHDTELSEEPEPDGWIARPITRDVARGCHFHDALDTLLRWAFDRHTWSFEYRCVVYQHRRGLYPDQWEATCLVRRPDDDLRGVEAFLEHYSITKRDTAEAAMQDVARQALSQYCSLFSGVADGLDLKYYPRRSTDNAGGVIVSLVGEGNPRLSSMVNLVAVLNTELDHALDELGKVRAEVEELHAECAACHYLDGGSPAPVGIQHPYRSPPRGRFDYGTPDCRTRIDLDP

SEQ ID NO: 69526 - protein, 518 aa, Zea mays
  Coding DNA Sequence Number=SeqID_26151
MAVAKAAASGAGKPPSGEPTKGRRLPSSPRTDEAATRVADFDTDICVGDYLVGSIVGQLGVVPTPVVATLPTAAVGAKGASQDPWSAFCVSGAIPSAAAAKDVAGSMSHQLRHASQQLKHATDFADHVASGSLTSELAAEVERLRAQHADAVRKKSAVESKSRRLTERMAAAEAEKGDLRRQLVEERRDANKAKLARAEASLARQHAKELEAWLGSLRNRVDKAEASTRAEVERTHVQLVDAYRELGVRTAAFEAPGQEVGLRFLEWLQEELGVLPTIVTGLMSFASLVTCEGAMNALSREGCGHFEVEDPVLKRSAGALFDRMWGPHGRETVRERSDRAMDQMAHDEEVEDLGDLDSTLPEASGWSWCRRPMRARAPRRTPRQLELEKTPCQPLRRWVPTFGPAQATATDNTDFAAETSTVVPTDDSLFGSVSECFESDGESESSFPWTEESSDEGLDYFVALDVATAETSPRVEGVGDLPGASIGCRRRRVVGKLSVGEFSRSGRRRRMGMERGRL

SEQ ID NO: 69527 - protein, 288 aa, Zea mays
  Coding DNA Sequence Number=SeqID_26152
  Subcellular localization annotation: CTP_CleavageSite=46; ConfidenceScore=5.57e-01
MSSSSLMRRVFPSSKPPDGAGLAAPLRRRSPRMVTTSFWVGKSKPGCDLGPTLSFKDVHHPRWGGGHAEPALYLPRGSAGPPFPRRSGVEALAGPAGGADLDNVGLIDGGRRHLQRVGVVGRAPGGPSCQRAAAAPGRCPTRLGGFEWGSAGGLASPAIGAEAEAAREVLVADGITATVRAPGHCAGQAFPMEWGRSYLRRGNRSSVCNGISNAVSPVDYLNRFTKHESPRVKVTSEYEQRWSWLENGNLVGRSLAGLSVSGADAGVDQPRPRVGLAPLEDAWPRPQG

SEQ ID NO: 69528 - protein, 309 aa, Zea mays
  Coding DNA Sequence Number=SeqID_26153
MEPYFITNGIRQSQYGITEVKHKERLRGHDNFILAHQCEQEEEDDEEEVQHHEEEDEQAHEEEDEVGIDAEADDDTTEAPVVRRRGTRKGHFVLPPSAPAQSEARVLIIPVGDSQWEDTSFDGRGIVTDPKGVVVPCTSWSHFALAPHATYGTAQGAVKHNFWRHYRVEPEAQEHADRVLENNAKKVCRDAFSNARLQVVNAYMKRRGHSINNFRQYSDVYLTVDQYMEQLEYMTAYNAQAQQAMNSWFPQQAQQQPFVFPQFQPPMPQWGLHAPPPPPPPQDPNPLHDFVNQFLASGGSGHNSNDPNM

SEQ ID NO: 69529 - protein, 349 aa, Zea mays
  Coding DNA Sequence Number=SeqID_26154
  Homolog annotation: Hit_ID=A0MFF2; Match level="QueryCoverage=29%, HitCoverage=21%, E-value=7e-13, Identity=42%"; Hit description =Putative uncharacterized protein
MAGELWLHSEGPAPEKGSGAWGSDRETRVVDVSMAESAGGRLGKGRWLTGGVHEPARANARMGGCYRSAHQDEPFPRGAIAGVEVEPDLDLQLRKLASAISNLDRMQDQIKSKAPTRSPQIGKGRRLTRGLKARARIMRRAEQGSEDPSQQGLQEGLLSAKQSPNLAAGSIRACQMLRRQPRLPAAPSPPLAVLRRAFRSEAALEAIRSHLHSPPSKSTSTSSDADGDDKAAPASLALYNYPTFAGAYAALAARLFHQRVRRRLLVLPFSSVVPFRAEDFKDAGFQTCYLLDFIGPKKFAFELARFIPRRVLGPPGCLGDKAPLFPQGELQGRSQKYNIRGTDQFINII

SEQ ID NO: 69530 - protein, 74 aa, Zea mays
  Coding DNA Sequence Number=SeqID_26155
MAIVIGEVVMSSQADFCVLYIDAAIPKGTKRTPLGPHLTLSAFFGPAVIPAWALAGLARPQGNGRGDLGPCRHN

SEQ ID NO: 69531 - protein, 89 aa, Zea mays
  Coding DNA Sequence Number=SeqID_26156
MDEGCTQPLSSDPMINLNTTVFFLIVFFPFARNLHKLEPLALTRLITKKARSKVGKEVGSFPRLDYDVLDVGLDRATDVGDKHMFHAPL

SEQ ID NO: 69532 - protein, 126 aa, Zea mays
  Coding DNA Sequence Number=SeqID_26157
MEVLDLTRRSGLCMQGSGAFPWGSGPTVDTLEVAPGPTSGKDTSLQVGPKLDWRLARRFRAFADKLTPKEYDLWARAPTSEIGPLFLTEMKRRTIAGGGSLVAVRLLRTRRPAHQLYDLWARAPVS

SEQ ID NO: 69533 - protein, 145 aa, Zea mays
  Coding DNA Sequence Number=SeqID_26158
MATAGAMAWRGWGRIGDVVVLVSCSRRHLQQSSTSSEWTMSRRGELHEAAGGADEQHPGDHQRSGGFRRNCHGVHKLQDGRVILLWSSREDRWGRKRMMRELSSQEEFFTGGSGLRAIRCGGTNAPIQVGGVLIWFSYLDIKKGS

SEQ ID NO: 69534 - protein, 115 aa, Zea mays
  Coding DNA Sequence Number=SeqID_26159
  Gene Ontology: Mol. function=oxidoreductase activity, acting on single donors with incorporation of molecular oxygen, incorporation of two atoms of oxygen; Cellular component=cytoplasm; Biological process=flavonoid biosynthetic process
  Homolog annotation: Hit_ID=P41213; Match level="QueryCoverage=82%, HitCoverage=24%, E-value=3e-48, Identity=92%"; Hit description =Leucoanthocyanidin dioxygenase
MHIAGHDIPAELMDRLRAIGTAFFALPVQDKEAYANDPATGRLQGYDSRLAANACGQREWEDYLFHLVHPDGLADHALWPAYPPDYVAATRDFGRARPIAALVGVVLLVAARLAE

SEQ ID NO: 69535 - protein, 230 aa, Zea mays
  Coding DNA Sequence Number=SeqID_26160
  Gene Ontology: Mol. function=sequence-specific DNA binding; Cellular component=nucleus; Biological process=regulation of transcription, DNA-dependent
  Homolog annotation: Hit_ID=P24345; Match level="QueryCoverage=33%, HitCoverage=25%, E-value=7e-13, Identity=50%"; Hit description =Homeotic protein knotted-1
  Pfam annotation: Domain name=KNOX2; Domain location=158-195; Score =19.3; E_value=0.00065; Accession=PF03791.4; Description=KNOX2 domain
MAPHLVAGLARSESEGLRFLLVTRLCIRVRQPGEILDIIFLSNPPIRFPILAGMMTSELSNQCRQSDQQSLPPPVGILPQRHRSAAAAATAGRRPTAHSEHGGGHWEQRRWRHPGAAACQWQRFPRGVRQGEGALIIGGDIEAIKAKEMEARQHTTLGGLAAETEKELDQFMEVYHAMLVKLTRKMEPQLNSLSISGRSPRSTLSTEHRPSSSNSSRKKGEIGSANPQKR

SEQ ID NO: 69536 - protein, 456 aa, Zea mays
  Coding DNA Sequence Number=SeqID_26161
  Homolog annotation: Hit_ID=A5C6D9; Match level="QueryCoverage=55%, HitCoverage=44%, E-value=1e-46, Identity=42%"; Hit description =Putative uncharacterized protein
  Pfam annotation: Domain name=DUF668; Domain location=288-378; Score =153.3; E_value=6.6e-43; Accession=PF05003.3; Description=Protein of unknown function (DUF668)
MCMTPQSSAAARTRPAAAAIEEGGDVDDGDPQRVVVVGMALAGFGHVYVDLLASRADAGALAAVASRSDAAPLVRRLDRVAAATAALYAELDALAELEQSTRRPPPDQARRALEQRAVASPRRAPAQGRVTLELDLRQGRAPARARRVRHLRPQPPRVRRPRSGARLAGHDPGVGAMRANPAALQSGGSRFSPRTPKQSQRCPGKMFMHCLSLSSSTPWTDGLEDEFSEDSSCISSTIRSGMLAPFSSEQGIPITTTTPPPSNSGSIGRKVRRFSPKSMVTSLAPTSTVGGSALALHYANIVIVIEKLLRYPHLVGEEARDELYQMLSWSLKLALRRSLRARARSTAIYDAFLAHNWRETLQKTTLAWLVPMAHNTVRWQAERSFEFEQQQQRRVVLERSVLLQTMYFADREKTEAAVCELLVGLNYICMYERQQNALLDCSSSLGLDDCVEWQVQ

SEQ ID NO: 69537 - protein, 210 aa, Zea mays
  Coding DNA Sequence Number=SeqID_26162
MEVRCQTSFCQNEDGFPKLLRACTVRLGIRSPPEYDGHEFVEHGTEKCVVTIYIGSSPYHVEWSVTAARMCALEGQQLLEDDPTVVYLTAYLLTLDAQGEKKAWELSEGAIVLEGIPVFPQAMDKKEHPESSQDPLPELFEPLTMKKIPAPSLEVKEEAASTPPAPPPSEELQVTVQLEEEFDPVLPSQSPPEEIINISSLLTHPGDVSY

SEQ ID NO: 69538 - protein, 55 aa, Zea mays
  Coding DNA Sequence Number=SeqID_26163
MGILFYGRRPKNKKVNGKRKDSLVPTAAWTPDTRPPHQDPHTIQAIVRQWMKDQR

SEQ ID NO: 69539 - protein, 126 aa, Zea mays
  Coding DNA Sequence Number=SeqID_26164
MTDQPEVDGQHIIFPNGSAHRRVPWIGAVTDDSGSATSHPTTDCPHYRSLVNAGVMVAPCPATTSWQFDSTTGYACINNEETSSRHGTQPGYNYVHALEHLFVWAEAIDFRHLALSLEPLSFVLRS

SEQ ID NO: 69540 - protein, 140 aa, Zea mays
  Coding DNA Sequence Number=SeqID_26165
  Subcellular localization annotation: CTP_CleavageSite=19; ConfidenceScore=5.06e-01
MVDPAVVRVRLFPQLPGCRAAMVLVGGANSREPRLPTNSAQTTGRFQPADNGAMRIENRLRGPPVGEPNSEYVMELPLDAQSSGRRLDVDERVEQCRVVVGVLHVLARFVLVLQMQHLRALSSVADLEIGQDPGRSDHKL

SEQ ID NO: 69541 - protein, 76 aa, Zea mays
  Coding DNA Sequence Number=SeqID_26166
MGWPADERAVARDLICEEIELQGLKCNENEEETVIEEVVAQAENPPAENNFYFDICGVDPEPPATQGKPRCIIPFP

SEQ ID NO: 69542 - protein, 87 aa, Zea mays
  Coding DNA Sequence Number=SeqID_26167
MDIKVERWAETGGGGMLELEDIKIFHWEKEQDNRRREKERFVASVFIATERLAGASSCLVPRHAASTPRPTHDPSHSEAVDERSTVI

SEQ ID NO: 69543 - protein, 41 aa, Zea mays
  Coding DNA Sequence Number=SeqID_26168
MGKEGEEEKEKGFALHGISSRILLYFGKDQGLARRKGKRKG

SEQ ID NO: 69544 - protein, 106 aa, Zea mays
  Coding DNA Sequence Number=SeqID_26169
MEVKFGRGKREAKGDSGSPWRNPRLQENRAPGAPLTRIEVLEEEGDVGSVDAIKVNVARVECMENTHDSWFHGTSEAFKARNQRSSNVKVDRGNAKSGARQGGKRG

SEQ ID NO: 69545 - protein, 118 aa, Zea mays
  Coding DNA Sequence Number=SeqID_26170
MGRRGAQRLKRRDVENSTAYATEALHVVVEGCTRDGGGGVAHRHGAGGALVLVGSVVSTADGVATILDVVIGGEAAKVVVGAGDGFWVLTGQRWARVARDNRACWKEQASLEGGVCEG

SEQ ID NO: 69546 - protein, 320 aa, Zea mays
  Coding DNA Sequence Number=SeqID_26171
  Pfam annotation: Domain name=DUF761; Domain location=19-302; Score= -117.1; E_value=0.0028; Accession=PF05553.2; Description=Cotton fibre expressed protein
  Subcellular localization annotation: CTP_CleavageSite=62; ConfidenceScore=5.03e-01
MVSSSLKATAAAATMVVVAAVIASTADAAGSYYIPTPATPDFLSSPVFLWVAANVIIVWLVSSSRRRGRAADDDTGEPSSAAHDGGGGEAVVPGAVDDDSFYASEYEAFSDATLVSRRPQAREASAGRRSDRPRVRKKPAGGGQDAATTPATRDDEPPPRDGRRRRGQEETAAPAVSSVVVDEDVSMDSLWASIVQQRAARPVVVRKSESWGNEELPRLQRVAETAARRQVRKSVSAVVAKAAAATPPPAPPSASRQTGWRTRDVLVTISPDDLLRRAESFIRRQREHLRLQRQESEQRQLLLQQRRVHGAAPPAPLIRV

SEQ ID NO: 69547 - protein, 190 aa, Zea mays
  Coding DNA Sequence Number=SeqID_26172
MAALHAISIAAAPPPIAFRETSSPATSAGIWDERDPHSLLFYCRIQWVVFSVVSFNSFGLIGSDIKKLKLSYLPAENALLKLQRSEGSTVANFPVTLFQRAKGNPTLAVIFSLDYGCPGILHGVEFISGLINLGCQTSPQCAGQEGKYCFAHSYTEMEAPGIWNNRSLMVASVELTTSQYCEMHLTWSRR

SEQ ID NO: 69548 - protein, 70 aa, Zea mays
  Coding DNA Sequence Number=SeqID_26173
  Subcellular localization annotation: CTP_CleavageSite=56; ConfidenceScore=5.05e-01
MGGNSRVDNVEASGFDEKNASSHVKTLPKKPYSPSPGAGSRRRSVLETCSPDRRCTSALGMKRTTIAAQL

SEQ ID NO: 69549 - protein, 682 aa, Zea mays
  Coding DNA Sequence Number=SeqID_26174
MDKDRQGAAQKRQATVRIHEARPKRQRGTAKAVASGGGKPPLAVKAGASAPSKAPEATAGAGGSKSAKVVPPASGVAEASKAARALPLAGKRVADFGTDITVDDYLGGSDEGQLAMVAPGAEIATAAIVPKARGEALDAGGEVSALAVVRDEAGAATRRLKGVTEALSQATEALSQVADFASRTASGALTAAVSAEVERLRTQHADAVREKSASDSKCRKLTDRVAALEKEKADLRRQLAAERREANEAVAKGQAAQAEAKLARAEGNLAKELAEHLQERLTALESHAKEAEAAMHAEAERTRTQLMDTYRELGARTGDFEVPDREPGLRCLQWVQEELLELPAVVGGLMLYASLVTCEGAMNALSREGCRHFEAFDQADEDFDRDIYKVKDPVVKESAGALYDRMWGLHGREVVRERAEAARAQAERGERVDDFGALNSALPDPEPTPAEAATGVALETTPETAEDAPGVPTSAVAGEGVSPKVAEGAPDAPAAAAPSAEDSAAVVAEAAAEATAEAPAAAGPSQVQEFGPAHATATTEFLATSTAEGGNEYGGSVCEFFDFTDSGSSVEWSEESSEEDLDYFAALDVAAAEASPRAADAPDVPGPSTGRRRRRAVAKRRVSAEEGARLRVSRVGRQELLSLPAAASTGEGELRGLFAGEELRIMLFNYREMGIIPKVEPM

SEQ ID NO: 69550 - protein, 204 aa, Zea mays
  Coding DNA Sequence Number=SeqID_26175
MQPGCTPPPAVTQDGDLRLDGGGKRAGLWPLPLPQPQGFSSPGLGRGVCRVEVGPRVGGSPLLHSVIGGKGGRRPWRRQLHRAWLSDASGFGAASQRRRLPRQLEEVLPQALIAKAGHGLTSNSTAFRPSLPHEFGHGRGPPGSSIRPEVSAAAVRPPGAEVVVAAAAGAGDGAPFAGLPSLRRPTPIEWGCSYLRRGEPEFRL

SEQ ID NO: 69551 - protein, 222 aa, Zea mays
  Coding DNA Sequence Number=SeqID_26176
  Subcellular localization annotation: CTP_CleavageSite=49; ConfidenceScore=5.01e-01
MPSYSTHACCFTGEQPSRSRAAVVVDSSFGARPLGVGGDWGRFAEALVSSSRAGEFAPPHRRECAASSLPPCREPAPPSVAAWLSGWNAGCCRWKLDRKGPLDAQQGTLNDTLNYRGRHTHPRCGDLETSAIRARGRARAGADQAGLEEAMLERVRRRTALGGWRQGGGPRGDKDRKLRCNRRCSSPSNRHHKEAEKIHGADEGRCGETQAHLVAAIVIVFQ

SEQ ID NO: 69552 - protein, 252 aa, Zea mays
  Coding DNA Sequence Number=SeqID_26177
  Homolog annotation: Hit_ID=A2YFV0; Match level="QueryCoverage=79%, HitCoverage=65%, E-value=2e-15, Identity=29%"; Hit description =Putative uncharacterized protein
MAVLRQNPSGMTDADKTSLAATRFAAIEKKPFHFLHCWSILKDQPKWMDQHMGNQNPPPNPIGTQSNTIDLDGGEDSAPSSFTSKRPLGRDSAKEKAKKQRSENTSSTDSEYLTRMGELSLERLSVYKSVASTEEKKLEFMKKQERQKLILERKKLNLEKMKMERQKVKEDTEQEVLILSMDLTKCNPLLRQYYEAKQQEILARVTGSSSSSKSGALAVGGYKRPHGRKERTQVYNGGVAEYYVSSGGELAP

SEQ ID NO: 69553 - protein, 70 aa, Zea mays
  Coding DNA Sequence Number=SeqID_26178
  Gene Ontology: Mol. function=protein serine/threonine kinase activity; Biological process=protein amino acid phosphorylation
  Homolog annotation: Hit_ID=A2ZMJ4; Match level="QueryCoverage=91%, HitCoverage=8%, E-value=2e-15, Identity=57%"; Hit description =Putative uncharacterized protein
  Pfam annotation: Domain name=DUF26; Domain location=2-56; Score=18.3; E_value=3.2e-05; Accession=PF01657.8; Description=Domain of unknown function DUF26
MAFGLIMCFVDRNAAQCLDCLSRAPPGIAAACPGSRSVDAAYDACVLRYSVAPIPAAADLDYDPSVTAAI

SEQ ID NO: 69554 - protein, 146 aa, Zea mays
  Coding DNA Sequence Number=SeqID_26179
MGKSKKGESSSHHSGDKRKREPSPPSQDFGDSEYSEEEFSSESEGSSVYTSPPASSDDSDGSQGITAEVWTYIRAVERSGLEGSDESEVSSDEENSSESSEEESGGDGDDGGGGDGDGDSGKGDGDGGDGKSGSGSSKASGKAPLA

SEQ ID NO: 69555 - protein, 81 aa, Zea mays
  Coding DNA Sequence Number=SeqID_26180
MPRSSAAATPTVREEVGDDQRVSRLSEGLSSARGRAGQWALGVGARFWVVRDVIVDITPQPITLNQRSKSDKHHKNKHSSI

SEQ ID NO: 69556 - protein, 504 aa, Zea mays
  Coding DNA Sequence Number=SeqID_26181
MEKDRQDAPQKRRAFARVGDPWREIKMTRASAKPAAPGASMPPPGAPGASAPLPAVPTQERRPTSPPRAVEMMMGGPKVSLDISMEDYLMGEVAMFDAHTGRGPAVAESRQLAIVPAPVAGPVVAAVGAWGEGVYTGPVVQGRIERLRTQHIEAVRDRSAAENRSRNLLEKLSAAEAEKEDLGHRLAVEKENADRAHAEAQASRAEANLVLQRATDAESGHRSLRRYLDRAEASTRTGVGRAHKLLVDAYRELGVCTAPFDASGEEEELELLPAIVTGLMSFASFITCEGAANALSREGCRHFEVFDRSNEDFDRGIFQVGDEVLKWSTGALYDRMWGPHGHDTVRERSDRALEQMANDEEVDDFGGLESSVTHVEDVRMEIGEQPAPLTGPCEDPVAAAAPSGSSDGCAGCRRPCRADRSFAGGGIVLGVPTFGPAQATPADDVNFVAAANAMSVNENLSGLETGSWSSDGVEFDSPFLWTEESLDEGFVTPGFRGTKTRART

SEQ ID NO: 69557 - protein, 185 aa, Zea mays
  Coding DNA Sequence Number=SeqID_26182
MHNETQPRNVLRVAEDNPNAKDELTGERGTQGAACPCQRRLDPRVPGLSPEYSHEGRLEIVIKKSKIGNKIAQFGSCTFTSRTRKTSAEVVEIVPCARNKWGNWWDFWFYVSPGDVEDLLGLPPAILCSHCYVAFPQFEVAEDDEDEGALRYADRLSSGRDLVEEFIGYGVWPLAHGWVLGEVCP

SEQ ID NO: 69558 - protein, 417 aa, Zea mays
  Coding DNA Sequence Number=SeqID_26183
  Gene Ontology: Mol. function=thiosulfate sulfurtransferase activity; Cellular component=mitochondrion; Biological process=sulfate transport
  Homolog annotation: Hit_ID=A2ZMK2; Match level="QueryCoverage=81%, HitCoverage=79%, E-value=1e-164, Identity=84%"; Hit description =Putative uncharacterized protein
  Pfam annotation: Domain name=Rhodanese; Domain location=114-234; Score=88.0; E_value=3e-23; Accession=PF00581.11; Description =Rhodanese-like domain
  Pfam annotation: Domain name=Rhodanese; Domain location=282-408; Score=70.2; E_value=6.7e-18; Accession=PF00581.11; Description =Rhodanese-like domain
  Pfam module annotation: Pfam domain module=Rhodanese::Rhodanese; Domain location=114-234::282-408
MAASLLSRAAAAAAALRGAARPNHLLARASLPKETLLPPLLLLIIIITAATPLAVGRVGWAARAAEGAGGPRCGPSPLLGAFGIAARCNATSSSSAVSEATGVHTVPPTEPVVSAEWLHANLKDPDVKVLDASWYMPAEQRNPLQEYQVAHIPGALFFDVDGISDRTSSLPHMLPSEKAFSAAVSALGIYNKDGIVVYDGKGLFSAARVWWMFRVFGHDKVWVLDGGLPQWRASGYDVESSASSDAILKASAAGEAIEKVYQGQLVGPTTFEAKLQPHLLWSLDQVKENINTQTHQLIDARSKPRLTDLKLLFRFDGAVPEPRKGIRSGHVPGSKCVPFPQVLDSSQKLLPSDELRKRFEQEGISLDQPLVTSCGTGVTACVLALGLHRLGKTDVAIYDGSWTEWGAHPDTPVATAV

SEQ ID NO: 69559 - protein, 292 aa, Zea mays
  Coding DNA Sequence Number=SeqID_26184
  Homolog annotation: Hit_ID=Q6JAD6; Match level="QueryCoverage=74%, HitCoverage=43%, E-value=4e-33, Identity=57%"; Hit description =Putative uncharacterized protein
MVRTKNVSAPGGGDDDDPPRPFRQVKGKTVYLEQQEGCKKRRLDRAACAAAEQRDPAAADLFSTKIQESFFRAQMSAQIALRAHRLLDLPAFLLAATCAMVLLILLDALTTESLQPQLTARPYSDRLSQMGLDTLQRISLQRPKFDVVDFLICEIEDMVLDGLHARRQLSYAHYLCYIFAQLIRPPQFQGTLEASRLHFGSYCPASEDPVPVPDLVTNTQAEDVAYHQFETQGIAIPDDDDDDDDDDDDDDDDDDDFGIPPPPFVPPRSHDHEAGSSRAAPPAIDPALAAII

SEQ ID NO: 69560 - protein, 55 aa, Zea mays
  Coding DNA Sequence Number=SeqID_26185
MWGPDPADEQPQPLLAHEFLHVTLGFRRQTECEPFHRMRRELDQGNEDATPQKKT

SEQ ID NO: 69561 - protein, 119 aa, Zea mays
  Coding DNA Sequence Number=SeqID_26186
MLQAVLEVENARQKRRGQPRHNNMEGGSWKASELTQVTETAKSGSKPVATHDSGELGKMGSNDHWREESQENDTHTKTILGATDMRETCSMDRRNSAPLLAEASALGHGHRGEERKTRT

SEQ ID NO: 69562 - protein, 670 aa, Zea mays
  Coding DNA Sequence Number=SeqID_26187
  Gene Ontology: Mol. function=homocysteine S-methyltransferase activity; Biological process=methionine biosynthetic process
  Homolog annotation: Hit_ID=Q9FUM9; Match level="QueryCoverage=43%, HitCoverage=88%, E-value=1e-148, Identity=90%"; Hit description =Homocysteine S-methyltransferase 2
  Pfam annotation: Domain name=S-methyl_trans; Domain location=24-319; Score=202.5; E_value=1.1e-57; Accession=PF02574.7; Description =Homocysteine S-methyltransferase
MVVTAAGSAEEAVRRWVDAAGGRLVLDGGLATELEANGADLNDPLWSAKCLLSSPHLIRKANHSPQTLLFATIQGFESKGFSKEQSENLLTKSVEIALEAREMFLKEHLEKSTPIQHPVLVAASLGSYGAYLADGSEYSGDYGEAGTKEFLKDFHRRRLQVLAEAGPDLIAFETIPNKLEAEAYVELLEECNINIPAWFSFNSKDGVHIVSGDSLIECTTIADKCAKVGAVGINCTPPRFIHGLILSIRKVTDKPILIYPNSGERYDGEKKEWVESTGVSDGDFVSYVNEWAPLRLYPNGNDTDHRGFVPADLTLALDGSGLPEATATYRPYRQAHSNRPCRFDGSWYTTPAVQRVVVGEEGRGGGACEEDERQVVERRRIKRRRIGRHRLKACCDGRQLGREDWQRRVEAQHIEGMPDVRPLGLPRWTRHVSAVRFQHRAPELDDENTLHPLNVVVPAQPRVQNPPGFTELPDPVRQVERVPVRQRHHGALAGHKRSRGARCSKLYTSDPTLVRPVLRHSGSTYPVVPAPPPSSETIGRPRPPPSPARKSPSLAANDASSITLLGLTSRCTTHDSVSWCRYSSAEPMPSTIWYLASSPPRQLLVCVVQVPIHAAFAHQLVDEQEVVATAAAEAPPDEQHEVPGPESADDPHLRHELVPALRGTFGVGES

SEQ ID NO: 69563 - protein, 80 aa, Zea mays
  Coding DNA Sequence Number=SeqID_26188
  Subcellular localization annotation: CTP_CleavageSite=43; ConfidenceScore=5.36e-01
MAAPPQLASLKHAALLPARPWKPHRRPRLNPLCRVPLPDFRASVMVYGGMGLRSLFVVHLWRNERLELGIIVNLAVSSQI

SEQ ID NO: 69564 - protein, 218 aa, Zea mays
  Coding DNA Sequence Number=SeqID_26189
EEVDADQIRVDAERLAAWGCARAQGADVRSREISRGSGGRWGAHGTRAGGRAATMSSTGANWTEPELEERGERLGEAAAQENGGDHGKRDSAVGETEQGLGVRAIAGAGARRRARAADEQSRRELRELGEHGRTSAPGTQGAGPSRTSGPTARAGSRQRSRATGGRGPRSAEGGREWAAGERRSGDEDFLGSSRHPRQSAKQKLGLAFLGPGCLEMRI

SEQ ID NO: 69565 - protein, 200 aa, Zea mays
  Coding DNA Sequence Number=SeqID_26190
  Gene Ontology: Mol. function=glutamate-5-semialdehyde dehydrogenase activity; Cellular component=cytoplasm; Biological process=amino acid biosynthetic process
  Homolog annotation: Hit_ID=Q0GH81; Match level="QueryCoverage=37%, HitCoverage=13%, E-value=3e-28, Identity=86%"; Hit description=P5cs
MAGFELTQPLLCFSHGRVPFSMVAAVFLCRGLAQPFSSFFELGRPHPSLRESDAGYEKFLVDRLTLKPGKISVLAKSIRTLACMEDPINQILKRTEVAENLILEKTSCPLGVLLVIFESRPDALVQETLLVHKDLIKAQGLDDLLLSLKTEGSRYSIYCFQLLFQETLLVHKDLIKAQGLDDLLLSLKTEGLHFTLLAHP

SEQ ID NO: 69566 - protein, 122 aa, Zea mays
  Coding DNA Sequence Number=SeqID_26191
MEDVVEGCGGTRAGRYVVEEDDDEVLPWFGLTMSAIDSTLEEAIPKNLLLNLPEIMVVDVRVALACWLGKSPDVISAPEGALAHEDATICSLFAASMNVHVGSPMPRTGDAAVTSSDLLAGL

SEQ ID NO: 69567 - protein, 129 aa, Zea mays
  Coding DNA Sequence Number=SeqID_26192
MTGAPVRLTPNSTLNDHNPSINCKALAPNLSVHGGSDRPGPVEPPPRAVEPPPDTPGDLTASLTGRLQIRSQRVRNQLSCPQDQFSWSRPESFGEKTPAQLPGGKFSWVWSKRSTAEVEVQLELKVQLS

SEQ ID NO: 69568 - protein, 64 aa, Zea mays
  Coding DNA Sequence Number=SeqID_26193
MGERVRAWAVLKKELGCVGGRRGQGSQRAARVHVFWSKVGVEKAELTERSHSAAARVRDLAGPS

SEQ ID NO: 69569 - protein, 51 aa, Zea mays
  Coding DNA Sequence Number=SeqID_26194
MVGLQVVMRMKVMIMLIVMVAFGAIHAQVKKKENGVEADLQEFWDFDEFED

SEQ ID NO: 69570 - protein, 85 aa, Zea mays
  Coding DNA Sequence Number=SeqID_26195
MAARQPGTEGQGLLAIHWLASRHQPDCATTAGRHGGRTGLIGHRGQAGNGDGRDSSASSSMARGLARRGPAPGACVRRAWVVLGR

SEQ ID NO: 69571 - protein, 162 aa, Zea mays
  Coding DNA Sequence Number=SeqID_26196
  Gene Ontology: Mol. function=nucleic acid binding
  Homolog annotation: Hit_ID=Q5NKP8; Match level="QueryCoverage=97%, HitCoverage=24%, E-value=6e-12, Identity=33%"; Hit description =Putative uncharacterized protein 9C20.4c
MKFVHHASMSKAGHQKALDTLDDLVRVLSRIEPDIGVMTVTTEGDVFTGGMGSGSQTEQADQNIKSVLHVVGDENVGDKAGCEPGASNALVRVEHDGVRKSKMLGGEPLLRGGIGIEDWGGCETDKQSRKKLDFNIGGVSMDKPINEKPKGRMIRSDELNED

SEQ ID NO: 69572 - protein, 93 aa, Zea mays
  Coding DNA Sequence Number=SeqID_26197
MDLVFGLLHLSESLSKYDISCTACINQNIMDQKSFDNTRDNHSIIVWVILELKILLREAGSEHEPPVIGRISFGAKAVPAWFLNEAIVSGEWK

SEQ ID NO: 69573 - protein, 123 aa, Zea mays
  Coding DNA Sequence Number=SeqID_26198
MTQLETWKPRWNNFGQSYVTGIGMGAGQPDREAKARARVVELSAALDSLQVYCNTLHEEYMYCMLDCTRTWLPTLLQMGAGPSGIASEGPDGELDLFRPPPSMNLADERSPAAGNEATKDNED

SEQ ID NO: 69574 - protein, 65 aa, Zea mays
  Coding DNA Sequence Number=SeqID_26199
MARRLARCRRHGGDEDDGFDYGNGNWYSFHLERVAFGAIYAQVKKKENGVEADLREFQDFDEFED

SEQ ID NO: 69575 - protein, 297 aa, Zea mays
  Coding DNA Sequence Number=SeqID_26200
  Subcellular localization annotation: CTP_CleavageSite=41; ConfidenceScore=5.43e-01
MGYRGFLAVRSSAYGPDYTGSPIYDPTVRKPPSTSGQSRVVAASLTVGLSPVNPGSVAPVLPTHHNLALSEADMKVKLVEGVLPETPMKVELPTPMCGSEGLRNFSTRGHEGQGKAEAPRGLYPLDEEVREEEELTGGVHEPARVTTETGGRLARHGPFGHLYLRTIMMVLASVAITSFAILLVFSLPSCLHLRATPFLAKGVGAGAYSSYSSDTSPDTDSRSGYCTSTRTFHIMRAPSFSSSSDVPFVFPAFVLFFHPNLLPPPTIVAASRPTLIDAVDICYGVGGGVVSLRRVQG

SEQ ID NO: 69576 - protein, 85 aa, Zea mays
  Coding DNA Sequence Number=SeqID_26201
MAARQPGTEGQGLLAIHWLASRHQLDCATAAGRHGGRTGLIGHRGQAGNGDGRDSSASSSMARGLARRGPAPGACVRRAWVVLGR

SEQ ID NO: 69577 - protein, 188 aa, Zea mays
  Coding DNA Sequence Number=SeqID_26202
MEIWDTLKIVHEGDNITKITKMELLEGRRFKRDAQPDQDDGQQDLHLQEQEMDQPSSVQINALSIHQNKDNKDVNPTTTLWSGGGTQGVLVLLERKVEFVKAHHVCIYDTQGSKRMTPRNQYATNPLVIIRATQMTLLRRLIPTNTIKNTSKNRKNDIILILITKLGSHKPMNDVTIQNRLNLSKFQV

SEQ ID NO: 69578 - protein, 461 aa, Zea mays
  Coding DNA Sequence Number=SeqID_26203
MSSRSLMHRVFPPSEPPDGEHPQSFRLVVGGTQLRGSWYLSAIVRLQGFSSGSPTASPHRWSPKTVTTSSWVGRSKPGCDLGPALSFKDLHHPCWGGGRAEPELYLLRGFVGQPLLQHSRERALTGLARGVDFNNAGPIGGECRQLQRVGLAGSAGSGLAPGASSRHKGGCCAARTRGPPKTSRAARAAFVFWSCPAFAPVRRLCVEVGAPLVREDSSGDLPVGRRLLSSVLRWRRLEKSSSPARSPPPSALRASGSLYLSSPLERRCGRGHCCSGVRPEAIAAAVQPPGAEVVVAAAGAGDDSPVGYLNRFTKRESPRAKVTSEPLFDEPKLEVEVSARTEAELARKEDLVGRSLAGSSTGGTDAGVKLPRPRAGLMSSGDSWLRLRGGRSSRLLKPDSWRRPWRRWPGRGADVVLRSGDPPTASPSEARPDLAEGVVDAEGAAAPFNCQDPSLQDRVIL

SEQ ID NO: 69579 - protein, 113 aa, Zea mays
  Coding DNA Sequence Number=SeqID_26204
  Subcellular localization annotation: CTP_CleavageSite=28; ConfidenceScore=5.17e-01
MQSACNRAKWAHPFDSNAPSMEAQAHTSCNRRAGCYVRATAPPLAPLPRLLDCGTSTVTRGNPTYDPTVPARRIDHRFTNSGERDYTIPVGLVLDSSSGKLHGLSGKLSEGLD

SEQ ID NO: 69580 - protein, 270 aa, Zea mays
  Coding DNA Sequence Number=SeqID_26205
  Homolog annotation: Hit_ID=Q84KB0; Match level="QueryCoverage=18%, HitCoverage=5%, E-value=3e-08, Identity=57%"; Hit description=Pol protein
  Subcellular localization annotation: CTP_CleavageSite=35; ConfidenceScore=5.27e-01
MNRQDFYTGKTVARTHCTVGRKNQKVNLHGGTAPRSKTVSFLDNELREGVFRTFGFLKPKRLFSRIKLIMKNDLAPRRGYCWDHASSPKVLRKETTSTEAAPFENKSPTGPYEIKANYGPVAYQLKLPPHMSTVHDVFHEHPVKEFVNPPEHVDQEPLTTFAACARGLGSSDHLRHRPAHRRDRCDLPDATEHPAGAQLSSGMFCLFVTSNLYDRLQRPIFTHYCNLVDGEYILVPEQGVAQEVAQDPAPEPAIEDLPAPALEGKPRFYA

SEQ ID NO: 69581 - protein, 60 aa, Zea mays
  Coding DNA Sequence Number=SeqID_26206
MVSHSGYGGYKCDHCTMAVGVSEALYAKADMVARVTWPSILPPGWTVEWDPTSAEEEHEE

SEQ ID NO: 69582 - protein, 120 aa, Zea mays
  Coding DNA Sequence Number=SeqID_26207
MAGKRWHSSSITREENGRLGASVRGRFQGTSGLRVARTWCHGRCAGLGVLGAAGSAGLRRVGWHRGRLCRGSVSRPRQGSGSRTQGRGALDFQLGVASGRHAGAVRRRSLAESRDFWWAR

SEQ ID NO: 69583 - protein, 149 aa, Zea mays
  Coding DNA Sequence Number=SeqID_26208
MGKNNKRKRGPTPPSEDFGDSEYSEEEFSSESEGSPVPVSPPASSDDSDDSQGIVAEVWTYIRAVERSGLEGSDESEYSSDEEDSDGGGEDEDDDDDDDGGDDGDGDGSGRGGNGGSRVGNSSSRSGNGGSSRGSGGGGSSKGSNKASG

SEQ ID NO: 69584 - protein, 90 aa, Zea mays
  Coding DNA Sequence Number=SeqID_26209
MASTVSSGGEGKNEEEVRDATGTVSASQGSWVRFRLSPGGFVQDCNLVDGEYILMPEQGVAQEVAQDPAPEPAIEDLPTPALEGKPRFYA

SEQ ID NO: 69585 - protein, 93 aa, Zea mays
  Coding DNA Sequence Number=SeqID_26210
MDFVFGLLHLSEGLSKYDISCAACINQNIMDQKSIDHKRDNHSIVVWVILELKILLREAGSEHEPPVIGRISFGAEVVPAWFLNEAIVSGKWK

SEQ ID NO: 69586 - protein, 82 aa, Zea mays
  Coding DNA Sequence Number=SeqID_26211
MAGSVREEPEVEHHLRVEKAHDSQQSYSTKPPGETASSSARGAGAPTLGARAAGLFPLASVVGGVWEAAFLCTSARDAPAPP

SEQ ID NO: 69587 - protein, 184 aa, Zea mays
  Coding DNA Sequence Number=SeqID_26212
MTKLKERSLTRFLRCGAWFPRGGAIRGDGASVSDGMRRRGRGPCFIARGTRISKTRSRRQVRNPLWCAGDHAVTAESVERSTEQGIRECGATVHPRGLLAVAERGNGRVDDGIGSRPDFSPPLRNSAENDECTVEERLRREGPAEKISPLHARLKKRHGRGPRKAPDAGRSEFAARRDLLGFRR

SEQ ID NO: 69588 - protein, 920 aa, Zea mays
  Coding DNA Sequence Number=SeqID_26213
  Homolog annotation: Hit_ID=A2YYA1; Match level="QueryCoverage=72%, HitCoverage=92%, E-value=1e-82, Identity=34%"; Hit description =Putative uncharacterized protein
MASLRHRRGGTGAANDYDDDDVHDDGSGTPPGTDTATDEEQEEEEEEEEEEKGEEEEDRQMHHLGLHSMTAKGIQHLCSELLEIKKASEQDFSANVYLSYLSFIRMFQEAGDLDKDVHHLKRQVMAHRRLVQQLSANCLYSSSSASMVLPRSGSEDDEADAEGVLLPDRQGERDEDLELDALLSEHRTDEAIQLLELQAAQALRTMQQQAGAADEAETVARALDARKARVAGRLASVAGNPRTPRPELLRALSGLCRLGDAEQANQLLLGLHRGSVVRGVEELRLRASQGGHLQLQSSGAGSSNYIKDLARVVFSSIVRTSRGFVALHGHPSPYTARLVRWAREEMEDLSAAFSEYVRSVSSPAAAAGHSLALALDAAECAVSYTPLLRAVDIVDSERDVVGLVVPCVRDAVTMYGRHLKEVVRLLVDSDAWVLGRFLVPPGLMMQGAGAALAEYCLLTTNGRKFVTLIQEVVEDVAWPLHKLGIGTNDSVGLQLVAELFREYMHSIVELIPRKEAAAALQDEASGDAQYTWQLAVLINCTTLVSLFPAIASGVFRTPASSTSGFPASAQREVDSLVSLVKEAAGQGVTMPSMAFQVVFLRVRRLVEVYGAIMSGDDGTTKKLLQELMEAMVCWLSTNLESWAVHGDAQAQLDVHFLLELAQLGGFSSESIRSSAMDLITKAQEKVAGGEQDDAVREERCGGWAADAAKHAVQVLLATEGGDVAAGNDAGEERDEMARRSSNDEEAGQEEAPEGENEDHEDESGAANKSSDEFVSMEDEDEDEGEEDGVRMPARAALSSESPKPGHSALGNGEEMANIRSGHHHPELDQAEGGGDDSVQADDETRDGEGMCHGAIQQQVEEQSSSSWEDIDGEGGGGGRSSTRRQSTPPVMAAGKDAPTGSRKKREAVSRSSKPSKPRWH

SEQ ID NO: 69589 - protein, 66 aa, Zea mays
  Coding DNA Sequence Number=SeqID_26214
MERSRAHKNPCDIYLPQGPEAQANFEGGKSGKGKCDKKSRSDKRKRPPTPSSDDFGDSNAVTYPDL

SEQ ID NO: 69590 - protein, 237 aa, Zea mays
  Coding DNA Sequence Number=SeqID_26215
MDIHARVSPPHIEGSDAARTRSLLPPEREGSMTISSLSIPPSSSILGGSEGPASSACHVPELGATSGVSGMAHRRSETVGDAAPGAASPASAPSPEETVMASVGYAGHVGTTSDAAVSGSTGLAEGLGLGLRLLGPCRPAIDVGDRAVALSSTGTEAGAGVRGGTMVEATMGPEQLHGEGEQGRDQLARAPDRQGGILFRGSKVRPSARFEKTASELQGFDPVTDQGFKGWPLRRAP

SEQ ID NO: 69591 - protein, 86 aa, Zea mays
  Coding DNA Sequence Number=SeqID_26216
MTRQTHQSVSNSKRWRDWRCGLHSSVPQDWAEGAVTVSAERDPGVSEGWRVQAQRRGNGPEGKKRETAHAGTSHIYGAPRHDGIYV

SEQ ID NO: 69592 - protein, 362 aa, Zea mays
  Coding DNA Sequence Number=SeqID_26217
  Gene Ontology: Mol. function=hydrogen ion transmembrane transporter activity; Cellular component=integral to membrane; Biological process=proton transport
  Homolog annotation: Hit_ID=Q06572; Match level="QueryCoverage=60%, HitCoverage=29%, E-value=1e-110, Identity=92%"; Hit description =Pyrophosphate-energized vacuolar membrane proton pump (EC 3.6.1.1) ...
  Homolog annotation: Hit description=(Pyrophosphate-energized inorganic pyrophosphatase) (H(+)-PPase)
  Pfam annotation: Domain name=H_PPase; Domain location=1-348; Score= -24.7; E_value=4.3e-23; Accession=PF03030.7; Description=Inorganic H+ pyrophosphatase
  Subcellular localization annotation: CTP_CleavageSite=57; ConfidenceScore=5.35e-01
MTARGGAAGFHGGAPHRSFIARRPKRRTAIQTMLHVLKTEANRLRGNSPVEVLHRSRTSTVPYFSSSLGIIYVLAKPAIYAIISGEVLSTDQGKAQGFIATVQSVAILLAPQFMSPLTSYFISEEVPFDCKGFSFIVASFFLGFAIGSAALVSLALFGAFISRAGVKVVHVLSPKVFIGLIVGAMLPYWFSAMTMKSVGSVTLKMVEEVRRQFNTIPGLMEGTAKPDYATCVKISTDASIKEMIPPGALVMLTPLIVGTLFGVETLSGVLAGALIAIFAPNTGGAWDNAKKYIEAGASEHARTLGPKGSDCHKAAVIGDTIGDPLKDTLGPSLNILIKLMAVESLVFAPFFATHSGLLFKYL

SEQ ID NO: 69593 - protein, 322 aa, Zea mays
  Coding DNA Sequence Number=SeqID_26218
  Gene Ontology: Mol. function=double-stranded RNA binding; Cellular component=intracellular; Biological process=RNA interference, production of ta-siRNAs
  Homolog annotation: Hit_ID=Q6YW64; Match level="QueryCoverage=82%, HitCoverage=80%, E-value=5e-36, Identity=38%"; Hit description =Putative uncharacterized protein B1090H08.31
  Pfam annotation: Domain name=dsrm; Domain location=171-237; Score =39.6; E_value=1.1e-08; Accession=PF00035.16; Description=Double -stranded RNA binding motif
  Pfam annotation: Domain name=dsrm; Domain location=59-125; Score =69.7; E_value=9.7e-18; Accession=PF00035.16; Description=Double -stranded RNA binding motif
  Pfam module annotation: Pfam domain module=dsrm::dsrm; Domain location=171-237::59-125
MAGTVTATATTATTEVGTTVTAATSEMEATATAATSELEATATAAAIGPPSAIPDKYMHKNRLQSFAERTYKKTPIYKVESEGQSHQPKFTCTVEVGDQQFSSTGSFSRKKEAEQDAARVAYEILTTVSESDVKEAFELIDQVPVLYEGLNAFVKFLACVLDTCGLDAVFCKSILIEFAVKTKTTLPSYSVVCVCLKKPLTLFAAIVVFDGNAYHGESAPNKKDAEQNAARVVIKSILAKHDTCMVRIVRSKKQLITAVRSSGNTPATFTPIQFTRPVSYAAYGRPDDTTPVLPNESSSLAVQRGINVVPAVGTSVNPSSAN

SEQ ID NO: 69594 - protein, 58 aa, Zea mays
  Coding DNA Sequence Number=SeqID_26219
  Subcellular localization annotation: CTP_CleavageSite=35; ConfidenceScore=5.19e-01
IPDDTTPVLPNESSSLAVQRGINVVPAVGTSVNPSSANFVDLAARVYGLPSVLTEFSF

SEQ ID NO: 69595 - protein, 67 aa, Zea mays
  Coding DNA Sequence Number=SeqID_26220
MASTGVTRGRELTFGEGDVLLGLADDVHRVHLQAQQRIRATEGGREVASAPRERIRTTIRLARAEWN

SEQ ID NO: 69596 - protein, 96 aa, Zea mays
  Coding DNA Sequence Number=SeqID_26221
MSRRGLGGGATVSQVWEDVAPVSLIGQWTSMIRLDRIILLIGTLRTTRENSATTRAELDALGQVIRKARERLSYPKRASGEVSLLEYREVLRSNYM

SEQ ID NO: 69597 - protein, 210 aa, Zea mays
  Coding DNA Sequence Number=SeqID_26222
MEGESPRVNFESPSTRPLALCAVPSLGQRKGVCGRDIRNLPPTPPQFLTVDQGAAAPRGQSLCATILGETLSLFDFVVLLRSLCALRFGFRVTVAVDWWPPVMSRCGLGGSATVSRVREEVAHVPLIGQWTSKVMRHLKSKLVPRNLESKIILLIETLRTTRENNATTRVEWGALGQVIRKAREALPYPEGASAEASLLEYREVLGSNYL

SEQ ID NO: 69598 - protein, 35 aa, Zea mays
  Coding DNA Sequence Number=SeqID_26223
METCSVSNLGWCCLTVLLDTAFGTAAAAEVDAGYA

SEQ ID NO: 69599 - protein, 75 aa, Zea mays
  Coding DNA Sequence Number=SeqID_26224
MSSLEAPTPVETTRRTPEGPRVPRSTELKLAFLQKPFRIPHGSRLPTGSAYVYANLVGSVPINPACWSAPTHDEL

SEQ ID NO: 69600 - protein, 72 aa, Zea mays
  Coding DNA Sequence Number=SeqID_26225
  Subcellular localization annotation: CTP_CleavageSite=31; ConfidenceScore=5.41e-01
MAKPLHPPAPTPAQLPSPWPAPNPPALALPRGSAPQPAPPLPQAQRPWRPGSYLARHGMAQPPARQSARRSL

SEQ ID NO: 69601 - protein, 199 aa, Zea mays
  Coding DNA Sequence Number=SeqID_26226
MGKCRTPVYTDWTFGRCAASAFNETCPFRGQAATSPFRMRRAYPFHWQAVRPCCRMHYAHHYSHITKEAATAYQYCMDYGQHGARRLLRRTRISYFYNVFPPLCSWAHMSGLDILTVNTMKVDGVDLPANNRRRRIVNQPQPEMNSPSNPPPAGADPTAVAQMQLLQQMVNTMTEMQAQMRQERQEMRQEWQEMRQELR

SEQ ID NO: 69602 - protein, 296 aa, Zea mays
  Coding DNA Sequence Number=SeqID_26227
  Gene Ontology: Mol. function=L-isoleucine transmembrane transporter activity; Cellular component=integral to membrane; Biological process=amino acid transport
  Homolog annotation: Hit_ID=Q2QN95; Match level="QueryCoverage=80%, HitCoverage=61%, E-value=2e-49, Identity=75%"; Hit description=Amino acid transporter family protein, putative, expressed
MSLASGLFGTNGGAFVVSQAVDQHAKRGAVADGEHADGSEPKPATQACCSPCWVTRILTTSYGIKEGGWSSLLLLPLLGDSSCYTGLLMKRCIDSSPNIGTYPDIGQAAFGVVCRIFVSVVLYLELYASCVEYITLLGDSMSSVFPLAHFDLNAHTLFAITTALAILPTVCLRNLSLLSYLSAGGVMATIAVIVFLFWVGSCSDCESVHKVCIDNDSSRLVYRGSPAKEALVMALLGSVFTMLVALILPCACYLSIKKGAVPLWEIILCIVIIMIGAVCACVGSYTSVSQMISSTR

SEQ ID NO: 69603 - protein, 300 aa, Zea mays
  Coding DNA Sequence Number=SeqID_26228
MGRCETEREGGREAGGRQARNERIQGNDGPFCDAVGPSPGLGEVEAPSRSRSSLSSKAEVESEPLGQARRRPSAEARAESEPWGRAKRSSSSSGAEPESEPWGQAKRSSSSSGAEPESEPWGRAKRSSSSSGAEPESEPWVGRSGVRRLPGLSPSPSPGVGRSGVRRLPGLSPSSSPGSGEADPSPSPGSGEAELPMALEAGLGYCQPHSVEWRNSRSGAGGFVFFVRPATFALNAPAIRSIGAAIGPRLLLGEDWASGELKLCADGGYQLRLGVLRGAEHGVSSELLTGNPSGRPCPIC

SEQ ID NO: 69604 - protein, 97 aa, Zea mays
  Coding DNA Sequence Number=SeqID_26229
MGARNLRMAHRIAQPTRGGGRPKSGDDDLAVLMRQGLDPCLEKLHGSTGKLSKGSVEAEGLWKWLAAVAGARVARAGGAELARAKGDVWPAKAYGFC

SEQ ID NO: 69605 - protein, 354 aa, Zea mays
  Coding DNA Sequence Number=SeqID_26230
MHRVLPPSEPPDGERLRCFRLAVVVRGMQLRRSWYLSAIARPQGFSSGSPAASPCRWSPKTVTTSLMVGRSKLGCGLCPALSFKDIHHPCWGGGRDEPELYLPHRFVGHLLLQHSREKALTGLAEGADFDNAGPSGRKRRRLQHAWFVGSAGSGTTSGATSHRWAECGYLPDIRATVALRASGDRPRRHALLGRRSCSWAVMPLLRHDAFTRRSVLACLGGLEWGSASGQAAAVVGAEVVAAEEVLVTDEIAAAIRAPGLWLFGFDGLSSPHEWGRGPYRSSVCPEVIAAAVWPPGAEVVVAAAGVGGGVPPGILSSRRPSNVGGCSYLREWNRCSVCNGTLSAGVCSLWLSAM

SEQ ID NO: 69606 - protein, 356 aa, Zea mays
  Coding DNA Sequence Number=SeqID_26231
  Gene Ontology: Mol. function=kinase activity; Cellular component =ornithine carbamoyltransferase complex; Biological process=amino acid metabolic process
  Homolog annotation: Hit_ID=Q6QP54; Match level="QueryCoverage=17%, HitCoverage=25%, E-value=8e-12, Identity=53%"; Hit description =Putative kinase
  Subcellular localization annotation: CTP_CleavageSite=15; ConfidenceScore=5.06e-01
GNDGPPCDVVGPSPRSGEAVTPPRSTESEPWGRARRRPSSGVEAESKPWGRARRRPSSGVEVESKPWGRARWSPSSEVEAEPEPWGRARWSPSSEVEAESEPWGQARRSPSSEVEAESEPWGRARQSPSSEVEVESEPWGRARRSPSSEVEVESEPWGRARRRPSSEAETGAEPWGRARRSFLWRPRLDLAAVGLTLASGTTVGAGQAALFSCQAILALIAPAIRSVGVAIWPRLLLREACPSWASGKSKLCADGGYQLRLGFLGTRLTSLRTHLRWPDNTLSSGELCATHPSHPSTGHHGQSFSETLSLNRALGQLPRGAVKLLQARIKTLPHRNSEIIVTGLRSPATARRPSYP

SEQ ID NO: 69607 - protein, 339 aa, Zea mays
  Coding DNA Sequence Number=SeqID_26232
  Homolog annotation: Hit_ID=A2YX63; Match level="QueryCoverage=43%, HitCoverage=60%, E-value=6e-45, Identity=64%"; Hit description =Putative uncharacterized protein
  Pfam annotation: Domain name=DUF1997; Domain location=165-332; Score =36.1; E_value=1.3e-07; Accession=PF09366.1; Description=Protein of unknown function (DUF1997)
MDVELRGMSSRGIRDGPCPVTVVDWTRSSGNWKNNTGSVGRPHIFVLRAGGVEQTKTLFEHEDKLLQPVVGWLVSSPVPCAAEADGMRLAAAKPAAITVAQRQPIPIPTCSSSRNQAKKSRRSAWRVAVASRDAADGEAEAGAGQGQGQAPTGRRGPAVGEAAAAHAAAGRPSPAPGVRRVPCSPRDTVESILNTGALESFGETGPGTFTCALRRVGLLGTRSPRCWTSESPRPAPKHHRDAVVQEVLEQQNELFSAFMSNHITWSDDAEEPCLDIHVKLEVTLEVYTKPFSMLPLSAVEKPGNLLMQGLLDRLVPVLGEQLLRDYHSWAQAQQQHESS

SEQ ID NO: 69608 - protein, 195 aa, Zea mays
  Coding DNA Sequence Number=SeqID_26233
  Gene Ontology: Mol. function=transcription factor activity; Cellular component=nucleus; Biological process=regulation of transcription, DNA-dependent
  Homolog annotation: Hit_ID=A2YX62; Match level="QueryCoverage=54%, HitCoverage=58%, E-value=7e-18, Identity=48%"; Hit description =Putative uncharacterized protein
  Pfam annotation: Domain name=AP2; Domain location=28-79; Score=54.4; E_value=3.9e-13; Accession=PF00847.11; Description=AP2 domain
  Subcellular localization annotation: CTP_CleavageSite=36; ConfidenceScore=5.09e-01
MTTTSSSRSSQAALAETRPPQKQQQQSSEYTGVRLRQWGRWAAEVRVPGTRQKLWIGTFETDRQAALAYDAAVFCFYGVHLPRRRRFNCPAAPRPDIPAWVRVQLNVASVKAIAERHARVVDARLPPLVAAAGAGGPSAGGGASAPPPGDDRTDGMDDGEALVAGASAADESLCSVPPLRRRRRTSARRPEPGES

SEQ ID NO: 69609 - protein, 125 aa, Zea mays
  Coding DNA Sequence Number=SeqID_26234
  Subcellular localization annotation: CTP_CleavageSite=79; ConfidenceScore=5.39e-01
MAGGNKLAGAKGKWLAGEGTGSCSVTKVPVSECLVPRLSCAKTVSNEFGLSSNFPRMCSRSFSSKVHHSAEIACVYFLSQFKYASFSFTTLNQFNFLHTGAPQDMVSTVSWSVCGDIPKGIPHWV

SEQ ID NO: 69610 - protein, 156 aa, Zea mays
  Coding DNA Sequence Number=SeqID_26235
MARAPRSSRAARRRAQDRLRRGSAHAAVSCDHRGGVHVGGRAGADAGPALQAALAYDAAIFYLYGALRLPSPRRFNFPAAPRPDIPEDVRAMLSRDDIKVIAKSHARSLARFFLGPQPAVSPAATSPPPPPAPAAAGEATATSDSDSSNDSNYYKG

SEQ ID NO: 69611 - protein, 138 aa, Zea mays
  Coding DNA Sequence Number=SeqID_26236
MEKRPQELFSFGKSQRLVSYNSPDMSGVHRTVRGIKCAAARADVRFAHTGAPDNEQELSGAPPDIKGGPQSELQRSDSNGTDDVAGAPDMSGVHRTVRCAIEQTGSPTATFGGWGYKYPNHPTFIAIQVFPFLNHYKS

SEQ ID NO: 69612 - protein, 277 aa, Zea mays
  Coding DNA Sequence Number=SeqID_26237
  Homolog annotation: Hit_ID=A2YX62; Match level="QueryCoverage=32%, HitCoverage=48%, E-value=6e-15, Identity=46%"; Hit description =Putative uncharacterized protein
  Pfam annotation: Domain name=AP2; Domain location=77-128; Score=46.8; E_value=7.9e-11; Accession=PF00847.11; Description=AP2 domain
MELDRATYVCKASTKSTQIYQQAVSICSHTLQADDNLDYDGAEQQQRGSDEGRSPAPAAPRRAFVTRRREPVGAQGPGLTGVRERLWGGWAAEIRIPRTRFRLWVGRFQHALQAALAYDAAMFCFYGERLPSQRKFNFPAAPRPAIPDHLRARLTVANIKAIAADYGRSCAAFFLAPAQLCPSAPAAAAASTTPPLMVVPPATESAAAAAAAASAEEAVVSTTTDHVVPAAASNAGNHVDGGFMETADCLLSCNPDDFVGVLEDMDDVDLFIGQQHN

SEQ ID NO: 69613 - protein, 628 aa, Zea mays
  Coding DNA Sequence Number=SeqID_26238
  Gene Ontology: Mol. function=cysteine-type peptidase activity; Biological process=proteolysis
  Homolog annotation: Hit_ID=Q5NKP7; Match level="QueryCoverage=96%, HitCoverage=72%, E-value=0.0, Identity=88%"; Hit description =Putative uncharacterized protein 9C20.3c
MKQVDRPPNNPKRITIQSSQECFSVDIPSAEQPNPCPEVGIPPNVVSQNLTNETVQIDSDEDDFMPALKKRNVSESHTRVLRKVVTKRIKHEELPRQRLNVRCNPQDVIASINILNERQREAIRRKGFSTILDMTVDALCSRSHLQWLMDKLDPKDMTIRPGPGKELKITKDIVHLILGVPNHGGGKPLGIDEAVAASNLRAELGVAKDEFNVTFLQDRLRKGEDDDLSIRCFFLILFNRLLFPTASWGITYHEVLLTEEMHRFHEIDWCQLIFNDLCEAAKKWHNRITTNVSTTIYGCSIVVLLYYLDHLHTAAAPQNKTGTPRIKFFDKNSIKALTKADKRKPECRTNIFDAPRPAPMPRPTFNIKLPSIKEMMSSKINDLPHRHRSKFTDILAAYDLEVDKSCVAIKDIIDKIIEKQYDIADKFIELIDEVLRAESENLENESDEPQQPGNLADSAGHTVDATQPTPDMPSQASQLETQLGGTQFEEIHERQQHIRRVLETCPDESDVVSNQQRGEMATEEMEHNDSGPVFDQTQLLMSDDTLKGTTNSGSDPPLTEQECVRSLWDLICSKDIDQSRVVIDYGEYSANCMDIYESFTEGKCLEKCLSCSVSLSVFVMIPKIIVEL

SEQ ID NO: 69614 - protein, 312 aa, Zea mays
  Coding DNA Sequence Number=SeqID_26239
  Gene Ontology: Mol. function=protein dimerization activity
  Homolog annotation: Hit_ID=A2ZFQ5; Match level="QueryCoverage=65%, HitCoverage=48%, E-value=9e-70, Identity=64%"; Hit description =Putative uncharacterized protein
  Pfam annotation: Domain name=F-box; Domain location=61-107; Score =21.6; E_value=0.0029; Accession=PF00646.24; Description=F-box domain
MEVGEGRWTVNQWLGLRIYYTVSTWDRVEPLKNLFKRSWLPGIRNVDLKFRKEGVMELDAAALPELPQDVLMDIFGTLEVPDLIRAGSVCSSWHATYKCLLDLRQYKQPQTPCLFYTCESAGSNVGFLYSLKENRSYKLTLPEPPIRSRLLIGSSNGWLITADERSELHLVNPITGEQVALPSVITLEHVKPIFDASGTICMYELSYQTPPDLFDLGDLRDELYFKAFVFPDPSTTGSYIVVLIHEPYSRLSFARPGDDKWTWVGQEKCLSPVYMPTWLSKRCLSPVYAITWPSEKCPSPMEAQLAVRLGFC

SEQ ID NO: 69615 - protein, 82 aa, Zea mays
  Coding DNA Sequence Number=SeqID_26240
MSSRVPTLRRGGWVPHVMRADRKQKKPNRRTRSRDRERGYFEKDPSQRREQAPSPLLIRGSKVGPLEGFDSCPRALGLRALY

SEQ ID NO: 69616 - protein, 59 aa, Zea mays
  Coding DNA Sequence Number=SeqID_26241
MEKLKRCLQGDAEHDEAAKKSFLRERNDHHHHNMKHKQKYSSFDNNSSMSMRKQEHASL

SEQ ID NO: 69617 - protein, 121 aa, Zea mays
  Coding DNA Sequence Number=SeqID_26242
MAGADRGLTSDSMAFCPSLPHKFWHGRGLPGSGIEPEAGAAAAWSLGAEGVVVAAAGAGDGAPLVGLPLLRRPSPSEWGCLYLVGRSLAVSPVSGAGAQVGQSRPRIGLAPLEAGCPRPQG

SEQ ID NO: 69618 - protein, 151 aa, Zea mays
  Coding DNA Sequence Number=SeqID_26243
  Gene Ontology: Mol. function=nucleoside-triphosphatase activity; Cellular component=outer membrane-bounded periplasmic space; Biological process=cytochrome complex assembly
  Homolog annotation: Hit_ID=Q9C8T1; Match level="QueryCoverage=62%, HitCoverage=41%, E-value=3e-27, Identity=67%"; Hit description =Putative non-intrinsic ABC protein 10
  Pfam annotation: Domain name=ABC_tran; Domain location=1-84; Score= -49.9; E_value=0.0094; Accession=PF00005.18; Description=ABC transporter
MELGRLMNEKARRMLSMGQRKRLQLARLLAIDRPIWLLDEPSVALDAEGTRLLKHIIADHREKGGIVFVATHLPIQVEDSMSLRLPQRFPRRKTLNLFERSRLPGIRNVDLKFRKEGVMELDAAALPELPQDVLMDIFGTLEVPDLIRAGS

SEQ ID NO: 69619 - protein, 69 aa, Zea mays
  Coding DNA Sequence Number=SeqID_26244
MQSANLNICQLPCSKAKQCSAFTIIFGNPYTHELPLLGRRRHRLSELVGGHVWWRAGAARAGRGKRLQQ

SEQ ID NO: 69620 - protein, 212 aa, Zea mays
  Coding DNA Sequence Number=SeqID_26245
MAAVAVLDSFIKRCTASKEDFGGPAQPEKACFLLGIGEFGRRKESSEEERTKETRNSISAKTFGVFGLLEEVYAAAFLHVLGQQLAVESDGHLAADVERVPVPVAPERQATWSGLRMESCPDSDTVPPDDGPMPDAENAVTWNRGRCGRTARYTTKRTTPATRSTVRNAEHSSLVHRLTCGRSAGSGRRMRATMWPVDEAASGGMVLVVYVR

SEQ ID NO: 69621 - protein, 95 aa, Zea mays
  Coding DNA Sequence Number=SeqID_26246
  Pfam annotation: Domain name=PBD; Domain location=2-37; Score=24.1; E_ value=0.0002; Accession=PF00786.19; Description=P21-Rho-binding domain
MEIGCPTDVKHVAHIGWDSAAGDASPSWVNGHQKFRALPLRLPSNVWILIDERHHGVLRLVVPGQLRSAHWYLLGFSRFLKPEIPAASLNSESLL

SEQ ID NO: 69622 - protein, 44 aa, Zea mays
  Coding DNA Sequence Number=SeqID_26247
MAHGQARSLKYRRGEENEIWALGSETITRNGEFGEIKACNIGWA

SEQ ID NO: 69623 - protein, 175 aa, Zea mays
  Coding DNA Sequence Number=SeqID_26248
MARSGVPSPAYVRSGRRAPLAWSCASLRRGPLHPPDGRRHFPAPCPRLVAVAPPSIVAAACRGLPALLQHATRHGHRRVRSAGVASFPVLCRPILQVEEKKTVSASFVHVTKEGERAHHGHVSTFGWPQEWSLSHPDFRGTKTRDVSTARVSSHKFIAQQVVGNNVHELAKSGSS

SEQ ID NO: 69624 - protein, 905 aa, Zea mays
  Coding DNA Sequence Number=SeqID_26249
  Gene Ontology: Mol. function=protein dimerization activity; Cellular component=outer membrane-bounded periplasmic space; Biological process=cytochrome complex assembly
  Homolog annotation: Hit_ID=Q6ASV3; Match level="QueryCoverage=43%, HitCoverage=86%, E-value=1e-115, Identity=53%"; Hit description =Expressed protein
  Pfam annotation: Domain name=ABC_tran; Domain location=33-208; Score =19.1; E_value=2e-08; Accession=PF00005.18; Description=ABC transporter
  Pfam annotation: Domain name=DUF295; Domain location=810-870; Score =33.8; E_value=6.2e-07; Accession=PF03478.9; Description=Protein of unknown function (DUF295)
  Pfam annotation: Domain name=F-box; Domain location=505-551; Score =19.9; E_value=0.0095; Accession=PF00646.24; Description=F-box domain
  Pfam module annotation: Pfam domain module=ABC_tran::DUF295::F-box; Domain location=33-208::810-870::505-551
PVTSRRGSLLNNVSACGNGTDVLRDINLSVHDGTALVLTGANRLRERPPSSACWRASRAPLAGEILWNGHDITSPGVFQQYKLQLNWMSLKDAVKEKLTVLENVQWFELLEGKDGSRSGPAIQLMELGRLINEKARRMLSMGQRKRLQLARLLAIDRPIWLLDEPSVALDAEGTRLLEHIIAEHREKGGIVFVATHLPIQVEDSMSLRLPQSGAQSSSFFPHSLDADPIPTEIAAWLAAHFGSAERPPGYRAAPPDGAAAGELRLAVIRASSVGLRAFPRLRGRALVASPPGIVAGDFTNWSPDLSYHDRAAAQRGRTSSELNLRYGYHFPTRRLSLSVSHKVALGLGLLEEAPDTIILTTSSQEREQGHGGYLVAEELGPMRHKSGGFNKANPMPGKAYGARRRAEAPGSSGRTKGRGGEGQGRVRVANHRWAPLWAKGGLVEVEKGRWTVNRESVARIKIYYTVLTWDRAEPLKNLFERSRLPGIWNVDLKFRKEGVSELDAVALPELSQDVLMDIFSTLEVPDLIRAGSVCSSWHATYKCLLDLRQYKQPQTPCLFYTCESAGSNIGFLYNLKENRSYKLTLPEPPIRSRLLIGSSNGWLITADERSELHLVNPITGEQVALPSVITIEHVKPIFDASGTIHMYELSYETPPDLFDLGDLRDELYFKAFVFPDPSTTGSYIVVLIHEPRSRLSFARPGDDKWTSVGQGIGYKDCTYVDGLLYTVDWTGEIDAFDFTASPVKMTVIMDSLKYPPCENLYIIQAPWGDLLHVWRTIDVPPNAPSWDPEKCLAETVKIQVHKVDLEAKKWVKINRLQCDGVLFLGHNDSLYRSAQVHPGLKSNHAYFTDDCKELTVAFKNSTRDMGVMDLENNAKKEIVSQIWSNWPCPTWITPNLMKLNQAFNK

SEQ ID NO: 69625 - protein, 166 aa, Zea mays
  Coding DNA Sequence Number=SeqID_26250
  Pfam annotation: Domain name=Hin1; Domain location=17-130; Score =17.3; E_value=5.5e-05; Accession=PF07320.4; Description=Harpin -induced protein 1 (Hin1)
MLHQPAGSVIVKEERDIASIAELLSGQLSIRNPNRDIAFFYDRFYLSVEYRGADVVKGQALTAAPLYQPPKTTSALAFQGVAASAASGDMARDAVEAGSRVELTVKVRSRIRARLAFWGNRHWHPLHVGCEVAVGLDGQLLAEYMQKQRSSLGVAATVLCRATDAR

SEQ ID NO: 69626 - protein, 109 aa, Zea mays
  Coding DNA Sequence Number=SeqID_26251
MAEIGVLGDWGCSWWRRGREAEDGCGCAMATTTSPPHPISVPDIALRQAGGPGPDPMAAVAVLDSFIKRCTASKEDFGGQPSQKACFLLGIGFEFDIRGLLATHQSPHP

SEQ ID NO: 69627 - protein, 86 aa, Zea mays
  Coding DNA Sequence Number=SeqID_26252
  Homolog annotation: Hit_ID=A2WXG3; Match level="QueryCoverage=93%, HitCoverage=11%, E-value=5e-26, Identity=70%"; Hit description =Putative uncharacterized protein
  Pfam annotation: Domain name=PBD; Domain location=27-74; Score=35.5; E_value=1.9e-07; Accession=PF00786.19; Description=P21-Rho-binding domain
MACKVKGIFKGLKAFSRIFAVKEHEMEIGCPTDVKHVAHIGWDSAAGGASPSWMNDIMASSDLSSLGNFAALTGTSWVSQGFWFFV

SEQ ID NO: 69628 - protein, 123 aa, Zea mays
  Coding DNA Sequence Number=SeqID_26253
  Pfam annotation: Domain name=PBD; Domain location=2-42; Score=25.4; E_ value=0.00014; Accession=PF00786.19; Description=P21-Rho-binding domain
MEIGCPTDVKHVAHIGWDSAAGGASPSWVNGHQKFRALPLRLPSNVWILIGTVFDLVLGLHNTRTGFRFLKPEIPAASLNSESLLVCHRVSCFTQMATKIKELDHANSVRNLSQTYLGLVLAS

SEQ ID NO: 69629 - protein, 119 aa, Zea mays
  Coding DNA Sequence Number=SeqID_26254
MGKSKKGGSSSHHSGDKRKREPTPPSEDFGDSEYSEEFSSESEGSPENSSDSSEEGGDGGDGDDDGGDGDGGEGDDKGADGGGKGGSGKGGSGDGGDGSKGSNRDNNKGSSKGSNKASG

SEQ ID NO: 69630 - protein, 123 aa, Zea mays
  Coding DNA Sequence Number=SeqID_26255
MGKKNFSAPRKKDGLCRGVKCREQRARPPWGRRPLRWLSGEEQEEDGTAARQEERWLVGEAQLRDFLGAMAAGLAPCLLPWRVGRKKRAEDAMDRSSMAMGGGEEPSSLRAATGKKSSLPWRA

SEQ ID NO: 69631 - protein, 83 aa, Zea mays
  Coding DNA Sequence Number=SeqID_26256
MGKKKLQRAEEEGRTLQGRQVQGAEGSASMGKKAPALAVWGGVGRKKRAEDAMDRSSMAMGGGEEPSSLQAATGKKSSLPWRA

SEQ ID NO: 69632 - protein, 104 aa, Zea mays
  Coding DNA Sequence Number=SeqID_26257
  Subcellular localization annotation: CTP_CleavageSite=49; ConfidenceScore=5.60e-01
MDAPCCSLRLALSIQRAPFSSMENQQRAPFLAVRRGARRLFGNMRSKLRAAAARRVFAVLRSPIRDAVETRASRQSPFVAHARSIQDRSGEPRACITQIRSRSG

SEQ ID NO: 69633 - protein, 136 aa, Zea mays
  Coding DNA Sequence Number=SeqID_26258
MGKGKRGRGSPHHAGDKRKRDPSPPSKDFSDSEYSKEGIVAEVWMYIRSVERAGLEGSDESEVSSGEDSFGSSEEQSDSDSDDESGGGGNDSDDGDDGEGDDNGGKGGEGGNGGSGGGGGKDGSGSGKASGKAPMV

SEQ ID NO: 69634 - protein, 153 aa, Zea mays
  Coding DNA Sequence Number=SeqID_26259
MSQVQFVEIKEAAEKGRDGKSKTSNKKRNVNDRFTGNLCRYGDTAANSPRAELFREQNPNVDKMKEVGFRDDGHVVTREWQLAVGVDRRDDGRNGALPLLLRRHHSLAGGTSRIEISGKQRSGSRRKSEVRAQKSKLHVGASINGVSWVGHYF

SEQ ID NO: 69635 - protein, 57 aa, Zea mays
  Coding DNA Sequence Number=SeqID_26260
MTVGGGCLSYGAPGQSGCSPDMSENDPVEELEELAGEAPEQQSVAMILMVLVMPMVL

SEQ ID NO: 69636 - protein, 202 aa, Zea mays
  Coding DNA Sequence Number=SeqID_26261
MRLMVLVMPMVLMAHLRHTARKSVIPFLPSRLAERPLRRPVAGQSSHLERLHHRLHEEQERRRHEQQGSSFSLQQEMESRRPLHHHWGAPASRVAAGGDLDDGGGNDSSSHDTDFSADQEPEGWVARPITRDAARGCHFHDALDTLLRRALNQRTWSIKYRCVVYQHSRGVYPDRWEATCLVRRSENSLQGAEVCSEHYSIS

SEQ ID NO: 69637 - protein, 78 aa, Zea mays
  Coding DNA Sequence Number=SeqID_26262
  Subcellular localization annotation: CTP_CleavageSite=39; ConfidenceScore=5.64e-01
MTKDFAMTASLRGSPSWLPSGARVAPSVIAFFSGMSKVVARAPGVEGGRLSSLEVGANVGHLFSNVVNQEQGKTLVKD

SEQ ID NO: 69638 - protein, 84 aa, Zea mays
  Coding DNA Sequence Number=SeqID_26263
  Homolog annotation: Hit_ID=Q7XBD4; Match level="QueryCoverage=66%, HitCoverage=5%, E-value=2e-08, Identity=44%"; Hit description =Cinful1 polyprotein
MKEECYNIAMQCSDKPKYAFTSVGVFSAEQDVIRGDPKGGIKWIEGEIEAFDEVLTGRGIFVSASTLGELYLWLKKLAVNIRRL

SEQ ID NO: 69639 - protein, 483 aa, Zea mays
  Coding DNA Sequence Number=SeqID_26264
  Homolog annotation: Hit_ID=Q6QP51; Match level="QueryCoverage=20%, HitCoverage=46%, E-value=4e-14, Identity=47%"; Hit description =Putative growth-regulating factor 1
AKLREEEMATLPSRGNPQKPFANRREDGCLHDEVGAEIVQLHPVDVQNRPHEITCRHSKPPLVKRDEAQHIPQRRGRGGSALRGHPLWLWVTGERTKQTISNKGLQIVRPDGGGRPPDPSLRRKRATSPPTDQRFEGWPLRRARQPPQSTQAPRLLLIRGSKAGTSEGFDSRLRALGLHAHYWSEVRRLARQRGSTAASDHLGSTPTTDQGFVGWPPKGSTAASEHAKRGMTLGTSDTWPRLGLRSRANHLQVLLERASGPLADPYRTGHGRPLGSPVSNSLETPCSAPSEGNMALPPPPCGKAMQGHMKKVESVLDRPLALCGGSGAALANPAPAKPLTASTYQPENLEPDYAPGLRPENSTACPAPTAVPLDKVRLTAAKSSLGRHRKLRLARPQGSGSASTLEDGFRLARPQGSDSASTSEDGLRLARPQGSDSASTSEDGLRLTRPPGSDSTSTLEESPPRPTTGSDRPRHRGPSLPYP

SEQ ID NO: 69640 - protein, 85 aa, Zea mays
  Coding DNA Sequence Number=SeqID_26265
MAGEKELAGAKEGWLAGAETLGDTGVSHQRSVAKSAGDAWQLQRSMEGIGLSSVHWTVSGAPMGLELQRSSMPGLEGNRAPDRLQ

SEQ ID NO: 69641 - protein, 73 aa, Zea mays
  Coding DNA Sequence Number=SeqID_26266
MESTCSSPSKDLSKRTRSKLPRLLLRISPQPQQLKASPGTIQEMVDGVTWPTTLPPGWTVEWDVAQAGEEHEE

SEQ ID NO: 69642 - protein, 35 aa, Zea mays
  Coding DNA Sequence Number=SeqID_26267
MAGGKELAGAKEGWLAGAGFELGIKVNMLDLWLKV

SEQ ID NO: 69643 - protein, 86 aa, Zea mays
  Coding DNA Sequence Number=SeqID_26268
MHISYALHSLDCNLLDGEYVLIPEQGSVQEEDQEQASEAAVEDLPAAPAIEGTIQEMVDGVTWPTTLPPGWTVEWDVAQAGEEHEE

SEQ ID NO: 69644 - protein, 185 aa, Zea mays
  Coding DNA Sequence Number=SeqID_26269
MAVMGSTSDKMYLYQENNAACPASTAVPLDRVRLTAAKSSLGHHRKLRLARPPGLGLSLNLGRRTSPRPTPGLRLSLDLGRRTPPRPTPGLRLSLDLGRRTPPRPTPGLGLNLDLGGVTASPDLELGLTTSQGAIITLPLTSSGYGEQDRRPIWLAPGTPEVETPTVGAPGRGLLRVDKQLPIKL

SEQ ID NO: 69645 - protein, 125 aa, Zea mays
  Coding DNA Sequence Number=SeqID_26270
  Subcellular localization annotation: CTP_CleavageSite=52; ConfidenceScore=5.73e-01
MPTSPSSHSALPPKRRFRVRSLDITSKMPTSPSSQSVLPPKRRFRVRSLCITSKMPTSPSSQSVLPLKRRFRVQSLGITSKIPTSPSSQSASPPKRRFRVQSLGITSKNADAAFQSIGVTPKTLI

SEQ ID NO: 69646 - protein, 145 aa, Zea mays
  Coding DNA Sequence Number=SeqID_26271
MGKNNKRKREPTPPSEEFGDSEYSEEEFSSESEGSLAPVPLRESYDDSDDSQGLAAEVWTYIQAVERSGLEGSDESEYSLDEEDSDGGGEDEDDDDNDDDGGGGKDDDSGGSRGSNRGGNNRGSNRGGSSRGSTRGGSGGNRASG

SEQ ID NO: 69647 - protein, 464 aa, Zea mays
  Coding DNA Sequence Number=SeqID_26272
MAGCWPKYALARCLLWASSWCEVRPSLWIYAAETRPRSFMKWRMGRGYPGDDAAAAVDRRGKKPVVVAEEGPSREAAPATKKRKIVMDKDRQDAARKRQAITRVEDPMREILSAAAARDVAGIVSQQLKHAAAFADHVASGALSSEFAAERQRLKGRIERLRAQHVDAVRDKSAAENKNHRLEERLAAAEAEKEDLRRRLAEERRDANKVCAEAQSAQAEAKLARAEASLARQRIKEMEMRLGSLRDRLDKMEASMRVEVEQTHTQLLDAYRKLGARTVPFEAPGQEVGLRFLGWLQEELEVLPTIMTGLMSFTSVVTYEGAMNALSREGCRHFEAFERSDKGFEHEIFQVEDPVMKRSAGALFDRMWGPHGRETVRERSDRAMDQMAHDEEVEDLGDLDSTLPEASGVELAPPSDAGEGPSATPAPTGAGEEPAPATALTGADASKVVAEPAAEDPGPSQVAE

SEQ ID NO: 69648 - protein, 239 aa, Zea mays
  Coding DNA Sequence Number=SeqID_26273
  Pfam annotation: Domain name=MFMR; Domain location=18-169; Score= -72.7; E_value=0.065; Accession=PF07777.2; Description=G-box binding protein MFMR
MSGWSPDLNTFTDLLQSDGQPSTSQARIQASFPVRPYAPPPPAADGSQASFQIPPYAPPPYAPPPYGVPPYAPYAPPPYGALHPYAPPTYGAPPPVAPLSVGSENQAEENGGKLFATSPSGTEDTEEEVPRPVGRDRAKAAARKTKTKGKGKEAMSSESTSEAFKMNNLWGGLVKAKLLKQWNILKGRSTRDMDPAERRTHGRAVKMVEKELGLLDDEEEEPEAEREEEEDEDEIEESD

SEQ ID NO: 69649 - protein, 115 aa, Zea mays
  Coding DNA Sequence Number=SeqID_26274
  Subcellular localization annotation: CTP_CleavageSite=22; ConfidenceScore=5.09e-01
MSARRKHKVPCVQFASSNGTVLSESVGQAPITQFYPNRIRCTILGKTLRKRFTTSGYTRESKSMKGDIDSRKLPAEGSVDADFATSPFYPALVMDRHDHTRRKSTREAVEVRLER

SEQ ID NO: 69650 - protein, 131 aa, Zea mays
  Coding DNA Sequence Number=SeqID_26275
MDAEAMAEELRLNMVTKTNGVDDDLDLKYYHRRSTGSTGGVIVSPAGEGNPRLSSMVNLVTVLNTELDHTLDELGKARMEIVELRAERTQHRHQENGSPAPVGTQRPYHSPPHGHHAYDTADYKTWINLDP

SEQ ID NO: 69651 - protein, 86 aa, Zea mays
  Coding DNA Sequence Number=SeqID_26276
MGGSSTVAANWARSGQGFVKARFWNSLASYGGLLQYHTDDPPQQLTVAKVGLGRLCNPTCRSGWLYMTKLVQGTNFRLKHDYRSRV

SEQ ID NO: 69652 - protein, 220 aa, Zea mays
  Coding DNA Sequence Number=SeqID_26277
MPPGLAGGRAREPYGRRAAPATGARGLARRAGAAPGRRGRCRGGRCSRPIDAVLEDLLGLWVRTHTCFRCATPILLVDVDCIVFIGVAKRTCALEVAKRTGARGKNNEKRGHTPAPRPCARAGAAVAEAACPAEIDARPCRRGWLGATLASRTAAGLRPPPGLRASPAEPVPRRATEAAAGGAGRGRGGGRGGRAASRERERDVREIGEREGGRGKGGWG

SEQ ID NO: 69653 - protein, 82 aa, Zea mays
  Coding DNA Sequence Number=SeqID_26278
MWGARGHDLAHTERVEHVELFFCPCSTAHPSRKHANLGKNPARVFSWHLELSLICELPWQIWPRYLLVLVYGVTWPPSLSPG

SEQ ID NO: 69654 - protein, 31 aa, Zea mays
  Coding DNA Sequence Number=SeqID_26279
MRLERDQDSWCSGGDAGNMEDFEEFQDYDEF

SEQ ID NO: 69655 - protein, 127 aa, Zea mays
  Coding DNA Sequence Number=SeqID_26280
MAAEEERGGWAYRRRDCSGEVVEGVGEVLRVTAMCGSPSGMVGVGRSTCAGGGARRRRGVRPNQGTIGQSKWVRELHQGSRKLTEWLVRLGSDWRELATVAEAGVVMVGGGAACSRRSPTNFGSGRT

SEQ ID NO: 69656 - protein, 162 aa, Zea mays
  Coding DNA Sequence Number=SeqID_26281
MEDHVIGNMSLEVSGPGTIKGLFFFRFWSLFVIDPRGLSLRSLWRSGRESFGRQVLLNLLPLLPWKTESLQGVNRECMGATFLSPCCAGTLENTSPLHVCQVQGTPIPFQVFKGQGAVKISSLPRALLTDHCMGVEVLVFLLVMTLYHSHQVCSVQSIKCQW

SEQ ID NO: 69657 - protein, 187 aa, Zea mays
  Coding DNA Sequence Number=SeqID_26282
MDYRIPPLVRQSSLDQFLSPVCGLDEGTEGVRQRARYLYLGHDTSGVSDNGNDRRDLRRRSSPRRKSRGSRMLLRGDGARCPTEKRIGRSGFDSYTPRSTTGGIGSEPKTSPGGLVTEDFGMEEMRATLLRYFHEVVDEPARWDPFVGHAREGGARKQAAPWRRVQARAGHLGRERPELGRAREVGE

SEQ ID NO: 69658 - protein, 107 aa, Zea mays
  Coding DNA Sequence Number=SeqID_26283
MVVAAPCLPCAAGLAESLLYVVPSLHAATTKVRNPVVFFNEPCLPRVLDCRSSHLRSAPCVMDARHVIGIVPDHRSLSPLQLGAQLGMISEIALFASVNVTISSWSL

SEQ ID NO: 69659 - protein, 56 aa, Zea mays
  Coding DNA Sequence Number=SeqID_26284
MEPNGNAVYIEIWLSSQYKSHLTITIFSVPCFPPNHCSDNMENINPFDENGEQGTG

SEQ ID NO: 69660 - protein, 58 aa, Zea mays
  Coding DNA Sequence Number=SeqID_26285
MEPHRRGPSGAALGGFVERTSHREPIGVGLADVLQVQGDANITGVARPVLDYLPDDRK

SEQ ID NO: 69661 - protein, 65 aa, Zea mays
  Coding DNA Sequence Number=SeqID_26286
MASSEDSNSGSRSGARTSLYIKDVTFVYVSWVIICVRLDPSTHLRHMIGFGPLNPGVTEVVSEEC

SEQ ID NO: 69662 - protein, 121 aa, Zea mays
  Coding DNA Sequence Number=SeqID_26287
  Subcellular localization annotation: CTP_CleavageSite=47; ConfidenceScore=5.14e-01
MAVMGSTSEKKYLCQMVHTIQTTRVNTNYIPPPRQAPVYLVVTSLCSCSVIFSTASTSSSSQGKDPDDFGDGGDDDDDEEEEEENNNEEANNEQEDNFVGIRPITKHYTSMFETRHFPNLL

SEQ ID NO: 69663 - protein, 53 aa, Zea mays
  Coding DNA Sequence Number=SeqID_26288
MLLGELYGLSATLIGNNFTTQGYMENLKKPTPGLQPLKLSSKEGIHPKPKSLP

SEQ ID NO: 69664 - protein, 236 aa, Zea mays
  Coding DNA Sequence Number=SeqID_26289
MEASHTINQKKEVPAKIMPQIQNLKSKFEKEEERKKRKYKRKRRPGMWSPLVCRSPRVINRSRINAPRVPHVSCSTASTSHLGDLAAWWALEYRPYSRVSSGVDGNTGHAVILAGPREPSPRPTRPQIVPTNLFYSCPFLRYHFSATTIAPSRLHMDLIAATVEVLNRANIHASCDTEVFLWRGECWMWLHSLDFATDTPQFLAVVKTSHGSASFRGRHRRVANTRYGNLSPVRRV

SEQ ID NO: 69665 - protein, 124 aa, Zea mays
  Coding DNA Sequence Number=SeqID_26290
MERKPTSKAPLAQRWSSATDELGAQPATLGEVQKDRALEVENTLGQGRKKGRGRHGRSFSALRKKGQRARREVEAPWEEAGDGVGKNGRAAAVWETRKKIVAAAWGLGVGMQKCLQLQGEGSYL

SEQ ID NO: 69666 - protein, 106 aa, Zea mays
  Coding DNA Sequence Number=SeqID_26291
MKRKPASKAPLAQRWSSATDELGAQPATLGEVQKDRALEVENALGQGRKKGRGHHGRSFSAPRKKGQRARREVEAPWEEAGDGVGKSGRAAAVWETRKKIVAAAWG

SEQ ID NO: 69667 - protein, 49 aa, Zea mays
  Coding DNA Sequence Number=SeqID_26292
MDYRIPPRLRQSSPTNFFHLRADWMKGPREYVNAPDVIVDITPLISHLF

SEQ ID NO: 69668 - protein, 240 aa, Zea mays
  Coding DNA Sequence Number=SeqID_26293
MEDSLVIRTSYCSEVEGFPHLLRSCALRMGICKKPKYVWKEYLKNGMEKCSMAVYLGESRNYPNHPSFQVTFTGYRFPDTCQNVARKALQQLCQNYSRRKRLQTLLGRDPTEDDPTIVYMVGYLHTLDNQYDDLASHCTHLNSRVESLEHQVRELTREKASLQESLEIAEGEETNTREAYRTLKMDYDKKLKKLAPARKIRKKTKSQGCQTEQKEEAPPALPPTRIGELVRHRGNVPSQP

SEQ ID NO: 69669 - protein, 182 aa, Zea mays
  Coding DNA Sequence Number=SeqID_26294
  Pfam annotation: Domain name=zf-CCHC; Domain location=107-124; Score =14.4; E_value=0.01; Accession=PF00098.14; Description=Zinc knuckle
MACFLKGLRPKLKTILASQDFLSFSHLSNKAIQVERAKEEEKGHLKRKFQVLRAQQQDRHQRARSFGHPPKGPSFNRPVGLTPSRYSQQSQSSFQAPSVASNQSPANACWHYGDPSHFKNNCPQLKAPGPTYSNSVNGPKIPSAPASKAPPPPPTVSRAGPSTRAEHELITSTHKRPNKLRE

SEQ ID NO: 69670 - protein, 94 aa, Zea mays
  Coding DNA Sequence Number=SeqID_26295
MEQGAERHGVSLASVHCRGWRLTSGCRRVGEGRSVERGAAMDGARMGGGRRLAGDVAPWIQGETTPMFAEKKGAASCTWVQGKQRGGRTEFQNR

SEQ ID NO: 69671 - protein, 557 aa, Zea mays
  Coding DNA Sequence Number=SeqID_26296
  Gene Ontology: Mol. function=drug transporter activity; Cellular component=membrane; Biological process=multidrug transport
  Homolog annotation: Hit_ID=Q5Z7G9; Match level="QueryCoverage=99%, HitCoverage=99%, E-value=0.0, Identity=65%"; Hit description =Putative NIC2
  Pfam annotation: Domain name=MatE; Domain location=291-454; Score =138.0; E_value=2.6e-38; Accession=PF01554.9; Description=MatE
  Pfam annotation: Domain name=MatE; Domain location=69-229; Score =127.6; E_value=3.6e-35; Accession=PF01554.9; Description=MatE
  Pfam module annotation: Pfam domain module=MatE::MatE; Domain location=291-454::69-229
MCTTPVPSPLPVALVGVKGDHRVYVTVPQHPEGDVAVHRSRQFMCRAVPLPTAGETFREAVALCRLAFPIALTALLLYSRMALSMLFLGTIGDLPLAAGSLAIAFANITGYSVLSGLSLGMDPLCSQAFGANHPRLLGLTLYRSVLFLFCCSLPLTALWLNMSRILVFLGQDIEITALAQEYILFSLPDLFSFSLIHPLRVYLRSQGITWPLAAAAGAAVLFHAPTNYVLVGRLRLGAPGVAAAASASNFVLLGVLLACVVGRRDSGLRAAGPPTAECLAGWGPLARLAAPSCVSVCLEWWWYEVMILLCGLLPDPKPAVASMGVLLQTTALVYVFPSSLGFGVSTRVGNELGANRPGHARAAAHVAVAGAACMGLAAMSFAAGVRHTWGRMFTADPDILRLTAAALPVVGLCELGNCPQTVGCGVLRGSARPTRAAHVNLGAFYLVGMPVAVLLAFGLGVGFVGLWIGLLAAQVCCAGLMLFVVGSTDWEAQARRAQELTSCAVGEMEKTGAHASATTEAGGRPEKGEQEEGVERRHDDYEPLMISNSGEPEPETV

SEQ ID NO: 69672 - protein, 123 aa, Zea mays
  Coding DNA Sequence Number=SeqID_26297
  Homolog annotation: Hit_ID=A2XFR6; Match level="QueryCoverage=78%, HitCoverage=27%, E-value=5e-14, Identity=44%"; Hit description =Putative uncharacterized protein
MLLGELCGPQPHLLAVATQYEVQASSSRLHGESQTSIVSGGAEEDRLNTLVGVVAGLNTDLDSATLVLSRVHLELEDAHARIAALEAQLKGRDPPEAQVPAMALSPPRKRIHYGEPGSITRLL

SEQ ID NO: 69673 - protein, 19 aa, Zea mays
  Coding DNA Sequence Number=SeqID_26298
MTVAKWFVPDARGIVDNVY

SEQ ID NO: 69674 - protein, 141 aa, Zea mays
  Coding DNA Sequence Number=SeqID_26299
MNENGNLQDRIGIQMGQVKMVEIKEVAEKGRNGKTEAAEKERSVNHGLMGILSRDSNPMANPPRTEFPRGKNPDGHKVEKFGLEDDRHVVTCERQLDVGVDWRNHRGRRTRGLPLGRHLDSTGEQSGRRIAERIRKRESKN

SEQ ID NO: 69675 - protein, 89 aa, Zea mays
  Coding DNA Sequence Number=SeqID_26300
MGSPSSPEPGGVRPCHAGHGGGELVVESYDYIFKVREGDALQLPALGFGSANSPEFSGSEPYRLGSGPPLLDLRHGGGGPGRVEGWSLL

SEQ ID NO: 69676 - protein, 95 aa, Zea mays
  Coding DNA Sequence Number=SeqID_26301
MSLPLTTWSSQGWSMAAETLSSTCSSWTQTQAIVLLRAVKKVPQRCAQHEGTIWEKDESIPKLRMKKLWLDARVVMENGTDLKGNILPSPRLITL

SEQ ID NO: 69677 - protein, 135 aa, Zea mays
  Coding DNA Sequence Number=SeqID_26302
MKHPRSYPKELGDFDQQRQGPACPCELDRRPRSTKRKKLSGSIKAEPNTQPRGTRAQAQASRPSLSVPLIPDHESDNDGCKDTVTDLHLPDASVIHRLRLHEAHAVRHGGKPLMDYYSKGGSAMLQDKGHVKVKG

SEQ ID NO: 69678 - protein, 48 aa, Zea mays
  Coding DNA Sequence Number=SeqID_26303
MAPYTSHELPPLGCNTHQTVYICKRLQVVEILVKGKYKDDRRLKLIIG

SEQ ID NO: 69679 - protein, 211 aa, Zea mays
  Coding DNA Sequence Number=SeqID_26304
MGSTLVSISGKQSLLIIEKPYLDSLNQHTLESLFFSRLCNRFRISLSPMFCNLCKTGETFLERTTVGGPNYLGGSVTEGASKHDPAHEGGAKDDLTPNDAGPGSSLAASMDVHVGSPLVQSEELVVTNLSAALVGLVTLEANDPDARNPLPADGAENVFDSVYAQLKSCGVPVPDQVLSLMQWNPLQLQRQMEDLRQWNPRLCKREHVTPT

SEQ ID NO: 69680 - protein, 70 aa, Zea mays
  Coding DNA Sequence Number=SeqID_26305
MGPIRLLSAHRAILHARRCGLLSVGCTGATQHFRITHRHVDPGVVVSTARRKFCADAEKIGGDPPPIADP

SEQ ID NO: 69681 - protein, 64 aa, Zea mays
  Coding DNA Sequence Number=SeqID_26306
MSSLPRAGPHRGWGPGRVFGMGGRLGGNHGGEVPRKNQAGAWDFTVVIAGTDAGVPSPHISDLT

SEQ ID NO: 69682 - protein, 233 aa, Zea mays
  Coding DNA Sequence Number=SeqID_26307
MTSHESSEGGNTHSHTDRLAREGFPLIVGGAIGSRLYDASPIRGAVVRGAPGTPLAEDTIESTALHVLTTFFGFHPLELSTHPIGLFPAEKEDDPMWKDRVEHAKDVWALYLGQTAHLTVRCMNALYRLQAVRGEAMSQLMGIVESTKITLDNREDLVVDLSTELAEKDLQVEQMATQIQELEEQEIQDMEAEGVDEDVDIEGGEEPEPASSLDTASSGRPPSPESSVASFAH

SEQ ID NO: 69683 - protein, 106 aa, Zea mays
  Coding DNA Sequence Number=SeqID_26308
MDGGNHPHGGEPPISQHLQGFQKVLEILLPLARGPVAPVGAEGGHHSLRKRWEPPIVVLKDRRYLWQAKQATLHLRHDDRVKKGPGKGILQKGSFSTKKTGPEPPY

SEQ ID NO: 69684 - protein, 150 aa, Zea mays
  Coding DNA Sequence Number=SeqID_26309
MGKNNKRKREPTPPSEEFGDSEYLEEEFSSESEGSPAPIPLRESSDDSDDSQGLAAKVWTYIRAVERSGLEGSDESEFSSDEEDSDDGEDEVDDDDDGDDDDSGNGDGDGGNGGKGSTRGGSSTGSTRGGSSKGSTKGGGGKGSGGKASG

SEQ ID NO: 69685 - protein, 302 aa, Zea mays
  Coding DNA Sequence Number=SeqID_26310
  Gene Ontology: Mol. function=Rab GTPase activator activity; Cellular component=intracellular; Biological process=regulation of Rab GTPase activity
  Homolog annotation: Hit_ID=A2YV75; Match level="QueryCoverage=17%, HitCoverage=13%, E-value=2e-15, Identity=75%"; Hit description =Putative uncharacterized protein
  Pfam annotation: Domain name=Nop; Domain location=208-302; Score= -39.4; E_value=0.00028; Accession=PF01798.9; Description=Putative snoRNA binding domain
  Subcellular localization annotation: CTP_CleavageSite=25; ConfidenceScore=5.00e-01
MAPSLPPPSPLPRRPPLCHPRPHASAQVFDHRYFFPPHPVFGSVRGQEGHVGVAATAVLGIAGRVEATGKVSCVGKERLVVPCTNSLESRAAGTGAEEGLQVVFQVGMALLRFSHDDLVKLRFEKLLYALRYFPEEAIDPDVLLSLAFSFKWFSLGAYPWDALYGGGNILAFALASFFSCSRCAPSSQAVQLSSLSLNYMNDVGCVPNVLHFTNLIDGLGHAGNLEAYSLLSPLRTKGCISLQALYIAPKTKHSTPKYGLVYLASLIGNASQKHKGKISLSLATKTALAIYYDGEDNSIAAA

SEQ ID NO: 69686 - protein, 105 aa, Zea mays
  Coding DNA Sequence Number=SeqID_26311
MGARRRRLGSGCCFPSSWFCFRHRPATTRLRSTVKVRVEADPHGVQDWDPADAAGLACGALTLALVCLEQGRGGESYHRSGEGQDALDRVRLMPFIAVFDPVKAS

SEQ ID NO: 69687 - protein, 49 aa, Zea mays
  Coding DNA Sequence Number=SeqID_26312
MSQMRCIQPISVPPFVNTERVGEQASEIAVRRGTLAQVSHYLTYHEAMT

SEQ ID NO: 69688 - protein, 50 aa, Zea mays
  Coding DNA Sequence Number=SeqID_26313
  Homolog annotation: Hit_ID=A3AA52; Match level="QueryCoverage=100%, HitCoverage=8%, E-value=1e-14, Identity=72%"; Hit description =Putative uncharacterized protein
MERVNPTLVPTDLDVGTRVTFPVFCQCSAAADNATTLITYVMQPGTPCAT

SEQ ID NO: 69689 - protein, 79 aa, Zea mays
  Coding DNA Sequence Number=SeqID_26314
MGLAPPLQEAKMLRVVDAFSSQQVGSGGGGLRHHGVGVEAEEGAMVRVRSQAKEGRVYARPQHLRRACMGLLVVAHDGD

SEQ ID NO: 69690 - protein, 82 aa, Zea mays
  Coding DNA Sequence Number=SeqID_26315
  Subcellular localization annotation: CTP_CleavageSite=23; ConfidenceScore=5.20e-01
MAWGVYLITSFSLLHPLAVAPRRQSAGGAARGQLPSGFGFPQSHGLGATSTRILDSIIIMSDQVHILAVVAGNMPLLVWETL

SEQ ID NO: 69691 - protein, 477 aa, Zea mays
  Coding DNA Sequence Number=SeqID_26316
  Gene Ontology: Mol. function=protein binding; Cellular component =cytoplasmic membrane-bound vesicle; Biological process=autophagy
  Homolog annotation: Hit_ID=Q4A192; Match level="QueryCoverage=96%, HitCoverage=96%, E-value=0.0, Identity=84%"; Hit description=Beclin 1 protein
  Pfam annotation: Domain name=APG6; Domain location=152-476; Score =311.5; E_value=1.6e-90; Accession=PF04111.3; Description=Autophagy protein Apg6
MKPTAGASGKGGAVYPSLPRLKCQECRRALVVVGVESYADRLPAHAAPGNHASSVQDSVMGASKMDNSYVVLSRQNKVQGPRIPPRPGSAVAAHTDPNQSTRAIEGSYIVLPPPSASIYKKSASEGGGAQLTPPGGNSSSPLSGNNSGFHSSVTVLKRAFEVASSQTQVEQPLCLECMRVLSDKMDKEIEDCNADIKSYEACLQRLQQEPYNILSETDFQKEKQKVTIPIDIEEEEKKLKCAIEEAEKQYSEVSSEMKDLEIKSKQFEELEERYWHEFNSFQFQLTSHQEERDAVFAKIGVSQVHLEMLKHTNVLNDAFYISCDEVIARINNFRLGRLPNVEVEWDEINVAWGQAALLLHTMAHYFTPKFRYRIKIHPMGSYPRFTDIHNHTYELFGPVNLFWSTRFDKAMTWFLTCLQEFAEFAISLDKENNVPPEKTLKLPHNRVIHAIVIETNWTSNLGGPWFDWAIGPLPQSS

SEQ ID NO: 69692 - protein, 135 aa, Zea mays
  Coding DNA Sequence Number=SeqID_26317
MVTRLRKGGERSGGWIAVREPLYIWEDAVSTGRARSPGRITGEIPAERDGELVEGRDRADDVVPQGGEMNARATTDEWTRFVSDGGPILLNLRTGSGELVLDSFLFKILIHLKVLNSDPLSFSLLNLSSNLLGLS

SEQ ID NO: 69693 - protein, 326 aa, Zea mays
  Coding DNA Sequence Number=SeqID_26318
  Subcellular localization annotation: CTP_CleavageSite=26; ConfidenceScore=5.07e-01
MSSRSLMHRVFPPSEPPDGGHPQSFRLVVGGTQLRESWYLSAIVRLQGFSSVSPAASPRRWSPKTVTTSPWVGRSKPGCDLGPALSFKDVHHPRWGGGRAEPELYLPRGFVGQPLLQHSRERALTGPARGADFDNAGLVDGRRRQLQRVGLAGLALGAPSCRKGGCRAARTGGPPKTSRAARAAFVFWGGPAFAPVGAAREVPVADGITATIRASGLRLFVLVLAPRASESLGSVGLAVRGFSCLVKGTPRPLFDEPKPRVAVSARTEAELARKEDLVGQSLAGSSTGGTDAGIELPRPQAGLMSSGDSWPRPRELRSSDRVAVRG

SEQ ID NO: 69694 - protein, 57 aa, Zea mays
  Coding DNA Sequence Number=SeqID_26319
MRMSRNEPGRGPITQNIGMIGSRVCAVGAMFILVQAGHPYSQPSTTCATDTIDDQNS

SEQ ID NO: 69695 - protein, 308 aa, Zea mays
  Coding DNA Sequence Number=SeqID_26320
  Gene Ontology: Mol. function=kinase activity; Cellular component =ornithine carbamoyltransferase complex; Biological process=amino acid metabolic process
  Homolog annotation: Hit_ID=Q6QP54; Match level="QueryCoverage=28%, HitCoverage=25%, E-value=7e-13, Identity=53%"; Hit description =Putative kinase
MAPPVDVVGLCPGLGDVEAPPRSRSRAEPESEPWGRAERSSSSSGAEPESELWGRVERSLSSSGVEPESEPWGRAERSSSSLGAEPESEPWGRAKRSSSSSGAEPESEPWGRAKRSFLWRLRSGLAACQPHSVEWHSSRSGTGGAVLLSDRSVERRSDYGHFGSVDWRARVRIKVSGHLCIKCPCDLVGWRGDLAKLCADGGYQLRFRSLEGTPNYGPRHGCARAHPLGVASEASEEWFDSSEVLMPRAMLRLGEKTVKDRLDFFTYAPASPFREEGGSAMLPSEGAEHGVSGELLAGNPSGRPCPIC

SEQ ID NO: 69696 - protein, 233 aa, Zea mays
  Coding DNA Sequence Number=SeqID_26321
MSIILQYLVLTCGVCETARVSSHTFIAQQVVGNNVHELAKDPTVQRDMSPEFRYDRPIPIGRSTASSPNRYARHNPNRSEGIQRPKSLLQPPDPHHGGGQRIPPSSTPVTAIRAHKCYCAQLNVAARSRGKGGLPGKVLTVKCGVVWSDHGEQRTGPVDEQSPQLRRHDPRLGGRRDIYTLWRVIGRIVERWRGGERMSSTRQRGNAELRRWRKRGGRAPSIYGPEFQESPII

SEQ ID NO: 69697 - protein, 211 aa, Zea mays
  Coding DNA Sequence Number=SeqID_26322
  Subcellular localization annotation: CTP_CleavageSite=78; ConfidenceScore=5.29e-01
MSSCSLMHHVFPPSEPPDGGCPQPFRLVIGGTQLRRSWYLSAIVRLQGSSSVSPAAPLRRRSPETVTTSPWVGRSKPGCDLGPTLSFKDVHHPCWGGGRAEPELYLPRGFVVRPLLRRSRERALTGPAGGSDFDNVGLVDGGRRQPQRVGLVSLAPGAPSCRKTVAAPCAREDRPRYHALPGRRSCSRAVLPLHRYGASTRRSVPHSSGRI

SEQ ID NO: 69698 - protein, 105 aa, Zea mays
  Coding DNA Sequence Number=SeqID_26323
ATFALNAPAIWSVGAAIWSGLLLGEDRASGKPELCADGGYQLRIRSLEGPGARSGSKFSGWYVDAVNGLAGAGGGSAMLPSVGAEHGVSGEPLAGNPSGRPCPIC

SEQ ID NO: 69699 - protein, 58 aa, Zea mays
  Coding DNA Sequence Number=SeqID_26324
MNEQSANLEQSQGAASVWGTGLFGGAPDSVRWCTGQCPVRQAASAEEAALGFFSGDFG

SEQ ID NO: 69700 - protein, 152 aa, Zea mays
  Coding DNA Sequence Number=SeqID_26325
MWQNTKMVEIKETAEERRNRKSKAADEKRNINNRLVGVLCRDSDPTADPPRTKFLRRKNSDGDKMKKWRLATGLIAAFAAALAAALAVTFAALATTFAVVAVAIAVASVAAATLAAVVVVTPSSDESEESPSSEEASDSFEPSSPTRSIARM

SEQ ID NO: 69701 - protein, 237 aa, Zea mays
  Coding DNA Sequence Number=SeqID_26326
MKSGSSSSSEPTGLEVEMAVSRSQVDHIWYPERCETNVRQVPRKSQGCRRHQSARGWHVAGKRHPSLSQVRGQLRHVPRRGAGVVVSLWSNSRRGAASCLATVAPSSPPLARRVAGQTQMFLFCRGEMPSSSSPPSGEPTTVVVVVLRGEEYHVVAAVAGHELETPKAEHRLGLKRLLKIVHLELNGKVFVNTQQDPYLARQLSVFRTREDPQPTSEFVVACPCPDVLMQDGTQEGG

SEQ ID NO: 69702 - protein, 170 aa, Zea mays
  Coding DNA Sequence Number=SeqID_26327
MAVLATMVWRATEAVGRGAAAGAPMVGLAPMATPREAVLLELEKMQPQVVLLCGTEVGLTMAVLSLLGPSGRMGRAHNRTWRRSSGWQHGRWLVEARPRAALWWGRCRSLPWPRPPKARHGGQGPSSSARRPPSRSCAIDRLGAAVDIVQRREEGQQRARRLRRGANPNR

SEQ ID NO: 69703 - protein, 361 aa, Zea mays
  Coding DNA Sequence Number=SeqID_26328
  Homolog annotation: Hit_ID=Q6QP51; Match level="QueryCoverage=42%, HitCoverage=77%, E-value=1e-14, Identity=35%"; Hit description =Putative growth-regulating factor 1
MPCLLDCRTSAATRGSPVRDPTVPIKCDDHGLASSPEAAGEPQSPLPHHKDDAPVFCSSNDSRTRNRCPTNRPSHRINSLGSRKGIFRKDPSQRRKRAPSPPNDQGFEGCALWGLATAPEHSGSEPFTDQGIEGWPLGRVRQPPRACRGRDDPGYVRYMAEARAMLPSKSLAGTFGARLWATSRPLLNEAQGRDLVSPEPGLEQETVVPDGFTPRPRTSSGNGCTPGSPEAKLGHFTPLLIVLTGKQHYSPRSDYCANHQGKTNNSKPQPLPSSASGAVGNSASPDPRARPQPRPRRRSPPRPTSGLGLRGRSPSRPTSASASGGVTSSPDLSLGLRRSLRLARPRPRTDYAIGDTSLPYP

SEQ ID NO: 69704 - protein, 108 aa, Zea mays
  Coding DNA Sequence Number=SeqID_26329
MMTVSLVVGKSEPGRGLSLALSFKDVHHPCWGGGRAELGPCLPHGLATRFFLQHSGEKGVHQPYGGGKLPPAARSECGCPSTARATVTPYAGFETALNESVKNCKALA

SEQ ID NO: 69705 - protein, 114 aa, Zea mays
  Coding DNA Sequence Number=SeqID_26330
MDPADAIAVCLKTRTLLERLAMARLMHHRHLELRRQSRLNHQDVACHIFVCASRVLSKRRRRRQRIVMGSSASTNESEVVSMPVHLELVAPVIILSDDEDGEIDWTTLMDDDDE

SEQ ID NO: 69706 - protein, 133 aa, Zea mays
  Coding DNA Sequence Number=SeqID_26331
NETAIAEHEAVTFDAFLLLKVRVNVDPVLDFDVFKWSSATFPFIATQKKLWRLALPMSTSPSDSSTSFVSHSSSREPTPEWDPIAAYEKQAPLHWDADGWDFVVASESDDDLTDGDDLHFLVDGELDSDTSTE

SEQ ID NO: 69707 - protein, 57 aa, Zea mays
  Coding DNA Sequence Number=SeqID_26332
MVLVGISGGTWHRSEGCIKVNQLRVERVAVGSKTKELVYFASSGVDRLYVNIVNLGK

SEQ ID NO: 69708 - protein, 305 aa, Zea mays
  Coding DNA Sequence Number=SeqID_26333
MESHDLRAEKESRLVGGDENVGFGIDSDDGKWYSFRLERMARLRHTAWKSVTPFLLSRLAERLLRRLVTEAPPAPPLSALAPRVAAGGDPDDGGGDDSSSFSTDLSADQEPEGWVARPITRDVAHGCHFHDALDTLLCQALDCRTWSIEYRCVVFQHSRGVYPDRWEATCLVRRPENSLRGAEICSEHYSISERDSAKATMQDAARRALSHYCSMLSGIADGLNLKLSSTVNLAVVLNTELDHALDELSRARAEIAQLRAERVERRHLDDGSLAPVGTQHPYRSPRHGHQSYGNPDCRTKINLEP

SEQ ID NO: 69709 - protein, 104 aa, Zea mays
  Coding DNA Sequence Number=SeqID_26334
MESHDLRAERESRLVGGDENVGFGIDSDDGKWYSFRLERVVSIATTAQEKMKPWKETSRSSKIMISSRRGLAATPSWLPVKAACIYVSFPHFDYCKDYVDVSDI

SEQ ID NO: 69710 - protein, 410 aa, Zea mays
  Coding DNA Sequence Number=SeqID_26335
  Gene Ontology: Mol. function=aspartic-type endopeptidase activity; Cellular component=extracellular region; Biological process =proteolysis
  Homolog annotation: Hit_ID=A2YW36; Match level="QueryCoverage=90%, HitCoverage=83%, E-value=1e-106, Identity=52%"; Hit description =Putative uncharacterized protein
  Pfam annotation: Domain name=Asp; Domain location=102-390; Score= -180.1; E_value=0.0059; Accession=PF00026.14; Description=Eukaryotic aspartyl protease
MARRRLHHGLQLVCLVAVVLTAAPAAHAIFHFDIRFDAGSPFFGGGHSRHDMWRRAALESNARLSRRLARALGNKQSGAAADAIVEPDVTLSQYTQQGHSLTVGVGTPPQPSKVILDLGSDLLWTQCSLVGPTAKQLEPVFDAARSSSFSVLPCSSKPCQEGTFTNKTCTDSRCAYENDYGIMTSTGVLATETFTFGAHQNFSANLTFGCGKLTNGTIAGASGIMGVSPGPLSVLKQLSITKFSYCLTPFTDHKTSPVMFGAMADLGKYKTTGKVQTIPLLKNPVEDIYYYVPMVGISIGSKRLDVPEAILALRPDGTGGTVLDSATTLAYLVEPAFKELKKAVMEGMKLPAANRSIDDYPVCFELPRGMSMEGVQVPPLVLHFAGDAEMSLPRDSYFPRAEPRDDVPGG

SEQ ID NO: 69711 - protein, 365 aa, Zea mays
  Coding DNA Sequence Number=SeqID_26336
  Pfam annotation: Domain name=zf-CCHC; Domain location=264-281; Score =16.8; E_value=0.0044; Accession=PF00098.14; Description=Zinc knuckle
  Pfam annotation: Domain name=zf-CCHC; Domain location=31-48; Score =19.3; E_value=0.0018; Accession=PF00098.14; Description=Zinc knuckle
  Pfam module annotation: Pfam domain module=zf-CCHC::zf-CCHC; Domain location=264-281::31-48
MGMIRKINLMGVPLQVEDLLFNIDMKKQRKRGCFACREKGHFRDSCTSTAKPKKGRSKVKALTCVKTWDDSSSEDEPPRTHSHRSSFRSSPSSRKCLMARGKMSIPSSSDDSSCDDGEATDDSLIKKNEKLKAKLASSKEAIENLLGKMEILSIHNNELTTKLENIGSTSGVSLIKIPEIIKKDAYISCFDLIDDSNPCNQVPIENVVIETYSNEVAKENEQLRQEVARLGKAFYDKKGKAKQIQPSQDNNITGVNKLVEGEIVICRLCDKEGHKSYQCKAMTGDKQKQKLKQKPTNKISNTDTNKVDKKVATPYLIKKKKNGKVITINTNKQANKGNEAKRIWVPKEIISTMKSTKKVWTLRGK

SEQ ID NO: 69712 - protein, 140 aa, Zea mays
  Coding DNA Sequence Number=SeqID_26337
MENGTGAARAEEQGELALETREGEQRLRGSARPQPWIKLEQGGNGVHGRSWGRPWERLETAMGGSWGLPASKVRGRSRGSRERWSAARSEHRRGNDGHGGRERNGAAASAMRAAERRDGVAASATVGTTRAAGGGGCVLD

SEQ ID NO: 69713 - protein, 35 aa, Zea mays
  Coding DNA Sequence Number=SeqID_26338
MATGRLGQAGVKGWLGHSERGRMAPTELVKFTSIS

SEQ ID NO: 69714 - protein, 151 aa, Zea mays
  Coding DNA Sequence Number=SeqID_26339
MAGGSIKMPIMASVSVDEERKSGRERKGKGFGRSWRVREVRRRDRFGQGRGVGRGRARTPERWRRGGASTGKEKGARKPLYDNYKFVLRADELWRDTSITILKWLQYHDIAKELSIYQIREHVEEMEKMVNDHKVTMVSIFVGDLFSNAMN

SEQ ID NO: 69715 - protein, 106 aa, Zea mays
  Coding DNA Sequence Number=SeqID_26340
MGSARVAFVLLLLEVAFVVGARVVAAGEGFPADDTISATRGPTSGSLALIACPRPSSGDAGEGLVAAASALRSSLLLFGRPEWRSLSLLTERAAASQLEFVVPQAL

SEQ ID NO: 69716 - protein, 394 aa, Zea mays
  Coding DNA Sequence Number=SeqID_26341
MPSSEETLSDLAVVELQPGHTVEFCTSRIFSGRILEMQRLGYFGNGVGQAPGAEEKRKIGDKIAQFGSCTFTPRTEKTSAEVVEIVPCAMNKWVEDKAVKIVGKYVPKTKTLRSWDIRGSNAMSTTDESPSRDKAPGAAAKKRKLGTAAEGLRASDHFVVDLLETCATPRETMSSLELRESSARMLKVTGGRWPRNVLIPRVATEDIFTSRLARDMKIFPYGRNVGVVVSAVEKDRQDASRKRRAYTRLVDPRREAKVARPSANPAAPGASMPLPAMPTSERRPPSPLRAAETAVVGVEVSMELSVDDYLVGGVAMFDTHTGLASAAGPVAAVTVAKSDVGPPEDPWSKFCASKAVRDKSAMENKSCNLLEKLTAAEAEKEDLSHRLAEEREGT

SEQ ID NO: 69717 - protein, 175 aa, Zea mays
  Coding DNA Sequence Number=SeqID_26342
MSLSTLLVERRRRGENSAACPTPTAVLPARVRLTAAESSLRRHRKLRLARPRGSAPALTSEDGLRLARPQGSDSTSTSEDGLPPRPTPGLGFNLDLRRRSPPRPTPGLGLNLDLGRRSPPRPTPGLGLNLDLGRRSPPRPTPGLGLNLDLGGVTASPDLGLGPTTLQGGTSLPYP

SEQ ID NO: 69718 - protein, 184 aa, Zea mays
  Coding DNA Sequence Number=SeqID_26343
MSGEEVGLRFLGWLQEELESLPSIPTGLMSYASLITYEGAANALSCEGCRHFDVFDRVGDEVLKRSAGALYDRMWGSHGRDTVRERADRALAQVPTSGPAQATPADVDTSILAAANATPFNGNVSEGSETESWSSDRDYFGSPLSWMEESFEEDLDYFVVLDLAASESPSQSDAREETVPRPGQ

SEQ ID NO: 69719 - protein, 23 aa, Zea mays
  Coding DNA Sequence Number=SeqID_26344
MALVPSLSVGQPLRVRVCKCVTY

SEQ ID NO: 69720 - protein, 350 aa, Zea mays
  Coding DNA Sequence Number=SeqID_26345
MQAACNRTKGAHPLDFDAFSMEAQAHTSCGQKQQSSRQQAHAPSWDSERTLSHGVKMTRPSSVPRTARARTTAAPRTTRPIALTLRQDRRHLWQAKQATLHLRHDDRVKKGAPRHSISYPFPLPLSLSCHRDRERGYSERDHSARRKRAPSPLLIRGSKAGPSEGFNSRLKALGLRAHYWSEVRRPGPWKGSTAASGHSVSTPTTDQGFVGWPPKGSDSRLRARRARDDPGYVRYITKARATLPSLGSGRRRTPLRPTPGLGLGLGSGDDELRFARPQGSDSASTPEDDELRLARPPGSDSASAPEDDDSTRPTPRLEINLELERSNPPRPTRARTDHVTGEGHHYPTPS

SEQ ID NO: 69721 - protein, 129 aa, Zea mays
  Coding DNA Sequence Number=SeqID_26346
MAFLPSCGKCLTPPVTLCPLCTRCSCMRSIGTDDTTEAAAMKTLTTFCGYHPLEMVMYPLGLFPAEKKDDPMWCNHVSHVKDVWAMYPDLVGRVTVQCMSVLYRLQALQSDAMAHLANIAQTTKLTLDS

SEQ ID NO: 69722 - protein, 222 aa, Zea mays
  Coding DNA Sequence Number=SeqID_26347
  Homolog annotation: Hit_ID=Q6QP51; Match level="QueryCoverage=90%, HitCoverage=98%, E-value=1e-48, Identity=54%"; Hit description =Putative growth-regulating factor 1
MMTASKKAPSPPTDQGFEGWPLRRVSTAAPKHSGFKLITDQGFEGWPLERVRQPPQSIRAPRPLLIRGSKAGPSEGFDNRPRARRARDDSGYVRYMAEARATLPRKNSVACPALIAVPPARVRLTTAKFSLRRNRKLRLARPWASASGGGLRLTRPQGSAPASASGGVLRLARPQVQPQPRPQKESRPHPTLASASRGVSASPDLELGPTASRGIHHYPTPS

SEQ ID NO: 69723 - protein, 421 aa, Zea mays
  Coding DNA Sequence Number=SeqID_26348
  Gene Ontology: Mol. function=metalloendopeptidase activity; Biological process=proteolysis
  Homolog annotation: Hit_ID=A3ANI0; Match level="QueryCoverage=32%, HitCoverage=36%, E-value=1e-61, Identity=69%"; Hit description =Putative uncharacterized protein
  Subcellular localization annotation: CTP_CleavageSite=59; ConfidenceScore=5.33e-01
MTLDAIVSGVGSGASPACRLMVVVGWPKLYFSSSFPKQRWGIVSALTDLSGLARQSAPVAMAKKSRAPKLMRLLRANADEQTIGMKDVAWHANDPLPSVPIVVVSGSSGQDLCLAVASHPILPSPHQSTTLSPPPAATTAPANLEGRSALHTKPGMAAALASSPLVHLTTSRLRLPRPQASASSSGPVCSIGVCLGWRLKVGWRALRRRDRLRCFSTDGGGGEEGEKRGEEETSATAAASPASVPAETQVGAGEELASERSRSGSFSSSSSSSGTPGVSSEPPLLSFSVDNIDTVKLLELLGPEKVDPVDVKAIKEKLFGYTTFWLTKEEPFGDLGEGVLFIGNLRGKREEIFAKLQRQYVISLLLFLLTMFSCIELGIASKISSLPPEIVSYFTDPNATGPPPDMQLLLPFVESALPVAY

SEQ ID NO: 69724 - protein, 489 aa, Zea mays
  Coding DNA Sequence Number=SeqID_26349
  Subcellular localization annotation: CTP_CleavageSite=29; ConfidenceScore=5.04e-01
MAGKATASAAADASAGGMSGGPEATAEPAASPVRQPPRQKSRSRELAPWQLEPPEPLVVGHLARRQLGLTPRGHLNSPAEGSSTPSVCPRSSDRNPGVPAPETDGASPLGGWLDDSWPSLKPGLRPRRVAISSSSSSSSSSSSSSGVSGDGSLGSPSHSCRRRSFSKASRARVRSRARAFSASFFSFLFSAATRHAARSTASSGTGGREGLCHPTSWRQTKSLGREDQGQSDARRKKERTLTRHTHPRSGRIKGWERAPASGFSQRDGYPPVEVIDGEGIRGHPRTLQVGLCRHLPKRQPPLRQGKHPPAMDGGNHPRSGEPSFPQHLQGLQKGLEILLSVVRGPVAPSIGGDGHHSLSKRREPPVVISEDRRHRWQEKRATLRLRHNDRVKKGTGKGRYPKRVPSPRRKRAPSPLLIRGSKAGPSEGFNSRLRALGLRAHYWSEVQRPAPRKGSTAASGHSGSAPTTDQGFVGWPSKGSQPPQTQSEG

SEQ ID NO: 69725 - protein, 130 aa, Zea mays
  Coding DNA Sequence Number=SeqID_26350
MWGNWYDYWFYVAGGSVEDLPGLPAAVMCSHCYVAFPPFEVAEGDSDEEALHGAARMSSRSDLVEGFIGYGVWPLAHGWALGKGRMGGNWLLSRLRWGHFANGGGWGEGCHAGLMGHLMRERRDSVGRWR

SEQ ID NO: 69726 - protein, 228 aa, Zea mays
  Coding DNA Sequence Number=SeqID_26351
  Gene Ontology: Mol. function=protein binding; Cellular component =endoplasmic reticulum; Biological process=vesicle-mediated transport
  Homolog annotation: Hit_ID=A3ANH6; Match level="QueryCoverage=100%, HitCoverage=93%, E-value=1e-114, Identity=90%"; Hit description =Putative uncharacterized protein
  Pfam annotation: Domain name=Synaptobrevin; Domain location=142-228; Score=83.8; E_value=5.6e-22; Accession=PF00957.12; Description =Synaptobrevin
MVKLTMIARVTDGLPLAEGLDDGRDLKDSDFYKQQAKLLFKNLSKGHHEASRMSIETGPYYFQYPCAVYVPYVYIIEGRVCYLTMCDRSYPKKLAFQYLEDLKNEFERVNGNQIETAARPYAFIKFDTFIQKTRKLYLDTRTQRNLAKLNDELYEVHQIMTRNVQEVLGVGEKLDQVSEMSSRLTSDTRIYADKAKDLNRQALIRKYAPVAIVIGVVLMLFWLKNKIW

SEQ ID NO: 69727 - protein, 305 aa, Zea mays
  Coding DNA Sequence Number=SeqID_26352
MARLRHTARKSVIPFLPSRLAERPLHRTVSGQSSHLERLHHRLREEQERRRQHGEQQGSSSSPQQEVETVRPRSSVAQLEAPLVPPRDVPAVGGAVGGDPDDDDSDHSTESSEPQEAEGWVARPITRDAARGCHFHDALDTLLRQAFDRHTWSIEYRCVAVSEHYSISERDTAEAAMQDAARRALSQYCSLFGGVADGLNLRYYPRRPTGSTESVVVSPVGEANPRLSSIVNLVAVLNTELDHSLDELSRARTEIAELRAELAERHHQEGGSPAPVGTQHPYRSPPRGHHTYGSPVCKTRIDLDP

SEQ ID NO: 69728 - protein, 268 aa, Zea mays
  Coding DNA Sequence Number=SeqID_26353
  Subcellular localization annotation: CTP_CleavageSite=67; ConfidenceScore=5.47e-01
RVALPSAHCPRAHVSGASSSTPHSFGTLARPQNLLPSPSFPHDALFICFPPAPRRGDQPWRPAYAVRAAASPGRTSPATRAWAWRAVRQAARHPSSARSCSPGGVWTRPPVPGQPARAWQLAAAQRGALAAPAVRSQPARRGAPPTSSRRAVGGQPTRGALAAACVAACPARQLAAPERSSARPSMALRALVRCLCPDMLPAGPGRHPAVVRNWGVVRFAVVPLMGVGVCGSLCQGGDKDDVYDYGNGKEEGVEVDLQEFQDFDEFED

SEQ ID NO: 69729 - protein, 327 aa, Zea mays
  Coding DNA Sequence Number=SeqID_26354
  Homolog annotation: Hit_ID=A2XFR6; Match level="QueryCoverage=37%, HitCoverage=34%, E-value=4e-10, Identity=34%"; Hit description =Putative uncharacterized protein
  Subcellular localization annotation: CTP_CleavageSite=84; ConfidenceScore=5.26e-01
MANTMRATQIARKILTTQPSIYILRTPQFGGSRSMTWIIAGGFSFGMKVFSRDKGKNMVHTLQTTRVNITRVPPPQQAPSYPVVAEEVPMELHHLAVKNGVILEDSSEEILATPTPSSEHHAFAAGASSSALPVLVAQAPTLEVRTLMILAMMEVMTRMEKTTTIMMMPTTSMIKKMAFVGMWPIVEHYTSMFEMGHFSNLLQDVLHALETYVRPLYDTRRVSEPPWACYYITHVHIRMLDVGDRGFRTLSSHESLTPLSTYAALVSIVARRALWSFSHIYRLQLHDMVYMHLPLCPHDENQTSVLPREAKEDRLNTLVGVVAGLVK

SEQ ID NO: 69730 - protein, 127 aa, Zea mays
  Coding DNA Sequence Number=SeqID_26355
MAQGHISLSAEAESEPWGRTKRSPSSSVEVEPEPWVERQSDCGHFGSVDWRARVRIRCQAILALNAPAIRSVGVAIWPRLLLCEDWASGEPKLCADGGYQLRLGVLGVPLIMVPDSSVSQYINTYTK

SEQ ID NO: 69731 - protein, 448 aa, Zea mays
  Coding DNA Sequence Number=SeqID_26356
  Gene Ontology: Mol. function=cysteine-type peptidase activity; Biological process=proteolysis
  Homolog annotation: Hit_ID=Q5NKQ2; Match level="QueryCoverage=98%, HitCoverage=55%, E-value=1e-173, Identity=62%"; Hit description =Putative uncharacterized protein 9C20.3a
MKNVDRPPSNPKQIIIQSTQECFSVDIPRVPAETVRPETRRAADEDDDFMPLSKKRNLDDSPGKVLKKQRLNMRCNPQDVLVSIQILNDRQRQAIARRGFSSILDMRLDALGSRSHLAWLMEKLDHNDMTIRAGPGKELKITKDTVHLILGLPNAGGGTALGIDEAVAANNLRAELGLSKEDFGVAALQDRLRKGSDDDLSIRSFFLILFNRLLFPTASWGITNHEVLLTEEMDCFHQMDWCQLIFNDLCQATKKWHTRSVTNVSTTIYGCSIVILLYYLDHLHDSAAPQNKRGTPRIKYFDRNIIQALTRADKGKIRKGEEAFGHCSHKTRKNTFDVPRPDPSGKHSIHIELPLIRDLISSKLNQLPSRHRLGFIEKLSHFDTEVGKACSVIKQTLQQIVEKQYNLSDVFGELIDEVLRAESGDNEDGYDVQKTTSKSDDILPQTAC

SEQ ID NO: 69732 - protein, 113 aa, Zea mays
  Coding DNA Sequence Number=SeqID_26357
  Homolog annotation: Hit_ID=Q8SAY0; Match level="QueryCoverage=25%, HitCoverage=17%, E-value=4e-07, Identity=89%"; Hit description=50S ribosomal protein L18, chloroplast precursor
MARSSCEEHNGKERTGGRRRGSDEGRKGRGDDCATLRVRKMARQSLFGAAQRRASRGEVGYDMFLTHFLLMASRKRHKIGEVIAKSCLEKGISKVVLDRGRFLYHGINDRTRC

SEQ ID NO: 69733 - protein, 206 aa, Zea mays
  Coding DNA Sequence Number=SeqID_26358
MHDDVETLYVAEKLDRILAQLQTINNRLDSHDARLAKLQQAWVGSSAATTGGLGAGSVGMSGEGGLGAGRGGHMGSGAVALEEANEPREGVLKAPEVGKFALAGVTGRLRGTAAGPSRVERPLRDAWLPQSRDCSAIKAKSKAAPRKLARSMRRQNVEKGDEEGSTPHGARRRKKTLRELDIEVGGRAIRWRPVLPRLAVCSWWPS

SEQ ID NO: 69734 - protein, 851 aa, Zea mays
  Coding DNA Sequence Number=SeqID_26359
  Gene Ontology: Mol. function=helicase activity; Biological process =viral genome replication
  Homolog annotation: Hit_ID=Q1EPC6; Match level="QueryCoverage=33%, HitCoverage=17%, E-value=1e-119, Identity=68%"; Hit description=DNA helicase homolog, putative
MNQLDSFVVEQRNQINKKRRKTRQRKKGQNVQANDIVTTIDLLTPGSVHETVSGSGETHLGVVESMHEHHRLCNQTPRRKEGKLDYIRKHRALQAHTLNPVSLAIEDPTYTSVVVHPTAYATEHDTIGDAGEGDDWTQPHTTAEITDIGDDDDEGIIFEEDDDENEGYLFTGQCNYEQVPNNINIHGTQDESTATDVPDPYDNVYNNIPEETHMLKPVPNCGYCTAKKFEYESPGFCCRGGKVELAPLETPPQLKRLWDSTDSVARHFRDNIRFFNGHFSFTSLYCCLDNMTTNVRDSGIYTFWAQGMMYHNIKSFGREGGAEHKHLELYFYDDDPSLEHRYRKCRADQLQRDKEVIRQIVGILRGNPYSEHLRSMGHVENLDDYYIALNLDQTLNQKTYNAPLTSEVAAVWIEGSERRGRFSKSVMLHGKDRSNHGIRSYHGCYDALSYPLFFPKGELGWHANIPKVGVSMDEVDAYRAIHRASNANDEDVDELSDSFTQDDMSHFRKKLAAILLSSYMNKRRGYPIYKYDKEVHTGSPSDVEILDSPTNHKKRKLLHVLDNSEVLMEDEDGPITQADLQRWFVDEWDKRTPTKVSADGCTDDFLMSGLSTKDMPVTKDDLIDVLCDYIMAIQDDRTLEMIWVRSFNPFKIEISVKDLQNILSINLDMTLKCFDMAVRLLANKESRRPKGEIIKNRKHYMDMRFWRMIGFGKLPKYHQDPTAEELTKTLDCWPSMNYYITACKYVLMPWKFNGCYALFVIDHGKKHVTFIDFAHIQDWCKHMPYKRLNTSYLILQAMAMWGNDSPMEFVRDAKVLRRNFIIELLSYEENSCRYAIPANIQQRVNNIIKKD

SEQ ID NO: 69735 - protein, 334 aa, Zea mays
  Coding DNA Sequence Number=SeqID_26360
  Gene Ontology: Mol. function=DNA binding; Cellular component=nucleus
  Homolog annotation: Hit_ID=A7PNH7; Match level="QueryCoverage=54%, HitCoverage=67%, E-value=1e-26, Identity=40%"; Hit description =Chromosome chr1 scaffold_22, whole genome shotgun sequence
  Subcellular localization annotation: CTP_CleavageSite=75; ConfidenceScore=5.23e-01
MTISSRKKRKVSEPVQNTDTCNLRSSLLLAALGIPAPVFPSRSAEFQEISSAPRPPLFGPSRRRQRRLGSFASSRAASLVYDQFDLLSAAVSILRCLCPVSTEGAGGFGLSAFLLASVGIVQSLEKASFQKTSSVTSVSGAIPVCLDTSSGMNGNMAMLNTTTSTIVSTGSPNMSAEFSCQNLKYTAPLAVEWSYPELQLLNDGLNKYANEPGIMKYIKIAATLPDKTVRDVAMRCQWMAARKEATRRRKPEEHYLGKKIKDRKDKMAEPSSWGTNPPVQTEMRCSSSMPANAKHNGFLSADSQIDHGMLNILEENAKLLNQIEVNILTSQVKF

SEQ ID NO: 69736 - protein, 296 aa, Zea mays
  Coding DNA Sequence Number=SeqID_26361
  Gene Ontology: Mol. function=protein binding; Cellular component =integral to membrane; Biological process=multicellular organismal development
  Homolog annotation: Hit_ID=Q6H475; Match level="QueryCoverage=100%, HitCoverage=76%, E-value=1e-113, Identity=71%"; Hit description =Putative uncharacterized protein B1250G12.7
MTTRNEDLTWQMRAIRVLPMFILPAVSSVIYSTVVNFTRMFEQKDQKTLEKLRAERKAKIDELKERTNYYSNTAAYSAAKAAAASVLASKLGEETGLKVHVGEEPKLDAAVARSNDVEIVPSDGLRNRKQPSARGSRTGSPTSHTPAQGTETNLPPAPASAGLETAPAPVVVEHHQGSGASDGGGWIAKIAALLVGEDPSQSYALICGSCHMHNGLARKEDYPHVTYYCPHCHALNTSKQSMGQYSGSNSGRSTPVVLADGLSTSSSVQETELSNLTTLQELPEEGKTDKQQVEAS

SEQ ID NO: 69737 - protein, 90 aa, Zea mays
  Coding DNA Sequence Number=SeqID_26362
MEELEHKKNELKESQDEVLEDDCEIMKVWCNKAIDKAVLVGHILMKRPNIVVPDDIAADVLASSGTSTKDPTSGIPVNVVPLKMLVHDIL

SEQ ID NO: 69738 - protein, 252 aa, Zea mays
  Coding DNA Sequence Number=SeqID_26363
  Homolog annotation: Hit_ID=Q7XBE0; Match level="QueryCoverage=78%, HitCoverage=25%, E-value=2e-07, Identity=25%"; Hit description =Putative gypsy-type retrotransposon
MSVVDGVLEDTISEDLCLNILSRVIDVRIDCPDEVSSASLLVGLEVSLSVCHGASGSEGPPAPEDALAPEGTLGPEGAPAPQGSSFGFLSIVSMDIHVGSSMPWTGDVVVTNSIVPIGPPNPTTLEVSGSGAKIPMSVYGIEFPMGVSGVEIPMGVMLSLGDPDPSTLVPAETVASTNVIASGSASAIPALGFPFFLSNLQKQIDDLKSANAALTQRCSDTKERCARNQAKLDQVTRFLDGAHAMNSSLQSK

SEQ ID NO: 69739 - protein, 71 aa, Zea mays
  Coding DNA Sequence Number=SeqID_26364
  Subcellular localization annotation: CTP_CleavageSite=36; ConfidenceScore=5.03e-01
MKKVDALPKVVEDLQKTKAPNTAAVAPTTRRTCRARSTIAAGWGGGAFLCIDREVNVIFGGHGSHENKGHQ

SEQ ID NO: 69740 - protein, 135 aa, Zea mays
  Coding DNA Sequence Number=SeqID_26365
  Homolog annotation: Hit_ID=Q6H475; Match level="QueryCoverage=43%, HitCoverage=15%, E-value=4e-24, Identity=94%"; Hit description =Putative uncharacterized protein B1250G12.7
MASTQAEAEAGAPAPPEAAEAKEKGKQGGVLGRVWRALFGGREDFEKRLQYLSKEEAAVHARMRRRTQFSRRAVRNLIVLSVLAEVSTCFPSFAPLVFCSHPMFGDDLVMRVAVLLVFGFVVIRIVIVEESLLTI

SEQ ID NO: 69741 - protein, 211 aa, Zea mays
  Coding DNA Sequence Number=SeqID_26366
  Homolog annotation: Hit_ID=Q6QP51; Match level="QueryCoverage=100%, HitCoverage=100%, E-value=1e-43, Identity=49%"; Hit description =Putative growth-regulating factor 1
MLAPRKGSIAAPEHSGFRLITDQGFEGWPLGMVRQSPQSTRAPRPLLIRGSKAGPSKGSTAAPEHAERGMTLGTSDTWLRLELCSRGTLGHFRDQQERFCNGIPSEGGIEPLDPIEWDRVRQITCRKLRLARPWASASGEVSASPDPRARPPPWPRKMDSASPDPRARPQSRPRAESRPRPTPASEGVSASPDLGLGPTTPQGVHHYPNPS

SEQ ID NO: 69742 - protein, 77 aa, Zea mays
  Coding DNA Sequence Number=SeqID_26367
MPKPDKTFPLLILPVLPSLLNPGVGPHEFGLSDCPHSLEWLYDKGVQVADGIIMLESLKCLYFTAADTADSMRMDHL

SEQ ID NO: 69743 - protein, 56 aa, Zea mays
  Coding DNA Sequence Number=SeqID_26368
MPKLPCAQLRLCSILRSPCVSSYNDFDLSEGSMSEDCDTDEGPKPKVRKNTFLLLE

SEQ ID NO: 69744 - protein, 107 aa, Zea mays
  Coding DNA Sequence Number=SeqID_26369
  Homolog annotation: Hit_ID=A3BK90; Match level="QueryCoverage=43%, HitCoverage=4%, E-value=3e-07, Identity=53%"; Hit description =Putative uncharacterized protein
MTNYKCTFDLKERSTRTKPLPDQKALEIIFEKIQRKDTYGVFVEAVDPVEIYKKEKIIVSPIVSMPASSKVPEKTRIALNPSQVIQKSNLGATVFLITYIHVHKESP

SEQ ID NO: 69745 - protein, 136 aa, Zea mays
  Coding DNA Sequence Number=SeqID_26370
  Homolog annotation: Hit_ID=A2XYS5; Match level="QueryCoverage=62%, HitCoverage=43%, E-value=2e-28, Identity=70%"; Hit description =Putative uncharacterized protein
MDRQDALRSPRLLLAVWRVAGNPHRYTDGTTYNRFCIIVKTIRDEKEVLKAIEYVHELLDKEVAAETSPTDILVCGMSQGGALAKASVLLYPKTLGGCAIFNGSVPISKSFAQKVPSESRKESKNTSVKQKQMPNA

SEQ ID NO: 69746 - protein, 53 aa, Zea mays
  Coding DNA Sequence Number=SeqID_26371
MVGTSAATARRQSGSVEHCTMQDVVDGVTWPTTLPPGWTVEWDVAPAGEEHEE

SEQ ID NO: 69747 - protein, 27 aa, Zea mays
  Coding DNA Sequence Number=SeqID_26372
MAQTRDGVDGWDVDPQSQRPREIKSYP

SEQ ID NO: 69748 - protein, 393 aa, Zea mays
  Coding DNA Sequence Number=SeqID_26373
  Gene Ontology: Mol. function=cysteine-type peptidase activity; Biological process=proteolysis
  Homolog annotation: Hit_ID=Q5NKQ2; Match level="QueryCoverage=88%, HitCoverage=42%, E-value=1e-146, Identity=68%"; Hit description =Putative uncharacterized protein 9C20.3a
  Subcellular localization annotation: CTP_CleavageSite=22; ConfidenceScore=5.33e-01
MALFFVSGKGPGIAEAVVPPLRSSTRGVSNSAALQAHPHSGTSDMKNVDRPPSNPKRIIIQSTPECFSVDIPRVPAETVRPETRQAADEDDDFMPLSKKRNLDDSPGKVLKKQRLNVRCNPQDVLVSIQILNDRQRQAIARRGFSSILDMRLDALGSRSHLAWLMEKLDHNDMTIRAGPGKELKITKNTVHLILGLPNAGGGTALGIDEAVAANNLRAELGLSKEDFGVTALQDRLRKGSDDDLSIRCFFLILFNRLLFPTASWGITNHEVLLTEEMDRFHQMDWCELIFNDLCQAAKKWHTRSVTNVSTTIYGCSIVILLYYLDHLHDSAAPQNKRGTPRIKYFDRNIIQALTRVDKGKIRKGEEAFGHCSFRSSSETCYTAVPPVEAQFKA

SEQ ID NO: 69749 - protein, 308 aa, Zea mays
  Coding DNA Sequence Number=SeqID_26374
MASHGSSDDGNALSHTDGLAREGFPRILWEVLQGAGYTTPPQYAVQQFEKHRVPHCRVRMTLEPHPLQPGWRSLDSESFGYRAEDTIEAIALHGLTTFCGFHPLELATHPIGLFPAEREDDPMWKDRVEHAKDIWAIYPGQTAHLTVRCMNALYRLQVMHGEAMSHLMALLEATKITLDNREELVVDLSTEMVEKDLQVEQLSNEIQELEELVGTRENTIEVLEDQLLNTQQQLAEANEHLDMHHQEIQDMEANEDVDIEGGEEPASSVDTAGSGRPPSPESSVASWPGDSVAVRMSAILHRLPLCRS

SEQ ID NO: 69750 - protein, 83 aa, Zea mays
  Coding DNA Sequence Number=SeqID_26375
MVGISTGGNCLETYDSYVSSCCIVNIGRTGGSKNKLFLDMQALKAKISGLASNLSTEAGESVNESKLDMRSLVNLEVSFAPNR

SEQ ID NO: 69751 - protein, 162 aa, Zea mays
  Coding DNA Sequence Number=SeqID_26376
  Gene Ontology: Mol. function=oxidoreductase activity, acting on the CH-OH group of donors, NAD or NADP as acceptor; Biological process =translation
  Homolog annotation: Hit_ID=Q8S484; Match level="QueryCoverage=32%, HitCoverage=18%, E-value=5e-11, Identity=66%"; Hit description =Putative NADP-dependent malic enzyme
MDVVVITPSRELSKLQPARATHGMLDHIMVENASVKVALNRIAVVSILDAHTLRPHPHGARYVAPPHPPAVARRPASRRQQPSLLTDGCKYFFTVALCSATISQQSRHAISLTITSCSLSAFARNLALHSVDIWPFLHSGISKMAGIYMHKWDNELCITVPN

SEQ ID NO: 69752 - protein, 181 aa, Zea mays
  Coding DNA Sequence Number=SeqID_26377
MVVRSKPGCGLCPALSFKDLHHPCWGGGRAEPELYLPYGPTGHLLLQQSGERALTGLAEGADFDNAGPIGRKRRQLQHAWWLRPSVLRWWPPEKASPPTRSLEPSVLRAYGSLALIACPRPSSGDVGEDLAAAASALRSSPLLFGCSEQRSLSLLQWSATSHPKLVVSQALRCGGCSYLRG

SEQ ID NO: 69753 - protein, 109 aa, Zea mays
  Coding DNA Sequence Number=SeqID_26378
MSLSHRTTFARPAAESDAGSEWRSMVVTMKCCFSYVDSTTPYYSRCSLDPFPTLIEPLHKRGILSDNIQLLLLIGRIRGTLFYSMKALHPYDTSRSHGEQHPTPPHGQA

SEQ ID NO: 69754 - protein, 157 aa, Zea mays
  Coding DNA Sequence Number=SeqID_26379
MSESKSPAGWRSAPALNPKMRRGLSVLLVGWKSGKNTRTHKDLEWFGPPERNTLLHWEASCKRDDGYCAARHGRTVRQQTGQACRLLGDPDAVCRRIGQDALNAERVRRPSAWWQAACLSAINAKTAQPYGPYVRFGLLAYVTGHKPRGRGRFPPER

SEQ ID NO: 69755 - protein, 270 aa, Zea mays
  Coding DNA Sequence Number=SeqID_26380
MPSATPIPTADWSVTFILNVTVGPCAGYLESLHCEDEGTHNREAVVRFLRGEECNPMGFHSSAIARLQGFSSHTLAAISQQWLSRGMTTSLVVGRSKPGCGLPPALSFKDVHHLCWGGGRAELGPRFFPQYPGEKGVCLLYERGELWDAGLADCRCRQPPRARCFGLSGFGAASDAAFDAGSGRGCPFPARATVAPCAEAVVAVDADVVASAGEPLGASYPVALLVWGVVKHAGPRYGIRLSGCTGFGPPQETNAHSLAPVPRLSDPQDL

SEQ ID NO: 69756 - protein, 118 aa, Zea mays
  Coding DNA Sequence Number=SeqID_26381
MALSPANQSRPVGWLGCRLLGRKEEKEEGPRLPEAMVHRSGGRSHDRGPGQPQQTPTPIEGERREQSSKDGSPPRCRPGKEKMDDGEVAAAERDLGYQSPEGDLKDVFAGGSYFGEDN

SEQ ID NO: 69757 - protein, 1079 aa, Zea mays
  Coding DNA Sequence Number=SeqID_26382
  Gene Ontology: Mol. function=translation initiation factor activity; Cellular component=cytoplasm; Biological process=RNA metabolic process
  Homolog annotation: Hit_ID=A2X7I0; Match level="QueryCoverage=99%, HitCoverage=89%, E-value=0.0, Identity=78%"; Hit description =Putative uncharacterized protein
  Pfam annotation: Domain name=MIF4G; Domain location=360-548; Score =165.4; E_value=1.5e-46; Accession=PF02854.10; Description=MIF4G domain
  Pfam annotation: Domain name=MIF4G; Domain location=563-764; Score =168.9; E_value=1.4e-47; Accession=PF02854.10; Description=MIF4G domain
  Pfam annotation: Domain name=Upf2; Domain location=836-1016; Score =147.1; E_value=4.8e-41; Accession=PF04050.5; Description=Up -frameshift suppressor 2
  Pfam module annotation: Pfam domain module=MIF4G::MIF4G::Upf2; Domain location=360-548::563-764::836-1016
MTSGNLLVCSLLHQRYKDFSPCLIEGLLKIFFPGKSGDDLDADKNSRAMKKRSTLKLLIELYFVGIVEDASIFVNIIKDLTSAEHLKDREGTQTNLSLLSTFARQGKFFVGLQPHGQEAYDEFFKDLNVTAEQKKFFKKALNSYYDAVAELLQSEHASLRLMEAENAKVLSAKGELSDENTSSYEKLRKSFDQLLRGVSSLAESLDMQPPVMPDDGNTTRVTTGTDALPSSGKESSALEPIWDDEDTKAFYESLPDLRAFVPAVLLGEVEPKSNEQHVKGRELSGESTSEQETELHDNVPTSATERQLEVKVDDLVKESEDRDKEKGKDGEKEKSKEKDLDKKNEREKEKGRVLDGASLDNLLQRLPGCVSRDLIDQLTVEFCYLNSKANRKKLVRALFNVNRTSLELLPYYSRLVATLSTCMKDVPSMLLSMLEEEFNFLINKKDQINIETKIKNIRFIGELCKFKMAPPALVFSCLKACLDDFSHHNIDVACNLLETCGRFLYRSPETTIRMANMLEILMRLKNVKNLDSRHSTLVENAYYLCKPPERSARISKVRPPLHQYIRKLLFSDLDKSSVEHVLRQLRKLPWAECQQYLLKCFLKVHKGKYSQVHLIALLTASLSRYHDDFAVSVVDEVLEEIRVGLELNDYGMQQRRLAHMRFLGELYSYKHIDSSVVFDTLYLIIVFGHGTPEQDVLDPPEDCFRIRLIITLLQTCGHYFSKGSSKRKLDKFLLHFQRYIISKGPLPLDIEFDIQDLFGELRPTMSRYSSIEELVAALVEFEENERSAPVEKVENERHSDNESQKRHSRDAGPSVNGESAANGTEENGKAHEVADSESYSDTGSIDGREEEEDILSEDKSNDGSDNEGDDEDDGIPVVSDEDENVEVRQKVMNVDPKEQEDFDRELKALLQESLESRKSEARSRLPLNMMVPMNVLEGSKDSRATESESGEETVDEEGGNAGGSSKVRVKVLMKKGHKQQTRQMLIPADSSIVQSTKQQEAAELEEKQSIKRRILEYNEREEELNGASQMGNWGQGATSTSSIRSGGRGSWDGSARGGGRQRHHITGSGGFYHSYGRRR

SEQ ID NO: 69758 - protein, 238 aa, Zea mays
  Coding DNA Sequence Number=SeqID_26383
MNKTPAFKMPLQTEPRFHLHRYEQPHTIGGPAKQQKTDGWLAVARSGSSDNDPRSGWPNCSSDGLRADAAATLPSPTPALEGRGQIPTQILPDEWSTDPHAEAPYRCKGRTAPEHERRPSSARRLGRSSRARGATTALAAGGGTGSQADEPNALKLTTPAVSQPRVVKVRPSRRASERPLPRTLKERLTNEPAREVELRLSPASAPARMMNILEAEGGTKIAARLASPHPGAGGHRLG

SEQ ID NO: 69759 - protein, 388 aa, Zea mays
  Coding DNA Sequence Number=SeqID_26384
  Gene Ontology: Mol. function=tumor necrosis factor receptor binding; Cellular component=nuclear ubiquitin ligase complex; Biological process=positive regulation of anti-apoptosis
  Homolog annotation: Hit_ID=Q5Z9P5; Match level="QueryCoverage=93%, HitCoverage=93%, E-value=1e-143, Identity=67%"; Hit description =Putative brain and reproductive organ-expressed protein
  Pfam annotation: Domain name=BRE; Domain location=1-335; Score=-49.0; E_value=9.3e-06; Accession=PF06113.3; Description=Brain and reproductive organ-expressed protein (BRE)
  Subcellular localization annotation: CTP_CleavageSite=39; ConfidenceScore=5.32e-01
MSPSADAPGPASSASAPPLAPLIAAQLNYLLSHSKLPIRVVQIWSGCRNGRPADRFRLAIPFCLDYVHCNAPSLSRSNGTRGDFVYNALSPKVAPDVVFGPEDERFQPLVDYAAAGNGDKSCLARWDCRAPEGLHALVQELRELYIEYQKERVHMVDDARLAFELSTVLSKEGIEVCMVPSADRPDEAKFAVPLLESDFDFAKLVPGCPWRLPQKIHLQVIFPISRSSSYSSMPSAPRLKLISTPDLRSLLSVEDVKLPPWSNGMCLAEYLPALEDSLNGLLVDASASIGSRRRFIEALAPIFGRPLEADPVHFAIPLQFPKQQPVVTLQSSQHCNADGMPITSPPINDYPWSPRWDQAEMVERIYDFLTDECQNFKKFCSDAITQQK

SEQ ID NO: 69760 - protein, 252 aa, Zea mays
  Coding DNA Sequence Number=SeqID_26385
  Gene Ontology: Mol. function=calcium ion binding; Cellular component =endoplasmic reticulum membrane
  Homolog annotation: Hit_ID=A2YGZ9; Match level="QueryCoverage=68%, HitCoverage=77%, E-value=9e-77, Identity=75%"; Hit description =Putative uncharacterized protein
  Pfam annotation: Domain name=TRAP_alpha; Domain location=1-251; Score= -78.2; E_value=7.8e-06; Accession=PF03896.7; Description=Translocon -associated protein (TRAP), alpha subunit
MVLYLKLKVDIVANGKSYSVPAIARADSEEDAAAAEVVEGADLGIVGDDTQVSSDGPLSPAPGVETVVVFPKNAGKIVLAGEETELLVGLQNEGESTLNVVAVHSTLHLPFDHNMYGQNLTVQPGAYDLVGYIVYEIDQHPYQNVFYNGTIEVVEAGGLLSVESVFLITLGTALLGLFGLWAYGQVQQLSKKTKKAPKVELGTGTTDANIDEWLEVYAVVSVISDLLFAVMATPGFFFVGCVAEVGRQAVDF

SEQ ID NO: 69761 - protein, 38 aa, Zea mays
  Coding DNA Sequence Number=SeqID_26386
RYFGTCDNEIDDSGYDYGAGEDEAVEGDFQEFQDYDEF

SEQ ID NO: 69762 - protein, 79 aa, Zea mays
  Coding DNA Sequence Number=SeqID_26387
MVEKGHESRGETTVTRSAITKQKRWRRRGQGTGKGDTPKGILLCEGSGPQALLLIRGSKAGPSEGFGSRLRALRLRAYY

SEQ ID NO: 69763 - protein, 112 aa, Zea mays
  Coding DNA Sequence Number=SeqID_26388
MPLIKDYNNDSNTCGLKGPSATKHGPNTYRTLKMDYDKKLKKLAPKKKIQKKTTNRGCQTEKKKTPQAPPSPRIDDWSDAEDISLASLDDLLKEFGDTLEKEFDSTSGNALV

SEQ ID NO: 69764 - protein, 157 aa, Zea mays
  Coding DNA Sequence Number=SeqID_26389
  Subcellular localization annotation: CTP_CleavageSite=42; ConfidenceScore=5.80e-01
MASSSVVAVPSIPLPPPGAYKRARPSPVFTTPAPAISFAFPRANRASAAVLPPSLWCQRFTISQQKDQERAQTKRAKDIPNGTLVWRTGLPVCHRTVSGAPPDSVRCTRELEAELATFGKMGGRSAIIHRTVQCASGATTTSRATVDCNTFNARVRA

SEQ ID NO: 69765 - protein, 66 aa, Zea mays
  Coding DNA Sequence Number=SeqID_26390
  Subcellular localization annotation: CTP_CleavageSite=2; ConfidenceScore=5.09e-01
MAAAMAGSPWPPGRALAARLALAARPPAWPPQPAWPRAPGRAPWPPARPRPRPCVLGRPAGRFNRP

SEQ ID NO: 69766 - protein, 77 aa, Zea mays
  Coding DNA Sequence Number=SeqID_26391
MGIWPAFWPKRPKPKFWLISKAAGDPDRASDNSLRPSSTDIQAPHPSKDGRAISPGAVLQLRQAIYARPSLLMPLLL

SEQ ID NO: 69767 - protein, 105 aa, Zea mays
  Coding DNA Sequence Number=SeqID_26392
MTVAAPWQLAHRTLSGAHRIVRCPLLTVGAGHASPADCATTVALAVVGSPDSPSAAAITPAVPSSVPRRRWSSAAPFAPPLRSPTVAPDHRRAIAAAEESPEPAL

SEQ ID NO: 69768 - protein, 72 aa, Zea mays
  Coding DNA Sequence Number=SeqID_26393
MIPGQNGNHGSWVKDGWFTNDDDDGYDYGNGKWYSFRLERVAFGAIYAQVKKKENGVEADLREFQDFDEFED

SEQ ID NO: 69769 - protein, 164 aa, Zea mays
  Coding DNA Sequence Number=SeqID_26394
MTKKASFRGHNKAHSLQGSSRALSGHQLQEAEAVGASEEDMGISPGNSTAYSVVRTRATLQEHARSPSRSKKRLPKQKRGKISRNRFYTLLRATLPVYQSTWVINLQLLLLRQDIHKLHGPSYHYHHHCHLLTPEASSQKGPSTPNNIVTLGISPKLVQSITLY

SEQ ID NO: 69770 - protein, 191 aa, Zea mays
  Coding DNA Sequence Number=SeqID_26395
MAPPHGVLTPSSWDARGGRKSCIRGLGVGTGVVGSQALASDPADEQVTEDSEVQQVEIAEQELIEGKLWGLVVSSTLFVPTRTEPATAASGLLGLIPRSDSGVFIAKLAATPSHPAEDCFGAGRGVCEQKAAHATAGESGLFRGQGEVPDVREGVRRVFEGQTDLVLAPGVGDCSPEQSFRRDSAYHRGRP

SEQ ID NO: 69771 - protein, 149 aa, Zea mays
  Coding DNA Sequence Number=SeqID_26396
MMDSVGRSWCSIDGSVGEESAWRATQAWGRAPVAAACTSGGYGQGSRVRATARCQLWRTGGSSVGESSGGGSYGERRRGESLGGRVRATTAVGEKDSGASDGEHGRRHEIDGDLLTPVGLVKRLTGISNSCRLGPEADEDNKFECSSAS

SEQ ID NO: 69772 - protein, 26 aa, Zea mays
  Coding DNA Sequence Number=SeqID_26397
MVLRKVVFKKVRRLSRELWWTKKEIG

SEQ ID NO: 69773 - protein, 350 aa, Zea mays
  Coding DNA Sequence Number=SeqID_26398
MEVRCQTSFCQNEDGFPKLLRACTVRLGIRSQPDYDGREFVEHGTEKCVVTVYIGSSPHHVEWSVTAAGHRFKDTCQVVARKALRALCQIYEEEVADTPLRFFPPFQRNRPVWMTRMRALEGQRLLEDDPTVVYLTAYLLTLDMIARAEDAEKLNRKLHVDLTIAQARATALESREVIVVEALKQAKDEHVQKLMEAYLVTHNQHRALRIQEPASSNPVQSVRAEDPQILEGQPVSIKGEKKAWELPEGAIVLEGIPVFPQAMDKQEHPESSQDPPPELFEPLTMKKIPAPSCEIKEEAASTPPAPPPSEELQEPVQLEEEFNPMLPSQSPPEEVINISSLLTHPGDVSD

SEQ ID NO: 69774 - protein, 132 aa, Zea mays
  Coding DNA Sequence Number=SeqID_26399
MVSSLLLLEGRVQGEGLRAAAVRVEEMRKDFGEEPIASDQHWWPPPVNSLPQQRKALSCRRRSQQQLVSWSLPWTPTKERKRLSEKHENRRGRRSVLHHKMKRSTEKSRTLKLSIIKWRNTKNMLRLSELHK

SEQ ID NO: 69775 - protein, 237 aa, Zea mays
  Coding DNA Sequence Number=SeqID_26400
MKHMGFACEHVTAGPHEAHRRCSLRRREQSTVDGCTVCDLEQRLGFLPDEPDVFLLLRHFHISYHCSLFTFFSFLPLHHGKNKKGGSSSHHSGDKRKREPTPPSEDFSDSEYSEEEFSSESEGSPTPASPPASSDDADDSQGIAVEVWTYIRAIEHAGLEGSDESEYSSDKENSSDLSEEGGGGDDGDGDDDGGDGDGGEGDGKGGDGGGKGGSGDGGDGSKGSSRGSSKGSNRASG

SEQ ID NO: 69776 - protein, 253 aa, Zea mays
  Coding DNA Sequence Number=SeqID_26401
MAYRRARSTRAGGRPKTGEGDLGLLEKFCRVRGLGKLHGPLAELTEALARLGGDWSGLATAAEALKAWRAVIGPTCQLHRSRPCHTGASATEPLSPRRLAIKARPTSATTPPLYPTRPLTPPPPRLPEPSQSTLAPFPPSRRARQCSSSPPPFSLSRAHIKGPARAPFPPHQLRPSPPLSPEPIELASPHSPVAPVSPALRSQVSFGQVKLVLELRHTITVTRHTSSPPIAPNYGTGDLTAVDTRHRAADLPP

SEQ ID NO: 69777 - protein, 52 aa, Zea mays
  Coding DNA Sequence Number=SeqID_26402
MEGKPSRKRKSELKRVSPPLAGVGEFICGREPKDKGSSSLISCEKQTIRIEF

SEQ ID NO: 69778 - protein, 303 aa, Zea mays
  Coding DNA Sequence Number=SeqID_26403
  Homolog annotation: Hit_ID=A2YL02; Match level="QueryCoverage=21%, HitCoverage=17%, E-value=7e-11, Identity=57%"; Hit description =Putative uncharacterized protein
MARPGTSCRPARQRPVSQPQTAQPSQTNEAVKNPAFLHRRITDEKRQPQQEERAPVRQLHHVLQLPPRSEVPDESIGDGGHAAARRAAAELHKSQELARVVRVLLEPPHGGPARLQVVEAEGGGDECPGRARRPSGEGQATATRLPLRRLVLQDPVLALMVEEGILRREWRRQNALMLEENERKERERRNEIIAEAEEFKRSFLDKRRLNCETNRTQNRDREKPMCHLHTRSRAPCSTVATAELGAIDLGAELGHVSARSICTRHRGEYLDAIIYGTEICGISSESSRAKGPAPSSIKREVYG

SEQ ID NO: 69779 - protein, 264 aa, Zea mays
  Coding DNA Sequence Number=SeqID_26404
MELTHLTPQHGDFHRIQSNRPLQGHRKATPRWVDLGSTETTVVVAGSRMLKEWGKERRKEVDSAAVSLSPPGDNDDTGRPSWSDARAVLTPQAPKGDPVLGHRELSDRHNVTRTLLWVRVTSLEEVPQFIVFSKAEGFFGDSWMVQCEIIQQNMLGGQPQDEDLVSEAPEDGQQLPLAFFCLGQPLPAAGLDLNFPLVLLGEDVQVQPEDNIQGEWDQWIVSVQPAPRIQQDIQPDEQQISNQHSSLSSDSSIGLNPGAPVLNG

SEQ ID NO: 69780 - protein, 133 aa, Zea mays
  Coding DNA Sequence Number=SeqID_26405
MGLKSQEVDGPLNQVDHQELEDALLPAAQPDWQPDPVFQMHMERKRTAQFYRLWANYFAPMGKPEISVKIPKKWSSFFMSNLLQPDSFNWSKSFLSSEIPPTLLEPELEALSFVIPKSCPNDKFLDNVLSEGP

SEQ ID NO: 69781 - protein, 82 aa, Zea mays
  Coding DNA Sequence Number=SeqID_26406
MWMCRIALMEEIVPKRWTKGQQKSESSTSVEVLQRIHDNREKVKEDEQLQQILARKDENPSLQREIREIKEQTRQEVLELRK

SEQ ID NO: 69782 - protein, 132 aa, Zea mays
  Coding DNA Sequence Number=SeqID_26407
MEILIPVIFVEEALLMKLSVLGPSVLLILSKMANFFRGFVYLPLQAVERSGLEGSDESEYSSGEEDSSDSSEEGGGGDGGDDNDDDDGGDGDDDDDGGDGGSRGSNGGSKGGNGGSRGGNGSSSKGSNRASG

SEQ ID NO: 69783 - protein, 402 aa, Zea mays
  Coding DNA Sequence Number=SeqID_26408
  Pfam annotation: Domain name=zf-CCHC; Domain location=116-133; Score =17.6; E_value=0.0033; Accession=PF00098.14; Description=Zinc knuckle
MEILSIHNNELTTKLENIGSTPAASLVEIPEIIKKDASTSCFDLIDDSNPCNQVLVKNVVVETCSDEVAKENEQLKQEVARLGKALYDKKGKAKQIRPPQDNTTAGVNKPVEGETVTCRLCHKKGHKSFQCKAMTGDKQRQKLKQKPSSKISNTYIKKVNKKDATSYLIKKKKNGKVIAIKANKQANKGKGAKRIWVPKEIISTMKSTKKVWIPKGNIILGIGYFLYDCLDCVTVFVYGASFCATDPSSPWCLLSLPACCTRARDLCGLSSSASSTATSTTTTRRTSPRQRLGALTLGYLDIIGIYGCSSRSICTAITLTHVLLAPNQKLSIMQLEGVLGAIVQSGVMDQKLSGWTGGTLDNIVQVEKQSNDVQIGAALDGIVTQDNLMEHLTPNVHAKYKW

SEQ ID NO: 69784 - protein, 202 aa, Zea mays
  Coding DNA Sequence Number=SeqID_26409
  Homolog annotation: Hit_ID=Q9FUH9; Match level="QueryCoverage=89%, HitCoverage=63%, E-value=4e-26, Identity=55%"; Hit description =Microtubule-binding protein TANGLED1
MAVCSVAGGEDIVPSQPPRQRRAMGQFQLGYSMGRWTNVVDGALMDEGGASAQKRSPSGKFGGVVGGEGTQWRRMLLPAMLLGETVLEIVRVRSRIQFKPVSSVTVGRPFVSANRVSPKNRPWVKKVVMFPNSMFHASTSAATDSCATSSPSKKQKWLYKTRSPVVAQQTPHKFLVKVTTECAGIQAQDAREGPTRETRRHP

SEQ ID NO: 69785 - protein, 115 aa, Zea mays
  Coding DNA Sequence Number=SeqID_26410
MYPKKLAGGCAGEWIVLGGISVEGDALEPWPLLGEPDAEVTLVLFSNGYHQGSGTSGGERGERRHGREGKKGKDDSHEKRWLMKMAMASVGRDWLPLPGLMVFAWIGPGLQTHVG

SEQ ID NO: 69786 - protein, 158 aa, Zea mays
  Coding DNA Sequence Number=SeqID_26411
MGNSKKGGSSSHHFGDKRKREPTPPSEDFGDSEYSEEEFSSEFEGSPAPTSPPASFDDSDDSQGIAAEVWTYVRAVERAGLEASDESEYSSDEENSSDSSEEGGGGDGGDGDYDGGDGDGGDDDGKSGDGGDKGGSGGGGSKAAAGAATRPMARCHWF

SEQ ID NO: 69787 - protein, 320 aa, Zea mays
  Coding DNA Sequence Number=SeqID_26412
  Homolog annotation: Hit_ID=A3A3U5; Match level="QueryCoverage=48%, HitCoverage=46%, E-value=1e-13, Identity=37%"; Hit description =Putative uncharacterized protein
MTAADGESCAVVATAADIICSLRGADLAGWTPPWRKHEAACDGVREEEGGGGDEARDLAWPAVARGKRSRSRRESPSASGSAASADAKKKKKARRGVRGSPASPLDYSGVSGSGASTSGGEDGAFCFQPEPAFPPAAACQLAEPAVLPPPPPPPSEVGGLAGRRTILPVPPPRPAGQRARKKMRLPEIQQMVRSLSVENDALRKTMKELQRACTALSQENGKLEWSAGPPAEIHFDTGAALVGPGDGTSTATAVHGKFLLMVPGGGTPLPFMTRLDQSTTLNEAVSVENKGKPQPQRQRAAEQEAPSGFVLPDLNLPADV

SEQ ID NO: 69788 - protein, 414 aa, Zea mays
  Coding DNA Sequence Number=SeqID_26413
  Gene Ontology: Mol. function=structural constituent of nuclear pore; Cellular component=nuclear pore; Biological process=transport
  Homolog annotation: Hit_ID=Q10R44; Match level="QueryCoverage=99%, HitCoverage=46%, E-value=1e-176, Identity=67%"; Hit description =Nucleoporin family protein, putative, expressed
MYLENILLLLTGRQLDTATEIAASRGDVRLAILLSQAGGSMSNRSDLAQTLDQRKMNGLDFDYIEEDWLKAAFLDLPIDWKRYLGLIMWYQLSPDTPLDIVIRSYDQLLDEGPLDEAPQWSPGDHFDISFYLMLLHANKDEKFGLLKTMFSAFSSSFDPLDYHFIWHQRSILEAVGAFSSNDLHLLDLSFVYQLLCFGRCHWAIYVILHMPYLDDAPYIHEKLIREVLSQYCESWSRDDAQRQYIVELGIPEEWMHEALALYHEYYGDKQGALENLIQCGNWKKAHTIFVTSVAHSMFLSFTSFVVILAQLTIRRSGGSQGSLEEMSESCRSFFGRLNESLLVWGSKLPVESRACYSKMAEELCALLVDTPSETLNLPMGCLLTMLNAPLPDKSRSSYLQDAPSVFTEILCSDP

SEQ ID NO: 69789 - protein, 67 aa, Zea mays; identical to SEQ ID NO: 64743
  Coding DNA Sequence Number=SeqID_26414
  Subcellular localization annotation: CTP_CleavageSite=55; ConfidenceScore=5.10e-01

SEQ ID NO: 69790 - protein, 127 aa, Zea mays
  Coding DNA Sequence Number=SeqID_26415
  Gene Ontology: Mol. function=carboxyl- or carbamoyltransferase activity; Cellular component=ornithine carbamoyltransferase complex; Biological process=amino acid metabolic process
  Homolog annotation: Hit_ID=Q8SA97; Match level="QueryCoverage=100%, HitCoverage=24%, E-value=1e-12, Identity=41%"; Hit description =Ornithine carbamoyltransferase
MAPPVDVAGLRPRLGDVEAPPRPRSSLSSEVEVESEPLGRARRSSSSSRAEPKSKPWVGRGGVRRLLGLSPSGAVLLPDRSVERRSDGGHFGSAGWGARVRIKLYADGGYQLRIRSLEGTPNYGPRQ

SEQ ID NO: 69791 - protein, 54 aa, Zea mays
  Coding DNA Sequence Number=SeqID_26416
MAAYNAQAQQAMNSWFPQQAQQQPFVFPQFQPPMPQWGLHAPPPPPPHQVIQFS

SEQ ID NO: 69792 - protein, 254 aa, Zea mays
  Coding DNA Sequence Number=SeqID_26417
MKRLLETTHLELDGKLFVNTQQAPTWRANCRRFDPGGSLDRRPWVGRGGGSSEVEVESVFRGRGRVRAPGRARRRPSAEARAESEPWGRARRSSSSSGAEAESEPWGRARRSSSSSGTEAESEPWGRARRSFLWRLRPYLDVVSLTLSSGTAVATAQAALSSHQAVDVAIWPRLLLGEDWASGEPKPAKIKSIGRRISPLSKEQQMVLIRKLGEQHNLEPPFGQLSGDLHETDELCVDGYKRASVQVLRCADRK

SEQ ID NO: 69793 - protein, 138 aa, Zea mays
  Coding DNA Sequence Number=SeqID_26418
  Subcellular localization annotation: CTP_CleavageSite=32; ConfidenceScore=5.07e-01
MPHPPAPPNPPQPPRRPLLDSGSSLSAPIAPPSAAGQEDARRVDCPLELRGEVGPNGFRRCGSGRGGGRRVRWQNCGRCGYEMLGWGGLRDAGMGEDDGGGVDPAAPWMGHSCEIRAWGVAARCWDGTGCEMRGCGEG

SEQ ID NO: 69794 - protein, 268 aa, Zea mays
  Coding DNA Sequence Number=SeqID_26419
MQAAWNRTKGAHPLDSYASSMEAHAHTSCNRRAGCYMQETAPPLAPQPCLLDCGTSTATRGNPAHDPTVPTRHIGHGSISRGRRRDGRYDQKWAGRTGKGDTPKGILLREGNGPRAPLLIRGSKAGPSEGFNSRLRALGLCAHYWSEVRRSAPRKGSTAASGHSGSASTTDQGFVGWPPKGSTAASDAERRMTLVKARSTQGTRSRLARAQPRARTADPGGFTSRPRAPSSNGHTFGSPKAQSSPRSNLGQIATPTDRIAGAFNARMA

SEQ ID NO: 69795 - protein, 51 aa, Zea mays
  Coding DNA Sequence Number=SeqID_26420
MTVNSNCLVHRYLGEDQQGLGKGQGVEEEQQGRCWDHASSPKVLRKENSFG

SEQ ID NO: 69796 - protein, 173 aa, Zea mays
  Coding DNA Sequence Number=SeqID_26421
  Subcellular localization annotation: CTP_CleavageSite=28; ConfidenceScore=5.35e-01
MELGFRFHSSVASRWGQRGFVGFRSGVPQSARTPLRSIKPGYLVHPSSIGTLVFDRAARAKRRHRQERGRSSIGPWGGDARSRGHLLMLVDVSLDLAYRWEASNWSSESPPPRQSPPTVAVCLRAIIVGKKSSYVFTFAFSSRRTRGIRVCVAVCGGGRSGHGAPPLRVLTLP

SEQ ID NO: 69797 - protein, 166 aa, Zea mays
  Coding DNA Sequence Number=SeqID_26422
MTKDFTMTAELPPYEDMVDSLPLLVSCLPEESFIPLVGVQVLDLFPSIVLRSNPFSFAKATDFSSHLRYLRLQVKLPYTLLWSKEPAGGPGPHPRGLQVPDIPFYIKWIHLCPGPHKDLDPIGGLQTPGWTPSCNRSVNHQEGPQGVGHLFSNVVIKEQGNTIVKY

SEQ ID NO: 69798 - protein, 125 aa, Zea mays
  Coding DNA Sequence Number=SeqID_26423
MKEVDDDHALITDCLKCLRLKVDETCYAKVVAESFIAAEGLLPTGPTDPTTGPSFLHPASDCECFEHAYGGTFPRSLWLLRCIYVTPPFSGGNHCQPLCIRPSSTAISQENVKAFLQSIGLLVLV

SEQ ID NO: 69799 - protein, 50 aa, Zea mays
  Coding DNA Sequence Number=SeqID_26424
MGTPLADSLPSAVRQTLGKGSKDLNLSPKHFQDLGHQAEAKSERATRPNL

SEQ ID NO: 69800 - protein, 309 aa, Zea mays
  Coding DNA Sequence Number=SeqID_26425
MGSARGSSVLSSSEERNFAEVGSPAASPCRWSPKKVTTNLMVGRSKPGCDLCPALSFKDLHHPCWGGERGESELYLPHGSAGHLFFQLLGVETILQLCGGGALQPCRGRRTVAAQPGCNIPSSVLPFTAKTVVRTYRCALGRSALAGAVLADRREPSGSSVRPGTIAAAAEVAGESPGESLGSVGLAARGCSCLVKGTFGRSAMSWSQRQRCQHRQRQSWLEKKLRRPEPGRAIHWRDRRRSWVAEATSRADVLGGQLAVATERPVDPSARAGFPEETPATMAQAWCQQVPSRWRSSDCVAVRGRVGFR

SEQ ID NO: 69801 - protein, 485 aa, Zea mays
  Coding DNA Sequence Number=SeqID_26426
  Homolog annotation: Hit_ID=Q6J9V9; Match level="QueryCoverage=17%, HitCoverage=31%, E-value=3e-11, Identity=50%"; Hit description =Putative uncharacterized protein
  Subcellular localization annotation: CTP_CleavageSite=22; ConfidenceScore=5.14e-01
MLQGPPPKTRGLGPTRHASWPRAEEAKPPRTVRVTAQRLQALLPFRPDQRVKGRTFMQAACNHTKGAHPFDSNASSVEAEAHTSCNRRASYYVREAAPPLAPVLRLLDCGTSAATRGDPAHDPTVPTEHIDHGSVSHGRRRDGQYGQKWADRNGGGRRAEAAVKLSAGSRPLLGQRESPLPRCQDDAPGRRHLWQAKQATLHLRHNDHVKKETGKGDTPKAILLREGSGPRAPLLIRGSKAGPSEGFDSRLRALGPRALLVIRGSKAGPSEGFDSRLRALGLRAHHWSEVRRLAPRMGSTAASSHSGSAPTTDQGFVGWPPKGSTAASEHAERGMTLGTSDTWPRLGLRSRGTLGHFRDQQERFCNGIPSEGASSPRTLSNGTGSGKSPKTVSASPDLGLGLSIDPGRQTPPRLTPGLGLSLNPERRTPPRPTPGLGLSLDIGRRTSPRPTPGLRLDLDLGGAFASPYLGLGPAMSQGRPSLPYP

SEQ ID NO: 69802 - protein, 175 aa, Zea mays
  Coding DNA Sequence Number=SeqID_26427
  Homolog annotation: Hit_ID=Q7G2G8; Match level="QueryCoverage=37%, HitCoverage=9%, E-value=2e-08, Identity=55%"; Hit description=KH domain containing protein, expressed
MSAVAVAAAAAALAGAEATAAAGLAVNQHRQPGKSYATGATDPCSLQYSSVVHSRYFHLKVFGQVFPWICKHEHVQKIAQVFGQVYSKADKPKYNLLVMNLCSFQVAGPPAIARGALTEIASRLRTRTLRDTSTANNPPPFASSDDPPGILNTVYMNILLASPLLKAILKDATAV

SEQ ID NO: 69803 - protein, 159 aa, Zea mays
  Coding DNA Sequence Number=SeqID_26428
  Subcellular localization annotation: CTP_CleavageSite=39; ConfidenceScore=5.10e-01
GYADRYSRQPWWRLTSAHGGATSPYRTAISIRIDLLSPSASMVRVPRVTHFNSTAAAVGKALPSLSLVREHCLAPPHSATGRHEDASAGHCCDLFQMVIHVFPFRSDGVYGIQVAAHVQVQCAGVIVRLQLEDDLLIQEGCSVRAQEERYKIVTVMAVL

SEQ ID NO: 69804 - protein, 258 aa, Zea mays
  Coding DNA Sequence Number=SeqID_26429
  Gene Ontology: Mol. function=pyridoxal phosphate binding; Cellular component=mitochondrial outer membrane; Biological process=electron transport
  Homolog annotation: Hit_ID=Q0MRQ7; Match level="QueryCoverage=85%, HitCoverage=68%, E-value=1e-107, Identity=83%"; Hit description =Molybdenum cofactor sulfurase-like protein 1
  Pfam annotation: Domain name=MOSC; Domain location=100-246; Score =84.4; E_value=3.6e-22; Accession=PF03473.8; Description=MOSC domain
  Pfam annotation: Domain name=MOSC_N; Domain location=1-87; Score= -12.1; E_value=0.002; Accession=PF03476.7; Description=MOSC N -terminal beta barrel domain
  Pfam module annotation: Pfam domain module=MOSC::MOSC_N; Domain location=100-246::1-87
MASTASALRMCTLFFMFMFQRTLKDTMFIHSSQNRAVIRAPGMDTLKIPLITEHTTIDDVSVWEWSGSAYDEGAEASEWFSTYFGKPSRLVRFKEASETRPTDPDYAQGYKIMFTDCFPFLIASQGSLDALNEILKEPVPMNRFRPNILVDGCHPYSEDLWKTIKINNLTFLGVKLCNRCKVPTINQEDGVPGTEPTETLQTFRSDQVLRPSHKNKRQVYFGQNLVCKESLSGEGKVIKVGDPVYVVQAFASSNEAPA

SEQ ID NO: 69805 - protein, 242 aa, Zea mays
  Coding DNA Sequence Number=SeqID_26430
  Gene Ontology: Mol. function=pyridoxal phosphate binding; Cellular component=mitochondrial outer membrane; Biological process=electron transport
  Homolog annotation: Hit_ID=Q0MRQ7; Match level="QueryCoverage=100%, HitCoverage=70%, E-value=2e-88, Identity=65%"; Hit description =Molybdenum cofactor sulfurase-like protein 1
  Pfam annotation: Domain name=MOSC; Domain location=95-223; Score =61.5; E_value=2.9e-15; Accession=PF03473.8; Description=MOSC domain
  Pfam annotation: Domain name=MOSC_N; Domain location=12-82; Score= -21.8; E_value=0.016; Accession=PF03476.7; Description=MOSC N -terminal beta barrel domain
  Pfam module annotation: Pfam domain module=MOSC::MOSC_N; Domain location=95-223::12-82
MPPEAFAEDWHPTPDDHMGIVRWIADRFSESVIRAPGMEPLKVPLSVECATISDVSVWEWTGAAYDEGAEAAEWFSTFLGCPTRLVRFNEDSETRLTDPDYARGYKTMFSDGFPYLIVSQGSLDALNEILKEPIPINRFRPNILVEGCHPYAEDMWKSVKINKLTFQGVKLCGRCKVPTINQDTGIPSPTEPTETLQTYRSGEVLLRSHKNKRQVYFGQNAVCKESLSANGEGRIVKVGDPV

SEQ ID NO: 69806 - protein, 128 aa, Zea mays
  Coding DNA Sequence Number=SeqID_26431
  Subcellular localization annotation: CTP_CleavageSite=47; ConfidenceScore=5.21e-01
VAAVSTTAQSHLLNTIFTKPSPAILERPVLHPSEGVTTPATTLSTIPAAPARRIKQRHGFNLSTEFQDWFKKPLTVEMGTALDALFNLDTPDTVRLDKALLGIAGDAIAEIQEEVDAMHAEARAVTAA

SEQ ID NO: 69807 - protein, 222 aa, Zea mays
  Coding DNA Sequence Number=SeqID_26432
MEGSWVIRTSYCSEEEGFPHLLRSCALRMGIRKKPEYVWKEYRENGIENNKNTPTWRKRLQALSGTDPTEDDPTIVYMDGYLHTLDNHYDDLSSHYTHLNSRVESLEQQVKELKKEKASLQECLDIAEGEEANTREAYRTLKMDYDNKLKKLAPTKKIQKKTKNQGGQAERRKKAPPAPTPARIENLSDIEDMSLASLDDILKEFGDTLEKEFGGTSKNARV

SEQ ID NO: 69808 - protein, 36 aa, Zea mays
  Coding DNA Sequence Number=SeqID_26433
MGSRHSACSAEAGCRGKEEGVETNLQEFQDFDEFED

SEQ ID NO: 69809 - protein, 115 aa, Zea mays
  Coding DNA Sequence Number=SeqID_26434
  Gene Ontology: Mol. function=pyridoxal phosphate binding; Cellular component=mitochondrial inner membrane
  Homolog annotation: Hit_ID=Q0MRQ7; Match level="QueryCoverage=69%, HitCoverage=24%, E-value=2e-34, Identity=83%"; Hit description =Molybdenum cofactor sulfurase-like protein 1
  Pfam annotation: Domain name=MOSC_N; Domain location=22-102; Score =79.3; E_value=1.3e-20; Accession=PF03476.7; Description=MOSC N -terminal beta barrel domain
MAMEKAASFLSSLLGGGGGEPAATVKSIFIYPIKSCRGLAVSQAPITSTGFRWDRQWVVVNAKGRAYTQRVEPKLALVQVELPPEAFAENWQPTPDDHLGMPGFIHLIILSATFC

SEQ ID NO: 69810 - protein, 283 aa, Zea mays
  Coding DNA Sequence Number=SeqID_26435
MHRALPPSEPPDGERPRSFRLVVVGGTQLHGSWYLLAIARLQGFSSGSPAASPRRWSPKAVTTSSMVGRSEPGCDLCPSLSFKDVHHPGWGRGRTEPKLYLLRGFVGHLLPQHSGERALTGLAGGSDFDNAGLLALARLPVPPPAARAVVAPRAPEDRPRRRALLGRRSCSWAVLPLLRYGASARRSVFARPGGSEWGSAGGQMASVVGAEVVAAEEVLVAGGITTTIRAPGLRLFGFDNLSSPLEWGRGRGPCCSSVRPEAIAAAVWPPGAEVVVAAAGAGG

SEQ ID NO: 69811 - protein, 226 aa, Zea mays
  Coding DNA Sequence Number=SeqID_26436
  Gene Ontology: Mol. function=protein dimerization activity
  Homolog annotation: Hit_ID=Q2R220; Match level="QueryCoverage=58%, HitCoverage=37%, E-value=3e-30, Identity=44%"; Hit description=F-box domain containing protein, expressed
MATAAPGVCAAARDRAGTQTNLFERSRLPGIRNVDLLWSLLLSRILPKLLGLPGILLKKFRKEASRKNRSYKLTLPEPPIRSRLLIGSSNGWLITADERSELHLVNPITGEQTPPDLFDLGDLRDELYFKAFVFPDPSTTGSYIVVLIHEPYSRLSFARPGDDKWTWVGQVNYSGEIDAFDFTASPVKMTVIMKELKYPIIKSKKQIVVLFDMWKQVKLLCGSRNS

SEQ ID NO: 69812 - protein, 262 aa, Zea mays
  Coding DNA Sequence Number=SeqID_26437
MARRSLRIGRTTSWISGCPTRWCIRDPGTRFISLASLLLALLATISIILRRRGENRGCRGGTSASRHPRLQCGPQSLPSVAGRALVASPPGIVAGDFTNWSPDLSYHDRAAAQRGRTSSELNLRYGYHFPTRRLSLSVSHKVALGLGLLEEAPDTIILTTSSQEREQGHGGYLVAEELGPMRHKSGGFNKANPMPGKAYGARRRAEAPGSSGRTKGRGGEGQGRWYWWAQDSPWLLMAGGHMRTPLRGLRKPLHFEDYGNRC

SEQ ID NO: 69813 - protein, 78 aa, Zea mays
  Coding DNA Sequence Number=SeqID_26438
  Gene Ontology: Mol. function=sodium ion transmembrane transporter activity; Cellular component=1-2nm peptidoglycan-based cell wall; Biological process=pantothenate transport
  Homolog annotation: Hit_ID=P16256; Match level="QueryCoverage=97%, HitCoverage=15%, E-value=7e-36, Identity=100%"; Hit description =Sodium/pantothenate symporter
MTMQLEVILPLVAYLVVVFGISVYAMRKRSTGTFLNEYFLGSRSMGGIVLAMTLTATYISASSFIGGPGAAYKYGLGW

SEQ ID NO: 69814 - protein, 79 aa, Zea mays
  Coding DNA Sequence Number=SeqID_26439
MANSTFRSGGIPGKSFGNTSGNSDTTLILSIGLGQEDEVPADSASETDLMTDCSDGSGTDAEDTAFGTADVAEVDVGSA

SEQ ID NO: 69815 - protein, 182 aa, Zea mays
  Coding DNA Sequence Number=SeqID_26440
  Subcellular localization annotation: CTP_CleavageSite=77; ConfidenceScore=5.05e-01
MDALLQLLTRQPGAQAHASSNWRASCCMQATAPPLVPPSRLFGCEAYATTRGDPTAPDWRVGQSDRKWAGSNSGGRRAGAAEERATLHLRLNNRVRKGTGEGGYPERDPSPRRNRAPRPPLLIRGSKAGPPRVQQPPQIAWARHPLLVRGSKAGPPKGSTAASGYSGSAPITDQGFEGWPPK

SEQ ID NO: 69816 - protein, 86 aa, Zea mays
  Coding DNA Sequence Number=SeqID_26441
METSLGWGGARLGVGRYAEGNRMASRGLRSSIGGNAPWEHRELEGSSHQRERGVGACSRQRREGEKRGPSGKGETKLELATAEDGA

SEQ ID NO: 69817 - protein, 104 aa, Zea mays
  Coding DNA Sequence Number=SeqID_26442
EPVIRRLPSMRCSCSRSTGAEDTIESIALHGLTTFCGFHPLELSTHPISLFPAEKEDDPMWKDRVEHAKDVWALYPGQTAHLTVREDLVVDLSTELVEKDLQVE

SEQ ID NO: 69818 - protein, 74 aa, Zea mays
  Coding DNA Sequence Number=SeqID_26443
MRRLVDAIEGPGSLLARHFEAEVVPPSPLPTTAAMPPELATPVGPHDPGGIGNRGRPVKSLPEGIAAWCPQAPE

SEQ ID NO: 69819 - protein, 423 aa, Zea mays
  Coding DNA Sequence Number=SeqID_26444
  Homolog annotation: Hit_ID=Q8S473; Match level="QueryCoverage=79%, HitCoverage=45%, E-value=3e-10, Identity=25%"; Hit description =Putative RIRE2 orf3
MEWGLPRELQTHLKPLLDALRRLRDRGLTTAGVVAVFYRWRVLLLTEPSREARWLAAEEKKKKDKEKKRAHKKMLARDALEKHHWVRAREGLPLEASPSTGDDDEERVTAPSPMFVAGRRGLRSWWPRLVAVPLSGSKRQAHASSFNATKVVQRGARHLRGLRPAPHSAQETTQKGTEVVQPAFGPPAEPDTIATEVVPARPAPLMVAIPVSSGEEAEAGDTAQGVASPTFSDLLCAIPDTPEAAPRSGGSGDLARATPDLSLWRGLTLNWMSIEGGPYFVLDDVEEREMWAELRTMTHEVMTKSMAKFVFNRRERGIWSSKVADLTSRCVGLKDEAVAERAKVAVTEGGESRRQVAEASLRVDTLSKHQEAERSEGRALRAQMGGLEKDLETAAQTSRTLSQTMELKVVELKEMSDAVAEIL

SEQ ID NO: 69820 - protein, 110 aa, Zea mays
  Coding DNA Sequence Number=SeqID_26445
MALWDKRSTLTGEQCRDRVRAQKSEGTGLSGVAPDCPVQLEDKNSNGRPAPNPNSCADVARTGQCTVVVRWRTRQFVVPSCDMVELQAEELVFEAPNFFAVDFHSCVVAV

SEQ ID NO: 69821 - protein, 86 aa, Zea mays
  Coding DNA Sequence Number=SeqID_26446
MAQAAYQMRLVQVLIYTLGTPRIGGSRLSLSVAILAKGRYLRIHDKNIHDEKSMIVTKVSVTPKLRARELRLIRGKRNRLKGEKAI

SEQ ID NO: 69822 - protein, 165 aa, Zea mays
  Coding DNA Sequence Number=SeqID_26447
MGAIRARESSGMEDRDELQGTSQLGTGIQARGARQRRRKEERARARRAGAEGREDGHAVELSAGKHPRRAAQRRNSARRGASQRAPVSRGCRLRANPRARPWEERQGETPDAMGTSLGWEELGWALGATQRETGWPAEDSGRALEETRHGSTGSWRGRASRGSEQ

SEQ ID NO: 69823 - protein, 84 aa, Zea mays
  Coding DNA Sequence Number=SeqID_26448
MRAVSQRLVAHRTLVSGVHRTVRSPKPFAFEILHRERANKVFVKRPHATARDLLGEPCRVYVIGPDASTLSTLLILAYAIYQYV

SEQ ID NO: 69824 - protein, 292 aa, Zea mays
  Coding DNA Sequence Number=SeqID_26449
MQVACNRTVEAHPFGFVASSMEAQTHTSCNRRAGYYVQETAPPLVPMPRLLDCRTSAATRGNPAHGPTVPIEHIDYGSVSRGRRRDGQYGQKWTGSNGGSRGAEAAGKRRLWQAKRALFHLRHDDHVKKGTGKGDISKGILLREGSGPRALLLIRGSKASPSEGSDFVMESHQREASSPRTLSNGSGSGKSPAETDGHDSGQGFVYSRDAISPRPSPASGGNSSPRPILASPEGFLKQRAHPRLARTPARASFVVKQPWPNCLTNRPYRRRIQCEDRLTPYPNTRASVGKVE

SEQ ID NO: 69825 - protein, 112 aa, Zea mays
  Coding DNA Sequence Number=SeqID_26450
MHRALPPSEPPDGERPRRRRPPAMRGKANYCFLDRVQLSVLQEVASAEAVAPADETVSATCTSGLRLFGFNGWFSSPVRGRERGPSSGSVRPGAIAAAVLPSETEVIVVLLM

SEQ ID NO: 69826 - protein, 345 aa, Zea mays
  Coding DNA Sequence Number=SeqID_26451
MADTDRGSHGREVMVKFPVIPSRLAKIQMFSPLWSTGYAFTASSREVVALEVAFLGAIARLLCRSMNGNLTRRWVSKYCYTPGYLLHPRNIPPYEVIIVVGYRQGFVYSRDAISPRWSPASGGNSSPRRILASPEGLLKQRAHPRLARTLARVGFVMKQPWPNRLTNRPYRRRIQCEDRLTPYPDKRASVGKVEPQEEVSASPDPRARPPPRPRKVVSASPDPRARPQPWPRKVVTTSPDPKARPQPRPREESLWGNKTGVPSRLAPVTSNDGSPRASMTMLVLSPYRRKETLARSQQPRQLCFYRAQALLRRPRYRGPPGVETPTVGVPGRGLLRVDEQLLKVA

SEQ ID NO: 69827 - protein, 292 aa, Zea mays
  Coding DNA Sequence Number=SeqID_26452
AGVLISGEESGLSRAKLINQTGQGASLGAREDMGARNLTMAYRRARSTRAGGRPKTGEGDLGLLEKFCRVRGLGKLHGPLAELTEALARLGGDWSGLATAAEALKAWRAVIGPTCQLHRSRPCHTGASATEPLSPRRLAIKARPTSATTPPLYPTRPLTPPPPRLPEPSQSTLAPFPPSRRARQCSSSPPPFSLSRAHIKGPARAPFPPHQLRPSPPLSPEPIELASPHSPVAPVSPALRSQVSFGQVKLVLELRHTITVTRHTSSPPIAPNYGTGDLTAVDTRHRAADLPP

SEQ ID NO: 69828 - protein, 192 aa, Zea mays
  Coding DNA Sequence Number=SeqID_26453
MRGDAGAEVALSGPQDPPATVEAMPLGSQVPARGLEAAMPPTATADPTVVIPSNIPSAALKETETAILREWEALETEHQRLVDWCTQLEECTKATSCKFTSERTELEREREDFKEDLRKVSDRDQEVTRKEIGLVKKKEHLDQMEEEKDLAFKEEMWERRNKLLVEFELEAEEKEKRLEGKEWALEEQVRRF

SEQ ID NO: 69829 - protein, 43 aa, Zea mays
  Coding DNA Sequence Number=SeqID_26454
MSLPSQRPSSLRHATPSAVQQEVQHLPLVSPSDVLNVYGYGSG

SEQ ID NO: 69830 - protein, 49 aa, Zea mays
  Coding DNA Sequence Number=SeqID_26455
MAKSFIIALEGPALTCHCVRDPPKNLQELYQLFEKYARSKELHQRKVES

SEQ ID NO: 69831 - protein, 80 aa, Zea mays
  Coding DNA Sequence Number=SeqID_26456
MKTWVTALHVAFPVNKKGLIRKWLVLAQVLELGDMPPRTGKIARKSTGPIGVPWHQLAPRHEESSIGNNDPIGDLEAQVE

SEQ ID NO: 69832 - protein, 314 aa, Zea mays
  Coding DNA Sequence Number=SeqID_26457
  Subcellular localization annotation: CTP_CleavageSite=59; ConfidenceScore=5.06e-01
MRGPRGKDVFARAPGVFGADAGGSGEGQLVVVPPAVATTASTAVLGVKGSPFSAGGEISAATAVKDEAGTVSRWLREASQQLSQQLSQAADFADRVASGALTADVSAEVERLRAQHADAIQEKSAADSKCHKLAEKVAALEGERTDLRRQLVEERREANQAIAKAQAAQAEAKLARVEGSLASQRAEEWEVRFNALQARMERAEASTRSEVERTGKQLVDSYASVAWTADLEGAMNALSREGCSHYEGFDRSDEDFGREIFKVEDPVVKDSAGALFDRMWGPYGREVVRERSDRARDQMARAEDVEDFRPLKSA

SEQ ID NO: 69833 - protein, 50 aa, Zea mays
  Coding DNA Sequence Number=SeqID_26458
MLDEAAGWDDLVIGLRPATCGTKARLAKASSEGWRLRLRPNICPPRDQFD

SEQ ID NO: 69834 - protein, 236 aa, Zea mays
  Coding DNA Sequence Number=SeqID_26459
  Gene Ontology: Mol. function=protein dimerization activity; Cellular component=nucleus; Biological process=regulation of transcription, DNA-dependent
  Homolog annotation: Hit_ID=A2WTQ5; Match level="QueryCoverage=61%, HitCoverage=52%, E-value=1e-63, Identity=83%"; Hit description=Auxin- responsive protein IAA5
  Pfam annotation: Domain name=AUX_IAA; Domain location=2-156; Score =164.7; E_value=2.4e-46; Accession=PF02309.7; Description=AUXIAA family
MQCALDPCRAQVVGWPPVRNYRKNTLAAATASRSKAPTEEAASGAGPMYVKVSMDGAPYLRKVDIKMYSSYEDLSLALEKMFSCFIAGQSGLHKSSSKDRLTNGSKVDALKDQEYVLTYEDKDADWMLVGDLPWDYFTSICRKLKIMRGSDAATAVICGHGVGTTADSDLCTFCGFPMCRPCYEYNRKDDTQACPQCKTNKRHQVLSYIARKSRKSEICWLQRFTKDNNQRCYSHC

SEQ ID NO: 69835 - protein, 54 aa, Zea mays
  Coding DNA Sequence Number=SeqID_26460
MQGLLQWAGSHMGLHVGRGRGMGRPRHRPLSGDAWDEGEAGEGIERRVASSPSP

SEQ ID NO: 69836 - protein, 147 aa, Zea mays
  Coding DNA Sequence Number=SeqID_26461
MEAKRIVSIQSRSAVRLVKEDQKALKKQKIVSEQKISAPKKWKLVKISSEKTMVQDVPKQTMSPSSSSVAEVSKILKSLLLSKALKMQQDDEDRKNEIVVKGFEDKIKKLEDSLKEKDDLLHSTEGSLVLGSSSPPKVLKTKTPLAR

SEQ ID NO: 69837 - protein, 57 aa, Zea mays; identical to SEQ ID NO: 66588
  Coding DNA Sequence Number=SeqID_26462

SEQ ID NO: 69838 - protein, 46 aa, Zea mays
  Coding DNA Sequence Number=SeqID_26463
MAVMGSTSEKMYLCQVRKQQIFVAFVPRWCQMKKNKNEAAGGPSPP

SEQ ID NO: 69839 - protein, 136 aa, Zea mays
  Coding DNA Sequence Number=SeqID_26464
  Subcellular localization annotation: CTP_CleavageSite=54; ConfidenceScore=5.11e-01
MGHRCKSLIIVNTLSPLKTSGHKTSFISLNRHIRFGFNLEDPFARDRYNTSSCNSATVMKMIPLIKNNMRVIIVSTSISNRFIIRTGRGSRARTMNPHRSMHEHQGKKAEQEYPLKSKTGRKYQINIHHQNQNERF

SEQ ID NO: 69840 - protein, 677 aa, Zea mays
  Coding DNA Sequence Number=SeqID_26465
  Gene Ontology: Mol. function=histone-lysine N-methyltransferase activity; Cellular component=nucleus; Biological process=chromatin modification
  Homolog annotation: Hit_ID=A2XZC4; Match level="QueryCoverage=94%, HitCoverage=98%, E-value=1e-174, Identity=47%"; Hit description =Putative uncharacterized protein
  Pfam annotation: Domain name=Pre-SET; Domain location=337-486; Score =13.3; E_value=3e-05; Accession=PF05033.7; Description=Pre-SET motif
  Pfam annotation: Domain name=SET; Domain location=488-619; Score =119.5; E_value=9.8e-33; Accession=PF00856.19; Description=SET domain
  Pfam module annotation: Pfam domain module=Pre-SET::SET; Domain location=337-486::488-619
MGSNTERARKALGAMKLIGFSKKQAIPVLKELLKIFNNNWEPIEDESYRALADAILDRQDSKQTPPSQQGTQAAHADLEPLRSTRDDRQQYLSASLDDTCEDDNETPLVKRPRMGTANFRPELQPPQQSSVSTQGALPASPQTSRRQTRSLTVEPHAAGHEYPLAVNDALVVKEPKPEPQIDRAEDFVAGPNATQLNDGSSDSEQTSGFGARGNIVHQAQSLGRSLQAAAVCKNGVGSTVQNTHETSIVEVDVASSANGELGTMHSEVNRDSGSLHNEVVVPFVKPISCEAAVGISDDVAGGSSVLESSEPCLQNSLVAWNPELAHCNQKTTHDTTDISKGEERVRIPVVNEFGSETCPPSFYYIPRNLVFQNAYVNISISRICDEDCCADCSGNCLSAPVPCSCARITGGEFSYTLEGLLKTAFLDECTSVNHFLQEHHRFYCPVCPLERSKNEGSPGPCKGHIVRKFIKECWSKCGCGMQCGNRVIQRGITCKLQVFFTREGKGWGVRTVEDLPRGAFVCEYVGEILTSAELHERAIENARNGVVLRDEDACSLDGSFYGNVGRFINHRCYNANLVQIPVEVETPDHHYHHLAFFTNKKVEAFEELTWDYGIDFDDMEGPSKPFRCMCGSRYCRDPNNPSMLPFSVLPLDVNGEPCMYDGLFLAGRMGRAAAKRK

SEQ ID NO: 69841 - protein, 362 aa, Zea mays
  Coding DNA Sequence Number=SeqID_26466
MTCTEKGQEHDRLALDPRRRALVGSRLRPSLPSLPESTVTLDKESSANSTSTKASLPSTFSRALGTDFTECQTVLGKEKRPSRRRVTEMTSLSSVLGDTRQRSYLCRVSSNTLGTEVTSLLSAYQPALDKESISGSLLSGSLPSDLYGTRQSVPLCRVPGQPHSAKKLYRCLGLGSLPSAIVLTLATIVSSLPPSRSSFAAVASSSAAVAALPPPSSRLRAHLRRPYPHQPSRIPTAVASAAIIVDPDRCPSAVAETVQICGRPRGSRLLPVRRRGSRPFPHLPRADLGRSRPFPPLPRAAALRRPHLPAVPSRDFFHPRQSSSVVRTCLLRPVAVLSRRPPAARHKQSLQRRRFVQLPSTR

SEQ ID NO: 69842 - protein, 266 aa, Zea mays
  Coding DNA Sequence Number=SeqID_26467
  Gene Ontology: Mol. function=nucleic acid binding; Biological process= DNA integration
  Homolog annotation: Hit_ID=A2WP36; Match level="QueryCoverage=52%, HitCoverage=65%, E-value=2e-49, Identity=71%"; Hit description =Putative uncharacterized protein
MAAMVNNVKPYMIMSLSKFKTAKAIWSHLKERFVQDSGALLHTLMQQTHVIEQNDMSIDEYYSAFDRLMSALTSMVPACTADPCPAHKFIEKFFTYRFVMGVRAEFDSLRARLLQGSDTLTMAKAFVLAAAQKPKNVFKPCDHCGKTNHRSELCFVKFPEKLTDFRARRAARGRGPGPSTRGLVAIAATSSTCTFESAWVLDLGVSFYVTSDQSKLASTTPVTDCALVQTADGTVCHITHKGSLCDPHFIVVGSRTPARGGVNRRF

SEQ ID NO: 69843 - protein, 110 aa, Zea mays
  Coding DNA Sequence Number=SeqID_26468
MARVNHVVIDEIRLGEWVGEGPISCPPLGSAGHCPVRPVCKLAGASPRSPSSRTWRENEEEIEVTEEKTSPPPSESQAGNCFYLDICGFEPDSPINEGKPRCICHLPLCF

SEQ ID NO: 69844 - protein, 119 aa, Zea mays
  Coding DNA Sequence Number=SeqID_26469
MAVMGSTSEKMYLCQDRLDIGLLTEDPLTGHMPRHGHIAIPYMKKFMYCIRNCTPAYLQILSGQKPDLLTKREKLLVVNWTFSDAVQDPIAGCSRNLQWEGVHPKSTSCSSHACRVKVA

SEQ ID NO: 69845 - protein, 150 aa, Zea mays
  Coding DNA Sequence Number=SeqID_26470
MCTGHFAECNTRQRTSLPSVRTISLGKELRPGHRYRFFAECNGSGTRQRSTLCRVPYQALGKVPDMGTSLADSLPSAVRQTLVKGKLLCRVSSVTLDKDAVSVTLCRNGCFSLMRVHNTQQTLRRMFEKNNWKEGFPMTELRFSLRSGYQ

SEQ ID NO: 69846 - protein, 140 aa, Zea mays
  Coding DNA Sequence Number=SeqID_26471
MGKNNKRKREPTPPSEEFGDSEYSEEEFSSEPEGSPAPVSPPASSDDSDDSQGIAAEVWTYIRAVERAGLEGSDESEYSSDEEDSDGGDEGEDDDDDDDDDDDDGDGSSRGGGDGSRDSTKGGSRGSTKGGGGGRGRASG

SEQ ID NO: 69847 - protein, 506 aa, Zea mays
  Coding DNA Sequence Number=SeqID_26472
  Gene Ontology: Mol. function=inositol or phosphatidylinositol phosphatase activity; Cellular component=cytoplasm; Biological process=abscisic acid mediated signaling
  Homolog annotation: Hit_ID=Q338A2; Match level="QueryCoverage=95%, HitCoverage=97%, E-value=1e-177, Identity=61%"; Hit description=Type I inositol-1,4,5-trisphosphate 5-phosphatase CVP2, putative, expressed
  Pfam annotation: Domain name=Exo_endo_phos; Domain location=26-458; Score=72.6; E_value=1.3e-18; Accession=PF03372.14; Description =EndonucleaseExonucleasephosphatase family
  Subcellular localization annotation: CTP_CleavageSite=77; ConfidenceScore=5.10e-01
MRDGGGGGGSSKTSKLSWSKSLVRKWFNIRGKSQDFHADAAAVGTGSVRSGRGDGDWMDGSFTRRDSYGAKKSRTERASRRSHERSRRSKIDLDAAEATVMLDYRFQEIVPLNAGNVLGAEDNGPARKWVSLVRRTLNSLPGSSGSGSLQTPSPAPYLVAEMDADFERSTTQNNPSFFHRRSFHSGLSRSMRVDGDLLAGPGPGPARLERRYSVNDRVMYGSRPSDYEANCQWGAGQLVDEDDGGGGESPVTVFSPMSHGYGNAPPPMEECNGSARGLARYCLVASKQMVGLFLMIWARKEMKNDIRNLKVSCVGRGLMGYLGNKGSISISMALHQTSFCFVCSHLTSGQKDGDEHRRNSDVLEILKKTRFPRVCGHRIIWLGDLNYRIALSYRSVKALVEMRNWKALLEKDQLAKEKLATRLSRCDRILWYGRGLSQLSYVRGESRFSDHRPVYSMFIAEVESINHSQIQKMSSWSSQLDIEELLPYSYGYTEIDHYGYTDLNFY

SEQ ID NO: 69848 - protein, 234 aa, Zea mays
  Coding DNA Sequence Number=SeqID_26473
MEKLAVYSQKTARSGCTGLSGGAPDSVRCARLASVNWLLLGLRRRCTAINHWTARWCTGLSGEPTVGPANGRPRNPRATRGRANGQKGAPDCPVCVRRGHRTVRCALDNVRCANGFETPTVGFAKEGKKSAPDCPVRQVTEGKNCLPGMLSTAPSCLGAIKGTPRHMEEYTKHSLSIFDHSHFILAHLFDILSDLSSVLGERLQVVEIPRKWEKSKVKKNTVVFKLIIGSLERS

SEQ ID NO: 69849 - protein, 78 aa, Zea mays
  Coding DNA Sequence Number=SeqID_26474
MANGESEGHTARGRGRADCVADVVEDWWDTCLEHGRQVWSTILMELSVVEPQNHLMLRMAGFATLGPQNSAMRFEQTD

SEQ ID NO: 69850 - protein, 133 aa, Zea mays
  Coding DNA Sequence Number=SeqID_26475
MGLKTLSMEGTFASLTRLKKKTLKDMLAFGNQGNKERCRSKSCSPLEDSRFASQIPPLLRILPRVLYMIIHVHECSCYVMNKQSYNRNIVDSKRERKLMNGIGSNLAQQAQFHAESECVHSRAGRFAPRSLAF

SEQ ID NO: 69851 - protein, 32 aa, Zea mays
  Coding DNA Sequence Number=SeqID_26476
MTPTTTDHHQPIDVFVGTSPISEDTSPELDRR

SEQ ID NO: 69852 - protein, 180 aa, Zea mays
  Coding DNA Sequence Number=SeqID_26477
  Gene Ontology: Mol. function=catalytic activity
  Homolog annotation: Hit_ID=A2ZBF6; Match level="QueryCoverage=70%, HitCoverage=22%, E-value=3e-39, Identity=64%"; Hit description =Putative uncharacterized protein
MNPFAVVNREPYPLDIRGELDDTTAFKNFKKWGGIEFPLPFGRVLSPIESFIHELDEKAMEDTDIAVELYKLSVSTLDLLKLASKEEQGAYVGAWYNMLLSCAQELKHGVALWQEFYHANVCDRVVSEGGHYLIALGEIYRVAQILYLSLQCFKTWVLADPGMLSKMLSCLDSCSFQRNK

SEQ ID NO: 69853 - protein, 337 aa, Zea mays
  Coding DNA Sequence Number=SeqID_26478
  Subcellular localization annotation: CTP_CleavageSite=35; ConfidenceScore=5.15e-01
MSPSSLMRRVFSPPKPPDGGYPPSSRLIVGGTQLRGSWERALTGPAGGPDFDNAGLGRRRASSPLACRARRLGSRRPLLSEGGCCAVCTGGPPKMPRAARAAFVFWGGPAFAPGWRPHEEVDAPLTREGLSGDLPGSRWALPSVPRRRRLEKSPSPTGSPPPSAPLAPSSSHLSSPLERRCGRGQDCSSAHPEACAAAARPSEAGVVVVVVRTGGGEPLESLGSIGLVVWGSSSLVKETPWPLFDEPRPGPGCPSAGPTPESISRGLGSGWRPWKMVGRSPRGKPAEPPARAGFPEKSLDCVARPRLGRISLKVSSMPRVLAPFQREDPSLQDQIAL

SEQ ID NO: 69854 - protein, 129 aa, Zea mays
  Coding DNA Sequence Number=SeqID_26479
  Gene Ontology: Cellular component=ribonucleoprotein complex; Biological process=ribosome biogenesis and assembly
  Homolog annotation: Hit_ID=Q2QYV8; Match level="QueryCoverage=54%, HitCoverage=18%, E-value=1e-30, Identity=88%"; Hit description =Ribosomal protein L10 containing protein
  Subcellular localization annotation: CTP_CleavageSite=21; ConfidenceScore=5.46e-01
MTPDRRQMQGANARPPRISPVATAPQTPRTARTCAAFLQGNSGLFFTNLPRDDVERMFREFEEHDFARTGCTAVDTVELKEGPLEQFTHEMEPFLRKQGLPVRLNKALFPQGCTPDEGYNDRATKVIPP

SEQ ID NO: 69855 - protein, 147 aa, Zea mays
  Coding DNA Sequence Number=SeqID_26480
MASLGARDDVGARNLKMAYRRARSTRDGGRPKSGEGDPGLPVKFCRVRGLGKFHGLMAKLTKGLAQLGHDWRELATAAEARKAWRAVARRARVKFRVTKVPASECLVPRSSCAKTVSNEFGLSSKFSRACSRKFGTTLIFGLPGFEF

SEQ ID NO: 69856 - protein, 73 aa, Zea mays
  Coding DNA Sequence Number=SeqID_26481
MVKNFGSKTVQIAMNAVVTSHLSVCLYSDAGINLCQGKGYKIVFDALISVYENQVAVSRRMSLFEDCYQLLFE

SEQ ID NO: 69857 - protein, 141 aa, Zea mays
  Coding DNA Sequence Number=SeqID_26482
  Gene Ontology: Mol. function=heat shock protein binding; Biological process=protein folding
  Homolog annotation: Hit_ID=Q7F1J8; Match level="QueryCoverage=31%, HitCoverage=11%, E-value=2e-13, Identity=82%"; Hit description=DnaJ protein family-like
MSRLMQESCKRILFGSELFEEYIGQLAMASMASLDNFGEDEQIDARKLQERMQCYQYALFVHFRLFFSSVLFQGHELTNLEGERMVYLGRGTRDRSNIRIPSSQTEGQAPFPLDPPGTGAWECRGKRMLACGDMINGRRSE

SEQ ID NO: 69858 - protein, 178 aa, Zea mays
  Coding DNA Sequence Number=SeqID_26483
  Pfam annotation: Domain name=MAP7; Domain location=2-170; Score= -76.5; E_value=0.036; Accession=PF05672.2; Description=MAP7 (E-MAP -115) family
MAPKRASSKAAPSIDEAVKAALLAEKKVKALADNTHQEACEDDALNKRQRNDQPTPEGTLRTCSSRGQPQEPPPGFTPLEGKDATEDGEVIGISAEEQLRALRIKNRNLQKQKEILEAKRLRVSVQAKVRQMIRDEEQRAPELEQEIALMASTTSMSEAPWRRNCKCHHGPPTSGQGP

SEQ ID NO: 69859 - protein, 77 aa, Zea mays
  Coding DNA Sequence Number=SeqID_26484
PIDWISNEVEAFEEILSGRGDVCAFSAELSPPPEPFEPMADPEAKREEEITKMAEAILDEAISQLLNEAAEVVLKEE

SEQ ID NO: 69860 - protein, 108 aa, Zea mays
  Coding DNA Sequence Number=SeqID_26485
MTEPLPFRLRALALELTKMFQKDKAASVVESLAKPKKRRIIQVTDVIHQTAPPATVSKIVFAETAEAEATEMKTAEAESGEAEATGAEAGATEESNLETTLEVIDTYC

SEQ ID NO: 69861 - protein, 184 aa, Zea mays
  Coding DNA Sequence Number=SeqID_26486
MGGSAGYEQGVAGVQGLWWAVVGSGRSSGGSVERGRERGVGKDELRGEGNWLHGSAPSFIGGERRGSIGGGEGEAGGGDFNAIMAAAMVEGEWGERKGEERRFPVRGGTFGLWSKLQCEEAQRIRRMAQSRSYAQGSFGVITGKGTDLKGKRLFRPRWTIIELLANVKGMGVILHGLRLVPINR

SEQ ID NO: 69862 - protein, 438 aa, Zea mays
  Coding DNA Sequence Number=SeqID_26487
  Homolog annotation: Hit_ID=Q6H6J8; Match level="QueryCoverage=91%, HitCoverage=92%, E-value=4e-64, Identity=40%"; Hit description=F-box- like
  Subcellular localization annotation: CTP_CleavageSite=40; ConfidenceScore=5.84e-01
MAAALQAQRLFLTASTSTSSSSSSFATRPRRTTTAAAPCRAGLRVPSGVQTTTAASTSRPADGGGGIRLDWIDAATSPADRNAVEKLRAVAEAAADRAEMHDIIGRQRDNWNHLLLHSTNSLALAASVMAALAPAAPAAKASAGALLATAAVTMAVANRLQPSQLAEEQRNATRLWKQLERDVRATLQQDKEAQRQPKQLGQADVQDAVDRVLALDAAYPLPLLPGMLDKFPNAVEPARWWPRRRPHTQQPKRNARSRSLGRRGGIGNGNGWSLELEEEMRGLLRVLRAKDEQQYLRVGKLVLGVNRVLAVAGPALAGTGAVAAAFIGSGDGGGAATAAAAAACGALAAAVNTVEHGGQLGMLFELLRNCAGFYRKMQEDIEAALGEADVERREDGEVFRTKVALLLGRDASELGQFRRMASASVKDDDIKDYAGKLF

SEQ ID NO: 69863 - protein, 60 aa, Zea mays
  Coding DNA Sequence Number=SeqID_26488
MSIGQGIRYEDEEDEMGLNNLSTLYRHNLRSQRRIADIAHRTVTLQALPLLARVRLYGLI

SEQ ID NO: 69864 - protein, 95 aa, Zea mays
  Coding DNA Sequence Number=SeqID_26489
MNHGAELDHVGAASAYRCQRRTHLSAKICGAESYYFGATAFGAEQKGLMDENVDENEEAHNNTKGNTSKRLVQDTERFSSIVGDNNTHTFLDISF

SEQ ID NO: 69865 - protein, 316 aa, Zea mays
  Coding DNA Sequence Number=SeqID_26490
  Gene Ontology: Mol. function=molecular_function; Cellular component =cellular_component; Biological process=multicellular organismal development
  Homolog annotation: Hit_ID=Q6Z8B1; Match level="QueryCoverage=95%, HitCoverage=93%, E-value=1e-140, Identity=75%"; Hit description =Putative pollen specific protein
  Pfam annotation: Domain name=Abhydrolase_1; Domain location=68-263; Score=-1.1; E_value=0.0063; Accession=PF00561.11; Description =alphabeta hydrolase fold
  Pfam annotation: Domain name=Ndr; Domain location=14-272; Score =422.2; E_value=7.5e-124; Accession=PF03096.5; Description=Ndr family
  Pfam module annotation: Pfam domain module=Abhydrolase_1::Ndr; Domain location=68-263::14-272
MSSAGISGCVPTTEHHIQTNHGPVSVAVYGDHDKPALVTYPDIALNYMSCFQGLLFCPEAASLLLHNFCIYHISPPGHELGAAPISPNAPIPSVDDLADQVADVLDFFGLGSVMCFGVTAGAYILTLFAAKYRERVLGLILVSPLCKGPTWTEWLYSKEVRGFSELPESDIVQACKSLLEQRQSMNVWRFVQTMNERYDLSEHIKRLQCRTLIFVGDNSQFHTEAVHLTSKLDRRYCALVEVQACGSLVTEEQPHAMLIPMEYFLMGYGLYRPPSQVVECSPRSPLSPFCISPDLLSPESMGVKLKPIRTRVRLEV

SEQ ID NO: 69866 - protein, 144 aa, Zea mays
  Coding DNA Sequence Number=SeqID_26491
MGKSNKRKREPTPPSEDFGDSEYSEEEFSSESEGSPAPVSLPASSDDSDDSQGIAAEGSDESEFSSDEEDSDGGEDEDDDDDDGDDDDGGDDDGDGSGSGGGSGGGDGSKGGTRGGGSTGSTRGGSSKGSTRGGGGGSSSKASG

SEQ ID NO: 69867 - protein, 718 aa, Zea mays
  Coding DNA Sequence Number=SeqID_26492
  Gene Ontology: Mol. function=RNA binding; Cellular component=nucleus; Biological process=transcription from RNA polymerase II promoter
  Homolog annotation: Hit_ID=A7P4I3; Match level="QueryCoverage=79%, HitCoverage=86%, E-value=1e-83, Identity=39%"; Hit description =Chromosome chr4 scaffold_6, whole genome shotgun sequence
  Pfam annotation: Domain name=Extensin_2; Domain location=336-709; Score=-141.5; E_value=0.095; Accession=PF04554.4; Description =Extensin-like region
  Pfam annotation: Domain name=KH_1; Domain location=140-205; Score =63.0; E_value=9.9e-16; Accession=PF00013.20; Description=KH domain
  Pfam annotation: Domain name=KH_1; Domain location=235-301; Score =80.7; E_value=4.8e-21; Accession=PF00013.20; Description=KH domain
  Pfam annotation: Domain name=KH_2; Domain location=140-184; Score =2.3; E_value=0.16; Accession=PF07650.8; Description=KH domain
  Pfam annotation: Domain name=KH_2; Domain location=235-287; Score =12.7; E_value=0.013; Accession=PF07650.8; Description=KH domain
  Pfam module annotation: Pfam domain module=Extensin_2::KH_1::KH_1::KH_ 2::KH_2; Domain location=336-709::140-205::235-301::140-184::235-287
  Subcellular localization annotation: CTP_CleavageSite=67; ConfidenceScore=5.06e-01
MADDHYSSKRKYDDPSPPPRRTGFSSGPPPASPLAGGAPSYNSVPPPPDEIQLAKQRAQEIAARIFNAAEAKRPRVDNGDDDSGGFGVGLGSTGGGGRIGGGGLGFSSSAGGGHGASIPQLSSQSSAPQYSSYGGYQGTSKKIEIPNGRVGVIIGKAGETIRYIQLQSGAKIQVTRDHEAEPGALTRQVELSGKPEQISKAEQLIKEVLAEADAGSSGAGSGGRKYNATQPGAETFQMKIANNKVGLIIGKGGETIKSMQANSGARIQVIPLHLPAGDTSTERTVHIDGTQEQIEAAKQLISEVTSESQLVSLACQEDCKLSWRADVQTIFLQNRARNPMSGGYSQQGYRPPRPQSNWGPPSVPPQQPGYGYMQPGAYPGAPPQYGAPQQPYGSYPPTSGGYQTGWDQSQNQQSHTTPPGTGYDYYSQQQQPQQQSAPGTAASTDATSYNYGQPSTYASQGYDSTYTQQSGGQQAYGHDGYTGYQTQGQQQGYSQQTGYDQQGYGTSAYGSAASSTQDGSNYGGPGGASQASPGQQTSNPAAGSQPGYTSQPPTSAAATYPPQGSAPSGYGAPPSQSGYGTQPPQQAGYGQGAYGQPSPQGQKPPALSPYGQAPPPGSAQAGYGQYGYSQPAYGAPPAYPGAPIASHQGYGQQQSYGQQQSYGDAYGSASYGQPPAYSTEATPPAASQDHSAAPAAALGTTASTAPENSGGAQTSAET

SEQ ID NO: 69868 - protein, 179 aa, Zea mays
  Coding DNA Sequence Number=SeqID_26493
  Subcellular localization annotation: CTP_CleavageSite=23; ConfidenceScore=5.03e-01
MNRAIAISSKNPVYIATLPRWINLHRRASSNIWRPPFVLRKNHPRWHPIKLARRLTRLRRQHYWPQKRARPSPSSTPPTKRPLKDDALRTCGSEGQPQPPPGFAPPEGADVTEDGEVIGVSAEEQLQLRALRIKNRNLQKQKEILEAKRQRVSAQAKVRQMIHDEDQKAQELEQEIALM

SEQ ID NO: 69869 - protein, 196 aa, Zea mays
  Coding DNA Sequence Number=SeqID_26494
MEDLDVLMGLRPPVVKDPASLSPMNSRPPGVSFELVLLGDGQGTRELAALGILWELLRYNSPDCPAPDSEQCPVRCTIELSGVSVDSNSWNSGYVPQLLGKAMALQSGSNVRRLKERSWIGAPEIDWQVASAAGEVASAAGVTGFPGEVNSAAGVTGFPSYSANAEAVIPDSRGFLSVDCAKTVLETGKRGRRGLG

SEQ ID NO: 69870 - protein, 172 aa, Zea mays
  Coding DNA Sequence Number=SeqID_26495
  Gene Ontology: Mol. function=nucleic acid binding
MDVLDELDGVLCRLEPDIGCNESCDVSDDEENQEEEINNNNAGDGMEDDNSITCHKIDDHNPMTGCEHALTLITAGYQEEFSSESEGSPAPVSPPATSDDSDDSQGITAEVWTYIRVVERAGLEGSDESEYSLDEEDSSDSSEEGSDGDGGDDGDDGGDGDGGGDSGCHTRF

SEQ ID NO: 69871 - protein, 351 aa, Zea mays
  Coding DNA Sequence Number=SeqID_26496
  Gene Ontology: Mol. function=transferase activity, transferring glycosyl groups; Cellular component=integral to membrane; Biological process=cellulose biosynthetic process
  Homolog annotation: Hit_ID=Q8X5L7; Match level="QueryCoverage=100%, HitCoverage=55%, E-value=1e-163, Identity=92%"; Hit description =Cellulose synthase catalytic subunit [UDP-forming]
MPGRFSALMLIVLSLTVSCRYIWWRYTSTLNWDDPVSLVCGLILLFAETYAWIVLVIGYFQLAMMQTPHHFFSPDPFERNLGRFRKTPNEGTLFYGLVQDGNDMWDATFFCGSCAVIRRKPLDEIGGIAVETVTEDAHTSLRLHRRGYTSAYMRIPQAAGLATESLSAHIGQRIRWARGMVQIFRLDNPLTGKGLKFAQRLCYVNAMFHFLSGIPRLIFLTAPLAFLLLHAYIIYAPALMIALFVLPHMIHASLTNSKIQGKYRHSFWSEIYETVLAWYIAPPTLVALINPHKGKFNVTAKGGLVEEEYVDWVISRPYIFLVLLNLVGVAVGIWRYFYGPPTEMLTVVVSM

SEQ ID NO: 69872 - protein, 55 aa, Zea mays
  Coding DNA Sequence Number=SeqID_26497
MTTNQAVGDLFSNAMSQEQGNIENVNRNNIELQMYLQLEGDESTSVTQKANAKLA

SEQ ID NO: 69873 - protein, 413 aa, Zea mays
  Coding DNA Sequence Number=SeqID_26498
  Subcellular localization annotation: CTP_CleavageSite=96; ConfidenceScore=5.21e-01
MGGFGPGPPRPWPRAQPKNPLYIVQKTSCLHRLSLALAASLSRSSHENIGSSNYFANLRDCVFYFASGAAASIQPCIALHAFRLYESGKGRRHQVAASNLRGGRVGYDSGIHHRQSDLHLRQSTSSVPVTITEPPKREYYYYNTRVLRVHKVLLQTREAKHPPQQKFIIFKVRGKHPPATNFTAGAPPWVPPLNRNNKTPLFRHLQQHGFEKPEYGVYFRKSYPTKEKDYQGYAGLRESRVYVSVFGTRPRTRGYPSRPYILEYSTVGRYMRRKREPSPPSEDFGDSEYLEEEFSSESKGSPVYASPPVSSDDSDDSQGITAEVWTYIRVVERSGLEGSNESEISSDEEDSSDSSEEGSGGDSDDEGDDGDGGDDGGGGDGDGKSDGVGGKGDGGNGKGDSGSSKASGIAPQA

SEQ ID NO: 69874 - protein, 114 aa, Zea mays
  Coding DNA Sequence Number=SeqID_26499
MTEVSWGSCRPPEFIYLLFSFRAVEILQATRAHLPPLQLTCGRFEGELFLDLNETLLYLFLVYYGVCITFSFDLSLNLLVALLILCIGFISERQPEGNILKTLYSSASIPHSSI

SEQ ID NO: 69875 - protein, 54 aa, Zea mays
  Coding DNA Sequence Number=SeqID_26500
MAELRGRLESSCLAIRTSGVCIMGLQAHLVIMEARASRQEFEQEELRQKIDAVT

SEQ ID NO: 69876 - protein, 772 aa, Zea mays
  Coding DNA Sequence Number=SeqID_26501
MEVVELVPCARNKWGNWNEFWFYVAEGTVEDHEGLPVSEMCSHFYSAYPPFEVAEEDADEGALRCAVGLSSGRDLVEEFVAYGVWPLAHGWALGEDGALRIVGRYVPRTEGQRSWDIRGSNDRLNRVFELNQLPYNGYPGQDDVDRRGKKPVVESGDDPAPAAAPSSKKRKLGTVMGGLGVSDGFARELMRTCAAPGGRMSLPELRESSARMLRVTGGWWPRNVPIPRVAGEDFFTSRMVCEWKVFPYGRNIAAVVSAVMDKDRQAAAQKRQAVVRLHEARPKRQRGAAKAAAPGGGKPPLAAKSGAPASSKAPEAAAGAGGSKSTKAVPPSSRVPEAAKAARVLPSSGKRVADFATDISVDDYLGGSDEGQLAIVAPAAATTAAVVVPKAKGGALSAGGEMSALAAVRDEAGAVSRRLKEVKEALSQRQGPSWQLCLSKSRDFGRNMLTPSVKNRPPTVSAASWRTRWPHWRGRRLTFGANWRGERRETNEALAKAQAAQAEANLARAEGNLARERAEQLQERLSALESRVERAEAAARAEAERTRKQLMDSYHELGARTGDFEVPDREPGLRCLEWVQEELQALPTIVEGFMSYASLVTCEGAMNALSREGCWHFEVFDQADEDFERDIFKVEDPIVKESAGAIYDRMWGPHGCEVVRERAETARAQAARGERVDDFGALNSALPDPEPVPAEAVSEAALEPPPETAEGAPDAPAAAAAGGDPPPETAEGAPDAPAAAAPRTEDPVTVAAEATAEATAEAPATAGSSHVA

SEQ ID NO: 69877 - protein, 446 aa, Zea mays
  Coding DNA Sequence Number=SeqID_26502
  Subcellular localization annotation: CTP_CleavageSite=31; ConfidenceScore=5.46e-01
MDKDRQGAAQKRQAVVRLPEARPKRSRGTAKAASPGGSQSTLAAKSAAPGSSRVPEAVKAASAGGTKPAPARAAKAREFPPPGKRVADFTTEISVDDYLIGQLVVVPPAVATAAAAVVPRARGSALSAGGEIPALTAVKDEAGTVSRRLKEALSQAADFADRVASGALTAVVSAEVERLRAQHADAVREKSAADSKCRKLAEKVAVLEGERTDLRRQLAEERREANEALAKAQSAQAKANLARVEGSLARQCAEEWEERFNALQTRVERAEASTRSEAERTRKQLMDSYHELGAMNALSREGCRHYEVFDQSDEDFEREIYKVEDPMVKESAGALFDRMWGPHGREVVRERSDTARGQAARNEKVEDFGALNSAQPDSELNPVAAVSEVAPAPPPETVEGAPDAPAATAAGGGSSPTAAPRAEDPMKMAAEPAAEDPATAGSSQVA

SEQ ID NO: 69878 - protein, 277 aa, Zea mays
  Coding DNA Sequence Number=SeqID_26503
  Homolog annotation: Hit_ID=A0EVH6; Match level="QueryCoverage=18%, HitCoverage=14%, E-value=1e-07, Identity=56%"; Hit description=Milt putative polyprotein
MEIDRQSVHVDTLGPRDKKALVRPCSTDKGKGKNIIISDPHTPNLSCRVVTRRLQTEERLLRPEASRAMVNQKPNVPKVKKDVSLSKTNSQPRSPLGLSIWHNKRLEKLGAQELKKRGITWVPNGSSQDQGKDDALGRGGVKAKRKKASTGCLGESYPCFGSLDFSFDGEGETFKAQEARPPPLRNLCVTTRASGCPRIDYTPGAVIRFGNLDFLINQEGDMFIGMVTGGVDLIFDALLTDSDSDLSPPKSIEEEPPGDKENKDHLAAAPPSAREAK

SEQ ID NO: 69879 - protein, 103 aa, Zea mays
  Coding DNA Sequence Number=SeqID_26504
MTKTVNEVEARRGQRQDRALRAGVAPGQRVGDGVHGTRLVFHRKVKAEELAHPMVLRDRREMLVEEELQAVVVGADEERAHPKVRPPVVHGVHQPNELPLIRC

SEQ ID NO: 69880 - protein, 124 aa, Zea mays
  Coding DNA Sequence Number=SeqID_26505
MAVEVMAMVTAVISIIHMEGVVHTDAEYKLKTRSLKTMIVRKDLMRIPLQMMKCLVGVIITDMLTLKIETVIMGSVIEMTWTILPKSSWMFLNLLGKKVQMNILIGLSSVIKFLELTIFQINIE

SEQ ID NO: 69881 - protein, 168 aa, Zea mays
  Coding DNA Sequence Number=SeqID_26506
MGDPSSSGTSACGTQWLSQALEVKKEAQGTARSPLPSISEGLPMSPEPGFVEFLAAGFLGWRSHLEGPLLDGGVFYYAQARMSVYRWWPSLSRRREAHAAARGTTAEGAMVAGSELGRMAGPKHPAVEAREGSSRAEPDLTEVRPSGRDVEGPLSGFSTEGEARAPSS

SEQ ID NO: 69882 - protein, 170 aa, Zea mays
  Coding DNA Sequence Number=SeqID_26507
MGGQRGRGCKESKNGSPGDPIYARWRVTEVRQGWSCFSGEAKPRLKLGEASQPVGEAVRGLGRGWGLLGRAGHGGRARAGIAGGGELTEARVFGSGARRSEERTAEHQRELSHRQKASVTRSSPEENLCQDRVKRLKFVSKLRQGVFREIWRHFVIWTKWIQVFELGEHN

SEQ ID NO: 69883 - protein, 156 aa, Zea mays
  Coding DNA Sequence Number=SeqID_26508
MGGQRGRGCKESKNGSPGGPVYAQWRVTEVRRGWSCFSGEAKPQLKLGEASQPLGEAVRGLGRSWGLSGRAGHGGRAWAGMAGGGELAGAGVFGSGARRSEEQTVEHQRELSRRQNASVTRPSPDENLRQDRVKRLRFVSKLHQGVFREIWRHFVI

SEQ ID NO: 69884 - protein, 53 aa, Zea mays
  Coding DNA Sequence Number=SeqID_26509
MNTSPWPALSENDEEVVKEEVAPPTEIPPVGESFYFDICGTDPESPTTQGDRS

SEQ ID NO: 69885 - protein, 239 aa, Zea mays
  Coding DNA Sequence Number=SeqID_26510
MTSHGSSDDGNALSHTDGLAREGFPRILWEVLQGAGYTTPPQYAVQQFEKHRVPRCRVRMTLEPHPLQPGWRSLDSESFGYQAEDTIEAIALHGLTTFCGFHPLELATHPIGLFPAEREDDPMWKDRVEHAKDIWAIYPGQTAHLTVRWSSYPLISQELEELVGTRENTIEVLKDQLINTQQQLAEANEHLDMHHQEIQDMEANEDVDIEGGEEPASSVDTAGSGRPPSPESSVASFAH

SEQ ID NO: 69886 - protein, 210 aa, Zea mays
  Coding DNA Sequence Number=SeqID_26511
  Gene Ontology: Mol. function=sequence-specific DNA binding; Cellular component=intracellular; Biological process=regulation of transcription, DNA-dependent
  Homolog annotation: Hit_ID=P0ACH9; Match level="QueryCoverage=100%, HitCoverage=69%, E-value=1e-116, Identity=100%"; Hit description =Melibiose operon regulatory protein
  Pfam annotation: Domain name=HTH_AraC; Domain location=106-149; Score= 30.7; E_value=5.3e-06; Accession=PF00165.14; Description=Bacterial regulatory helix-turn-helix proteins, araC family
  Pfam annotation: Domain name=HTH_AraC; Domain location=155-199; Score= 57.9; E_value=3.5e-14; Accession=PF00165.14; Description=Bacterial regulatory helix-turn-helix proteins, araC family
  Pfam module annotation: Pfam domain module=HTH_AraC::HTH_AraC; Domain location=106-149::155-199
MAIFNLPMHLFLSWPLDKDLINHVTHGMVIKSLATQQLSPFEVRRWQQELNSPNEQIRQLAIDEIGLMLKRFSLSGWEPILVNKTSRTHKNSVSRHAQFYVSQMLGFIAENYDQALTINDVAEHVKLNANYAMGIFQRVMQLTMKQYITAMRINHVRALLSDTDKSILDIALTAGFRSSSRFYSTFGKYVGMSPQQYRKLSQQRRQTFPG

SEQ ID NO: 69887 - protein, 107 aa, Zea mays
  Coding DNA Sequence Number=SeqID_26512
MVGGKGSKGKRGQKDGRQKRPPTPPSEDFGDSEFSEERSPLRREGLEGSNDSEEEDSKEEGGGGDDGSGGNGSGKGNNGDVGGYDGYNEGGGGRGGSDNVGGGVPSM

SEQ ID NO: 69888 - protein, 63 aa, Zea mays
  Coding DNA Sequence Number=SeqID_26513
  Subcellular localization annotation: CTP_CleavageSite=45; ConfidenceScore=5.03e-01
MKTNKLIDTQVNSKLGGYTHWVHGAPNRYKNGTKMPSKSFCKRVRSQAFGDNSDKKVIKALDI

SEQ ID NO: 69889 - protein, 135 aa, Zea mays
  Coding DNA Sequence Number=SeqID_26514
MAVPSSKWLQSSPDSLDHSMVNDESEKLPGWIYPQLVLGQLSCDSGNVHGLSCEYVSVVMQNLDERAFLFGSDARTDDCCLALIGESKVSPLGFFGQPHCGSCNASFVGIVRSSPVGVLSLDAVIAIEGPTTRVV

SEQ ID NO: 69890 - protein, 50 aa, Zea mays
  Coding DNA Sequence Number=SeqID_26515
MAIIRRMGEGKKMVRFLCEDLSIAFCIWGAWQAVGDLSQDSPTSLGVFSA

SEQ ID NO: 69891 - protein, 397 aa, Zea mays
  Coding DNA Sequence Number=SeqID_26516
  Pfam annotation: Domain name=zf-CCHC; Domain location=105-122; Score =20.7; E_value=0.0011; Accession=PF00098.14; Description=Zinc knuckle
MEDLSTMTPTIVIGKIKAFEMSLKMCQGEEPTSSSPYAFACDEMKGKKKAPTPISSSEEEEEEESDDDEDNQPSTSSSKDEEIIRRVGKVEDLLFNIDRKKHRKRGCFACGENDHFRDSCPTMAEPKKRRSKGNALTSVKTWDDSSSEDEPPRTRSHQYSSRSSRSSRKCLMARGKMSIPSSSDDSSSDDEVEGKPSVDELAEAVKCFQDVGTKQKAQLKTLKNKLISSQNDYKGLLENFETFANLNCELSTKIEQLESSALSTATNDDLIKKNVKLKAKLASSQEAIENLLGKMEILSIHNNELTTKLENIGSTLGASLVEITKIIKKDASTSYFDLIDDSNPCNQVLVENIVVETCSDEVAKENEQLRQEVAHPGKALYDKKGKSNLHKITPLWE

SEQ ID NO: 69892 - protein, 16 aa, Zea mays
  Coding DNA Sequence Number=SeqID_26517
MAPSRLACAPSARKFI

SEQ ID NO: 69893 - protein, 149 aa, Zea mays
  Coding DNA Sequence Number=SeqID_26518
MPDVPPVGAPAPSTCSTADEGRLLLGLGCPASSSVGGGEGGPDSVERHSSRSGAGDAVLLSGRSVERRSDCGHFGSVDWRTRVRIKVSGHLCIKCSCDLVGWRGDLVRVASWRRQGLGRALYADGGYQLRIRRLEVYDWSSRGENGVKS

SEQ ID NO: 69894 - protein, 318 aa, Zea mays
  Coding DNA Sequence Number=SeqID_26519
  Gene Ontology: Mol. function=protein-N(PI)-phosphohistidine-sugar phosphotransferase activity; Cellular component=integral to membrane; Biological process=phosphoenolpyruvate-dependent sugar phosphotransferase system
  Homolog annotation: Hit_ID=P00550; Match level="QueryCoverage=74%, HitCoverage=37%, E-value=1e-118, Identity=94%"; Hit description=PTS system mannitol-specific EIICBA component (EIICBA-Mtl) (EII-Mtl) [Includes: Mannitol ...
  Homolog annotation: Hit description=permease IIC component (PTS system mannitol- specific EIIC component); Mannitol-specific phosphotransferase enzyme IIB component (EC 2.7.1.69) (PTS system mannitol-specific EIIB ...
  Homolog annotation: Hit description=component); Mannitol-specific phosphotransferase enzyme IIA component (EC 2.7.1.-) (PTS system mannitol-specific EIIA component)]
  Pfam annotation: Domain name=Mannitol_dh; Domain location=194-318; Score=9.3; E_value=5.6e-06; Accession=PF01232.14; Description =Mannitol dehydrogenase
  Pfam annotation: Domain name=PTS_EIIA_2; Domain location=102-244; Score=288.6; E_value=1.2e-83; Accession=PF00359.13; Description =Phosphoenolpyruvate-dependent sugar phosphotransferase system, EIIA 2
  Pfam annotation: Domain name=PTS_IIB; Domain location=1-70; Score= -1.4; E_value=0.026; Accession=PF02302.8; Description=PTS system, LactoseCellobiose specific IIB subunit
  Pfam module annotation: Pfam domain module=Mannitol_dh::PTS_EIIA _2::PTS_IIB; Domain location=194-318::102-244::1-70
MGAGVLRKKIQDAGLSQISVTNSAINNLPPDVDLVITHRDLTERAMRQVPQAQHISLTNFLDSGLYTSLTERLVAAQRHTANEEKVKDSLKDSFDDSSANLFKLGAENIFLGRKAATKEEAIRFAGEQLVKGGYVEPEYVQAMLDREKLTPTYLGESIAVPHGTVEAKDRVLKTGVVFCQYPEGVRFGEEEDDIARLVIGIAARNNEHIQVITSLTNALDDESVIERLAHTTSVDEVLELLAGRRIRRLRRIRALPLSSRRGLGEGKASPQPSRVDLVTTAVGPVVLERIAPAIAKGQVKRKEQGNESPLNIIACENM

SEQ ID NO: 69895 - protein, 428 aa, Zea mays
  Coding DNA Sequence Number=SeqID_26520
  Homolog annotation: Hit_ID=Q6JAD6; Match level="QueryCoverage=47%, HitCoverage=27%, E-value=5e-94, Identity=83%"; Hit description =Putative uncharacterized protein
LLSGDHLLAGGRAPVEVLLLGLSSPLSSAAAAAEQAELGDQPQTPSDQIAYRVRRLASRPRSSTPTTASTPPPTLPTPVTPAAPSITSTTPASTAPPPTPVSAPPIPPARFRERDETEVRPLAADPMLFDLQRAIAVRVRRFRYVPVESWLPAHRDPAVVDLFSTRIQESFFRAQMSAQIDLRVHRLLDLPAFLLAAGADSEVHLSYLPGLLTLLTTSGRYVEEWVRVFYATIWIYPDHHWMRFRFDREDVTIHASQIHQLFGFHESSTRLHSLCYGTSDPPHRPHGGVAPGTTHVAALFRPPFSDGSRRSPDAAVDDDDDDFGIPPPPPPLQAPVVPAIQPGPPLPTVGPSSSPLRPVTLAFTSPVFSSVCPQPPVPPASAVTTAAVAVSVTTSHPAAPAAQPQSESVPAPTSTADPGSETDSDPQL

SEQ ID NO: 69896 - protein, 176 aa, Zea mays
  Coding DNA Sequence Number=SeqID_26521
  Gene Ontology: Mol. function=hydrogen ion transmembrane transporter activity; Cellular component=integral to membrane; Biological process=response to antibiotic
  Homolog annotation: Hit_ID=P0A4K7; Match level="QueryCoverage=100%, HitCoverage=67%, E-value=4e-56, Identity=47%"; Hit description =Tetracycline resistance protein
MGEGVGPAIGGMIAHYIHWSYLLLIPMITIITVPFLMKLLKKEVRIKGKNIPFMIGVLCGGIIFGTVAGFVSMVPYMMKDVHQLSTAEIGSVIIFPGTMSVIIFGYIGGILVDRRGGLSFTKTVISTIVSSSLKQQEAGAGMSLLNFTSFLSEGTGIIVISWLVTLNVYKHSQRDF

SEQ ID NO: 69897 - protein, 234 aa, Zea mays
  Coding DNA Sequence Number=SeqID_26522
MVSHSGYGGYKCGHCTTAIGVSEALYAKAGAGYTTPPQYVVQLFEKHRVPCCRVRMTLEPHPLQPGWRSLDSESFGYRAEDTIEAIALHGLTTFCGFHPLELSTHPIGLFPAEKEDDPMWKDRVEHAKDIWAIYPGQTAHLTATKITLDNREELVVDLSTEMVEKDLQVEQLSNEIQELEELVGTRENTIEEIQDMEANEDVDIKGGEEPASSLDTAGLGRPPSPESSVASFAH

SEQ ID NO: 69898 - protein, 225 aa, Zea mays
  Coding DNA Sequence Number=SeqID_26523
AVEKNEGSVSTVEKNEGAAPPPPHYRVPSPVKKNKAIASLRWRRRFRVSAVEKAAAVEKKQTTAIELGYGRRERYGVVDPPPLTPREARASSPAVGRQQAPLWDACLREADGVCLPDLPSRARLLDPRSWGSVVVARSYGSAAIPRSWGRSLDPSETSPSLDPSELSPSITLLEAPPPLAPEIVAARTPEETAATTRSPEGTAAPLKPNPWRSKGVFIAVRIWCG

SEQ ID NO: 69899 - protein, 75 aa, Zea mays
  Coding DNA Sequence Number=SeqID_26524
MGGAEGAWCACANAGTSGTNQISVRCMTHHVGNPTALGLIFCSISPKSYPKTKTKTKTKIGGAHEFLRKRFVRRQ

SEQ ID NO: 69900 - protein, 96 aa, Zea mays
  Coding DNA Sequence Number=SeqID_26525
MGIGCLRDENWNKDQSRLCPSRDLRRGLPFRLWWVQVRSLHDDSRDRYTFSLKRVTLNLEKGSLEDMVAGVAWPPILPPGWTVVWDPTSAEEEHEE

SEQ ID NO: 69901 - protein, 267 aa, Zea mays
  Coding DNA Sequence Number=SeqID_26526
MTSHGSSEGGNTHSHTDGLAREGFPHILLEVLQGAGYTTPPQYTVQLFEKHRVPRCRPGWRSLDSESFGYRTEDTIEAIALHGLTTFCGFHPLELSTHPIGLFPTEKEDDPKWKDRVEHAKDVWALYPGQTAHLTVRCMNALYLYRLQVMRGEAMSQLMASLEATKITLDNREELVVDLSTEMELEELVGARENTIEVLEDQLINTQQQLEEANQHLDMHHQEIQDMEANEDVDIEGGVEPEAASSLDTAGSGRPPSPESSVASFVH

SEQ ID NO: 69902 - protein, 84 aa, Zea mays
  Coding DNA Sequence Number=SeqID_26527
  Subcellular localization annotation: CTP_CleavageSite=55; ConfidenceScore=5.03e-01
MVHFLSGFVDLLLKLLASQREIVSWFVSSGCSAAPVTIVFFGGMMMVVALPKIVEVSTPEVGANVGHLFSNAIDQEQGNTIVND

SEQ ID NO: 69903 - protein, 345 aa, Zea mays
  Coding DNA Sequence Number=SeqID_26528
  Subcellular localization annotation: CTP_CleavageSite=45; ConfidenceScore=5.15e-01
MPAPPPPLSAGKVTGQTRMLLFRHAGKTSSIPPPAGGLTAAIVVVARRRKEYHVVAAVEGHELKTPETEHHPGLERLLETTHLELDGKLFVNTQQAPTWRANCRRFDPGGYLDRRVNCRGVSQPRWVGARRNTRGENTKGSQSPMYMPSWLSERFWRPVHVMSWPSEERLSPVEPEVGRGGGSSWVEAESRPEGRARRRPSSEVEVESEPWGRARRRPSSEVEVESEPWGRARHRPSSEVEVESEPWGRARRRPPSGVEVESELRGQARRSPSSEVEVESELWGRARRSFLWCLRPVLAAVSLTLTGGTAVGAVQAALFSCQASQWRGKVTAVTSALSTEERASG

SEQ ID NO: 69904 - protein, 97 aa, Zea mays
  Coding DNA Sequence Number=SeqID_26529
  Subcellular localization annotation: CTP_CleavageSite=24; ConfidenceScore=5.60e-01
MSPISWSNSSSWSVGLVAFLFWLRASQRERVSWFGSSGWSAAVSGAEAFFSGMTTLRSNDNLRHGRASLIVYAFDPESEDVDVVDAVLINNEHDKRL

SEQ ID NO: 69905 - protein, 22 aa, Zea mays
  Coding DNA Sequence Number=SeqID_26530
MGKHVPSLLMLLLCRVGYYLSL

SEQ ID NO: 69906 - protein, 138 aa, Zea mays
  Coding DNA Sequence Number=SeqID_26531
MGTHIQETALGARRRPTPDFCQDSHACDLGKLLNEGRRTLPRVRRALNVPEHAQRLTPRAPRRAKPCPCLLPAPAPIKPTKASTVLPRVLSTSPEPGITGVCPAHGVTAATRSPATVDRPAQPLPTPSDPQNRPCVPR

SEQ ID NO: 69907 - protein, 102 aa, Zea mays
  Coding DNA Sequence Number=SeqID_26532
MGGEGECEWGSGHKWPRARWGESHARRGRGEGGREQLGGGYAGTTGLTSRARNADREKKAGAGARETGLMGLGPRADRERGSRRTRGSGIFDWWGRLALIDG

SEQ ID NO: 69908 - protein, 45 aa, Zea mays
  Coding DNA Sequence Number=SeqID_26533
MRLHILRGMKAEVILAFADICTHEFDIILLAEMCHLTLALLNAGA

SEQ ID NO: 69909 - protein, 59 aa, Zea mays
  Coding DNA Sequence Number=SeqID_26534
MTQLFEFYKAEDPEHLFGEGKDVWFTDDDEDGYDHAYGNGKEGVEADLQEFQDVDEFED

SEQ ID NO: 69910 - protein, 53 aa, Zea mays
  Coding DNA Sequence Number=SeqID_26535
MPWDGAYGRMLYKSEYKFSTIVQIESISCSCYRFGKNMWKANLGSCFLQVCCV

SEQ ID NO: 69911 - protein, 237 aa, Zea mays
  Coding DNA Sequence Number=SeqID_26536
  Homolog annotation: Hit_ID=A3BZJ3; Match level="QueryCoverage=44%, HitCoverage=30%, E-value=1e-36, Identity=72%"; Hit description =Putative uncharacterized protein
  Subcellular localization annotation: CTP_CleavageSite=84; ConfidenceScore=5.44e-01
MGVHPSSRYHVGPGRTDASSRAAHLTSSRPLSGGASTVHHVLPPRPIPPTPPRPQSTPPRCPRPRHPPPRPHPRPRKSRPRDPSAHTPPPLLSVDGRAPLTHRDPRYRPHEAIPCPRPLPDLRRGRHPAPVLGPSSASASSRHGLHSFAPLTAAVLGHLWASGVAVLPGLTELELVRTKAEMWFAFPPDLRAVLAAGLPSGPGFPDWQSRVGLRSAFDLPIAAASLQIARGELWPRC

SEQ ID NO: 69912 - protein, 111 aa, Zea mays
  Coding DNA Sequence Number=SeqID_26537
MVQVQVLVCPLELLLGVLELFFQNLNGVVPDFHLILELVDVCHRPGNRKIPSPANAILAAGDEAPESSSPYSEVPGAPRIAAPRTGEWYKLRYQFSRNRPNYSNLSAQVPP

SEQ ID NO: 69913 - protein, 73 aa, Zea mays
  Coding DNA Sequence Number=SeqID_26538
MGEQRRRVAQRSKDASSRREEGEKSRVSASGTQGTKGSTQTNIKIKLGFKKKGAKETEENPGLAHRTVRCATG

SEQ ID NO: 69914 - protein, 506 aa, Zea mays
  Coding DNA Sequence Number=SeqID_26539
  Gene Ontology: Mol. function=carbohydrate binding; Cellular component= extracellular region; Biological process=homophilic cell adhesion
  Homolog annotation: Hit_ID=Q6BTJ4; Match level="QueryCoverage=33%, HitCoverage=27%, E-value=5e-11, Identity=37%"; Hit description =Similar to CA1621|CaIFF6 Candida albicans CaIFF6 unknown function
  Subcellular localization annotation: CTP_CleavageSite=61; ConfidenceScore=5.07e-01
MDAFQGGHPPFKGDSPYLRPQPSWAKSSPTHSKVLPLWHGGWVPRVMQAGPEQKKPNRHARCMQPPSGYKHSSTFAQTSGPTRHATGALVATCEQLHRHSHHYHASSTAEPAGKSSGHVVSQAYVPSRGSERTLSHGVKTARPSSVPRTARARATAASRTACPVTLTPRRDRRRLWQEKRATLRLRHNDRVRKGTGKGDTLKRVLLREGNRPRASLLIRGSKAGPSEGFNSRLRALGFCAHYWSEVRRPAPRKGSTAASGHSGSAPTTDQGFVGWPPKAAKPGPRRHGKLRSARPHGSDSGSAPEDGELRSARPQGSDSGSVLEDGELRSARPQGSDSSSAPKDGELRSARPQGSNSGSVPEDDELRSARPQGSGSGSAPEDGELRSARPQGSDSGSAPEDDKLRSARPQGSDSVSAPKNDELHFARPQGSDSALASADGLCLARPGGSDLTSASKTDSTTTSEEPPHRPTQGTDRPHQQEAPSLPYPKLTQATGNKTGVPSGSLR

SEQ ID NO: 69915 - protein, 32 aa, Zea mays
  Coding DNA Sequence Number=SeqID_26540
MGSRKYQLLSTAMYEAVDIRLYRRLAVSNVVI

SEQ ID NO: 69916 - protein, 144 aa, Zea mays
  Coding DNA Sequence Number=SeqID_26541
MSTKVGGGGGNDDGDASDGKHGRVTPLSVASAPLMNTGGGPRVALELLINTNGNALEGNVTSEPGSSKDNRFVLPITISTVLLLRSYKPCKVIVAQLPLVKFEYAKPVPRKFMDYLIQDFVDFAAFYTKKLHLRNTLPMLGGKF

SEQ ID NO: 69917 - protein, 70 aa, Zea mays
  Coding DNA Sequence Number=SeqID_26542
MASTLCGIEIMAFEEVLDRLKAFDECSRRRTHASAKWCDDQLLLIEAEWKAQRKKKSSIGKCFNFAIIVT

SEQ ID NO: 69918 - protein, 134 aa, Zea mays
  Coding DNA Sequence Number=SeqID_26543
MAKGHISVSASCSCPWKTRTRDTHHQQHANMCAKQHNTLTRPPHTHDAGFITNIAVVNEMSRCFKKLLAHEMVEVVLVAYSGVFLMSIQSGEPVYKESGSLHLGQVQQPITRHKTKHEQGKHWRGDEVDLLKVA

SEQ ID NO: 69919 - protein, 127 aa, Zea mays
  Coding DNA Sequence Number=SeqID_26544
MGDTRNPSALSLEERNSVEVGTFQPSFGFKDFHHFKDVHHPRWGGGRAEPELYLPRGFVGQPLLQRSRERALTGPARGADFDNAGLVDGGRRQLQRVGLAGLAPGAPSSRKGGCRAHGRTAQDVARC

SEQ ID NO: 69920 - protein, 362 aa, Zea mays
  Coding DNA Sequence Number=SeqID_26545
MNIKTDIQGAITNGTPVPPPQVQTTPRDWGACGATEDRRVAHRRPLRQQRQRPPLRVAELQQRWPQGGRRYNLALAHAGARGARTSTKSRRLRARMVAVIPSATGTSRAASASAPTTGADSPSADPHSDPPGRAELKGKCALGPFLSILVIECQLKCLKCEFMQWMNKVQIKSKAKGLFQSGAPDCPVVHRTVSGAPGCLGRTGRSREFADGVRLKFTGLSGAPTSARRRRTGAKAGQPQNTNAALAARDVLGGPPVCAATALAGGGGTGSQAGEPNALKLTTPAVDQPRVVEVRPSRRASERPLPRTLKERLTHEPAREVELRLSPASAPARMMNILEAEGGTKIAARLASPHPGAGGHRL

SEQ ID NO: 69921 - protein, 26 aa, Zea mays
  Coding DNA Sequence Number=SeqID_26546
MAKAQQGWQNGWATAVVALRAGNTYH

SEQ ID NO: 69922 - protein, 197 aa, Zea mays
  Coding DNA Sequence Number=SeqID_26547
MKHVADVRAVNAKNAESLRVRFSLAVGPCRKSMSVIKREHGEVVLGVYDELTCLGERGVNRQPRNCVGASRNRIQPPARQRSNSAASKWRRKQELPKWKRAGSVEAEQHGDKRNSAASSGRSEFCFILVSRKPSTSHQARVLDLADRQTQVVPVRSIKIEEGPSEMGNGGRAACSFHSPLASTLLPQPALRYLLPPL

SEQ ID NO: 69923 - protein, 49 aa, Zea mays
  Coding DNA Sequence Number=SeqID_26548
MGGGLLASASALRSVSLLFGPPEQKSSSSPLLEQGCLCERKSLLAEGDE

SEQ ID NO: 69924 - protein, 132 aa, Zea mays
  Coding DNA Sequence Number=SeqID_26549
  Homolog annotation: Hit_ID=Q6J9V9; Match level="QueryCoverage=37%, HitCoverage=17%, E-value=4e-08, Identity=62%"; Hit description =Putative uncharacterized protein
  Subcellular localization annotation: CTP_CleavageSite=19; ConfidenceScore=5.09e-01
MQTGSEQKKPNHRAWGCVSGSSNGRRFALAKTTAPKKGPGKGDPPKGILPREGTRLRASLLIRGSKAGPRRVQQPPQIAWALHPLLVRGSKAGPPKGSTAASGYSGSVPITDQGFEGWPPKGSQSPQTPSEG

SEQ ID NO: 69925 - protein, 376 aa, Zea mays
  Coding DNA Sequence Number=SeqID_26550
MQAACNRTKGGAPFRLRRVQHGGPGPHVMDRERGYPERDPSPRRKRAPSPLLIRGSKAGPSEGFNSRLRALGLRAHYWSEVRRPAPRKGSTPASGHSGSAPTTDQGFVGWPSKGSTVASDAERGMTLGLGLGLGPGRRRTPPRPTPGLGLDLDLGRQTRPRPRWSLRLALPRARTDHVTGGAIITLPVASSGYGEQDRRPIWLAPVKQIKMAPRVLHDDGGSQPPYRSKETSARTRQPRQLSFCKAPALLRRPRHHTNRVPKPLRLPRRHGPLTEGWPRGEGRDGARIGLSLPPARTLVTPYCKRTRPGRGTNTKAAGTPGVETPTGPTDAMDVLMARRASPVPASVSHAPSPSVLGSSHGVWTLRFGPPLASAPM

SEQ ID NO: 69926 - protein, 178 aa, Zea mays
  Coding DNA Sequence Number=SeqID_26551
  Gene Ontology: Mol. function=nucleic acid binding; Cellular component= intracellular; Biological process=regulation of transcription
  Homolog annotation: Hit_ID=A2XIC5; Match level="QueryCoverage=97%, HitCoverage=97%, E-value=1e-43, Identity=54%"; Hit description =Putative uncharacterized protein
  Pfam annotation: Domain name=zf-C2H2; Domain location=45-67; Score =23.7; E_value=0.00068; Accession=PF00096.17; Description=Zinc finger, C2H2 type
  Pfam annotation: Domain name=zf-C2H2; Domain location=97-119; Score =10.2; E_value=0.89; Accession=PF00096.17; Description=Zinc finger, C2H2 type
  Pfam module annotation: Pfam domain module=zf-C2H2::zf-C2H2; Domain location=45-67::97-119
MATTHDDCVSLCLMALAAAGGGGMTTQSYAPSTAAWTTQECELRFRCSVCGKAFASHQALGGHKASHRKPTHLQTQQASSSSVTTSSAGSGGGQGRHRCSVCHRSFATGQALGGHKRCHYWDGLSVSLTASGSGSTVKGFDLNLMPATRWGEEEEVQSPLPIKKRRLSGPSLDLSLTI

SEQ ID NO: 69927 - protein, 80 aa, Zea mays
  Coding DNA Sequence Number=SeqID_26552
MGAQVGRPSRPTSGTALSLFYRIVIGNCASVSLYGFYTARHKFQCARAFFVISYRDKILHIGFHPWFHTRDGKTTQNLWF

SEQ ID NO: 69928 - protein, 242 aa, Zea mays
  Coding DNA Sequence Number=SeqID_26553
MHRVLPPSEPPDGERPRCFRLAVVGGAQLRGSWYLSAIGWLQGFSSGSPAASPRRWSPKTVTTSLMVGRSKPGCSLCPTLSFKDLHHPCWGGGRAEPELYLPYGPVGHLLLQHSGERALAGLAEGADFDNAGPISRKRRQLQHAWFAGSAGSGAASGATSHRWAECGYLPTVRAAVAPCALGDRPRRRALLGRRSCSWAVLPLRRYDASARRSMLACPGGPEWGSAGGQMAAVVGAEVVAAE

SEQ ID NO: 69929 - protein, 281 aa, Zea mays
  Coding DNA Sequence Number=SeqID_26554
  Homolog annotation: Hit_ID=Q8SA97; Match level="QueryCoverage=28%, HitCoverage=11%, E-value=9e-07, Identity=46%"; Hit description =Ornithine carbamoyltransferase
METTHLELDGKLFISTQQAPTWRTNYRRFDPGGPWTDDRGLQAFARERESLCVSPSSRAATFSYEGPGPSLYRCKEKAQVEVESEPWVRARRRLSFKVKVESEPWGRARRRPSSEVEVESEPWGRARRRPSSGVEVESEPWGRARQRLSSGVEVESEPWGRARRSFLWRPRLDLAAVSLTLTGGTAVGAAQAALFSCQAILALNAPAIRSAGEAIWPRLLLREACPSWASGELKACPLLEGTLGRGVNLPGPLQLCADGGYQLRLGVLGVPLIMVPDKVQQ

SEQ ID NO: 69930 - protein, 204 aa, Zea mays
  Coding DNA Sequence Number=SeqID_26555
  Subcellular localization annotation: CTP_CleavageSite=54; ConfidenceScore=5.71e-01
MAQLSSFARGETFAPGSRITFGTLNFFATSTDKLSLVVRNVPVTMGTQPTHSTRSKAEKRRLKRRSTVLRRRLNRHTRTKVVEALSSTLVAVINHRPTSVLDLVKDVSSHGLTGANFNAEEAPERACFVATPPPNDNGGGDKEEKLDALVQKLDCLYDDVEQRHLEAKRSRPRKVAPGEKTTGLSGGTPDCPVWKACGTNDHLL

SEQ ID NO: 69931 - protein, 74 aa, Zea mays
  Coding DNA Sequence Number=SeqID_26556
MACGHVVAGASRGEGRWVALLAAVGICVISGGANATGHSGGEDDATAAGSVTDDWDRSWHTGSVGVALWPSIGG

SEQ ID NO: 69932 - protein, 169 aa, Zea mays
  Coding DNA Sequence Number=SeqID_26557
MSSREVALARRGEFLADLNAPRLGGGGILLLEGIPHSLSRCGVPDILENLRSHGRKQTAEQLLLLAILALVVGIGGIHHAGRRDNRLGLERSGIGSIEEIEKLRTAKIWQELCTLKEIVCFCELDGDNLVDGNWWRGGRWRGGYGNVQEERQREIDGGEEAVEKIVEID

SEQ ID NO: 69933 - protein, 242 aa, Zea mays
  Coding DNA Sequence Number=SeqID_26558
MEKTHLTYAVGQNHHRPTKSGHLRSSNWCCLLYADDWGSSVIVSRALHIFPQQPSAVPAPGSAQLTPPDAVVRSAGAWTRLDCGTFSANSLQQRTQSSGSGGILPPRIRIRRSSPWLVVAPADLFAGITIKNRPRQEIKAREDQDSVEMGLRDHNDASVDIRGRGSNQNHGKFRITGAHSRGASLAVASVQPCLKCGKKTSAEFAAISSTHSARESRIECCGHWIGNAPAMPRRGVLCAASW

SEQ ID NO: 69934 - protein, 67 aa, Zea mays
  Coding DNA Sequence Number=SeqID_26559
MRALVRLALASCRLAVAKPQPANYRPTLRHGKDQAPLRPATELQRFPPVLTPKRLWTQTIILLFMLI

SEQ ID NO: 69935 - protein, 51 aa, Zea mays
  Coding DNA Sequence Number=SeqID_26560
MAPSCGDLATARWGVRRGRESPGRSSRIEQHGLGAAGRSSLIPRKFILTPF

SEQ ID NO: 69936 - protein, 100 aa, Zea mays
  Coding DNA Sequence Number=SeqID_26561
  Gene Ontology: Mol. function=carboxyl- or carbamoyltransferase activity; Cellular component=ornithine carbamoyltransferase complex; Biological process=amino acid metabolic process
  Homolog annotation: Hit_ID=Q8SA97; Match level="QueryCoverage=89%, HitCoverage=21%, E-value=4e-11, Identity=40%"; Hit description =Ornithine carbamoyltransferase
MAPPVDVAGLRPRLGDVEAPPQPRSSLSSMAEAESEPLGRARRRSSAEARAESEPWGRAKRRLSPSPSPGSGGAEFAVFRDLARVRALGRAERSSPSSGT

SEQ ID NO: 69937 - protein, 287 aa, Zea mays
  Coding DNA Sequence Number=SeqID_26562
  Homolog annotation: Hit_ID=A2YGC2; Match level="QueryCoverage=42%, HitCoverage=53%, E-value=3e-08, Identity=32%"; Hit description =Putative uncharacterized protein
MARLRHTARKSIILFLPSRLVKRPLRRPVAGQSSHLQRLHHRLHEEQERRRQEQQGSSFSLQQEIESEPEGWIARPITRDAARRCHFHDALDTLLRRALDRRTWSIEYHCVVYQHSRGVYPDRWEATYLVRRLENSIWGAEVCSEHYSISERDSAEAAMQDAAWRALSHYCSVLGGVADGLNLKYYPRRPSGSTGGVIVSPVGEDNPRLSSTVNLAAVLNTELDHALDELSRARAEIAQMRAERAERCHLDDGSPAPVGTQHPYRSPRRGHQPYGNPDCKTKIDLEP

SEQ ID NO: 69938 - protein, 178 aa, Zea mays
  Coding DNA Sequence Number=SeqID_26563
MSKSNGSESTGEALMDAAIKSCTGILITYEVSVASTAWASRDGAQDQQSRDRTGTAKVTGLGGHAWKDTAGFRRARALRVLQQSHHHRGLIRSPLQWLRQLSIRRAENCLRVGDGAGRPTEMVWRQRAVNMVTWRWDLGLGREAKGDDDDGDITRREAEGAVIATNSSAGVSNVLDSQ

SEQ ID NO: 69939 - protein, 119 aa, Zea mays
  Coding DNA Sequence Number=SeqID_26564
MHRQMLEAALVTVDLGTRGHDLALSDGHQQQYRAAISKCEHGTCPAGDELQLYGSGGRKGTPLGIGKGVLFSATTFRYWPPQGRLRWLLLRSTPEAPQPTFLSIDTSLQSLTDLATITL

SEQ ID NO: 69940 - protein, 375 aa, Zea mays
  Coding DNA Sequence Number=SeqID_26565
  Gene Ontology: Mol. function=catalytic activity; Biological process =cellular metabolic process
  Homolog annotation: Hit_ID=Q60DC5; Match level="QueryCoverage=99%, HitCoverage=99%, E-value=1e-135, Identity=60%"; Hit description =Progesterone 5-beta-reductase, putative
MSWSWGWTRSVGAVRELSDELAGVPEHSFQSVALVVGSTGIVGASLVDILPRSDTPGGPWKVYALSRRPPPPWSLPSSSSLTHIHVDLTDFAAVAEALTPLTDITHVFYVAWSPRATEAENQEANSAMLRNVLSVVVPNCPALAHVSLQTGTKHYLGPFELIGKIPTPDPPYTEDVPRLDCPNFYYDQEDVLFAAVSRRGGAVSWSVHRPNLILGFSPRSFFNVVCSLCVTLRRGPHRRAAHLGGRRPHGQIQAFNSNNGDLYNWKTLWPVLAARFGLEWTGYDGEEKQFKVSEAMAGKEAVWAEIVRENGLVETRLRDVADWWLIDVVVYEHGANWKLLDSMNKSKEHGFLGFRDTVKSFNKWIDKMKACKIVP

SEQ ID NO: 69941 - protein, 224 aa, Zea mays
  Coding DNA Sequence Number=SeqID_26566
MDHITSYLDRLALHKQYHGSDSVQVGNGAGAKGSTQTNQKNKLGLKRKEQEGTEGSPGLAHRTVRCATGQCLVPQGASSRTLHLRVSQAQLRYNSSDSVRCTPDCPGAPAEHRESARNGRLCKVKQWNQMSEQTVRGAPDCPVSHRTIRCRMRTKASNGRPAPSPNGKMTWRHTGHCPVAHRTVRCAHRQQLSPTATIWLVAINTTPTGHFNVREPKQHSKSSS

SEQ ID NO: 69942 - protein, 133 aa, Zea mays
  Coding DNA Sequence Number=SeqID_26567
MGKNNKRKREPTPPSEDFGDSEYSEEEFSSESEGSPAPIPLRESSDDSDDSQGLAAEGSDESEYSSDEEDSSKGGGGDGDDDDDDDDDDEGGGGNDGDGGDDGDGGGNKDGDGGSSRGSNRGGSGRGSNRASG

SEQ ID NO: 69943 - protein, 75 aa, Zea mays
  Coding DNA Sequence Number=SeqID_26568
MDQSFILGCIVGGWKQQLEGIFEVLASSARSKFDVMRSQFTGPLGYSANGFLVVKNIPYWKTSDYYDFVVVKVVT

SEQ ID NO: 69944 - protein, 114 aa, Zea mays
  Coding DNA Sequence Number=SeqID_26569
MAHRRARSTRGGGRPKSGEGDLGLPVKFCRVRGLGKLHKLMVKLTEALARLGGDLSGLATVAEALAAMAGGKELAGAKEGRLAGDGFELGIKVNTLDLWLKVYKFDVVTQGKKP

SEQ ID NO: 69945 - protein, 357 aa, Zea mays
  Coding DNA Sequence Number=SeqID_26570
MEQAVKSAWLLRTPPSSTVSSISSALGGILLAARGLTSGGLVGDVVHLLLIAAVPAGVYLRGPRPSAAGLRRVFGLPLRLDFALVEIFGSSIFLKQLIQLLEVPRRVPDAVAIEDTDPKATDGVVDGNLSESSAKASVSGRYPWKLSKNLSWRLLQESMDNGGNLVYQVRCQGTSLVKVVDALESRGVRDGVFALRDEQVFDLCALLEGWAVLQAELAFALHERDLLFKLLCLMLFVAARSCSCSSAETPMTSPSSVASAPSGGAKPGGGCCGPPELQSVVNEGLAFFSASSATFAASSAFDERDWRRHRAEGSVYAIAPTWGNTAVMAKSFVMVPTVPNEIVIEAMIRGLRPGPMT

SEQ ID NO: 69946 - protein, 156 aa, Zea mays
  Coding DNA Sequence Number=SeqID_26571
MVALAKYVWATTSYDGQPSVEVFAKHYSLHWQKRKIGNKIAQFGSCTFTPKTGMTSMEVVELVPWTRNKWGNWWEFWFYVAEGTVEGQLGLPVAVMCSHYYVAYPQFEVAEEDENEGALRCAARMSSERDLVEEFVGYGAGSSEVAALGNSPATYG

SEQ ID NO: 69947 - protein, 294 aa, Zea mays
  Coding DNA Sequence Number=SeqID_26572
  Gene Ontology: Mol. function=carboxyl- or carbamoyltransferase activity; Cellular component=ornithine carbamoyltransferase complex; Biological process=amino acid metabolic process
  Homolog annotation: Hit_ID=Q8SA97; Match level="QueryCoverage=37%, HitCoverage=20%, E-value=1e-21, Identity=53%"; Hit description =Ornithine carbamoyltransferase
MAPPVDVAGLCPRLGDVEAPPKPRSSLSSVAEVESEPLGRARRKPSAEARAESEPWGRAERSSSSSGAEPKSEPWVGRSGVRRLLGLSPSLSPGSGRAEFAVFRDLARVRALGRAERSSPSSGAEPESEPWVGRSVVRRLPGLSPCPSPGSGGAELPMVPSAGPDCLSVSLCQVAPQTEWRRRRCPSVRPLYADGGYQLRIRSLEGTPNYGPRQFSSCLVLFIIGPRLRVLDSFMYDNDPIRFGGGPPSVGDGPNAFPFKPLDLKSSHYTAEAMKREKQLKDKSLYAKGHAAEG

SEQ ID NO: 69948 - protein, 296 aa, Zea mays
  Coding DNA Sequence Number=SeqID_26573
  Gene Ontology: Mol. function=pyridoxal phosphate binding; Cellular component=chloroplast; Biological process=threonine biosynthetic process
  Homolog annotation: Hit_ID=Q9S7B5; Match level="QueryCoverage=80%, HitCoverage=43%, E-value=4e-89, Identity=71%"; Hit description =Threonine synthase, chloroplast precursor
  Subcellular localization annotation: CTP_CleavageSite=38; ConfidenceScore=5.35e-01
MAATTHAASMSFLLSHPQSRSATPSCHLPLHLAARRVREAARHPALKQGLSAWYEPFPPAPNGDPNERYSLDEIVYRSSSGGLLDVWHDMEALARFSGAYWRDLFDSRIGRTTWPYGSGVWSKKEFVLPEIEPDHIVSLFEGNSNLFWAERLGRDHQGRMNDLWVKHCGISHMGSFKDLGMTVLVSQVNRLRRAPLSRPIAGVGCASMGDTSAALSAYCAAAGIPTIVFLPTNRISLEQLIQPIANGATVLSLDTDFDGCMRLIREVTAELLSSSLCIIFTVRDIFMYLILIFRHF

SEQ ID NO: 69949 - protein, 128 aa, Zea mays
  Coding DNA Sequence Number=SeqID_26574
  Gene Ontology: Mol. function=catalytic activity; Biological process =metabolic process
  Homolog annotation: Hit_ID=A3C702; Match level="QueryCoverage=70%, HitCoverage=36%, E-value=5e-36, Identity=76%"; Hit description =Putative uncharacterized protein
MKNLHLGGAQLFLILSAGSKGVVPTRNLLYAVFEEYKPETHGNQRFDFPFTPTKYIPFYGGAEYHDYHHYVGGQSQSNFASVFTYCDYLYGTDKGYRFHKTYLAKLKDLGHNDGQKGDGSGPSYVKLD

SEQ ID NO: 69950 - protein, 235 aa, Zea mays
  Coding DNA Sequence Number=SeqID_26575
  Gene Ontology: Mol. function=catalytic activity; Cellular component =endoplasmic reticulum membrane; Biological process=metabolic process
  Homolog annotation: Hit_ID=Q9AV39; Match level="QueryCoverage=85%, HitCoverage=66%, E-value=1e-100, Identity=84%"; Hit description =Putative C-4 sterol methyl oxidase
  Pfam annotation: Domain name=FA_hydroxylase; Domain location=113-212; Score=76.1; E_value=1.2e-19; Accession=PF04116.4; Description=Fatty acid hydroxylase
MTPAEALWFRYTAGVSDYHLYCCNILFLFVVFTVAPLPIALLELRAPAAVSPYKLQPRVRLSRAEFVRCYKDVLRIFFLVIGPLQLVSYPAVKFVGIHTKLPLPSLAELAAQLLVYFLVEDYLNYWIHRFLHGEWGYQNIHRVHHEFTAPIGFAAPYAHWAEVLILGIPSFVGPAIVPGHMITFWLWIILRQVEAIETHSGIALRVLSWLFTVKGFFTLYFFGVFPGNEGIIHMD

SEQ ID NO: 69951 - protein, 139 aa, Zea mays
  Coding DNA Sequence Number=SeqID_26576
MAHRRARSTRGGGRPKSGEGDLGLPVKFCRVRGPGKLHKLMAKLTEALARLGGDWSGLATVAEALAAMACGKELAGAKEGRLAGDASSTRQHRERSSSSADWLQIFEIMAMIPLRDLFLSGSFVVSVWRLAGLADWIKR

SEQ ID NO: 69952 - protein, 92 aa, Zea mays
  Coding DNA Sequence Number=SeqID_26577
MGRLEPWAEWESRLVGKVCNLCRVLETVADTEAELTEAKGTATPQRWQQNGCSDMVNGGGAPSSGKGQRTSEGRLGVVCKWRKWPSGREGFE

SEQ ID NO: 69953 - protein, 131 aa, Zea mays
  Coding DNA Sequence Number=SeqID_26578
MAGAPDSVRWRTELSGAPIDRQPPQQLNWWLGAINTPQPPPLQPSKHSQQCIQYKSKTQHCKTQIKDSDPIKVHNSALITLNAIKFARINDLTVGDYHNLMMDTIDEVTDKRMMALREIKNDKVIAAKAYN

SEQ ID NO: 69954 - protein, 103 aa, Zea mays
  Coding DNA Sequence Number=SeqID_26579
MEQQGNGGGAGTRRTTVAELRLCENHSGCGAQKGREGSDVARERAVVGASTVGRSWARAGEPPPSTQALVVSLSLFKGPGISSQGGDADNMEDFEEFQDYDEF

SEQ ID NO: 69955 - protein, 210 aa, Zea mays
  Coding DNA Sequence Number=SeqID_26580
  Subcellular localization annotation: CTP_CleavageSite=60; ConfidenceScore=5.02e-01
MSRGKTCDRHGSGRFLCYQQSPVQRNPRFDLRTPSGILVELPIKPSCAPFLLTTWGRAVSAVNAERSRRRRRQVLSLFPASRDPSVGTGLFTDVLRSYAWHRRVECVLGTALMAHRSTAVTVGSVLAVGRLTHYTIHGKVSLKLFTSIHRSHSNSWSGDRASGHRRGDSSGGCAAAIAPPGSGPWGEGGLLAVGSSPTVEIRRLCTDSQE

SEQ ID NO: 69956 - protein, 196 aa, Zea mays
  Coding DNA Sequence Number=SeqID_26581
MSRGKTCDRHGSGRFLCYQQSLVQRNPRFDLRTPSEILAELPIKPSCAPFLLTTWGRAVSAVNAERSRRRRRQVLSLFPASRDPSVGTGLFTDVLRSYAWHRRVECVLGTALMAHRSTAVTVGSVLAVGRLTHYTIHGKVSLKLFTSIHRSHSNSWSGDRASRHRRGDSSGGRAARFRSVGRRWPPGRWIVPYGGD

SEQ ID NO: 69957 - protein, 160 aa, Zea mays
  Coding DNA Sequence Number=SeqID_26582
MGRLEPWAEWESRLVGKVCNLCRVLETDISVVLMMARIRCTARKSVIPFCLLDWRSVPCVARCQVSLVTWRDCIVAYMRSRSADARSRSRTRSSRTLPPRLNGSWSLRGLLPLRLSQRCPLHHHRASRLLEETPTEMEMMTTPVAVQTSRSRRGWIARPI

SEQ ID NO: 69958 - protein, 379 aa, Zea mays
  Coding DNA Sequence Number=SeqID_26583
  Gene Ontology: Mol. function=exodeoxyribonuclease III activity; Cellular component=cytoplasm; Biological process=DNA repair
  Homolog annotation: Hit_ID=Q10LK4; Match level="QueryCoverage=100%, HitCoverage=100%, E-value=1e-165, Identity=78%"; Hit description =Rad9 family protein, expressed
  Pfam annotation: Domain name=Rad9; Domain location=13-290; Score =295.0; E_value=1.4e-85; Accession=PF04139.4; Description=Rad9
MELSMSGSSLRTFGRCVTFLARVASELVLQAHPAKLEMHTLNSSRSAYASISLARDFFDQYHLDAAASAPSSTPLQCSVLLKSLLAVLRTPHAALDRLAVSLPEPDAPKLQITLHCLNGVRKTYWIVCSAEPEVQSLSLDRGRFPSRLAIRPRELARLLSNFQSSLQELTIIATDPASGLPDASGDVGGKAVELRSYNDPTKDDCDTRLHTQLWIDPAEEFVEFVHAGDPVDVTFGVKELKAFLTFCEGCEVDILLFFEKTGEPVLLVPRFGLDDGAASDFEATLVLATMTVSQLSDSDDAQQPATSAQNAGEPGAAAPTLVPENVSNHTKIWSELSEGISGIPRSQHHPSNWVGADDNDDDNEDDEELLVQTTPYYMD

SEQ ID NO: 69959 - protein, 103 aa, Zea mays
  Coding DNA Sequence Number=SeqID_26584
MTHFSGRRLARPFLPDVPADRLKRSCSLVEPVLQHGSGEAETVGWGQGPSPSPGSGGSVFAVFRGLARVRALGHAERKFAVFRGLARVRALGRAERSSPSFGA

SEQ ID NO: 69960 - protein, 350 aa, Zea mays
  Coding DNA Sequence Number=SeqID_26585
  Gene Ontology: Biological process=response to stress
  Homolog annotation: Hit_ID=Q10LK1; Match level="QueryCoverage=81%, HitCoverage=81%, E-value=1e-106, Identity=68%"; Hit description =Desiccation-related protein PCC13-62, putative, expressed
MAPSHAHSRSVPLLLLVIGVCCCCSGASSPVVGRLDDDPTCPREPTAAVAAVSSAESSYVEPRRCQPPAPHIAVAVFPYDVDPMQFALNLEYTEAEFFLHGAYGVGLDHLAPRLALGGPPPVGARKANLDEVTRRIVAEFGLQEVGHISARSAGFLGPLIDLSAHNFARVMDEAFGTRLDPPFDPYVNSLNFLLASYVIPYLGINGYVGTNPIVDGYQTKKLLAGLLGVEAAQDAVFRARLFERLGEAVPPYGNITVAEFTDRVSALRNRLGRCGVKDEGLTVPRRLGAEGAICTNVLSADRDSLSYARTPAELLSILYLTGDERVPGGFYPEGANGRIARSFLGKPHGN

SEQ ID NO: 69961 - protein, 232 aa, Zea mays
  Coding DNA Sequence Number=SeqID_26586
  Gene Ontology: Mol. function=sulfate adenylyltransferase (ATP) activity; Biological process=sulfate assimilation
  Homolog annotation: Hit_ID=O48888; Match level="QueryCoverage=28%, HitCoverage=12%, E-value=2e-10, Identity=62%"; Hit description=ATP sulfurylase
MWIGKKGNVFLQIRSLFKKLCDEGYSPSSPWEWDDQGLPGLGEGLSLLGLVIVSHLSPKGSGRFMTRVATDAVGGAKLGARVGVKAGTRAVAIVAGRGVRCHARLFESDGRRLVDLVAPEEGGWHTVLWRSSHNGCASAVLARIGSTPSANGGRARCEGSCAGMRMAFAGCPCRGALPHARHHASPWHDLCDCVLPWPCIAGSTGGSSVRHSFAAVVAVGVSVRKMDPGPFG

SEQ ID NO: 69962 - protein, 260 aa, Zea mays
  Coding DNA Sequence Number=SeqID_26587
MAGCRTRDLHRQVVAHAGASVVAPRVTVDAHRREGATAPQGAALALPGWPRVRAARTPGPLPARNGRAIEAAANARDGPLRPAPSAPGPRSRIRAGADGAWPPRRRCRVPRPGHRQCPAPTRLPQGARVGRAMRRWGAAPPARLGWRGRVPEPAPEPWPGPPWLRAGAATSPSAAPPGAAPVRWGGATCPCAVEATGAWTREMPARAAPMPTGLRAHHQEPPPSCLRHAAGKPEPESDEVGGNRAVAAVTLWRLQWMMRT

SEQ ID NO: 69963 - protein, 91 aa, Zea mays
  Coding DNA Sequence Number=SeqID_26588
MAMGTRYPKPVGMGNPLGTRNPHGYGFGQNFIPVMGMGFLASVFFLRGYEFGQVIPSGFIPVAISRSEWGNSLHLGMLGVRDGNKEFSVRF

SEQ ID NO: 69964 - protein, 21 aa, Zea mays
  Coding DNA Sequence Number=SeqID_26589
MDSMMFEVAKLDHANSKREET

SEQ ID NO: 69965 - protein, 319 aa, Zea mays
  Coding DNA Sequence Number=SeqID_26590
  Gene Ontology: Mol. function=metal ion binding; Biological process =metal ion transport
  Homolog annotation: Hit_ID=Q10LJ9; Match level="QueryCoverage=20%, HitCoverage=17%, E-value=1e-20, Identity=71%"; Hit description=Heavy metal-associated domain containing protein, expressed
  Pfam annotation: Domain name=HMA; Domain location=29-89; Score=45.7; E_value=1.6e-10; Accession=PF00403.17; Description=Heavy-metal -associated domain
  Subcellular localization annotation: CTP_CleavageSite=3; ConfidenceScore=5.01e-01
MASGAAAPVVQVSVHAFLISLHPKPQTLVLKVAIHCHGCKKKVRKVLRSVEGVQNVTVDASQNKVTVVGTVDADTLIQRLYKSGKKGEPWQCHPPVKKSEPAPEAPPAAHPAGGGGKDAATAAAAVDKKPEEPMKKPQGDSSEEKKKKPEEAAKEPQSEKKKPEEAAKEPQSEKKKPEEVVKAPQSEKEEPQSEKKKPDEAAESSKEKEKKPEEPVKEPKAESSKEEKKKKPEEAVKEPQGESSEEKKKKTEQEGGAAEKKPEAESKKKDGGDSKGAETKAKGSAEPAKEAAAVPAPAAAAAVNDKAEAKKSEKPKDAG

SEQ ID NO: 69966 - protein, 89 aa, Zea mays
  Coding DNA Sequence Number=SeqID_26591
MARGPAATFPAAGVKRRPLVGGPDNEQPLHFAKPGIGVMRTLAAARKPSRGFGHGKVVDVGGSQTAGWDDILAQSPKLATGSKSRKFAW

SEQ ID NO: 69967 - protein, 65 aa, Zea mays
  Coding DNA Sequence Number=SeqID_26592
MAVGGHVLPACFHSLRSSMSAPWIFAAQSRHLPATPSRSGIKAVPGDWSDGDSVVPGKDCASPVK

SEQ ID NO: 69968 - protein, 106 aa, Zea mays
  Coding DNA Sequence Number=SeqID_26593
MWVQGHKEYSAWNLLMSVAETIFLCPNARDLRIFGVQGKLLVEERMSIARHLLMSWATSSGSPPEREVEGKARTRVSTGPLLIPGSSSFRDPAEVRTYPEAPDLYV

SEQ ID NO: 69969 - protein, 248 aa, Zea mays
  Coding DNA Sequence Number=SeqID_26594
  Gene Ontology: Mol. function=oxidoreductase activity; Cellular component=flagellum; Biological process=negative regulation of transcription
  Homolog annotation: Hit_ID=A2Z7Q5; Match level="QueryCoverage=94%, HitCoverage=48%, E-value=6e-88, Identity=69%"; Hit description =Putative uncharacterized protein
  Pfam annotation: Domain name=FMN_red; Domain location=46-243; Score= -23.6; E_value=0.002; Accession=PF03358.6; Description=NADPH -dependent FMN reductase
  Pfam annotation: Domain name=Flavodoxin_1; Domain location=50-183; Score=81.0; E_value=3.9e-21; Accession=PF00258.16; Description =Flavodoxin
  Pfam module annotation: Pfam domain module=FMN_red::Flavodoxin_1; Domain location=46-243::50-183
MGKGGGCVPSKKRQPPAAAPSSSSAAAAVPREAPEEEAAAAVGRKLRLYIVFYSMYGHVESLARRAAAGAGAVDGLEAVLRRVPETLPPEVLEKMQAPVKDPAVPVIASAAELQEADGVLFGFPTRYGAMAAQMKAFFDSTGSLWEAQKLAGKPAGFFVSTGTQGGGQETTAWTAITQLAHHGMLFVPIGYTFGSGMFDMDGIRGGSPYGAGVFAGDGSRQPSETELALAEHQGKYMASIVKKLALHA

SEQ ID NO: 69970 - protein, 72 aa, Zea mays
  Coding DNA Sequence Number=SeqID_26595
  Homolog annotation: Hit_ID=Q2QPF0; Match level="QueryCoverage=93%, HitCoverage=6%, E-value=1e-07, Identity=50%"; Hit description =Retrotransposon protein, putative, Ty1-copia subclass
  Pfam annotation: Domain name=zf-CCHC; Domain location=28-44; Score =9.7; E_value=0.052; Accession=PF00098.14; Description=Zinc knuckle
MQHAGKKNYKPKQTTQFKKNMMINMDEVVCFVCGENEHFIKCRNRKDKKNQPGQKSANVTIGDPRGSGIIYK

SEQ ID NO: 69971 - protein, 130 aa, Zea mays
  Coding DNA Sequence Number=SeqID_26596
MTGEGDLERQGRPSRGTHTPMGYEYLTLHLPREVPHARISDSATDEQVLMLETTGKKHNFIPKCSGLSSHKEQTNILGVTMRVPLQTGLRVHSHRNEQPPHKKAWEITNSRWLADDHYTSSATTTSISDG

SEQ ID NO: 69972 - protein, 169 aa, Zea mays
  Coding DNA Sequence Number=SeqID_26597
MAERYQLPRSCVPPTMRWKDGGYPPSGGLEGGKTRCIRECEDMVAFQGGHPPFKGDYPYLRPQPSRAKSSPTRSKALPCGVGAGSHMPCKPAQSRRSQTAVRGTGKGDTPKRILPCEGTWLRATLLIRGSKAGPPEGFDSRLRSRGPYNNYWSEVRRSAPRKGSTAASG

SEQ ID NO: 69973 - protein, 177 aa, Zea mays
  Coding DNA Sequence Number=SeqID_26598
  Gene Ontology: Mol. function=transferase activity, transferring glycosyl groups; Cellular component=membrane
  Homolog annotation: Hit_ID=A2YCL2; Match level="QueryCoverage=31%, HitCoverage=10%, E-value=3e-14, Identity=66%"; Hit description =Putative uncharacterized protein
MEVILLRRGGRVLEERYLKQPLGDLGFKRSWAVDPVAPEADTAVSCGGQAAVELADLRMWLNMFLEGSIVYTRATIVFMRRPNGDLIVGLRHDEEEAVPNTLPNMCSMICFIRGLDVGSHLWGNNSTAADHDTTGLRLLWWLKNQTSFQRSGSWDHFITLGHIFIDLEPLRARLFVG

SEQ ID NO: 69974 - protein, 103 aa, Zea mays
  Coding DNA Sequence Number=SeqID_26599
  Subcellular localization annotation: CTP_CleavageSite=44; ConfidenceScore=5.15e-01
MATSTSTTSASRGYHLLGVHTGLYSNRNIHNLTTLRLRGDFNLSAATFGFYSSLIIGGVERKPAGASGATGKVEAAIGAGIKVRAGYFAADPEVWWDGDAEKK

SEQ ID NO: 69975 - protein, 219 aa, Zea mays
  Coding DNA Sequence Number=SeqID_26600
  Gene Ontology: Mol. function=transferase activity, transferring glycosyl groups; Cellular component=chloroplast; Biological process =starch biosynthetic process
  Homolog annotation: Hit_ID=A9QXF0; Match level="QueryCoverage=72%, HitCoverage=20%, E-value=9e-92, Identity=98%"; Hit description =Starch synthase IIc
  Pfam annotation: Domain name=Glyco_transf_5; Domain location=39-211; Score=177.9; E_value=2.6e-50; Accession=PF08323.2; Description =Starch synthase catalytic domain
MLVALDISCTNSTTKIAFNTDHFNPLFTLFAITLYQFPAGGLGDVAGALPKALAKRGHRVMVVVPKYGDYEEPQEIGEPRSYHVAGQDMEVKYYHAYIDGVDFVFIDNPVFHYVQSEIYGGDQTDIWKRMVLLCKAAVEVQWYVPCGGFCYGDGNLVFIANDWHTALLPVYLKAYYRDNGFMPYARSVLVIHNIAHQGWQLGQWCMQVIVAHGCTCQAI

SEQ ID NO: 69976 - protein, 242 aa, Zea mays
  Coding DNA Sequence Number=SeqID_26601
  Gene Ontology: Mol. function=transferase activity, transferring glycosyl groups; Cellular component=chloroplast; Biological process =starch biosynthetic process
  Homolog annotation: Hit_ID=A9QXF0; Match level="QueryCoverage=67%, HitCoverage=21%, E-value=1e-83, Identity=94%"; Hit description =Starch synthase IIc
MGAEPAPVEATTARDALVADRGAAATPTVEASSMGGREGREVRPTRGDRRPESEWVTFLWKELTVSGIEPGWVIFLWKKISEKKQLISTILDSSIHNEQEPLSGQSDGSLSNLNAIAKGTEIGYDHQTYHNRSLQQYEFDTTYGESIYDQNTYYESSEDDGTDFSENYQYKSFPRATRSVYELEEDNGMKQGYVVQLSQASGHEQSVNEGTNDNASEVDVMNVILVAAECAPWSKTGGGIGL

SEQ ID NO: 69977 - protein, 468 aa, Zea mays
  Coding DNA Sequence Number=SeqID_26602
MGSARVAFILSSLEECNFAEVGTFQPSLGFKDFHQAARLHPLAGGERALTGLAEGTDFGNAGLVGRERHQLQRVGLAGSAGSGSAPGAPLPPSGGAWPPARRTSGCCAARTGGPPKTSRAARAAFVFLGCPAFAPMAAVVGAEVVAAVEVLVADEIAATIRAPGLRLFGFDSLSSPLEWGHGRGPCRSSVCPGVIVAAVWPPGAEVIVAAAGVGGGEPPGVLSSRRPSNVGGCSYLREWNRSSVCNGTLSVGVCSLWLSGPEHESLGSVGLAARGFSCLVKETLGRSAMSRSWRQRCEHGQRQSWLEKKLRRPEPGRAVHWRDRRRSRVAEAMSRADVLEGQLAEAMKRPVEPSARAGFPEETLAVMAQAGADRFLRGGDPPTVLPFEAWSDSAEGGVNAEGAAAPPLMSDPAGTVYLYGIAYPSVSYLSQKVMSEDPTFEVVKKHERCSGRKTFSEENFDAEGVPPF

SEQ ID NO: 69978 - protein, 338 aa, Zea mays
  Coding DNA Sequence Number=SeqID_26603
  Homolog annotation: Hit_ID=Q6QP51; Match level="QueryCoverage=18%, HitCoverage=30%, E-value=7e-17, Identity=66%"; Hit description =Putative growth-regulating factor 1
  Subcellular localization annotation: CTP_CleavageSite=28; ConfidenceScore=5.11e-01
MQAACNRTKGSHPFDSDASSMGAQTHTSCNRRAGYYVRETAPPLVSVPRLLDYGTGAATRDNPAHGPTVPTEHIDHGSVSRGRRRDGRYGQKWAGSNGGGRRAEAAVKSSAGTRPLLGQRESPLPWCEDDAPVFRSSNGSDRERGYSERDPSPRRKRAPSPPTDQRFEGWPLGRVQQPPQSTRAPRPLLIRGSKAGPSEGFDSRLRALRLRAHYWSKVRRLAPRKGSTAASGHSGSAPITDQGFVGWPPKGSTAASEHAERGMTLGTSDTWPRLGLRSHGTLGHFRDQQKRFCNGIPSEGGIEPSDPIKRDRTPCSAPSEGNMALSPVLLAERRRRGV

SEQ ID NO: 69979 - protein, 187 aa, Zea mays
  Coding DNA Sequence Number=SeqID_26604
MPCSFLVAVGCGLWLGMAAGRVVFGSDNTRPDIIPDPYTNIHTHQVNRVKKWTRTRTHRVSVGYRVSGGYGTVKYKSACKLMNNVMNSSGTPQRGSGLLSAGLLGEGAGLGPGAWPPRRLLGAWTGARGWGLGPGRRGAAWEPGRGLPQCRVPAWPRGALGPGLLASTSREGWDEDDWDSGSGGCGG

SEQ ID NO: 69980 - protein, 136 aa, Zea mays
  Coding DNA Sequence Number=SeqID_26605
  Homolog annotation: Hit_ID=Q2RAS4; Match level="QueryCoverage=50%, HitCoverage=36%, E-value=1e-16, Identity=62%"; Hit description =Uncharacterised protein family containing protein, expressed
  Pfam annotation: Domain name=AIG2; Domain location=7-106; Score=-5.5; E_value=0.084; Accession=PF06094.3; Description=AIG2-like family
  Subcellular localization annotation: CTP_CleavageSite=50; ConfidenceScore=5.62e-01
MADPPPHPHPNHSFLVASTIPFVGSASTAGPASLIIGPYSVPFLLPTPASASSRRVVCGELYAPSHAALAELDAFEASASPPRQTRSLSTEDKRMQLLDKLKYMERELVATKGWESALQEQLLKELGDYKGRIVVK

SEQ ID NO: 69981 - protein, 128 aa, Zea mays
  Coding DNA Sequence Number=SeqID_26606
  Gene Ontology: Mol. function=ligand-dependent nuclear receptor activity; Cellular component=nucleus; Biological process=regulation of transcription, DNA-dependent
  Homolog annotation: Hit_ID=A8X2F5; Match level="QueryCoverage=93%, HitCoverage=89%, E-value=3e-26, Identity=50%"; Hit description =Putative uncharacterized protein
HSGHPELRHSGHPELRHSGHPELRHSGHPELRHSGHPELRHSGHPELRHSGHPELRHSGHPELRHSGHPELRHSGHPELRHSGHPELRHSGHPELRHSGHPELRHSGHPELRHSGHPELSKREHVAPP

SEQ ID NO: 69982 - protein, 130 aa, Zea mays
  Coding DNA Sequence Number=SeqID_26607
  Subcellular localization annotation: CTP_CleavageSite=37; ConfidenceScore=5.09e-01
MRDNSWVVGWLCPRHPVSGGLHFRAVSCWVRAVFAVEQAVKSARLDMTTPSTNTLQPLSHTTSTQVQPTSSPTQVFDGPITRSRAKKLQQEVHALLYEFRLNTNENFMLPKSLRQPTYFSADWSEGQQSA

SEQ ID NO: 69983 - protein, 111 aa, Zea mays
  Coding DNA Sequence Number=SeqID_26608
MSDDLVVPVHFEVGQEPCFCLLIICSSNWSCSSAGNVSQVGSMMLLGETSELSLEPAIEGRFDRSRCTVPSGVAKKYVDAFLERQTPNKNRGGALCTGADGPRAGTRRSAA

SEQ ID NO: 69984 - protein, 100 aa, Zea mays
  Coding DNA Sequence Number=SeqID_26609
QAGPLVQALVLDLGLPPEQLLAPAGGRLSVSKATVNPKPRSAKREMETYTSRGKAPSKESGTKGREDSPPRVKSHRSGDNKKKMKKVVYYETDSSSLKVA

SEQ ID NO: 69985 - protein, 161 aa, Zea mays
  Coding DNA Sequence Number=SeqID_26610
MQDRQDALQQQLLQDRAESRAFMALMLQHSGVSVPPVQSAPPPPLQAPVVPAIQTGPPIPSIGPSPLRPVTLAFTSPVLSSVCPQPPVPPASAVTTTAMAVSVTTSVPAAPAVRPQSESVLAPASTADPGSETDSDPPPAFALLPRPRPDAPPPPPPASDV

SEQ ID NO: 69986 - protein, 56 aa, Zea mays
  Coding DNA Sequence Number=SeqID_26611
MGTGGPGIGFASRSRSDTHLGKDEGLENTWLMDSGCSCHMTRSDKWFSSLEPMIGA

SEQ ID NO: 69987 - protein, 71 aa, Zea mays
  Coding DNA Sequence Number=SeqID_26612
AILALNAPAIWSVGVAIWPRLLLGEDWASGEPKLCADGGYQLRLGVLGGAEHGVSSELLTGDPSGRSCPIR

SEQ ID NO: 69988 - protein, 126 aa, Zea mays
  Coding DNA Sequence Number=SeqID_26613
  Subcellular localization annotation: CTP_CleavageSite=31; ConfidenceScore=5.72e-01
MALRMSPQAHTSFNPSLSKSAMSSPSSSSTHASQERKTTEINQVATQENEISQNGRATSKTCLEPILAYRSVNSDHVTADSNVMERQISDPCTNGLMTMLHSGKPDGLMMRYPPWWLIPFLKARIR

SEQ ID NO: 69989 - protein, 46 aa, Zea mays
  Coding DNA Sequence Number=SeqID_26614
MAMMGTTSKKMYLCQVRKQPTFVASVQRWYQRKNTRSEAAGGKDPP

SEQ ID NO: 69990 - protein, 85 aa, Zea mays
  Coding DNA Sequence Number=SeqID_26615
MGHGDAVEVPRHVAQGREEAVTGEVIRSDRGRLGEQGSDPPEFVTPEEGSEPDLSEIDLSCQENFDEGKFILPLMHKLPTLSTTT

SEQ ID NO: 69991 - protein, 71 aa, Zea mays
  Coding DNA Sequence Number=SeqID_26616
MTAKRRVEYAETRKRGGKNSGAAIDVRKTKRKERTTTQLPYNGLRGEEESALIARILTVAASAVREWGSRK

SEQ ID NO: 69992 - protein, 145 aa, Zea mays
  Coding DNA Sequence Number=SeqID_26617
MERGAALGAEHASEQDPGEEWRHGSKEKFLLFLRRRRARRPALVMKWWQDTAWGRSRRTWGNSREQHHGETAFPAAGEVRQRGSHGRPCSCAEKGETLEEASALRNRGENGVSAEDWTQGFLAELDKNLLEDNTLEIPLENTDSY

SEQ ID NO: 69993 - protein, 84 aa, Zea mays
  Coding DNA Sequence Number=SeqID_26618
MAHEIMKKSEKDIHDAREATKEAEKAAELERRIAELPPPPEPFDPLADPETRKAIEVINVAEAIVDEVVTKLLNEVAEKVLKEE

SEQ ID NO: 69994 - protein, 398 aa, Zea mays
  Coding DNA Sequence Number=SeqID_26619
MHRALPISEPPDGEHPRCFRLAAVGGAQPHGGWHPSAIAQLQGFSSGSPAAFFHQWSRMMVTTGSMVGRSKLGCGLCPALSFKDLHHPSWGGGRGKSGPASAWAGDPLLPPASGGGNHPPALPRRRPPAMQGKANCCCLARVQHSVLRPGDCGRLHRGVAQHVVRREGDTRVLGRSRSRSCGEDGSEDLPVRFGAVAARGRGVGRQVAAVVGAEVVVAGEGFSADDTVSVTCAPGLWLFGFNGWFSSPKRGHEREPSRGSVRPRAIAAVVLPFETEVVVVAAAEVAGEPPGDPGGDPGCDGPSAVLTSSFEVEILPPVSPSEAGPDPAEGGNNAEGAVVPSVDDLFVGSRITYPSESYLSRKVMSEDTAIEAIEKRERCSGKKTFSEENFDTEGVPSF

SEQ ID NO: 69995 - protein, 152 aa, Zea mays
  Coding DNA Sequence Number=SeqID_26620
  Homolog annotation: Hit_ID=Q6J9V9; Match level="QueryCoverage=49%, HitCoverage=31%, E-value=5e-10, Identity=47%"; Hit description =Putative uncharacterized protein
MQVACDRTTGTHPFDFDASSMEAQAHTSWTGKGDISKGILLHEGSGPRALLLIKGSKAGHSEGGLKAGPSEEFDSRPRARRARDDSGYVRYKAEARATLPRGSRAALANPATAKPLTASTNQPENSEPDHAPGLPSDRMREQPDRLRHHERH

SEQ ID NO: 69996 - protein, 195 aa, Zea mays
  Coding DNA Sequence Number=SeqID_26621
MAAWERPQGPVGTQQSAHAHRSKAELDKVWTDKAKIIKLSDSWPLHSSIQLYSLKISKAFSGEDAARDLVAFELQVAKEMHLPEGSDQCSAVSSANESVQLQRPEFGHLEQWAVILIPFFFSSHHSCVQLANCSLISGKHLLFDTSVQFFKLMVTPPATLPMHEREDELDFFETLFASGGIDHHSSQYPDGDWRS

SEQ ID NO: 69997 - protein, 97 aa, Zea mays
  Coding DNA Sequence Number=SeqID_26622
MDEYEKGDRPPGTSNCITFESPEDWGRFSLQEPNLETFCAQICLPEPRHPTRETASQDMEKHKGSYNQGPREDWEIELAELLSTKRKSCSSTDSRTS

SEQ ID NO: 69998 - protein, 130 aa, Zea mays
  Coding DNA Sequence Number=SeqID_26623
MDVLIIRYLGEDQQGLRKGQGVEEEEQGRPQQEGDQVRDQSALKWTPKMHPDSDSDGLDMVRKITRLSNQPNWFHPKIHPESTGIVETSQRSDSVLVLLSGTIIRGTLKTPNSQLVTPISMKLQRPDGCD

SEQ ID NO: 69999 - protein, 202 aa, Zea mays
  Coding DNA Sequence Number=SeqID_26624
  Gene Ontology: Mol. function=heat shock protein binding; Cellular component=membrane; Biological process=protein folding
  Homolog annotation: Hit_ID=O65160; Match level="QueryCoverage=57%, HitCoverage=28%, E-value=2e-47, Identity=80%"; Hit description=DnaJ -related protein ZMDJ1
  Pfam annotation: Domain name=DnaJ_C; Domain location=65-180; Score= -36.0; E_value=0.0016; Accession=PF01556.9; Description=DnaJ C terminal region
  Subcellular localization annotation: CTP_CleavageSite=7; ConfidenceScore=5.03e-01
MAHRTVRCATGAPTVRHRCANGRFQRLVLTGSRWTHGAPDSEQSTVRCTPDSPVRCPGPRCFQVGIMQSAKKGWVKVTDYNSYQTVKGSLKFKRKGPDLFYEHTLSLTEALCWFQFVLTHLDNWQLLIKSIPGEVVKPGRFKAINDDGMSIMKGKLYIHFTVEFPDSLVLEQCKALESVLPPKLSSNLIDMEIDECEETTMH

SEQ ID NO: 70000 - protein, 156 aa, Zea mays
  Coding DNA Sequence Number=SeqID_26625
  Homolog annotation: Hit_ID=Q5G7K0; Match level="QueryCoverage=39%, HitCoverage=8%, E-value=4e-17, Identity=70%"; Hit description =Putative polynucleotide adenylyltransferase
MSTPRAVQFGDGRYANGHKRSTRDVVCAGERQNLLKVLPNNSKELSVRRVCEGCGMSKVKNNNGYHGVTEPISLSGPTEKYLMQTAEVEKYLSDARLYERQDEAILREEVLGKLDQVEQFSTEIYYFASFKIFFSLAAVDEGTTSSAFASGNKQTV

SEQ ID NO: 70001 - protein, 331 aa, Zea mays
  Coding DNA Sequence Number=SeqID_26626
MHRALPPFEPPDGERPRCFCLAVVGGAQLRGSRHLSAIARLQGFLSGSPVASPHQWSPKTVTTSSMVGTSKPGCGLCPALSFKDLHHPCWGGGRAELELYLPHGSVGHLLLQHSGERAPTGLAEGANFDNAGPVGRERRQLQRVGLAGSAGSGSASGAPSRRWAECGYLAAVRAAVTPRVPGDRLRRRALLGWRSCSWAVLPVLRHDASARRLALARPGGLEWGSAGRQVAAVVGAEVVAAGESFPTDKGVSATRGPTSGSLALIACPRPSSGDVGEGFVAAASALRSSLLLFGRPERRSLSLLQEWVAASHLEIVVPQALRCGVEPEFRL

SEQ ID NO: 70002 - protein, 337 aa, Zea mays
  Coding DNA Sequence Number=SeqID_26627
  Gene Ontology: Cellular component=nucleolus
  Homolog annotation: Hit_ID=A2Z3P4; Match level="QueryCoverage=93%, HitCoverage=95%, E-value=5e-60, Identity=44%"; Hit description =Putative uncharacterized protein
  Pfam annotation: Domain name=Auxin_inducible; Domain location=186 -290; Score=-1.3; E_value=5.6e-05; Accession=PF02519.5; Description =Auxin responsive protein
MINPKKLAQLARKWQRVKIATKDDDRCCTISPIAGRGHCTVYTVDGSRFEVPLAYLRSVVFSELLRMAAEEFGFTGLVHDVNSLDAMCPIQELKAHYACLTPACTKHLAPSESDPEHMHVAPHGLVPCQSSHLAEQPCPSSIYILMVKWPPNTITCRLQLLKQGIPNRNHTAPQLPARQREKETIMISTKRISQMVKKWQRMAVLGRKRLSWRVEREVEDRSCASVASKDHCMMYSLDGRRFEVPLAYLGTLVFAELLWMSYEEFGFVSHGRITLPCDAAAVEYAMCLLRKGSSADVEKAFLSTMAVSCHYASCIAIAPFVGVSHQAVICSSWLTVK

SEQ ID NO: 70003 - protein, 145 aa, Zea mays
  Coding DNA Sequence Number=SeqID_26628
MGTWHVGSTVRRLDSQADAGFTSLLRLELSVLQLQHGLSGLPWGRNDRQLLGILCYALFVELLSGGVWRSLDPEYIAESKSKESCRVGLLARDKVMRTWMQYVHTFDLRALSLLGLSTSYAAMLSGLVGKGHEDPMAMWNGSNMN

SEQ ID NO: 70004 - protein, 117 aa, Zea mays
  Coding DNA Sequence Number=SeqID_26629
MEPGGRTAVGAVESLLTSSCFRKGAESRRRHKVESEPLGRARRSSSSSRAEPKSEPWVGRSGVHRLLGLSPSPSPGSGRADPSPSPGSGGAEFAVFRDLAQVRALGRAERSSPSSGT

SEQ ID NO: 70005 - protein, 320 aa, Zea mays
  Coding DNA Sequence Number=SeqID_26630
  Subcellular localization annotation: CTP_CleavageSite=94; ConfidenceScore=5.20e-01
MSSRSLMHRVFPPSKPLDRGYPPSFRLLVGGTQLHGSWYLLAIVRLQGFSSASPAVPPRRRSPKTVTTSPWVGRSKSGCDLGPTLSFKDVHHPRWGGGWAEPELYLPRGFVGHPLLWRSRERALTGPAGGSDFDNAGLVDGGRRQPQRVELVGLAPGAPSCQKVAAAPCAREDRPRCRALLGRRSCSGAVLPLHRYGASARRDVCASESCFSRKVMSEVSVSRRRRSPSARSALPLTRTLTRPWGSVTDSVEKARRIASAEELPNVKTCSVRGITYLNVSYLSQKVMSEVSVSRRRRSPSARSALAAYVYSVVFRIHFSK

SEQ ID NO: 70006 - protein, 255 aa, Zea mays
  Coding DNA Sequence Number=SeqID_26631
  Gene Ontology: Mol. function=oxidoreductase activity; Cellular component=fatty acid synthase complex; Biological process=metabolic process
  Homolog annotation: Hit_ID=A5C538; Match level="QueryCoverage=72%, HitCoverage=26%, E-value=4e-59, Identity=51%"; Hit description =Putative uncharacterized protein
  Pfam annotation: Domain name=MaoC_dehydratas; Domain location=124 -246; Score=98.4; E_value=2.3e-26; Accession=PF01575.10; Description =MaoC like domain
MATSSKPAAPVDPMVVLAHEFPEVSFDYDERDVALYALGVGACGDDAVDEKELHFVYHRDGQPHIKVVVNRVKVAGLHDKGKATILELETTTSLKESGEILCMNRSTIYLRGAGGFSDSSRPYSYATYPANQVSRISIPNSAPSAALLYRLSGDYNPLHSDPDIAQLAGFTRPILHGLCTLGFAARAVIKSFCNGEPTAVKSIFGRFLLHVYPGETLSTEMWLDGQKVHYQTKAKERNRAVLSGYVLLQHIPSSL

SEQ ID NO: 70007 - protein, 84 aa, Zea mays
  Coding DNA Sequence Number=SeqID_26632
  Subcellular localization annotation: CTP_CleavageSite=58; ConfidenceScore=5.31e-01
MPPRRPCPPHARHSHPRWLAPLLLLVPSPASALNVAGQPWSKARGFTGFTKRALVATGAAVVSSIPVNPLDVAKEQDGAVEQHL

SEQ ID NO: 70008 - protein, 610 aa, Zea mays
  Coding DNA Sequence Number=SeqID_26633
  Homolog annotation: Hit_ID=Q6JAD6; Match level="QueryCoverage=83%, HitCoverage=70%, E-value=0.0, Identity=73%"; Hit description =Putative uncharacterized protein
MEKCKPIKTPMPTNGHLDLDEGVTLIARVPSPVLPGSSPLVHQFRMPRTKNVSAPGGGDDEDPRRPFRQVKGKTVYLEQQEGRKKRRTDRAARAAAAAAAAAQAELGDQPQTPSDQIAYRVRRLASRPRSSTHTSASTPPPTLPAPVTPVAPSTTTAIPATSTTPASTAPPPPAPALAPPVPPPRFRERDETEVQPLAADPRLFDLQRAIAARVRRFRYVPVESWLPAQRDPAAVDLFSTRIQESFFRAQMSAQIALRVHRLLDLPAFLLAAGADSEAHLTYLPGLQTLLTTSDRYVEEWVRVFYASVWIDPDHHWMRFRFEREDVTITASQIRQLFGFPESTTRLHSLCYGTSDPPRRPHGGVAPGTTHVVALFRPPFTDGSRRSPADFTTAAKYLYELIRRTLLSRMGYREATTHIQLWLLGALVSHSEFDVVDFLICEIEDTVLDGIRARRQLPYAHYLCHIFAQLIQPPRFQGTLEASRLVFGSYRPAPETPVLASAPVFDSQAEDATFHQFDTQATTADDDDDDDFGVPPPPPMPPRSHDHEAGSSSAAVGVLGPTAHLGLPLEVGLLILSHALEVGIILAWNDNPWGAPEVHPMGVAPDLQMDF

SEQ ID NO: 70009 - protein, 149 aa, Zea mays
  Coding DNA Sequence Number=SeqID_26634
MGKNNKRKREPTPPSEEFGDSEYSEEEFSSESEGSPAPIPLRESSDDSDDSQGLAAEVWTYIWAVERSGLEGSDESEYSSDEEDSDGGGEDEEEDDDDNDDGGNGGDGDGDGSGRGGNRGGSSRGSTRGGSGGGSTRGSSGGGSNRASG

SEQ ID NO: 70010 - protein, 43 aa, Zea mays
  Coding DNA Sequence Number=SeqID_26635
MTTMFMHRCDNASHVIDKVWEIRETCRYRNTTKNFRKVCYDVG

SEQ ID NO: 70011 - protein, 223 aa, Zea mays
  Coding DNA Sequence Number=SeqID_26636
  Gene Ontology: Mol. function=protein dimerization activity
  Homolog annotation: Hit_ID=Q3E8T5; Match level="QueryCoverage=29%, HitCoverage=15%, E-value=4e-10, Identity=48%"; Hit description =Uncharacterized protein At5g31412.1
  Pfam annotation: Domain name=zf-C2HC_plant; Domain location=67-122; Score=46.9; E_value=6.9e-11; Accession=PF07567.3; Description =Protein of unknown function, DUF1544
MRTKEQYRAVTTAGAASSILSSAHPAAQEAEAGTPHPFVVARMSSAASNPSAQPAVDKQPLKRNSDDIGWEYGTIVNPNDWNVIKCKLCPMVVKAGIYRLKLHIAGRKGQVRACPNATLVATDATFAQGWMVDGAEKDEEGSDVEPVTGLTWKLIAETCGAEEVTKLRRSARLTVEREVEDTPLSETESEEEAPQEEDVDFESDQDDVITAGYELDAEEDNDG

SEQ ID NO: 70012 - protein, 67 aa, Zea mays
  Coding DNA Sequence Number=SeqID_26637
MGSPCFSFLLARPLYPWACVPLFHCRTTAEMRGEEKEEPWASRREEGGALPGRLGKSNLSIAYITNT

SEQ ID NO: 70013 - protein, 549 aa, Zea mays
  Coding DNA Sequence Number=SeqID_26638
  Gene Ontology: Mol. function=alpha,alpha-trehalase activity; Cellular component=anchored to membrane; Biological process=trehalose metabolic process
  Homolog annotation: Hit_ID=A2Z9F3; Match level="QueryCoverage=100%, HitCoverage=100%, E-value=0.0, Identity=68%"; Hit description =Putative uncharacterized protein
  Pfam annotation: Domain name=Trehalase; Domain location=35-540; Score= 807.1; E_value=1e-239; Accession=PF01204.9; Description=Trehalase
MAPTAATAGASDEGASALLGLLQRVQSEALRTLGPHDFDPKFYVDLPLATDERAAAAALAALPRPSPSRAELDDFLSRYFGDPGSDLVADVPPDFEPEPRGFLPHVHSPEARAWALEVHALWKRLARRVAPDVAARPDRHTLMPLPGRAVVPGSRFREVYYWDSYWVIRGLLVSKMYDTAKTIVLNLVYLLEKYGFVPNGARSYYTNRSQPPLLSSMVLEIYRATGDVEFVRTVFHSLLKEHSFWMSVAVQSFTIKGPTNIVFFFKDEELASKLNSMAAKEKLYCEIASTAESGWDFSSRWMRNSTDMTTLATTYIIPVDLNTFLFKMELDIGALAKVVGDNATSEFFLNASKARHIAIDSILWNSEMEQWLDYWLPGDADCQEVHEWKPNSQNRNIFASNFVPLWLNAYHSEFVRFADEAKSNRVMASLKASGLLHAAGIATSLTNTSQQWDFPNGWAPLQHLIAEGLLHSGSEAKKLAEDIATRWVRTNYAAYKATGAMHEKYDVEACGESGGGGEYKPQTGFGWSNGVVLSFLEEFGWPEGKEIAC

SEQ ID NO: 70014 - protein, 144 aa, Zea mays
  Coding DNA Sequence Number=SeqID_26639
MGKSKKSGSLSHHSGDKRKREPTPPSEDFGDSEYSEEEFSSESEGSPVYTSPPASSEDSDNSQGIAAEVWTYIRAVERSELEGSDESEVSSDEEDSSDSSEEGSGDDGDGDDGKGDGSKGDDKGDGMGGNGSGSGKASGKAPLA

SEQ ID NO: 70015 - protein, 51 aa, Zea mays
  Coding DNA Sequence Number=SeqID_26640
MTPTKKEDKQQASCQVKRHFCYMCGEHGHLSKALLDDRYGPIPRWVPNCTN

SEQ ID NO: 70016 - protein, 145 aa, Zea mays
  Coding DNA Sequence Number=SeqID_26641
MAKSVPNELVVPSGSDQNHSMKKHKEYEAFENKSPTEAPSHFRKPVGFLPSLAKIIISPDVFIHLLKELLQGLRGFPGKILGRRSWPKPFDHGPNDSFIGHYGRLCSQTQEPSNICLEVFFVVLRALEQSLSSDRLHLKSLETGD

SEQ ID NO: 70017 - protein, 131 aa, Zea mays
  Coding DNA Sequence Number=SeqID_26642
  Gene Ontology: Cellular component=integral to membrane; Biological process=protein insertion into membrane
  Homolog annotation: Hit_ID=Q9FWB8; Match level="QueryCoverage=66%, HitCoverage=17%, E-value=3e-26, Identity=64%"; Hit description =Putative Oxa1 protein
MANTAIGPPAIAMLKNTCIMDHYVVLAVFCYWTSSNIFTLLYGLVIRRPAVRKWFDLPALENTRSLTAKPVFNMFGGSKAIPAAQSPVAIAGAQQSGLDQPDASALGYKVKNLEKKVKSRGKSRKHRGGRG

SEQ ID NO: 70018 - protein, 143 aa, Zea mays
  Coding DNA Sequence Number=SeqID_26643
MKNYRRSNVARSGVEHAAHSRGVYPDRWEVTYLVRRPENSLRGAEICSEHYSISERDSAEAAMQDAARRALSHYCSVLGGMSENRCRGGRRAQQEHAAPQDEAPQQQQLPPPPPMSFEQMFLMQTQAVPAIGQTLAAIQQQQQ

SEQ ID NO: 70019 - protein, 106 aa, Zea mays
  Coding DNA Sequence Number=SeqID_26644
MAYQTELLLPIFNDQGHRSKLQEIRGVITDCTIELSCAPRVHELHVSMSSDGYSSRSPLNCSSEAPSVFAYGAEVTQLGVIGMAPRFLGIYGKRDGNGMCYYKNGT

SEQ ID NO: 70020 - protein, 46 aa, Zea mays
  Coding DNA Sequence Number=SeqID_26645
MAVAFSLLRIVLASSLWAHGRCLLPAQDRARDFLKALGKDIKASSD

SEQ ID NO: 70021 - protein, 403 aa, Zea mays
  Coding DNA Sequence Number=SeqID_26646
  Gene Ontology: Cellular component=integral to membrane; Biological process=protein insertion into membrane
  Homolog annotation: Hit_ID=Q9FWB8; Match level="QueryCoverage=45%, HitCoverage=35%, E-value=6e-25, Identity=44%"; Hit description =Putative Oxa1 protein
MAFAARRSIATRLSHHLTRRLHPCVPHSRTSDSLDEQASRPSPPLPLPLPPLHVQLKQRSREVQILGFLPFSLRLAGPTRRTFSSSAPAPNLEAAPAAEVDAAGVLADAAEAAASVPAPFPGEVAAAAADSFPPVAALQHIIDAIHTFTGLNWWVCIALTTFIIRIATVPLLVNQLKATTKLRVNNGARRPGGRWAWTAMVLDTGSSRLAALEKNSPLLLPSTPNRVSALEKENKAVEEVETVHSYSSEAKAWSDRSSKWGRGEEGGEWELWGESVIGFMCGWALVDGLLHFLAFNLQKQENDHNSFILVQHWNQKLVSYNMDTQELHGLCTLENGYVDNMDLPSGSARRQQGELASTILSREKATAMGPERTREHDPEQGEGNGHGQRHATTGADAAGLNPS

SEQ ID NO: 70022 - protein, 127 aa, Zea mays
  Coding DNA Sequence Number=SeqID_26647
  Gene Ontology: Mol. function=actin binding; Cellular component =intracellular; Biological process=response to stress
  Homolog annotation: Hit_ID=Q337A5; Match level="QueryCoverage=92%, HitCoverage=93%, E-value=6e-53, Identity=75%"; Hit description=Actin- depolymerizing factor 10
  Pfam annotation: Domain name=Cofilin_ADF; Domain location=22-125; Score=90.1; E_value=7e-24; Accession=PF00241.11; Description =Cofilintropomyosin-type actin-binding pr
MATAAAALPWGGGSPAWIDVPERSKSAFMELKRRKVHRYVIFKIDDSREEVVVDKIGAPGESYDDFTASLPTDDCRSPSDSRIRAKTIYAVSRNQFRHELDGVHFEIQATDPDDMNLEVLRGRANRT

SEQ ID NO: 70023 - protein, 60 aa, Zea mays
  Coding DNA Sequence Number=SeqID_26648
MAWIRMVLAAEATRDSHIPQHSPPPHPLDLMWVRILTLNASYFLKNDSHFVISIKRLSEG

SEQ ID NO: 70024 - protein, 170 aa, Zea mays
  Coding DNA Sequence Number=SeqID_26649
  Subcellular localization annotation: CTP_CleavageSite=21; ConfidenceScore=5.10e-01
MRCRLLALAHRCVELLNAAVSSSYIVVPALGSPTSLLPTGPAALSATARRLPRNSPTVACLLADILPRRVRSATASSTSPRRPRTRFQAITPDAHLQSAIKFHLTLPWPGILEGFLDRVALVLCSLKGANVSTKNCENLRRVLLSEDKLLVKVWGCLEDICSEILIVSLI

SEQ ID NO: 70025 - protein, 662 aa, Zea mays
  Coding DNA Sequence Number=SeqID_26650
  Subcellular localization annotation: CTP_CleavageSite=13; ConfidenceScore=5.01e-01
MPSSSSSANATPPAAASSEETLSNVMVEELRTGDSVEFGVSRMTSARIEDMQRLGYFGGGVARAPGTEEVPEPEGELVVFEAFFVAGLRLPAHRVFELNQLPYDGYPGQDEADRRGKKPAVETGSDPALVAAASSKKRKLVMDKDRQGAARKRQATVRVHEARPKRQRGTAKAEASGGGKPPLPAKAGASAPGKAPEVTVGAGGPKLTKVVPSASGAAEAAKAARTLPPPGKRVADFGTEINVEDYLGGSDEGPLALVVPGAAIATAAPAPKAGGDFLGVGGEVSALALVRDEAGVATRRLKGATEALSQVADFTSRTASGALTAALSAEVERLRTQHADAVREKSASDSKCRKLAEKVAALEKEKADLRRQLAEERREANEAIAKEQAAQAEARLARAEGNIAKELAGELQRRLAALESRAEGAEAAMRAEAERTRTQLMTSYRELGVRTGDFEVPEREAGLRCLEWVQEELQELPTVLAGLMSFTSLVTCEAAMNALSREGCRHYEALDQVDEDFGRDIFEVEDPVVKESAGALYDRMWGSYGREVVRARAEAARAQAERGERVDDFGALNSALPEPETTPAEAATGVAPGPTPETVEDAPGAPAPAAVGEDLPPTVAEGAPDAPAAAVRSAEDPVEVGAEATAEASAEAAAAAGPSQVA

SEQ ID NO: 70026 - protein, 120 aa, Zea mays
  Coding DNA Sequence Number=SeqID_26651
  Subcellular localization annotation: CTP_CleavageSite=43; ConfidenceScore=5.11e-01
MGAASQSASESNMAVGVTGGGLTPWATTLGQQQRPTPPRGRFRGRHVAREDDILQGINSGDQSIPQATCLSIPLVGSTSILLRALCASSLARYQGSNRSISILHGLRISWRQEIAQAYSH

SEQ ID NO: 70027 - protein, 87 aa, Zea mays
  Coding DNA Sequence Number=SeqID_26652
MEVRPKLGWPSRRMEMIRQCDVAHAGQWDTRLDPGARWSLRCDRSEVVVEVATLDVLPALKRPLQRDSGILARMPTVEFCPQVIRSL

SEQ ID NO: 70028 - protein, 269 aa, Zea mays
  Coding DNA Sequence Number=SeqID_26653
  Homolog annotation: Hit_ID=Q9FIJ2; Match level="QueryCoverage=14%, HitCoverage=41%, E-value=1e-09, Identity=70%"; Hit description=NADH dehydrogenase 10.5K chain-like protein
  Pfam annotation: Domain name=L51_S25_CI-B8; Domain location=158-217; Score=16.6; E_value=0.0032; Accession=PF05047.7; Description =Mitochondrial ribosomal protein L51  S25  CI-B8 domain
  Subcellular localization annotation: CTP_CleavageSite=58; ConfidenceScore=5.06e-01
MKSITKDRVKARLAKWRSGENNQGRPIRTLSPPRIAPPPPRIPHPPRIPQPRRSRSLPCSLRARPWISNNERRRRRLASTNPAPGRQLPPVGPHVQRREAVRDPAAGPTKVSVFIASNDAEQACDFKITGIYHDGTNLAPSSTLPVRFDYLKLLFLIRCAGDLVARREFVKKNYGDIKARNPSLPFLVRECSGVQPQLWARYASGVMATLLVFLSVGLVGATDGPLVRHPWQGIQAWAPRHHRTSTNTTSRGHMESNYFDLSVSFLSTL

SEQ ID NO: 70029 - protein, 64 aa, Zea mays
  Coding DNA Sequence Number=SeqID_26654
MDGTCNGGEVADEGGDGGGIGRPRAGGDAAARNTNDFLSPIVVPTDGVPLRLAATYRGRNLGWV

SEQ ID NO: 70030 - protein, 54 aa, Zea mays
  Coding DNA Sequence Number=SeqID_26655
MDSQAPTNSDGDQGSYPLIEDGDPMGTRNPNGDGYGMSFTPMMGMGMGMGMDQT

SEQ ID NO: 70031 - protein, 127 aa, Zea mays
  Coding DNA Sequence Number=SeqID_26656
MAPSAPAAPLRPLDKGKGAAGSSSAPGGTGMSEEERRHRLRHADGSFVLDPQKRQRTAGGAEEAGSQAQGTKRRVSPPPPPPSGPPPPQPPPPSGPPPPPRPGGNLPQGHHQQQQRQQQQQQRSPRF

SEQ ID NO: 70032 - protein, 66 aa, Zea mays
  Coding DNA Sequence Number=SeqID_26657
MPLASYETHEDISVDLGPRIINWPMDLLCHGGVLIEAAVDGEVVDVRCTNKESSTKTKYMTYQKKS

SEQ ID NO: 70033 - protein, 103 aa, Zea mays
  Coding DNA Sequence Number=SeqID_26658
MRLDGRARMDGELRTAHRHERSSGDRRMDADYPATSFTAASWARREQGLNGGRSQGVGSSRFGRGAQGAGLRGMATACVWVPGSGGGQREEEGWRLRVGPVRE

SEQ ID NO: 70034 - protein, 99 aa, Zea mays
  Coding DNA Sequence Number=SeqID_26659
MWDVISNDIACNVARQCLEDGNPPPADPTAGGGGGAPAAGVVVVAAREAEPRCLRAASLLARLAIGRETQDNGRRKVAGGVWISLPGGTPSGGKILGVV

SEQ ID NO: 70035 - protein, 57 aa, Zea mays
  Coding DNA Sequence Number=SeqID_26660
MGSSSLRAEWESRLVGGYEIDGFGYDYGAGCQHCNHCSGEDEAEEGDFQEFQDYDEF

SEQ ID NO: 70036 - protein, 78 aa, Zea mays
  Coding DNA Sequence Number=SeqID_26661
MAPKNMEQVGIASKHGKQLQQRQFLAGVADGRNAAACSRRDYILGDSRCCSLDLINRVPLRSGEAGLSIVKWARDRQI

SEQ ID NO: 70037 - protein, 229 aa, Zea mays
  Coding DNA Sequence Number=SeqID_26662
MQKLQQELEGKARDAGLTEEELKAKGESLDRREMNLARREKDLAFKEEMLERREKLLAEHELEEEKEQTLEEWVCQFEAAQAAPGPQVAEAAKKALEDLQAEHRAGVQQIAEWAGEASTALVPLGISPIPVSRPPASISDALPVLDSTTERLRCLDQILGARMEAESSGLCRVVVDYVLTCFRSHDPAMSLAPVLDGPVAATEDTARESVQDAVETVAARFQRDPAGAE

SEQ ID NO: 70038 - protein, 123 aa, Zea mays
  Coding DNA Sequence Number=SeqID_26663
MSRKTTLSSKGPEKGDVCTTKNQQVSTINLEGQIRKGLRSQARKPPLDSKKSHKARGLLLSTQKWGTDSKAQNLSDPFVEQVCKAGRMTKPPPSKSVRRHKLPSPQRESLRCKGSVQASAEQV

SEQ ID NO: 70039 - protein, 440 aa, Zea mays
  Coding DNA Sequence Number=SeqID_26664
  Gene Ontology: Mol. function=protein serine/threonine phosphatase activity; Cellular component=protein serine/threonine phosphatase complex; Biological process=protein amino acid dephosphorylation
  Homolog annotation: Hit_ID=A2XQB1; Match level="QueryCoverage=40%, HitCoverage=37%, E-value=2e-43, Identity=55%"; Hit description =Putative uncharacterized protein
  Pfam annotation: Domain name=PP2C; Domain location=130-416; Score= -30.4; E_value=0.00037; Accession=PF00481.12; Description=Protein phosphatase 2C
MASAGVNVPGGDEVRNPTAASASTPECRMRRRHRLEPQGSGDAAAAAAPGPSWVRRLRPAASRFSPSPSPSLSPSSSQSSADRPNDEEQEELDHEVEVELAPAGPQLEPGEAEGEPEAEAVAVAPQVWPVAFGSLSMAGRMRMMEDAVSLHPDLCTWAADGSPMHFFGVFDGHGGSHVSALCRDRMHEVVAEELAREGATFLRRRQESAASGSAAWSERAEEERAWRAALQRGFRRVDDMAALACACGRVARPSCSCPLAGTSSGIVGSTAVVALLVRGRLVVANCGDSRAVLCRGPAGTPPVPLSSDHKEGSGRCCCSTDIKAGHAVAVPWIARNFQGGRCAPSLSPVGHVAGTAGDSEGEGGGHVSVDAGARGETRVVAGWWALVPQSCGAGAALSTRWVAVACAAGPAGEEKGVVAGGATCPSLRARSREKRRESME

SEQ ID NO: 70040 - protein, 188 aa, Zea mays
  Coding DNA Sequence Number=SeqID_26665
MGKKKSDPSARAQKNTTKLSLLVTIALSGIGTWRDFDSLYLCLVLNALALVLNVLAENLDALKCWWLGGTLERTSKDLGKAKVLRRSSKGAHNRKEIKSDSAASLRLHLGVQDQSALKWTPKMHPDFDCDELDMVGKIKRLSNQINWFYLKIHPESMGIVETIQRSDSVLVLRHRLLGHWAVYRVGAH

SEQ ID NO: 70041 - protein, 147 aa, Zea mays
  Coding DNA Sequence Number=SeqID_26666
MVQIVEHHDFDPKDFPMEEEAASSTPRASSRPAPEALRYNSPDCPVYHRTVSGAPEESDSELASFGNPLRYNSPDMSGALNARQRAQKSEHARVAHRTVYRTCPVHHRTARRAHKSELQRSEPNGLVTWLAHRTVRCAMRQQPPPND

SEQ ID NO: 70042 - protein, 279 aa, Zea mays
  Coding DNA Sequence Number=SeqID_26667
  Gene Ontology: Mol. function=protein binding; Cellular component =nucleus; Biological process=cell division
  Homolog annotation: Hit_ID=Q10K98; Match level="QueryCoverage=99%, HitCoverage=70%, E-value=6e-63, Identity=49%"; Hit description =Putative cyclin-D2-3
  Pfam annotation: Domain name=Cyclin_N; Domain location=52-198; Score =89.8; E_value=8.4e-24; Accession=PF00134.14; Description=Cyclin, N -terminal domain
MGFRCGRASSSLLCEEDVAGMFGCNGHDDEEVGLLVLGMDTTFAALPSQSDEVVASLMEKEKEQLHSVATGDYLQRLSSGGLESSCRIAAIDWIKKAQAYHDFGPLSAYLAVNYLDRVLSTNQVPVSSTNADADHQPWMPQLLSVACLTIAAKMEETVVPRRLDIHQNQVLSEKYRFDLDAIQRMEIYILDSLNWRMQAVTPFSYINYFVDKFTDGKPLSCGFISRCTEIILGSLEATKLLQFRPSEMAAAVVLSAAAESQVIAFSGALLASNILVNKV

SEQ ID NO: 70043 - protein, 169 aa, Zea mays
  Coding DNA Sequence Number=SeqID_26668
MEDVGRDLMLGLGMGVGVRREEEAQRGRRDREVRRELEFTTRSARSSPEPAVGLTLLHGLGLPWPPPPSSETNRHLEASARGFDVNRASSLSAAGAAAEEDEEQDEAGAAAAASSSPNNSASSFPTDFSAQGQRRGRRRLHAKKLRLSKEQSVFLEDSFKEHATLNPSV

SEQ ID NO: 70044 - protein, 394 aa, Zea mays
  Coding DNA Sequence Number=SeqID_26669
  Gene Ontology: Mol. function=inositol or phosphatidylinositol phosphatase activity
  Homolog annotation: Hit_ID=A2XKC0; Match level="QueryCoverage=11%, HitCoverage=8%, E-value=1e-10, Identity=68%"; Hit description =Putative uncharacterized protein
  Pfam annotation: Domain name=DUF581; Domain location=150-197; Score =20.6; E_value=5.9e-05; Accession=PF04570.5; Description=Protein of unknown function (DUF581)
MAVVEACDPARIDISSKTAAPSERTTQLISGGRHVATPPLPPRAPADACLALLVDRLSLSSVVASRLSRTHKDAPNVLNLSYRVRTQLSASTLIDLNGAFGWLAIHIDNLKVNFRCTFDGLRYGAAFNSLQCARMLLRRMAEKLRVLLRYQSLHVHTYFKNSSEKLKEGEDIYIYQGDKSFCSMECRENFMVDEMEGKGGWKHLFCMGAAWRELIGRKQTLTRFLNVPREKGINWDLLFIQGKKARTYDGALARDIGLSDETLLPLGFQARLTAPTPRPGMSLRRYLPVLVKRKLKIVHCKMLPSLYVSSTLRLRAFFVYNFFCGFAFNKLKRSTDQLRQNADAVEILRKTRFPHVHGAGEKKSPETILDHETMRGLWQQMFGLDFSGWFYDTL

SEQ ID NO: 70045 - protein, 82 aa, Zea mays
  Coding DNA Sequence Number=SeqID_26670
MSHESNTSSTDLEIHTDLAGLCVSYRSLTPPLLARRGHGQLVPCHTATSLGTMSLCLAPIATSVVRRPPLDQVQYAQVQKMS

SEQ ID NO: 70046 - protein, 15 aa, Zea mays
  Coding DNA Sequence Number=SeqID_26671
MAPPKATTVIGLWSH

SEQ ID NO: 70047 - protein, 335 aa, Zea mays
  Coding DNA Sequence Number=SeqID_26672
MEAQAHASCNRRADCFVHATAPPLAPPPHLLDCRTNTATRGDPTHDPAAPAWRGGQCSQKRRLWQEKRATLRLRHNDRVSKGTGKGGYPEKNPSPGRNQAPSLPTDQRFEGWPPEGFDSRLRSRGPYTHYWSEVRGPAPRRVPRPPQATRAPRPLLIRGSKAGPRRVHGRLRRRARDDHGYVRYITKARAALPRLGGCSRKPGSGRTVNSVNIPARELGTRPYTRATASSHEGTTRPAEALRKALRPRRSETTPPRPRGLHPAGALTRTHRNKMQPRKAGPLAKKCDESLQASANTPFEARGLLSGTIIRGTLKTPNSQLVTPISIKLLRPDGCD

SEQ ID NO: 70048 - protein, 688 aa, Zea mays
  Coding DNA Sequence Number=SeqID_26673
MPSSSSSAATTPPAAASSEETLSSLMVEELRAGDSVDFGVSRMTSARVEDMHRLGYFGGGVARAPGTEEVPEPEVAEEDADEGALRCAAGQSSGRDLVEEFVAYGVWPLAHGWALGEVCPRQMPFHGGRVVRSPTFALNLRNRDPTAFVRDAEDGVVRLVGRYVPRTEGQRSFDIRGSNDRLNRVFELNQLPYDGYPGQDEADRRGKKPAAAATGGGKPPLAAKAGASAPSKAPEATAGAGGSKSTKVVPPASGVAEASKAARALPLSGKRVADFGTDITVDDYLGGSDEGQLAIVAPGAAIATAAIVPKARSEALGAGGEVSALAVVRDEAGAATRRLKGVTEALSQATDELSQVANFTSRTASGALTAALSAEVERLRTQHADAVREKSASDSKCRKLAEKVAALEKEKADLRRQLAGERREANEAIAKEQAAQAEAKLARAEGNIAKELAGHLQERLTALESRTKGAEAAMRAEAERTRTQLMDTYRELGGAAGTPRCRGGFMSYASLVTCEGAVNALSREGCRHFEVFDQADEDFERDVYKVEDPVVKESAGALYDRMWGPHGREVVRERAETARAQAARGERVDDFGALNSALPHPEPTPAEAVTGVALEPTPETAAIATAAPTSVAVGEDLPPKVAEGAPDAPAAAVPSVEDPVAVAVETTVEAAAEPTAEAPAASWPSQVA

SEQ ID NO: 70049 - protein, 383 aa, Zea mays
  Coding DNA Sequence Number=SeqID_26674
MGGGPAEQQKTDGRLAVARSSSNNDDPRSRWPNCSSDGLRADAAATLPSPTPTLEGRGQGPSALRQIPTQILPDEWGTDLRVEAPHRCKGRTAPEHERRPGSARHLGRSSRAHGATTAFAAGGGTGSQAGESNAPRLTTPAVDQPRVVEVRLSRRASERPLPRTMKERLTHETAREIELRLSPASTPARMMNILEAEGGTKIAARLASPHPGAGDQRARGRAAMQAACNRAKWAHLSDFQRAQHGGPDPRVMQPARRMLRASNCTATRATATPPRLRNQYRDSRQPYARPSSASLARWGSERRFAFAIMSASKKAPSLPTDQRFEGWPLEGFNNRLRASGLHTHYWSEVRRSAPRKGSTTASGYSGSTPTTDQGFEGWPSKGS

SEQ ID NO: 70050 - protein, 181 aa, Zea mays
  Coding DNA Sequence Number=SeqID_26675
  Gene Ontology: Mol. function=structural constituent of ribosome; Cellular component=ribonucleoprotein complex; Biological process =translation
  Homolog annotation: Hit_ID=Q5XUU9; Match level="QueryCoverage=91%, HitCoverage=99%, E-value=2e-57, Identity=75%"; Hit description =Cytoplasmatic ribosomal protein S13
  Pfam annotation: Domain name=Ribosomal_S13_N; Domain location=1-76; Score=42.1; E_value=2e-09; Accession=PF08069.3; Description =Ribosomal S13S15 N-terminal domain
  Pfam annotation: Domain name=Ribosomal_S15; Domain location=81-167; Score=96.5; E_value=8.4e-26; Accession=PF00312.13; Description =Ribosomal protein S15
  Pfam module annotation: Pfam domain module=Ribosomal_S13_N::Ribosomal_ S15; Domain location=1-76::81-167
MGRMHSRGKGYLFIGAAVQEDSSDLAQDSYHRGDAGCRLTRSHGMDRQVEEMITKAAKKGQMPSQIGVLLRDQHGIPLVKSVTGSKILRILKAHGLAPEIPEDLYFLIKKAVAIRKHLERNRKDKDSKFRLILVESRIHRLARYYKRTKKLPPTWKYLGAVLDQLVRVNHGEHSGGLSDIL

SEQ ID NO: 70051 - protein, 1142 aa, Zea mays
  Coding DNA Sequence Number=SeqID_26676
  Gene Ontology: Mol. function=protein binding; Cellular component =membrane coat; Biological process=intracellular protein transport
  Homolog annotation: Hit_ID=A2WZL8; Match level="QueryCoverage=100%, HitCoverage=100%, E-value=0.0, Identity=70%"; Hit description =Putative uncharacterized protein
  Pfam annotation: Domain name=Adaptin_N; Domain location=29-671; Score= 234.4; E_value=2.5e-67; Accession=PF01602.11; Description=Adaptin N terminal region
  Pfam annotation: Domain name=HEAT; Domain location=131-167; Score =24.5; E_value=0.00038; Accession=PF02985.13; Description=HEAT repeat
  Pfam annotation: Domain name=HEAT; Domain location=200-235; Score =11.8; E_value=0.46; Accession=PF02985.13; Description=HEAT repeat
  Pfam annotation: Domain name=HEAT; Domain location=456-489; Score =4.4; E_value=5.9; Accession=PF02985.13; Description=HEAT repeat
  Pfam module annotation: Pfam domain module=Adaptin_N::HEAT::HEAT::HEAT ; Domain location=29-671::131-167::200-235::456-489
MFGLQASGAAASWVVGRMGTDAHLYDDPDDASIPELLDSRFDADKVDALKRLLALIAQGVDVAHLFPQVVKNVASQSLEVKKLVYLYLLHYADKRQNEALLSINIFQKDLSDINPLVRAWALRTMAGIRLHVVAPLVLVAIKKCARDPSAYVRKCAAYALCKLCDLIPDENAALEEVLSSITHTFFSMQQLCIPYTYLKPALLMLLQIVDTLFSDNSPGVVGAAAVAFKSVCPSCLPLVSKHFRRLCETLPDIEEWTQIVLIEILLRYVIARHGLVKDSLLFASDLPTEIHGVTDSDAVASVPTQSDSIVNGVSDTISSIMLFRHYIEQCSGSSDREGNNLELSSVTANNNDDVTILLKCTSPLLWSRNSGVVLAAASVHWIMAPIGDMKKIVGPILFTLRSSPDAAYVMLGNIVVFVKTMPSLFAPFYEDFFVNTSDPYQTRALKLEILTTIATESSIPAIFEEFQDYIKDPDRKFVADTVAAIALCAQKLPSIATSCLEGLLALVFYESFISNSVHLDGEDAVLVQAILSIKAIVKMDPVSHEKVCCNVQSCIRAVIVRLVRGLDKLKEPAARSLIIWMFGEYSFMGDLTTKIVPPVLKYLAWSFVAEVVETKLQILNSSAKVIMRCTEEDMEEFKSIVAYVIELATCDLNYDVRDRARLLSRLLPCYMTHQGSSHQPQNGDIYKELANHIFNGKLQPTSHPASNYRIYLPGSLSQVVLHAAPGYAPLPKPQSMELNHNVTAAIRGKAKLSGSDSDAESGSSTYESSSVYDSESEGAGLSDRDTVESHQAQEDNQDAPLVQIYDASIQQGQAGQNTEENLADLISTDLTELMSKSALESWLDEAPAEPVVQNLTQTSSARVSFTNRNFERKPKLHTLLDPSGSNGLSVLYAFSPEVSPRSRLLVCVDLYFENVTTQQLTDITIESEEASSSVDFIDQTSEGYSGVPTIVPVEGIHSLAPQQMAKLVLQVHFHHHILPLKLSVFCNGKRHPAKLHPDIAYFVRPLPMDLNTFLCKENQLRGMFEYARRCAFKDHLQKLGHEDSAEHIDKNLQVAQSVASKILSNANIHLVSMDMPVTFSVDDASGLCWRFSGEILSTSKPCLITILAEGRASGPLDLAVKVNSEDTVFALNLLNRVVAIID

SEQ ID NO: 70052 - protein, 303 aa, Zea mays
  Coding DNA Sequence Number=SeqID_26677
MCPWAISKYFGDWVQTQVLKCENMLMGEQSANHNVRNRKKKKKWRVAVYSQRLLQAGAPDCPGPGKGDTPKRILLREGTRLRASLLIRGSKAGPSEGFNSRLRARGLHTHYWSEVRRPAPRKGSTTASGYLGSAPTTDQGFVGWPLKGSQLPQTQSEGLPWRLGGCSRKPGSGQTVDSVNIPARELGTRPCTRATASSHEGTTRPAEALRETFRPRRSQTTPPRPRGLHPAGALARTHRNKTQPRKAGPLAKKCDESLQASANTPFEARGLLSGTIIRGTLKAPNYQLVTPISTKLQRPDGCD

SEQ ID NO: 70053 - protein, 359 aa, Zea mays
  Coding DNA Sequence Number=SeqID_26678
  Gene Ontology: Mol. function=transferase activity, transferring glycosyl groups; Cellular component=integral to membrane; Biological process=protein amino acid glycosylation
  Homolog annotation: Hit_ID=Q69UI5; Match level="QueryCoverage=94%, HitCoverage=94%, E-value=1e-141, Identity=69%"; Hit description =Putative avr9 elicitor response protein
  Pfam annotation: Domain name=Galactosyl_T; Domain location=114-302; Score=123.6; E_value=5.7e-34; Accession=PF01762.12; Description =Galactosyltransferase
MMAAAALRPHKSSPARVPTRCVAALCAACFLVGVGVVNRYWPVPEPHPGCPDKAGPDHSRAVLNQASQTREVVMALDKTISDIEMRLAAARAAQAMSQGMSPGDSDSEGDQGTARRDQLRRLEDKGVVIRFVVGRSANPNLENEVDHAIDMEDEEYSDILRINHVEGYGGLPMKVQMFLSTALTMWDADFYVKADDNVHVNIGITRSILARHRMKPRVYIGCMKSGPVVAKNDSKYYEPDHWKFGTEGNNYFRHATRQLYAVTRDLATYISANRHILHKYSNEDVSFGSWLIGLEVEHVDERSLCCGTPPDCEWKGQAGNPCAASFDWNCTGICNPVERMTEMCSNGIVSWPVRVRKLG

SEQ ID NO: 70054 - protein, 151 aa, Zea mays
  Coding DNA Sequence Number=SeqID_26679
  Subcellular localization annotation: CTP_CleavageSite=49; ConfidenceScore=5.13e-01
MASNSQQLNEDPRKPATSTNASRQRAQQLLPLRGDAVLLPLRACAVLLPCAVSWSLGLAPARCCGAWDWRWPTARGACAVAACWPAGSLGGGGRRRPRWKLGFRLAWDWEDRRRMPSAAWEAGIGSRHCAALLGLGCLAASAQPGPWRRAA

SEQ ID NO: 70055 - protein, 70 aa, Zea mays
  Coding DNA Sequence Number=SeqID_26680
MGTTWGGVACKARPGLYRPDLHYQGEWPGIHYVAFTKTPLVLTERYSGKRPEPPRVSQDHQHNQDNSIVS

SEQ ID NO: 70056 - protein, 81 aa, Zea mays
  Coding DNA Sequence Number=SeqID_26681
MLDGVARRDDLVTGLRPVAYEAKARTAKASSEGWRLRLRPQHLPSEGPVRLSHLVPKTSLDGGDAALARSGSAGFFDMTVD

SEQ ID NO: 70057 - protein, 511 aa, Zea mays
  Coding DNA Sequence Number=SeqID_26682
MCSHYYSAYPQFEVAEEDADEGALRCAAGLSSGHDLVEEFVAYGVWPLAHGWALGEVCPRQMPSRGGMLVRSPAFALDLHSRDPAAFVREAEDGAVRIVSRYVPKTEGQRSWDIRGSNDRLNRVFELNRLPYGGYPGQDDVDRRGKKPAAETGDDPAPAAAPSSKKRKLGTATGGLGVSDGFAMELMRTCAAPGGRMSSPELRESSARMLKVTGGWWPKNVPIPHAAGEDFFTSRMVREWRVFPYGRNIAAVVSAVMDKDRQGAVQKRQAVVRLPEARPKRSRGTAKAAAPGGSQPTLAAKSAAPGSSRVPEAAKAAAAGATKSVPAGVAKARELPPPGKRVADFATDISVEDYLVGSGEGQLVVVPPAVATAAAAVVPGARGSAVSAGGEIPALTAVKDKAGAVSRRLKEALSQAADFADRVASGALMAVVSAEVERLRAQHADAVREKSAADSKCRKLAEKVAALEGERTDLRCQLAEERREANEAFAKAQSAQAEANLARVAVVGSSP

SEQ ID NO: 70058 - protein, 198 aa, Zea mays
  Coding DNA Sequence Number=SeqID_26683
MGADRQARGAGRACAKRYPQSGSCDQDRTGEIRPREGEWLRAALLISAAVRSPELRQARARVAPGSPGLGREEENAMAHSMAGKSHESTVRGGRTAGRRSQADRKNSGEAFRPRGGDLRRAKAWESFSRGRCDTGAYTGKLDQAKLVGHRASTADRHGRAPAMPKLAEHRAELGKLSMGKGVSPRGGARGDLTQSPAS

SEQ ID NO: 70059 - protein, 346 aa, Zea mays
  Coding DNA Sequence Number=SeqID_26684
  Homolog annotation: Hit_ID=A2YGC2; Match level="QueryCoverage=50%, HitCoverage=74%, E-value=2e-12, Identity=31%"; Hit description =Putative uncharacterized protein
  Subcellular localization annotation: CTP_CleavageSite=57; ConfidenceScore=5.44e-01
MSNYVITVYVSSDPGTASTASHGDRSVRSPGETASSPARGAGAPTPGAGAVGLFPLPQQEVESERPPSPAPQLEMPPAPPQGILAAGGDPDGDEDDDETDGSSSHDTELLEEPEPKGWIARPITHDAARGCHFHDALDTLLRRAFDRHTWSIEYRCVVYQHRRELYSDQWEATCLVHHPDDDLQGAEAFSEHYSINERDTTEAAMQDAARRALSQYCLLFSGVADGLDLKYYPRRSTGSAGGVIASPVGEGNPRLNSMVNLAVVLNTELDHALDELGKVRAEVAELRVECATHHYLDGGSPTPVGIQHLYRSPPVVASTMMSKNRRKGARRAQPEQQAPQEETAPQ

SEQ ID NO: 70060 - protein, 44 aa, Zea mays
  Coding DNA Sequence Number=SeqID_26685
MLDGVARRDDLVTGLRPVAYEVKARTAKASSEGWRLRLRPNRRF

SEQ ID NO: 70061 - protein, 458 aa, Zea mays
  Coding DNA Sequence Number=SeqID_26686
  Gene Ontology: Mol. function=microtubule motor activity; Cellular component=microtubule associated complex; Biological process =microtubule-based movement
  Homolog annotation: Hit_ID=Q69UI4; Match level="QueryCoverage=100%, HitCoverage=69%, E-value=1e-132, Identity=57%"; Hit description =Kinesin 1-like
  Pfam annotation: Domain name=Kinesin; Domain location=9-290; Score =395.9; E_value=6.2e-116; Accession=PF00225.14; Description=Kinesin motor domain
MSNVTVCVRFRPLSHKERKANGDNVCFKRLDSESFVLKDEREEDVVFSFDKVFYEDAQQSDVYNFLAVPIVSDAINGINGTIITYGQTGAGKTYSMEVEIYLEKVRDLLDLSKDNLQIKESKTQGIYISGATEISILNSSDALENLSQGIANRAVGETQMNLASSRSHCLYIFSVQYGCTSDERVTTGKIILVDLAGSEKVEKTGAEGRVLDEAKTINKSLSALGNVINALTTGKQNHVPFRDSKLTRILQDSLGGNSRAALLCCCSPSPSNAAESLSTLRFGTRHASQPVSHLYRIVVIHCSLWILSKVCSNEPEVIGYILAFISRCQHLTLNQTCVQLRLSLKEEDVDLLEELFVQEGIIFDASSVVDIDSVFRDTASEEISLLMQAVEELKETVEEALQLTDENEKLRRSLQVAQEMTTQAQLAAAAAVAGAARSRTLLDFVPAVLFRPFGFVPE

SEQ ID NO: 70062 - protein, 398 aa, Zea mays
  Coding DNA Sequence Number=SeqID_26687
  Subcellular localization annotation: CTP_CleavageSite=57; ConfidenceScore=5.21e-01
MNKNTGIQSATTNGTPVPPPQQRQRPPLRVAELQQRGPQGRRCYDLALAHADARGVRTSTKSRRPEARMVAVIPSATGTSRAASTSAPTTGAISPPADPHLDPPGRVGHRPPRGGVVPVQRQDRPRTRTPPWQRAISWAVLPCTRRGNRLPAGGGTGGQADEPDTLRLTTPAVDQPRVVEVRPAHRASERPLPRTPKERPTHEPAREVELRLSPVSTPARMMNILEAEGGTKIATRLAPPHPGAGGHRLGRRGLSLLQHAPRSSPYGAGLGPTRHASRPRAEEAKPPRAVHATAQRLQAALHFCPDQRAKGRVAMQAACNRAKWAHFSDFQHAQHGGPGPHVMRPARRMLRASNCTATCATATPPRLRNQYRDSRQPYARPSSASLARRSMRPKMGRQ

SEQ ID NO: 70063 - protein, 65 aa, Zea mays
  Coding DNA Sequence Number=SeqID_26688
MADQERGAKEDWGRMMETLEAVCARLKDVERAQQQLMCASCYVGFSCIDEFGTYCDTMVAVSQNV

SEQ ID NO: 70064 - protein, 200 aa, Zea mays
  Coding DNA Sequence Number=SeqID_26689
  Gene Ontology: Mol. function=transferase activity; Cellular component= cytoplasm; Biological process=oligopeptide transport
  Homolog annotation: Hit_ID=P0A9D3; Match level="QueryCoverage=68%, HitCoverage=67%, E-value=3e-72, Identity=98%"; Hit description =Glutathione S-transferase
  Pfam annotation: Domain name=GST_C; Domain location=99-188; Score =78.4; E_value=2.4e-20; Accession=PF00043.16; Description=Glutathione S-transferase, C-terminal domain
MGDTLPMPTKFAIGMVMCSGAFLILPLGAKFASDAGIVSRLMGFIMGSWFLTTAGANLIGGYVAGVAIMQYLADSVPDRQLLAPVNSISRYKTIEWLNYIATELHKGFTPLFRPDTPEEYKPTVRAQLEKKLQYVNEALKDEHWICGQRFTIADAYLFTVLRWAYAVKLNLERVEHIAAFMQRMAERPEVQDALSAEGLK

SEQ ID NO: 70065 - protein, 104 aa, Zea mays
  Coding DNA Sequence Number=SeqID_26690
  Homolog annotation: Hit_ID=Q2QU58; Match level="QueryCoverage=85%, HitCoverage=22%, E-value=3e-08, Identity=32%"; Hit description=Zinc knuckle family protein
MCFNKERSKRSDRRCYGCKEKDHEIDSCPYMKNQDLARSRKMTIKRMKAEDKCIARTSTTFVTIAVKRVIYSRRPKFDSCARKVMSSPHSRTKVPRDDMKLWGA

SEQ ID NO: 70066 - protein, 141 aa, Zea mays
  Coding DNA Sequence Number=SeqID_26691
  Subcellular localization annotation: CTP_CleavageSite=19; ConfidenceScore=5.01e-01
MDNLFVPFFFSTNNIGRPKASDLMTNTSSPDEDTNFTVLLSQLRLARNLLQKNALLQYQITHLQNGIRLRMYLVPLLGSPGLCRPPCGSPFHTGHEAAHSCCLLAEEGEVPGCSGGTVAAEGTISGTAAGADADVDAGGLA

SEQ ID NO: 70067 - protein, 101 aa, Zea mays
  Coding DNA Sequence Number=SeqID_26692
MRRCARLGDQLQPAYQEKAALEEEIETLKGSATAEGKGVEEGCDSVAARAGTPKDQGVVPPALYYYASDGMVLSLIDPFAEANAEESGVDLGTKDYVHMRI

SEQ ID NO: 70068 - protein, 455 aa, Zea mays
  Coding DNA Sequence Number=SeqID_26693
  Pfam annotation: Domain name=IncA; Domain location=34-231; Score= -18.6; E_value=0.097; Accession=PF04156.5; Description=IncA protein
MEKDRQDAAQKSRMVVRIGDPFREAKKARGGAKSATPGSSKPPPAAKPASLGSSKPSAGSDAGQLAVVPAQVAATSPTTAVGAKGSSQDSWSTFCMGGEILSAADAKDVAGFVSRQLRHVADFTDRVASGALTVEFAAEVERLRAQHTDAVREKSAAENKSRRLTERLATAEAEKGDLRRQLMEERRDANKAIVDAQAAQAEAKLARAEASLARQRAEELEARLKSLRNRVDKAEASTRAEVERTHAQFVDTYRELGARTVAFEAPGQEASLCFLEWLQEEVGVLLTIVTGLMSFASLVTCEGAVNALSLEGCRHFEVFDQSDENFEREIFKVEDPVLKQSAGTLFDWMWGLHGRETVRERSDRAIDQMAHAEGVEDLGDLDGTLPDSTLLEASGVDLAPPSDAGEGPSATPASIVAGKDPMPTPVLTGEDTSKAMGGPAAEDPATTAGPSQVAE

SEQ ID NO: 70069 - protein, 120 aa, Zea mays
  Coding DNA Sequence Number=SeqID_26694
MGKLESVVPPARRCGRAGEGRRAAGRPWEENSRGVKDAMARELTLGAMNVLMIRNFGEDQQGLGKGLGVEEEQQGRHNRKEIKSDSAATPSRGDDEEARIPYRFSMNVLAAKILRQQQAS

SEQ ID NO: 70070 - protein, 164 aa, Zea mays
  Coding DNA Sequence Number=SeqID_26695
MAAAASAGARTDGGAREEELGELSPGARARMARAERTGTASSSTGTVVGAEGGGLGKIWAPAALGETSMELRFAASMARRCKMGMGAKRHGQKVPAPTRRHGGARDVDHDKSRERAQSWGRPACCLRLSSAMGKGVPAPRTCRGRLVEISTNDENFGHQCGQGR

SEQ ID NO: 70071 - protein, 120 aa, Zea mays
  Coding DNA Sequence Number=SeqID_26696
MAEGRTELGVGGWGAMGMSLRRRGCGELPAAQQGQGPTSGSEGGPLELDAGQARQREGLGERSSKARWEGRGARPLLEEEREQSRHHGWEEQRRGPVEPECGPARELDYDRKGAWRGSAG

SEQ ID NO: 70072 - protein, 411 aa, Zea mays
  Coding DNA Sequence Number=SeqID_26697
  Gene Ontology: Mol. function=phosphatidylinositol binding; Cellular component=clathrin coat; Biological process=clathrin cage assembly
  Homolog annotation: Hit_ID=A3AGK1; Match level="QueryCoverage=71%, HitCoverage=66%, E-value=8e-54, Identity=66%"; Hit description =Putative uncharacterized protein
  Pfam annotation: Domain name=ANTH; Domain location=29-229; Score =164.8; E_value=2.3e-46; Accession=PF07651.7; Description=ANTH domain
  Pfam annotation: Domain name=ENTH; Domain location=29-150; Score= -17.0; E_value=0.00091; Accession=PF01417.11; Description=ENTH domain
  Pfam module annotation: Pfam domain module=ANTH::ENTH; Domain location=29-229::29-150
MPPPQIPSSASCPTGKAHRATAKVTSNIAPDLDVLIVKATSHDDEPAGERHIRKILHLTSGSHAHVAAAVVGCSRRLSRTRDYVVALKSLMLVHRLLVDGDSSFHRELLHGTRRGTRLLNLSDFWDEAHSGSWDHSAFVRTYALYLDQRLEFFLHERKQGFLDRFFDMEYAECVKAFEAYASAAKQIDELSAFYAWCKDSGVARSSEYPEVQHVTDKLLETLEKFMRDRAKRPKSPPREPEPEPVKEEPEPDMNSIKALPAPEDYKEPEPMKGGGRDEQGNRLALALFQGPPAASGNNGSWEAFPSNGGNEMYSAQMGSQMGPQFTRPSQSGQTPNTNETQGSETGQGNPQMDIQWSMPPRGQILPPQPVSCSERLLSMDDGGSLRLLFCGEEGRSRGLGGIAPAAVHGKK

SEQ ID NO: 70073 - protein, 151 aa, Zea mays
  Coding DNA Sequence Number=SeqID_26698
MAYWRSPQMIMAKLPMAGPHHAGDFVVKSRPQQCLLEPMVVVEGPSIVVLDAIIQVGITIAGTWGAKGSTQTNKKVQDRVQKKGAKETEGYPGLAYRTVQCTRVDQLELATFGFLEKPLRYNSPDCPVCHRTVQCASGATATAQRSTPTET

SEQ ID NO: 70074 - protein, 78 aa, Zea mays
  Coding DNA Sequence Number=SeqID_26699
RLLDKALAIEHKCVQLGDMKRKATTKGQGSSNIHPRYVPPQGTPARTGGGQRPAQYTSQGTPPTRQAALTGTTRNMLI

SEQ ID NO: 70075 - protein, 62 aa, Zea mays
  Coding DNA Sequence Number=SeqID_26700
MSFEESTIKHGDQVIELFEFYEIEDPEHLFDDEDGYDHAYGNGKEGVEADLQEFQDVDEFED

SEQ ID NO: 70076 - protein, 257 aa, Zea mays
  Coding DNA Sequence Number=SeqID_26701
  Homolog annotation: Hit_ID=A7P833; Match level="QueryCoverage=78%, HitCoverage=30%, E-value=3e-50, Identity=50%"; Hit description =Chromosome chr3 scaffold_8, whole genome shotgun sequence
MLVQGIGVKGWLATAGRLWQALGRRGRRLKEENWRRSDFWSSLCVQFPLAVTVGRTSSAVMVYREAVSAGLLPSSDVLSQVLGCLRLPHGSSLKSTFIENMGEAASLGAVASISIKETRIVIDARKLKIFTAEVSLLRTLRSLKHRLAAGSRLPNVTILLPTEKKQVDIDEKEKTLKLAGRIGQAVGSLLRRLGISYQGEESHGRMRINGLTIRRWFNPKLNSKSSAAGPADLLPLPSRLAKGIAGQQRDIRNLSLE

SEQ ID NO: 70077 - protein, 313 aa, Zea mays
  Coding DNA Sequence Number=SeqID_26702
MKGGMVLLVVMAVGALERGHGVVIVHMEAGHACGEHEGSALILMVGAGIFFMVRGSNNSGRGSWEDSGDRVTFKNLGVFSSPWLKLGWMERALGSAGLYVGYGASNSNDFTTFQGSYMGLSCGEVHMELTVALLCIFCSGNHLTVVPSQEIILRIQGEQVCSEVHDCGVILKQLLLFQRTHPGHPNGAVSLKGRKESEWGIGHFFFIDLTQGPQCLASDDLAGVFESVPSSSDTPFHMVRTGSNVHSHDTFLCVVLDEFTTIILWLAPDSEANCACSQQLGETIFILAQVGLAADLHLTSERRKGESIFEMKG

SEQ ID NO: 70078 - protein, 36 aa, Zea mays
  Coding DNA Sequence Number=SeqID_26703
MAVAAAAAASDPALALADGELLVVAPVLLHIVLEVI

SEQ ID NO: 70079 - protein, 59 aa, Zea mays
  Coding DNA Sequence Number=SeqID_26704
MELCVGPGRDSPQLRVTTLGQQQHPTPPRGRLRDRHVAREDDILQGGDPMLQRGLLHVT

SEQ ID NO: 70080 - protein, 207 aa, Zea mays
  Coding DNA Sequence Number=SeqID_26705
MANNGEPNSDELIPTGSLDDREHEQTWSMLTTARALPRWRKTELEEMGNWRVVVANRRQERVLRLGDDLTQQTVLSIYSGAKRWPVNLVWRGGGWRRKESLAHEISGCNRGNLTSDLWIGQYESRRSQGARFTGGRDTGLEWHDYSASQAEKRQGRITRAGKVCTGSVVVDTVVSGNVAVGEKKDVSRRGWFTTPFGVALRPSPSIP

SEQ ID NO: 70081 - protein, 127 aa, Zea mays
  Coding DNA Sequence Number=SeqID_26706
  Homolog annotation: Hit_ID=A2YTD3; Match level="QueryCoverage=69%, HitCoverage=91%, E-value=1e-33, Identity=79%"; Hit description =Putative uncharacterized protein
  Pfam annotation: Domain name=Complex1_LYR; Domain location=48-114; Score=39.4; E_value=1.3e-08; Accession=PF05347.6; Description =Complex 1 protein (LYR family)
  Subcellular localization annotation: CTP_CleavageSite=79; ConfidenceScore=5.03e-01
MRRTLKQTPSPVFVLRHHGGRGRAIICLQAFFGTTSSADMASRPKLSGIQKQVLALYRGFLRTARLKAPEERHRIESVVLAEFRDKAKSVDRRNFIHIEYLLRSGKKQLEQLKNPDITGLATLVVKK

SEQ ID NO: 70082 - protein, 142 aa, Zea mays
  Coding DNA Sequence Number=SeqID_26707
MDTPLYGAAQYLNPGKFYNIKAEDFDWDNEWVDPLANSSHVSNALGDDFNLSWDQVDEAIVASAHLRSRNFPRRAVGGWVRRNEDLEEEETNLANEDDEDEEYILDDLDVEDEIEGSKSGKDGDDQGVDAHGLNIDEFDDGY

SEQ ID NO: 70083 - protein, 79 aa, Zea mays
  Coding DNA Sequence Number=SeqID_26708
MESCLQSYIRPKELAMEVHGGPLGSGQGLTKWIGCLWYSELLNGKYGHHHATGPRGLDPRMLQSLGKVPRHLRYYRSTI

SEQ ID NO: 70084 - protein, 213 aa, Zea mays
  Coding DNA Sequence Number=SeqID_26709
QEVESVRSCSPVPPLEAPPAPPLGVSTVGVAVGGDLDDEGGDSSSSHSIDLSEEQEPEGWVARPITRDAPAAQSPSLPGPLGGDLFGVSSGEQSPGCGGLGGVANGLDLRYYPRRSSGSTGGVVVSPVGEDNPRLSSTVNLAVVLNTELDHTLDELCRARAEIAQLRAERAERRHLEDGSPAPVGTQHPYRSPQRGHHAYGNPDCRTRINLEP

SEQ ID NO: 70085 - protein, 144 aa, Zea mays
  Coding DNA Sequence Number=SeqID_26710
MTEVFGITAHPKEKIMLDPQNPPGQAEDANRTEARSTPFALGRFQHLAATVRTTKQQPTMASKRATSKATASIDDAAKAALLAEKKGKALADTTPRRPSKMTMSTARDSAKTTPPSTALYAPAVPKAHHKYHHQASLHQRAKTP

SEQ ID NO: 70086 - protein, 156 aa, Zea mays
  Coding DNA Sequence Number=SeqID_26711
VFGDSSHGQNNKRKREPTPPSEDFGDSEYSEEEFSSEFEGSPAPIPLRESSDDSDDSQGLAAEVWTYIRAVERSGLEGSDESEYSSDEEDSDGGGEDKDGDDDDDDDEGGGGGDGDGSGRGGSSGSKDGDGGGSRGGSSRGRNRGGSGGGSNRACG

SEQ ID NO: 70087 - protein, 248 aa, Zea mays
  Coding DNA Sequence Number=SeqID_26712
  Subcellular localization annotation: CTP_CleavageSite=32; ConfidenceScore=5.11e-01
MEHEGGQEGRTGVKGKPAAFVLSCVQVGRKERAQARRSSSSSGAEAESEPWGRARRSSSSSGAEAESEPWGRARRRPSSEAKVESEPWGRARRSSSSSGAEAESEPWGRARRSFLWRPRPDLATISLTLSSGTTVGAAQAALSSCQAGQWSGEAILALNTPAIRSDGVVIRPRLLLGEDWASGEPKLCADGGYQLRLGVLRAILALNAPVIRSVGVAIRPRLLLGEDWASGEPKLCADGGYQLADSPK

SEQ ID NO: 70088 - protein, 190 aa, Zea mays
  Coding DNA Sequence Number=SeqID_26713
MSTGKRHLDQIELLSVRRLLLNHLIISCGGFMGRSSKGFLADRHRSKINQGPPRTDLSPTALAPFGKRRPTRIKGKYPYLESCAQCPWPRNTAALRRQNSDGEKFFGPGRRLRQIASSRTILGHWLSPPTTTRKPDAITRAPIAAALSPSLLSHPLCFCYDAGTCTRHKGRSWSPSTARAASCGQRRMGR

SEQ ID NO: 70089 - protein, 235 aa, Zea mays
  Coding DNA Sequence Number=SeqID_26714
  Gene Ontology: Mol. function=glycoprotein 3-alpha-L-fucosyltransferase activity; Cellular component=integral to membrane; Biological process=protein amino acid glycosylation
  Homolog annotation: Hit_ID=Q70G72; Match level="QueryCoverage=98%, HitCoverage=45%, E-value=1e-114, Identity=89%"; Hit description =Putative glycoprotein 3-alpha-L-fucosyltransferase
  Pfam annotation: Domain name=Glyco_transf_10; Domain location=3-227; Score=-151.7; E_value=0.00012; Accession=PF00852.10; Description =Glycosyltransferase family 10 (fucosyltransferase)
DWNKCYVGCEFGFSASKTPDATFGIAPDPSVDGILRSMESSQYYSENNIDVARGWMKNGCSSKRGYKIVMTTSLSSDVPVGYFSWAEYDIMAPVPPKTEEALAAAFISNCGARNFRLQALEMLENLDVKIDSYGSCHRNRDGKVDKVDTLKRYRFSLAFENSNEEDYVTEKFFQSLVAGSIPVVVGAPNIQEFSPGEGAILHIKELDDVASVAKTMKNIASNPDAFNQSLRLQQQ

SEQ ID NO: 70090 - protein, 260 aa, Zea mays
  Coding DNA Sequence Number=SeqID_26715
  Subcellular localization annotation: CTP_CleavageSite=33; ConfidenceScore=5.23e-01
MALQKLLPKLSTSASTFTLARIGGASLFAASLKAMLKAEMSVMPEEIPLVGTEEAKIEDVIALIAQKVIPLKPLSKSEEEEEQITLVMSSFFDIEEGVGDTFGNYGTEEKIGSSNPATVEDKGKGPIRNDEAKKAIEGDTPLSEEPFDQEFGCRKYRVHQAARKSMGAKQLAEPIGFAEQLGMETGSCRYMANNIGFPKLEAMLLTMSSEDFSDCLAYTHLKALKNKRNVEGKVAHKEIVKLRFKVYGLWFNCEEKEKIF

SEQ ID NO: 70091 - protein, 70 aa, Zea mays
  Coding DNA Sequence Number=SeqID_26716
MTNFTMTTELPPYEDMVDSLPLLVSCLPEESFVPLVGVQGPEEGAGFCCLVRRHGVSCCGREIIGGGHQC

SEQ ID NO: 70092 - protein, 84 aa, Zea mays
  Coding DNA Sequence Number=SeqID_26717
MRIKLKLMKIKIKKMSHLKKRTLIKGEMKIIKTRKMIKKLGIKDRHTQESTKQFKEIPPLTPFLVTFTRGGCHADNLGMEVFGV

SEQ ID NO: 70093 - protein, 64 aa, Zea mays
  Coding DNA Sequence Number=SeqID_26718
MARPASPAMALAPALPGATRDPGGDEDDGFGCDSGNGCQHGNHCSGEDEAVEGDFQEFQDYDEF

SEQ ID NO: 70094 - protein, 98 aa, Zea mays
  Coding DNA Sequence Number=SeqID_26719
MSFGLSDGGGTVEGGLSGGGGGGRCGGEYWQLETQPAGSAPPNEPANSLGGRFPQMQVNDSGELDLDGGGRSSVHPFDLGAKGMKLCGDSELAVHFLA

SEQ ID NO: 70095 - protein, 98 aa, Zea mays
  Coding DNA Sequence Number=SeqID_26720
  Subcellular localization annotation: CTP_CleavageSite=39; ConfidenceScore=5.21e-01
MGRAPVQPGARARALGAAPRIGRGGFPSSPAHRTGRGRRAAAHAEVLRRQVLDEELGKLPSGVTSILPNINPVLLPKKTAEPTDRQMQHWGGGRVASW

SEQ ID NO: 70096 - protein, 398 aa, Zea mays; identical to SEQ ID NO: 68619
  Coding DNA Sequence Number=SeqID_26721
  Homolog annotation: Hit_ID=Q67TQ0; Match level="QueryCoverage=100%, HitCoverage=98%, E-value=1e-110, Identity=55%"; Hit description =Putative uncharacterized protein B1342C04.33
  Subcellular localization annotation: CTP_CleavageSite=50; ConfidenceScore=5.59e-01

SEQ ID NO: 70097 - protein, 169 aa, Zea mays
  Coding DNA Sequence Number=SeqID_26722
MAPKKVNSKADEAAKAALLAAKKGKALALTHSTHHEATEDDGADLTEDGEVLGVSAEEQLQLRALRLKNRNLQRQKEILEAKHQRVSALAKVRQMIRDEEQKAQDLEREIALMQREGHLGPAAWATPCNSAHNRKTRVSPSATTPSCTPRHSKGSTTSTSEVPWRHICK

SEQ ID NO: 70098 - protein, 97 aa, Zea mays
  Coding DNA Sequence Number=SeqID_26723
MVLNKREDIKEIIQRPIMSHFGIKMLAIVMTEEAQACLVAFNAVCSYIGTRITPSRQMDVFTMVLFLIYEEEKDTEEEVVEVLIKDEAPLASLQPEL

SEQ ID NO: 70099 - protein, 69 aa, Zea mays
  Coding DNA Sequence Number=SeqID_26724
MELEACHEMMDIMDGLSAMPKDQLMDCLAYNNLKIELRRLIFGFNLHNIQGLVVSKALKANKDAEDEST

SEQ ID NO: 70100 - protein, 214 aa, Zea mays
  Coding DNA Sequence Number=SeqID_26725
  Gene Ontology: Mol. function=aspartic-type endopeptidase activity; Cellular component=chromatin; Biological process=RNA-dependent DNA replication
  Homolog annotation: Hit_ID=A3BBM6; Match level="QueryCoverage=86%, HitCoverage=15%, E-value=2e-72, Identity=71%"; Hit description =Putative uncharacterized protein
MALSSSGNSYKHCQDLLSHGIPITEPEAVRMCMNNLSPDMAIYLQGVRPITFEELASKATDIENYMQHISRQARPYNKPVMERNGPRDKVPSKPKQMQAMEATVVPRKLQTRGVIERNQHRGDASAPRRPTLSERQNQTYSFPVEEVDDLFIGLRELGLIELPKPKRPEEASKFKEPNFCHYHRILGHTLKDCFVVKNIIQKLIDEDTHKKIYG

SEQ ID NO: 70101 - protein, 143 aa, Zea mays
  Coding DNA Sequence Number=SeqID_26726
  Gene Ontology: Mol. function=calcium ion binding; Cellular component =oxygen evolving complex; Biological process=photosynthesis
  Homolog annotation: Hit_ID=A3AGN2; Match level="QueryCoverage=90%, HitCoverage=8%, E-value=1e-52, Identity=79%"; Hit description =Putative uncharacterized protein
  Pfam annotation: Domain name=PsbP; Domain location=2-143; Score= -11.9; E_value=9.8e-05; Accession=PF01789.7; Description=PsbP
MASLQNLVCSVSKQDFDFLGHDSAFKDRNLALQCVRVGFIPTEKTDIRDLGPMDEAIFNLVNNVYAAPNQIPSIYDMQERTVDGKNYWTFEYDLEAPGYSVSAFATVAIGNVRLTASLIMSWTSRGWRFLQNTLMDVPCSFDI

SEQ ID NO: 70102 - protein, 410 aa, Zea mays
  Coding DNA Sequence Number=SeqID_26727
  Gene Ontology: Mol. function=microtubule motor activity; Cellular component=microtubule associated complex; Biological process =microtubule-based movement
  Homolog annotation: Hit_ID=A3AGN2; Match level="QueryCoverage=90%, HitCoverage=33%, E-value=2e-38, Identity=38%"; Hit description =Putative uncharacterized protein
GLRRNLASVQAMSKQSIDFFEDIRIHVSQLMTLMEQNQMERSSKLVKFENEFKETCVKDEQAALNKIAAILSELTAKKTTMVSSYMGQLNERYSEDQKNLKLEISNLQQNDAEFHGITSDVLTVSKNSLLLDHETCKMVETNTTIFSDHLELLNEKHSEGVESTRNMMSDCLEKDYMNNTEEQGLLREDHVSSTSDAEERRVLEEQLGWARLERQKILALSAEADDAIWHLATLARRRMQERDEARNQARMLLADLQARNARMKAAVPGASCSRVARPDAFAATGYEHIQAQAQAQAQALAPAAFGPRGQRARAGTGYYCVASSSGFGHRSIDSSLDTCAVQPSLLGFASSSSSQEHFDPDMFLVDVAESPQDVVPVPATADSSQGRSSGSGSGTYGHSLASKRPCSERK

SEQ ID NO: 70103 - protein, 193 aa, Zea mays
  Coding DNA Sequence Number=SeqID_26728
MTENMSHIILGKKPLSYVAQSQIYAPRNSDAANPVIINRELKIGELDNSTRGWRSQPTISGICFYPYAPTKQPEQAFTLGNRMISHGLGWENYDIEYIPIPSGYAEWGTIILAKHSFNLRGDGEVDGEFYEEYVPSHHEREPSMLLYPKCLSQLLEVWDELQVGGEVSLQEWCDCFHNGPRGLSHSDDMQMSF

SEQ ID NO: 70104 - protein, 639 aa, Zea mays
  Coding DNA Sequence Number=SeqID_26729
  Gene Ontology: Mol. function=ATPase activity, coupled to transmembrane movement of substances; Cellular component=integral to membrane; Biological process=transport
  Homolog annotation: Hit_ID=Q10N72; Match level="QueryCoverage=99%, HitCoverage=88%, E-value=0.0, Identity=66%"; Hit description=ABC transporter family protein, putative, expressed
  Pfam annotation: Domain name=ABC_membrane; Domain location=1-220; Score=8.1; E_value=0.00082; Accession=PF00664.14; Description=ABC transporter transmembrane region
  Pfam annotation: Domain name=ABC_tran; Domain location=293-476; Score= 141.7; E_value=2e-39; Accession=PF00005.18; Description=ABC transporter
  Pfam module annotation: Pfam domain module=ABC_membrane::ABC_tran; Domain location=1-220::293-476
MDSSVEVSCWILTGERQTAVIRSKYVQVLLNQDMSFFDTYGNNGDIVSQVLSDVLLIQSAISEKVGNYIHNMATFVVGLIVGLLNCWQIALLTLATGPLIVAAGGISNIFLHRLAENIQDAYAEAASIAEQAILYIRTLYAFTNETLAKYSYATSLQATLRYGILISLVQGIGLGFTYGLAICSCALQLWVGRHLIHRGKADGGEVVVALFSVILSGLGLNQAATNFYSFEQGRIAAYRLYEMISRSTSSTNQEGATLPQVQGNIEFRNVYFSYLSRPEIPILSGFFLTVPARKTVALVGRNGSGKSSIIPLMERFYDPTLGEVLLDGENIKNLKVEWLRSQIGLVTQEPALLSLSIRENIAYGRSGTFDQIEEAAKTAHAHGFISSLEKGYETQVGLAGVALTDEQKIKISIARAVLSNPSILLLDEVTGGLDFEAEKAVQEALDVLMLGRSTIIIARRLCLIKNADYIAVMEEGHLVEMGTHDELLNLDGLYAELLRCEEATKLPKRMPTKNSRERKSLQAEDTSRQSSKNSDPDSPISPLLTSDPKNERSHSQTFSRPQSERDDTSSEHSELDEVQHQKPPSFWRLATLSIAEWPYALLGTIGAAVFGSFNPLLAYTIALIVSSYYQIEIRDMRHE

SEQ ID NO: 70105 - protein, 256 aa, Zea mays
  Coding DNA Sequence Number=SeqID_26730
  Gene Ontology: Mol. function=ATPase activity, coupled to transmembrane movement of substances; Cellular component=integral to membrane; Biological process=transport
  Homolog annotation: Hit_ID=Q10N72; Match level="QueryCoverage=55%, HitCoverage=9%, E-value=1e-32, Identity=51%"; Hit description=ABC transporter family protein, putative, expressed
MVPSGLFGWASPHVQPLTPVSEVSEPPESPSPYGDGPAGDAGVGTREGEGAGAGEEEVEDDEVEPPPAAVSFWRLFEFADGVDWALMAAGALAAAAHGAALVVYLHYFGRALNLLDSERVGSSLYGRGEELLHRFKESTLWEDESREETVAGGAIGGVEQGTRGRARAGRQGRRRGGSGDLRLRARDTGRQRQARAGRQRRAAAGEQGTRAATHGGGEGGGELRHGGLLTAKPREATKAPRRLAQHAEAVGVTQKM

SEQ ID NO: 70106 - protein, 125 aa, Zea mays
  Coding DNA Sequence Number=SeqID_26731
MSDDLVVPVHFEVAQEFCFRLLDHPLLVLLKLELLVSRQDMYLPSGVAKKYVDAFSERQILKKNRRAVPSAQGRTVRARGRTVRGLVRGAVGRRKIADGAWISLPGGTPSGRRDPRSCLGSGRPT

SEQ ID NO: 70107 - protein, 319 aa, Zea mays
  Coding DNA Sequence Number=SeqID_26732
  Gene Ontology: Mol. function=metal ion binding; Cellular component =cytoplasm; Biological process=negative regulation of nitric-oxide synthase activity
  Homolog annotation: Hit_ID=Q10N73; Match level="QueryCoverage=100%, HitCoverage=100%, E-value=1e-145, Identity=79%"; Hit description =Zinc finger, C3HC4 type family protein, expressed
  Pfam annotation: Domain name=FYVE; Domain location=223-275; Score= -17.5; E_value=0.083; Accession=PF01363.12; Description=FYVE zinc finger
  Pfam annotation: Domain name=zf-C3HC4; Domain location=228-269; Score= 14.7; E_value=0.0019; Accession=PF00097.16; Description=Zinc finger, C3HC4 type (RING finger)
  Pfam module annotation: Pfam domain module=FYVE::zf-C3HC4; Domain location=223-275::228-269
MPQRHSKNNNDLAFFTYEEKRKLGYGTQRERLGKDSIKPFDACCLCLKPLIDPLCCPKGHTFCKECILECLLAQKKDIKRLLNRVLRVYSYSSSKLAAHEAQKKQEKEEEEEKLILQKAKELDAFDQQNHGAVPQYHDRSGSQGKNGFHGANSVKVTSFEEEALRNMKAFWLPSATPEATVKVDAPSADTVCPEGQEKLKLKSLFPISFMEETADPKRKKAMEKSYMCPSCKSTLTNTMSLVAVSACGHVFCKKCSDKFLVKDKVCLECSKSFKERNLVPLEKGGTGFAAHDERLEARDFKHLGSGSGLGLVKPAPKAY

SEQ ID NO: 70108 - protein, 140 aa, Zea mays
  Coding DNA Sequence Number=SeqID_26733
MTDEKNLAIRRRLESLPRCDCGDRDVICEDTTKYFMSHWAEEWKFDPVLYKCECPRDARYPTHATLREMVAGSRASILIKARRTVVYIKEIVGDHTDEEVYARSKALPLLAVPNSPPCLGEVVATTSREMAASNPSRGVA

SEQ ID NO: 70109 - protein, 101 aa, Zea mays
  Coding DNA Sequence Number=SeqID_26734
MARRRPRATVADLRGCTEDGGEGKVRERGLLVRKRGRGRVGFWAQVDGGGGVASSTRDVGAESAAARSSGGSYAETTGLTGRAREQRERGKRVRPRGRRPR

SEQ ID NO: 70110 - protein, 112 aa, Zea mays
  Coding DNA Sequence Number=SeqID_26735
MSNVTCSLRALGATPKERGSSIFPTGKVPACHAAVDNHGVDVGCAAQVDVSAVEGQWHMGPLCLHDWTSDGDVVDVAVVVPLLSLCVEVGAGPPSDHVNDSAIRLIGEVFLF

SEQ ID NO: 70111 - protein, 106 aa, Zea mays
  Coding DNA Sequence Number=SeqID_26736
MSGAHRTVSGAPEESDSELASFGNPLRYNSSDMSGAHRTVPVSQRSNDYFAPTGRLQRIKCAPARAEEQSTREWHTGQSTGLVRSKHHLDPTTSQSAHQANQPSHQ

SEQ ID NO: 70112 - protein, 539 aa, Zea mays
  Coding DNA Sequence Number=SeqID_26737
  Gene Ontology: Mol. function=cysteine-type peptidase activity; Biological process=proteolysis
  Homolog annotation: Hit_ID=Q5NKP7; Match level="QueryCoverage=97%, HitCoverage=64%, E-value=0.0, Identity=85%"; Hit description =Putative uncharacterized protein 9C20.3c
MFVMLVSASRPSPNNPKRITIQSSQECFSVDIPSAEQPNPCPEVENPPNADSQNVTNETVQIDSDEDDFMPALKKRNVSESHTRVLRKVVTKRIKHEELPRQRLNVRCNPQDVIASINILNERQREAIRRKGFSSILDMTVDALCSRSHLQWLMDKLDPKDMTIRPGPGKELKITKDIVHLILGVPNHGGDKPLGIDEAVAASNLRAELGVAKDEFNVAFLQDRLRKGEDDDLSIRCFFLILFNRLLFPTASWGITYHEVLLTEEMHRFHEIDWCQLIFNDLCEAAKKWHNRITTNVSTTIYGCSIVVLLYYLDHLHTAAAPHNKSGTPRIKFFDKNSIKALTKADKRKVRHGAESFGHCEPECRTNIFDAPRPGPMPRPTFNIKLPSIKEMMSSKINDLPHRHRSKFTDILAAYDLEVDKSCVAIKDSIDKIIEKQYDIADKFIELIDEDTLLMPPSPHPICHPQASQLETQLGGTQFEEIHERQQHIHRVLETFPDELDVVSDQQRGAMATEEMEHNVCGPVFDQTPTPHVSRITYI

SEQ ID NO: 70113 - protein, 136 aa, Zea mays
  Coding DNA Sequence Number=SeqID_26738
MDYQLERYPLTTANVEDGGERGSSRVGGERRSRSVAGEGRVFSGRRTQRREYWSEDWGHRGRAAQMPLATGSTASGEGLEESSERGAESPGWKNRRRFLESCRGWGFAVMETEPGAKELIAGSRRYLYGNRKVSRL

SEQ ID NO: 70114 - protein, 180 aa, Zea mays
  Coding DNA Sequence Number=SeqID_26739
MNWQERSKPNSKEFDIREKMQRKRMVVPMRKQEDEEHACKEEEKAAATATASDSCPLAILLHATLDADALALGGGGPSTGSLMVDHPQARQVGRLTPREQPPAFAIGVRRACSRAAIAAVIYLCGVAERTERTKRRRERGRRGLAAREQKEAMKEKVPTRRFEGRREPKRFAMREKMIMT

SEQ ID NO: 70115 - protein, 494 aa, Zea mays
  Coding DNA Sequence Number=SeqID_26740
  Gene Ontology: Mol. function=acyltransferase activity; Cellular component=integral to membrane; Biological process=metabolic process
  Homolog annotation: Hit_ID=Q7XDH2; Match level="QueryCoverage=93%, HitCoverage=93%, E-value=0.0, Identity=76%"; Hit description=Beta -ketoacyl-CoA synthase family protein, putative, expressed
  Pfam annotation: Domain name=ACP_syn_III_C; Domain location=369-455; Score=36.5; E_value=2.5e-09; Accession=PF08541.1; Description=3 -Oxoacyl-[acyl-carrier-protein (ACP)
  Pfam annotation: Domain name=Chal_sti_synt_C; Domain location=323 -457; Score=1.4; E_value=0.0014; Accession=PF02797.6; Description =Chalcone and stilbene synthases, C-te
  Pfam annotation: Domain name=FAE1_CUT1_RppA; Domain location=25-349; Score=515.0; E_value=8.8e-152; Accession=PF08392.3; Description =FAE1Type III polyketide synthase-lik
  Pfam module annotation: Pfam domain module=ACP_syn_III_C::Chal_sti _synt_C::FAE1_CUT1_RppA; Domain location=369-455::323-457::25-349
MELVTMVTLTLLAYSAAMLARLLVARAQRRRCYLLDYVCYKATDDRKLPTDLCGEIIQRNKLLGLEEYKFLLKVIVNSGIGEETYGPRNMIEGGEARPDRLREGMEEMDETFHAVLDELFARSAAPGGVGIRPADVDVLVVNVSMFSPAPSLSARVVRRYGLREDAKVYNLTGMGCSATLIALDLVNGYFRSYINIEELTTIKIHISWMLDYVWLVACRTHAGQVALVMTSESIAPNWYAGNKRTFMLGNCLFRSGGCAYFLTNDPRLRPHAKLRLRHVVRTHTGASDEAYNCALQMEDEAGRPGFHLGKELPRAAVHAFVHNLRVLAPRVLPLPELLRLACATLSARLARKKRQRGAGHGHGHLTIRMKAGVDHFCVHTGGAAVIDGVGKGLTLTEHDLEPSRMTLHRFGNTSASSVWYVLAYMEAKGRLRQGDRVLMLTFGAGFKCNSCVWTVERPATDAGVWKDRIHHYPLKDVSNPFMDKYGFVKDLIDL

SEQ ID NO: 70116 - protein, 233 aa, Zea mays
  Coding DNA Sequence Number=SeqID_26741
  Subcellular localization annotation: CTP_CleavageSite=28; ConfidenceScore=5.04e-01
MQAACNRAKWAHPFDSNAPSMEAQAHTSCNRRAGCYVRATAPPLAPLPCLLDCGTSTTTRGNPAYDPIVPVRRIDHGTGGTFGERSGQRFAFAIMTASKKGPGKGDTPKGILLREGNGPRAPLTDQRSGGWPPRRGSTAASERSGSAPTTGQSTKLQRPDGVQLSQGSVHSRDTISPRPSPASGKGSRLRRIHVLPEGPLKQWTHLRLARGPVFAKKQPWPDRHADRPYRRSI

SEQ ID NO: 70117 - protein, 365 aa, Zea mays
  Coding DNA Sequence Number=SeqID_26742
  Subcellular localization annotation: CTP_CleavageSite=68; ConfidenceScore=5.69e-01
MNGSGHMGAGRPALRLWMTHAPAARRGRPACVKVAFSSSSSNQSFESTSRPTTGWLATTALLTEVVIVGSTTDGEYVAPANSGDERHTPANSTGSGDERQRRAVYWEQEGEKESTRERKRASASSLAIDGVAVSSRHQWARQRLGGSLARLEGAARRMQALARGWMHARRGEQRQSGSAAEQLGSCAGWGRALSRSGSVSRQRLARSPVHAHGSDSGSAPEDDGLRLARPRARTRAQPRKTTNSASFDPGLGLGLSPRRRRTPPSPDPGLGLDLGRQTQPRPRRSLHLALPRARTDHATGGAIITLPLADSGYGEQDRRPIWLAPRSSDCHDITRIGRQDLSGCHDGMALLERVGRAGKDGTALA

SEQ ID NO: 70118 - protein, 202 aa, Zea mays
  Coding DNA Sequence Number=SeqID_26743
MVTSGLMVGESEPGCGLYPSLSLKDFHHQGWGGESAELGCSVPGFRTRVASEPLAAPASATAAGRGSYADEIARAAHGPTSDSTAFCPSLPHKFGHGRGPPSSSARPEVSAAAVRPPGAEVVVVAAAGAGDGAPFVGLLLLRRPSPMEWGYSPVDYLNRFTKHESPRVKVTSESLAGLSVSGTNAGVDKPRPRVELAPLEDD

SEQ ID NO: 70119 - protein, 170 aa, Zea mays
  Coding DNA Sequence Number=SeqID_26744
  Subcellular localization annotation: CTP_CleavageSite=22; ConfidenceScore=5.04e-01
MQAACNRAKWTCFSDSQHASMEAQAHASRNRRAGCCMQATAPPLAPPPHLFGCGTNTATRGGPAHDQAAPAWRDGGASGGRSGRRFAFAVITAPKKGPGKGDTPKRILPCEGTGLRASLLIRGSKAGPPRGSTAASDRVGPTPTTGQRFEGRPPEGLHGRLRLLGLRAHY

SEQ ID NO: 70120 - protein, 131 aa, Zea mays
  Coding DNA Sequence Number=SeqID_26745
MGCQTSFKLNLSTVHRNYRKGLAGDKDATAARDGSSAATVKDFCDVALKRGGGKPRLNGSHRAITVVLPRAFENKSPTAPLMKLFEGKCSGGVQFSVCRMRVPAVARSGQHELIAERPNAVYRRGPHPVKK

SEQ ID NO: 70121 - protein, 82 aa, Zea mays
  Coding DNA Sequence Number=SeqID_26746
MGCQTSFKLNLSTVHRNYRKGLAGDKDATAVRDGSSAATVKDFCDVALKRGGGKPRLNGGHRAITVVLPRGQMGNFGAFKMA

SEQ ID NO: 70122 - protein, 166 aa, Zea mays
  Coding DNA Sequence Number=SeqID_26747
MTHATTVPARRLPTPMGRTIRQEVRLALGHKLCPPKVDLGLGTNSTSPELGLGYLLLANPAGGHSFNYGAHVFESWNGLGRLERTSASPEPSPNLDIRNGKAPNVTIYFRVDVLLRSVLPYSLLCQPLRHVQPSCQGGSGCLDFKEEDGPGLGLDFSGLCDPKAML

SEQ ID NO: 70123 - protein, 364 aa, Zea mays
  Coding DNA Sequence Number=SeqID_26748
MGSDEAETGVLGKGDLSRDEDSSENTPCLWAGSSDAELCSSPLALAHVPRPGPVGCGRLAQPQRPRETETASKTSPNALLSPSSGHPRSASTLASSCPSPRSRCPGVQPAWPAASSQRGQRGAARAVQPAWLACAAARRGSPARMPRRHFPARARSLRGGAAQPRHQHADHAPPCTDVVIRRRDATSLRSTFAVRPSLAIFELVDAFALSPSRREPHHLRQPVKCVYPCLVLPQPQVPASWRPAGAARGEQPAWPARRAAGAARGVQPAWLARLACAAARRGQPVRLAQRGGPRGSLARMPRRRFPAGARSLRGGAVQPRHRHADHAPPCTDVVIRRRDAASLRSTFVVRPSLAIAELVDAFTL

SEQ ID NO: 70124 - protein, 30 aa, Zea mays
  Coding DNA Sequence Number=SeqID_26749
MKPLDAVARCLCALIIEPRPWIYDPVDTNE

SEQ ID NO: 70125 - protein, 72 aa, Zea mays
  Coding DNA Sequence Number=SeqID_26750
  Gene Ontology: Mol. function=transferase activity
  Homolog annotation: Hit_ID=A2WSM9; Match level="QueryCoverage=48%, HitCoverage=3%, E-value=4e-10, Identity=88%"; Hit description =Putative uncharacterized protein
MVKVRSSKAVEVLEAYEVTLEDDYPLENERYEHNEMLLYKYNRHFTAKYELGKEVGRGHFGHTCSRPPARET

SEQ ID NO: 70126 - protein, 257 aa, Zea mays
  Coding DNA Sequence Number=SeqID_26751
MTEGTHFPYKRSRTRGISPHLVGGTAGSGLHHTSQYAVQLFEEHQVPHCRVRMTLEPHPLQPGWRSLDSESFGFRADDTIEPTTMHVLTTFYGFHPLEMSTHPIGLFPAEKEDDPMWKDQVDHAKDVWALYPRHTTHLTVRSREVQGDIRQTREECPQRPDLGRDRPAALSEQRARGLQWVHQLSLTPFFSVLACAQIERAGAEAEWKILYSLSKNGDGLLRKDVARSVYDGTLFSRLAPRWKSLDREKLISMVREN

SEQ ID NO: 70127 - protein, 131 aa, Zea mays
  Coding DNA Sequence Number=SeqID_26752
  Pfam annotation: Domain name=zf-CCHC; Domain location=72-89; Score =16.1; E_value=0.0055; Accession=PF00098.14; Description=Zinc knuckle
  Subcellular localization annotation: CTP_CleavageSite=53; ConfidenceScore=5.32e-01
MNSTPVLFTRTCHFAFGVTLVLSTFSQDRRNDSLVMLISYFMLYVSPSSLLVMFTKVEDLLFNIEKKKQRKRGCFACGEKGHFRDNYPTMAEPKKERTKGKALTSVKTWDNSSSEDEPPRTRNHRSSSRSS

SEQ ID NO: 70128 - protein, 152 aa, Zea mays
  Coding DNA Sequence Number=SeqID_26753
  Homolog annotation: Hit_ID=Q7XBD0; Match level="QueryCoverage=100%, HitCoverage=37%, E-value=1e-07, Identity=39%"; Hit description =Putative gag protein
MEKLLQKMDEYIRANNDFRQRREEAYSLKGHNTTPNLQGNNQALSGHQPQGAEAAWASEEGTGISPEGYIVYSVEKIRATPQEHAKSQYRSKRRLPKLKHDRISRSRFYILPHATLPMYQKGHQHAQQQRNFREESEARTVNNTMPESKHIY

SEQ ID NO: 70129 - protein, 168 aa, Zea mays
  Coding DNA Sequence Number=SeqID_26754
MEDLSTMTPTIVIGKYTAFEMSRKMCRGEEPTSSRPYAFACDEMKGKKKAPTPSSSSEEEEEEESDDDEDNQPCTSSSKDEETIQRVGKVFSDSELWIWSTTRTKAKPGEGRRQPKLYAGKLRRDSTRGNRLKDKKTSGSSIDFHKPLTNVMDMDVILRGLRPASINR

SEQ ID NO: 70130 - protein, 84 aa, Zea mays
  Coding DNA Sequence Number=SeqID_26755
MAHEIIKKSEKDTHEARAEARQAEEAAKRKKRIAELSSPPEPFDPLVDPEVKEALDIINLAESIVDEVVNKLLHEVAEKVLKED

SEQ ID NO: 70131 - protein, 770 aa, Zea mays
  Coding DNA Sequence Number=SeqID_26756
  Gene Ontology: Mol. function=binding; Cellular component =mitochondrion; Biological process=negative regulation of cell proliferation
  Homolog annotation: Hit_ID=Q6K624; Match level="QueryCoverage=98%, HitCoverage=99%, E-value=0.0, Identity=49%"; Hit description=BRI1-KD interacting protein 135
MAEDPAAEQETRQLEDRLRDVGERLQAPSDDAEDLLNLLIEVEECLIKVEQSPRESISNALRPATEALVKKELLGHADSNVRLAVASCISEITRITAPDAPYDDDAMKDVFSLIVGAFEHLDDIESPFFGRRTSILDTVAKVRSCVVMLDLECDDLINDMFHHFLRTANSGHSEAIISCMETIMRLVIEESEDVQPQIASCLLQNVRKEEKESSPSFELAEKVIGTCREKLKPVFLQSLKGTSLSEYSQIVASVCEEVSDDREDNNANPSGKDMVDDGKLSERTISDELPQESSKMEQDVSRPEQDGTSMNGDTVTAISSGATPPDTSESDQGPPSTNEKIEQPCYAQNIADAMQLKSDHNEGAESNAAKPNKKATLGSVKNTKLKPSDKCEPTVHSDADTKKQDLVASAEGSNGAADDTSRPADSTPKPKRGRPPGPKSLQKAPGKDQSPGLDLKKVNDDSAGKLAKRSAKDEKPSAKNTGEGEPSKKTQKNNLKQHKGETLSEDDPAKDLSLKEMISLKSSTKGPGRTKGQTTENSTPKLKQEQETDEPPRSRKNKGLDRSLVGARIKVWWPDDKMFYNGIVESFDAVSKRHKEKEASMASETPRGRKRKADALKEENTETPKSDAVDPPKKRGRPKGVGSSNGTPSTSATPSTKGKTAGKVTKETPKTGPNLKKELEKNSKDKANVSTGTKDDKSVSKPKEAIIKGKDSKDEGKSTEGKAKPGRKPKNAGTPAGDSDKEKQEVEVKAAEIEEASGNASTGKKRRRKA

SEQ ID NO: 70132 - protein, 92 aa, Zea mays
  Coding DNA Sequence Number=SeqID_26757
MVKFFSSTTVQWCEGESSSRPHPLNSHLHPLNGGPRCVEDESPDHCNLTDGEYVLIPEQGVAQDEVQELAPEPAPEDLPAASAFEGKPRFYA

SEQ ID NO: 70133 - protein, 89 aa, Zea mays
  Coding DNA Sequence Number=SeqID_26758
  Subcellular localization annotation: CTP_CleavageSite=56; ConfidenceScore=5.21e-01
MFPLALLSVAAITAVGIAASLVCSFVGGFPHLKNFVSRDRLGWIALSSFVVTPYITAPILSSSRIALGAPPPARWLRHWRWALFPLSPE

SEQ ID NO: 70134 - protein, 156 aa, Zea mays
  Coding DNA Sequence Number=SeqID_26759
MVGIHRQNWGKLLPTSATSRLYGVPKTVADPFILSLETRFAEYHVAVVAPSGEGRAPSRPTLGYVVVGVLGKGRGASPHHQEDVPASIWRNWSSGRPQFVAAHQPPPRNRIAAWAEKSPLRFEVCLGGVLSTDGPHWGIVDTFSPGTGAAPPSPMS

SEQ ID NO: 70135 - protein, 401 aa, Zea mays
  Coding DNA Sequence Number=SeqID_26760
  Gene Ontology: Mol. function=protein binding; Cellular component =chromatin; Biological process=chromatin assembly or disassembly
  Homolog annotation: Hit_ID=A7QTK7; Match level="QueryCoverage=35%, HitCoverage=98%, E-value=1e-37, Identity=51%"; Hit description =Chromosome chr11 scaffold_170, whole genome shotgun sequence
  Pfam annotation: Domain name=PRKCSH; Domain location=116-156; Score =32.3; E_value=1.7e-06; Accession=PF07915.4; Description=Glucosidase II beta subunit-like protei
  Subcellular localization annotation: CTP_CleavageSite=34; ConfidenceScore=5.04e-01
MGFAGWVSMLLFLLVAGAVANDQIFTTSGVPFGRSSREPSYRVEFHPVDSPFHPENGQESVPMASHDGKRYKCFLPVEETKTMKSMLPQNATNVIIESERRIKPKEPDELLEVLKDQCFYRHEGWWSYEFCYHGKIRQVHVDDDKSAARGHNPADGVQRRAGITLLAATDRDYDLRSRGPATLGPEVLDNLVSRVRRSASQSQSATAYTPSVHPPHPPPSPSSSIASSAMGDQPTLADVMKKLLDLTANMTAMKADMAGMKEQATSSSPVSGGHTEGQRDLDRPLKFQRLGFPRYNGKTDPMLFISGADGARQGGSYTGQGRSARATIPASTAADTPGLRAPVSACTTAGASSSASQGQGSTGENVSLQKSRRNDDALACATIAMSPIPEATIVCAAVPST

SEQ ID NO: 70136 - protein, 303 aa, Zea mays
  Coding DNA Sequence Number=SeqID_26761
DLPTTEFHRRAADSTPRYLILPPEASNTQSRGQGTSWGDYSPRRSYDVVGHGNRRNHGDDVSMASDSKSSVHDEATAEEIERASGPTCRPMVAPGIRRFWAYTARVQMDRTLEVVKEKENENTELQEKLQQLESQLMELTNAKYGMINSNTKEGDNEKGGTEEDDEPVVVVAKMWENNKFVDYDSSKEKENDGDSQVDLESNKGDAGLDSNGLHSTKENSGRASPTKQHQQDAESQLTIESTMKPPAQCEINDRNEVRVGVGVGDTNITGDEDMMVNLMDASLVTPPVIFLWKNVHVLLYFDE

SEQ ID NO: 70137 - protein, 64 aa, Zea mays
  Coding DNA Sequence Number=SeqID_26762
  Subcellular localization annotation: CTP_CleavageSite=44; ConfidenceScore=5.16e-01
MDLILWCPYPSPSPTIGFPAPFPIFLDHPNSSKTPEQTRVVPPLVARGKGRSRLPNPRHSPQIQ

SEQ ID NO: 70138 - protein, 938 aa, Zea mays
  Coding DNA Sequence Number=SeqID_26763
  Gene Ontology: Mol. function=kinase activity; Cellular component =ornithine carbamoyltransferase complex; Biological process=amino acid metabolic process
  Homolog annotation: Hit_ID=Q6Z7G3; Match level="QueryCoverage=37%, HitCoverage=72%, E-value=7e-31, Identity=29%"; Hit description =Cingulin-like
  Pfam annotation: Domain name=DUF827; Domain location=429-780; Score= -93.8; E_value=0.0019; Accession=PF05701.2; Description=Plant protein of unknown function (DUF827)
  Pfam annotation: Domain name=MAP7; Domain location=480-653; Score= -78.4; E_value=0.046; Accession=PF05672.2; Description=MAP7 (E-MAP -115) family
  Pfam annotation: Domain name=Tup_N; Domain location=573-655; Score= -14.8; E_value=0.09; Accession=PF08581.1; Description=Tup N-terminal
  Pfam module annotation: Pfam domain module=DUF827::MAP7::Tup_N; Domain location=429-780::480-653::573-655
MGRRETKREGGKKPEGDRRKRGNPRPSCLSRAQVGRKERIQGNDGASCDVVGPSPGLGEVEAPPRSRLSLSSKAEVESEPLGRARRRPSAEARAESEPWGRVKRSSSSSGAEPESEPWGRALGSGDAEAEPESEPWGRAKWSLSSSGAEPESEPLVGRGGASYGARGRTWLLSAALCRVAQQSERRRRRCPLVRPATFALNAPAIRSVGAAIVPRLLLGEDWASGEPRLCADGGYQLRLGVLGVPLIMVPDSYLVSEFSTRSSIAAPARRHCRVVLLCCFSINALLSVNFPHWSTVGEATPSSLLFITAPELTQRPRRHPLPARQRTVSFYAPTLPEFCLLDANLFRLPSFNADGGGVGMQEEAPNPPLEVSTGEERPRCVVSTNLSSDLLLENRAHVGEDGRSSCVTATPPSRWIPADSGGGSSPSDGGFVSWLEHRSGSAEAKSNDKPDKEKKGGGGGTPPTPKDSKPRKSAVPKASAAGHGTPRTADKSPSSGSADRKAPMPKAAASRLATTPEKGKPTKPPQEQQAQLATIREELMNAKEQLVENEKEKCKVLAELERAKKVADEANTKLQDVLDVQRRAIEVQEADKLPARESEQASIHGQQEADDAVLRSTVEQLEKARASVVKAQEVEHLTAEVTHLKGQLDSKVDGNRKKTAERIQNLEEENFALKLELEKNKAAEEKTVRLERMIDELKSDVDDARNLGSKSKQLADEWQKKAMEGLASALQEMSAESREVQEKYLLKQDEIGHAQAQVEELNLSLKNIKENYELLLDEANYEKVCLTKADERLEAEAKRAHEEWQSKELSFVNSIKNSEEEIVAVCHTRVSGHQDPGANIITRGCASLPTSHVTHLPRDRDFPYTSTEEARQGIPRMITIAAKSSQGPPYTDHSPTALAPFGRFDAQVPNPPTGSEQHAEQRTGNILGATTHREGAAT

SEQ ID NO: 70139 - protein, 411 aa, Zea mays
  Coding DNA Sequence Number=SeqID_26764
MNKTPALKVPLQTELRFHLRRYEQPHTIGGPTEQQKADGWLAAARSNNDDDDFCSEGPNNSSDDHRADAAAIGPSPTSSLERQGRAKGRRVGGQFVGGTGYLVGGETSSGCRGGRRHRKRLRSRSGQRAGHAAAASATNGEHPSPRSLREGAGRCPRRDRPQLGALPSPALMMNILEAEGEAEAAARLASPDPGAGGHRLGAEEAKPPRAVHATAQRLQAFLHFHPDQRVKGRTAMQSACNRAKWAHPFDSNAPSMEAQAHTSCNWRAGCYVRATAPPLAPLPRLLDCGTSTATRGNPAHDPTVPARRIGHGPVSRGRRRDGRCGQKWADSNGGGRRAEAAVTSSAKLTSPHGIGENPLPRREDGAPVFRSSNGSRTRNGCPANHSPRRINSAAGHAAPLAGEAGDASPLP

SEQ ID NO: 70140 - protein, 69 aa, Zea mays
  Coding DNA Sequence Number=SeqID_26765
  Subcellular localization annotation: CTP_CleavageSite=41; ConfidenceScore=5.20e-01
MAPKRKTANSSAAVIPAIDPNSQLPFAEHSATERQGPSNISVSRVSRLNSGYQQENPFSRLGEPSRNDP

SEQ ID NO: 70141 - protein, 61 aa, Zea mays
  Coding DNA Sequence Number=SeqID_26766
MAPKRKTANSSAAVIPAIDPNSQLPFAAPEGVAGEDSAQVRSVGHYPAPEGVAGGDPGSSG

SEQ ID NO: 70142 - protein, 142 aa, Zea mays
  Coding DNA Sequence Number=SeqID_26767
MGKNNKRKREPTPPSEEFGDSEYSEEEFSSESEGSPAPVSPPASSDDSDDSQGIAAEVWTYIRAVERAGLEGSDESECSSDEEDSDGGDEGEDDDDDDDDDDGGGGGSGSGRGGGDGSRDSTKGDSRGSTKGGGGGRGRASG

SEQ ID NO: 70143 - protein, 158 aa, Zea mays
  Coding DNA Sequence Number=SeqID_26768
MESTPNEHLDLLTKSRCWRRVLRTTRRCRRWSAHEVLYIKMSSKKTSTNRRRKNPIENALLEQPKYAQSGSTGLSGGAPDSVRCARLALANRLLSGLRRRCTTIIHRTVRWCTGLSGGPFTGELVALGNSSATYGYNSPDCPCKGERLQVVEIPRKRD

SEQ ID NO: 70144 - protein, 193 aa, Zea mays
  Coding DNA Sequence Number=SeqID_26769
  Homolog annotation: Hit_ID=Q10P78; Match level="QueryCoverage=49%, HitCoverage=28%, E-value=2e-30, Identity=71%"; Hit description =Expressed protein
MAAVSSLNSGGISSDHQIKDGTNNISRKASRGFNLIECHSLPISQLLKSLGNSLNENDFECQKDVYVCYKLPCRGSSKLDLVCRKEDSLELNDIEASNKYNIDTTGLVFHVYGHVPGIFQLLSVSTCQELRKMMTLTNTVQDDDTEQQDDAASQEDDEEEEHPLQSDGRSMEGEESVLGGVGGSATADAFHLD

SEQ ID NO: 70145 - protein, 155 aa, Zea mays
  Coding DNA Sequence Number=SeqID_26770
  Subcellular localization annotation: CTP_CleavageSite=18; ConfidenceScore=5.03e-01
MQAACNRAKWAHLSNFQRAQHGGPGPRVMQPGPGKGDTPKRTLLREGNRLRASLLIRGSGYAPEVPKDISETSGSDLVTESHQREASSPRTPSIGDRVRQITHRGSGAALANPAPARPLTASTYQPENLGPDRALGLRPARMREQLDQSKCCEAS

SEQ ID NO: 70146 - protein, 187 aa, Zea mays
  Coding DNA Sequence Number=SeqID_26771
MTLGTSVTWPRLRLRSRGTLGHFRDQQERFVMESHRREAPEPSEPLSNESGSSESPAGPRPSRMKEQQGRPRNHRKSVKTSEESNHSSEASGATPDGITTLFTPVPTTMPTTKPRAQQGVPPRPTPASASGGIVTIPEHGLSLGMDLRLARPRPWPQPRSREEIYASPDPGLGLILGLEKRSSPHPT

SEQ ID NO: 70147 - protein, 310 aa, Zea mays
  Coding DNA Sequence Number=SeqID_26772
  Gene Ontology: Mol. function=molecular_function; Cellular component =anchored to membrane; Biological process=biological_process
  Homolog annotation: Hit_ID=Q10P77; Match level="QueryCoverage=75%, HitCoverage=69%, E-value=1e-102, Identity=76%"; Hit description =Thaumatin family protein, expressed
  Pfam annotation: Domain name=Keratin_B2; Domain location=58-215; Score=-77.3; E_value=0.096; Accession=PF01500.8; Description=Keratin, high sulfur B2 protein
  Pfam annotation: Domain name=Thaumatin; Domain location=10-227; Score= 268.4; E_value=1.4e-77; Accession=PF00314.8; Description=Thaumatin family
  Pfam module annotation: Pfam domain module=Keratin_B2::Thaumatin; Domain location=58-215::10-227
  Subcellular localization annotation: CTP_CleavageSite=70; ConfidenceScore=5.54e-01
GRAATFTFVNRCAATVWPGIQSNAGSSRLDPTGFALPAGASRAVPAPSGWSGRVWARTGCAQDAASGKVACATGDCGSGSLECDGRNAATPATLAEFTLDPAGGNDFYDVSLVDGYNLPVVVEPAGGGGGGATTTCAAAGCAADLSERCPAELRAEGGAGCRSACDAFGRPEYCCSGAYASPSTCRPTAYSQLFKSACLRSYSYAYDDPTSTFTCAGGRDYTITFCPVAPPSLKSSSGPGATAAAPAGPTPQMPRLAGGQGGGPDGQGVMLGDSSWLASLATGAAPPGPALRASPLVPLLLGVGGLLLVL

SEQ ID NO: 70148 - protein, 133 aa, Zea mays
  Coding DNA Sequence Number=SeqID_26773
  Subcellular localization annotation: CTP_CleavageSite=47; ConfidenceScore=5.40e-01
MGKPVPSLLVLLLSRGRVPLDSPTRCTMDQAVSLAARSRRFESSFLNLASRSGLTALAYNASLTPTGRRAVTALVPTITGMGDHVSGRVRGYVRWQVMHKPGLAFQSCGRQILWCRLGCWIWGYLLSSSLLRI

SEQ ID NO: 70149 - protein, 234 aa, Zea mays
  Coding DNA Sequence Number=SeqID_26774
  Gene Ontology: Mol. function=nucleotide diphosphatase activity; Cellular component=chromatin silencing complex; Biological process =metabolic process
  Homolog annotation: Hit_ID=Q42974; Match level="QueryCoverage=59%, HitCoverage=29%, E-value=1e-62, Identity=80%"; Hit description =Nucleotide pyrophosphatase precursor
  Pfam annotation: Domain name=SIR2; Domain location=107-226; Score= -36.5; E_value=1.2e-07; Accession=PF02146.8; Description=Sir2 family
MLGRLIAGLEARGMFEDVNIILVGDHGMVGTCDRKLVFLEELAPWIELKSDWVLLMTPLLAIRSPDGVSPTEIVAKMNEGLGSGKVKNGEYLKMYLKEELPTRLHYSESYRIPPIIGLVGEGYKIEMKRSKRNECGGAHGRAQPNAAHYALVSLERTGRVHSMATQNVDRLHHRAGSNPFELHGSVYEVICLECGTSISRESFQEEVKNLNPKWAQAIDSLEVGQPGSGKSFGM

SEQ ID NO: 70150 - protein, 533 aa, Zea mays
  Coding DNA Sequence Number=SeqID_26775
MKKTSALKAAHRRPKSSSDNDLCFERPNSSSDDLRADAAAIRPSLTSPLEGRGQAEGRRVGGQSAGGTDYLVGGETSFGCLGGRWHRKRHRSRSGRRARHAAAASATNGEHPSPRSLREGAGRCPRGDRPQLGALPSPALMMNILEAEGGAEAAARLASPHLGTGGHRLGTEEAKLPRAVRATAQWLRAFLHFRPDQRVKGRAAMQAACNRTKGVHPFGFDASSMEAQAHTSCNRRAGYYVRETAPPLAPVPRLLDCGTSATTRGDPAHGPTVPTEHIGHGDRERGYSERDPSPRRKRAPSPLLIRGSKAGPSEGFNSRLRALGLCAHYGSEVRRPAPRKGSTAASGHSGSAPTTDQGFCRLAPEGFDSRLRRRARDDPGYVRYITKARATLPRVRLTAAKSGLGRHRKLRLARPQGSAPVSASDDELRLAQPQGSDSASAPEDDELRLARPQGSDSTSALKDDELRLARPQGSNSASPPEDDELRLVQPRGSNSALASDDGLRLARPGARTRPRPRKIDSTSTSEEPPPRPT

SEQ ID NO: 70151 - protein, 201 aa, Zea mays
  Coding DNA Sequence Number=SeqID_26776
MDAQWDVTQEWLDRVKIARKGLRGTKRSKGRIRVERDLALCGRLNEEVGHLGDVDPRAIDLAMRIAERMFLKMKEDEAKNKIEEEENDRWRPNDESTSSQGSSFKSTSHMCFVANGSDSESESEDEEEHESDSEDEGDLQQFFAQLSKKNRMRLLKLMKRSEEQKEMLHKQEDFLIRKIEDLEKLTKEHEKLKCSHDDLVR

SEQ ID NO: 70152 - protein, 139 aa, Zea mays
  Coding DNA Sequence Number=SeqID_26777
MSGAPEDSEFKLVTFGNFQRRLRYNSPDCPVYTRHVRCSKEESPLELANLGFSLQPLRYNSPDCPVYTGLSGATAGQRLFRRQRLPATHLRSGTPMLAHRTLNSTCPVRHRTSRRAQKTELQRSTPTAFGDVAVAPDMS

SEQ ID NO: 70153 - protein, 148 aa, Zea mays
  Coding DNA Sequence Number=SeqID_26778
  Homolog annotation: Hit_ID=A0YI02; Match level="QueryCoverage=74%, HitCoverage=77%, E-value=2e-07, Identity=38%"; Hit description =Putative uncharacterized protein
MRIKSPRRRDASGLGPLTHTAVRHIPWDLGAWSLGSPDKHASTFASRSPWPVGRSGDGRWGDGHWADAWEDGAWGDGRWAPGEIRRWPLGACLGVRACAVHIVAVGAWPDRQGRWACASAPGETGRWPLATGRLGRWPLPAGAHCGVG

SEQ ID NO: 70154 - protein, 136 aa, Zea mays
  Coding DNA Sequence Number=SeqID_26779
MGRKRAAVKKSSVSSNPPQLFPIIGNAALDSTGTESADRVHVEAESFVASASSPANVDGDHVPVPLPRKSKTSVSRAECWNHMDKQEIVENDSAGGTGHLNRHFKACLKKVGQTVGGGVQTQLNFAVDGTVPKVHT

SEQ ID NO: 70155 - protein, 138 aa, Zea mays
  Coding DNA Sequence Number=SeqID_26780
RRLRYNSPDCPVYTRHVRCSKEESPLELANLGFSLQPLRYNSPDCPVYTGLSGATAGQRLFRRQRLPATHLRSGTPMLAHRTLNSTCPVRHRTSRRAQKTELQRSTPTAFGDVAVAPDMSGVHRTVRCAIEQTASPNG

SEQ ID NO: 70156 - protein, 178 aa, Zea mays
  Coding DNA Sequence Number=SeqID_26781
MAVSCRRLLTVLCRAPSFAECLVLGKVVFAECLSLLRVLLSTGPALGVAAGATAPGPTKLVGPHPINNILQATATIADLQPATPEAQSPDANPIAYAATPIPLLAACMRLFACPDRAACYCCLCGSAWRLAFARRTARRSATADARSGDRRSSLPPGVPPTVPSRDRVRSPPGAGKFK

SEQ ID NO: 70157 - protein, 112 aa, Zea mays
  Coding DNA Sequence Number=SeqID_26782
MKLMDVCWFDAHGRRRGFYDDESQEEDRYRRRVARTAIDSIRTGSEGMQAYGAEVTQLGAIGYDAEIFRLWLMLKSAEIFLIAGMRCIGADTSDIVVLAARDAVVFIFRLCH

SEQ ID NO: 70158 - protein, 633 aa, Zea mays
  Coding DNA Sequence Number=SeqID_26783
  Gene Ontology: Mol. function=ligase activity; Cellular component =cytoplasm; Biological process=response to auxin stimulus
  Homolog annotation: Hit_ID=Q60EJ6; Match level="QueryCoverage=96%, HitCoverage=97%, E-value=0.0, Identity=80%"; Hit description =Probable indole-3-acetic acid-amido synthetase GH3.4
  Pfam annotation: Domain name=GH3; Domain location=23-584; Score =1064.0; E_value=0; Accession=PF03321.4; Description=GH3 auxin -responsive promoter
MPEAPVVTMRDTAAAAPPATHRDLLEYIERVTAGAAQVQRRVLSEILAQNAPAEYLRRLGVSGAAPGAVEAFRRAAPLVTYEDILPDVLRIANGDTSPILSGKPIREFLTSSGTSGGERKLMPAIADEMDRRSLLYSLLMPVMSQAVPGLDRGRCMYLYFVKAESRTPGGHPARPVLTSFYRSRHFLERPHDPYTVHTSPDEAVLCVDAYQSMYAQLLCGLVHRADVLRVGAVFASGFLRAIRFLEKHWQRLCRDLRRGALGAEVTDRSVRAAVARVLRADPALADAVEAECARPSWQGIIRRVWPGTKYIDVIVTGAMAQYIPTLEFYGGGLPLTCTMYASSESYFGINLNPMCKPSEVAYTLIPTMCYFEFLPLPQPGPGGTDDADPDHRDLVDLVDVKLGHEYELVVTTYSGLYRYRVGDVLRVAGFKNQAPMFKFLRRKNVVLSIDSDKTDEAELHAAVSGAVQHLAPFGASLVEYTSYADAGTIPGHYVLFWELRLRAGDVPVPVPASVFEDCCLAVEEALNSVYRQGRAADRSIGPLEIRVVSDGTFDRLMDYALARGASINQYKVPRCVHPGPVVELLDGRVQASYVSPKCPKWSPGGGKQWSSDAAAKKPAAAAGSNNGGGAVVA

SEQ ID NO: 70159 - protein, 91 aa, Zea mays
  Coding DNA Sequence Number=SeqID_26784
  Subcellular localization annotation: CTP_CleavageSite=39; ConfidenceScore=5.40e-01
MSLGRTPPPTRPSSPVLSANFLMLTPTESRAKGAGRKVECARVGYTRREPVIESGFLIVDERRGALQSDLLLVVESDWPWPYPFARVLESR

SEQ ID NO: 70160 - protein, 171 aa, Zea mays
  Coding DNA Sequence Number=SeqID_26785
  Gene Ontology: Mol. function=protein transporter activity; Cellular component=clathrin coat of trans-Golgi network vesicle; Biological process=intracellular protein transport
  Homolog annotation: Hit_ID=A2ZH90; Match level="QueryCoverage=49%, HitCoverage=10%, E-value=5e-17, Identity=94%"; Hit description =Putative uncharacterized protein
MTVDNDLALKIYIKARATPKVVAAFAERREFDKTLIYSKQVLEINLVTYPNVVDAILANGMFSHYDRPRIAYLCEKAGLYLRALQLSAFRDRGVPKPTSECAACPSPDGSSAWASAEGGEARRPEPSVREVEVPRPSCSSRAQVSCKERIQVYNGDVAECYVSSGGRASAL

SEQ ID NO: 70161 - protein, 309 aa, Zea mays
  Coding DNA Sequence Number=SeqID_26786
MARLRHTARKSVIPFLPSRLAERPLRRPVAGQSSHLERLHHRLHEEQERRRQEQEQQDSSFSLQQEIESVRSCSPVLPLEAPPAPPQGAPAPGVAAGGDPDDRGGDDSSSHDTDFSANHELEGWFARSITRDAARGCHFHDALDTLLRRALNRHTWSIEYRCVVYQHCRGIYPDRWEATCLVRRPENSLQGAEACSEHYSISERDSAEAAMQDAARRGVIVSPVGEGNPRLSSTVNLAAVLNTELDHALDELSRARAEIARLRAERAERRHLEDGSPAPVGTQHLYRSPQRGHQSYGNPDCKTKITLEP

SEQ ID NO: 70162 - protein, 38 aa, Zea mays; identical to SEQ ID NO: 60284
  Coding DNA Sequence Number=SeqID_26787

SEQ ID NO: 70163 - protein, 118 aa, Zea mays
  Coding DNA Sequence Number=SeqID_26788
MNDNGSAHCSRGSSASWASSSGQAECGMERRAVWRGNAREQEAGTREKMNGDTWIAAAGLGVRDLGRPRLQRQTKDQVSHRKGPVSHDFIVIAPQAMFSKTNLGVPNIRSVGSTASDP

SEQ ID NO: 70164 - protein, 164 aa, Zea mays
  Coding DNA Sequence Number=SeqID_26789
MVEAPWVRYLSQEYIPMLTWAANTYRSPSCPYFRNKALALSKGVEQIWGIGVDLGWGTRWRLGFVLICVGVGVELLIMIGERRKAFWAGHNSEVGGGGGERGRTTRLPDRATRGSPFSKPWRSSPIATSSALPSDFLSCCSEIGVPDFPTEYLGTKCNACVQPG

SEQ ID NO: 70165 - protein, 722 aa, Zea mays
  Coding DNA Sequence Number=SeqID_26790
  Gene Ontology: Mol. function=protein transporter activity; Cellular component=clathrin coat of trans-Golgi network vesicle; Biological process=intracellular protein transport
  Homolog annotation: Hit_ID=Q2QYW2; Match level="QueryCoverage=98%, HitCoverage=40%, E-value=1e-141, Identity=74%"; Hit description =Clathrin heavy chain, putative, expressed
  Pfam annotation: Domain name=Clathrin; Domain location=393-535; Score= 102.4; E_value=1.4e-27; Accession=PF00637.11; Description=Region in Clathrin and VPS
MTVDNDLALKIYIKARATPKVVAAFAERREFDKTLIYSKQVGYTPDYLFLLQTILRTDPQVIDCLNIIVIMIALVLLSCVKRLGCTCEPSSCRRFETGGSLSRRAGRRGVSSEAEVESCLQLPWPSPSQGVGRGGSRPAEARAESEPWGRARRSFVVFRVLARVRALGSGGAEFAVFRVLARVRALGSGGAEFAVFRVLARVRALGSGGAEFAVFRVLARVRALGSGGAEFAVFRVLARVRALGSGGAEFAVFRVLARVRALGSGGAEFAVAPLARPNCLSDSLCRVALQSEWRRRRCPSVRLASGALYADGGYQLRIRRLEGTPNYGPRQQHYSELPDIKRAIANTHPINNFLGQALVEFFGTLSREWALECMKDLLLVNLRGNLQIVVQATKEYSEQLGVDACIKLFEQFKSYEDLYFFLGSYLSSSEDPDIHFKYIEAAARTGQIKEVERVTRESNFYDAEKIMNFLMEAKLPNARPLINVCDRFGFVPDLTHYLYTNNMLRYIEGYVQKVNPGNAPLVVGQLLDDECPKDFIKGLILFVRSLLPVEPLVDECEKRRGQCDDELINVTNKNSLFKLQARYVVERMDGDLWDKVLQPENEYRRQLIDQVVSTALPESKSPEQVSAAVKAFMTADLPHELIELLEKIILQNSAFSGNFNLQNLLILTAKAQLREGLVSEAIESFIRVDDAAHFLDVIRAAEEANVYNDLVKYLDQLTCYDC

SEQ ID NO: 70166 - protein, 73 aa, Zea mays
  Coding DNA Sequence Number=SeqID_26791
MERRAVWRGNAREQGAGTLEKMNGDTWIAAAGLETEYGSYSETSAPAKGAERDDSTASGGQYIGKSRHRQDKE

SEQ ID NO: 70167 - protein, 131 aa, Zea mays
  Coding DNA Sequence Number=SeqID_26792
MALLESIREKILHYLYPLPTMGTKLPYTSTHVDKIPIVNNVLGKNLPNEKLGDEGTDTGIFDDIMKLGSGTQRSPYLEMKSRKWEKLPMSGYTEKGGILADVTADNLKIEIENKLNMVQGYTERTLSLLET

SEQ ID NO: 70168 - protein, 103 aa, Zea mays
  Coding DNA Sequence Number=SeqID_26793
MARRPDGQRRRPDARSPGAPPTPDWVADGIVDCNSMVRARCTRGDTRFSTGSGRFEMRNTLLPSVDLYVGAARGKVEQMLQIALKLLGPEPASFNSYVDPFHQ

SEQ ID NO: 70169 - protein, 61 aa, Zea mays
  Coding DNA Sequence Number=SeqID_26794
MSCAFDDYYIKDYDVILAPEINLLIETSEQLLQAYKVKNEQCVHVNSRYTEIIYEDEDIRA

SEQ ID NO: 70170 - protein, 357 aa, Zea mays
  Coding DNA Sequence Number=SeqID_26795
  Gene Ontology: Mol. function=nucleotide binding; Cellular component =myosin complex; Biological process=signal transduction
  Homolog annotation: Hit_ID=A3APZ6; Match level="QueryCoverage=26%, HitCoverage=5%, E-value=1e-19, Identity=74%"; Hit description =Putative uncharacterized protein
MGITRSCTVIIELSHIFVFHGQIEQHESLENIFSSILETTAQAYGEDDNIQPSSGCTDAGQLCHHPVQELDTERASAETAARSGSTLFALFELLALPTFSKREAQRRGRHLHLSVSAVAINLWRAGRAPKNSSLAWPLVLPIFNGAAYIYEAHVRHYFKIGNYVSPSYSEHHRRVLQMTSLDVCSFSCVNLELLQEHVVTALSVESYYRFNYAKDQIKTCVEFPECFVSKTVGEALNKPVLGHLAMQKLSGTIQVVLEFFVEIQFDANGKISGAAIRAYLVERSRVCQISDPERNYHCFCMLCSAPSEFDANGKISGAAIRAYLVERSCVCQISDPERTYHCFCMLCSAPSETSMVA

SEQ ID NO: 70171 - protein, 508 aa, Zea mays
  Coding DNA Sequence Number=SeqID_26796
  Gene Ontology: Mol. function=nucleic acid binding; Biological process= RNA-dependent DNA replication
  Homolog annotation: Hit_ID=A3BD88; Match level="QueryCoverage=58%, HitCoverage=41%, E-value=5e-16, Identity=23%"; Hit description =Putative uncharacterized protein
  Pfam annotation: Domain name=zf-CCHC; Domain location=245-262; Score =3.5; E_value=0.45; Accession=PF00098.14; Description=Zinc knuckle
  Pfam annotation: Domain name=zf-CCHC; Domain location=264-281; Score =4.6; E_value=0.31; Accession=PF00098.14; Description=Zinc knuckle
  Pfam module annotation: Pfam domain module=zf-CCHC::zf-CCHC; Domain location=245-262::264-281
MAAIPRASEVLERSESVRVGSEPPSNLQMHQSRMNPGILRKDHRRGCLEEKCKSVVKKTEEVEGLWGKIPESGISRIGNAESAHLCSPPNPKSHTYISSPVHASKPQIERFVGHFWGRSQKYYASVVKAKRAPIVAVKMQPRGTGRRGAARGYGRGSGRDHVWRRIEDGAVQNQRGGRNIEEADLGEEGDTLNQGNPSPWEGQANRSEEKNEDSWKGNPHPMGEDGPKDSHVKKEVTRNFNLDRSGCAFCHFKNHLTKDCRHHFPCDICGCDDHVVFDCKKCLPWNFGPDLCAAQVEDQSFFYIEEKVDNRMIKEKSSTAIITVVQGNVGEKQIELEFMSMLGKNLWRWSARSVEDNKFVMRFLDPKMIGDLGYFRPLGMRTAKAQITIDPWTPAVNAKGCLQKGWFRISGIPMEQRSLVTIAKVGGLVGKVIEIDERTRLRNEYVRARIACRDVTAVPGVVESSLGLFLYDFFFEREIHSEEDEQSLETRIRVDDSYQKAAKRSKYE

SEQ ID NO: 70172 - protein, 69 aa, Zea mays
  Coding DNA Sequence Number=SeqID_26797
MKKIYKYMKKVMCGSLDVFFVRLLAAPDGCELEGEDLVLEATDGCLKASNREGLTYPILSKKLEYPFTE

SEQ ID NO: 70173 - protein, 31 aa, Zea mays
  Coding DNA Sequence Number=SeqID_26798
MAAQNLCGVVKYERKGKGEGSVFMPYNPMQM

SEQ ID NO: 70174 - protein, 130 aa, Zea mays
  Coding DNA Sequence Number=SeqID_26799
MEQRCYHRASTTTGVKGFKDGISGAQVNGNDCNGGLQLAKASRLRWAFVAQRARTNRARRGQKPPPAIYPGGDSLAPSSGLGASQDPAARICGLVGREPRPKNRRFLADASAPPRSRTPQRAGFPTAPAP

SEQ ID NO: 70175 - protein, 112 aa, Zea mays
  Coding DNA Sequence Number=SeqID_26800
MGQIARGPQKQDEAALRGDVTAGLRLVLNEAKGVPARFVSVRPATAAKGDERRVASLPSPQHKYYPKILSGKTSRSIRPEEISALFVAADSELNGSHLPATNAACGCCSILF

SEQ ID NO: 70176 - protein, 382 aa, Zea mays
  Coding DNA Sequence Number=SeqID_26801
MDKDRQGAAQKRQATVRLHEARPKRQRGAPKAAASGGGKPPLAAKAGVSAPSKAPEATAGAGGSKSTKVVPPASGVAEASKAARALPLSGKRVADFGTDITVDDYLGGEVSALAVVRDEASAATRRLKGVTEALSQATEALSQVADFASRTASGALTAAVSAEVERLRTQHADAVREKSASDSKCRKLTDRVAALEREKADLRRQLAAERREANEAVAKGQAAQAEAKLARAEGNLAKELAEHLQERLTALESRAKEAEAAMHAEAEWTRTQLMDTYRELGARTGDFEVPDREPGLRCLQWVQEELLEFPAVAGGVDVAERGERVDDFGALNSALPDPEPTLAEAVTGVALEPTLETAAIATAALTSAVVGEDLPLNVRLRP

SEQ ID NO: 70177 - protein, 68 aa, Zea mays
  Coding DNA Sequence Number=SeqID_26802
  Subcellular localization annotation: CTP_CleavageSite=72; ConfidenceScore=5.38e-01
MSSSSLSLLNSHGRCSAQILPAKLPAESPPMASASLLLASWPSPSSGPSRLLWRSAISAPVHGGSLRA

SEQ ID NO: 70178 - protein, 249 aa, Zea mays
  Coding DNA Sequence Number=SeqID_26803
MVLNRLRRRHYTETPFSCKSPDRSQLNHFKPKVWYLAEAICRALEEYRAASFVFVRFLGFLDNARNDDEIEFGASWRDGIRAGLTIGDHYRQELGRTACRGAGRTRRPSRPDPVARTNRGGELEYGQSRAGRLGEIRARGKLWPWEFRAEAEASKMDGELAHAGSRKQPREIRESRGARDPGIQGAGRAQGDTRAQENSRRGDQGARPGEQQGARRARDGRARRAALGSSAQRAEQGDEKRLRAGLNPS

SEQ ID NO: 70179 - protein, 323 aa, Zea mays
  Coding DNA Sequence Number=SeqID_26804
MERSRSHLFYLRFKSPIDHWICIIIYPKDGKVLVLDSLNYDPSTYAKLLNILELQETMASGHDSMSPAAARLIDEKAQKHLLYGDDDMSGHHRISSSPRHLMGPETDSPRSQGGRGGYMTESLGLQPNGKQDFEKDSRLARQITLFLQPGRSLRSKATPLLGERTTISARSTLVFGEKIMRSGGSAHALQVANDSVAINSEIRLIAISFCLPDRVSHRKQPHMRVLGGIVRFALISMVKYRTYRGSIGSGSRCKHCREAKSDGSATCLKNYLAHRGKDDVKNCPSVPLEVKSLFAGELDKTKEKEETEFGRGNRYMKQQELIM

SEQ ID NO: 70180 - protein, 256 aa, Zea mays
  Coding DNA Sequence Number=SeqID_26805
MWTEDMTLRKFTGFPRSIEPLPGRGAPSPPLELRLLPDLRQHHRSAAAARSRFAPTPLLLHAAQSAGSSAARPRGSSSAERGDIVVLRGASVPPTRTSSPPLPSRIEVQVRRAADSTDSYLPVAGFLYCSELHHDAWSKWTNSCHAESLKHASITLALRYLTQLKVDQLELATFGFLEKSLCYNSPDCPVCQRSNGYSAKVDSNRNLKSATVHGQFAQSQRRPQKAHQTVNSGCPVDHRTVRWPRLSELQRSNPNG

SEQ ID NO: 70181 - protein, 577 aa, Zea mays
  Coding DNA Sequence Number=SeqID_26806
  Gene Ontology: Mol. function=acyl-CoA binding; Cellular component =endosome membrane; Biological process=lipid transport
  Homolog annotation: Hit_ID=Q10B01; Match level="QueryCoverage=82%, HitCoverage=89%, E-value=0.0, Identity=55%"; Hit description=Acyl -CoA binding family protein, putative, expressed
  Pfam annotation: Domain name=Kelch_1; Domain location=209-254; Score =34.9; E_value=2.9e-07; Accession=PF01344.16; Description=Kelch motif
  Pfam annotation: Domain name=Kelch_1; Domain location=314-360; Score =17.4; E_value=0.025; Accession=PF01344.16; Description=Kelch motif
  Pfam annotation: Domain name=Kelch_1; Domain location=365-410; Score =18.7; E_value=0.018; Accession=PF01344.16; Description=Kelch motif
  Pfam annotation: Domain name=Kelch_1; Domain location=415-460; Score =25.2; E_value=0.00024; Accession=PF01344.16; Description=Kelch motif
  Pfam annotation: Domain name=Kelch_2; Domain location=209-254; Score =37.7; E_value=4.1e-08; Accession=PF07646.6; Description=Kelch motif
  Pfam annotation: Domain name=Kelch_2; Domain location=314-360; Score =32.0; E_value=2.2e-06; Accession=PF07646.6; Description=Kelch motif
  Pfam annotation: Domain name=Kelch_2; Domain location=364-410; Score =25.2; E_value=0.00024; Accession=PF07646.6; Description=Kelch motif
  Pfam annotation: Domain name=Kelch_2; Domain location=415-460; Score =10.4; E_value=2.5; Accession=PF07646.6; Description=Kelch motif
  Pfam module annotation: Pfam domain module=Kelch_1::Kelch_1::Kelch _1::Kelch_1::Kelch_2::Kelch_2::Kelch_2::Kelch_2; Domain location=209 -254::314-360::365-410::415-460::209-254::314-360::364-410::415-460
  Subcellular localization annotation: CTP_CleavageSite=42; ConfidenceScore=5.10e-01
MASSGLAYPDRFYAAAAYAGFGAGGATSSSTACTAGHSWSVQCAQAKGVEPRGAEQMGQIMESPTWIAGVENSQKIPFTIELHLHVLKTILISYMICVFSWHGLGSMPSAEAMRLFVKILEEEDPGWYSRVPEFNSEPIVDIQMHKPKEEPQIVPASTNGTSISEPKIISENGSSVETQDIDVILEGLSTVSSLDEWTPLAISGHRPKPRYEHGATVLQDKMYIFGGNHNGCYLSDLQALDLKNLTWSKIDAKLEAESSDSAKTSQIAPCAGHSLFFSIAGHTKDPSEGVTVKEFDPHTCTWSIVRTYGKSPVSRGGQTVTLVGTTLVLFGGEDAKRCLLNDLHILDLETMTWDDVDAIGTPPPRSDHAAACHADRYLLIFGGGSHATCFNDLHVLDLQTMEWSRPKQQGLTPSPRAGHAGATVGENWYIVGGGNNKSGVSDTLVLNMSTLTWSVVSTAEGRVPLASEGMTLVHSNYNGYDYLISFGGYNGRYSNEELQAVRGQLAAEQSRCFKLEVDVAELRQKLQSMDALEKEVELLRRHRAASEQAALDAKQRQSSGGMWSWLVGTPPDDKSES

SEQ ID NO: 70182 - protein, 166 aa, Zea mays
  Coding DNA Sequence Number=SeqID_26807
  Homolog annotation: Hit_ID=Q6J9V9; Match level="QueryCoverage=30%, HitCoverage=17%, E-value=9e-16, Identity=76%"; Hit description =Putative uncharacterized protein
MAEAQAMLPRYPKTFPRPAGAICNGISSEEGIEPSDPIERDRVQQITCRKTAQLAPLRLLRHPPGVRLTAAESSLRRSRKLRPARPWASTSGGSLRLARPQGSASEDGLRLARPQGPASTSTSEGGLRLARPQGPASTSTSEGGLRLARPQGPASTSDGGLRLARP

SEQ ID NO: 70183 - protein, 172 aa, Zea mays
  Coding DNA Sequence Number=SeqID_26808
MAVELRLQGEEAGEHRPGELEGLEANWKLSHVAGEEVELTKAMGDNDKYPLAARSTPHEDVTDGEDVGIEEKPEEYVRTPELEEECTRQIRVLLHFYAPIGILADTSGWAVPSPVIYLDGGNGCGCSHRYYRLLPLVILLSDPSIWSSESSTVVEKAQLQLKKFNSVEVQLS

SEQ ID NO: 70184 - protein, 207 aa, Zea mays
  Coding DNA Sequence Number=SeqID_26809
MGKTSLIPPPAGGLSAAIVVVTRRRKEYHVVAAVEGHELKTPETEHRPGLERLLETTHLELDGKLFVNMQQAPTWRANCRRFDPGGSLDRRVNYRRMSQPRWVGARRSMKGGKKGDRQKEKLAAFMLSYAQVGARVRIRCQAILALNAPAIRSVGVAIWPRLLLGEDWASGEPKLCADGGYQLRLGVLGVPLIMVPDSSHYKDSPGA

SEQ ID NO: 70185 - protein, 278 aa, Zea mays
  Coding DNA Sequence Number=SeqID_26810
  Subcellular localization annotation: CTP_CleavageSite=32; ConfidenceScore=5.57e-01
MSSSSSSTAATPPVDSSPPTAASSEETLSSLMAALRAGDSVDFGVSRMSSARVEDMQRLGYFGGGVGRALGTEEVPEPEASWLFSRRSSPPVSACLHTGDDFVRRTAIGRSFAKHYCLHWQKRMIGDEVAQFGSCTFTPKTGKTTMQVVELVPCARNKWGNWNEFWFYVAEGTVEGHEGLPVSEMCSHFYSAYPPFEVAEEDVDEGALRVVRSPAFALNLRNRDPAAFVREAEDVAVRLVGRYVPRTEGPRSWEIRGSNDRLNRVFELNQLSYDGYPG

SEQ ID NO: 70186 - protein, 494 aa, Zea mays
  Coding DNA Sequence Number=SeqID_26811
MDKDRQGAAQKRQATIRIVEARPKRQKRGSATAAAPGGGKPPLAVKSGVPASSKAPEAAAGAGGSKPAKAVSPLSRVAEAAKAARALPSAGKRVADFATDICVEDYLGGSDEGQLATVAPASAIATAAIVPKARGEALGSGGEVSALAVVRDEADAATRRLKEVTEALSQVADFASRAASGALTAAVSAEVKRLQTQHADAVREKSASDSKCRKLTNKVAALEREKADLRRQLAAERREANEAIAKEQVAQAEAKLARAEGNLAKELAEHLQERLTALESRAKGAEAAMRAEAERTRTQLMDTYRELGAQTGDFEVPDREPGLRCLQWVQEELLELPAVVGGFMSYASLVTCEGAMNALSREGCRHFEVFDQADEDFDRDVYKVEDIVVKDSAGALYDRMWGPHGREVFRERAETAMAQALRGERVDDLGALNSALPDPEPTPAEAVSGVALEPTPETAAIATAAPTSAAAGEDLPPKVAEGEPGCPRGCCAEC

SEQ ID NO: 70187 - protein, 103 aa, Zea mays
  Coding DNA Sequence Number=SeqID_26812
  Gene Ontology: Mol. function=actin binding; Cellular component =cytoskeleton; Biological process=positive regulation of growth rate
  Homolog annotation: Hit_ID=A2WK63; Match level="QueryCoverage=81%, HitCoverage=13%, E-value=9e-35, Identity=83%"; Hit description =Putative uncharacterized protein
  Pfam annotation: Domain name=WD40; Domain location=19-57; Score=23.5; E_value=0.00081; Accession=PF00400.23; Description=WD domain, G-beta repeat
  Pfam annotation: Domain name=WD40; Domain location=63-100; Score =12.1; E_value=1; Accession=PF00400.23; Description=WD domain, G-beta repeat
  Pfam module annotation: Pfam domain module=WD40::WD40; Domain location=19-57::63-100
MGRASDDYFNRFSPTSSGKIKLKNMLYRTARINSLAWSPDSRLVATGSLDTCAIVYEIDKPVASRITIKGAHLGGVHGLTFLENDTLVTAGEDACIRVRKVVE

SEQ ID NO: 70188 - protein, 312 aa, Zea mays
  Coding DNA Sequence Number=SeqID_26813
  Gene Ontology: Mol. function=transferase activity, transferring glycosyl groups; Cellular component=integral to membrane; Biological process=cell wall organization and biogenesis
  Homolog annotation: Hit_ID=A7PPK8; Match level="QueryCoverage=99%, HitCoverage=66%, E-value=1e-149, Identity=72%"; Hit description =Chromosome chr8 scaffold_23, whole genome shotgun sequence
MKRAYARGCDLVAIFDADFQPEPDFLWRAVPFLLHNPDLALVQARWKFVNADECLMTRMQEMSLDYHFAVEQEVGSSTYAFFGFNGTAGVWRISALNEAGGWKDRTTVEDMDLAVRASLKGWKFVYIGDLMKVTLWKKIHVIYNFFLVRKIVAHAVTFVFYCIVIPTTVLVPEVQVPKWGSVYIPTVITLLSAVATPRSAHLVVFWTLFENVMSLHRTKATFIGLLEAGRVNEWVVTEKLGDALRTKVPGKKPRMRIGDRLHVLELGVAAYLLFCGCYDIAFGNNRYYIFLFLQSIAFFIVGIGYVGTFVPH

SEQ ID NO: 70189 - protein, 378 aa, Zea mays
  Coding DNA Sequence Number=SeqID_26814
  Gene Ontology: Mol. function=microtubule motor activity; Cellular component=microtubule associated complex; Biological process =microtubule-based movement
  Homolog annotation: Hit_ID=Q9FME7; Match level="QueryCoverage=75%, HitCoverage=21%, E-value=1e-103, Identity=68%"; Hit description =Kinesin-like protein
  Pfam annotation: Domain name=Kinesin; Domain location=94-378; Score =217.8; E_value=2.6e-62; Accession=PF00225.14; Description=Kinesin motor domain
  Subcellular localization annotation: CTP_CleavageSite=71; ConfidenceScore=5.51e-01
MHACIWGTTLLPNVHGPRLQTMPNAPMTHQRNGRSSNESVKSTGQMHRAHRPGRRQSGSIRRFKSGEIMIRVPMETSEAAAAHPQKDSVKVAVNIRPLITVELQDGCTDCVTVTPGEPQVQIGPHVFTFDHVYGSSGPSSSLIFEQCVHPLIDALFSGYNATVLAYGQTGSGKTYTMGTDYSGEGNCGGIIPQVMDTIFRKVDTSKDGSEFLIRVSFIEIFKEDVFDLLDANQAAVRLDAGSMAKASAPGRVPIQIRETATGGITLAGVTEAEVKSKEEMASYLTRGSSSRATASTNMNRQSSRSHAIFTICVEQKRTSGTSDKSANGDYDILSSKFHLVDLAGSERAKRTGADGHRLKEGIHINKGLLALGFFKCIR

SEQ ID NO: 70190 - protein, 405 aa, Zea mays
  Coding DNA Sequence Number=SeqID_26815
  Gene Ontology: Mol. function=helicase activity; Biological process =viral genome replication
  Homolog annotation: Hit_ID=Q1EPC6; Match level="QueryCoverage=24%, HitCoverage=6%, E-value=9e-33, Identity=68%"; Hit description=DNA helicase homolog, putative
ILLLLFSPGLEIVGNNWLRCGDTQDKIAVATATSVVAASIMPGGRTAHSRFKIPLTIDDGAICTFTEQSGTSKLLQKALLIIWDEASMAKRQSIEAFDNNMCDIMGCPGLPFGGKTIVFGGDSQSRAAFPSSAHAPLPRGPLQASLHAATEVVANIYTSALLEEETIENGTLEHTVSNLEKLEKPCLFYPPPRRRCGCCYCDARSCRHRMRVWSASAAVPSWQLPLSHRTLTTAWFARNRRGRPVRGDRAGVASLGTGCWNRICGKGDGENETLLARDGRKETAAASGSQSRCWRRRDFTSMVSPPAGFAQVLGASRLREQGIISGGRHVWAGRQRQHEVERGIPSIAGCERSNGGCTSRIMGYKGGGGGVNGTERDCESEIGTERLRPVDFLEQNGSGSEENIP

SEQ ID NO: 70191 - protein, 96 aa, Zea mays
  Coding DNA Sequence Number=SeqID_26816
  Subcellular localization annotation: CTP_CleavageSite=68; ConfidenceScore=5.59e-01
MSADLLCDPLAAAVSFLPSLANNVSFSPSPLPHMRFQQPVPREATPALSPLTGRPRLFLANHAVVSVRCDKGNCHDGTAAEADQTLIRWRHERASQ

SEQ ID NO: 70192 - protein, 136 aa, Zea mays
  Coding DNA Sequence Number=SeqID_26817
  Gene Ontology: Mol. function=kinase activity; Cellular component =ornithine carbamoyltransferase complex; Biological process=amino acid metabolic process
  Homolog annotation: Hit_ID=Q6QP54; Match level="QueryCoverage=63%, HitCoverage=36%, E-value=2e-25, Identity=63%"; Hit description =Putative kinase
  Subcellular localization annotation: CTP_CleavageSite=43; ConfidenceScore=5.09e-01
MAPPVDVAGLRPRLGDVEAPPKPRSSLSTVAVVGSEPLGRAKRSSSFSGAEPEFEPWVGRSGVRRLSGLSPSPSPGSGGAEFAVFWDLARVRALGRAEFAVFRDLARVRALGRVEFTVFRDLARVRALGRAEFAVF

SEQ ID NO: 70193 - protein, 175 aa, Zea mays
  Coding DNA Sequence Number=SeqID_26818
  Gene Ontology: Mol. function=protein kinase activity; Biological process=protein amino acid phosphorylation
  Homolog annotation: Hit_ID=A7Q3Y1; Match level="QueryCoverage=98%, HitCoverage=35%, E-value=2e-63, Identity=57%"; Hit description =Chromosome chr13 scaffold_48, whole genome shotgun sequence
MFKFLKEVVAGSGSGLKDFPYTIGEPYASAWGSWKHHRGTSKDDGSPVSIFSLSGSNPQDRHMVAGRNGVKRLRTSLLCHFLKAQGTESWWYTEVHGNVCLASVVVTQTLDWKLHAFDVLSEFDANNEASGSPMLQFEWLVGTQYKPMELSKSDWASIRKSPPWAIDSWGLGERK

SEQ ID NO: 70194 - protein, 127 aa, Zea mays
  Coding DNA Sequence Number=SeqID_26819
  Gene Ontology: Mol. function=carboxyl- or carbamoyltransferase activity; Cellular component=ornithine carbamoyltransferase complex; Biological process=amino acid metabolic process
  Homolog annotation: Hit_ID=Q8SA97; Match level="QueryCoverage=74%, HitCoverage=21%, E-value=3e-24, Identity=58%"; Hit description =Ornithine carbamoyltransferase
  Subcellular localization annotation: CTP_CleavageSite=92; ConfidenceScore=5.11e-01
MAPPVDVAGLRPRLGDVEAPPKPRSSLSSVAVVGSEPLGQAKRSSSSSGAEPESEPWVGRSGVRRLSGLSPSPSPGSGGAEFAVFRDLARVRALGRAEFTVFWDLARVRALGRAEFAVFQSSPSSGT

SEQ ID NO: 70195 - protein, 120 aa, Zea mays
  Coding DNA Sequence Number=SeqID_26820
  Subcellular localization annotation: CTP_CleavageSite=59; ConfidenceScore=5.47e-01
MAAHPFARWSGQKWRVACNRWAVPGCTPPPPPRRRSPKTVTTSPWVGRSKLGCDLGPTLCFKDVHHPRWGGGWAEPELYLPRGLVGHPLLRRSRERALAGPAGGSDFDNAGPVDDRRRLP

SEQ ID NO: 70196 - protein, 198 aa, Zea mays
  Coding DNA Sequence Number=SeqID_26821
MAERYQLPRSCVPPTTRRKDGGYPPSGGLEGGKTRRIREREDMVAFQGGHPPFKGGSPYLRPQPSWAESSPTHSKVLPYGTGAGSHVSCKPTQSRRSQTAARGTGKGGYPEKDPSPRRNQAPSPLLIRGSKAGPPEGFDSHLRSRGPYTHYWSEVRRPAPRKGSTAASGYSGSAPITDQGFKGWPPKGSQPPQTPSEG

SEQ ID NO: 70197 - protein, 351 aa, Zea mays
  Coding DNA Sequence Number=SeqID_26822
  Gene Ontology: Mol. function=protein kinase activity; Biological process=protein amino acid phosphorylation
  Homolog annotation: Hit_ID=Q5QLZ5; Match level="QueryCoverage=88%, HitCoverage=35%, E-value=1e-114, Identity=69%"; Hit description =Putative kinase-like protein splice variant 1
MASPYKELRPCISPRFPNVLTGSEVRSHLQQRKLCRFRLIDVRTKAFQATDQFLQIAKQHHEKIQGFWYFSWFRSQLNTGDNSVAESTGVKLKPGNAGLLGWAMSSVTQKGKPFDHAPISTANANNSQASTTSTATPDLQLSISIRLPDTQASTLAYAPSTSTSLDQAASASARSSVDGWGELEDGNIHEENSSDKDGWDDVDPFEDKPSPSLLSNIQAAQKRPVVQPKQPVANSSKPNPLKAPKSEDDPLWGPIAAAPPKSAVKSADIKPSTSHNDEDDLWGSIAAPPKSSGKPLKPAVANSDDLWGAIAAPPPATKARPLASSGRGRGTKPAQPKLGAQRIGRTSSTGM

SEQ ID NO: 70198 - protein, 455 aa, Zea mays
  Coding DNA Sequence Number=SeqID_26823
  Homolog annotation: Hit_ID=Q8LQE9; Match level="QueryCoverage=96%, HitCoverage=96%, E-value=6e-73, Identity=39%"; Hit description =Putative uncharacterized protein OJ1529_G03.19
MQAEDVRSRFGRCPYCRAMIYQDLSAVIFYCTRCRTPIRGRNPQPADETEYALAQLEILSADTASVFSDVDAEPPNPRSAWAVEDDDGEQSRSATATRRSSASSPSYREGEFGSVRAGPTSSGSALNSGLNRDHRSEAARSASPLHSRVTQLRPSSRRTRRSSSGDVDVRSDAGSNTESYSAATDTSYTRRSSPLSSQELQAPTALSAAAGFESADLTRTPLGDPAFQKDLLQALDNLRKLIAVVDHPPRSVDVDDGHLQGATPRLSASCNNGSSGGKRTTTRRSSRLMLRLESQSQLTRALPAERPRRRDANTSTSSSSSASSSRRRGGARARAPQCRPVLGGTPFVVCGECSEILQLPPALPAGRVCRLQCGGCGEAFEMTLPAVGSTGLPKKIFSAPQPAVSGGEDAEEYPLARSNLSLSLSREQPRPTMEPLHRVLGYSSVSSVLRSLRYS

SEQ ID NO: 70199 - protein, 207 aa, Zea mays
  Coding DNA Sequence Number=SeqID_26824
  Gene Ontology: Mol. function=small conjugating protein ligase activity; Cellular component=proteasome complex; Biological process =regulation of protein metabolic process
  Homolog annotation: Hit_ID=A2WWE6; Match level="QueryCoverage=39%, HitCoverage=59%, E-value=3e-36, Identity=90%"; Hit description =Ubiquitin carrier protein
  Pfam annotation: Domain name=UQ_con; Domain location=109-197; Score =42.5; E_value=1.5e-09; Accession=PF00179.17; Description=Ubiquitin -conjugating enzyme
MNVCELTLAVSHTPQVKTRTPVIYNVVTFDPVPLYIICVRLGPSIPGVYVNPGFWTPKIRLSVHDAPTEATGHHHSFLVPSPAPQAAHRPPSAPPIQIQIQGLVMASKRILKELKDLQKDPPTSCSAGPAGEDMFHWQATIMGPPDSPYAGGVFLVNIHFPPDYPFKPPKSANGPQLSWLRPCLAVHLYGHPNTVLHCRLYFSQSGV

SEQ ID NO: 70200 - protein, 144 aa, Zea mays
  Coding DNA Sequence Number=SeqID_26825
PPTEKSGFTVELARRRAIPCVTVAPNPNWRRGQLPRAKTILPDPTPRAETLQPRRSTAAALLSGGYGRGGELGELLYPEQSPSEGEAVTGRSAILGGERAAPSSSGFRCEEGDVLTSGARAPVEQRRKARGGANGKWVRVVGAS

SEQ ID NO: 70201 - protein, 93 aa, Zea mays
  Coding DNA Sequence Number=SeqID_26826
  Subcellular localization annotation: CTP_CleavageSite=38; ConfidenceScore=5.38e-01
MRMQHLKRRHKKVHRSPILKNKRSPKKSAKKPKKRAVSQRLVAHRTVLSGVAPDSLRREATDRRSLAVAPVYASGGSSWIIDSGCTNHMTGEK

SEQ ID NO: 70202 - protein, 69 aa, Zea mays
  Coding DNA Sequence Number=SeqID_26827
  Subcellular localization annotation: CTP_CleavageSite=55; ConfidenceScore=5.12e-01
MEPGGGTAVGAVESLLTSSCFRKGAESRRRHRVGRCGSSSEAEVESVFRSCGRVRAPGSGEAEFIVFWG

SEQ ID NO: 70203 - protein, 451 aa, Zea mays
  Coding DNA Sequence Number=SeqID_26828
  Subcellular localization annotation: CTP_CleavageSite=60; ConfidenceScore=5.56e-01
MVAFQGGHPPFKGGSPYLRPQPSWAESSPTHSKVLPYGTGAGSHASCKPTQSRRSQTAARGAYNRPTVTSDPPLLPRPAGERVGSHAGGMQRAKWAHFSDSQHARHGGPGPRVMQPARRMLRACNCTATCATTAPPRLRNQCRDSRRPSARPSGASLARRTGGASGRRSGRRFAFAIMTASKKAGPPEGFDSRLRSRGPYTHYWSEPTREYPRAVHLKFGADIRAPPVSLTRSTTASPLAALRDPRASRLPPIARHWVLGPTDRPPNALISFPVAAAGKPSLRAYRRDPRGRGQLSSIQCQGSRGISWYLLRPSPLLRRPRDFSLASAACAPCSLEESRDRRRRPRCPPQIGTRCAVGWVRFSWWTGWLTAPPIRAAHLLSSWNCSPVVNQGRKHILSMVGRHLVSDWQIFHDDRSIQIVRAGNQSESFKSQALIVDRTTYTAYRFGFEGF

SEQ ID NO: 70204 - protein, 139 aa, Zea mays
  Coding DNA Sequence Number=SeqID_26829
MSSRSLMRRVFPPSKPPDGGYPPSFRLVVGGTQLRGSCFKDVHHPRWGGGRAEPELYLPARARGSPSPAAFEGEGARRPCGWVRLRQRGAGRRQASSAPARRARWLGPQCPLLPEGGCRAVCTGGPPKMSRAARAAFVF

SEQ ID NO: 70205 - protein, 589 aa, Zea mays
  Coding DNA Sequence Number=SeqID_26830
MSLRYDLIYTPSALKIERPRLSVNVAILAKGRCQRFTINQYKSKERVQTKGAKDNRGQPWSGAPDCPVCHRTVSGAPGNSNSELASLGNSGSHSAKIHRTVRCYTGLSGVPAEQRLLRTSGRLQTAFNALQCAPESEQRQKAHRTVYRTCPMHHRTVLAQHADAMREKSAAKSKSRRLSEKAKANVVRAKGSLTRQRTEELEARFNALCSRMDKAEASTRVEVERTHAQFMDAYQELGAWTADFEVPGQEASLCFLEWLQEELLVLPTIVTGFMSFASLVTCEGVVNALSHEGCKHYEVFDQADENFEREIFKVEDPVLKQSAGALFDRMWGPHGREAMAHAEDIEDLGGLDGALPEAAEVDPVPPSDAGEGPSATPAPTAVAAQVLRFGPAHATATDNAIFVATSTVAADDDSFGSVSKCFESDDSGRSIVWTEESSDEDLDYFAALDVAAAEPSPRAEGSEELPGASTGYRRRRAVAKRRVSGLSRSGRRHRSEMESGRLHVDKTGKRELMSSPIGVSVGEGELRNLFEGEELRIMLFNYREMGIIPKAEPMLRAFVDPAAHVGDFCTESFGNDFDLRVLVVLFRPR

SEQ ID NO: 70206 - protein, 115 aa, Zea mays
  Coding DNA Sequence Number=SeqID_26831
MAIALLIQPLKGTLYGGIYRCLSAQSLDDMQQLGYFGSGVGRVPGAEEVPEPEGELVVFEAFFTTALRLPAHRFMAEVLQRFEVQVHHLTPNAVVALAKWQMMMKMKEPFGALPA

SEQ ID NO: 70207 - protein, 308 aa, Zea mays
  Coding DNA Sequence Number=SeqID_26832
  Gene Ontology: Mol. function=nucleic acid binding
  Homolog annotation: Hit_ID=Q53MN9; Match level="QueryCoverage=79%, HitCoverage=39%, E-value=3e-14, Identity=25%"; Hit description =Transposable element protein, putative
MARRRSRKNKKTQENKEVTLDILLSDCSNYDSWSTRVINAFRTIDPQLEQILDKSIIPPSYTRDNASEEDLRCIRLNYLAYDILSKSLSKEDYHAFIIKYDKPICDVHDIWTRIKSKFDESKHDDSFCASTSFGICETNPLKEEENERWRPNDESTSPKGLSSHFDSHICCVANENDSGSTNEDEEEERSFLQLYARLSQEDKAVMLNLLKRAREQSEARQRLEDILSIKMLSFDELTKEHEELKCSHVDLVQSKSSFELEFAGTKDDKYQKLKEENERLKMSLTQLKGKCIAHVGTCSPEQDDPTGE

SEQ ID NO: 70208 - protein, 172 aa, Zea mays
  Coding DNA Sequence Number=SeqID_26833
MTMIPSRPSGRKEIDLTIRAQGSVTERGWDGVLDSGVIRPSSCQSQCSRKIHSMTREDHRSDSPWRVHGRITYTWGPLTRLISLARNNLTVFAAITTRRIIVAMLLSHPVLEGKPNANHVRARISYSRTQQLHNMDIITVLKIVLRREIVDYIIRLRRPYSPYNKSKCGKET

SEQ ID NO: 70209 - protein, 348 aa, Zea mays
  Coding DNA Sequence Number=SeqID_26834
MKLYNTTMLKGATAPSTSTTPSARSDLASDGDAVGGSPTPKDDISITPGPSLPGPPPGIRLEQTARAGHPEASASCPLRTSARFVASATRLRRRSRQWTTRPGSGRPNLLFEANSASVRADTATSGFGSSKSGRGVPLTNQEKPRTARPTEPRDSYASGIRIPHSSPSHEATHTCHNEQKTGIQGAITNGTPVPSPRHERGHRKALVRVPAQGTLTRHQSQRAGGRPVGGADGVDGGESSPGCHHVNTDGGVRLSTNAAPANAGRSKVHRQVLAPVLATKARKRTECCILAGQEQFAFPGMAGGRLLRRAGGWFPPPEAGRGGGQPTRAGGRAPARLALRPSKDDKHP

SEQ ID NO: 70210 - protein, 294 aa, Zea mays
  Coding DNA Sequence Number=SeqID_26835
MESSTTATSTTLSPIASIRASLRLTHVTTIAVTCKGKREYTFDKHKSERGFDKEALKKKYLQKAKIKECVFLASLSDVDHDSDDASSSFSDEETHKRVKDKLNELFFLTNIAGGFCTMAFGDDAVGGHDQDIGDGSASDVSHSTDDLTAEAEEPISYLASQDKLLRLAARERKDFKFKYESTLKETESTRASIVIELAERDARIALLDKASLVSSSEPQLGMMVSRLVRGTSEPGLGFAAKDGSAACFGKVGEWSGWKPSEKPSSTPKLMKITPPKPTTNVRDGVIEEPVRAPP

SEQ ID NO: 70211 - protein, 122 aa, Zea mays
  Coding DNA Sequence Number=SeqID_26836
MEGDADANDPWKYTTVLLYRHMICPASKDYYSVLRVLVAVRRNGRADKVGSWYSNLETDVVGSTITGGGVGKYLKAWTASSINVTGSAGATDDLREKRKAIASTRTFKKSFIVLWFPNFNGN

SEQ ID NO: 70212 - protein, 98 aa, Zea mays
  Coding DNA Sequence Number=SeqID_26837
MDGRYAEEGDCGRGLRRRRRGGAELRTRDVVEKATKDAAAIREAQRIKELEEGGGGVESRRDDGAAVADLRVRGARNKFTYNCDSHTFNYLIEDELGE

SEQ ID NO: 70213 - protein, 64 aa, Zea mays
  Coding DNA Sequence Number=SeqID_26838
MAVRRGILALLFLEIVAACTSPRIAFIVSPPLKKRSNYASEYGGPSSDPSRASETKISESDMKQ

SEQ ID NO: 70214 - protein, 92 aa, Zea mays
  Coding DNA Sequence Number=SeqID_26839
MGPSFLAVIVAFLAADLFAFFDWDISSSITPGMMLILLAGCFMGKRMVFLKQLKPDLLLRLGVIASHGDTHAVGYLKQHLFENLLKHPAFIG

SEQ ID NO: 70215 - protein, 52 aa, Zea mays
  Coding DNA Sequence Number=SeqID_26840
MDSMVFEVSKLDGVRATPTEEVKVLAIMDSLNYEFLTVDELFNKLKSIKIDH

SEQ ID NO: 70216 - protein, 26 aa, Zea mays
  Coding DNA Sequence Number=SeqID_26841
MQLHTLRDDVVLYPQRCLLLIKGSGK

SEQ ID NO: 70217 - protein, 435 aa, Zea mays
  Coding DNA Sequence Number=SeqID_26842
  Homolog annotation: Hit_ID=A3AQ03; Match level="QueryCoverage=16%, HitCoverage=42%, E-value=4e-07, Identity=45%"; Hit description =Putative uncharacterized protein
MGLRCQYRPLRARCGPARAHSRTSPDFSATTPAHAPSSLLRAPPVPRAHPSPHFAHIHPLSRSAHTASRRRRPAPAFSAIQLAGDRSKPPQAPPQGETPVPVPNFPYCALCSTNFTFASARPRRSTVLTRWPAGLARSSSPELSGVPPDCSVHQRSNGYQRATVDSDSEQYRTVNAAEVRAVGHRGTGLSGVAPDCPVPHKDKASNGRPAPSPNDWMTWRRTRHCLVRPSLAAFPNGYNLVGGYKYHPNRPLQGTKDDTYPKIKEENERLKMSLTQLKGKCIAQPSQDNRDHMVKKLETGTTVACTKSLEECVKDLRIAKRREQKKKINTSSKSLNHASIEGFAYPPPLGDYQLAQALARLKSPPRGRNGSPELLWPTEAFSPPFSSLCPWNHGLFPAIEFAVAPSPSLLNSGDPGATLARASLNSGDLTAAERS

SEQ ID NO: 70218 - protein, 64 aa, Zea mays
  Coding DNA Sequence Number=SeqID_26843
MQGSASGGAGSAGALGGCAAGPACGLGEIRWLSQWRHRVLLACAAALVVKRKKNVVVRWIGMDG

SEQ ID NO: 70219 - protein, 103 aa, Zea mays
  Coding DNA Sequence Number=SeqID_26844
MMLVDYTMGLLQQPGCLEVVQGASLAEVQGKAASQTPPPAETRGKSPAAPGPAPAPSVGAPAPRAGNDAVCPGDWTDMAAYDTVDAPPCEKAKRGSQTYVQCT

SEQ ID NO: 70220 - protein, 161 aa, Zea mays
  Coding DNA Sequence Number=SeqID_26845
  Homolog annotation: Hit_ID=Q6QP51; Match level="QueryCoverage=30%, HitCoverage=22%, E-value=4e-12, Identity=67%"; Hit description =Putative growth-regulating factor 1
  Subcellular localization annotation: CTP_CleavageSite=41; ConfidenceScore=5.66e-01
MAVAGGQKQRSRRQPSSRPLMGQQENLSHGVKTARPCSVPRTARVRTTAAPRTTRPVALTPRRDRRHLWQEKRATLRLRHNDRVKKGTGKGGYPERDPSQRRKQAPSPPTDQRFEGWPLGGVQLPPQSARAPRPLLVRGSKVGPSEGFNDRLRPLGLRAHY

SEQ ID NO: 70221 - protein, 144 aa, Zea mays
  Coding DNA Sequence Number=SeqID_26846
MRMRLKLMKEKIKEMSHLKMTAMIKGEMQMIMIRRMKNQDHHTQESTKQSNEITSSTPSSATFIRGVEKALQDSDWVVAMQEELNNFTRNENCQMGRHETERKGGKKPEGDRRKRGNPRPSCLSRAQVGRKERIQVYNGGVAVC

SEQ ID NO: 70222 - protein, 38 aa, Zea mays
  Coding DNA Sequence Number=SeqID_26847
MAKFADVLCAVTLLVLLPCSDVALGQTTDPSEGLSRDD

SEQ ID NO: 70223 - protein, 279 aa, Zea mays
  Coding DNA Sequence Number=SeqID_26848
MQPGCTPPPAVTQDGDLQLDGGGKRAGLRPLPLPQPQGFSSLVLGRGLHRARLAEPSDFGAAPGAASRHGSWKRFRRRRVCRRHPRTDLQLYGLLPVLASRVLGMGGGLLAAASALRSSLLLFSPPGQKSSSSPLLGRATTSRSSVFCCSAGLSPVEWGYSSVDYLNRFTKHESPRVKVTRPMSELISRGLGPGWRPWKMVGRGPRGNRPSRLLGPDSRRSPWQRLPGRGDDVVLRSGEPRTASPSAARSGLAEGVIDTKGVAAPFQRQDPSLQDQIVL

SEQ ID NO: 70224 - protein, 356 aa, Zea mays
  Coding DNA Sequence Number=SeqID_26849
  Gene Ontology: Mol. function=oxidoreductase activity, acting on the CH-CH group of donors; Cellular component=mitochondrial inner membrane; Biological process=tricarboxylic acid cycle
  Homolog annotation: Hit_ID=A3B3T2; Match level="QueryCoverage=48%, HitCoverage=22%, E-value=4e-59, Identity=60%"; Hit description =Putative uncharacterized protein
  Pfam annotation: Domain name=FAD_binding_2; Domain location=61-341; Score=-117.7; E_value=0.0012; Accession=PF00890.15; Description=FAD binding domain
DEKKPEDAPQSEVEKDKEGAENEEEEKEPEDKAMQQLPVKKDGDEVFIKLGSDKDLKKKESAEREERGKKEFGDQGEDSIILSPWLKEISTPDRPAALRFLGEKYNNLMERYKKQVVKCSEECEPRYNGLKKKYTDECAERRRLYNELIELRGNIRVFCRCRPLSSDEVNHGCLSVVEIDPSHETELQFVPSEKERKPFKFDHVSGPEDDQVWEGVQFAIGTLATSVNCKTNLCPVLVVSPGSRGEGGILRNSEGPLKDHIYLHQNHLPPEVLKERLPGISETAAIFAGVDVTKEPIPVLPTVHYNMGGIPTNYHKEVVDIKGDNPDAVIPGLMAAGEAACAAPRWWMIDRPVVCD

SEQ ID NO: 70225 - protein, 21 aa, Zea mays
  Coding DNA Sequence Number=SeqID_26850
MAELSSSTRARALASLAQNQP

SEQ ID NO: 70226 - protein, 29 aa, Zea mays
  Coding DNA Sequence Number=SeqID_26851
MSTVAVAMVNHLAIDEIVLGEIVRVIGVD

SEQ ID NO: 70227 - protein, 228 aa, Zea mays
  Coding DNA Sequence Number=SeqID_26852
MSRSRRQRCQHGQRQSRLEKGASSAQEQAASQAEEVQRRRPEPGRVIREREHLRSYAAKAMSRADVLGGQLAEVTEQPVEVFARARTLEETLAAMAQARCRHLPSRWRSFRPCRRPRPGQIPPKVETTPRALLFPLLMSEPVGTDLFVGSRITCPSESEDSVIDIVEKARKIVLAEKFSSVKTCSASRIVYPSVSYLSQKLMSEDPAIEAVEKREKMFWQKDFFRGKF

SEQ ID NO: 70228 - protein, 43 aa, Zea mays
  Coding DNA Sequence Number=SeqID_26853
MGSTSEKVYLCQVRKRQIFVAFAPRWFQRKKNKNEVQEERILH

SEQ ID NO: 70229 - protein, 34 aa, Zea mays
  Coding DNA Sequence Number=SeqID_26854
MAPQPKLPEWKPSKLKPAKPKLLGPKPGPWKVIF

SEQ ID NO: 70230 - protein, 88 aa, Zea mays
  Coding DNA Sequence Number=SeqID_26855
MDSTIGTTPAQGHQRAQTMVERRRGPALASNRMKDRATNGEIRAWGGCSPQVDNLEHQSNGGDVGKPRVDGDGAPHAWLLLPLSDGPT

SEQ ID NO: 70231 - protein, 238 aa, Zea mays
  Coding DNA Sequence Number=SeqID_26856
  Gene Ontology: Mol. function=binding
  Homolog annotation: Hit_ID=Q10N57; Match level="QueryCoverage=27%, HitCoverage=13%, E-value=9e-22, Identity=78%"; Hit description=HEAT repeat family protein, expressed
  Pfam annotation: Domain name=HEAT; Domain location=27-47; Score=2.6; E_value=11; Accession=PF02985.13; Description=HEAT repeat
  Pfam annotation: Domain name=HEAT; Domain location=48-84; Score=21.6; E_value=0.003; Accession=PF02985.13; Description=HEAT repeat
  Pfam module annotation: Pfam domain module=HEAT::HEAT; Domain location=27-47::48-84
  Subcellular localization annotation: CTP_CleavageSite=59; ConfidenceScore=5.30e-01
MAVWPVTDWKAAADSSFSQRNYSAIKLLFLQVRRTACKSLGALTKFSTQYTEKALDLLMVMMNDDTEAVRLQALEALFRMATYGCLSVQEKHMHMVLTMNILHSQMHDWSFQIDNYHGSGMVPLADLYEAEGVILLQEEEGVILLKVEEDEVVIDFKPTPSAMSTSASAPCTHPSQSSSRTYSVIFWPIFAHTDKVRMLLLSREEVLEARIRVLEVCEKMITRMHASRWRNTQLMERF

SEQ ID NO: 70232 - protein, 160 aa, Zea mays
  Coding DNA Sequence Number=SeqID_26857
  Gene Ontology: Mol. function=ferredoxin-NADP+ reductase activity; Cellular component=thylakoid membrane; Biological process=electron transport
  Homolog annotation: Hit_ID=Q9SLP6; Match level="QueryCoverage=40%, HitCoverage=18%, E-value=5e-27, Identity=92%"; Hit description =Ferredoxin--NADP reductase
MVDYPLPSEFLMPLEGQSIGVIANGIDKNGKPHKVRLYSIASSAIDNFGDSKTVSLCVKRLIYTNDAEEIVKGVCSNFLSKRMGLKELKMGYESSQFDFCFKSILCSVVGDLTIHFVGYAGIVLIGEIGGMAEEDVATFIQRKLNYSCKWYQWMEYKPKL

SEQ ID NO: 70233 - protein, 187 aa, Zea mays
  Coding DNA Sequence Number=SeqID_26858
MDGADRWVRFVSRTRLPAPSLYADLWDPVDRATISHAFSLVPLLRRAHRAVPQSPCISVFPAHQPPSRMPQGRKLRASVAAAPCNTSPTNIGPHNLAHSCSPFTATATPHQPFRSRDLHRDNSPPPLTRPFATIPESAGGLGDSPGHMERVRGGLRPGEAAEVGRIPRQSWDRNRIRRSPSTDPLPP

SEQ ID NO: 70234 - protein, 110 aa, Zea mays
  Coding DNA Sequence Number=SeqID_26859
MAGEPQIEVPTSYFLCGLGHHEEQREAKLGVGLYRGSRSRRHPPTAGCSPELSAELRGESDLRRKTTDEADPHVSATQEKEKERTQSGLAVEWGFGPDRGIRPKISQVQI

SEQ ID NO: 70235 - protein, 186 aa, Zea mays
  Coding DNA Sequence Number=SeqID_26860
MDPSDMSQNHNAKKHKGNGGWNRAEAAGELVGGEESGLSRAQLINQMDQRASPGIKEGGRPKSGEDDLGPPMKFYRVRELGKLHKLLAKLAEQLAWLGSDRSGLATVAGARVAMADGRELAGAKEKRVAGKALRETLGDTGVSHPLGPSSISGTAAPVAGVQVCAYGCWPVAAHVHVCWFSVLLRC

SEQ ID NO: 70236 - protein, 59 aa, Zea mays
  Coding DNA Sequence Number=SeqID_26861
MAGGLDDKGDFEVSDGLDETDVDLEAINQLVIDNTQELYPRVRNIRLALAIDGFNPFRP

SEQ ID NO: 70237 - protein, 58 aa, Zea mays
  Coding DNA Sequence Number=SeqID_26862
MTQADSETDEGCSFITEDHAEHVNPIATSIDITTSMDMRLMMNKIKVIHPGTWVATGQ

SEQ ID NO: 70238 - protein, 86 aa, Zea mays
  Coding DNA Sequence Number=SeqID_26863
MAWRRLTSRPRAPETRTRANVGENALTSGPHLAMTRCGREKQLWCGPHWSFKKKQLRLKLLEHDAEDTVHEASELQHIRRQRVKPT

SEQ ID NO: 70239 - protein, 258 aa, Zea mays
  Coding DNA Sequence Number=SeqID_26864
  Subcellular localization annotation: CTP_CleavageSite=43; ConfidenceScore=5.27e-01
MEKIEGSNKQSVQQDCRSRVAKGKRESSPVRLYPWAFLASPVRTNAPPSRLQASRSRPSARPPPLDTAARPHRTVALRTLPCSTTLPWTGWTSFAESSPTPVVALPPNSPAPPDGRRRVPDGHVSLQPPPGGRCPASARSASAVLPSACFCSQCSTMGCPSLALRQRVGDSSAPASLPSGFVAAEAISGVEYVTRQILLGLRSSRPDLRYHLMNREFRLLRAFIPFPAADVQLRLTVLLWFCLAPAPARSARLRAALL

SEQ ID NO: 70240 - protein, 204 aa, Zea mays
  Coding DNA Sequence Number=SeqID_26865
  Pfam annotation: Domain name=IQ; Domain location=115-135; Score=27.0; E_value=7.2e-05; Accession=PF00612.18; Description=IQ calmodulin -binding motif
  Pfam annotation: Domain name=IQ; Domain location=73-93; Score=25.8; E_ value=0.00016; Accession=PF00612.18; Description=IQ calmodulin -binding motif
  Pfam module annotation: Pfam domain module=IQ::IQ; Domain location =115-135::73-93
  Subcellular localization annotation: CTP_CleavageSite=50; ConfidenceScore=5.28e-01
MDLRSMTPGISSRLSSPPPAAHPSPPPAAAPSVAATPSHPPSPTLDAFTRLEEKWDQFVVMFHRYKEKTEKELHAAVRLQAAARGFLARRQVQSLRGEKHLAVASRATPWPSSHEQAVVRLQAAVRGFLVRRAVRKLHLLISSSLHQLAACAPNHQVSSILFEPPTEVEIWLEDELVLKGGGDVMGIIGSERQQPGWDKAREQD

SEQ ID NO: 70241 - protein, 278 aa, Zea mays
  Coding DNA Sequence Number=SeqID_26866
  Gene Ontology: Mol. function=transferase activity, transferring glycosyl groups; Cellular component=endoplasmic reticulum membrane; Biological process=GPI anchor biosynthetic process
  Homolog annotation: Hit_ID=Q656F1; Match level="QueryCoverage=76%, HitCoverage=58%, E-value=1e-48, Identity=65%"; Hit description =Dolichyl-phosphate-mannose-glycolipid alpha-mannosyltransferase-like
  Pfam annotation: Domain name=Glyco_transf_22; Domain location=43-278; Score=6.0; E_value=4.8e-08; Accession=PF03901.8; Description=Alg9 -like mannosyltransferase family
MMSHRRRSRAAGSPPSDASTGTAPTPEKSGWIRPWAATGSDLKVLELALAFRAANALLVRTYFNPDEHWQCPRGRPPRRVRVTSPSPCCCCLLRWYGHLTWEWKRGLRSYLHPLIFAALYKTLALLHLDTPWVMMKSKCCFILLDVIPVGAIVLAVTTLLDWWMYGSWVIVPLNFLKFNLLSSGGDYYGTHVFHWYFTQGFPSMIWTFLPFALCGIVKSQEWRLSGLIAWVLGVYSILGHKEFRYSPFPVCSSSATFSIDVLRLLLSFHVTVQGQKSA

SEQ ID NO: 70242 - protein, 100 aa, Zea mays
  Coding DNA Sequence Number=SeqID_26867
MAAERTGWADSFSLANPPGRKNLRRRDRERGIPRKGSFSVKETGPEPPTDQRFEGWPLGGVQQPPQSARAPRPLLVRGSRAGPSEGFNGRLRPLGLRAHY

SEQ ID NO: 70243 - protein, 1146 aa, Zea mays
  Coding DNA Sequence Number=SeqID_26868
  Gene Ontology: Mol. function=nucleic acid binding; Cellular component= chromosome, pericentric region; Biological process=RNA elongation from RNA polymerase II promoter
  Homolog annotation: Hit_ID=Q6Z7C5; Match level="QueryCoverage=99%, HitCoverage=50%, E-value=0.0, Identity=66%"; Hit description=SNF2 domain/helicase domain-containing protein-like
  Pfam annotation: Domain name=DEAD; Domain location=911-1070; Score= -19.6; E_value=0.0012; Accession=PF00270.20; Description=DEADDEAH box helicase
  Pfam annotation: Domain name=QLQ; Domain location=373-409; Score =52.2; E_value=1.8e-12; Accession=PF08880.2; Description=QLQ
  Pfam annotation: Domain name=ResIII; Domain location=883-1064; Score=- 34.8; E_value=0.039; Accession=PF04851.6; Description=Type III restriction enzyme, res subunit
  Pfam annotation: Domain name=SNF2_N; Domain location=915-1146; Score =192.5; E_value=1e-54; Accession=PF00176.14; Description=SNF2 family N-terminal domain
  Pfam module annotation: Pfam domain module=DEAD::QLQ::ResIII::SNF2_N; Domain location=911-1070::373-409::883-1064::915-1146
  Subcellular localization annotation: CTP_CleavageSite=74; ConfidenceScore=5.60e-01
MGPGGVNFPQSSGPVSSFQGQRNLPLSSGGPQGMVGGQMHNQVAMQQQFLKLAMQQQQQQQKAAQGMLLQQQAKMNMAGSSSRDQDMLNNPAKMQELMALHQAQMYKRQCEQKEQGQSSGSEQRSGDMRPPMPPQGVPGQQLPSMGMIRPMQPIQGQVGMGSAGGNPITPTQFQAIQAWAKEHNFDLSNPANISAISQLLPIWQSNRMAAMQKQNEANMAAQQQQALPSQVNSDTPGHVNAPSQGALLKPRQPLAPSSISGGEEAKVVNSSNLQLQQQFPVHNRDGSNERAVRSLMTGGNGAQTTHIPQSSGHVNKIPEQPNPKNVLANSEAMQMQHVRQMQQLNQAAAPTSTPIEAGGSQVPTSAQPQTGQTGFTKNQLHVLKAQILAFRRLKRGDRLPPEVLELIVSGRPPDSQGQQQVSGPQVTHNRERPTVSNADEHGKQMESGGKAPEKPALLKGPCLPKVEVSTSEDKASPASGPGPAQVMKASPKEPLKIGPVSVPEHCNTTVIKSEQDLERNIQRTPGRSDYNAERGKSVPAESGSVDVEQAKRTGSTSSAPVPRDVPRKYHGPLFDFPSFTRRHDSMGSANYNSNLSLGYDVKDLLAQEGMIVLGRKREDNLKKISGLLAINLERKRIRPDLVLRLQIEEKKLKLLEHQARLRDEVEHEQQEIMAMPDRIYRKFVRQCERQRVELVRQVQQMQRASREKQLKSIFQWRKKLLEAHWAIRDARITRNRGVAKYHERMLREFSKKKDDDRNKRMEALKNNDQTSVPGDAAQRYNVLSSFLTQTEEYLYKLGGKITATKSQQQVEEAANAAAAAARAQGLSEEEVKAAAQCAGQEVMIRNTFSEMNAPRDNTSVNKYYTLAHAVSERVTKQPSLLRAGTLRDYQLSWPVIGDLTIHFVGYAGGPNSGCFSLYNNKLNGILADEMGLGKTVQVMALVAYLMEFKGNYGPHLIIVPNAVLVNWKSELLNWLPSASCIFYVGAKDQRQKLFSQEVMAMKFNVLVTTYEFVMFDRSKLSRVDWKYIIIDEAQRMKDRDSVLARDLDRYRCQRRLLLTGTPLQNDLKELWSLLNLLLPEVFDSSKAFSDWFSKPFQRDGPTHNEEEDDWLETEKKVIIIHRLHQILEPFMLRRRVEDVEGSLPRK

SEQ ID NO: 70244 - protein, 74 aa, Zea mays
  Coding DNA Sequence Number=SeqID_26869
MRRTRVEGLLLFMVMHHSLQQKELRQYQGQTILIEKRGKTESRAPHTTNVQQQIKEIRPGEEQQESKDKDNRRN

SEQ ID NO: 70245 - protein, 58 aa, Zea mays
  Coding DNA Sequence Number=SeqID_26870
MKSEMSEYKNVVGGRLKLKGKALDVKEGGVKKKKKKLQLEESSQIEHDLSSKVVSRHH

SEQ ID NO: 70246 - protein, 63 aa, Zea mays
  Coding DNA Sequence Number=SeqID_26871
SETTDQAKDGGKKSFEVPSAREKVKEAEEPKAKGEEEAKRLVRSGAPDCPVVHRTVSGIPQYQ

SEQ ID NO: 70247 - protein, 90 aa, Zea mays
  Coding DNA Sequence Number=SeqID_26872
MGAVQALSCIPPSDRLTEGRPGACEGVRCPAASCVLWASRALPAPAATCQCHGVGNIATSATRLENLNASPYNSTLSPISKQRLVTRNIS

SEQ ID NO: 70248 - protein, 126 aa, Zea mays
  Coding DNA Sequence Number=SeqID_26873
MTVGGAVCSMAHRTVRCTPDMSGAPATSSVPLEFDRWSSDFWPRLDVRWRTGHELFTVRCAGMGTPAFCARCARIKCTAACRLQENPEAEEFSARPPGAPDTVRCATGQSGAPDQGGFRDAFSSQF

SEQ ID NO: 70249 - protein, 142 aa, Zea mays
  Coding DNA Sequence Number=SeqID_26874
MAMMGSTSEKMYLCQVRKKIPNLSSGSGAPTRLSEEWSMGRGSAIRYLQDQLAKRDLALDWAVNSRPFAWAKESKAQVRVEELSLAMDNLQVYYNTLHEVHVLYSQLHPNVSADPVGMEVGPSRVAGEALGGELNLFRPLPL

SEQ ID NO: 70250 - protein, 142 aa, Zea mays
  Coding DNA Sequence Number=SeqID_26875
MELLSKSYPTKEKTLKGMLVKGVKGSDQVFITAKGFKEGNQVQGRNVPVVLILYTLKPSTADGDAQGSNEHVNRLFRSVTGVLLWPKPNSSSKDHFPPINFIIGDLPSSAREDSERRRHVLVFLAIGGLLVQFGGLASITGL

SEQ ID NO: 70251 - protein, 83 aa, Zea mays
  Coding DNA Sequence Number=SeqID_26876
MDDVCEECHRLLGPDAGEGSDLDPLGEFVDGDQQVREAPRCLLQGTDEVQTPHSKRPGDGYCLQGLSGQERTILVASATVVGQ

SEQ ID NO: 70252 - protein, 389 aa, Zea mays
  Coding DNA Sequence Number=SeqID_26877
MHRVLPPSEPPDGERPRCLRLVVGGARPHRGWHPSAIARLQGFSSGSPAAFPHQWSPRMVTTSSMVGRSKPGCGLCPALSFKDLHHPCWGGGRSKSGPASAWAGDPPLPPASGGGNHPPALRRRRPPAMRGKANCCCLARVQHSVLRPGDCGRLHQRVAQHVVRREGGTRVLGRSRSRSCGENESEDLPVRFGAAVARWCGVGGQVAAVIGAEVVVARGGFSADDTVNATCAPGLRLFGFNGWFSSPMRGRERGPSSGSVRPGAIAAAVLPSEAEVVVAATVVGGEPPGVEILPAVSPSEAGPDSAEGGNDTEGAAAPSVDDLFVGSRIVYLSESYFSREVMSEDPAIEAVEKRERRSGIKTFTEENLDAPLLAPEGGSGFAEARLTLP

SEQ ID NO: 70253 - protein, 154 aa, Zea mays
  Coding DNA Sequence Number=SeqID_26878
  Homolog annotation: Hit_ID=Q6QP51; Match level="QueryCoverage=73%, HitCoverage=36%, E-value=1e-14, Identity=46%"; Hit description =Putative growth-regulating factor 1
MKGIKTSEESNHSSEASGATPGGRQGRSDRSHFALSLTDLTGKQRRSPRSDCCATHQGETDDNQVRPRAQQEAPPRPTLGLGLGRRSSPEGSASTSASEGGLRLARPQGSASTSASGGIVSSPDPGLGLRRNLRLAQPWAQTNRATGDTSLPYP

SEQ ID NO: 70254 - protein, 34 aa, Zea mays
  Coding DNA Sequence Number=SeqID_26879
MACSNVLGFGGRKSYRILFLRSPRHQMLGAFVLR

SEQ ID NO: 70255 - protein, 183 aa, Zea mays
  Coding DNA Sequence Number=SeqID_26880
MPTLPHQPSNKALRRHRQRHDQAPRRPSVAYHRIPDTRWVPRGRGCIKVQHKPIKDQSQGSKAKEQEIQVCPGSGAPDCLVCHRTVSGAPGPYNSKLATFGFLQRRSAIIHRTVRCTSGAMTLSRNGRLRKLKKQSYSAKTVRGRAEQSSKTHRTVKSTCLVRTRLSGATRRQSLQRSSAPES

SEQ ID NO: 70256 - protein, 260 aa, Zea mays
  Coding DNA Sequence Number=SeqID_26881
  Homolog annotation: Hit_ID=A3ACD9; Match level="QueryCoverage=27%, HitCoverage=16%, E-value=2e-16, Identity=54%"; Hit description =Putative uncharacterized protein
MDTGPDTAVPRIKVATPLPLCIRHGGTFKILAVVRASLAVVQLLATVAARDLDHGVTVGAIDPRDDAGDRGAYHHQQQARQKLLKSLTFVFSLCGLDNDEPYWEEKEDTVELVQLDANRAKNVLILMSDTSDRHRASTEAIKDRLPPPHRHRSSSLKEGRSSTRSCLRNTGPSPTPCSRRSSAASPSSFSNSGPNSAMPPVRTRFASSHFSSVQHEFAGVVNCATASIVLFLDKGPIDSSELLPSVRMLSLKYELEVELI

SEQ ID NO: 70257 - protein, 136 aa, Zea mays
  Coding DNA Sequence Number=SeqID_26882
MDGDLEGVWVLQLKVVLEEVPGVRLTAAKSSLGRHRKLRLARPQGSAPVSASEDGLCLARPQGSDLTTTQPWLRKTTDSASPDPRARTQPRLRKTTNSVSPDPRARTQPRPRRSLRLARPRARTDHVTGGASLPYP

SEQ ID NO: 70258 - protein, 158 aa, Zea mays
  Coding DNA Sequence Number=SeqID_26883
  Homolog annotation: Hit_ID=Q6ZK44; Match level="QueryCoverage=32%, HitCoverage=12%, E-value=1e-15, Identity=76%"; Hit description=Kelch repeat-containing protein-like
  Subcellular localization annotation: CTP_CleavageSite=53; ConfidenceScore=5.21e-01
MSVCHFAWFWQHPGPTWQPPYAYSRFGYKRRLRLSVQWVGGLSTPLPFILGVRQSSSDHRPTNQARACVDHLFLNVGGTTEKHAITKKLILVGEVFRFDLEALTWSVIGRMPFRIKTSLSSEIMGLTIQLQRKLLGVWDYVENEAALVMAEVVTVCFP

SEQ ID NO: 70259 - protein, 87 aa, Zea mays
  Coding DNA Sequence Number=SeqID_26884
  Gene Ontology: Mol. function=protein serine/threonine kinase activity; Biological process=protein amino acid phosphorylation
  Homolog annotation: Hit_ID=A2Y9B1; Match level="QueryCoverage=42%, HitCoverage=14%, E-value=4e-09, Identity=81%"; Hit description =Putative uncharacterized protein
MATPRKPIKLTLPSHETTIGKFLTHSGTFTDGDLRVNKDALRKLRSNGYFAPMVVCKGIVKVNSARLRAQKSEQVPEGAPDSEQDLS

SEQ ID NO: 70260 - protein, 134 aa, Zea mays
  Coding DNA Sequence Number=SeqID_26885
MSLRKWRAEAPAPPTEGLCGLDGRQPYGSRSVVVAVPACFGAGAARKGTEMEGGKIDLALSSLGVVLRVLEDLVEVAVHGAGAGRVGAERQATTTTQPLKKCPLGNHTIIRKYQQKAHILSLKEDVVHLRTLNQ

SEQ ID NO: 70261 - protein, 147 aa, Zea mays
  Coding DNA Sequence Number=SeqID_26886
MGRCMPGPVVAVVVSMAASMAAVVAAVDASIGATAGGRRSRGLCWSGWGTALHGAVGRVGGAGTGARPRGVRPVRGAAHGAGRPWWLEAADGGASGWEGGSAGGRLLGGRRREAVPSRIQTFEQKAAQALAPKRNRSRQATSVIRTG

SEQ ID NO: 70262 - protein, 152 aa, Zea mays
  Coding DNA Sequence Number=SeqID_26887
  Subcellular localization annotation: CTP_CleavageSite=70; ConfidenceScore=5.25e-01
MTAVTSPPLLIVLTGKQHYSPCSDYCANHQDKTSDSKSRPPSSSASGTTGSSASPDTRPRPQPRPREKVSASPDPRPRPQPQSREKVSASPDPRPRPQPREESQPRPTSASASGEVSASPDLSLGLRRSLRLARPRLGPTAPQGIHHYPTPS

SEQ ID NO: 70263 - protein, 178 aa, Zea mays
  Coding DNA Sequence Number=SeqID_26888
  Subcellular localization annotation: CTP_CleavageSite=51; ConfidenceScore=5.00e-01
MQKWPRRRGDLLGRNEVVWPRGVGVVDSLWSDSRRGATSCLAMVAPSPPPPARRVAGKTRVFLFRHREMSSSSSPSLGEPMTVVVVVLRGEEYHVVAAVEGHELETPKAEHRPGPKRLLKIIHLELNGKVLPTRSATLPGAPTVGVLDPRGPSTDQELRTIDVMDACREPSLPVAGVI

SEQ ID NO: 70264 - protein, 190 aa, Zea mays
  Coding DNA Sequence Number=SeqID_26889
  Subcellular localization annotation: CTP_CleavageSite=27; ConfidenceScore=5.18e-01
MAPSGSPTLTPHTESGGPAARLHLSTRASTGCANVAAPGGSQACADFSDVQQPRPCPGYKDVGAILLLLSPDPQLTACAREIQPPGRSGICLAGQLHLATSGRRTAWNIDRLPPNPVRGSPKLGVARYCKDCSTVFELRRRPPGVVAGRNHSKNSGRLDLDLMSLIRSWGNRREPSDRDQVVLGAYRFIK

SEQ ID NO: 70265 - protein, 153 aa, Zea mays
  Coding DNA Sequence Number=SeqID_26890
  Subcellular localization annotation: CTP_CleavageSite=30; ConfidenceScore=5.60e-01
MAPQKGSTVASGHSGFAPITNQGFVGWPPKGSTAASDAERGMTLGLGLGLGPRRRRTPPRPTPGLGLGLGPGRRRTPPRLTPGLGLDLALRRWSPPRPTPGLGLDLDLDLGGASASLDPGLGPTTSQGGPSLPYPQLAQATWNKTGVPSGSPR

SEQ ID NO: 70266 - protein, 315 aa, Zea mays
  Coding DNA Sequence Number=SeqID_26891
MNKTPAFKVPLQTELRFRLRRYEQPPTLEGLRSNRKPQAAHRRPKSSSDNDLCSERPNSSNDDLRADAAAIRPSPTSPLEGRGQAGGRRVGGQSAGGAGYLVGSETSSGCLGGRRPRKRRRSRLGRRARHTAAASATNGERPSPRSLREGAGRCLREDRPQLGALPSPALMMNILEAEGGPGCLMKILEAERWLKGTNFREAVLLQQRQGGRTTGAPIRGLRRWKDAMHEGEREDMVAFQGGHPPFKGNSPHLRPQPSHAESSPTRSKVLPLRHGGWVPRVMQAGPGQKKSNRRARCAQLPSGYGHSSTFAQTSG

SEQ ID NO: 70267 - protein, 294 aa, Zea mays
  Coding DNA Sequence Number=SeqID_26892
  Subcellular localization annotation: CTP_CleavageSite=32; ConfidenceScore=5.11e-01
MEHEGGQEGRTGVKGKPAAFVLSCVQVGRKERAQARRSSSSSGAEAESEPWGRARRSSSSSGAEAESEPWGRARRRPSSEAKVESEPWGRARRSSSSSGAEAESEPWGRARRSFLWRPRPDLATISLTLSSGTTVGAAQAALSSCQAGDPQARRESSGVGCLCPRLGSGEARSCPLSGSSLDLIAPIRPLQLCADGGYQLRLGVLRAILALNAPVIRSVGVAIRPRLLLGEDWASGEPKLCADGGYQLADSPKRADGPRPGTRLGFLPDGRMADLDSSNRRRVEERRRIWGLEG

SEQ ID NO: 70268 - protein, 166 aa, Zea mays
  Coding DNA Sequence Number=SeqID_26893
RPRFPPSLLHETRAPASPVDYVASLRVADYGPHVSDPSPTASPRMVGTPHWRDSRAPDPTDHGFGTIWVFCTSCDLAESRAILVRIARQNCHAASDPRFTVNKASTPPPLMVNTSKGGGIDLPPNRHNRRILRQQQQQAKMNPPNPPNPPPAGADPAVAAQMRIMQ

SEQ ID NO: 70269 - protein, 87 aa, Zea mays
  Coding DNA Sequence Number=SeqID_26894
MGAPRTQPPPTGTVDGKGQGDRRHGILSAKLSRPKELAMEVRGFPWNLVRASPSGLDACGIRNCSTESMATTMLRVLVVLILGCSNP

SEQ ID NO: 70270 - protein, 69 aa, Zea mays
  Coding DNA Sequence Number=SeqID_26895
  Homolog annotation: Hit_ID=A2WKU9; Match level="QueryCoverage=68%, HitCoverage=51%, E-value=6e-11, Identity=70%"; Hit description =Putative uncharacterized protein
MARKEKVPKGFIPILIGQGEERERILVHMEQFKQSYFLELLDLAAQEFGLLVTVSHNHTRNKVVLVQKV

SEQ ID NO: 70271 - protein, 362 aa, Zea mays
  Coding DNA Sequence Number=SeqID_26896
  Homolog annotation: Hit_ID=A2WKV1; Match level="QueryCoverage=70%, HitCoverage=73%, E-value=6e-95, Identity=75%"; Hit description =Putative uncharacterized protein
  Pfam annotation: Domain name=Dirigent; Domain location=172-361; Score= 144.5; E_value=3e-40; Accession=PF03018.5; Description=Dirigent-like protein
MAFKKAAIGLSSLLLILVLLLVAPSATAARPTRQLTSDDDDDGTGAAAPAAAPAIAHPAADAPVTADASPPVVGGAGVVAAPGGAVAADAPVAANAIPAAAAAAPVAASTIPVGAGAGAAGAGAASGADGHGMVFFMHDILGGTNPSARIVAGIVDNAAVTGQLPFARPNGAVLPLNSGVNVNSGAAGAIDNNNIPFLTGLGGATNAAKSVGSNGNGNGNGNGVPVFAGGSLPQGTTLQKLLFGTMTVVDDELTEAPELGSAAVGRAQGFYIASSEEGVSQTVAVTAMFKEGGFDDTISFFGVHRTADSESHLAVVGGTGKYVGAKGFAKVAVVRPGGVAASGALLETDGVESVLQFTVFLV

SEQ ID NO: 70272 - protein, 561 aa, Zea mays
  Coding DNA Sequence Number=SeqID_26897
  Homolog annotation: Hit_ID=A2WKV3; Match level="QueryCoverage=99%, HitCoverage=99%, E-value=1e-114, Identity=57%"; Hit description =Putative uncharacterized protein
MSSWLRSAVSKAVEAGGRSGVARTVLGYADAVAHHAGQAVAEGAKIINERVSTQNFKSVKQTVKRLEEVAVSSRRDERVQVLRRWLGALQEVEAEVGGSGGSQRQNVSSSEPNSSKPSLAKVLFYDADIGGPPMNFRDIFLYSHALEGITLSMILEAPKEEEVSLLLEIFGICLTGGKEVNNAIVSSIQDLAKSFSNYHDEVLVKREELLQFTQSAISGLKRNADIVRIDSEALDLWKKLHEKEASRAQSIGDPDKVTEKTSTIENPLGSVAGASLNPNYPPTGTPSVGRAVSLVPGLESLERNRALEAGRPWASEGLRDTWLGRALIELFSVDVIFDRHIVSIRGRQKEEALNFRAKKENEVIAVEKDLTAEISELEKQKDELEAQLKKTSPQKSLEEEYLETEKKIVIAFSIVDRMKKMFYSEQAANSRQDDAEVRTLFSEIEKLKEVFESVERPTLDIEVRKAKDPMKDKSGSNRSAKDKSESSHSPVQVPSSPKDVPVESPKSPVKPEQTMDPDSEFAKLELEFGKVNRDHEEIGGWDFDELEEELRADLSKSTNPK

SEQ ID NO: 70273 - protein, 320 aa, Zea mays
  Coding DNA Sequence Number=SeqID_26898
MSSKYRGLSDTLNVEGSGSALSTLFVHQPPPGNFPAFLPHASDCIFRGRALDPARFAAGIEAGGREAAVRRWVCRRRARTPWNRGRATPRNRRSKPASPCSSPESRHRQKASSSADFVEGSRQKEENLLAAVVFVFDSVHRGRSANSEVHIDATAMDSENEKLRKALATLLRVVQKRSCDIVDVVKSAFQPFNSPLLDELNRALVEIDDLAKDLEDVAVQTQWEVENMAKSEVKEHPQQEEAVEELLIQDGSEDELLIDEESPIKYEDLVGYANPTHSNTVDVDAEESVPSSFTSKRPLGRDSSKEKAKRTKSVDTSEST

SEQ ID NO: 70274 - protein, 160 aa, Zea mays
  Coding DNA Sequence Number=SeqID_26899
MVRQSFAHGRSFCPVRCRRGKRKRNMRWAIPHGRCRADSLTEEGDRAKDEQGRRVTECPDSLRRRLISHARLYASADARVGSRSKLRPLKGHDLASPEPSLGQEQWTKVDSRLAPRAYSSNGRTFDSPEAQLGQASRRSNLGQIATPTVRIAGAFNARIT

SEQ ID NO: 70275 - protein, 176 aa, Zea mays
  Coding DNA Sequence Number=SeqID_26900
MGKSNKRKREPTPPSEDFGDSEYSEEEFSSESEGSPAPVSPPASSDDSDDSQGIAAEVWTYIRAVERSGLEGSDESEYSSDEEDSDGGEDEDDDDDDDGDDDGGDGDGDGSGSGGGSCDGTSQGSDQVFITAKIKVHDEDQPSLHPDEPIPTGRRHGWSFRATGTPLNLHRTLPLS

SEQ ID NO: 70276 - protein, 49 aa, Zea mays
  Coding DNA Sequence Number=SeqID_26901
MSTEKRHLDQIILLALWRLMNHLFFSCGGVRDKSPEPLKIRHYTEVAFA

SEQ ID NO: 70277 - protein, 146 aa, Zea mays
  Coding DNA Sequence Number=SeqID_26902
MMVLASVATTSFAILLLFSLPSCLHPPRHPILDRRSEDVGADASSSYSSDSSLDTDSCSGYCTSTRTFHVMRAPSFSPSSDVPFVFPDFALFFHPQPAAPVHGRSREPTDARRRGYGGSCLTAIAAKSTQGPPYTDHSPTALAPFG

SEQ ID NO: 70278 - protein, 205 aa, Zea mays
  Coding DNA Sequence Number=SeqID_26903
  Subcellular localization annotation: CTP_CleavageSite=78; ConfidenceScore=5.82e-01
MATTQGVAPFFKGDSPHSRPQASRTKSSPTRSKVPPYDTGAGSHTTCKLAWDRSSQTAARGAACNRTTRMHPFDFDASSMESQGHTSCNWRAGYYVRKTAPPLASVPRLLDYGADAATRGNPAHGPTVPNRAHRSWVSQPREKGRQTIWPKESPLPLREDDVPVFRSSNGSRNSCPANHTSRRINSATGQATPLAGEAGDASPPP

SEQ ID NO: 70279 - protein, 161 aa, Zea mays
  Coding DNA Sequence Number=SeqID_26904
MGSARVVFVSLWEERNLVELLGVETILQLYGGGALQPCRGRRTVAAQPGCNIPSFVRATVASRTGGVSQHVVRREGGTRVPGWSHSRFRGEDGSEDLPVRFGAPGARWCGVGGQVDAATGAEVVAAGESFLRRRDRQRHPRADLRLFGFNVWFSSLEWGHE

SEQ ID NO: 70280 - protein, 128 aa, Zea mays
  Coding DNA Sequence Number=SeqID_26905
MSKIVLDTGTSPNTKEASRVLMERKEQGSLEDSTAMNGGAEKEFDSMMLAVSRLGEGAEKGGRTPTFGRRGAVEQRALRGRRPWKSQGAPWEAPSRGEKGEGRLEPREETQGILDAMTAGRSWSSVAV

SEQ ID NO: 70281 - protein, 103 aa, Zea mays
  Coding DNA Sequence Number=SeqID_26906
MGKPDPSLLMLFPYRGRVPLDCPTRWQDGRPSHSSNHILQEPVKNYATSKAEYTNTQLDLPVTALVPTITGMGDHVSGRVRSKVCGQVHSGIRTLILIPISVS

SEQ ID NO: 70282 - protein, 123 aa, Zea mays
  Coding DNA Sequence Number=SeqID_26907
MPSYDFVEGLNFFFNMFTGSGNIFGRRDDSQGIAAEVWTYIRAVEHAGLEGSDESEYSLDEENSSGSSEEGGGGDGGDSDDDGGDGDGGGGDSKSGDDDGKGGSGDGGSGSKGSSRGSNKASG

SEQ ID NO: 70283 - protein, 72 aa, Zea mays
  Coding DNA Sequence Number=SeqID_26908
MVRDRLRDNRQPQEEAVEALFHKDKGDGKRKEGAPEASTQCNPNKGKKKKTQQGPPEPLTVELVTAIEKHNP

SEQ ID NO: 70284 - protein, 66 aa, Zea mays
  Coding DNA Sequence Number=SeqID_26909
MARCLHRPVVGLRTTVRIPSRPGSSCYEFWILDPSLDDRDRLGVALDLGRRFVIGQSCAVHGFIMH

SEQ ID NO: 70285 - protein, 104 aa, Zea mays
  Coding DNA Sequence Number=SeqID_26910
VHASEVSILHCWTSNFIGCIEGIFTFLAAACYFISSSSFHSTMGKSKKGGGSSHHSGDKRKREPTPPSEDFGDSEYSEEEFSSESEGSPAPASPSPSSDDSDDS

SEQ ID NO: 70286 - protein, 43 aa, Zea mays
  Coding DNA Sequence Number=SeqID_26911
MTKTETILNYKRYLQLDGKRNYKRDAKMNISPREQYGVLFIYL

SEQ ID NO: 70287 - protein, 80 aa, Zea mays
  Coding DNA Sequence Number=SeqID_26912
MSQSEFIILNKLIQRGATVGGPSSSEGPQKRNLTMSSKYGLWTGTFGLHDEKGAIVTKVADTLKLCAKELRHNHGKKEPT

SEQ ID NO: 70288 - protein, 105 aa, Zea mays
  Coding DNA Sequence Number=SeqID_26913
MVGGFHSRISLTLLGSTAILFADNTCPKNWISSNQNAHLLNLACWGPSSSEGPQKRNLTMSSKYGLWTGTFGLHNEKGVIVTKVADTSKLCAKELRLNHGKKEPT

SEQ ID NO: 70289 - protein, 81 aa, Zea mays
  Coding DNA Sequence Number=SeqID_26914
MRMVWDALGQVIREVLCWVLVLVNEDGGICYALIFSLRDLGTGIVPTAFPEGGGYMLGLPLVQPMLRWHRMSRGLKSYGQH

SEQ ID NO: 70290 - protein, 62 aa, Zea mays
  Coding DNA Sequence Number=SeqID_26915
MEGSTPMSIGPTVAFMDVSATHPSTQTGIFLLPEIIIYYKCTFGLKGDKEYKRDAKANAKSA

SEQ ID NO: 70291 - protein, 49 aa, Zea mays
  Coding DNA Sequence Number=SeqID_26916
MAKRWGRGIGDGCAAHEDEGWVKAGRTNMENHPRQQYNNKDYMALVLAN

SEQ ID NO: 70292 - protein, 250 aa, Zea mays
  Coding DNA Sequence Number=SeqID_26917
MGPGVGHTCTKRYLVIWTARLRSDSRNQAPEGLTDAGGAALAHGGAVTGAGAGVGYNGSEVAGVGQDQRGEPGEHAGGGDGRTIEGELRAGRGKNQAREWMSLLGTELGVAWHDAERLRLAGHRRITVAANSDLRREEVERGPGRGIKERGNHHGFLVHQAQAKLTVGKALAEVQRRRRNGEGTVRGSDVVAGARATWARRVDVGASLAGRAHTMGATVAEEEGGSDGQGPRASESGYEQARNSADGAVH

SEQ ID NO: 70293 - protein, 219 aa, Zea mays
  Coding DNA Sequence Number=SeqID_26918
MVTSSLMVGESEPGCGLYPSLNLKDFHHQGWGGDCTVPGSRTRVASEPLAAPVSTTAAGRGSSAGEIAKAGHGPTSNSAAFCPSLPHKFGHGRRPPGSSIRPEVSAAAVRPPGAEVVVVAAAGAGDGAPFVGLLFLRRLTPIEWGCSYLRRGNQSSVCNGTLNANSPVDYLNRFTKHESPHVKVTSESGDPWTASPSEARSDLAEGVVDAEGATAPFQR

SEQ ID NO: 70294 - protein, 113 aa, Zea mays
  Coding DNA Sequence Number=SeqID_26919
  Gene Ontology: Mol. function=lactoylglutathione lyase activity; Biological process=carbohydrate metabolic process
  Homolog annotation: Hit_ID=A7PQS5; Match level="QueryCoverage=68%, HitCoverage=45%, E-value=3e-16, Identity=52%"; Hit description =Chromosome chr6 scaffold_25, whole genome shotgun sequence
MATSSGPKEAPANNPGLQTEVDPATKGYFLQQTMLRVKDPKVSLDFYSRVMGMSNQQAALPKAHIEDQWSSDDNETKWMIHQHQCVLWFRRVRRHGSGRRCDGNGDIGRGYTG

SEQ ID NO: 70295 - protein, 96 aa, Zea mays
  Coding DNA Sequence Number=SeqID_26920
  Homolog annotation: Hit_ID=Q94KE7; Match level="QueryCoverage=43%, HitCoverage=23%, E-value=1e-07, Identity=64%"; Hit description=Early light-inducible protein ELIP
MGFWDTLVFSGLVPKQINGWLAMVGFVSTLAIKATHADGIPSQVGRVHDRATPSSGTTSSTCSGSSVTHASHASRRKIRWIRGEWLVALRCAGTTC

SEQ ID NO: 70296 - protein, 57 aa, Zea mays
  Coding DNA Sequence Number=SeqID_26921
MASNRTVDLPRRPSITDCLHVCCDVNFPFILYLFVLWRVEEPVTEDPGDHQIEVAEQ

SEQ ID NO: 70297 - protein, 114 aa, Zea mays
  Coding DNA Sequence Number=SeqID_26922
MEELDENPFLNACRRKYENNEYQVKFHFHGTIVLSHASPTNTATPISPRNSSVLWRQLCKALILPYVCYLSIKKGAIPLWEIILCVIIIMIGVVCAYIWSYTSNSRMFFTDSAR

SEQ ID NO: 70298 - protein, 96 aa, Zea mays
  Coding DNA Sequence Number=SeqID_26923
MEDLGSSEAKLFIEMALPPVVVEDDEAYEILFCVYGCPSPNIEAFLPLCRRLTSVLLLLLSVMSVSAKKGCLCLSSQYLLAGAFEELKDESLETDE

SEQ ID NO: 70299 - protein, 67 aa, Zea mays
  Coding DNA Sequence Number=SeqID_26924
MEGGCGERGEDGGDRRGGSQEWHLPSMEGGGWGVTPEVAAEDPWNGVTESGRGGENGGGRGTVSGRG

SEQ ID NO: 70300 - protein, 113 aa, Zea mays
  Coding DNA Sequence Number=SeqID_26925
MAVLQGIPALELPINCSGKGKIITQQQTEMNPPNPPPVEIDQVVAAQRLVIQQLTDLVTEMQNQIRQEREEIRQVRQEIRQARLERQQQQQSPPPPPPAPPSYINIYINYYYL

SEQ ID NO: 70301 - protein, 147 aa, Zea mays
  Coding DNA Sequence Number=SeqID_26926
  Gene Ontology: Mol. function=structural constituent of ribosome; Cellular component=ribonucleoprotein complex; Biological process =translation
  Homolog annotation: Hit_ID=O22424; Match level="QueryCoverage=78%, HitCoverage=78%, E-value=6e-32, Identity=81%"; Hit description=40S ribosomal protein S4
  Pfam annotation: Domain name=KOW; Domain location=106-140; Score =32.7; E_value=1.4e-06; Accession=PF00467.20; Description=KOW motif
  Pfam annotation: Domain name=RS4NT; Domain location=25-57; Score =35.6; E_value=1.8e-07; Accession=PF08071.3; Description=RS4NT (NUC023) domain
  Pfam annotation: Domain name=Ribosomal_S4e; Domain location=35-99; Score=51.1; E_value=3.8e-12; Accession=PF00900.11; Description =Ribosomal family S4e
  Pfam module annotation: Pfam domain module=KOW::RS4NT::Ribosomal_S4e; Domain location=106-140::25-57::35-99
MAPPEYQQYLVQVTKYQAAQNCKARGLKKHLKRLNAPKHWMLDKLGGAFFMLCKVRSVQFGQKGIPYLNTYDDRTIRYPDPLIKANDTIKIDLETNKIMDFIKFDVGNVVMVTGGRNTGRVGVIKNREKHKGSFETIHVLLGAFCYV

SEQ ID NO: 70302 - protein, 143 aa, Zea mays
  Coding DNA Sequence Number=SeqID_26927
MNTGVPDDLTRFSLIEWVEEHQENLRTLKRESIEHERTWNELATAITGEKGVHWHKRLVAFTVASSPAITGWAKMTHGGMVKALRHMAQGCEVDNSGEPIQSGCDLGGTTELQSQPCSLILRLSHMRGVEWLFANKPKSHGLI

SEQ ID NO: 70303 - protein, 92 aa, Zea mays
  Coding DNA Sequence Number=SeqID_26928
  Gene Ontology: Mol. function=nucleic acid binding; Cellular component= cytoplasm; Biological process=mRNA metabolic process
  Homolog annotation: Hit_ID=P93616; Match level="QueryCoverage=60%, HitCoverage=8%, E-value=3e-19, Identity=82%"; Hit description =Poly(A)-binding protein
  Pfam annotation: Domain name=RRM_1; Domain location=36-92; Score =30.9; E_value=4.7e-06; Accession=PF00076.13; Description=RNA recognition motif. (a.k.a. RRM, RBD,
MAAQGQAAAGSASESGGSPAASAAAAAAAAFPATSLYVGDLHESVQDAQLFDVFSQVGGVVSVRVCRDINSRKSLGYAYVNYNNTSDVAVRL

SEQ ID NO: 70304 - protein, 91 aa, Zea mays
  Coding DNA Sequence Number=SeqID_26929
MEQIDGFSGLDEMGAGTNLPGDDDGVRRDELGIEALSTSRQYLRNQESGCGYTEAWSRRSLTRMVITTKDKMITKLYAEELRHHNGKGKPT

SEQ ID NO: 70305 - protein, 61 aa, Zea mays
  Coding DNA Sequence Number=SeqID_26930
MAGGNTLAGAKERWLADEGECGAKRDVADEDMMLNSMDASLVIPSVIFLWMDVLVSLYFDE

SEQ ID NO: 70306 - protein, 101 aa, Zea mays
  Coding DNA Sequence Number=SeqID_26931
MHLTCPMGQAANVSSPASMIDTVINIARRKGKTGWPRGLTGGEGSIGAQAMASQASAMPEGGLGLAGSDPTRPGHDHRRRCSVDDGDWAHPATVLPGKLVP

SEQ ID NO: 70307 - protein, 108 aa, Zea mays
  Coding DNA Sequence Number=SeqID_26932
MGRVLANDGRDGEVDYGNWRLPLSGSFAARSLAASGRGPHMVRLRDHYKAPNQAPWARHQERGGDGREVLLRRQSSEDHYGVRTDCRKEQGGCGHGFIPRFPINMILM

SEQ ID NO: 70308 - protein, 88 aa, Zea mays
  Coding DNA Sequence Number=SeqID_26933
MAPEAGLGRCQPHSVEWHNSRSGAGGAVLLSGRLRPKRVVVGLIPQQERLIPVGFVTPIGHICPTGIIRIIPMGQIWPTGVIEPTRIN

SEQ ID NO: 70309 - protein, 365 aa, Zea mays
  Coding DNA Sequence Number=SeqID_26934
  Homolog annotation: Hit_ID=Q6QP51; Match level="QueryCoverage=58%, HitCoverage=79%, E-value=6e-09, Identity=32%"; Hit description =Putative growth-regulating factor 1
  Subcellular localization annotation: CTP_CleavageSite=28; ConfidenceScore=5.06e-01
MQAACNRTKWAHPFDSNASSMGAQAHTSCNRRAGCYVQETAPPLAPLPCLLDCGTSTATRGNPAYDPTVPTRHVGHGTGGAFGRRSRRRFTSAIMTASKKGPGKGDTPKGILLSEGNGPRAPLLIRGSKAGPSEGFNSRLRALGLRAHYWSEVRRPTPRKGSTAASGHSGSAPTTDQGFVGWPSKGSTAASDAERGMTLATKSGLGRHRKLRLARPQGSKSGSAPKDDELRLARSQGSYSGSALEDDELRLARPQALDSGSAPEDDELCLARPQGSDSALASADGLHLARPRGSNSTSDSEDRLDLDLGGASASPNPGLGPTTSQEAPSLPYPKLTQATGNKTGVPSGSPRLQRSSDGHDTTRTG

SEQ ID NO: 70310 - protein, 256 aa, Zea mays
  Coding DNA Sequence Number=SeqID_26935
  Subcellular localization annotation: CTP_CleavageSite=69; ConfidenceScore=5.60e-01
MSSRSLMHHLFPPSKPPDGGHSQFFRLVVGGTQLRGSWHLSAIVRLQGFSSGSLAASPRRWSPKTVTTSSMVGRSEPDCDLGPTLSFKDLHHPCWGGGRAEPELYLPCGFMGHLLPQHSRERALTGLAGGSDIDNVGLVGGERRQLQRIGLAGSAGSGSALGAPSRRKSGSRAARTGGPPKTSRAARAAFVFWGCPAFAPVRRLCAEVDAPLVREDPSGDLPVGRQTASVVGAEVVAAEEVLVADGITATIRAPGL

SEQ ID NO: 70311 - protein, 64 aa, Zea mays
  Coding DNA Sequence Number=SeqID_26936
MGVTAGLTTVAAIERAGVSREIRGGLVKHPLANERDLWRLLRSLVREDRDEPDYEGPPADFQST

SEQ ID NO: 70312 - protein, 247 aa, Zea mays
  Coding DNA Sequence Number=SeqID_26937
  Gene Ontology: Mol. function=protein binding; Cellular component =cytoplasm; Biological process=mitotic cell cycle G2/M transition DNA damage checkpoint
  Homolog annotation: Hit_ID=Q657T0; Match level="QueryCoverage=69%, HitCoverage=22%, E-value=7e-55, Identity=69%"; Hit description =Putative uncharacterized protein P0439B06.21
  Subcellular localization annotation: CTP_CleavageSite=20; ConfidenceScore=5.32e-01
MAAEAPPSASASSSSAPRPPAAAASASGGGAAGSAESYIGSLISLTSKSEIRYEGVLYKINTEESSIGLRNGNCFLFSSALAPHPLLSFSSDANVPDLDLLVPVRSFGTEGRKKDGMQIPASDKVYEYILFRGTDIKDLQVKSSPPPPPPQAASLHNDPAIIQSHYSQPASTSSNLPSAGGAVLPDLSSQAVQYGLQRPTFQSNLPLYQPGNAPRGSSAAPPAGNAPWGSSADLQQERHFRFPHVLA

SEQ ID NO: 70313 - protein, 278 aa, Zea mays
  Coding DNA Sequence Number=SeqID_26938
  Homolog annotation: Hit_ID=Q6J9W0; Match level="QueryCoverage=43%, HitCoverage=32%, E-value=3e-51, Identity=81%"; Hit description =Putative RNA-binding protein
  Subcellular localization annotation: CTP_CleavageSite=51; ConfidenceScore=5.29e-01
MAAAGRTPNFCGGQVEDTGGARRGASGGSRVPRLAARVRGSPRVLGLLPLRAVERAVEPETPQPQPEQPREIGARTIALFAMELPVSPGSKMHPYLRNLMVLGLSFRQDHNIITNQALKRHSVDPEWWMCPAIPVKDITPAPPPSVAMAKVTDKKKTKKKSLGTIYEEGSPEPANGDDDGALALPETGLGLSLNTDGVLKAWCGRGSAFADGNGPDLPLSPAHVIGLRLFNIDMIREHPLLVKQLTPLQDLHDMTSASPRPRSTQRAKLGVDCRYLEM

SEQ ID NO: 70314 - protein, 243 aa, Zea mays
  Coding DNA Sequence Number=SeqID_26939
  Gene Ontology: Mol. function=transcription regulator activity; Cellular component=nucleus; Biological process=regulation of transcription
  Homolog annotation: Hit_ID=A3A0W1; Match level="QueryCoverage=46%, HitCoverage=18%, E-value=9e-36, Identity=65%"; Hit description =Putative uncharacterized protein
MPLNIDIALFKLDIDELIADYAKLKIILAVEPLTPSEGPRIGENIFGYTIVDIFSSSCRGHHKNPPSEPYVLEVNRDVSFYNFRTKQVHEFTARLLDIHDKMMLINNKETLDFSFQVVGNAVMLGEIINYVQSLQRQVEFMSMKLATVNPQVDLNSLPNVLPKDSCGPPHFSLETSGASLSYLSQPHHGSPLGCMDNQSCMHPLDTTFCLAINLQYHFLNGVSDASSQTSMESKEEHYPSMTN

SEQ ID NO: 70315 - protein, 78 aa, Zea mays
  Coding DNA Sequence Number=SeqID_26940
  Homolog annotation: Hit_ID=A2XM86; Match level="QueryCoverage=57%, HitCoverage=14%, E-value=4e-09, Identity=62%"; Hit description =Putative uncharacterized protein
MVIKVKLERNLHMLVDFFEPKMGLYDNSGTFLGANEDSTRTLAEIEKKIARATVLPRNHGEPFQTPPPGPLVSIRKPP

SEQ ID NO: 70316 - protein, 74 aa, Zea mays
  Coding DNA Sequence Number=SeqID_26941
MAVGCLLGLELRLDHDAPAWGPRRVEIGSAGWWIARRVGSPGGHDERIAGMAPPRPAAALPQIPTVDLTAGAPD

SEQ ID NO: 70317 - protein, 134 aa, Zea mays
  Coding DNA Sequence Number=SeqID_26942
MAVELPRLMLSSHRRRVLVNGEEEGEDPQRFYRAKSNPRRGEDANLRSGFAELTTEMAKCWLGKKKILPERDHQSVATKETGLVVRFDRWVPRDTRTSGAGVKLPGIAWRGERDEDDVNVDITRQPITLNQRSK

SEQ ID NO: 70318 - protein, 110 aa, Zea mays
  Coding DNA Sequence Number=SeqID_26943
  Subcellular localization annotation: CTP_CleavageSite=15; ConfidenceScore=5.16e-01
MAKGILPAMTSQRSRATARAGSTTGQQVRRGIPPSPDAILARKSPGPMRGDLATHLDCLVSPEVVAQASSTVAAHCRAVRARKIGNRGEVAARGLNTSGMARPRRDIRGK

SEQ ID NO: 70319 - protein, 238 aa, Zea mays
  Coding DNA Sequence Number=SeqID_26944
  Gene Ontology: Mol. function=nucleic acid binding
  Homolog annotation: Hit_ID=Q6QP51; Match level="QueryCoverage=58%, HitCoverage=50%, E-value=4e-27, Identity=51%"; Hit description =Putative growth-regulating factor 1
MPRLLDCGTSAATRGNPARGPTVPVERIDHGDRERGYSERDHSPRRKRAPSPPTDQGFEGWPLGRVRQPPQSTRASGSLLIRGSKAGPWMGSTAASEHSGSAPTTDQGFEGWPLEGFDSRPRACIARDDSGSIRCKDRLTPYPDARSSVGRAEVTAVTSPFPLTDLTGKQRRLPRSDCCATRQGEADNRELSAFGFVKFCYLEDATVAKREMNHQVIGGREISIVYARRIEKRHKKCA

SEQ ID NO: 70320 - protein, 255 aa, Zea mays
  Coding DNA Sequence Number=SeqID_26945
  Gene Ontology: Mol. function=polynucleotide adenylyltransferase activity; Cellular component=nucleus; Biological process=RNA 3'-end processing
  Homolog annotation: Hit_ID=Q5G7K0; Match level="QueryCoverage=69%, HitCoverage=22%, E-value=1e-39, Identity=52%"; Hit description =Putative polynucleotide adenylyltransferase
  Pfam annotation: Domain name=PAP_central; Domain location=73-244; Score=-115.5; E_value=0.00018; Accession=PF04928.8; Description =Poly(A) polymerase central domain
MGALIVGAKYRGEFEDRPKVVLKEVTDSDGQTILFIDEIHKVVGAVHIRDGLRELSVWRVCEGCGMSKVKNNNGYHGVTEPISLSGPTEKYLMQTVEVEKYLSDARLYERQDEAILREEVLGKLDQTVKAWIKKATRISGYGEQFVHEANAKIFTFGSYRLGWLKGTALNMVCNLLHRYMALVPTLTPYVLVQDHATQNLRCQKFLSYIQYQMLMCLFWDSKINGVSIDLVYANLAHAAIPEKACAYEHKEYLAM

SEQ ID NO: 70321 - protein, 26 aa, Zea mays
  Coding DNA Sequence Number=SeqID_26946
MAKLPGRYLRHVPSRYVCFYADLPKV

SEQ ID NO: 70322 - protein, 132 aa, Zea mays
  Coding DNA Sequence Number=SeqID_26947
MQNMTKIQKVVPKGSHRFDEYKRSKVMLRCVRKEGKVFFVFGSKNTSFVHIKAVHTWMERAFLQHLHQYPSSFGSSIFGFVILYITKRYKVNRNLRRRLGMSVKSAGDRLKFGLFTVFPCVQPVFMKAIAVS

SEQ ID NO: 70323 - protein, 259 aa, Zea mays
  Coding DNA Sequence Number=SeqID_26948
  Subcellular localization annotation: CTP_CleavageSite=62; ConfidenceScore=5.34e-01
MAKKVKCCTFFSYMSFFLEGQGSVYSRNAISPRPSPASGRNNSPRRIHASPEGLLKQRAHPRLARGPARVGLAVKQPWPDRLANRPYRRSIQWKDRLTPYPDARSSVGRAEVTAVTSPFPLTDLTENIAACPAPTAVPPARVRLTTAKSSLRRNRKLCLTRPWASASEGGLCLARPQGSAPASASEGGLRLARPQGSASTSASEDGLRLARPQGSASTSTSEGIASSPHPGLGLRRSLRLARPWARTDHATGGTSLPYP

SEQ ID NO: 70324 - protein, 261 aa, Zea mays
  Coding DNA Sequence Number=SeqID_26949
MLDVSKSKGCVPAVRLHATYMAVRPINRWMVTTGSMVGRSKPGCGFCPALSFKDLHHPCCGGGRAEPELYLPHGLVGHLFLQHSGERALIGLAEGRTLTTRGWSAASVVSSSMPGSLAQLALALLPVPPPTAGVGRGCPPTVRAAVAPLGGHSWIDLWLFGFDGLSSPLVLGRGRGPSHSSICPELRNPRLLCDGLEPEAAVSVWTEAESTQKGASSAQEQVASQAEEVEILPPVSPSEAGPDPAEGGNNAEGAGVPSVDV

SEQ ID NO: 70325 - protein, 265 aa, Zea mays
  Coding DNA Sequence Number=SeqID_26950
  Gene Ontology: Mol. function=catalytic activity
  Homolog annotation: Hit_ID=Q9FL05; Match level="QueryCoverage=35%, HitCoverage=27%, E-value=1e-20, Identity=48%"; Hit description =Similarity to intracellular protein
  Subcellular localization annotation: CTP_CleavageSite=61; ConfidenceScore=5.25e-01
MAVPQARGMEYTFPKFRKLPTRRGHPTFPPIPPPKSTTPQPAHSQSRNAPHEATTHERALRAFGNSNAPVGEENRTAAQTWASTAPPRRGTPRWRRRPLTLPSSSPATAVRPSYGSCDRSYVKQVFDNLHGSISVDPGVELGIDPVDMQTVKLAGWSTNPGSHEKMSVLLLDSIVDKHAIDIENDYLKMVKSAKEKHFLYDIVANGRNGIDVDKFDYIGRDCRACGLGSDTQSREGGRYAASAVVPPDCDSGCGVLGVSDGLTWN

SEQ ID NO: 70326 - protein, 42 aa, Zea mays
  Coding DNA Sequence Number=SeqID_26951
MSCAFDDYYIKDYGVILAPELFLERTTENGDPQSLTNAPHKD

SEQ ID NO: 70327 - protein, 250 aa, Zea mays
  Coding DNA Sequence Number=SeqID_26952
  Gene Ontology: Mol. function=catalytic activity; Cellular component =intracellular; Biological process=immune response
  Homolog annotation: Hit_ID=Q9FL05; Match level="QueryCoverage=92%, HitCoverage=46%, E-value=2e-78, Identity=63%"; Hit description =Similarity to intracellular protein
MAGKRAANNAATGAGGGDLSIHKLFSTRADLHRTVYTHAKVKAVELMLVDALVEANDYLGISLHAHDPEDFWKSILHSLKLQLDDTIIKTIETAPNNELKKAKEIIQRIRRRELYKFCNQYSVPKDKLEHFKNITAQDIVCSQKSSEVLLKEEDVAVCNVKIDLTRGKYNPLESFSQNVDFGCDEKFPIIDDRVSHLLPAYNEDRIVRVYAKNPELVDVVSEAFENLQMRMYGEKTQVHETPKKKKIRSN

SEQ ID NO: 70328 - protein, 179 aa, Zea mays
  Coding DNA Sequence Number=SeqID_26953
  Homolog annotation: Hit_ID=A2ZNG0; Match level="QueryCoverage=63%, HitCoverage=17%, E-value=1e-27, Identity=56%"; Hit description =Putative uncharacterized protein
  Pfam annotation: Domain name=DFDF; Domain location=21-44; Score=37.1; E_value=6.5e-08; Accession=PF09532.1; Description=DFDF motif
  Pfam annotation: Domain name=FFD_TFG; Domain location=80-124; Score =63.2; E_value=8.9e-16; Accession=PF09542.1; Description=FFD and TFG box motifs
  Pfam module annotation: Pfam domain module=DFDF::FFD_TFG; Domain location=21-44::80-124
MHMKVFGKAIVKLLFSQSVTTFTEEFDFTAMNEKFNKDEVWGHLGKKSQSRDKDGEVGDDVFDEDLEVEETDNPELSVKPVYVKDDFFDSLSSGTFGRGGPNGRGRPSERRRVDTETFGEFPRHRQPYRGGARGYRGGGRSRGSYYGGRGYGNTGTGGYGNTGTGGPGNSYSHRGYGRD

SEQ ID NO: 70329 - protein, 330 aa, Zea mays
  Coding DNA Sequence Number=SeqID_26954
MTASKKGPEKGDTPKRILPREGTRLRASLLIRGSKAGPSEGFNSRLRARGLHTHYWSEVRRPAPRKGSTAASGYSGSAPTTDQGFEGWPPKAHRRHHVRRPPRATWCFPPLLLAERRRRGICKKVESVLDRPLALCRGSGAALANPAPAKPLTASTYQPEKLGTRPYTRATASSHEGTTRPAEALREALRPRRSQTTPPRPRGLHPAGALARTHRNKTQPRKAGPLAKKCDESLQASANTPFEARGLLSGTIIRGTLKAPNSQLVTPISIKLQRPDGHHRKLRSARPRARTRAKPRKTANSAPPDPGLGLGLSPGRRRTPLRPTQGSDLG

SEQ ID NO: 70330 - protein, 156 aa, Zea mays
  Coding DNA Sequence Number=SeqID_26955
MGLGVCGSLCQVWVRPLGRSAVHLGNLTGIVRGFDPAEGGKHNVDVSAQPTSANSFDSNISAVLAVMSGQGTSGNDWYLIRDIVVQVVMRLMVLVMTMVLVVSIATTAQAKMKLWKETSRSSKITTSSRCGLAATPSRLPVKAAVIYVSFPHFDLL

SEQ ID NO: 70331 - protein, 306 aa, Zea mays
  Coding DNA Sequence Number=SeqID_26956
  Gene Ontology: Mol. function=hydrolase activity, hydrolyzing O -glycosyl compounds; Cellular component=extracellular region; Biological process=carbohydrate metabolic process
  Homolog annotation: Hit_ID=Q9S7W9; Match level="QueryCoverage=89%, HitCoverage=100%, E-value=4e-95, Identity=60%"; Hit description=Beta- 1,3-glucanase
  Pfam annotation: Domain name=Glyco_hydro_17; Domain location=31-301; Score=479.1; E_value=5.7e-141; Accession=PF00332.9; Description =Glycosyl hydrolases family 17
MTSAAAAAAPWVSVCSFLLCLAAFQGAEGAIGVNYGMVANNLPAPEQVVSMYKAKNISYVRLFHPDTDALNALRGSGVGVVLGTLNEDLPRLASDPSFAASWVATNVQPFAGAVQFRYINAGNEVIPGDAAARVLPAMQNLESALRSAGVTGVPVTTAVATSVLGASYPPSQGAFSEAAASVMAPIVSYLSSKGAPLLVNVYPYFAYSSSGGQKAGVQGLELVVSETGWPSAGGEGATVENAAAYNNNVVRHVGGGTPRRPGKAVETYLFAMFNENGKAEGVEQHFGLFQPDMSEVYHVDFTAGSP

SEQ ID NO: 70332 - protein, 386 aa, Zea mays
  Coding DNA Sequence Number=SeqID_26957
  Gene Ontology: Mol. function=phosphoglycerate kinase activity; Cellular component=chloroplast; Biological process=reductive pentose- phosphate cycle
  Homolog annotation: Hit_ID=A2WW09; Match level="QueryCoverage=89%, HitCoverage=85%, E-value=1e-153, Identity=77%"; Hit description =Phosphoglycerate kinase
  Pfam annotation: Domain name=PGK; Domain location=77-386; Score =470.9; E_value=1.7e-138; Accession=PF00162.10; Description =Phosphoglycerate kinase
  Subcellular localization annotation: CTP_CleavageSite=71; ConfidenceScore=5.61e-01
MASAAAPPTSLSLAARAATRAAAAAAAPLRRGGLATACQPARSLAFAAGDARLAVHVASRCRQAFSGRGTRAMATMAKKSVGELTEADLEGKRVFVRADLNVPLDENQNITDDTRIRAAIPTIQYILSKGAKVILSSHLGRPKGFTPKFSLAPLVGRLSELLGIQVQKADDVIGPEVEKLVAALPNGGVLLLENELDYLVGAVSSPKRPFAAIVGGSKVSSKIGVIESLLEKCDILLLGGGMIFTFYKAQGLPVGASLVEEDKLELATSLLAKAKEKGVSLMLPTDVVIADKFAPDANSQIVPASAIPDGWMGLDIGPDSVASFNAALDTTKTVIWNGPMGVFEFDKFAVGTEAVAKKLAELSGKGVTTIIGGGDSVAAVEKRSKL

SEQ ID NO: 70333 - protein, 81 aa, Zea mays
  Coding DNA Sequence Number=SeqID_26958
MDGDVWGLGGFVFPCPLCDLGSPSLLSPTFPKLAALEEEAAAVVFFNPTQFKIKTNKPALGSILLSAGQAAAVAESEIRPL

SEQ ID NO: 70334 - protein, 97 aa, Zea mays
  Coding DNA Sequence Number=SeqID_26959
MEEVGIRSPPGPPSFAGVSAMPWAHMGFGWELWVAGTSRSGGTAMAPLQLRQGAALLGRWRFITVDLAIGGPDLIKWTPVWRIESGRWCWDRWSGSE

SEQ ID NO: 70335 - protein, 800 aa, Zea mays
  Coding DNA Sequence Number=SeqID_26960
  Gene Ontology: Mol. function=hydrolase activity, acting on acid anhydrides, catalyzing transmembrane movement of substances; Cellular component=integral to membrane; Biological process=calcium ion transport
  Homolog annotation: Hit_ID=Q65X71; Match level="QueryCoverage=99%, HitCoverage=69%, E-value=0.0, Identity=74%"; Hit description =Probable calcium-transporting ATPase 6, plasma membrane-type (EC 3.6.3.8) (Ca(2+)-ATPase isoform 6)
  Pfam annotation: Domain name=Cation_ATPase_N; Domain location=186 -263; Score=53.5; E_value=7.4e-13; Accession=PF00690.17; Description =Cation transporterATPase, N-terminus
  Pfam annotation: Domain name=E1-E2_ATPase; Domain location=277-518; Score=227.3; E_value=3.6e-65; Accession=PF00122.11; Description=E1 -E2 ATPase
  Pfam module annotation: Pfam domain module=Cation_ATPase_N::E1-E2 _ATPase; Domain location=186-263::277-518
  Subcellular localization annotation: CTP_CleavageSite=21; ConfidenceScore=5.09e-01
MDSGSKSWSIDSYLNEHFDIPAKNPPSEARLRWRRAVGLVVRNRRRRFRMFSGLHALDDAQRRNILMSSAVQRIRVYAEDGAGGGEFGVGAVVVDEMTGRLGALMITTYMNVLLVQSIGHQRQTVGLDIREGGSDGLAGGANAWCWRTNVHKGGIRRYHLSPELIEEGFCISPDELAAITGIREDSTILKSHGGISGISRKIKASLDDGIKETEIATRQKLYGSNKHTEKPPRSFWTFVWDALHDLTLIILIVCAVVSLMVGLATEGWPKGIYDGLGIITSILLVVLVTASSDYKQSRKFMELDYEKKKIYALVTRDRKTKRVLIHDLVVGDILHLSVGDVVPADGLFISGYCLVIDESSLSGESEPVDVSEEKPFVHAGSKVVDGTAKMLVTAVGMRTEWGKVMDTLSADGVDETPLQVKLNGVATIIGQIGLAFAILTFLVLLVRFLVDKGMHVGLSNWSANDALTIVNYFAIAVTIIVVAVPEGLPLAVTLSLAFAMQKLMNDKALVRHLAACETMGSASCICTDKTGTLTTNHMIVDKVWMGDVSKSVNSDTNMNELKDATAESAVDLLVQGIFVNTAAEIVKGDDGRRSILGTPTEAALLEFGLGLQGDLYGEYNKMARVKIEPFNSVKKKMSVVIQLPNGGLRSFCKGASELILGQCDSFLNSEGNLAPLSEMQKQNVLDIINSFGSEALRTLCIAFKDLGEIPDDQTIPEDGYTLIALFGIKDPVRPGVRDAVMTCMAAGIKVTMVTGDNINTAKAIAKECGILTEDGIAIEGRELHDKSMDELKEILPKIQV

SEQ ID NO: 70336 - protein, 180 aa, Zea mays
  Coding DNA Sequence Number=SeqID_26961
  Gene Ontology: Mol. function=kinase activity; Cellular component =ornithine carbamoyltransferase complex; Biological process=amino acid metabolic process
  Homolog annotation: Hit_ID=Q6QP54; Match level="QueryCoverage=60%, HitCoverage=38%, E-value=2e-28, Identity=61%"; Hit description =Putative kinase
MVRVLTIFKVGRLLNIDLFLDWSIEEGTFHVHLIKLEAMREGEREGGKSEAAGDRRERGGNPAAFVFVPRLGRRAAVVTEYAGRHHCLSSGASQMGHQSCSLRPESARGRVMMAPPVDVAGLRPRLGDVEAPPKPRSSLSSVAEVESEPLGRARRRPPAEARAESEPWGRAERSSPSSGA

SEQ ID NO: 70337 - protein, 70 aa, Zea mays
  Coding DNA Sequence Number=SeqID_26962
MEVSHRGRRPSLEPKQNPSIAGDSGIQSTNRTRCDETLDETNATEFAVFRDLARVRALGRAERSSPSSGA

SEQ ID NO: 70338 - protein, 145 aa, Zea mays
  Coding DNA Sequence Number=SeqID_26963
MASCGEEVQAGLGTIRYWEFVVASGGEELGGRIGSDQWRIHHDDMLRGDGGRLKCLRVWYHQNLRSILTLTAEKKGSLLVTGRGDSEFVLDAKVPGWLWRGQLKAGGTNLFLYMNHDTCETASNLLHGDLRAIVPALLQTRDMTI

SEQ ID NO: 70339 - protein, 319 aa, Zea mays
  Coding DNA Sequence Number=SeqID_26964
MDVSHIYCSGLGGLRNKLVGRFKSKRPRADDADYATTTDSEAQSSAGGSVSMDIKDIPHTHPDYPIDITGWTFPKRRFSMAEYCSRRTVNQYTLPSDTNVQFFHTQLQFDVFWGTLMDTNFHKHQVIDWTFMLGQSVMEDLISKFETCGLYHYMGQRTDFSDLATTEIDIDEESITWMIGFKRYSTMFAEFAAANSLNYGTISAGIDLYTEDNFEDFVQFYEPARLGIPRRQLNDLKMDKNQNLVYAPYIMALIKAKTRFEGPCEIVHTPFRPFKNEIGFLTRPLTPFPNDEEDPGYDAGEALEVETEQMPPPPPPPQP

SEQ ID NO: 70340 - protein, 122 aa, Zea mays
  Coding DNA Sequence Number=SeqID_26965
MSIVKDGAKARIVIDKGENATKGRVGKTPFSNRDGKYDISKGVYFRQNLQGVKEGGAINGEVGEALPSNRDRKEKALKGRFKVGIWQGHRYHEGLKVITDKDVGEEVNVHKNQEYKYHKGWS

SEQ ID NO: 70341 - protein, 30 aa, Zea mays
  Coding DNA Sequence Number=SeqID_26966
MALLVSGSGALARGQTDRIRDQPIQVALAL

SEQ ID NO: 70342 - protein, 161 aa, Zea mays
  Coding DNA Sequence Number=SeqID_26967
MPIAIGGYSLKQPIIFYPSLTHRKIYDTPSTVGETHGAPSTLRANSDMRTRYVAGKSTTGITTSQHGVRLPGPNRPRLQLVAPPGDGRGTMTTTPLPGTDNIIDDRRTRVEYRHLLRASKPFNGPLTSRYPTSTNMNLSRIREAGWPSTPPLPELLGQPRT

SEQ ID NO: 70343 - protein, 369 aa, Zea mays
  Coding DNA Sequence Number=SeqID_26968
MAHWSYSGPPETFSPLFSLLCSWIHGLFIAIEFAVVPSPSLPNPDNEQSEVPECVVGDLPEQQPGEGGDAGNMDDFEEFQKYDEFWFFLSGKPPVSPVTWRDCIVACTRSRSTNARSRSSRTLPPRLSSRWSLRGRLPLHLSQRCPVHHLRASRLLEETLTETETTTTPVAVRATARSSRRSRSRRYGLLDPSLVTPLAGVTSMTLSIPCCVGPSTNTLGPSKAFSEHYSITERDTTEAAMQDVARRALSQYCSLFNGVADGLDLKYYPRHSTSSAGGVIALAVGEGNPRLNNMVNLAVVLNKELDHALDELGKVQVEVAELRSECAARHYLDGGSPAPVGIQHPYRSPPHGRFDYGTPDCRTRIDLDP

SEQ ID NO: 70344 - protein, 154 aa, Zea mays
  Coding DNA Sequence Number=SeqID_26969
MGKSKKGGGSSHHSGDKRKHEPTPPSEDFGDSEYSEEEFSSESEGSPAPVSPPTSSDDSDDSQGIATEVWTYIWAVECAGLEGLDESEYSSDEENSSDPSEEGSGCDGDGDGDGGDGDGGGDSGKGGDGSGKGGSGDGGDDSKGSSKGSNKASG

SEQ ID NO: 70345 - protein, 58 aa, Zea mays
  Coding DNA Sequence Number=SeqID_26970
  Subcellular localization annotation: CTP_CleavageSite=34; ConfidenceScore=5.19e-01
MASNSPTRSGAGPCPAGPALLRASFLRRLRWFCRCRGLPGFSCEFPECDHLDFDYLGI

SEQ ID NO: 70346 - protein, 210 aa, Zea mays
  Coding DNA Sequence Number=SeqID_26971
MHAPSRGISCHPAHPRGSSGAAADIVEEGGAPCCHCRAGGRARGPANGGGRRRRPRPWPRDGDVNVLAGAYVALEEERWAAQGRRGGTTSVCRGDGAATGRGTWGSGTPLSLSAGGAVRADLEGGEVSGGGVDQRGHGGAVKCRGRRRHKLQCVWAQGTAAATTNSIGKARYGPNRTSGDTQGRRAGLAGGVGEGGATGHGLAHYSVGGC

SEQ ID NO: 70347 - protein, 349 aa, Zea mays
  Coding DNA Sequence Number=SeqID_26972
  Gene Ontology: Mol. function=protein transporter activity; Cellular component=clathrin coat of trans-Golgi network vesicle; Biological process=intracellular protein transport
  Homolog annotation: Hit_ID=A2YL02; Match level="QueryCoverage=99%, HitCoverage=93%, E-value=1e-82, Identity=51%"; Hit description =Putative uncharacterized protein
MSSSFDSITAVVGDDDELPPAPFDTAVDGTAAEYGGEQQGFGMRRGHRFAASYSSFGTAVSEDDLGGAGGEGGGGYGGFGIPPYSNGGPAYGYADNDANGVEHVMGAQDVMDGAAHAAGDISGGRLDEDLFSGAADDDDGAVLPPPEAMREEGILRREWRRQNALMLEEKERKERERRNEIIAEAEEFKRSFLDKRRLNCETNRTQNRDREKLSLANQERFHKEADQQYYWKAIAELVPREIPGLEKRGKRKEQERKPGIVVVQGPKPGKATDLSRMRQVLLKLKDKPPSHMVPPPPQAKEEKEKDGDKDAKKDGNKQEEKKDGKQQAAGPAEKKTDGPEMASAAGSPP

SEQ ID NO: 70348 - protein, 219 aa, Zea mays
  Coding DNA Sequence Number=SeqID_26973
MKRSIEKYQFLESNAWTDGRWTIGPVRLDGRLDGRPLACAWTDGRSPASAARATGRLDGRTACCPRDWTPGRTDGLLPARGRLDGRTDGRPAPLACVCAALFSAAKIRMRGDRDGEVLCISVKDQLKLHALHIKNNHLQKQKEILAAKRQRITMQAKVRQVILDEERKARELEQHIVEMQGEDFLHQRQDPEHRLRMLVPALATFHRLNYLDERSPLTP

SEQ ID NO: 70349 - protein, 136 aa, Zea mays
  Coding DNA Sequence Number=SeqID_26974
MAGSKDHTDVSTTNIIKRTMEALPANDQHPFNDIIRREEEEVLRQLVERRDKEEEEVHKSNHLNSKPTVRNTVDYSGQEQLFRKFTCARTVWVLPAGRPRHLGEKNTVGDQAQTVQPQAQTVRPLEIRETRRCQVR

SEQ ID NO: 70350 - protein, 62 aa, Zea mays
  Coding DNA Sequence Number=SeqID_26975
MVKRPIPPLSYSHLIPYFTAAAHPAPFLAPVAMAISWIDVAEDFVDSGPTHAASDDTPFEEH

SEQ ID NO: 70351 - protein, 64 aa, Zea mays
  Coding DNA Sequence Number=SeqID_26976
MILPQHLHIKRVTFGVNWSNQGWKQEKLRGTECTGEGQGDQETSSAGLANLVLCSGSECTRSPV

SEQ ID NO: 70352 - protein, 80 aa, Zea mays
  Coding DNA Sequence Number=SeqID_26977
MAISWANVAKGHGDQLRCVWGHPRETPNHLPFSMYPYVGPPLEYDGMPKPPYLSLPSPPVPHRSSSETAVPKDELDTTKQ

SEQ ID NO: 70353 - protein, 125 aa, Zea mays
  Coding DNA Sequence Number=SeqID_26978
MEGGEGDTVVRLTSHQGSEAVEAVEGLKKAAGTAATWGVGGSGRETEEERSRVGVRAMVVPGLTRWVDSLTQSLPDDRVGLGTAHVSPCRAGPVTGQNSAGPRAAWWAQPVWTTKCNMDDGTRDC

SEQ ID NO: 70354 - protein, 61 aa, Zea mays
  Coding DNA Sequence Number=SeqID_26979
MHNKKEPGNQLPNSSWKNLPRHPHLKASPGSLQDMVDGVTWPSTLPPGWTVKWDAASAGED

SEQ ID NO: 70355 - protein, 73 aa, Zea mays
  Coding DNA Sequence Number=SeqID_26980
MATAAPVLYATGAEHQVSGEDARGPLVLAPADGIRSGGRSVGGDITIPLRLARIAKEPLENLVINPRSIAGEL

SEQ ID NO: 70356 - protein, 73 aa, Zea mays
  Coding DNA Sequence Number=SeqID_26981
MKEKIKKLRHLKRRAMIKGAMPMIKTRKMNKFQDCHTQESTKQSNEITPVEEALQDSDWVVAMQEELNNFTRK

SEQ ID NO: 70357 - protein, 117 aa, Zea mays
  Coding DNA Sequence Number=SeqID_26982
MALEATDIEAMSLRARLLKSDRRMGGESCLFVRPIFDFTNPSPFCWNWSQRFKASTRARVKSRGLSKPAVSIGRSVSSMYLMGFTTSFIAALSAASTPPWPSPNLDRAMSYAISLVS

SEQ ID NO: 70358 - protein, 87 aa, Zea mays
  Coding DNA Sequence Number=SeqID_26983
MCQRGYREEPAKVNPPPDDPRTKVWRGATLAKGQMRCQRATRVDSASGRRTALVINTVHVTLTTLGAESWCGSELVCLPLMAYVFYV

SEQ ID NO: 70359 - protein, 194 aa, Zea mays
  Coding DNA Sequence Number=SeqID_26984
MSYYTKCMVHSCRVGIFDSTIDSRELRRRGQQSTSSSSQSSRSRSAAHEIELAVLRQQAEYHQSVLRDQLEYQRQQSEYQRQQAEYQKKRDEYYASLQAQNQALLSLIEQLAQQVGVPMPTYGMPPPDFALPMPMLAPPPPPPPPSQFPMGFQTPPASVAAPGDGSGQDDTTHSWVNNLFSTHSPAGGGGDGYE

SEQ ID NO: 70360 - protein, 59 aa, Zea mays
  Coding DNA Sequence Number=SeqID_26985
MDPTLTKKVCPIHGTVPLFIGTGYNFRRITIVPQTYTFKLSGLGSNRSTYIAIPSGGNC

SEQ ID NO: 70361 - protein, 202 aa, Zea mays
  Coding DNA Sequence Number=SeqID_26986
MGLGSLDAFGDGAHFDSPVVDLFAPFVEEATNTSSLGATKASVHTEGILGRGGNEEAKHFPPSCPYVGREESYFHEKQDNTALHRRQQAFHGFGHCAMIVTDRGTTATRDRVSTRESVAPPGSEAALRQSSDYSLALSIEGDEVLISAVIRSSQLHLGIGGPQVELSCLEGALGSQFLLEDSSERIDLQALNGELFEMGAIS

SEQ ID NO: 70362 - protein, 64 aa, Zea mays
  Coding DNA Sequence Number=SeqID_26987
MGISSPRAERESQLVGKVCDLCRGLEIDISVVLMVTSGLGILFGKEEGVEADLQEFQDFDEFVV

SEQ ID NO: 70363 - protein, 90 aa, Zea mays
  Coding DNA Sequence Number=SeqID_26988
MESTCSSPSKELSKRRTRSKLPRLLSRISLQPQLLKASPGSLEEMVAGVTWPSILPPGLSGTIIRGTLKTPNSQLVTPISIKLQRPDGSD

SEQ ID NO: 70364 - protein, 284 aa, Zea mays
  Coding DNA Sequence Number=SeqID_26989
MMVDYTMILNGPSVSVEGPTQQGVESVMEVTPASGVTSDGSSDPPLRLLRALRAMARTATGVVVVSISVRGKVTSQTPPPAEARGRVLLLLLRASVLLLLVQATMQSLQVSGPTVSKALIPLMSHPVLEGVKGSHSANKKTKFLDSTKEQNGNRRHPWSGAPGLSGVPPDMSGAPGGLRLKLATFGNFQRHSRYNSPDCPVYTGQCPVRHGEAASGTRQLREIPTASPLKFTGLSGVHRTVRCDSSATAISAPTALCRAFNARSARVEVRRAHTGTPDSKQYLS

SEQ ID NO: 70365 - protein, 49 aa, Zea mays
  Coding DNA Sequence Number=SeqID_26990
MSLGGIVIRLSIYARDCHTRFWKGALKQNSHAKGYGVISAIRSEISGPD

SEQ ID NO: 70366 - protein, 79 aa, Zea mays
  Coding DNA Sequence Number=SeqID_26991
MEEAQTGLVVSLFDVYRRGHRAKNSEISDELCSQAVVERMAGCGSSRSWRSVSSMEDAMREQQERFREELQQQQMTFLQ

SEQ ID NO: 70367 - protein, 110 aa, Zea mays
  Coding DNA Sequence Number=SeqID_26992
MHLTSRVQQEAFALNDQFNDYLTWQDTWLGPLVHQTGPVSLWMTGSEEISLIEVTIEESYGNIVDGIMLYSMRIRTPAQTLVAGDKNATVVRDGSSAATVKESCDVALKQ

SEQ ID NO: 70368 - protein, 79 aa, Zea mays
  Coding DNA Sequence Number=SeqID_26993
MPYFLVEAPTKSRVSFNPNPPFADHKDLKWERQEMCEREWEVFLRLEMEFKSCSSVGERDKNWLSVQLSVRLNQYFPKR

SEQ ID NO: 70369 - protein, 109 aa, Zea mays
  Coding DNA Sequence Number=SeqID_26994
MEEHGRPYDGHPTTSMADRQRYSVLNIWRSIDNLISFNYLQFLLSFPNGRSNIKSGHLKNAVVPVVPKCPEPQDDKGIEPFRSNALQLIRGLLPPIHGAPIAWLRSEAL

SEQ ID NO: 70370 - protein, 34 aa, Zea mays
  Coding DNA Sequence Number=SeqID_26995
MGARAWCSLCQGGCRGGDAGNMEDFEEFQDYDEF

SEQ ID NO: 70371 - protein, 27 aa, Zea mays
  Coding DNA Sequence Number=SeqID_26996
MEKCKPIKTPMPTNGHLDLDEGGSTFG

SEQ ID NO: 70372 - protein, 84 aa, Zea mays
  Coding DNA Sequence Number=SeqID_26997
MKAKSHHQPNQGGTCKNYATSKAEYTNTQLDLPGLTALAYNAPLTPTAAVQWPHLYPPYLEWETQSQVVLGIKSAPGFTQVSAH

SEQ ID NO: 70373 - protein, 89 aa, Zea mays
  Coding DNA Sequence Number=SeqID_26998
  Subcellular localization annotation: CTP_CleavageSite=54; ConfidenceScore=5.11e-01
MSTVPIDSPFASRPHRLGIQCSTDPDRRRAVAALVPTISRMGDPVSGRVRDKVRARLHSGIRTLILIPILSHRPRIPMDPCPQTIIILI

SEQ ID NO: 70374 - protein, 399 aa, Zea mays
  Coding DNA Sequence Number=SeqID_26999
  Homolog annotation: Hit_ID=Q5Z401; Match level="QueryCoverage=67%, HitCoverage=73%, E-value=1e-132, Identity=82%"; Hit description =Putative lysine ketoglutarate reductase trans-splicing related 1
  Pfam annotation: Domain name=DUF707; Domain location=101-399; Score =381.2; E_value=1.6e-111; Accession=PF05212.3; Description=Protein of unknown function (DUF707)
MKHQPPRRWGVVAAVVALVLLACLQIQYHHLKVALFPSLPPPSTPVFPFLALSLAYFFTLARCSQPGDNTHAAVSYLQVDLGKAGFASATQENNAIRSRNRIRWGPDRNGAHSLPRGIVHRHSDMSLRPLWEDDTASTHKNKNSDYSALLAMAVGISQIKNIDTMARKFLKENYAVMLFHYDGNVDGWRHLEWSDKAIHILAHNQTKWWFAKRFLHPDVMAIYDFIFLWDEDLGVENFNPRRYLDIMVSEGLEITQPALDPDLSTDIHHRITIRNKMAKVHRRIYDNRPSMNCSDESKGPPCTGWVEGMAPVFSRTAWKCVWHLIQNDLIHGWGLDMKLGYCAQGDRTEKVGVIDSEYVVHQGIPSLGGPSLSSKVLDISATNYFFRNLESGRTKDEVY

SEQ ID NO: 70375 - protein, 178 aa, Zea mays
  Coding DNA Sequence Number=SeqID_27000
  Gene Ontology: Mol. function=protein transporter activity; Cellular component=clathrin coat of trans-Golgi network vesicle; Biological process=intracellular protein transport
  Homolog annotation: Hit_ID=Q5Z402; Match level="QueryCoverage=87%, HitCoverage=57%, E-value=1e-48, Identity=65%"; Hit description =Putative uncharacterized protein B1206D04.26
EKEKKEKELRSQIIVDAEEFKKAFVEKRKLNAETSKGQNRDREKEKFHAGADKQYWKAISELIPHEIANIEKRGARKDKEKKPGIVVIQGPKPGKPTDMARMRQILLKLKHTPPPHMKPPPPPAAATGKDGAPAAAGKDGAKPATVANGSVPEMEKAAAEASVPAAAPPAATEPIAAA

SEQ ID NO: 70376 - protein, 440 aa, Zea mays
  Coding DNA Sequence Number=SeqID_27001
  Homolog annotation: Hit_ID=A7QYN2; Match level="QueryCoverage=56%, HitCoverage=45%, E-value=2e-76, Identity=60%"; Hit description =Chromosome undetermined scaffold_252, whole genome shotgun sequence
MSDALGPLGEVADYLGAWARHAVRDLSLSPPRKKPAKGNNSSDVQAAANPNNRAAQQQQEIGSNKPVDSTLQQQPFAFDPSAVDDANGRPLGMLQFDEDDNGSKDAGTGAQATLERLVSKHRHRRDPDGPPFEGRFSDESSSLLERTLEIRDRSYRLKIGVMSEAHPPVYGDDESAASAADSDGEEFSRNVKEAAEILRKARASMADEETADALLYKSARLLSTAVALRPTSLVAVGQLGNTYLLHGELKLKVSRELRTLLASSGAFLNGRERAPRSRKVDRRMVSRESISSALVDVCEECESLLVEAGRSYRMALSIDSGDAKALYNWGLALIFRAQLLADIGPEAAADADRVYLAAIDKFDAMLSRSNTYAPEALYRWGTALQQRSHLRPRSNGEKIRLLEQAKSLFEDVLYVEADNKMVREALSSCISELNYHGRWL

SEQ ID NO: 70377 - protein, 91 aa, Zea mays
  Coding DNA Sequence Number=SeqID_27002
MHLVRATHLPPDLWGRRSAPHHFDHARSDSLPRGPADQAQQLCAPALARLGSLPVGPPGHRAPTLRAPMLAVKDSEAAVAACGRWKMATSR

SEQ ID NO: 70378 - protein, 51 aa, Zea mays
  Coding DNA Sequence Number=SeqID_27003
MEIVFEGLKSLEDVEEMDPEWLHDPPQATRMRGEGHLLVGLVQRRPVRSKW

SEQ ID NO: 70379 - protein, 200 aa, Zea mays
  Coding DNA Sequence Number=SeqID_27004
  Homolog annotation: Hit_ID=Q6QP51; Match level="QueryCoverage=21%, HitCoverage=19%, E-value=9e-13, Identity=83%"; Hit description =Putative growth-regulating factor 1
MTLGTSVTWPRLGLRSRGTLGHFRDQQERFCNGIPPEGGIEPSDPIERVRVQQITCSRQGRSDRSHFALSLTDLTGKQPRSPRSDCCATHQGEADNSQVQPRAQQEAPPHPTPGLGLNLGLGRRSPPRLTPGLGHNLGLGRRSPPRPTLGLCLNLGLGRNHVLARPRPRPQEKSPPRPTSGSDRPRHGGYIIILPLASSG

SEQ ID NO: 70380 - protein, 127 aa, Zea mays
  Coding DNA Sequence Number=SeqID_27005
MARLCLIVAEHGRGRWPSSTGGGFGRRRHGDGEAPASLKNWCAQLGGRWGYAGTWRGGQGAGLALGGDVGAAISASVRVVHARERLKEERGTGKRGPPNSGTDTRAHDGPGRRQGDPAEQRGRRPVS

SEQ ID NO: 70381 - protein, 187 aa, Zea mays
  Coding DNA Sequence Number=SeqID_27006
MTSPRGGRCRPVWEDLSGDLLVQAGAAAIRRRGAGAQVAAVVGAEVVVARGGFSADKTVGATHGRTSGSLASMACPRPSCGDVGEGLFTAALALRSSLLLFSRPTRRSLSLLNLRPLCDELEPEAAVLAWTEAESARKEALSAQEQVASQAEEVQQRRLELGQVIRERDQPRSHAAEAVSRAEVLGG

SEQ ID NO: 70382 - protein, 212 aa, Zea mays
  Coding DNA Sequence Number=SeqID_27007
MASIGSTARLISPTSSEAQQDTLHVFEATRASSPRVAAELLKDRPSKPSYIEIGRSILKEKVLQTMRRLGYFSSGVNVRLPREETTSKPGPTPAVEEEASAVERAANPLQVPTLGAKGPWSQGLRMLGMPQSREYVLVPEQGAAQEVAPDPAPDPAPEDLPSTALEGKPRNPFEMNTSSLEDMVAGVTWPSILPSGWTVEWDPSSAEEEHEE

SEQ ID NO: 70383 - protein, 210 aa, Zea mays
  Coding DNA Sequence Number=SeqID_27008
  Subcellular localization annotation: CTP_CleavageSite=68; ConfidenceScore=5.20e-01
MVPGRTRPPEGSRSRSRSRDANQPSKPKSGPLQSAPTECGRNWRDACRRHATAPSGRTSPTSNEPSMEAQAHAPCNRGAGRCARATAPPPAPLSRLLDCGTSTATRGNPTCDPAAPAWRDGQCGQNGPTVMAVAGGQEQRSRRQPSLRPIRGQRENPLSRREDDAPVFRSSNGSCTRNGCPANRSPRRINSAAGQAAPLVGEASDASPLP

SEQ ID NO: 70384 - protein, 549 aa, Zea mays
  Coding DNA Sequence Number=SeqID_27009
  Gene Ontology: Mol. function=nucleic acid binding; Cellular component= nucleus; Biological process=mRNA processing
  Homolog annotation: Hit_ID=Q6K7Q7; Match level="QueryCoverage=96%, HitCoverage=96%, E-value=0.0, Identity=62%"; Hit description =Putative splicing factor 3B subunit 2
  Pfam annotation: Domain name=DUF382; Domain location=171-299; Score =312.2; E_value=1e-90; Accession=PF04037.4; Description=Domain of unknown function (DUF382)
  Pfam annotation: Domain name=PSP; Domain location=307-354; Score =91.0; E_value=3.8e-24; Accession=PF04046.7; Description=PSP
  Pfam module annotation: Pfam domain module=DUF382::PSP; Domain location=171-299::307-354
  Subcellular localization annotation: CTP_CleavageSite=36; ConfidenceScore=5.36e-01
MAAAAEVDPSPNPPPTTASGLSKTKTREADRRRRRRSKAKKNKSVTEADAQDADGGASSSDAKENADPNPEPQVEVEIEYVPEKAELDDPLLDDFKAIFEKFTFKDAAAAAAEDDKKDEGAADATKKGSLDDDDDDEDDEQEANKKKDGGLSNKKKKLERRMKIADLKQICNRPDVVEVWDATAADPKLLVYLKAYRNTVPVPRHWSQKRKFLQGKRGIEKQPFQLPDFIAATGIEKIRQAYIEKEDSKKLKQKQRERMQPKMGKMDIDYQVLHDAFFKYQTKPKLSSHGDLYYEGKEFEVKLREMKPGMLSRELKDALGMPDGAPPPWLINMQRYGPPPSYPQLKIPGLNAPIPPGASFGYRPGEWGKPPVDEHGRPLYGDVFGVLQQDEPNYDDEPVDRSKHWGDLEEEEEEEEEEEEEEEPMEDEEMEDGIQSVDTISSTPTGVETPDVIDLRKLQRKETDKQAERPLYQVDLLKNQKSDKVDVTIQPEELEAMDDVLAAKYEEAREEEKLRNQKEDFSDMVAENAHKRKRKQEKEGKSKKKEFKF

SEQ ID NO: 70385 - protein, 155 aa, Zea mays
  Coding DNA Sequence Number=SeqID_27010
  Subcellular localization annotation: CTP_CleavageSite=35; ConfidenceScore=5.46e-01
MTRARAYKTLPDFDCTLPRTLTPHRSLARRRLPVRSVSATAQSLCHRRPASGAIPNSVQLSEKTVHTSVKLPEQGIGVCFAGEASPRSPELSTPPDSSWFGRYTRRRRGHPPARVDRAILAIPDVKPYLDVTARVSPSQPHPSPDLPRRRNFENS

SEQ ID NO: 70386 - protein, 17 aa, Zea mays
  Coding DNA Sequence Number=SeqID_27011
MASTSVGGTGGGFEKQP

SEQ ID NO: 70387 - protein, 123 aa, Zea mays
  Coding DNA Sequence Number=SeqID_27012
  Homolog annotation: Hit_ID=Q6JAD6; Match level="QueryCoverage=29%, HitCoverage=4%, E-value=1e-07, Identity=75%"; Hit description =Putative uncharacterized protein
MSGAPAGRADLFLCCPIRRFTGQLLCAVCSWRFPPPLHQRRWSPAVGFGELLKPESVFHLSPVVKLCDLACSLARLLLCLDLLSLEKMVQAKNVTPLGGGDDEDPPCPFRQVKGKTVYLEQQE

SEQ ID NO: 70388 - protein, 122 aa, Zea mays
  Coding DNA Sequence Number=SeqID_27013
MDGQVTPATMSSREPVKLCHKQGEYNGSSSLISCEKQTIRIEFSSLQVTALVPTITGMGDHVSGRVRGYVHCQILWGRLWCWIRGYLLSNSLLRHEDFAERSPELWASSGEFGVGQRMQRGS

SEQ ID NO: 70389 - protein, 158 aa, Zea mays
  Coding DNA Sequence Number=SeqID_27014
  Subcellular localization annotation: CTP_CleavageSite=35; ConfidenceScore=5.13e-01
MGRFGEGWGWLWEVLAVTTRYGSTMVNPRARGASRGAKESTRARNRRITHRGARSTFAGGRVKSGNLDPASPVRQGLIPRSGSFTEACRVYFEGWIGLGMALLAGLRWRGIGRPLARRVQGKLRRSRAPVIKLLTLWLRVNSWFAHLFNLSLNQGSGS

SEQ ID NO: 70390 - protein, 180 aa, Zea mays
  Coding DNA Sequence Number=SeqID_27015
MTSHGSSEGGNAHSHTDRLAREGFPRILWEVLQGAGYTTPPQYTVQLFEKHRVPRCRVRMTLEPHPLQSGWRSLDSESFGYRAEDTIEAIALHGLTTFCGFHPLELSTRPIDLFPAEKEDDPMWKDRVEHAKCWGLVLKCYESRTRQHKILNIEGPSSSKSLFPFGHNESRTKVMKDVPS

SEQ ID NO: 70391 - protein, 36 aa, Zea mays
  Coding DNA Sequence Number=SeqID_27016
MESHDLRAEWESRLVGKEEGAEADLQEFQDFGEFED

SEQ ID NO: 70392 - protein, 55 aa, Zea mays
  Coding DNA Sequence Number=SeqID_27017
MPVGGLLFLRSPAVVVVHPGEKPRVLRGEEGKLFNARQCAELCTNRIANVLTNTD

SEQ ID NO: 70393 - protein, 125 aa, Zea mays
  Coding DNA Sequence Number=SeqID_27018
MSSSPPPLGGLTAAVVAVVLRRKEYHVVAAVEGHELETPETKQRPGLERLLETTHLELDGKLFVNTQQTPTWRANCRRFDPGGSLDRRVKLSLRVPAQMGRREMEYKGERTAARVILRLGRMRLQ

SEQ ID NO: 70394 - protein, 81 aa, Zea mays
  Coding DNA Sequence Number=SeqID_27019
MSPSEAGPDPAEGGNNAEGAVVPSVDDLFVGSRITYPSESYLSRKVMSEDPAIEAIKKRERCSGRKTFSEENFDAEGVPPF

SEQ ID NO: 70395 - protein, 101 aa, Zea mays
  Coding DNA Sequence Number=SeqID_27020
MQVACNCTTGMHPSGFDASNMEAQAHTSCNRRIGYYVRKTALPLAPMPRLLDCGTGAATRGNPAHAPTVPTEHIGHGSGPGKGILRKGSFSTKEAGPEPSY

SEQ ID NO: 70396 - protein, 175 aa, Zea mays
  Coding DNA Sequence Number=SeqID_27021
MNFAEDARRPERRKKHWLRGYVANDVAVTPVNHGGFREGHGDAVKRLGHAAHGREAAVDGEPIGFPPRQLCAVVGFTFPAGLIHGNAHQVLSTYPKLKLDRRRHESRRKSVAGGKSSRTGVLIHSSLLFHGKPYAEHLTERVESHFSLHFSIVTQVKLCSKLVEMVPTTNLLWQS

SEQ ID NO: 70397 - protein, 140 aa, Zea mays
  Coding DNA Sequence Number=SeqID_27022
MGSTDDGETQTHDKGVAQAHDIAWYGEGAVHGSVDKPRGWGTGRRHGWVVRRRRTAVPGAGRMLARRSNPLNRDLAPEIQEEVGNKIRRSRPSGTLPEDPLDRSIDTHLMRMQPTPILTDLEELEVANWTRARGKNSEKI

SEQ ID NO: 70398 - protein, 279 aa, Zea mays
  Coding DNA Sequence Number=SeqID_27023
  Gene Ontology: Mol. function=cysteine-type peptidase activity; Biological process=proteolysis
  Homolog annotation: Hit_ID=A2YCU1; Match level="QueryCoverage=100%, HitCoverage=31%, E-value=7e-28, Identity=31%"; Hit description =Putative uncharacterized protein
IKGLQRQIDMISQRKELKDHRWPDLQVAFLPLREIDMGYTKQTDSSSCGLFLLNYIEYWTGDELSDSFIQDDMSHFRKKMAAILLSSDLNKRRGCLLYKNEKEVDSGSPSDVEILENPTDSKKRKLLHVLDDSEVVYEDEEGPITQADLQRWFVDDWDKRAHIFVMLHYRMTWVRSFNPFKIEISVKDLQNILTINQDMILRCFDMAVRLLANKESRRPKGEIINNRKHYMDMRFWRMVGFGKLPKHHQDPTTEELAKTLDCWPSMNYYITGCRYVLMP

SEQ ID NO: 70399 - protein, 182 aa, Zea mays
  Coding DNA Sequence Number=SeqID_27024
MPAGIIHTRPRLYCRQNTNTEIRRTNKEEAKKATIARDDRFPYNMQSLLIAEQEPGEHEHLADDGEEREDGQIPRPLPPGPIYALGLGVEVLGPTQRVHLLEQVKVEALVLELGDTPGQEQRILALPCKEAFQVDLHVGLVPLSPEHGERGEQQDEMGDPRSLHGATEAVKEERKRSRTEVA

SEQ ID NO: 70400 - protein, 305 aa, Zea mays
  Coding DNA Sequence Number=SeqID_27025
MAPPVDVVGPCPRLGEVEAPPRSSLSSKVEVESEPPGRTRRRLAEPESEPWGRAKRSSSSSGAEPESEPWGPAERSSSSSGAEPESEPWGRAERSSSSSRTEPKSEPWGRAKRSSSSSEAEPESEPWGRAKRSSSSSGAEPESEPWGRAERSSSSSGAELESDPWGRVKRSFPWRLGPDLAAVSLTLSSGSAVGAAQAALSSCQTGKRCQATFALNAPAIWSVGVAIWPRLLLGEDWASGEPKLCADGGYQLRFRSLEGTPNYGPRHVVTGESRGMHACDLAERVLGRDIPGHEIRPGSAFCWDP

SEQ ID NO: 70401 - protein, 382 aa, Zea mays
  Coding DNA Sequence Number=SeqID_27026
  Subcellular localization annotation: CTP_CleavageSite=64; ConfidenceScore=5.52e-01
MAAFQGGHPPFKGDSPYLRPQPSRAESSPTRSKVLPLRHGGWAHASCKLVQGRRSQTATRRACNCPAVTSIPPLSSRPAGGQEQRSRRQPSLRPIQGQRENPLSRREDGGASGRRSKRRFAFTIMTASKKGPGKGDTPKRTLLHEGNRPRASLLIRGSKAGPSEGFNGRLRALGFCAHYWSEVRWPAPQKGSMAASGHSGSAPTTDQGFVGWPSKGSQSPQTQSEELPWVRSIHNQGSGYAPELTGDTMFGALRGQHGAFPPSSLRKGDAGAVACAAPTAEPLDRVRLTAAKSGPRRHGKLRFARPQGSDSGSTPEDDELRSARPQGSDSASAPEDDELRFARPQGSDSGSAPEDDELHFARPQGSDSGSAPKDDELRFARP

SEQ ID NO: 70402 - protein, 215 aa, Zea mays
  Coding DNA Sequence Number=SeqID_27027
MECGRFRMLKVYLGDSSMRLGVPFIAPRQLGAAGGISGRQFLSSVGWRTGQSGAPPDIHCSLSGADRLPFLAQPTVGSSGWLAHQTLSGAHRTVRCPQPTVGVGHASRANCAADRCPGGRWLIGQSSAPLDSPYSHSRLYGQSLNLNSYGPNPRVMMAGEHREDEEGECFVRFGHGGGLTPSGITVKQLKTSFLLCSTRRGLCDCVCTQSAYGLG

SEQ ID NO: 70403 - protein, 62 aa, Zea mays
  Coding DNA Sequence Number=SeqID_27028
MEEFYGGDAAFWDFGYGRVQLAGTVSNPRLKEVAPAARYDHKGQQSRGDRGIRAPRRRSYPI

SEQ ID NO: 70404 - protein, 263 aa, Zea mays
  Coding DNA Sequence Number=SeqID_27029
MTVAGGREQRSRRRPDSRPVRGQQENPLSRREDRAPVIRSSNGSRMRNGRPANNSPRRINSAAGQAALLAGEAGDASPSPDRERGIPRKGSFPVKEPGFEPPLLIRGSKAGPPRGSTVASDRVGPTPTTGQRARTRAKPRKTANSAPPNPGLGLGLSPGRRRTPLRPTQGSNSGSAPEDDELRFARPQGSDSALASAERPPPRPTQELGLGLGHGRQTRPRLRRSLHVARPRAQARHVNRKRHHHPAPSRLGPQRTKTDVPSG

SEQ ID NO: 70405 - protein, 83 aa, Zea mays
  Coding DNA Sequence Number=SeqID_27030
  Gene Ontology: Mol. function=helicase activity
  Homolog annotation: Hit_ID=Q2QP80; Match level="QueryCoverage=98%, HitCoverage=15%, E-value=2e-10, Identity=35%"; Hit description =Putative uncharacterized protein
MAEVLISNLMIGNCSDRLCAGSAHAQIYPPLTDVFKPLIKEGNVYNVSYIQIKKANRMYKHVDNDIMIGFTKWILCCLNKPAV

SEQ ID NO: 70406 - protein, 175 aa, Zea mays
  Coding DNA Sequence Number=SeqID_27031
MYSTSYCTHLHPKPPTRELEFGISPKPVEEHREPKLTVESSPQEPANRLEHEHLSAPFTVLAGRAWQITNEREEEIEVTEDRTPPPSESQAGDCFYFDICGSEPDSPVNEGKPRRADRGPFNWSHASSWHTLESLFLSRVRKRQIFVAFAPRWYQMKKNKTEVREDLVLHIGSFA

SEQ ID NO: 70407 - protein, 118 aa, Zea mays
  Coding DNA Sequence Number=SeqID_27032
  Subcellular localization annotation: CTP_CleavageSite=20; ConfidenceScore=5.63e-01
RPYLLRACSSIHFSCRASLRSSSSSVGCSSLATRAPCFSLLTLPVELPGRRAVELPQLAPPVPRASPWFGSTPPCLPFLSPCHGVRRQSELAHPLLGFNLVVPAASPIVSSLHCPRFP

SEQ ID NO: 70408 - protein, 69 aa, Zea mays; identical to SEQ ID NO: 53582
  Coding DNA Sequence Number=SeqID_27033

SEQ ID NO: 70409 - protein, 237 aa, Zea mays
  Coding DNA Sequence Number=SeqID_27034
  Subcellular localization annotation: CTP_CleavageSite=60; ConfidenceScore=5.60e-01
MVAFQGGHPPFKGNSPHLCPQPSRTESSPTRSKVFPLRHGGWVPRVMQTGPGQKEPKPPRAVRATAQRLRAFLHFRPGQRVKGRTTMQAACNRTKGAHPFDFDAFSMRAQAHTSCNRRTGYYVRETAPPLAPLPRLLDCGTSAATRGDPTHSPTVPTEHIGHGDRERGYSERDPSPRRKRAPSPPTDQRFEGWPLGRVQQPPQSARAPRPLLVRGSKAGPSEGFNGRLRPLGLRARY

SEQ ID NO: 70410 - protein, 130 aa, Zea mays
  Coding DNA Sequence Number=SeqID_27035
MGKSNKRKREPTPPSEDFGDSEYSEEEFFSESEGSPAPVSPPASSDNSDDSLGIAAEVWTYIRAVERSGLEGSDESEYSSGEEDSSDSSEEGGGGDGGDDDDDDDDGGDDDDGGDGGNGGSSRGGNRASG

SEQ ID NO: 70411 - protein, 81 aa, Zea mays
  Coding DNA Sequence Number=SeqID_27036
MAQTEAAFSIDDTKDPSDEATLMGRKFYNDIWVAVVEVVGAEATKPVNDLLKQQKLQDDCPHIQNSDLAHSCSMVLVLTIE

SEQ ID NO: 70412 - protein, 243 aa, Zea mays
  Coding DNA Sequence Number=SeqID_27037
  Homolog annotation: Hit_ID=Q6QP51; Match level="QueryCoverage=89%, HitCoverage=85%, E-value=3e-14, Identity=30%"; Hit description =Putative growth-regulating factor 1
  Subcellular localization annotation: CTP_CleavageSite=20; ConfidenceScore=5.19e-01
MMTASKKRATSPPTDQRVRRLAPRKGSTATPEHSGSAPTTDQRLAPEGFDSCLRTHRARDDSGYVRYMAKARATLPRGSGAAIANPALAKPLTASTYQPENLEPDYAPGLRPVKAPSTQGTRSRLTRAQPRTGTVDPGGFTPRPRASSSNGRTFDSPEAQLGQASQRSNLGQIASPTDRIAGAFNARIAWHLILTRVPQSTGPKARTQPRPRKTVSASPDPRARTQPRPRKTVSALPDPRART

SEQ ID NO: 70413 - protein, 83 aa, Zea mays
  Coding DNA Sequence Number=SeqID_27038
MGNAEKKEKAESECRGIAAVGGGEQSGGVRGVVLGESPLCPGGDSSGASQERRAGAPSSPLNHKASVAPPRDNLFEPGRRTVD

SEQ ID NO: 70414 - protein, 41 aa, Zea mays
  Coding DNA Sequence Number=SeqID_27039
MEDEFRELKAEFPKEEDYEIQEVVSEEESASVPARPVMGAI

SEQ ID NO: 70415 - protein, 112 aa, Zea mays
  Coding DNA Sequence Number=SeqID_27040
  Subcellular localization annotation: CTP_CleavageSite=68; ConfidenceScore=5.17e-01
MAPEAGLGCCQPHSVEWHSSRSDAGGAIFLSGRRSGCSLMRTGRSPGAQSSPKFSGWYVDAVNCWGPSASEGPQKQDLTVFLEYNVRTGIFGLKSGITVDQNNTKVGEAPKV

SEQ ID NO: 70416 - protein, 69 aa, Zea mays
  Coding DNA Sequence Number=SeqID_27041
MDIKDIKTFNGGDEYYKAFFAEIWDKGGRQLSTSKVEAYTQKRKYAKRKVIILELYIPLGTTSKLFHLY

SEQ ID NO: 70417 - protein, 153 aa, Zea mays
  Coding DNA Sequence Number=SeqID_27042
MDQLLVKGQDIKKWQRIQESEVKEAFNRMKEGKAMGSDGIPTEIYVAWCKSSIVFGGGKKGGSKGGEPKVVDFWTVLRDLPKLPFRRDLMVRPYRYIEHHMLPEKGHLISPLGKEGCSSTTTTPLIKEPLLNNVVNQGGSCLENFYVLASLGG

SEQ ID NO: 70418 - protein, 93 aa, Zea mays
  Coding DNA Sequence Number=SeqID_27043
MVSWFGSSGCRAAAPVAEAFFGGMTKLRRCVNLRILCASHIVVRFLAFGRYLFMYYTPEALLNHVFEDLRKTKAPNRYSGHPKSSKSEHVAPS

SEQ ID NO: 70419 - protein, 167 aa, Zea mays
  Coding DNA Sequence Number=SeqID_27044
MGKSKKGGSSSHHSGDKRKHEPSPPSEDFGDSEYSEEEFSSEFEGSPVYASPPVSSDDSDNSQGIATEVWTYIRAVERSGLEGSDESEISSDEENSSDSSEEGSGGDGDDEGDGGDGGDGGDGGDNGDGGDDGDGDGTGEGDGGKGDGGSDKGDGGSSEASGKAPLA

SEQ ID NO: 70420 - protein, 56 aa, Zea mays
  Coding DNA Sequence Number=SeqID_27045
MVKNFGRKTVQIAMNAVVTSHLLVCLYSAAALENKFPTTGISAELMVKSGLGILFD

SEQ ID NO: 70421 - protein, 132 aa, Zea mays
  Coding DNA Sequence Number=SeqID_27046
MPPTPPQGIPATRGYPDGDNDDTGGSSSHSMELSEEQEPKGWIARSITRDVARGCHFHDALDTLMRWAFDRYTWSIEYRCVVYQHRRELYPDQWEDTCLVRRPIDDLWGAEAFSEHYSITKMDTAGYGIIQL

SEQ ID NO: 70422 - protein, 51 aa, Zea mays
  Coding DNA Sequence Number=SeqID_27047
MPLIKVYNIDSDPYGLKDVIVDINPQFITLNQRSKSDKYHKNKHSSSQILI

SEQ ID NO: 70423 - protein, 159 aa, Zea mays
  Coding DNA Sequence Number=SeqID_27048
MGMHSGPYKGMYSRVDRDLPARPWSVACMFGRGLVVTCLVLADAGRVYLTGTSASPSYLVGTWSFGPPRRVARSLRLVEWLNETWSVALAHRVAWQGPSRRVLWWRQEAVVAAAGEEEAAAFEEKAGVQSDLAASSFFGGSDAAGSFDVPPTGIRVFVE

SEQ ID NO: 70424 - protein, 352 aa, Zea mays
  Coding DNA Sequence Number=SeqID_27049
MSFPLPAAVATCDLPSVPVVLTRCATLLGFPLCMRAEHHQPPCCLPIHGRRSPDLAPWLSCACRRVVIRLVYVHGVHSHGALRPRLLCPRRSRAVISPIIPSASWTLSAPCCLVPARAQTPSARLRLPARAPASYAARREQAPRCSASSPSPAPVSPAVSPVPSPNSPPSSLRAQPELCSPAPLRCAPCACAAERRAGYCAVFCPMSSLARFLFLCSIVHRMSSLLPIVPSIPLEPFAFIEAPWLDSAQFASCSSLRRARSVPLFLRVLLRSSLFSLFCRVVMRAKFSAHDCGRVHRIRNALLLIRLSSFRAPARNPKNRVKTKLVARYSPSARQIAWIGKSLPISWIRVSR

SEQ ID NO: 70425 - protein, 92 aa, Zea mays
  Coding DNA Sequence Number=SeqID_27050
MSAEPNAGETKVTRSRLAGDLRQGSRDIEIRRLAGTGSGEARHRRNKVVRCQQWLEHGHAASMHRYHASSYPQLNNGTDDSKEIGREVTDSG

SEQ ID NO: 70426 - protein, 49 aa, Zea mays
  Coding DNA Sequence Number=SeqID_27051
MAHEAGLGGCQPHPDRWHISRSRAGDAIFLSGEEQVVQEEPHIEEFDLI

SEQ ID NO: 70427 - protein, 247 aa, Zea mays
  Coding DNA Sequence Number=SeqID_27052
MGGSGTATWPEKMIYSKVSTVGPDPHGKVSDPYIYRPDLRVRRSPDAATWHGARDVSQRAGPDVRPLGYAASAFIADKARCLSIPLAGDVPPLHLLSPAHSIGRRCAASAFNVTCPFRWQAATCPFRRRHVCAFHWQAVRPYCRVHYAHHYSHVTKEAAAAYQYCMSCGHQHAWRLLRRYLVTPTMYFFHFVPGPTCRGSASLYVPPLSYKREGTQRYRADPTQTLRLTSPYKLSSSQIQYNTQTVE

SEQ ID NO: 70428 - protein, 117 aa, Zea mays
  Coding DNA Sequence Number=SeqID_27053
MLRLEIFKCFLRCLHRLGAWCCLRRLELADPLFQLFLLLLRLELMLGQQIIPPFKHFLPKGEVLLPPGEIRRPLIQGRILLLEVLLDQGNVAGLVLQLPLPFEDPLHSRGLLDPLLF

SEQ ID NO: 70429 - protein, 293 aa, Zea mays
  Coding DNA Sequence Number=SeqID_27054
MRHLWQAKQATLHLRHDDHVKKGTGKGDTPKGILLRDGNGPRALLLIRGSKAGASEGFDSRLRALGLRAHHWSEVRRLAPRRGSTAASDHSGSAPTTDQGFVGWPPKGSTAASEHAERGMTLGTTDTWPRLGLRSRGTLGISETRRSDSVTKSHQREASSPRTLSNGSGSGKSPAGSGAALANPALAKPLTASTYQPENLEPDYAPRLRPENSVACPAPTAVPPVRVRLTATKTGLRRHRKLRLARPQGSDSTSTSNDGLRFARPLGSDSASTPEYGLCLARPPGQGLRLDLG

SEQ ID NO: 70430 - protein, 346 aa, Zea mays
  Coding DNA Sequence Number=SeqID_27055
MSRPRIPTAPAHSGLARRPLAQPQIRAEAKTGSHVIVFIIVVIVIVVIIRRLRRWLPWEPVPLLPPMMPFQGIPSPRPLAGPSFLRVLLLLLLRSDPPRGSVHHVLWDRWQKRLVKPHLLETDENLSCENPRAILHKKEEGADTHQGYAPALRAHRGLGKSTGVQLSYRGGYPPMEVIGGEGDRGHLRTLQVDPQHHLRKRQSPLHQGEHPPGMDGGNHPRGGEPSISQLLQSLQKGLEILLSLARGPIAPVGAGGGHHSLRKRWEPPLVVPKVKPPALPPLVRRGKDGGDVLLRTRLPQLKDAATGPHRHANSPLPRRQGKRLRGEEMGPQIPVGVNPQTLCKPP

SEQ ID NO: 70431 - protein, 145 aa, Zea mays
  Coding DNA Sequence Number=SeqID_27056
MASSSVGRTRTASKLLYTASCYPAEDGMGGHDERHQIRLSYPVNRFGDSPGERFASFYNDKMLVIGILIANHSQVMEDQTTKKMAQDKSHIHPLNVIKVTMEDLTEADMKELEEEVAQEMEESQKEKLACFRKTKNGAESRLEWG

SEQ ID NO: 70432 - protein, 207 aa, Zea mays
  Coding DNA Sequence Number=SeqID_27057
MAPTIQWWRHGRVAATRRFWPRIEQTRFATHLMEDCEARGSIHTVVLGVGGTIRGEQWIGDTVLAHGHSAAYATSTGERALVCDLAERWHLGPPNVLAMISPPASAQVQGGGAHDDLSMCAEDEGAGLPSAQQTEEERATVVILGQELVAQAQVVVCQRNGHVSLNAKATHRLPVEWAGLNKCRGGTLPASGMDRRHALSTINAEAA

SEQ ID NO: 70433 - protein, 88 aa, Zea mays
  Coding DNA Sequence Number=SeqID_27058
MDRPTPTIPDGNSHIAVIPETSPTSSTTSPEQSRRREYVLIPEQGSVQEEDQEQASEAAVEDLPVAPAIEGKPRKDALSMRRENGNKD

SEQ ID NO: 70434 - protein, 205 aa, Zea mays
  Coding DNA Sequence Number=SeqID_27059
  Subcellular localization annotation: CTP_CleavageSite=51; ConfidenceScore=5.12e-01
MDEGCTQPLSSDPMINLNTMVFSFRVYLSFAREYPQFGVSRPYNLRSQKKSQSKGVSFIALRQLGAVGGQLGRPNLPSIGWCTGQSGPPPDSHCSCLENNTIHPVPTTVPTTRVKPTTVSHDLPRVQPRKQQGAPPCPTSGLSLSLGRRRRSPPRLTPGLGLSLSLGRRSPPHPTSGLGLSRSHILARPQPRTDYATRDTSLPYR

SEQ ID NO: 70435 - protein, 139 aa, Zea mays
  Coding DNA Sequence Number=SeqID_27060
MSRGGVRRDTLEQTTTTRWAVAQGEAQLRLVLPSWGFPPCQILPYRVTKSHSPLSMQVRKGAQVSAIRWRSIFSGRQRTVAVAHEGPIWFYQGIITGKECQGTSSRPPVEDELEELSRVEDCLWALDAEHTTLCVSINM

SEQ ID NO: 70436 - protein, 276 aa, Zea mays
  Coding DNA Sequence Number=SeqID_27061
  Subcellular localization annotation: CTP_CleavageSite=82; ConfidenceScore=5.04e-01
MTSGQTLLRQGPRPRPHSRGEDKLSKPKSRSTNDGSHLPTNTAPASTDRPKAHRQGPPPTTWGLGPTRHASWPGTEEAKPPHAERVTAPRLQAHLHPRRNQRLKGRTATQVVCNCTTETHPFDFDASSMEAQAHTSCNRRAGYYVRETAPPLAPMPRLLDCRTGATTRGNPAHGPTVPTEHIGHGSVSRGRRHDGRCGQKWAGSNGGSRRAEAAVKSSAGSRPLLEQQGSPLPWREDDAPVFRPSNGSHNDRPGPGKGVFRKGSFSVKEAGPRPSY

SEQ ID NO: 70437 - protein, 43 aa, Zea mays
  Coding DNA Sequence Number=SeqID_27062
MEKDTLECDICCLPFQSEVFMCKNGHSGCAKCCIRMDVRLLYL

SEQ ID NO: 70438 - protein, 107 aa, Zea mays
  Coding DNA Sequence Number=SeqID_27063
MYLSMSGLALSELSYFFRQLCAKELSRIVVADLERLAPMFSLSNGQRDPSMSAELRQVANDFAYRVKKYSGFLDKYGGRLAEEEEGEEEQDGGRGRTGRGTSGGAAG

SEQ ID NO: 70439 - protein, 121 aa, Zea mays
  Coding DNA Sequence Number=SeqID_27064
  Subcellular localization annotation: CTP_CleavageSite=36; ConfidenceScore=5.58e-01
MAPRPAANHQATAKQGAKHLGRPSGAPSARAPRPPPAAPERPTGRQAEQSFNSVPDRVFLIQVAASKTKIYMVLELVNGGELLDRIAAKANESPYASITQRYEVWSNHVEKIPLILTDFTD

SEQ ID NO: 70440 - protein, 142 aa, Zea mays
  Coding DNA Sequence Number=SeqID_27065
  Homolog annotation: Hit_ID=Q6QP51; Match level="QueryCoverage=90%, HitCoverage=41%, E-value=3e-25, Identity=54%"; Hit description =Putative growth-regulating factor 1
MPPARVRLTAAESSLRRHKKLRLAQPWASASGEVSASPDPRARPPPRPQKVVSASPDPKARPQPRPRKVVSASPDPKARPQPRPRRVVSASPDPRAQPQPRPRKESRPRPTPTSASGGVSASPDLGLGPTMPQGVHHYPTPS

SEQ ID NO: 70441 - protein, 159 aa, Zea mays
  Coding DNA Sequence Number=SeqID_27066
MANDDRVEDVVTQTRTHVEAPISFGPWPNPALSIAGIIYIRQSQQGWIHHEYCHWYHPLVYFPATAKGSSLPGLRQYPFLCMMSILSRPMHHHIFWRRSRHRQSLDGVPPGGALCGGADGPRPGRRSSVFPASHRTIHSSRSDGPQLGDRIVFLLLARI

SEQ ID NO: 70442 - protein, 76 aa, Zea mays
  Coding DNA Sequence Number=SeqID_27067
MEGKPSRERKSELKRVSPPLAGVGEFICGRESKYKGSSSLISCEKQTIRIEFYPCKWGSSGYKSTGFLLSILGLVL

SEQ ID NO: 70443 - protein, 157 aa, Zea mays
  Coding DNA Sequence Number=SeqID_27068
MGKNNKRKREPTPPSEDFGDSEYSEEEFSSESEGSPAPVSPPASSDDSDDSQGIAAEVWTYIRAVERSGLEGSDESEYSSDEEDSPEEDGEGDDDDDDGGDDSDDGDGGSRGGNGGSRSGNGGSRGGDGGSSRCSNGGSSKCSGGGGSSKGSNKASG

SEQ ID NO: 70444 - protein, 90 aa, Zea mays
  Coding DNA Sequence Number=SeqID_27069
MDATVNSASETSHRAVGILVTEPPKVLDPPTDVLVLRTSDSHAEIAELSRFITYNNMGLKTLSTECTFASHTRQRKRLSRICWSLGIKVK

SEQ ID NO: 70445 - protein, 119 aa, Zea mays
  Coding DNA Sequence Number=SeqID_27070
  Homolog annotation: Hit_ID=O48967; Match level="QueryCoverage=99%, HitCoverage=21%, E-value=8e-21, Identity=50%"; Hit description =Putative uncharacterized protein
  Subcellular localization annotation: CTP_CleavageSite=25; ConfidenceScore=5.18e-01
MKQWPDDVDRLLGMAHSTSTRSRPRSSHRQHEATAFVRSPSVRGAQTDDLRAELNRRHAGEDAQVFLERERERRQNFEGREDARVSLERARERRQNIEGHNLDQDFAAVAPQTPVGAQF

SEQ ID NO: 70446 - protein, 122 aa, Zea mays
  Coding DNA Sequence Number=SeqID_27071
MSDLTTPRKPYAACARCQRFIYNYTKSTVWNTVDYSGQEKLFGKTGQARTVRALAADRPQHQDNTRTEPMQKSKSALRTVRRKSKDRLRPHADRPASGADRPARTVRTRRADRPRSAEWSNG

SEQ ID NO: 70447 - protein, 163 aa, Zea mays
  Coding DNA Sequence Number=SeqID_27072
MGRGKGWPRRADGKRKHPPSPPSEDFEDSEYSEEVSSEYDPSPALASPMASFEDSDDSMGLSIAARAYWRFIECAGLGGSDDSEETFSEEVEDFTDFEEWSDGEGDNGEGNGSSDDDDSEGSGDGDGEGGDGDDEDNDPEKATTMARATTTARATMTTARPTS

SEQ ID NO: 70448 - protein, 218 aa, Zea mays
  Coding DNA Sequence Number=SeqID_27073
MHKPDPWDGSELLIVGSRDSKTKNTQALIKARRGSGADTQYARAAAYTMLIITRTLPVKLPLHADTTQAVDIRAAGAFRHPAGDFLSDTIEFIALHGLTTFCGFHPLELSTHPIGLFPAEKEDDPMWKDRVEHAKDLMGLVESTKITLDNREDLVVDLSTELVENDLQVEQMATQIQELEEQVGARENTIEVLEDQLLTMQQQLEEANQHLDMHHQEI

SEQ ID NO: 70449 - protein, 293 aa, Zea mays
  Coding DNA Sequence Number=SeqID_27074
MALLDPPERLQPEVALNLVRNLLGWGAPAFVERICVGASTHNDLTTGGFMLFVSNHPVVVRGGDAPSRFFLQHSGGRMFPSLVKVDSGLSHGSIPHAPNPWGKAGARASSLMAHALRRPPPLAWPLKTSYKTSYAEEMAASRFQRDPTDVELMVRDQAKRLHGSGPPQETSQQAGLTRADLTGPAYTEVVTHGSAYFHRLEGSFPAGGDRFCMDPSEDWTLGESRRVSGGRQALAPWTGEYGVPPVARLAVTTGVGVSGDDILQDPLGWASTLCCWQALAKFAVNRAQRSSQE

SEQ ID NO: 70450 - protein, 81 aa, Zea mays
  Coding DNA Sequence Number=SeqID_27075
MRSWSLEGDAATPWPQKMPPEPLLTESGMSTWLYAAVQHAQQRCSSLGSWEPVGSGTFPWGSRPTVATLEYTIFPGHVEAL

SEQ ID NO: 70451 - protein, 448 aa, Zea mays
  Coding DNA Sequence Number=SeqID_27076
  Gene Ontology: Mol. function=catalytic activity; Cellular component =endoplasmic reticulum membrane; Biological process=metabolic process
  Homolog annotation: Hit_ID=Q8L4V2; Match level="QueryCoverage=99%, HitCoverage=87%, E-value=1e-147, Identity=60%"; Hit description =Fatty acyl coA reductase
  Pfam annotation: Domain name=NAD_binding_4; Domain location=3-271; Score=206.1; E_value=8.3e-59; Accession=PF07993.3; Description=Male sterility protein
  Pfam annotation: Domain name=Sterile; Domain location=349-448; Score =70.1; E_value=7.4e-18; Accession=PF03015.10; Description=Male sterility protein
  Pfam module annotation: Pfam domain module=NAD_binding_4::Sterile; Domain location=3-271::349-448
MQVIGKELFGLLRETHGKRFHSFIEEKVVPLAGDIIHENLGVEGPQLRRMTRELNVIVNGAATTNFYERYDVALDVNVMGVKHICQLAKQCPNLEVVLHVSTAYVVGEKQGMILERAFKQGETLRMETELDMDAELRVARDYQQQVAGDDAEQKNERKAMKELGLARARELGWPNTYVFTKALGEMMLARELGGVVPAVIVRPSIITSIHKEPLPGWMEGTRTIDAILIGYAKQSLSCFLADLQLTMDVVCIRCAHPCMGAIPGDMVVNAMMAATVAHASAPGGHKEESPTVYHATSSLRNPAPYAVLYRTGIRYFCDHPRVGKDGRPVRTRKVHFFGTVAAFTAYMLLRYRLPLELLRLLSLLSGGLLFSRLYADLDRKYRFVMHLVDLYGPFALFKGIFDDANMERLRMAMPVADRLEFNFDPNTIDWDDYFYKIHIPGVMKYVLK

SEQ ID NO: 70452 - protein, 175 aa, Zea mays
  Coding DNA Sequence Number=SeqID_27077
  Gene Ontology: Mol. function=phosphoprotein phosphatase activity; Cellular component=cytoplasm; Biological process=embryonic development ending in birth or egg hatching
  Homolog annotation: Hit_ID=Q6Z0R3; Match level="QueryCoverage=96%, HitCoverage=60%, E-value=2e-90, Identity=85%"; Hit description =Serine/threonine protein phosphatase
TRTTSSLLRGNHECASINRIYGFYDECKRRFSVRLWKIFTDCFNCLPVAAVIDDKILCMHGGLSPDLDNLNRIREIQRPVDVPDQGLLCDLLWSDPDRDSSGWGDNDRGVSFTFGADKVVEDGYEFFADRQLVTIFSAPNYCGEFNNAGALMNVDASLLCSFQILKPYRGKAQTE

SEQ ID NO: 70453 - protein, 218 aa, Zea mays
  Coding DNA Sequence Number=SeqID_27078
MSCRHVLGIDIDPQSLELAQENAADLENNLYTCMEEHVTHGPGFPARSSTWRDDSLDFISSSSVAKPQGIAASSQQPNWKRMGGDETIDIGEGQIRWRLGWGDQRHARRLLGVRRHKGCISHPDGWVRGWFRGRQERFRDGFREQRAESAGMAAAAAGSAEIGRFDGCYGNSARSRWGWRLRAESADVARSMAARTGMAAAGSAESVDRRMLRDRWVL

SEQ ID NO: 70454 - protein, 90 aa, Zea mays
  Coding DNA Sequence Number=SeqID_27079
MGRRETEREGGREPEGDGRERWNPVAFVFVPRPGQVGRGGGSSEVEVESVFQGRGRVRAPGSDEAETVGGCQGQVRALGSGGAEFVVFWG

SEQ ID NO: 70455 - protein, 253 aa, Zea mays
  Coding DNA Sequence Number=SeqID_27080
MIKGILGQVGIAVDRNNTKVDTEPKVNSIPVLFTLTWHSLFASRLYCHLLPIEVETLATINVETGPKLLKHHRREALGEDIGELRSSRDMKNSHNPNGDTLVDKVEVELDMLRALVLDEIGREVHDVDAVAVEKSALYQWTMELLKQLTKPRETWYSVLMLEQGTTGCCFEDHETRKVGPVGVGVDDKVDGRRSSKEAKIDHRGANVKGCLALSIHQSRTWLIVDHASVLEDVDDVLVEREICPWAISSCFDD

SEQ ID NO: 70456 - protein, 181 aa, Zea mays
  Coding DNA Sequence Number=SeqID_27081
  Gene Ontology: Mol. function=nucleic acid binding
  Homolog annotation: Hit_ID=Q53QR0; Match level="QueryCoverage=71%, HitCoverage=51%, E-value=6e-36, Identity=51%"; Hit description =Putative uncharacterized protein
MDNYSKVVEDACLDMLKVGQRQMRYRLKQKYFNGIPANHVRTTSPISSMSDEDWRKLVEKWSTPKHKDICMKNKRNREKKQEKYKDVEPSAIDLFKDMHCSKKKGFSENVKKAIVDMEAMVTTPVEDGQQQKSPMEVVSEVLGAPVYFYRMLVYKITPRKAPQQLFLQRFKNFRINWSLRG

SEQ ID NO: 70457 - protein, 47 aa, Zea mays
  Coding DNA Sequence Number=SeqID_27082
MTLLRLLTAAGKNQWSWLRKALRGRLPQPLRRENRRPTSPALSRRVL

SEQ ID NO: 70458 - protein, 549 aa, Zea mays
  Coding DNA Sequence Number=SeqID_27083
MNKRPAFKMPLQTELRFRPRSYEQPPHQGACGGTSSGRLASDLCSSSYGPRTDVATGRLSFASPLKGREPDIKAKERAAPKRTGSNSSPSPAWLEDASSAELGDGFHHQKLEEEVASRPVREVEPQLASLSAPARMGLVVTVLGDHRRGVQPGRLMKILEAKRWLKGAGSHASYKLAQGRRSQTATRGACYRPVVTSVPPLSPRPAGERAGSHAGGMQPRQVGAPLRLPTHPAWRPGPTRHATGAPVATCEQLHRHSCHYHASSTAEPVPRLEATLRTTRQCQQGAMVNTAKNGPAVMAVAGGQEQWSHRQPSLRPIQGQRENPLSRREDGAPVFRSSNGSRTHNSRLANHSPRRINSAAGQAVPLEGGASDARLRHNVRVKKGNRLRASLLIKGSKAGPSEGFNSRLRALGFCAHYWSEAGPRRVHSRLRHRARDDPGYVRYITKARATLPRGPGPVDHPQVLLSAPPDLKRPLTNGARASTRITRQQLTGDTMFGALRGQHGAFPPSSLRKGDAGAYVKKSSLSLTVLSPCAEARGLLSQTQLRPDR

SEQ ID NO: 70459 - protein, 49 aa, Zea mays
  Coding DNA Sequence Number=SeqID_27084
MGSARVAFVLLLLEERNFAEQLGERALTGLAEGADFDNAGSIGRKRRHL

SEQ ID NO: 70460 - protein, 51 aa, Zea mays
  Coding DNA Sequence Number=SeqID_27085
MAMLVTSEAVRVLDCITHRLTPCGRLPAQGRWKPDTLGPRVSGTMRPWSHD

SEQ ID NO: 70461 - protein, 449 aa, Zea mays
  Coding DNA Sequence Number=SeqID_27086
  Gene Ontology: Mol. function=hydrolase activity, acting on glycosyl bonds; Biological process=cell wall organization and biogenesis
  Homolog annotation: Hit_ID=A2ZLI7; Match level="QueryCoverage=74%, HitCoverage=89%, E-value=1e-155, Identity=78%"; Hit description =Putative uncharacterized protein
  Pfam annotation: Domain name=Glyco_hydro_28; Domain location=113-422; Score=-128.9; E_value=0.0099; Accession=PF00295.8; Description =Glycosyl hydrolases family 28
MVRDTMVLFMDLVTYDDDDAINDDSGYGSWYFLYEEEPCKVPTNPRWYPYAKASSRMLPAVFTIELLAETLRASFPPVALASMVAVLVLGLACAEAEPQCTRRRPPAPPRPHSVTITEFGAVGDGVTLNTVSFQNAVFYLRSFADKGGAQLYIPRGRWLTGSFNLTSHLTLFLESGAVIVGTQDVSQWPVVEPLPSYGRGMDLPGSRHRSLINGQNLVDVVITDSCSNMCIEDSSISVSHDAISLKSGWDKQGIAFGRPTSDIHISRLDLQSSLGAALAFGSEMSGGISDIHADRLLIHSSSRGVFFKTAPGRGGYIRDTVISDVQMEDVDVAIAFTGDWPSHPDDQFDPAALPVVSHITLKNMTGTRISVAGVLSGIAGDPFTDICLSNINFSLADSASPTSHWSCSNVSGYSELVFPEPCLDLQTQSSDASVCSTLPSFHAAAIAAA

SEQ ID NO: 70462 - protein, 271 aa, Zea mays
  Coding DNA Sequence Number=SeqID_27087
MTPPIEVVGPCPRLGDVEAPPRSRSSLSSEAEVESEPLGRVRRRPSAVAEPESEPWGRAERSSSSSGAEPESEPWGRAERSSSSSGAEPESEPWCQAERSSSSSGAEPESEPWGRAERSFLWRLRPGLAACQPHSVEWHNSRSGTGGTALLSDRSVERRSDCGHFGSVDRRARVRIKLCADGGYQLRIRSLEEAEHLLLGMTVSNGVQFSRNILLPAHQQQLRYQQPVFQDKPGACANGDRPRRRQLSGPPAALHGDKAKPMKPPPPPGPQ

SEQ ID NO: 70463 - protein, 196 aa, Zea mays
  Coding DNA Sequence Number=SeqID_27088
MEDLKKVHQGLDDRASSLALAEENLKEKDASLDKRAADLAWREKDLAFREEMLERRDKLLADYELEAEEKERALEEKEQTLGERVRQFEAAQAAQAAQAAQPASISDALPVLDSAADRLRRLGQILGTRLEAEGSRLCRSVIEYILTCFRSHDLAISMEPVIAGPVADMEDAARVGIQDAVDAVAKRFQRDPTDDE

SEQ ID NO: 70464 - protein, 165 aa, Zea mays
  Coding DNA Sequence Number=SeqID_27089
MASGQTLLRKGPRSRPLTRDENQPLKPKSQRGSLTYGDHHISSDDSDHLPTNTAPANGGRPNAHRQVLTPVLATGTRTGPSQNTSVAFALYDVLCDPPVQPEAQGGPGRGRPVHGATDTRTADGQPRSALVRVGYYVQGNRTATCANAASSRLQSQCRDSRHPCA

SEQ ID NO: 70465 - protein, 593 aa, Zea mays
  Coding DNA Sequence Number=SeqID_27090
MPSRGGQRVRSPAFALDLHGRDLAAFVREAEDGAARIVGRYVPKTEGLQSWDIRGANDRLNRVFELNCLPYDGYPGEDAADRRGKKPMGVTEEEPSQVAAPATKKRKLGTTVRGLGVSDSFSMELMGTCAALGGKMSLPELRESSAQMLEVTGGRWPKNVPIPHAAGEDFFTSRMARDLEVFPYGHNIAAVVSAVMNKDRQDAAQKRRAVVRLADPMCETKRAQGSAKTAAASGSSKPVPAAKPVVPGPSKASASAKTAASGGTKPPPGEPVKGRELPSPGRRVADFDTNISVEDYFVGSGEGQLVVVPPSAATTLPTAVVGAKGAAQDPWAAFCVSDEILSAAAAKDVAGSMSHRLREASQQLSQQLTQQLKQAADFADRVASGVLTADVAAKVESLRAQHADAVREKSAAESKNHRLAEKVAAMEAEKADLRRQLAEERREANQAIAKAQAARAEAKVARAESSLASQRTEEVEARFNALRSCVDKAEASTRSEVERTHAQLVDAYRELGVRTADFAVPDREASLRFLEWLQEELLVLPTIVEGFMSFASLVTCEGTMNALSREGCRALRGLRPNQTRTLNVKSSRPKTLW

SEQ ID NO: 70466 - protein, 72 aa, Zea mays
  Coding DNA Sequence Number=SeqID_27091
MLVMGDQGFNSIDFTTFQGSYMGLSCGEIHMELTVALLCIFCSGNHLTVVPSQEIILCIQGEQAKGYVLRPT

SEQ ID NO: 70467 - protein, 172 aa, Zea mays
  Coding DNA Sequence Number=SeqID_27092
  Subcellular localization annotation: CTP_CleavageSite=63; ConfidenceScore=5.31e-01
MKLELKDGNMTRGSTLLSTKLSGRTVRAGGPDGPPSAPVVRTAGNPSPAPGHRPSGPWSWTVRACAESTAAGSHAVIGAQKGTNTLLATPLGKTHINPSDRSSMAGSRDSSDVSPSNIIEPTWETLPADEQLQFEEHKEQLIQEAKAKFLANFKVDRNNKVVRQWTTDLASL

SEQ ID NO: 70468 - protein, 702 aa, Zea mays
  Coding DNA Sequence Number=SeqID_27093
  Gene Ontology: Mol. function=RNA splicing factor activity, transesterification mechanism; Cellular component=spliceosome; Biological process=nuclear mRNA splicing, via spliceosome
  Homolog annotation: Hit_ID=A7QIL5; Match level="QueryCoverage=20%, HitCoverage=14%, E-value=6e-82, Identity=97%"; Hit description =Chromosome chr9 scaffold_104, whole genome shotgun sequence
  Pfam annotation: Domain name=Peptidase_C48; Domain location=1-131; Score=-29.6; E_value=0.033; Accession=PF02902.10; Description=Ulp1 protease family, C-terminal catalytic domain
VFIPINIRELHWYLVVLNAKRREIQILDSLGSSLGHKDLDCVLKGLQKQIDGVSQYMKLKDHNWPDLQVAYWPWKLIEFKDAKQTDSSSCGLFLLNYMEYWTGVELSDNFTQADIKHFRPKLAAILLSSDLNKRKGCPLYKNKTNKSTEDNETDSSGVEILEPSPNPNKRKRSPPISPEDDPISLYFEEICAKEKNDVIPTPTSVNECGKDSLISGLSTKDMPVKKEDMIEFLCDYIMTIQDATILEAKWVRSFKPYRIDLTVKTLQELLNVNKDMPIDCFNMAVRILAHNEPNRLSLAKRRITKHYMDLCFCEMCGFDEESKSYKDPSAIELAETLTNWPQMNYYITLCKFVLMPWRYSTGYVLFIINHANKSVSVFNFTPIPEWCKDIPLNFFWEVMLLISKKYKAAYGVKRIGWSHDIYMWRHSIRPDAPIDLKGVNTGHFALHIMEWWESGLKAQFSMDGATLRRNLLIDLLTYEGNTYRFNIPVDIREYLDHIMFVADKVAYALTQGLKVIACIGETLEQREAGTTMDVVAAQTKAIAEMKDFTQSVSWTRFLAYDKGWRVRTDFKQYQVLKQNPFWWTHQQHDGKLWNLNNYRTDVIQALGGVQGILEHTLFKGTYFPTWEGLFWEKASGFEESMKYKKLINAQRSGLNQIPNRRFTLWWSPTINRANVYVGFQVQLDLTGIFMHGKIPTLKISLI

SEQ ID NO: 70469 - protein, 145 aa, Zea mays
  Coding DNA Sequence Number=SeqID_27094
MDRGMESDGDNEIDHLTTFEINNNVPATNSDKMTEGVDVGKQHQTNSTITTNGDDDETVLFKDDDEEEEYLFAGQDGEFGEDIEIDETQDAFTVNPDVPDLYDKTTDQAKDGGKRSFEVPSAREKVKEAEEPKAKGEEEGLQSQG

SEQ ID NO: 70470 - protein, 303 aa, Zea mays
  Coding DNA Sequence Number=SeqID_27095
  Gene Ontology: Mol. function=protein transporter activity; Cellular component=clathrin coat of trans-Golgi network vesicle; Biological process=intracellular protein transport
  Homolog annotation: Hit_ID=A2ZH90; Match level="QueryCoverage=72%, HitCoverage=28%, E-value=1e-61, Identity=82%"; Hit description =Putative uncharacterized protein
  Pfam annotation: Domain name=Clathrin; Domain location=131-273; Score= 100.0; E_value=7.3e-27; Accession=PF00637.11; Description=Region in Clathrin and VPS
MYSDFAVGSSINPSERTYPEEMIQTGISTIDVMNSIARGQKIPLFSAAGLPHNEIAAQICRQASLVKTLEKEKHAELGVDASIKLFEQFKSYEGLYFFLGSYLSSSEDPDIHFKYIEAAAKIGQIKEVEHVTRESNLYDAEKTKIDRLSDIEEFSNLVKYLLMVRQKARVTKVDGELIFAYAKIDRLSDIEEFILMPNVANLQNVGDRLYDEELYEAAKIIYAFISNWAKLVVTLVKLKQFQGDVDAARKANSAKTWKEFCFACVDAEEFRFAQICGLNIIIQPLYTAFHRYALMALNEELCQ

SEQ ID NO: 70471 - protein, 205 aa, Zea mays
  Coding DNA Sequence Number=SeqID_27096
MEVRCQTSFCQNEDGFPKLLRACTVRLRIRNQPEYDGHEFVEHGTEKCVVTVYIGSSLHHVEWSVTATGHRFKDTCQVVALVYLTAYLLTLDAQYDFLARHHRQMIARAEDAEKLNRKLHVDLTTAQAHATALESREVIAVEALKQAKDEHVQKLMEAYLVTHNQRRALRIQEPASSNPVQPRRAEDPQILEGHPVSIRGEKKSW

SEQ ID NO: 70472 - protein, 269 aa, Zea mays
  Coding DNA Sequence Number=SeqID_27097
  Gene Ontology: Mol. function=nucleotide binding; Cellular component =intrinsic to membrane; Biological process=defense response
  Homolog annotation: Hit_ID=Q52QI0; Match level="QueryCoverage=98%, HitCoverage=33%, E-value=1e-127, Identity=80%"; Hit description=NBS -LRR type disease resistance protein
  Pfam annotation: Domain name=NB-ARC; Domain location=120-268; Score= -126.0; E_value=0.031; Accession=PF00931.13; Description=NB-ARC domain
MAEAIILALRKIGSALADETAKKMLAKLSEKVNNLRDLNDKIESIRMQLTAMNNVICKIGTIYLTDEVVRGWIGEVRKVAYHVEDVMDMYSYHTLQMEEEWFLKKYFIKASHYVLVFSQIAEEVIKVEKEIKKVVELKNLWRRLTEWLYSDELDSTVITVSGMGGLGKTTLVTNVYEREKTNFSATTWMVVSQTYTIEALLRKLLMKVGREEQVSPNIDKLDVHDLKENIKQKLDNRKCLIVLDDVWDQEVYLQMSDAFQNLAMTSCWR

SEQ ID NO: 70473 - protein, 81 aa, Zea mays
  Coding DNA Sequence Number=SeqID_27098
  Gene Ontology: Mol. function=hydrolase activity, acting on glycosyl bonds; Cellular component=beta-galactosidase complex; Biological process=carbohydrate metabolic process
  Homolog annotation: Hit_ID=Q8W0A1; Match level="QueryCoverage=50%, HitCoverage=4%, E-value=2e-12, Identity=82%"; Hit description=Beta -galactosidase 2 precursor
MRSKTVSFLDNELREAFENKSPTVIVEAFFNAPDADEPLALDMSSMGKGQIWINGQGIGRNIHGKLTFESLYIHAMLAQKR

SEQ ID NO: 70474 - protein, 691 aa, Zea mays
  Coding DNA Sequence Number=SeqID_27099
  Gene Ontology: Mol. function=helicase activity; Cellular component =nucleus; Biological process=viral genome replication
  Homolog annotation: Hit_ID=Q1EPC6; Match level="QueryCoverage=79%, HitCoverage=35%, E-value=0.0, Identity=64%"; Hit description=DNA helicase homolog, putative
  Pfam annotation: Domain name=DUF889; Domain location=247-477; Score =355.9; E_value=6.9e-104; Accession=PF05970.5; Description=Eukaryotic protein of unknown function (DUF889)
MPSALRRLFATILVYCEPNDVAELWQRHLDSMSEDYHHSTQSKTHVQQMVLIDIRNILQSMGKDIKTFPLPAIIDIYDDSHGTDREIYEEESIEPTAEDVAMKETLNEEQRSAYDKILSVVDTNNDGVFFVDGPGGTRKTYLYKALLAALHSQDKIAVATATSGVVASILPGGRTAHSRFKIPLTIDDGAVCSFMKQSGTTKFLQKASLIIWDEASMTKRQAIEALDSSLRDIMGQPGLPFGGKTVMFGGDFRQVLPVVCKGSRAQIVAASLRSSYLWESMCLLKLVQNMRAYSDPWFAEYLLRIGGGTEEANHDGDVRLPDEVCVPYTGSDRDLDRLIDDIYPNLNENMSNTSYITSRAILSTRNDWVDMINMRMIDRFQGEQMMYHSFDTAMDDPNNYYPSEFLNTLTPNGLPPHVLKLKVGCPIMLLRNIDPANGLRNGTRLVVRGFQKKTVLMQFKRKQFPIRLSFAMTVNKAQGQTISNVGVYLPEPVFSHGQLYVALSRATARSKVKILAIPVTDEKKKKKKKKGVERNSAINGATYTKNIVYKEKNNVQYANLVYKEVLNPARSEVWTDITTPATSWPLVGYVVVPIADNFVEPVISMRLKISEAKAIFNQAEDKMRLLLAKNAKRLKYLDLKGAEAQKIDPIRNMVRKLSTKLRIYVRVITKVSKKINRERDEELWPQINALI

SEQ ID NO: 70475 - protein, 84 aa, Zea mays
  Coding DNA Sequence Number=SeqID_27100
MQPNFSKPSHPRPHGVHRRLKGSYRDLLVIFHDIAAIFSFVARAPCKQARLKVVVMHRHCHTWFWKLHLLITEYNGDNLVWGGL

SEQ ID NO: 70476 - protein, 141 aa, Zea mays
  Coding DNA Sequence Number=SeqID_27101
MWLRLHELRAFCYRAWRNNEGDKPDKVWALGPPGRDREWVEKGVSAHDTDAIVDITPQLITLNQRTKSGRLGLLFLKITLGAGFQSVKSTFVFRREKLWGIMCMSSRWGSCERQGLAFVARSIAQHTVDNQRRSGAAIAGF

SEQ ID NO: 70477 - protein, 146 aa, Zea mays
  Coding DNA Sequence Number=SeqID_27102
MGKSKKGSGSSPRSGDKRKREPTPSSEDFGDSEYSEEEFSSESEGSPALSDDSDDSQGIVAEVWTYIRAVERSRLEGSDESEYSSDEEDSSDSSEEDSGGDGGDGGDDGGDGDGSGDSGRGGDGGSKGDHGSGSKGSSKGSNKTSG

SEQ ID NO: 70478 - protein, 297 aa, Zea mays
  Coding DNA Sequence Number=SeqID_27103
PSGQPNHFGLWPPSRARCRCYPGAWVLATCVGFHRPAARRRHRGCATQPHAQIERASPSCHPAIPDSPSSVRPRPELVAPLDEPRTGELGQLPAHRAAAGRTTDGRRSVTSLPAHRAASARALTGHRAPCSQVPATEPGSRPHRAAARPSAVRAPSTPAPVHCSRRRQPCVQECSSLTPAHQVPTAGTPRRPPSSARRRGLVSSSKRQLTPEPSIRGPVVQLGNVVALPTMTVHLVWFTTISNFAHIIVMDNDSAMDVDDICDNNVSHEDEIHGSREDVNGNNSEHMVEDHVPAPSE

SEQ ID NO: 70479 - protein, 147 aa, Zea mays
  Coding DNA Sequence Number=SeqID_27104
  Gene Ontology: Mol. function=DNA binding; Cellular component=nucleus; Biological process=regulation of transcription
  Homolog annotation: Hit_ID=Q6ZI39; Match level="QueryCoverage=86%, HitCoverage=18%, E-value=2e-29, Identity=54%"; Hit description=Myb -family transcription factor-like protein
  Pfam annotation: Domain name=Myb_DNA-binding; Domain location=82-131; Score=23.1; E_value=0.0011; Accession=PF00249.22; Description=Myb -like DNA-binding domain
MKVQALISGSSQASGHRINLDTHVLNTRNEKIVRVPSEKQLAQSHRVTNVAGPVSNSKQLAHIGPSAGLLDPNGPSKKRKKPKAWSKEEDADLAAGVQKYGEGNWEDILHKCNFDNTRTPDQLSQHALSCHIAFLFMGLFGSLSNLP

SEQ ID NO: 70480 - protein, 270 aa, Zea mays
  Coding DNA Sequence Number=SeqID_27105
MRLGVPFIAPRQLGAVESILGRQFLPSVAWRTGQSGVDFFPVLAQPTVEDPEPLAHRTLSDAHRTVRCPLLTVGSATRHARITRPTVGPADCWLTGQSGAPPDSPVIYSRTPPTKPESSQFARASLAHRTLSGECWRHGAAAEAQGHDGATVAELQLRKNHSGEHGPAEPGREGAHQRVSREADGKVKLTIALDGVWAQRRPRNRQWTSAGGGRGSRFAWAERESWAEGANGRGEVGEQGAGFKRGAGARSWPKNAVMSASTVGSSWARG

SEQ ID NO: 70481 - protein, 159 aa, Zea mays
  Coding DNA Sequence Number=SeqID_27106
  Gene Ontology: Mol. function=DNA binding; Cellular component=nucleus; Biological process=regulation of transcription
  Homolog annotation: Hit_ID=Q6ZI39; Match level="QueryCoverage=69%, HitCoverage=15%, E-value=6e-22, Identity=50%"; Hit description=Myb -family transcription factor-like protein
MAAAAPAACKGKRKRHLSEDDVWLLLHRYHPGTILTALQEVAQHADGRRIDWRAVVAKSATGITSAREYQMLWRHFAYHHDVDESVDADDQPLDDDSDLELELEPDPNLTKEALCEASALAKEREAPACVAFALPFFNTLFYHDQVSRRVLAAYTCSVL

SEQ ID NO: 70482 - protein, 21 aa, Zea mays
  Coding DNA Sequence Number=SeqID_27107
MAAAVVCGQNVAATWGWLAMC

SEQ ID NO: 70483 - protein, 58 aa, Zea mays
  Coding DNA Sequence Number=SeqID_27108
MGAARRVGKVWAARGEPSEVGRVGGIKPKRRALHDLGLGLTTLLGSIITLPLASCLRL

SEQ ID NO: 70484 - protein, 471 aa, Zea mays
  Coding DNA Sequence Number=SeqID_27109
  Gene Ontology: Mol. function=binding; Cellular component=nucleus; Biological process=regulation of transcription
  Homolog annotation: Hit_ID=A3A958; Match level="QueryCoverage=99%, HitCoverage=59%, E-value=0.0, Identity=73%"; Hit description =Putative uncharacterized protein
  Pfam annotation: Domain name=PPR; Domain location=158-192; Score =34.1; E_value=5.2e-07; Accession=PF01535.11; Description=PPR repeat
  Pfam annotation: Domain name=PPR; Domain location=259-293; Score =44.0; E_value=5.2e-10; Accession=PF01535.11; Description=PPR repeat
  Pfam annotation: Domain name=PPR; Domain location=294-328; Score =10.7; E_value=0.42; Accession=PF01535.11; Description=PPR repeat
  Pfam annotation: Domain name=PPR; Domain location=330-364; Score =12.0; E_value=0.29; Accession=PF01535.11; Description=PPR repeat
  Pfam annotation: Domain name=PPR; Domain location=96-130; Score=11.5; E_value=0.34; Accession=PF01535.11; Description=PPR repeat
  Pfam module annotation: Pfam domain module=PPR::PPR::PPR::PPR::PPR; Domain location=158-192::259-293::294-328::330-364::96-130
  Subcellular localization annotation: CTP_CleavageSite=67; ConfidenceScore=5.04e-01
MPRHLFDATPHPNVFLYSAILSAYASAAAAASPSSYAHARDALALFLRMLRHGRPSPNQFVYPLVLRAACAVDVRIVRSIHSHACKSGFCGYEYDVIRTSLLDCYSRHAMMADARKLFDGLTERSVVSWTALVSGYARAGKIGDAIMLFERMTERDVAAWNAIITGCSQNRLFAEAVGIFGRMVGTGLRPNATTISCVLSACGHLGMLKIGKLIHCCAWRTCVGFGSSVLNGLIDMYGKCGNLEGATWIFYEVSDRSLTAWNSLINCLALHGHSKCAISVFNEMRGEGVEPDVITFVGLLNACTHGGFVDEGIKYFELMQHEHGIEPEIEHYGCIINLLGRAGRFQDALNVISNMRIESDEVIWGSLLNACRVHRNVELAELAIRKLLELDPNNANYVVMLANVYSEGGLWEEVRKARKFMEEENIGKKLPGCSWIEVDRKIHRFYSGDDAHSESENIYDTLEDLAASMEL

SEQ ID NO: 70485 - protein, 502 aa, Zea mays
  Coding DNA Sequence Number=SeqID_27110
  Gene Ontology: Mol. function=ammonium transmembrane transporter activity; Cellular component=membrane; Biological process=ammonium transport
  Homolog annotation: Hit_ID=Q947N1; Match level="QueryCoverage=93%, HitCoverage=88%, E-value=0.0, Identity=73%"; Hit description =Ammonium transporter 1-1
  Pfam annotation: Domain name=Ammonium_transp; Domain location=35-459; Score=655.4; E_value=4.7e-194; Accession=PF00909.12; Description =Ammonium Transporter Family
MATCATTLAPLLGPAANATEYLCNQFADTTSAVDSTYLLFSAYLVFAMQLGFAMLCAGSVRAKNTMNIMLTNVLDAAAGALFYYLFGFAFAYGTPSNGFIGKHFFGLKRLPQVGFDYDFFLFQWAFAIAAAGITSGSIAERTQFVAYLIYSAFLTGFVYPVVSHWVWSADGWASPSRTSGKLLFGSGIIDFAGSSVVHMVGGIAGLWGALIEGPRIGRFDHAGRSVALRGHSASLVVLGTFLLWFGWFGFNPGSFLTILKSYGPAGSIHGQWSAVGRTAVTTTLAGSTAALTTLFGKRLQTGHWNVVDVCNGLLGGFAAITAGCSVVDPWAAIICGFVSAWVLIGLNALAARLRFDDPLEAAQLHGGCGAWGVLFTGLFARREYVEQIYGTPGRPYGLFMGGGGRLLAANVVMILVIAAWVSVTMAPLFLALNKMGLLRVSAEDEMAGMDQTRHGGFAYAYHDDDLSLSSRPKGMQSTQIADAASGEFYFKQKKRILRVETI

SEQ ID NO: 70486 - protein, 193 aa, Zea mays
  Coding DNA Sequence Number=SeqID_27111
MNVCELTLAVSHLPIGQEQVGRGGDSSEAEAEVGRGGDSSEAEAEVGRGGVLLPRPRLRPSCRSGVNSAAILSERSVKGRSDCGHFDLADRGTRVRTRCQAIPALNAHAIRSVGKAIRSRSLRDKVRPSLALGETGVRLLTEGTLGRGVNLPGTIVCARGWARTRRGRVLRGPDLNRAYQLLMVCSEDVFRPG

SEQ ID NO: 70487 - protein, 87 aa, Zea mays
  Coding DNA Sequence Number=SeqID_27112
  Subcellular localization annotation: CTP_CleavageSite=9; ConfidenceScore=5.02e-01
MAWPRPGVRVAWSSRELTGCTSTQRRAPGPSTSGHSRDRPSWVGELYARSQLPLEAILEVQNSQNTWGEVLIFIFWKKIAKKATFWI

SEQ ID NO: 70488 - protein, 72 aa, Zea mays
  Coding DNA Sequence Number=SeqID_27113
MRLVKDEKAVWYPLPKDTLSASDTRTREYGPCLPNGIRAGQPPTGTPAQGIWQIPTLTKPHLFCFEFTIYTL

SEQ ID NO: 70489 - protein, 188 aa, Zea mays
  Coding DNA Sequence Number=SeqID_27114
MSLAFLQLPACRILGPRLQRRGGRSVALREEEEGDPVIARRRRGCHARESSSVLPSARCQEAGSARVQQNHRTTTDPVQESARQWAATASRGRRGGGGFARETGRRRLRESGQGSSSRPAEVGSEITELPRGEGREACSPNSEKKFAGAIWPGVFVARDWIGILPGSCAAKGALRPCSVTWDKIPPWI

SEQ ID NO: 70490 - protein, 194 aa, Zea mays
  Coding DNA Sequence Number=SeqID_27115
MRADAARRHGKGKGEQAMMDGWRSERGQRPNPISSISCVSSVVLMGRETGLLQLLAPLLLTGGKGADLVIRGNVVLNTLSARSTSTLLRGSDLHQLFVKPAGPWPSRTVLHDRLQFLYSTEHGCCSRDRVVIGVVSDQRTGLEDPVARRRCSAHPVAGSTGSTRILSIYETCTQPQPLDFLLAVADQRTSRTYA

SEQ ID NO: 70491 - protein, 23 aa, Zea mays
  Coding DNA Sequence Number=SeqID_27116
MATRPGPLTEWPWQRLGNFKSKF

SEQ ID NO: 70492 - protein, 315 aa, Zea mays
  Coding DNA Sequence Number=SeqID_27117
MEADPRLGSPSTPARMMNILEAEAGGKPQPGLLLPTARLVKTQGHPIWGPRRRKGAKDAKGPRHDYYPRGQPLFKGERSGRRTAAQEAYNHPMVMHPPHFHCNWRSNVGAQTHMSYSWRAGYRSQCNDSRNPAWLSSGIKCEDSGPAYRFTSSPEAGPGATVALGLDLHRRTPDPYAYNSGAPKKARRAPWEDPSPPLSEVRALARSRDKKDPGMSKGPVLARVQTFPALPTTTARLVAYEANGPSLTIYAFLSNLLADDVKVTQQAAHQTSSVGKQAPEDRLSGRHWRFQELPLLCPWAHMSGLSTFVHAPLQL

SEQ ID NO: 70493 - protein, 221 aa, Zea mays
  Coding DNA Sequence Number=SeqID_27118
  Subcellular localization annotation: CTP_CleavageSite=24; ConfidenceScore=5.39e-01
MCASPHATFRRQSRSRTPSDPGTRSRTNTDGPATVHTAAPKPDYTPRRLPPCSEISQQPRALPIPSTLASLPSSSSSLSSSGSTQAGSEGGTKVDWSREGHRHAGLVDVLDSSSSDLARVGSGGGAEADRSRGGLETCEGERGGVGVLAVGSIARIWQSLIFDSIPYDLGKPDQCASKHIPNRLKKGHEQRGHLLSFAIFTVGRADELSPDELDRLMTMVG

SEQ ID NO: 70494 - protein, 181 aa, Zea mays
  Coding DNA Sequence Number=SeqID_27119
MPPSLPACVEPEEDKDEDEEGSDAKVEGIGSARGPSVLVRERVPGSEGVLDRLFRRKVAGGDAHIHGAGLRREPKAFAEEGVVAGSYKSCNDCCTQKFGSHTRSQLFTKMECFSDLDVNVHLVEVYAGLLRPELIYVNIFKLRNGGCDYFGKGVLKVVNNVNNIIGPAIVGKICISIIKLH

SEQ ID NO: 70495 - protein, 279 aa, Zea mays
  Coding DNA Sequence Number=SeqID_27120
  Homolog annotation: Hit_ID=Q6I604; Match level="QueryCoverage=59%, HitCoverage=29%, E-value=6e-45, Identity=58%"; Hit description =Putative uncharacterized protein OJ1214_E03.15
  Subcellular localization annotation: CTP_CleavageSite=51; ConfidenceScore=5.45e-01
MAVPSAEARTVRGQGLDSQRPGVHRTFVLPPRASAAAARKSVVPPVPHIRRASSARSIPLPAPAFPVTVLVDGRLRTRMEGCAQGGRRRAQLEGCAKSCIRRNARGWKVPDLFSPLPRPVNSHIPSRHSLGASTAIHGRQTIPSSRFMKVLFLRLGFSGVADLKIRRSEWGGALVAPRRSGSLSARISAALSGGLVLAPPAVEEKVEVNSAIFPKGPPVPLPVQKMATHIDTTEVSRGPDDLPGYWVVTGAKLCMEGGKVALKVKYSLLIAVQEDPEGH

SEQ ID NO: 70496 - protein, 308 aa, Zea mays
  Coding DNA Sequence Number=SeqID_27121
  Homolog annotation: Hit_ID=A0EVH6; Match level="QueryCoverage=41%, HitCoverage=37%, E-value=5e-09, Identity=38%"; Hit description=Milt putative polyprotein
MEALPADDQRPFEDLVMRDEKEVMRQWNEQRGKEEAELLHKLSEQRKEAAEKYLSHFTMDRHQKIIRQGEIDMESLLPPLQGPAQESNTEPPASNTSAINGSPLTKPSYGMPTHAFVPPSQPQPLGTRQVLDAAGPSEHHLRQSGYTTDCPTYFAGPSDQMQARTQTAQVATYMAGPSGYNPEQFGPITDRPVHHAGQSGYVTDRPPSYVGPSGYVMNRPTYYAGQSDSTRVHAQTAQVVPYMTDPSGYNPRPFGPITDRPVLYDRRSGYETAHVAPYTAGQSGYTFGPFGPVKGKCALGPFLSILVI

SEQ ID NO: 70497 - protein, 48 aa, Zea mays
  Coding DNA Sequence Number=SeqID_27122
MAVGRGILASACWGEGKDATLRSRPSLQPLDAGHSDTYKYPRTVPVRG

SEQ ID NO: 70498 - protein, 75 aa, Zea mays
  Coding DNA Sequence Number=SeqID_27123
MDPWGCVVYEMKLEYGLTCGYLCQAFEHTKHMPRNMVNRRLCPSRDLRRGLPFRLWWVQVRSLHDGTRGTLRMIG

SEQ ID NO: 70499 - protein, 550 aa, Zea mays
  Coding DNA Sequence Number=SeqID_27124
  Gene Ontology: Mol. function=citrate transmembrane transporter activity; Cellular component=integral to membrane; Biological process=citrate transport
  Homolog annotation: Hit_ID=A2Z7Z0; Match level="QueryCoverage=100%, HitCoverage=100%, E-value=0.0, Identity=79%"; Hit description =Putative uncharacterized protein
  Pfam annotation: Domain name=ABC-3; Domain location=2-213; Score= -177.0; E_value=0.086; Accession=PF00950.8; Description=ABC 3 transport family
  Pfam annotation: Domain name=ArsB; Domain location=14-375; Score= -213.7; E_value=0.028; Accession=PF02040.6; Description=Arsenical pump membrane protein
  Pfam annotation: Domain name=C4dic_mal_tran; Domain location=4-388; Score=-84.5; E_value=0.04; Accession=PF03595.8; Description=C4 -dicarboxylate transportermalic acid transport protein
  Pfam annotation: Domain name=CitMHS; Domain location=16-496; Score =383.5; E_value=3.3e-112; Accession=PF03600.7; Description=Citrate transporter
  Pfam module annotation: Pfam domain module=ABC-3::ArsB::C4dic_mal _tran::CitMHS; Domain location=2-213::14-375::4-388::16-496
  Subcellular localization annotation: CTP_CleavageSite=50; ConfidenceScore=5.33e-01
MTLASTDKVVLGCVAFSIFWVLAVFPSVPFMPVGRTAGSLLGAMLMVLFRVMTPDEAYKAIDLPILGLLFGTMVVSIFLERADMFEYLGGALAWRSRGSKDLLLRVCLVSAVASALFTNDTCCVVLTEFILKLARQNGLPPQPFLLALASSSNIGSAATPIGNPQNLVIAVQSGITFGQFLVGVFPAMAVGVAANTCVLLCYFWRYLAAPEKDQEAGPDAVVADEEVTSHRFTPARMSHASSMNGGFDGDCVSEPMRRSESLGRADALRSRSYNSEGDIQVSIRSMRASSLSQEMVDVSTVGDGPRKITRSTSQQRSVIIEDAPPEADDDAHKGKDGDDDDVKVKRWKVVVWKSAVYLTTLGMLVALLMGLNMSWSAITAALVLLALDFTDAQACLEKVSYSLLIFFCGMFITVDGFNKTGIPNALWELVEPYSRIDSARGTALLALVILVLSNVASNVPTVLLLGSRVAASAAAISPESQKKAWLILAWVSTVSGNLTLLGSAANLIVCEQARRAQFFGYNLTFWSHLRFGLPSTIIVTAIGLLIVVSY

SEQ ID NO: 70500 - protein, 301 aa, Zea mays
  Coding DNA Sequence Number=SeqID_27125
  Gene Ontology: Mol. function=small conjugating protein ligase activity; Cellular component=cytoplasm; Biological process =regulation of protein metabolic process
  Homolog annotation: Hit_ID=A2Z7Y7; Match level="QueryCoverage=47%, HitCoverage=78%, E-value=2e-60, Identity=76%"; Hit description =Ubiquitin carrier protein
  Pfam annotation: Domain name=UQ_con; Domain location=128-258; Score =137.6; E_value=3.6e-38; Accession=PF00179.17; Description=Ubiquitin -conjugating enzyme
MAKGHDNWYRSLQFFAAMLHFIGDERRVAAVDNDAIGGDLHLVASGGGRSCGKMLEWDDERSVANTWDQTCGEDGDDERLQGGDGETTGCRNSSSNSRARPKVITLAPNPSLPPLAPNPGFSPPSASRRADDPRGLGGDGFPENCQSTLSIVFRYSCIYQGGVWKVRVELPDAYPYKSPSIGFINKIYHPNVDEMSGSVCLDVINQTWSPMFDLVNVFEVFLPQLLLYPNPSDPLNGEAAALMMRDRPVYEQKVKEYCEKYAKPEDAGITPEDKSSDEELSDDDDDDNDSGDEAILGNPDP

SEQ ID NO: 70501 - protein, 296 aa, Zea mays
  Coding DNA Sequence Number=SeqID_27126
  Homolog annotation: Hit_ID=A3C581; Match level="QueryCoverage=86%, HitCoverage=26%, E-value=1e-100, Identity=70%"; Hit description =Putative uncharacterized protein
MYRNVKSLQGLSISDFANTQPPYLQCPAHVLKIKHPQDTKVSPGVWYIGYFHGLGPARTQSKMISRGKAHLVSTRITVRGCATSAFWGPYCNQTVDMIGCSQPSIDNNSRNLLDLKAERRNSLYTREHNRRINILSRPNGLVEQEVASNATTLVRMENSISCSISNDSICIRQGDMKFYFLDVVNLALQFKITATNFGALGPSLICYLRHNAFPQRDLHDYSGDISHDPLVVKLPNIGRWYIAIETVNKTQTNVTASTPVLDTTCFSLKWQLTGCLNGKTGTNCSWEAYGLHECIV

SEQ ID NO: 70502 - protein, 224 aa, Zea mays
  Coding DNA Sequence Number=SeqID_27127
MGSRRWGRNRIGLEEGVKIGGWGGASKGKHIFVKDDMTRDDDAVGGEVQTPGEVRGRVAYRLRGKTVQEVGGSVQGLCPVAGRERRLEEEAAEHISGGADHAFGSAVLCRGVGARETQLDAMSEEERARGVIIELAAIVTLQSTDRATKLSGYPGEEVCEGGECVRLQQKREGPEKMGKIIQNHQIIFIARKTEYRGGPKITVNQVKSLLSPRRSSKWETSMSV

SEQ ID NO: 70503 - protein, 684 aa, Zea mays
  Coding DNA Sequence Number=SeqID_27128
  Homolog annotation: Hit_ID=Q6JAD6; Match level="QueryCoverage=96%, HitCoverage=96%, E-value=0.0, Identity=63%"; Hit description =Putative uncharacterized protein
MPRMKNVSAPGGGDDEDPRRPFRQVKGKTVYLEQQEGRKKRRTDRAARAAAAAAAAAAQAVLGDQPQTPSDQIAYRVRRLTSQPRSSTHTFASTPPPTLPAPVTPIAPSTSTAIPATSTTPASTAPPPPAPASAPPVPPPRFRERDETEVRPLVSDPRLFDLQRATAARVRRFRYVPVESWLPAQRDPAAGDLFSTRIQESFFRAQMSAQIALRVHRLLDLPAFLLVAGADSEAHLTYLPGLQTLLTISGRYVEEWVRVFYASVWIDPDHHWMRFRFEREDVTITASQIHQLFGFPESTTRLHSLCYDTSDPPRRPHGGVAPGTAHVAALFRPPFTDGSRRSPADFTTTAKYLYELIRRTLLPRMGYREATTHIQLWLLGALVSQSEFDVVDFLICEIEDTVLDGIRARRQLPYAHYLCHIFAQLIQPPRFQSTLEASRLAEDAALRQFDTQGTAADDDDDDDFGVPPPPPPPPPMPPRSHDHEAGSSSAVPPPPQAMDPALASILAHLAAEQARLSERMLSMFQNMQDRQDALQQQLLQDRAESRAFMALMLQHSGISVPPVQSAPPPPLHAPVVPSILSGPPVGASPLRPVTLAFTSPVLSSVCPQPPVPPASAVTTTAVAVSVTASVPVAPAVRPLSESVPAPASTTDPGSETDSDPPPAFALLPRPRPDAPPPPPPASDV

SEQ ID NO: 70504 - protein, 128 aa, Zea mays
  Coding DNA Sequence Number=SeqID_27129
  Gene Ontology: Mol. function=ER retention sequence binding; Cellular component=endoplasmic reticulum; Biological process=protein retention in ER
  Homolog annotation: Hit_ID=Q75K69; Match level="QueryCoverage=94%, HitCoverage=85%, E-value=8e-53, Identity=83%"; Hit description=ER lumen protein retaining receptor
  Pfam annotation: Domain name=ER_lumen_recept; Domain location=1-128; Score=129.9; E_value=7.1e-36; Accession=PF00810.9; Description=ER lumen protein retaining receptor
MNAFRFLGDMTHLFSVLVLLLKIYATKSCSGVSRKTQELYMLVFVARYLDLFTDYVSLYNSVMKMVFITSSAAIVWCMRRHPQVRRTYDKEQDTFRHAVLVAAAFLLALMFHDRFTFRELMTHQIGPY

SEQ ID NO: 70505 - protein, 387 aa, Zea mays
  Coding DNA Sequence Number=SeqID_27130
  Gene Ontology: Mol. function=kinase activity; Cellular component =ornithine carbamoyltransferase complex; Biological process=amino acid metabolic process
  Homolog annotation: Hit_ID=Q6QP54; Match level="QueryCoverage=22%, HitCoverage=37%, E-value=3e-19, Identity=56%"; Hit description =Putative kinase
MAPPVDVVGPRPRLGDVEAPPRSRLSLSSMAEVESEPLGWARRIPSAKARAESEPWVGRSGVRRLPGLSPSPSPGSGRAEFAVFRGLAPSPSPGSGGAEFAVFRGLARVRALGRAERSGVRRLPGLSPSPSPGSGEAELPMVHVARPDCLSASLCQVALQSERRRRRCLSVRPLYADGGYQLRIRRLEEVADTLLRFFPPFQRDRPVWMARMRALEGKQLLEDDPTVVYLTAYLLTLDAQYDFLARHHHQMIARAEDAEKLNRKLHVDLTTAQARVAALESREVIAVEALKQAKDEHVQKLMEAYLVTHNQRRALRIQEPASSNPVQPRRAEDPQILEGHPISIRGEKKAWELPEGAIVLEGIPVFPQAMNKKEHPESSQDPLPEFV

SEQ ID NO: 70506 - protein, 81 aa, Zea mays
  Coding DNA Sequence Number=SeqID_27131
MGCTYAAIFLLLLEEHDLVGVGALQSSLGCPAAVPRRRSPRMMTVGLVVGKSEPGRGLPPALSFKDVHHPCWGGGRAEPPS

SEQ ID NO: 70507 - protein, 504 aa, Zea mays
  Coding DNA Sequence Number=SeqID_27132
  Homolog annotation: Hit_ID=Q6J9V9; Match level="QueryCoverage=26%, HitCoverage=46%, E-value=3e-57, Identity=85%"; Hit description =Putative uncharacterized protein
MPEQGAAQEVAPDPAPEPAPEDLPAPALEASAFGNQTPQPNSCMFRGRGVDSSHRVALTVSSAEATASVGGSLTYGDHHLSTDDSGHLPTNTAPANGGRPSVHRQVLTTVLATGARTRLSQNTNTALAAYDVLCDPPVQPAAQEGPGPTLCPSVRRRHRKQHQSRSGRGARHAAADSATDGKRPSPLNAEGRSGPLPTRRWDLTRRLGAPSSPTRMMNILEAEGRGEATARLALPHHEAYGTGKGDISKRILLSEGNWPRALLLIRGLKVAPCGVRQPPQSTRAPSPLLIRGSKAGPSEGFDSRPRACRVRDDPGYVCYMAEARATLPRYPRTFPRPAGTICNGIPPEGGTEPLEPIKWVRVQQITCMDRLTPYPDTRASVGKVEVTAVTSPLFDCSDRKTALFTPFRLLCQPPGLGRNRELRLARPQASASASASGEGLRFARSQASASASASGEGLKHFSDSHISTYTGLRHFSDGHGLPKGGRREKARKKGEQRQTEWERR

SEQ ID NO: 70508 - protein, 102 aa, Zea mays
  Coding DNA Sequence Number=SeqID_27133
MARRRPGSMVADLRGCTEDGGAGEVREGPAGAQMREGERASGVLGSSGRGGTVASSTRDVGAESAAARSSGGGYAGMTGLTAGTHGQRRRGKRARVRRRRPR

SEQ ID NO: 70509 - protein, 155 aa, Zea mays
  Coding DNA Sequence Number=SeqID_27134
MTTAALSPLTEARRRQQGLDSPDSCPSARVQRSSDGHDITRTGSQNLFGCHDGMCQRFIYNYTKSTVRNTVDYSGQKKLFGKTGQARTVRALAADRPRHKDDPRTEPMQKSESALWTVRRISADRLRPRSDRPASGADRPVGKDPKNPKVTGSEE

SEQ ID NO: 70510 - protein, 291 aa, Zea mays
  Coding DNA Sequence Number=SeqID_27135
  Homolog annotation: Hit_ID=Q65XC4; Match level="QueryCoverage=64%, HitCoverage=93%, E-value=4e-64, Identity=79%"; Hit description =Putative uncharacterized protein OJ1187_E11.15
  Pfam annotation: Domain name=DUF502; Domain location=32-181; Score =176.6; E_value=6.4e-50; Accession=PF04367.4; Description=Protein of unknown function (DUF502)
MGGRDRDRELLIPVSGGGSAPGVDDEDADRASSASAALSSSGREAFHKVVRSWASKKFMTGCLGEWIIKRMPLVRHIYNASKQISAAISPDQNKQAFKEAVIIRHPRVGEYAFGFITSSVSLQSYSGQEDLYCVYVPTNHLYIGDIFMVNSKDVIRPNLSVREGIEIVVSGGMSMPQILSTLDPEMILGYQEYGELNLEHKRHRKLRLARFQGMDSASAPEDDEHRLARPQGSDSVSAPEDDELRLARPQGSDSASAPEDGLDLDLGGASASPYPGLGPTTSQEGPSLPYP

SEQ ID NO: 70511 - protein, 54 aa, Zea mays
  Coding DNA Sequence Number=SeqID_27136
MGGGLLAAASALRSVLPLFGPPEQKSSSSLLLERALPYRVGLFVPTEGEPEFRL

SEQ ID NO: 70512 - protein, 246 aa, Zea mays
  Coding DNA Sequence Number=SeqID_27137
  Homolog annotation: Hit_ID=Q6QP51; Match level="QueryCoverage=80%, HitCoverage=79%, E-value=3e-10, Identity=32%"; Hit description =Putative growth-regulating factor 1
MTRQKRCATSFRFRILFLFLFLSLTTGTGKGDTPKGILLREGNGPRAPLLIRGSKAGPSEGFNSRLRELGLRAHYWSEVRRPAPRKGSTATSGHSGSVPTTDQGFVGWPSKGFDSRLRRRARDDPGVRLTAAKSGLGRHRKLRLARSQGSDSASAPEDDELRLARPQGSDSASAPEDDELRLTRPQGSDSASVLEDDELRLARPQGSDSASAPEDGLDLDLGGASASPYPGLGPTTSQEGPSLPYP

SEQ ID NO: 70513 - protein, 146 aa, Zea mays
  Coding DNA Sequence Number=SeqID_27138
MGKNNKHKREPTPPSEDFGDSEYSEEEFSSESEGSPAPIPLRESSDDSDDSQGLAAEVWTYIRAVERSGLEGSDESEYSSDEEDSSEEDGGGDGEDDDDDDDEGGGGGDGDGDGRGGSSGSSGSKDGDGGSSRGGGSSKGSNKASG

SEQ ID NO: 70514 - protein, 127 aa, Zea mays
  Coding DNA Sequence Number=SeqID_27139
  Gene Ontology: Mol. function=catalytic activity; Cellular component =protein complex; Biological process=metabolic process
  Homolog annotation: Hit_ID=Q0DWQ7; Match level="QueryCoverage=87%, HitCoverage=19%, E-value=6e-19, Identity=45%"; Hit description =Cyclin-B1-2
MKREISEAHDTIRFGINAGVKADLAPPHPLQSTIQSVRIRRSPPFPFVRAHETLTMSMGLMWGGGRLAQETKFWADKKKFGTDAIYGSALNIRKDLDAQILSRFFTIPFAVVLTGEIEFPSINSSIR

SEQ ID NO: 70515 - protein, 202 aa, Zea mays
  Coding DNA Sequence Number=SeqID_27140
  Gene Ontology: Mol. function=sequence-specific DNA binding; Cellular component=nucleus; Biological process=regulation of transcription, DNA-dependent
  Homolog annotation: Hit_ID=Q942D2; Match level="QueryCoverage=87%, HitCoverage=62%, E-value=7e-40, Identity=51%"; Hit description =Putative WRKY DNA binding protein
  Pfam annotation: Domain name=WRKY; Domain location=86-174; Score =105.7; E_value=1.4e-28; Accession=PF03106.6; Description=WRKY DNA -binding domain
  Subcellular localization annotation: CTP_CleavageSite=38; ConfidenceScore=5.37e-01
MSCPPPPAAVDWASLLLPPSTSGASEVGCGVSAVTTVAAGSKAGATAGEGDNSKTVKAGKQGGGRGKNKVSRPRFAFQTRSENDILDDGYRWRKYGQKAVKNTAFPRLIVSLLMLMKSCLMLASICCGNDALWACRSYYRCTHHTCDVKKQVQRLAKDTSIVVTTYEGVHNHPCEKLMEALSPILKQLQLLSQLQSCTNQLL

SEQ ID NO: 70516 - protein, 90 aa, Zea mays
  Coding DNA Sequence Number=SeqID_27141
MTRDYRKGFWRAWSRPGTPHMGDGRSGMLDEQGGMLAQPSAGRTVGWLRPIDEILEDLMDMWVRTHTRFRCATLILLVDVDCIAFIGVSG

SEQ ID NO: 70517 - protein, 133 aa, Zea mays
  Coding DNA Sequence Number=SeqID_27142
  Subcellular localization annotation: CTP_CleavageSite=68; ConfidenceScore=5.46e-01
MVGPSPRSGEAVTPLRSRLSPSPGVGRGGDRLPRSRLSPSPGVGRGGDLLPGSRLSLSPGVGEAETVLGGRGGGRAPGSGEAELPMVPEAGLGCCQPHPGGWHSSRSRAGDAVFLSGQSVEGRSDCGHFGPVN

SEQ ID NO: 70518 - protein, 246 aa, Zea mays
  Coding DNA Sequence Number=SeqID_27143
MDGSDHPRGGKPSVSQLLQGLQKGLEILLFLVRSPIVPVAAGGSHHSLRKRREPPIVISEERPHETACWHSEPPLMEGDETRHIPRRRGRGGPARRDHPLQLRVTREGTEQAIGDKGLQIIHRDGGERPWVTRRNDGYPVCHRQAKGVAAERTRAGDTFGRRSGRRFTSAMMTASKKVCHIVQFRILFLFPFLSLATGTGKGDTPKGILLCEESGSRALLLIRGSKAGPSEGFDSHPRALGLRAHY

SEQ ID NO: 70519 - protein, 143 aa, Zea mays
  Coding DNA Sequence Number=SeqID_27144
MALRRLASRAPGEAGLRQPPLAGAADGFRALFAVPGGAGFCFSTGATEAGPTPPAEVRMGRRRRREYSTSDDEKAAWCCSLALRGVGAVARSAVAPWPPACSSKESQMASSSVDEKDGWPGRRLGLSRAADGGAGAHLSIVDV

SEQ ID NO: 70520 - protein, 84 aa, Zea mays
  Coding DNA Sequence Number=SeqID_27145
MRRQVRATCAHHPLLLKSIPPQCFQVELQISDLGMRIVTGPWEFDRERKGKDFGSHQVTPAPHADFADRCLNSSGGATNNNSMS

SEQ ID NO: 70521 - protein, 110 aa, Zea mays
  Coding DNA Sequence Number=SeqID_27146
MDDHHFRQNAQLLGRNIRTKGQDTKIEDAFALMAQGVTPLEPLSDSEEEDEECIDLVMSSFFDVDEDDSRDNDTASTTLATKDFMMPTADVAIPRSPKIQPMPAVVYASS

SEQ ID NO: 70522 - protein, 170 aa, Zea mays
  Coding DNA Sequence Number=SeqID_27147
MAPSATSRAGEIKDEGAASDGLYDEVEIDGGARQPNKQEGTLARGQQGRANAMSLDDGARCSLAKRTPAPGNQQFGRPRGCYRSNPLNRNLALEIQEEAGKTTRCSRPTDAILEDLLDMWVRTRTRFRCITSIYWLMLIALSSVGLAANPLNRSIDMRLVKMLTTLILTD

SEQ ID NO: 70523 - protein, 96 aa, Zea mays
  Coding DNA Sequence Number=SeqID_27148
MPPPPRTPPVQLRALIGRTVGYREGYRRGEVAISSIDAMARGFAAAGPRLGAARVSLELLGEKCLRFAANSSPYLAAATTPRPTVNSPCATRFSIL

SEQ ID NO: 70524 - protein, 44 aa, Zea mays
  Coding DNA Sequence Number=SeqID_27149
MRVVMRMMVFYYDYGNGCPHCNHCSGEDEVVEGDIQEFQDYDEF

SEQ ID NO: 70525 - protein, 175 aa, Zea mays
  Coding DNA Sequence Number=SeqID_27150
  Gene Ontology: Mol. function=RNA binding; Cellular component=ribosome
  Homolog annotation: Hit_ID=A2Y6W7; Match level="QueryCoverage=28%, HitCoverage=9%, E-value=6e-14, Identity=75%"; Hit description =Putative uncharacterized protein
MDSIPHLTLTSFMCSLLKEESHFHDDLLPPHLELWIDEGTNKLIISAKEVWAVTFLREGTLLQDPIRKLFPYGAQIRIGETNRGFCWRTPRKGSIPPLIYERGERRLDPLNQPLMAGSKDHSDVSPNNIIVPTMETLSAEEQQEFEEYMEQLIKEAKPKYLTNFKADKNQKVVRI

SEQ ID NO: 70526 - protein, 135 aa, Zea mays
  Coding DNA Sequence Number=SeqID_27151
MAPSATSRAGEIRDEGAASDGLYDEVEIDGGARQPNKQEGTLARGQHGRANAMSLDDGARCSLAKRTPAPGNQQFGRPRAQTRGDEQRSCRGGRLRARKHAARRQLRGCGLSGHERNKRDRVGAIWAHEREEWGK

SEQ ID NO: 70527 - protein, 202 aa, Zea mays
  Coding DNA Sequence Number=SeqID_27152
MHSPTRTDLHERVSLRILWEVLQGAGYTTPPQYVVQLFEKHRVPCCRVRMTLEPHPLQPGWRSLDSESFGYRAEDTIEAIALHGLTTFCGFHPLELSTHPIGLFPAEKEDDPMWKDRVEHAKDIWAIYPGQTAHLTATKITLDNREELVVDLSTEMVEKDLQVEQLSNEIQELEELVGTRENTIEVLEDQLINTQQQLAEAN

SEQ ID NO: 70528 - protein, 252 aa, Zea mays
  Coding DNA Sequence Number=SeqID_27153
  Pfam annotation: Domain name=SlyX; Domain location=160-228; Score= -6.1; E_value=0.034; Accession=PF04102.3; Description=SlyX
MTSHGSSDQGNAQSHTDGLAREGFPRILWEVLQGASYTTPPQYAEQLFEKHRVPRCRVRMTLEPHPLQPGWRSLDSKSFGYWAEDTMEAIALHGLTTFCGFHPLELSTHPIGLFPVEKEDNPMWKDRVEHAKDIWAIYPGEELVVDLSTDMVEKDLQVEQLSNEIQELEELVGTRENTIEVLEDQLINTQQQLVEANQHLDMHHLEIQDMEANEDVDIEGGEELPPAWTLLALGDHLPPSRVLPHLLTRSQG

SEQ ID NO: 70529 - protein, 105 aa, Zea mays
  Coding DNA Sequence Number=SeqID_27154
  Homolog annotation: Hit_ID=A2Y3P0; Match level="QueryCoverage=90%, HitCoverage=40%, E-value=9e-19, Identity=44%"; Hit description =Putative uncharacterized protein
MYDKLRRSRRLDAVQSGCSALSIVKQGDLMFVANVGDSRVVLGTAFDDDLSQESPVLGMSRAFDDYYIEDCGVILALEVTQRRTDNNDQFVILATVGVAFVLACL

SEQ ID NO: 70530 - protein, 229 aa, Zea mays
  Coding DNA Sequence Number=SeqID_27155
  Homolog annotation: Hit_ID=A2XFR6; Match level="QueryCoverage=37%, HitCoverage=25%, E-value=3e-13, Identity=45%"; Hit description =Putative uncharacterized protein
MVVEEIPVDLPHIRVENRVILEDSMEEFLPTPTPLVELLAFAAGSRDDPDDSGDNDEDDEEEEEEDEENINEEANEEQQDHYVGLWPVTKHYTSMFETGHFPNLLQDVLHALGTYVRPLSETRQVYEPPRAFYYITRIHVRVMDAGGAAEDRLNTLAGVVAGLNIDLDSATLDLSRVHLELEDAHARITALEAQLDGRNPPEVQVPAMALSPPRKRIRYGEPGSITKML

SEQ ID NO: 70531 - protein, 111 aa, Zea mays
  Coding DNA Sequence Number=SeqID_27156
MGKRGELGTSGQGEEELHELREEDAQGRETELSGAAGRRRVEQSAQASGRRRLTPRRDSDSYPRMAERMKARTAAAGEDKRWRWTTRVPGAGVGSLAAGKDCNVHLSVGVA

SEQ ID NO: 70532 - protein, 197 aa, Zea mays
  Coding DNA Sequence Number=SeqID_27157
MESTCSSPSKELSQEEDQEQASEAAIEDLLQPQLWQNLPSYWAHMHLSLSQRPQTAMHARSKEPGPGGARGVAPRRSAAGSGNRHGEHREAAAGEVHLGVLEEERALPEDACSEQEKWARRGGRGRREPPWEREESWARVAKEKKSSEINTMAGFGFLSKDGRADEGKNSGGPERISAGGGRRASQELAWGAWPPAR

SEQ ID NO: 70533 - protein, 187 aa, Zea mays
  Coding DNA Sequence Number=SeqID_27158
MAALSFLSLLYAPISPARNKRPRAAHALLPARPDELPPPRLPCALHGGFHCRQLTSLVPRPLLLPALALCCAPAPTPSAEQRILLPMRSSSSELSLVAPGISPARIQLCAARRIKVLGNLRESRNSRDFAVFAIIKPGPCSGVILRKDDFYLQEYIFIGSMVGSYCKVPYDALFILRNTNNPKGGNT

SEQ ID NO: 70534 - protein, 143 aa, Zea mays
  Coding DNA Sequence Number=SeqID_27159
MAVIGQRWRAAVLAFHGELRRSLAQARLGVCKCQRLRPLEAFIGEGTTQARRAKQPRVGRALPRPVRARPVRQAIEHVAFCFCPSSSAHRLKIFTSLRPRKDHHTISVSCFAYKALRVRMRERRKPTKQQEQQKNTSRSSHKS

SEQ ID NO: 70535 - protein, 160 aa, Zea mays
  Coding DNA Sequence Number=SeqID_27160
  Subcellular localization annotation: CTP_CleavageSite=46; ConfidenceScore=5.15e-01
EPKLAHQVLLADLPEAPWSSSAVTNRNRTMQMVQNISLTVTSTLLVAGNENRGNLHGASGNGFAHLWEGEDDTRGWDPPTSAIATGSARLQDQARKHPEPKDPDSLLLEKAHLSAQTAEVGSRGASWWAEMEHQGPEIWSPEIRSVSLLKPEANPGFCRV

SEQ ID NO: 70536 - protein, 54 aa, Zea mays
  Coding DNA Sequence Number=SeqID_27161
MGRLEPRAEWESLLVGKVCNLCTVLETVISVEITCSGDVGNMKDFEEFEDYDEF

SEQ ID NO: 70537 - protein, 37 aa, Zea mays
  Coding DNA Sequence Number=SeqID_27162
MGKPVPSLLMLLLSRGLNYNSGLTFSKNAVKITVGCH

SEQ ID NO: 70538 - protein, 38 aa, Zea mays
  Coding DNA Sequence Number=SeqID_27163
MAGGDLASCLALPPLHICSVQLLIDAQEPHESSCRVRD

SEQ ID NO: 70539 - protein, 135 aa, Zea mays
  Coding DNA Sequence Number=SeqID_27164
MANDEQLPLQWAEVPPNRRPWGPMQMIPRQTPALVATGMQWGVHTPPPAAEPPLSIHGERRSAHFALAHGVQGSRAPIDLAVLVKNSVFFLFSFSDFSLETVLITIERDHQAGDGTAPAGVNKQFVASGQAMNME

SEQ ID NO: 70540 - protein, 206 aa, Zea mays
  Coding DNA Sequence Number=SeqID_27165
MALDPAVASAVWGEGVESGAACLCALGAGLPGVGTRRGPHMGARHGLLWRSARAPTRGRSARPAMARSAWPPAGARRGQPRTLGASPHGACSARPPVTLGASPHGACSARPPVALGAGPHEARDSGASLGAWRGCLLLAALGRAPQGARAAPRFGEARRPGGLRPWRRLGAWLLAAAGTGRWCPTAASTARTPDKARWSVCSRTEA

SEQ ID NO: 70541 - protein, 226 aa, Zea mays
  Coding DNA Sequence Number=SeqID_27166
  Gene Ontology: Mol. function=RNA-directed DNA polymerase activity; Biological process=RNA-dependent DNA replication
  Homolog annotation: Hit_ID=Q8W0Y2; Match level="QueryCoverage=18%, HitCoverage=1%, E-value=5e-09, Identity=73%"; Hit description =Putative gag-pol
  Subcellular localization annotation: CTP_CleavageSite=54; ConfidenceScore=5.19e-01
MGAIQVKAPSTQGTQSRLARAQPRAGTGQSDRSHFAPPLTDLIGKQRRLPCSDCCATRQGLGLYLDLGRRSPPRPTLGLGLSLDLGGVSALPDLGLGPTTSQGGPSYEKVAAREDGLTNRLSPSLANAWTPGVETPIVGAPGRGLLRVDEQLPVKLQMGSLHQPLQPGTLLRFGSLEFMSLDGSYDMVLHLEHLDEPCEDVKDADDCSALLDAFVYIETSSAALRV

SEQ ID NO: 70542 - protein, 643 aa, Zea mays
  Coding DNA Sequence Number=SeqID_27167
  Homolog annotation: Hit_ID=Q6J9V9; Match level="QueryCoverage=11%, HitCoverage=27%, E-value=9e-13, Identity=55%"; Hit description =Putative uncharacterized protein
MQAACNRTTRMHPFDFDESSMESQAYTSCNRRAGYYVRKTAPPLTPMSCLLDSGTGVATRGNPAHGPTVPAEHVGHGSVSHGRRRDGRYGQKWADGNGGSRRAEAAVKSSAGLRPLLEQQESPLPRCEDETLVPRTTRARTTAAPRTTRPVALTPRQGRRHLCQAKRATLHLRHDDCVKKGTGKGDTPKGILLREGSGPRALLLIRGSKAGPSEGFDSRPRALGLRAPLLIRGWPPEGFDSRPRTRRARDDSGYIRYMAEARTTLPRGVKPLLRGLGGYTRRRPDGRNSGQGSVHSRDTISPRPSPASGGNSRPRQIHALPEGLLKQQAHPRLARGPVRAGFAVKQPWPDRLANRPYRRSIQCKDRLTPYPDARSSVGRDEPPSPASGAIGSSASPDPGAQPPPRPRKTISASPDPRARTLPRPRKTVSASPNPRARTQPRPRRSLRPARPWARTNHIAGGYIITLPLASSGYGEQDRRPIWLAPGSSAPPMATTPHAQGTNTSFTATSAWPSYEKVAAREDGLTNMLSPSLANAWFGPFHGLECGSNSREGPLGYGARQLQHSCTPIRSVLVRASCWLGRRSSLSPSPSVLGYASGAAQRVLAVRQGRPPGQRQWGQGAAQEPTIGRLLKSSAMHGSTADVE

SEQ ID NO: 70543 - protein, 285 aa, Zea mays
  Coding DNA Sequence Number=SeqID_27168
MPGKANFCCPARVQHSVLCPGDGGQPHRGVSQHVVRREGGTRVLGRSHSRFRGEDGSEDLPVRFRAAGARWCGVGGQVDAAVGAEVVAAGEGFSTDKIVGVSCAPSLRLFGFNVWLLSPVTSEVSVSRRRRSPSARSALPLKVSLAQLRNPWLLCDESEPEAAVSAWTEAELARKGASSAQEQYQDLFVGSRIAHPSESYLSRKVMSEDSVIDIVEKARKIILAKKFSSVKTCSVSRIAYPSVSYLSQKVMSEDPAIEVVEKRERCSGRKTFSGENFDVEGVPPF

SEQ ID NO: 70544 - protein, 672 aa, Zea mays
  Coding DNA Sequence Number=SeqID_27169
  Homolog annotation: Hit_ID=Q6JAD6; Match level="QueryCoverage=93%, HitCoverage=96%, E-value=1e-133, Identity=77%"; Hit description =Putative uncharacterized protein
MEKCKPIKTPMPTNGHLDLDEGAPAVDLLSPAASISGDLRTPSVPLRMPRTKNASTSGGGDDEDPRRPFRQVKGKTVFLEQQEGRKKRRSDREARAAAAAAAAAAQAALGDQPDIPSDQIAFRARRLASRSRSSTHTSVSTPPPTLPAPVTPIAPSTSSAIPTTSTTPASTASPAPAPASAPPVPPPRFRERDETEVRPLASDPRLFDLQRATAARVRRFRYVPVESWLPAQRDPAAGVFFSTRIQESFFRAQMSAQIALRVHRLLDLPAFLLAAGAESEAHLTYLPGLLSFLTISGRYVEEWVRVFYASVWIDPDHQWMRFRFEREDITITASQIRQLFGFPESTTRLHSLCYGTSDPPRRPHGGVAPGTAHVAALFRPPFTDGSRRSPADFTTAAKYLYELVRRTLLPRMGYREATTHIQLWLLGALGRGCQLYVSFEQLRVQLLMMMMMMILGFLFPPPPPMPPRSHDHEAGSSSAAPPHPQTMDPALASILQALTQQQQTLTQQQQTLTQQQALLAAEQARLSDRMLSMFQSMQDRQDALQQQLIQDRAENRAFMALMLQHSGISAPPVQSAPPSSLHALVVPSILSAPPAVTSPLQPVTLAFTSPVLSSVCPQPPVPPASAVTTTAVAVSVTASIPVAPAALPASESVPAPASTADPGSETDSDPPS

SEQ ID NO: 70545 - protein, 140 aa, Zea mays
  Coding DNA Sequence Number=SeqID_27170
MALSASSFLRKGDEEAYHQKSRQSLIALSPYVEARGLPLHQCCGKIVGSTNKINTEARGCLCTQAMARCSERAAGELHAVILADVAIRALGVQILLVVKRSWRWISLGAVIGLAAVPTCLTAGPDSLAGVGRLPRDGHMP

SEQ ID NO: 70546 - protein, 251 aa, Zea mays
  Coding DNA Sequence Number=SeqID_27171
MQDAARRALSHYCSVLGGVADGLNLRYYPCRPSGSIGGVVVSPVGEDNPRLNNTVNLADMLNAELDHALDELSRARAKIAQLQAERAERRHLEDGSPAPVGTKHPYRSPQRGHHAYGTEEEGVLSRSRQHRKIRHLAAVATTAPDDNRADVLDADSGSLGYWSDDSEERGIFWRSSKGPCLAQVVTCVRVCARALRLVCVALPTLTSVLLCDHLIVRARGSKLWRFLANGKEKRKKNTVVFKLIIGSLERS

SEQ ID NO: 70547 - protein, 544 aa, Zea mays
  Coding DNA Sequence Number=SeqID_27172
MSSSSSSADATPPAAASSEETLSNVMVEELRAGDSVEFGVSRMTSARIEDMQRLGYFGGGVARAPGTEEVPEPEGELVVFEAFFVAGLRLPAHRVFELNQLPYDGYPGQDEADRRGKKPAVETGGDPALVAAASSKKRKLVMDKDHQGAARKRQATVRVHEARPKRQRGTAKAEASGGGKPPLPAKVGASAPGKAPEVTVGGGGPKLTKVVPSVSGVAEAAKAARTLPPPGKRVADFGTEINVEDYLGGSDEGPLALVVPGAAIATAAPAPKAGGETLGAGGEVSALALVRDEAGVATRRLKGATEALSRATEALSQVADFTSRTASGALTAALSAEVERLRTQHADAVREKSASDSKCRKLAEKVAALEKEKADLRRQLAGERREANEAIAKEQAAQAEARLARAEGNIAKELAGELQRRLTALESRAEGAEAAMRAEAERTRTQLMTAYRELGVRTGDFEVPEREAGLRCLEWVQEELQELPTVLAGLMSFSSLVTCEAAMNALSREGCRHFEALDQADEDFGRDIFEVEDPVVKESAGGPV

SEQ ID NO: 70548 - protein, 301 aa, Zea mays
  Coding DNA Sequence Number=SeqID_27173
MKPKECTTVVRLHAFYMAVRPFACWFQREWGNAYNRGVGRRAYSSSAEEASSSHAGEGELLLPGQGAIVRPPPGRRPCRARAGYVQVLPAPSAAQHVVRREGGTRVLGRPRSRSRGENGSEDLPVRFGAATARWCGVGGQVAAVVGAEVVAAREGFSADETVGATYGRTSGSSALTACPRSSCGGMDEGLSTAVLALRSSLLLFSRLKRRSLSLLVQWSSASHLEFVVPQALWCRGCSYPREWNRSPNLRPLCDELKPKAAMSAWTEAESARKEASSAREHVASLAEEVQRRRLELGQVVR

SEQ ID NO: 70549 - protein, 63 aa, Zea mays
  Coding DNA Sequence Number=SeqID_27174
MVLCVTTCDSGDVAHNNEQGGRLSGRAPARELSHNDEREGRVGEAAGAPGVQWLGGVERMSKK

SEQ ID NO: 70550 - protein, 119 aa, Zea mays
  Coding DNA Sequence Number=SeqID_27175
  Homolog annotation: Hit_ID=Q6J9V9; Match level="QueryCoverage=39%, HitCoverage=25%, E-value=1e-07, Identity=50%"; Hit description =Putative uncharacterized protein
MHGGECEGMATARGIDPFLKAALPTRVLKRHGQSLHRRALGSSPYDTGAGSHTSCKLTRNGRSQTTAREAGTGKGDTLKGILLYEGSGPRALLLIRGSKAGPSEGFDNRPRALGLQAHY

SEQ ID NO: 70551 - protein, 153 aa, Zea mays
  Coding DNA Sequence Number=SeqID_27176
  Subcellular localization annotation: CTP_CleavageSite=61; ConfidenceScore=5.24e-01
MELLTKAPVVDCSGKMKKQRQRGSMLGFIVVGTGGSPTVLSPISPAANAAPASISLPPTVRPSVVIGQSRECSHHFLSIDISAPRLHPRIPKSCGASAPTPLVDSSLPNTPEESFSATRLPPLCRAGMDWSLLLLCYGGVTVLDLFGFQERTA

SEQ ID NO: 70552 - protein, 457 aa, Zea mays
  Coding DNA Sequence Number=SeqID_27177
MEKDRQDALRKRQAYARLADPRHKAKMERPSAKPTATGASMPPPAVPTIERRPPSPPRAAEATVAGAEVSMELSVDDYFVGGVTMFDAHTGLAPTAGPAAVTAVARGDVGSSQDSWSKFCAGGEIASAAAAKDVAASVAQQLKYMAAFVERIALGALTSEFSTERQRLQGRIERLRTQHMEAVRDKSAVENRSRNLLEKLMAVEAEKEDLSRRLVEEREGTEKARAEAPASRVEASLALKRATDAESGLKSLHGYAEKTETSTRAEEELESLPSIATGLMSYASLVTCEGAVNALSHEGCRHFEVFDRMLNDEEVEDFGGLESSMTRTEGAGTGAEEQAPQAGPGKDPAAATAPDGEDSAAAAAPSQVPTYGSAQATIADIDTNFLAAANAMPINGNASGSKTELWSSERDDFGSPLSWIEESSDEDLDYFAALDLAAAESSPQPEVREESTPRLGR

SEQ ID NO: 70553 - protein, 141 aa, Zea mays
  Coding DNA Sequence Number=SeqID_27178
  Subcellular localization annotation: CTP_CleavageSite=42; ConfidenceScore=5.05e-01
MRTDGPVAHPTVPVQPGDYAMNSSALGNFSEPARYNSTELSRCSKRTRLWNLAASGIHNGGSAIIHRTCPVYTGLSGVTAGQRHFGANGYLQRIYCAPTRAEVRRAHTGAPDTLQYMSGAPPDIEADPDNSAPTVESQRLW

SEQ ID NO: 70554 - protein, 377 aa, Zea mays
  Coding DNA Sequence Number=SeqID_27179
  Homolog annotation: Hit_ID=UPI00005A9633; Match level="QueryCoverage =11%, HitCoverage=8%, E-value=2e-08, Identity=67%"; Hit description =PREDICTED: similar to Copia protein (Gag-int-pol protein)
MKIKTTSLLKRRTLIKGEMKMIRIRKMIKKLGIKDRHTQESTKQFKDITPSTQYLPYKIEDALRDPDLVVAMQEELNNFTRNENGKPIKTPMGTNGHLDLDTGGKSIDQKLYQNHGLLDASHLLSGLPVLFVRRVTKFGDTTHADRLIFSFQETEPATTGSGAGRAPQRQVPGLRLSHAPRANVWTCHAPASRPSDRMAPTPWPTCVASACEKTDTYGAETTRWGTVGWALGDGELRLIPNPRKWSSSTQYLTTRQRSSSSEKIRRCRMMARLPPDLVTVGGGEFSWKAPHSVAVGAHGWFGREREIEENMWPLVNGIAAAAVSAAATLRHGGAFGREREIEALSHGVRGGGGQREVGRRAPVRGHGAPVDALLTAL

SEQ ID NO: 70555 - protein, 98 aa, Zea mays
  Coding DNA Sequence Number=SeqID_27180
  Gene Ontology: Mol. function=protein serine/threonine kinase activity; Cellular component=cytoplasm; Biological process=protein amino acid phosphorylation
  Homolog annotation: Hit_ID=Q9LSH3; Match level="QueryCoverage=45%, HitCoverage=3%, E-value=6e-11, Identity=71%"; Hit description=Ser -Thr protein kinase-like protein
MALFLDEVIVLLQKDEGATIAKMVTYNRILIVRVGTRDIVKSLFQDDSPTTLLAHVMGTIGSIEQAMLAQGRHTYKYFIKNHMLYEKKSGKDLIAQRL

SEQ ID NO: 70556 - protein, 388 aa, Zea mays
  Coding DNA Sequence Number=SeqID_27181
  Homolog annotation: Hit_ID=A3B299; Match level="QueryCoverage=92%, HitCoverage=37%, E-value=1e-129, Identity=69%"; Hit description =Putative uncharacterized protein
MDCSGRRSEGEERWNGDSSDVLLLPAARVESAIAAKIMSNVKPSENSPSLTYTVSMLQKFARTLALLPSVRVSEDSWSLMIRRILIVVNNLLNDAFIGLEEEKKGHDIMLLLVPPGTDPLPTLGDEVMPGGNVHIMKKFRVFTVPTISALTLCCSVMLTSYYPVQVNVPIHALIALMRRVLLVDGSLHNKLFPSTTSLHQELICFDLPSLHSTFLDLLNATIKGMRSQLLPHGASIIRLITEYFKIAKLPTLRTKTYSILQLLLTSMGVGTSLHLLEATVRNAVADLNDDGEINMTMINTNSSQLTNESSSKVYSKKRKQEPQMQNSTISGSEKVAISPRKRKGSSIPITSKGVAPESTGDVTLSTPHSVKIAALETLEVLLNVIFLI

SEQ ID NO: 70557 - protein, 24 aa, Zea mays
  Coding DNA Sequence Number=SeqID_27182
MAAQNTFFCFVLFLFFFLLLLLRS

SEQ ID NO: 70558 - protein, 310 aa, Zea mays
  Coding DNA Sequence Number=SeqID_27183
  Gene Ontology: Mol. function=metal ion binding
  Homolog annotation: Hit_ID=Q6ZG80; Match level="QueryCoverage=98%, HitCoverage=90%, E-value=1e-102, Identity=65%"; Hit description=Zinc finger (C3HC4-type RING finger) protein-like
  Pfam annotation: Domain name=zf-C3HC4; Domain location=67-114; Score =53.7; E_value=6.5e-13; Accession=PF00097.16; Description=Zinc finger, C3HC4 type (RING finger)
MQFVPHCDHAEVSDSQSTSSQLNLIERSTEHLASCEINPVSVDDDNDNEHIDANEETHLVIQDVPQCRICLDSEGDDLIAPCRCKGTQKYVHRSCLDNWRSTKEGFAFSHCTECRAAFFLRANVPPDRWWLRLKFQLLVVRDHTLIFFIVQLLGFLLDWRGKDCPPDIVLRSDRNMVSTEKIPEPWPPSLVGRHRPLATAHPEGGAQDVVAFMGMVIYRFYGDELREMFGYEEHPYAFYAMAILAIVLVGLLYGFFIAIICGQRITERHYHVLAKQELTKEYIVEDLEGADHVPDLDPSHVIELKILGLY

SEQ ID NO: 70559 - protein, 174 aa, Zea mays
  Coding DNA Sequence Number=SeqID_27184
MGTWMDGEVRANSKEMFRIITVVVDDFPKSIVDMYISCRKYMKSCVDTSESTVRDEINIVDEWGTAYRKQISVPWDLGCAAEIRSTPASMLALLIENTAGTWRWWPSTTIPWNHVIANAIEVLDFQCLINILNDAMTVKVKLILDGLLRRIFQAELTSSACQACESPSRGSASA

SEQ ID NO: 70560 - protein, 58 aa, Zea mays
  Coding DNA Sequence Number=SeqID_27185
MALRAATSAAAISLQAGIIVLAENEAKLFHSLRKKTGCCHSDYSHYLEEYQAELSAGE

SEQ ID NO: 70561 - protein, 113 aa, Zea mays
  Coding DNA Sequence Number=SeqID_27186
MSQSHLAPTAAPTSPDALIPTPAWAAVAVEVLRVAWLCGVGSRDFWDNTSTQAWGIAHRNSVATVSPPSRAGILTTLRSEKRCGPLILDQAGPIRSGCFKSTSWISDLTSIGY

SEQ ID NO: 70562 - protein, 112 aa, Zea mays
  Coding DNA Sequence Number=SeqID_27187
  Homolog annotation: Hit_ID=Q8LN48; Match level="QueryCoverage=70%, HitCoverage=26%, E-value=3e-08, Identity=40%"; Hit description =Putative uncharacterized protein P0031G09.3
MGRPKGATWQGKTTHPTLTIEYTSATFCYVEFKKIQNTETLETLKEHKRQEDQFSISKCLAQLKGMDGLTVMDKTYALELFVSATNRDIFLTATEHDVRQIWLKRKIRYAIT

SEQ ID NO: 70563 - protein, 335 aa, Zea mays
  Coding DNA Sequence Number=SeqID_27188
MAPGPASGEDASLQVGPESDWQLDRCSCAPVAAITAGPPMAMPTDSRDGLEKTWHWRKRRGATPWELASFHHHSASRIFITQPGCNLRPMVIHKDDYQPCGGEKRAGLRPPPALSFKDVHHPRWGGGRAEWELHLPCGLAVRFFLQHSGEKGVCQPCGGGELRRWSLPLVGLTWSPPLVRLPTAEVVASAGKTVSATWRRTSDSLALMASLSSPVGGRRRGPVRSSAHPEVIAAAGEPLGAEVIVAAGAEVVAVVGIPSMQRWLPPLVGLSGASFRHDSCWCSVVHSCRNGARVPLVRECDDICLRAECNNICTQDFSLGSQVVCSDPLDGGFKY

SEQ ID NO: 70564 - protein, 623 aa, Zea mays
  Coding DNA Sequence Number=SeqID_27189
MPSSSSSANATPPAAASSEETLSNVMVEELRAGDSVEFGVSRMTSARIEDMQRLGYFGGGVARAPGTEEVPEPEGELVVFEAFFVAGLRLPAHRDGQGSPRGGAKTPGDCEGSRSSAEEAAGERRRLRPPAEASRRCRRRAGASAPGKAPEVTVGAGGPKLTKVVPSASGAAEAAKAARTLPPPGKRVADFGTEINVEDYLGGSDEGPLALVVPGAAIATAAPAPKAGGDFLGAGGEVSALALVRDEAGVATRRLKGATEALSRATEALSQVADFTSRTASGALTAALSAEVERLRTQHVDVVREKSASDSKCRKLAEKAAALEKEKADLRRQLAEERREANEAIAKEQAAQAEARLARAEGNIAKELAGELQRRLAALESRAEGAEAAMRAEAERTRTQLMTSYRELGVRTGDFEVPEREAGLRCLEWVQEELQELPTVLAGLMSFTSLVTCEAAMNALSREGCRHYEALDQVDEDFGRDIFEVEDPVVKESVGALYDRMWGSYGREVVRARAEAARAQAERGERVDDFGALNSALPEPETTPAEAATGVAPGPTPETAEDAPGAPAPAAAGEDLPPTVAEGAPDAPAAAVRSAEDPAEVGAEATAEASAEAAAAAGPSQVA

SEQ ID NO: 70565 - protein, 146 aa, Zea mays
  Coding DNA Sequence Number=SeqID_27190
  Gene Ontology: Mol. function=glutathione transferase activity; Cellular component=cytoplasm; Biological process=response to stress
  Homolog annotation: Hit_ID=Q9FQC3; Match level="QueryCoverage=81%, HitCoverage=40%, E-value=1e-60, Identity=96%"; Hit description =Glutathione S-transferase GST 16
  Pfam annotation: Domain name=GST_C; Domain location=35-123; Score =52.0; E_value=2e-12; Accession=PF00043.16; Description=Glutathione S- transferase, C-terminal domain
MAKNHRTVLSVSSVRPHTRGYPRGAFAEHAFNPLSRALFCHLAFPLGEEDDDIDVHTRKLEEVLEVYEQRLSDNEFLVGNKFTLADLVHLPNSHYIKASNKFLYLYDSRKNVRRWWDAISDRSSWKKVLRYMKSVEEKNKQEELKK

SEQ ID NO: 70566 - protein, 154 aa, Zea mays
  Coding DNA Sequence Number=SeqID_27191
  Gene Ontology: Mol. function=small conjugating protein ligase activity; Biological process=regulation of protein metabolic process
  Homolog annotation: Hit_ID=Q7Y014; Match level="QueryCoverage=75%, HitCoverage=87%, E-value=5e-21, Identity=50%"; Hit description =Putative ubiquitin-conjugating enzyme, 3'-partial
MASPSSSPSRKALSKIACSRLQKELAEWQVNPPAGFKHRVTDDLQRCPSAIVALPIPFPQQAIPAVRGLLDSFLRGSVLGYRFLVRESSTSSALDATRRDVIRRVIFLHPAPMHPHIYSNGHICLDWSTGYAKKFLEILLTNHDSMRWQLSLAP

SEQ ID NO: 70567 - protein, 167 aa, Zea mays
  Coding DNA Sequence Number=SeqID_27192
MGDLDGAPSSRFGDPRAGRSVRSDRCNSSLLYPRRYCLRIGFKMSSHDAKVLQNLVLTLASLVETSAFNIRSFLEEAFMHLGDEHYLLNALLTIRKEVDLMEQDALESKARSDPEKERMEEEIKVLEQVNPVAQNSFTPPSSPELYEASDNDSYDSDRSTRYSIWNL

SEQ ID NO: 70568 - protein, 238 aa, Zea mays
  Coding DNA Sequence Number=SeqID_27193
MGPQVPVGGNPQKSFATRREDGCLRDGVGTEIVQLHPVDVQNRPHETTCRHSEPLLVKRDEAQHIPRRRGRGGSARRGHPLRLRVTGERTKQTISNKGLQIIRRDGGERPRVARRNNGHPVGHHQAEEVVAERTSRAGDTFGRRSRRRFTSAMMTASKRDRERGYFERDPSPRRKRAPSPPTDQRFEGSGAALANPAPANPLTASTYQPENLEPDYAPGLRPVRMREQPDRPKHHETR

SEQ ID NO: 70569 - protein, 157 aa, Zea mays
  Coding DNA Sequence Number=SeqID_27194
  Gene Ontology: Mol. function=protein phosphatase type 2A regulator activity; Cellular component=protein phosphatase type 2A complex; Biological process=signal transduction
  Homolog annotation: Hit_ID=A3ALG2; Match level="QueryCoverage=69%, HitCoverage=67%, E-value=4e-49, Identity=89%"; Hit description =Putative uncharacterized protein
  Pfam annotation: Domain name=B56; Domain location=2-145; Score= -182.0; E_value=7.7e-07; Accession=PF01603.11; Description=Protein phosphatase 2A regulatory B subunit (B56 family)
MDAKAGGMVNCCGREEIDGKLLALTKELEAVGMWYVLEMGNVVGEIAHVAERALFLWNNDHIVSLIAQNRVVIFPIIFEALERNIQSHWNQAVHGLTANVRKMFLDMDSELFEECQQQYMEKQAKAKEIQEQRESAWRQLEAVVAAKAAGDDMVLVN

SEQ ID NO: 70570 - protein, 68 aa, Zea mays
  Coding DNA Sequence Number=SeqID_27195
MGKNKKGGGSSHHSNDKRKCEPSPPSEDFGDSEYSEEEFSSESEGAEREMCPWAISKCFGDLVSNTSA

SEQ ID NO: 70571 - protein, 148 aa, Zea mays
  Coding DNA Sequence Number=SeqID_27196
MENPVVHLIHGNGHGLQGKKRSKRDKGPSSCSSGTFALKGEQREVCRHGDPILPRRPLYRRKWNRLPSPTMSQPCLGKNLLSEKLADGGTNAGMFSDIMKLENETRRSLYLEMRSRRWEKLLMNESSGKGGTLADVTDGKLRSKLNRM

SEQ ID NO: 70572 - protein, 268 aa, Zea mays
  Coding DNA Sequence Number=SeqID_27197
  Homolog annotation: Hit_ID=A3AUK1; Match level="QueryCoverage=98%, HitCoverage=95%, E-value=4e-77, Identity=54%"; Hit description =Putative uncharacterized protein
  Subcellular localization annotation: CTP_CleavageSite=68; ConfidenceScore=5.54e-01
MAAPPVPVLCSASPCRITTHLAPPAFRTVAAARPQALPFVLCVEQRVGPSARARAPFAAKRGGGGEVSAEAPDGTRALLQAALWGAEAAYILWLFLLPYAPGDPVWAISQATISDLIGLSLNFFFVLPLLNSAFLIPYMAIRLNGPEADRSPPRRSQLGSVMVNGAPAVGAVGGLVCVLSIVWAFSGRGDSGFGGIAERWQYLQSYLFSERLAYAFLWDMFLYSVFQPWLIGDNLRNVKADAAGLVSVVRFVPVVGLVAYLLCLEEED

SEQ ID NO: 70573 - protein, 503 aa, Zea mays
  Coding DNA Sequence Number=SeqID_27198
  Gene Ontology: Cellular component=integral to membrane; Biological process=peroxisome organization and biogenesis
  Homolog annotation: Hit_ID=A7P347; Match level="QueryCoverage=73%, HitCoverage=83%, E-value=1e-129, Identity=59%"; Hit description =Chromosome chr1 scaffold_5, whole genome shotgun sequence
  Pfam annotation: Domain name=Aa_trans; Domain location=1-395; Score =370.2; E_value=3.5e-108; Accession=PF01490.9; Description =Transmembrane amino acid transporter protein
MVGAGVLSLPYAMAHLGWGPGMVALLASWGITLYTLRLLIELHECVPGVRFDRLRDLGAHALGPRLGPWVVVPQQLIVQLGCDMVYMVTGGKCLQKFAESACPRCAPLHRSYWICIFGSSQFLLSQLPNLDAITAVSFAAAAMSLCYSTISWAACVARGPVPGVSYDAYKAGTGTGTAADSAFRVFSALGQVAFAYAGHGVVLEIQATIPSTPTKPSRAPMWKGTVAAYLVTAACYFPVAVAGYWAFGRDVGDNVLVALQRPPWLVAAANMMVVIHVVGSYQVYAMPMFESIETIMATRFRLPRGLLLRLVARSAYVAFTLFVAVTFPFFGDLLGFFGGFGFTPTSYFLPCVLWLKIKKPPRFSASWCANWVGDDRHFFFFLAFFGFFKLGESPELGLASACSPLACSVRVSLSGLHHRRSAADACVHHRRLTEHRPRRIDVPVLLLKPSHLHVPLHSHGSSKSSPSLVHAALPLHFVASLRVSGCGCSLPKCRGRCSKLYTR

SEQ ID NO: 70574 - protein, 241 aa, Zea mays
  Coding DNA Sequence Number=SeqID_27199
  Gene Ontology: Mol. function=lipid binding; Cellular component =anchored to membrane; Biological process=lipid transport
  Homolog annotation: Hit_ID=A2XMU5; Match level="QueryCoverage=42%, HitCoverage=57%, E-value=8e-13, Identity=37%"; Hit description =Putative uncharacterized protein
  Pfam annotation: Domain name=Tryp_alpha_amyl; Domain location=34-111; Score=45.1; E_value=2.5e-10; Accession=PF00234.13; Description =Protease inhibitorseed storageLTP f
  Subcellular localization annotation: CTP_CleavageSite=19; ConfidenceScore=5.13e-01
MASAPAFYVALLLLLASVAAVHAVPPQAGTSSTCSTDLLRLLPCLPFIEGTATVPADTCCANLGSMVHDEPQCLCQALSNPSTAPVAVNMTRVMAMPRLCRLDLPPATGACAGNTRTHAISITCTDISPPLLVPGIWHSLKLCLMMSPLAVAGLLPHGPSPPLPPPPPPPAAAVTPHASANSSAPATLTTPATPTPTTPRMIPSPSVSSQTPPRYSRGSKMIAHGFSVTLGFVALVSVLAF

SEQ ID NO: 70575 - protein, 158 aa, Zea mays
  Coding DNA Sequence Number=SeqID_27200
MACEDTAGLGALWRHSMPANHGQEDPTPHMMLDDATKAHQPNNTRGPGVCLGVKNKSADRTANIQRDSPSKISAMDLKGKNPQNSQWDRWGPMEKPQGPHSWNRTRNLSWKLKPTLGKSEQHEGLLSPHPGEGTKSGNPSVSPVPLKKDVDLVRPAFC

SEQ ID NO: 70576 - protein, 91 aa, Zea mays
  Coding DNA Sequence Number=SeqID_27201
MAGDKQRQKLKQKPSSKISNTYIKKVDKKTVIPYLIKKKKNGKVIAIKANKQANKGKGAKRIWVHQEGLDPKREVIAKWVSKFFGPKFPHP

SEQ ID NO: 70577 - protein, 294 aa, Zea mays
  Coding DNA Sequence Number=SeqID_27202
GDENDGFDYDYGNGAKGSQQTNTKSKKGFKYKGAKPTKGCPSLAHRSVRCTRVDQLELLSFGDLGKLLRYNSPDCPVCQRSNGYFAPTVVCKGTMKVNSARLRAQKSEQAPEGAPDSEQDLSDKQDTPCPSKARYSSRRNRQPQPQQSDLYPLASKSQQAGLWPLQPPKESETQPSMEYEHLVASPTEGEGLAVVFHNKPLEVPPFDAVLEGDVEVLYLPPTTHLQTGTTDELVLSPGHPGLAMIQILPKAKMGENLEIIEIKEAAEEGRNGKSKAADKKRNNPNVNKMEKIGF

SEQ ID NO: 70578 - protein, 106 aa, Zea mays
  Coding DNA Sequence Number=SeqID_27203
MTNLNSPHQLSPILKDTVIGTLGLKYLSSPPHDQPEATLERFVSGSPHKITTDSEAPPCVSYSSVTFGKKQTATTLKVYTRKMPRERGYQDTEVVQVIDDGRGDAE

SEQ ID NO: 70579 - protein, 592 aa, Zea mays
  Coding DNA Sequence Number=SeqID_27204
  Gene Ontology: Mol. function=ATP-dependent helicase activity; Cellular component=endoplasmic reticulum membrane; Biological process=vesicle-mediated transport
  Homolog annotation: Hit_ID=A2YPI3; Match level="QueryCoverage=79%, HitCoverage=44%, E-value=1e-144, Identity=60%"; Hit description =Putative uncharacterized protein
  Subcellular localization annotation: CTP_CleavageSite=34; ConfidenceScore=5.27e-01
MHTTRPLSTTNHLPAFLIHRKGRRRGAGGAVTCRGRRAGGANRAGGGCIFNGSWRWKGTSSRRVAAPSLGLGPPILGVQPPGQTGPCRRGGGRQGGGHQYQGGDRRGAGGEGSGEGKRSGGFAQKEEWHILCDTLASRLLNVGDTLAATLCYICAGNIDKAVEIWSRTLKSEDGGKTYVDLLQKRFSASLSKLIENYAELLASQGLLKTAMEYLKLLGSDEHSHELAILRDRIACSTEENDNVSSVSESTGTPSPYVTNQPYTTPDHSQNVYQVPQPYNVPSNTYSEAYPQQGTGAYGYNNAYQPQQPANMFVPPSTPPNTQQQPGPSHVPVPQQTVKTFTPANPAGLKNPGQYQQPNTLGSQLYTGATNQPYSSGPSAPYPSGPPTTFHQPVAPVQYQSAAPPVSSFGPTTPVPGTVPNQMFPHSAATNSTSRFMPSNNQSFAPRPGLSPVQPSSPTQVQAQPAPPAPPATVQTADTTKVSAELRPVIGTLTRLFDETTKALGGSQATQAKKREIEDNSRKIGALFSKLNSGDISPNVSSKLIQLCSAIDASDFVTAMHLQVLLTTSDWDECNFWLAALKRMIKTRQNFRM

SEQ ID NO: 70580 - protein, 637 aa, Zea mays
  Coding DNA Sequence Number=SeqID_27205
  Gene Ontology: Mol. function=ATP-dependent helicase activity; Cellular component=endoplasmic reticulum membrane; Biological process=vesicle-mediated transport
  Homolog annotation: Hit_ID=A2YPI3; Match level="QueryCoverage=99%, HitCoverage=55%, E-value=0.0, Identity=80%"; Hit description =Putative uncharacterized protein
  Pfam annotation: Domain name=WD40; Domain location=114-153; Score =20.4; E_value=0.0066; Accession=PF00400.23; Description=WD domain, G- beta repeat
  Pfam annotation: Domain name=WD40; Domain location=164-203; Score =21.7; E_value=0.0027; Accession=PF00400.23; Description=WD domain, G- beta repeat
  Pfam annotation: Domain name=WD40; Domain location=255-294; Score =33.9; E_value=5.7e-07; Accession=PF00400.23; Description=WD domain, G-beta repeat
  Pfam annotation: Domain name=WD40; Domain location=298-337; Score =12.0; E_value=1; Accession=PF00400.23; Description=WD domain, G-beta repeat
  Pfam annotation: Domain name=WD40; Domain location=54-101; Score=1.2; E_value=22; Accession=PF00400.23; Description=WD domain, G-beta repeat
  Pfam module annotation: Pfam domain module=WD40::WD40::WD40::WD40::WD4 0; Domain location=114-153::164-203::255-294::298-337::54-101
MACIKSAHRAALTALAPDAPYLAAGTMTGAVDLSFSASANIEIFRLDFQSDSTDLPILASAPSPDRFNRLSWSRPGAVEGDSFALGLLAGGLSDGSVAVWNPLSMISSEGKAEDAMVARLEKHTGPVCGLEFSELTPNRLASGAEQGELCIWDLKNPVEPIVYPPLKSVGSHAQAEISCLSWNPKFQHIVASTSSNGMTVVWDLRNQKPLTSFSDSNRRKCSVLQWNPDMSTQLIVASDDDNSPSLRVWDVRKTISPVREFVGHSKGVIAMSWCPYDSSFLLTCSKDNRTICWDTVSGEIISELPASANWNFDLHWYRKIPGVIAASSFDGKIGIYNLEFSGLYATGDAVGAPVRPRAPAPKWLKCPTGASFGFGGKLVSFHPVAPTQGAQTSTSEVHVHNLVIEQSLVSRSTEFEAAIQNGDKSSLRALSDEERETWGFLRVMFEDGDFARTKLLAHLGFEPPQAPPASSTDELSQTLADTLNIDHAAVTDNADAQFLIDNGDDFFNNPRPSEASLAEESVSTNGQQIEQEVSGDSVPSDPSIDKSIQHALVVGDYKGAVNQCLASNRMADALVIAHAGGSALWESTRNHYLKNSISPYLKVVSAMVGNDLMSFVSTWPLSSWKETLALLCTCLLI

SEQ ID NO: 70581 - protein, 215 aa, Zea mays
  Coding DNA Sequence Number=SeqID_27206
  Gene Ontology: Mol. function=sugar:hydrogen symporter activity; Cellular component=integral to membrane; Biological process =carbohydrate transport
  Homolog annotation: Hit_ID=Q94EC4; Match level="QueryCoverage=69%, HitCoverage=29%, E-value=4e-54, Identity=71%"; Hit description =Putative monosaccharide transport protein
MAGGAFTEKGKQYPGKMTVFVFLTCLVASSGGLIFGYDIGISGGVTSMDPFLKRFFPSVYAKEQEVVETNQYCKFDSVLLTLFTSSLYLAALVASLFAGYITKRCGRRVSMLGGGAIFLVGAVLNGLAQNVAMLIIGRIFLGIGVGFSNQESLAGPPSQQNPPEGLPRNPLQDRHHSKILPRAFPGIPCRTAITAKSSRGPPYTDHSPTALAPFG

SEQ ID NO: 70582 - protein, 254 aa, Zea mays
  Coding DNA Sequence Number=SeqID_27207
  Gene Ontology: Mol. function=phospholipase A2 activity; Biological process=lipid catabolic process
  Homolog annotation: Hit_ID=A3BN09; Match level="QueryCoverage=57%, HitCoverage=55%, E-value=2e-80, Identity=93%"; Hit description =Putative uncharacterized protein
  Subcellular localization annotation: CTP_CleavageSite=83; ConfidenceScore=5.74e-01
MEVTSSPSPSAPPPASSKPALQLNPAAVLLRRLPTPTPTAATPVTATAPPARPATASNPLAALLVPFWRGLRRAPKQPVHPASAAAARRAAEQQEAEARGGGAAAGGLPWHGGARAWLSKLFPRYGHYCGPNWSSGKEAGSVLWDRRPVDHLDFCCYCHDMAYDTHDQAQLLRADLAFLRCLEGSRHTPARDGIAAAAIYRAMCIFGLKTILIPYRTNLVRLQTGPNYADFFADFVKRVASSSGRPTGGEKQRL

SEQ ID NO: 70583 - protein, 319 aa, Zea mays
  Coding DNA Sequence Number=SeqID_27208
  Homolog annotation: Hit_ID=A9P7U0; Match level="QueryCoverage=93%, HitCoverage=91%, E-value=2e-41, Identity=36%"; Hit description =Putative uncharacterized protein
MSLSPADSAAYWLRWQVLVCGALIALPAAAAAALLPRLRRAAPPLRAADLWVSCWARLHPGWLLAYRAFALAAAVALLARLLVGHGLTVFYFYTQYGHSILLLKASWTFLLVTIYFAFATAISAHGCWVYSRKSLRKSDESHGFLNADVENRDVSNSISGERKKDETKMMVSYYEQIANERRAGFWGRCMQIIYQTSAGATMLTDVTFWGLLVPFFYRDKFGLALVTDGMHSLNAVFLLIDTVLNNMISEYAANSLQIHCLVLAMHVGTLLLAKWPYPFLDLSSSGAPIWYWHLPPLIPSFTIRECLQQSEFGAAVRLL

SEQ ID NO: 70584 - protein, 871 aa, Zea mays
  Coding DNA Sequence Number=SeqID_27209
  Gene Ontology: Mol. function=transferase activity; Cellular component= intracellular
  Homolog annotation: Hit_ID=Q8GRV4; Match level="QueryCoverage=60%, HitCoverage=96%, E-value=0.0, Identity=72%"; Hit description =Symbiosis-related protein-like protein
  Pfam annotation: Domain name=DUF563; Domain location=128-401; Score =369.5; E_value=5.6e-108; Accession=PF04577.5; Description=Protein of unknown function (DUF563)
MVQQQQQHRIYILQFRKGGPEQEVSCKVSQPKGGGRRPVMYYYQDHGSGGGKNGKKVQPRALGLRRFLGMLFLSFLCVGTLFVAPVSFLSFVHSDEGGSAAAAAAAAATAAVRGGVSEPCSAVGNDSLCCDRTSERADICFAKGDVRMHSASASFQLVSAGNSSAAAEEEERIRPYTRKWEANVMATIDEVRLRRVLPGDAARCDVRHDAPAVLFSTGGYTGNVYHEFNDGILPLFVTAHHLRRRVVLVILEYHDWWMTKYGDVVSQLSAFPPIDFAADRRVHCFPELIAGLRIHGELTVDPARTPEGKSIGDFRRLLDDAYRGRIGFLERLERRAARKRLRQRRHRRGGGGGAPPAPGGPREDRPRLVIVSRTGSRVIENEADVAALAADVGFDVRVIRPERTTELCKIYRELNGSDAMVGVHGAAMTHFLFMRPGKVFIQVVPLGTHWAAGAYYGEPAARMGLRYVGYRILPEESSLSREYPTGDPVLTDPAGVAQRGWDVTKKVYLDRQNVRLDLARFREELVRAHRKLPVDVDASGRRAHAHSDVWWQARPRPRRSRTSDVRAVEPNAGHREPAGGLAFLLAAGSGVGPWATFLQAWLAWAAALASSSRIGKWLPRHFARYAETWRNRQTLGCWAVAGYRLTACAASRDVGNFGQLGCCCGWTEEDRLYFGVGPNPKGLGSKSLFRFRLLQPVLLPRTSSARYPGSPLVRTIASAPIRRLGAGGRDVDLDGGDSDHRSMEAADSESVISTFTCPHCIVSGRYSYDYHDGREVPSSNIALHSAHCARNLQKCEHCGDMVARKLMDEHYDENHAPAYNAHKGCSRANTVSLNCLQLIFLNIRKYIRLREWIGHELQFHTILNAASELSR

SEQ ID NO: 70585 - protein, 104 aa, Zea mays
  Coding DNA Sequence Number=SeqID_27210
MASTDFICVHDRGCGAKSSSSTMAKMSGEWGMSSTHWASSEAEEQAGARRSTIISLPRTKAKPTMRRNDPRGTTRWKAMTTTWEDELISCLQKGERDDPASVVA

SEQ ID NO: 70586 - protein, 171 aa, Zea mays
  Coding DNA Sequence Number=SeqID_27211
MRGVRWIGDGDSGLEISVVKETSDWMVVEGGPDISDTRLYRSRVTKPYLYLTYLRGVGPSWAVTICFVFLIEPAAEIRINNLPWHLERSELSMEDQTFTTTDTVHGDPRGDGVKMLEILEAMVSRCLRWWRWFCGHGWWHGAKGLLEYVFHNRLSTGVYFGVPSRLVNVGM

SEQ ID NO: 70587 - protein, 24 aa, Zea mays
  Coding DNA Sequence Number=SeqID_27212
MELESRLLGNVGKAVEGAADVYVA

SEQ ID NO: 70588 - protein, 199 aa, Zea mays
  Coding DNA Sequence Number=SeqID_27213
MRDRERGYSERDPSPRRKRASSPLLIRGSKAGPSKGFNSRLRALGLRAHYWSEVRRLAPRKGSTAASGHSGSAPTTDQGFVGWPLKGSDSRLRARRARDDPGYVRYITKARATLPRGSRSALANPTPAKPLTASTYQPENLGLDYAPGLRPVCMREQPDRSKHHENALRPRRSQTTPPKPRGLHPADLEPKIKDVHLDP

SEQ ID NO: 70589 - protein, 200 aa, Zea mays
  Coding DNA Sequence Number=SeqID_27214
  Homolog annotation: Hit_ID=Q53NM4; Match level="QueryCoverage=77%, HitCoverage=86%, E-value=8e-20, Identity=37%"; Hit description =Osmotin protein homolog-rice, putative
MAIMLSCSRTLEKALMMMTMALATIAGASIITTTTNLTHQNLGSYPVWPLVTANAGVQPIPADDEPALRLELDSNGEGLATLAFPPGAWWHGPGNTPAVTVAHVSVGEPGRAGPRHTASTGCRRRAGGGAPRWDAPWTSLPTAPRAPERHEEDAALFKARYPDTRTNATDVEVTPHDHVNPSEIKVVLCPKPASVVAGHL

SEQ ID NO: 70590 - protein, 188 aa, Zea mays
  Coding DNA Sequence Number=SeqID_27215
  Gene Ontology: Mol. function=metal ion binding; Cellular component =integral to membrane; Biological process=ubiquitin cycle
  Homolog annotation: Hit_ID=Q53NM8; Match level="QueryCoverage=31%, HitCoverage=35%, E-value=1e-22, Identity=71%"; Hit description=Zinc finger, C3HC4 type (RING finger), putative
  Pfam annotation: Domain name=PHD; Domain location=114-159; Score= -3.6; E_value=0.035; Accession=PF00628.20; Description=PHD-finger
  Pfam annotation: Domain name=zf-C3HC4; Domain location=115-156; Score= 41.4; E_value=3.3e-09; Accession=PF00097.16; Description=Zinc finger, C3HC4 type (RING finger)
  Pfam module annotation: Pfam domain module=PHD::zf-C3HC4; Domain location=114-159::115-156
MSWSSLTSGDTYKSPAFIALVSALCVAVLLLLHHCVLVACCHGGDRRRRRQQHHHRRVVGVVSASTADTRRQRQPEEEEEASVSVEVSATSRTHLVGAAVVCRYRKEEAWNESTCPVCLADFDDGEVVRVLPECMHYFHADCIDTWLRGSTSCPMCRAETTPTPTPSPASVRHHLELSVSLEEILVAT

SEQ ID NO: 70591 - protein, 72 aa, Zea mays
  Coding DNA Sequence Number=SeqID_27216
MVEKGHGSRGGTMVTLSAITERRDRKRGYFEKDPSQRRKRAPSPPTDQGFEGCALRGSATAPEHSGFEPFTD

SEQ ID NO: 70592 - protein, 103 aa, Zea mays
  Coding DNA Sequence Number=SeqID_27217
  Homolog annotation: Hit_ID=Q6QP51; Match level="QueryCoverage=29%, HitCoverage=13%, E-value=3e-07, Identity=86%"; Hit description =Putative growth-regulating factor 1
  Subcellular localization annotation: CTP_CleavageSite=26; ConfidenceScore=5.47e-01
MSHLDYSTNRVKLTTVSHDFPRVQPRAQQGALPRPTSGLGLSLGLGRRSPPRPTPGLGLSLDLGGSHVLARPQASASGEVSASPDLGLGPTTLQEMHHYPTPS

SEQ ID NO: 70593 - protein, 203 aa, Zea mays
  Coding DNA Sequence Number=SeqID_27218
MASHGSSDEGNAQSHTDGLAREGFPCILWEVLQGAGYTTPPQYAVQQFEKHRVPRCRVRMTLEPHPLQPGWRSLDSESFGYRAEDTIEAIALHGLTTFCGFHPLELSTHAIGLFPVEKEDDPMWKDRVEHAKDIWAIYPDTDEKKRDRFRRGLSTKLRDRLNTVRANSYNELVNMAISQEDCITTRQAEKKRKTPVAGPSAQP

SEQ ID NO: 70594 - protein, 19 aa, Zea mays
  Coding DNA Sequence Number=SeqID_27219
GIFLTERGKAGVGESNGTD

SEQ ID NO: 70595 - protein, 222 aa, Zea mays
  Coding DNA Sequence Number=SeqID_27220
  Gene Ontology: Mol. function=pyruvate kinase activity; Cellular component=cytoplasm; Biological process=glycolysis
  Homolog annotation: Hit_ID=A4B409; Match level="QueryCoverage=99%, HitCoverage=60%, E-value=5e-72, Identity=56%"; Hit description =Pyruvate kinase
  Pfam annotation: Domain name=PK; Domain location=1-222; Score=285.1; E_value=1.4e-82; Accession=PF00224.12; Description=Pyruvate kinase, barrel domain
MRADKVREIAAKLGRHVAILGDLQGPKIRVSTFKEGKVFLNIGDKFLLDANLGKGEGDKEKVGIDYKGLPADVVPGDILLLDDGRVQLKVLEVQGMKRCDAKIVAKVERAEAVCSQDAMDDIILASDVVMVARGDLGVEIGDPELVGIQKALIRRARQLNRAVITATQMMESMITNPMPTRAEVMDVANAVLDGTDAVMLSAETAAGQYPSETVAAMARVCL

SEQ ID NO: 70596 - protein, 262 aa, Zea mays
  Coding DNA Sequence Number=SeqID_27221
  Gene Ontology: Mol. function=transcription factor activity; Cellular component=intracellular; Biological process=regulation of transcription, DNA-dependent
  Homolog annotation: Hit_ID=P46118; Match level="QueryCoverage=95%, HitCoverage=100%, E-value=1e-128, Identity=86%"; Hit description=HTH- type transcriptional regulator hexR
  Pfam annotation: Domain name=HTH_6; Domain location=13-118; Score =208.2; E_value=1.9e-59; Accession=PF01418.8; Description=Helix-turn -helix domain, rpiR family
  Pfam annotation: Domain name=SIS; Domain location=136-226; Score =22.2; E_value=0.00073; Accession=PF01380.13; Description=SIS domain
  Pfam module annotation: Pfam domain module=HTH_6::SIS; Domain location=13-118::136-226
AEIVITRESLYIMNMLEKIQSQLEHLSKSERKVAEVILASPDNAIHSSIAAMALEANVSEPTVNRFCRSMDTRGFPDFKLHLAQSLANGTPYVNRNVNEDDSVESYTGKIFESAMATLDHVRHSLDKSAINRAVDLLTQAKKIAFFGLGSSAAVAHDAMNKFFRFNVPVLARENDAMVIALTFAGTPLAREATLAITLDVPEDTDIYMPMVSRLAQLTVIDVLATGFTLRRGAKFRDNLKRVKEALKESRFDKQLLNLSDDR

SEQ ID NO: 70597 - protein, 143 aa, Zea mays
  Coding DNA Sequence Number=SeqID_27222
MAEDLASSAGHPRDADDSVEEGKSDRMGPHDSEGGTRGAGGELANRADRWARERSELQSASASERPPCGSHATVRAARGAELGWPREGKGKWAKFTNLRTRNEAVHNMKSMVETKVEPASRVHARKLRLSSRKRNRLKEEKAI

SEQ ID NO: 70598 - protein, 218 aa, Zea mays
  Coding DNA Sequence Number=SeqID_27223
MSGALFISELGDNLNHFHDVGGMQTTLEWGARGMNDFLPDHIKHIQSLIAVGLHEREKYLAFTQNVHLISPFGNESHHEKRVEISVVLMHKAWFKSRPRLPRDATSSEPSLRQGRVKLTTAGLDLPRVQPRAQQGAPPRPTPGLGPGLGEGLRLARPQASASGEGPRLARPRASVIALASGGVTSSPDLNLGLRRSLRLARPRPRTDYATWDTSLPYR

SEQ ID NO: 70599 - protein, 47 aa, Zea mays
  Coding DNA Sequence Number=SeqID_27224
MGEELGSTRKGAERGVGLPFSRKKGAAGTSLADFYSVLKALFEILRD

SEQ ID NO: 70600 - protein, 112 aa, Zea mays
  Coding DNA Sequence Number=SeqID_27225
MVVGGGVGARARGADDRPWCGHTGAKSEWAPVAARLSSGSGGGSVARPCWLQWAVVERHRWRQGGVVELLHDNKSKATQVREYQSSPLIRKIIEGEKIRDKDEGAMNRIREE

SEQ ID NO: 70601 - protein, 307 aa, Zea mays
  Coding DNA Sequence Number=SeqID_27226
  Gene Ontology: Mol. function=transcription regulator activity; Cellular component=nucleus; Biological process=regulation of transcription
  Homolog annotation: Hit_ID=A2XJ66; Match level="QueryCoverage=94%, HitCoverage=98%, E-value=1e-101, Identity=61%"; Hit description =Putative uncharacterized protein
MYSGQQSDQGPSANSGREFSEANWNSYTMHQKIAYSGQHGFGPYGMGLEDRLGLYQSSSGTLSHDIQMSDEHSGGVKKRKGVEDCVTLLPNAGDQQTEGSSQPERNSMEEGNRKISPKIQSKEDSSDGDGTKEDYVHIRAKRVNETLQLRRKKISERMKLLQDLVPGCSKFLSMKLSTVNPELGFDIEQIISKQMMLSQDRHLAFYGVDPGSSSLTAPFNQGIVQPAMMCNISNPADVLHGTIHDVSTMNQVMGFCEPWTQIPSMWEGLQSMPQMNFNPGVAADSGTNNSGIYVILSSLFSEKYKCP

SEQ ID NO: 70602 - protein, 75 aa, Zea mays
  Coding DNA Sequence Number=SeqID_27227
MSLTHVDPHKWEWLIKKEDSSKMKNTMELMKGCIHEYCPPLGIIRILHFSDGQSRSHPGLGQLARARRWGFWELI

SEQ ID NO: 70603 - protein, 195 aa, Zea mays
  Coding DNA Sequence Number=SeqID_27228
  Subcellular localization annotation: CTP_CleavageSite=28; ConfidenceScore=5.10e-01
MQAACNRAKWAHPFDSNAPSMEAQAHTSCNRRAGCYVRATAPPLAPLLRLLDCETSTATRGNPAYDPTVPARHVGHGTGDTFGRRSGRRFAFAIMTASKKVCHVISISYPFPLPLYLSYNRDRERGYPERDPSPRRKRALSPPTDQRFKGWPLGGVQQPPQSARAPRPLLVRGSKAGPSEGFNGRLRPLGLRAHY

SEQ ID NO: 70604 - protein, 92 aa, Zea mays
  Coding DNA Sequence Number=SeqID_27229
  Subcellular localization annotation: CTP_CleavageSite=81; ConfidenceScore=5.02e-01
MPPVALRLRAVFPPFRRALHPRDTYNLRCRSTRLDLAYFRGPCPNLGFSAPAPGANPGVFGPNGRPNWACRPPNVLPFGQRVDATVGVLEYD

SEQ ID NO: 70605 - protein, 43 aa, Zea mays
  Coding DNA Sequence Number=SeqID_27230
MAERYQLPWSCVPPTRRRKGGGYPPSGGLEDGCDTPVSPRVSL

SEQ ID NO: 70606 - protein, 246 aa, Zea mays
  Coding DNA Sequence Number=SeqID_27231
  Gene Ontology: Mol. function=hydrolase activity, hydrolyzing O -glycosyl compounds; Cellular component=extracellular region; Biological process=carbohydrate metabolic process
  Homolog annotation: Hit_ID=Q5W6G0; Match level="QueryCoverage=90%, HitCoverage=50%, E-value=3e-70, Identity=57%"; Hit description =Putative mannan endo-1,4-beta-mannosidase 5 precursor
MLTRVNTYTSVMYKDDPTIFAWELMNEPRCTSDPAGNKLQGFYGPSSPSRLPANPNAYAGQVGTDFIRNHRVLGVDFASVHIYPDTWMPGATLEARLWFVESWDGRRTFADRRRHAGACRWSSRIFFLSTTKARSGCFNATTRDQFIQAVYARLLNSTRRGGAGAGALLWQMLPLGTDYMDDGYGVVLPRAAATARIISAHSRDLAIFNSRCAWSCRWGCRRRGHKSEDPDVDDDLPLVEDKQREA

SEQ ID NO: 70607 - protein, 15 aa, Zea mays
  Coding DNA Sequence Number=SeqID_27232
MSRGRGVDSSHRVPP

SEQ ID NO: 70608 - protein, 218 aa, Zea mays
  Coding DNA Sequence Number=SeqID_27233
  Homolog annotation: Hit_ID=A0EVH6; Match level="QueryCoverage=14%, HitCoverage=9%, E-value=5e-08, Identity=84%"; Hit description=Milt putative polyprotein
MADSKDLNSASPNSNTRLTNLSAAEHKRIEDDMKKIDEEAHRQKDQVLKVADKWYLSHFKVDFHQKTVQEREINAEYMLAVLQQLPTIGDARSAEDIERMAHALGKTHMPNFLSHKLGNETIASNTSAANGFPQPYSGAPWKGEVDELLLAVEQGRGAAAVCESWSLGEGEQRRCAGKKGAMAGASSFIPEQGVGPRGTAPCSCCSLEEEEEGLLGRG

SEQ ID NO: 70609 - protein, 194 aa, Zea mays
  Coding DNA Sequence Number=SeqID_27234
MEVEAEAAARKLEVDLPKLQKLQGGCLCIVGCKVDDTKQTSKTVSLIDLRIFRRSPWRLCLLELVSGRKFVVAPKPRIGSSSEAPGHFRKSEGLLPSLAKVIVNTNVLVHPLEQLLQGLRRLPSKVLSWLGSSDCSAAAPVAEAFFGAIARVYSFRRSQPVTNYNYAPCETEAASSCETFGAPKHDPNICRIIF

SEQ ID NO: 70610 - protein, 152 aa, Zea mays
  Coding DNA Sequence Number=SeqID_27235
MQAACDRTNGAHPFDFNASSMVAQAHTSCNRYAGCYVQETAPPLTPLPCLLDCGTSTATRGNPAHDPTVPTRHIGHGSVSRGRRRDGRYGQKWAGSNGGGRRAEAADRRRLWQAKQATLHLRHNDRVKKGSGKGIPRKGSFFAKETGPKPPY

SEQ ID NO: 70611 - protein, 409 aa, Zea mays
  Coding DNA Sequence Number=SeqID_27236
  Gene Ontology: Mol. function=protein serine/threonine kinase activity; Cellular component=cytoplasm; Biological process=protein amino acid phosphorylation
  Homolog annotation: Hit_ID=Q67C40; Match level="QueryCoverage=25%, HitCoverage=18%, E-value=7e-47, Identity=89%"; Hit description =Mitogen-activated protein kinase 7
  Pfam annotation: Domain name=Pkinase; Domain location=70-385; Score= -94.8; E_value=0.0062; Accession=PF00069.16; Description=Protein kinase domain
MDGGFYFRKGWGLVCKTPSRRAVSTCRTPRRHFDVAKPAEHPEFADDKVVEVPGFIPGQKEGGPHPTRHGTGPNGRAETQTHSARGDGLAFCARDARAVARKKEILTAQGPPHSDADALGSKDWAGAGVGRWWAEKEKGGPARGSDSALALADGLRLARPRGSDSTSASEDRLDLDLGGASASPNPGLGPTTSQEVPSLPYPKLTQATGNKTGVPSGSPRLQRSSDGHNTTRTGCQNLSGCHDGTPGVETPTIRYPKFLGGRGLRWKAVLLSCVDLSLYSPAIDMWSIGCIFAEILTGKPLFPGKNVVHQLDLMTDLLGTPSTDTISQIRNEKTRRYLSSMRRKQPIPFSEKFPNADHSALKLLQRLLAFDPKDRPTAEEPKLLLRVRPSAHRSTTPTVAPFAVLDRSS

SEQ ID NO: 70612 - protein, 363 aa, Zea mays
  Coding DNA Sequence Number=SeqID_27237
MGNTRSLSALSSEEHNFAEVGTFQPSFDFKDFHQAARPHPLAGGHPRRFKDLHHPCWGGERGEPGLYLPHGSAGHLFFQLLVVETILQLCGGGILQPCWGRRTVAAQLGCNIPSSSSLSWRGRERGPAAGGSFPTVEAVSATYGPTSGSLALMSGLIPLSGDTNESLPVAASVLGPWLLLQRSLASRPELVAPQAPQNPRPLFDEPKPEAAVSAQTEAELARKEDFVGRSLAGPSTGGTDAGVELPRPRAGLMSLGDSWLRLRDPPTVLPSEARSDFAEGVVDAEGAAASPSVEVRAYRIGLSCNLFVGNRIVCPSESYFSRKVMSEKVMSEVSVSWRRRSPSARSALAAYVYSVVFRIPLSK

SEQ ID NO: 70613 - protein, 144 aa, Zea mays
  Coding DNA Sequence Number=SeqID_27238
  Subcellular localization annotation: CTP_CleavageSite=64; ConfidenceScore=5.37e-01
MASPISRGRFSNPDHLERQSPTTELEAVPRQRGRSNSLRAVDSPSTPPSSTTIRSASSSRASAQSSRKGGGRITIPAPRRFATSVASPGISLLDVHYQVIVDRGDDKKGIKEDRRCTTGRRAAMPMFAGSGILNESSTDSFLRR

SEQ ID NO: 70614 - protein, 456 aa, Zea mays
  Coding DNA Sequence Number=SeqID_27239
  Homolog annotation: Hit_ID=Q6QP51; Match level="QueryCoverage=41%, HitCoverage=81%, E-value=1e-13, Identity=33%"; Hit description =Putative growth-regulating factor 1
MQAACNRTKGAHPFNFDASNMEAQAHTSCNRRADYYVRETAPPLAPVPRLLDCGTGAATRGDPAHDPIVPTEHIGHGSVSRGRRRDDRYDQKWAGSNGGGMRAEAAVRTGGTFGRRSRRRFTSAIMTASKKVRHVVRFRILFHFLFLSLATGTEKGDTPKGILLREGSGPRAPLLIRGSKAGPSEGSNSRLRALGLCAHYWSEVRRLAPRKGSTAASGHSGFAPTTDQGFVGWPPKGSNSCLRAHRVRDDPGYVRYITKAWATLPRLGGCSRKPGSGQTVDSVNIPARELGTRLCTGYGHLGRHRKLRLARPQGSGLTSTLDDELRLARPQGSDTASASEDGLRLARPRARTRPRPRKTDSTSPDPRARAQPRRWTADSASPDPRARTQPRPRKTVSASPDPGLGLDLDLGRWTPPRLTPGVGLSLDLGRRTRPRPRRSLRLARPRARTNHVTGGP

SEQ ID NO: 70615 - protein, 26 aa, Zea mays
  Coding DNA Sequence Number=SeqID_27240
MAPPWSAQVLSLLLFYYLIGLVFTYT

SEQ ID NO: 70616 - protein, 97 aa, Zea mays
  Coding DNA Sequence Number=SeqID_27241
MALAFDEFGRPFIILREQEKMTHMWGLSVDCPCRYPAPPLRATARLPDPAQPAATERPPPPRNLPPHNPSSARAVAGPRLRPPRLYRVAPPPTPQPP

SEQ ID NO: 70617 - protein, 175 aa, Zea mays
  Coding DNA Sequence Number=SeqID_27242
  Gene Ontology: Mol. function=zinc ion binding
  Homolog annotation: Hit_ID=Q10PC5; Match level="QueryCoverage=54%, HitCoverage=13%, E-value=4e-15, Identity=49%"; Hit description =Tropomyosin, putative, expressed
MRCQAILALNAPAIRSVGVAIWPRLLLGEGWASGEPKQNPPLARPPTSLPQLPPERPAVLRYLNAPLSWYRCSATPTDLKDASAAAPGSNPPESPFPSWELTLSSYLCDKAPPAAAGPSSPPNPEAAAGPAEDAAANAKLCVERDLLHLTAPKRGDPPGDDSSMVGGKKPRLESL

SEQ ID NO: 70618 - protein, 211 aa, Zea mays
  Coding DNA Sequence Number=SeqID_27243
  Gene Ontology: Mol. function=kinase activity
  Homolog annotation: Hit_ID=Q6QP54; Match level="QueryCoverage=51%, HitCoverage=51%, E-value=8e-26, Identity=51%"; Hit description =Putative kinase
MEHRPGLERSLETAHLELDGKLLVNTQQAPTWRANYRRFETGGRKERIQVYNGGVAECYVSSGGRASALSTCQCGSRRDLGTLLLRAAVVTGLAGRHHCLSGGASQMGHRSCFLRPESARGRVMMALPVDVAGLCPRLGDVEAPPKPGSSLSSRAEAESELLGRARRRSFGKGQGGVRALGSGEAEFVVFWGLARVRALGRAERSSPSSGA

SEQ ID NO: 70619 - protein, 98 aa, Zea mays
  Coding DNA Sequence Number=SeqID_27244
  Gene Ontology: Mol. function=metal ion binding
  Homolog annotation: Hit_ID=Q6ERQ8; Match level="QueryCoverage=48%, HitCoverage=15%, E-value=1e-11, Identity=64%"; Hit description =Putative ubiquitin conjugating enzyme 7 interacting protein 4
MPSTLWLVIGFKFKFQRPRKDEQDREDLLPRKVKQESKWQRCPECKIYVERIGDCVFIIYRTLLASRSEEYMLLFWLPLDEVHLIVGRGASSNLDSAR

SEQ ID NO: 70620 - protein, 179 aa, Zea mays
  Coding DNA Sequence Number=SeqID_27245
MLAASDVSVQGHGGGDIGPKTSSGPRLPRRDPRRETDSEQVPRGKDEKDFEKRVKRVLEITREESGWGLATRTRPYAERLLLVPPIGSGAWTVVARAGGQSPGALGAPGSRRRRGRYPRASGAPLGALRRNGLRAPHPTRLETRTKESDMRASRRVQKPEMRKEADEREALTGRTAGRP

SEQ ID NO: 70621 - protein, 112 aa, Zea mays
  Coding DNA Sequence Number=SeqID_27246
MSKTGGSRLSKTVAILAKGRNCVTFYILFECSPFFIMIMKDSIDEYYHHTEEETKDYEPCTTVFNPRITKHCDLRGEGVGKWSCLQFGRGDFIGAFFALCEMGVEGAGGGVL

SEQ ID NO: 70622 - protein, 79 aa, Zea mays
  Coding DNA Sequence Number=SeqID_27247
MKKIPAPSLEVKEEATSTPPVPPPSEELQEPVPLEEEFDPVLPSQSPPEEGSCLTAIAAKSTQGPPYTDHSPTALAPFG

SEQ ID NO: 70623 - protein, 68 aa, Zea mays
  Coding DNA Sequence Number=SeqID_27248
MEQVHTGVSDAQNLAHNIAWLGGREAAPARHLAVPEGRTPYWCPGDPPRVMEVHPDHRQGPVLKKEIE

SEQ ID NO: 70624 - protein, 124 aa, Zea mays
  Coding DNA Sequence Number=SeqID_27249
MDEGCTQPLSSDPMVNLNTTVFLFLITFPVCEESPQVGVSRPYNKYQSESTRVPKVHNKPIKRPRWVQIKRAKDIPKGTLVWRTGTVPVCHRDRCPGAPGNSKLNLPPFGKMGGRSAIIHRTVR

SEQ ID NO: 70625 - protein, 289 aa, Zea mays
  Coding DNA Sequence Number=SeqID_27250
MAGLLVSGEFQPRDRAAPPRPNNEQSEVPECVVGDLPEQQPVTWRDCIIACTRSRSADARSRSSRTLAPRLNGRWSLRGRLPLHLSQRCPLHHHRASRLLEETPTEMETTTPVAVRATARSVRRSRSQRDGSRDPSLVTLLAEAFSEHYSVTERDTAEAAMQDAARQALSQYCSLFSGVADGLDLKYYPRRSTDSARGVIVSPVGEGNPRLSSMVNLVTMLNTELDHALDELGKVRAEVAELCAECAARHYLDGGSPAPVGIQHPYRSPPRGFFDYATPDCRTRIYLDP

SEQ ID NO: 70626 - protein, 98 aa, Zea mays
  Coding DNA Sequence Number=SeqID_27251
MEAQRRDGATVAELRLCKNHSGERGPDRPERARAHQRVSRVADGKAKLTVAQDGARAQRRPRNTRWTSAGGGGGSRFAWAEQERGRESRAGGANEREE

SEQ ID NO: 70627 - protein, 140 aa, Zea mays
  Coding DNA Sequence Number=SeqID_27252
  Subcellular localization annotation: CTP_CleavageSite=30; ConfidenceScore=5.52e-01
MAGTSNPLCSAPLPASSLFSLVVAFSAPARVDNGSPTMAGPALARAVDLPSPMAEPHSSLAAQLIVHVAQKIPAAGPRRPPLLLLSSPQNSSSSPTFPRCAAPRRNAAVPAAPVPSLASSLLALRACRVFGKLSKWGVEQ

SEQ ID NO: 70628 - protein, 139 aa, Zea mays
  Coding DNA Sequence Number=SeqID_27253
MAAGRFSLLAVVGTREEGDDVGRKKRWYPLPTSHVTHLPRDRDFPYTSTEEARQGIPCRTAIAAKSSRGPPYTDHSPTALAPFGYQDDLQVTRDLTAKRSNTDKHASRSCADGSDWIRNPANRYTLVAFGSKTNDHDLT

SEQ ID NO: 70629 - protein, 233 aa, Zea mays
  Coding DNA Sequence Number=SeqID_27254
MTASKKVRHVVRFRILFLFLSLTTGTGKGDIPKGILLREGSGPRAPLLIRGSKAGPSEGFNNRLRALGLRAHYWSEVRRPAPRKGSTAASGHSGSAPTTDQRFVGWPPKGSTAASDAERGMTLWLGLGLGPGRRRTPPRLTPGLGLGLGSEDDELCLARPQGSDSASAPEDDELRLARPQGSDSASASEDDELRLARPQGSDSASAPEDDRLRLARPQGSDSALASDDGLRLA

SEQ ID NO: 70630 - protein, 67 aa, Zea mays
  Coding DNA Sequence Number=SeqID_27255
MAHRTLNSACPVHHRTVRWPRRQKLQRSESNDVDHRAIDLAMRIAERMFLKMKEDEAKNMIEKEEND

SEQ ID NO: 70631 - protein, 165 aa, Zea mays
  Coding DNA Sequence Number=SeqID_27256
MEIGWPKSSTGGLPELGRVWATAVPRSPGLARIGEENPANTLVGFWPRNRGQRWENGRGRAPGGSGLSPSRAASSKGRLAERGRRQAATLWLLYDNRIEDRVSRTGGGYHFASSELATVGSSKPSLVPVHTLNDFHFGSSEGAMDASSMGSLAPSTNTQAVATSA

SEQ ID NO: 70632 - protein, 105 aa, Zea mays
  Coding DNA Sequence Number=SeqID_27257
MVSVVPTRPIPSESPDAVSVALCALSLAPRGRRRRPRLAPPFEADEIRRHIAIHMGPNPSYDDMSVFFASYAELSVLYDIETTPYRGDSRDGFNAFPPRLNHAPQ

SEQ ID NO: 70633 - protein, 450 aa, Zea mays
  Coding DNA Sequence Number=SeqID_27258
  Gene Ontology: Mol. function=zinc ion binding
  Homolog annotation: Hit_ID=Q6ATM9; Match level="QueryCoverage=87%, HitCoverage=74%, E-value=2e-62, Identity=39%"; Hit description =Expressed protein
MDIKLSESVSIFYLKLLYEGGGTGGQTELQKPCHGRDMTSERETSKLHLSQSSVVHQIISPKSLNRFENAKVKFISSEEVALLSRERPPSVTSRFTLSQPSKASSPPTTKHLSNMNCVSPSRSDKNVQALKRCADASHSQAELEDRSYSAMQQRRVHPASPSSMKQPSNMKSTSPGRRDMQVQNQKRYAPMRESQPHVKQLSNRTATQVHATKRSATSSHDQANIDDINMDCEARSGGSVPMMHECRTSESVKVKMDSLIEHKAREKKIVNADKGEIKSQTELEPREKGTLCTSDEDIGCKSEIGSLNQNKDVIVTMVSTVQYSRRPAPTNCWRGCFHVFNAGEKLNLGEFKAYFPSKVSSRVIDIVKMMPTVLQLELLHRMDDWPKSFETMHPVHEDIGLFFFPNKPDGCEKKHSNVLEAYNNFVLRAYIHDIKLLIYSSEVLPPDSQC

SEQ ID NO: 70634 - protein, 613 aa, Zea mays
  Coding DNA Sequence Number=SeqID_27259
MNKKPWHAKCHYKRNSGSVSTGMDDLRAGEARGATSSGRITSKTRDVSAVGPEGDCHHQKLEEEVVRRPAQKVEPRLASLPAPARMTNTLNTEGGIGITARPTRRATGAPDAACKQLHRLRHHRTSSIAEPIPRLEATQRVTQQRQPDAAANAAKGGRAVMTVAGAREQRSRRQPSSRPIRGQRENPLSRREDDVPVIRSSNGSRTRNGCPANYSPRRINSATGQAALLAGATGDASPSPKQPRQKRLRASLLIRGSKAGPPKGSTAASDRVGPTPTTGQRLAPEGFTVASDAERGMTRGDQVRQITRRYFWACLWAPSRPLTNEARTSTRITRLQLTGDTMFGVHRGLGGCSRKPGSGQTVDSVNIPAREFGPRPYTRATTSSHEGTTRPAKALRKALRPRRSETTPPRPRGLHPAGALARTHRNKMQPRKAGPLAKKCDESLQASANTPFEARGLLSGTIIRGTLKTPNSQLSETDRQSGLAKGAIANSAPPDPGLGLGLGPGRRRTPLRPTQGSDSGSAPEDDELRFARPQGSDSALASAEQPPPRPTQGLGLGLGHGRQTRPRHRRSLHVARPRAQARHVNRKRHHHPTPSRLGPQRTRPVSHLASSAR

SEQ ID NO: 70635 - protein, 173 aa, Zea mays
  Coding DNA Sequence Number=SeqID_27260
  Homolog annotation: Hit_ID=A2YD96; Match level="QueryCoverage=98%, HitCoverage=39%, E-value=1e-23, Identity=56%"; Hit description =Putative uncharacterized protein
MGKRSGSSRKDKNKVILPPELPPEIHDDEVDVSEEDIEFYATDSSNVTPFRHFDKKSIDRYVGRVAGRDEGEVERLYEERQKRKATESSGRPREDDDYLEVDPVDALPTKTLQGELVYNRGRYSKAYLQKLISLEKQPYFYTVAVRCMCALLDTAPHFNFRESLLASVCQVFA

SEQ ID NO: 70636 - protein, 121 aa, Zea mays
  Coding DNA Sequence Number=SeqID_27261
MVCLGLGGRRKHTLQDNPILQARILTVEGSSSTLGVNYTFGEVRPSLGRRRGRRISTLKGGTGGASGRGSERCFAFAIMTASKKAGPSEGFNGRFRHSGSAPITDQGFVGWPSKGSQPPQT

SEQ ID NO: 70637 - protein, 60 aa, Zea mays
  Coding DNA Sequence Number=SeqID_27262
MGKEELPAKPNRAVKGVVAVSSGRWKNIDIRRPFLAFSFWNRTLVAVKDIFLDVHSTNLV

SEQ ID NO: 70638 - protein, 119 aa, Zea mays
  Coding DNA Sequence Number=SeqID_27263
MQRRGAWAVFQARSRRVHTGRGYAARSGGGSGWPGGSAGAQVRGRGAGWQLLAAAELLVARLGERRWREGIQTPTPLVVALGDGSAKDDPATSSANNLFASHSTARGSGHNSNQPSDGW

SEQ ID NO: 70639 - protein, 110 aa, Zea mays
  Coding DNA Sequence Number=SeqID_27264
MAHRAPWLADGRDPLVSLSLPWHMVLYNTNSWGPVVRPVPNPVGRCNRPAYGSMRAGDWGLPTLRDKKAWPGGSAAKPRTMILLLLVRKFAAWSPMKSTVIALSSALACS

SEQ ID NO: 70640 - protein, 259 aa, Zea mays
  Coding DNA Sequence Number=SeqID_27265
MPWIWDRPSEAIKARIGARGFDNLGGCHNCIVACTRSRSADARSKSSRTLPPCLSRRWSLRGHLPLHLSQRCPLHHLRASRLLEETLTETMTTSVAVRATERSSRRSQSWMDGLRDPSLVTLLAGVTSTTLSIPCCVGISTDTLGLSGVVDGLDLKYYPRRLTGSARGVIVSPVGEGNPKLSSMVNLVAVLNIELDHALDELGKVRAEVAELRAECTARHYLDGGSPAPVGIQHPYRSPPRGRFNYGTPDCRTRIDLDP

SEQ ID NO: 70641 - protein, 206 aa, Zea mays
  Coding DNA Sequence Number=SeqID_27266
  Gene Ontology: Mol. function=kinase activity; Cellular component =ornithine carbamoyltransferase complex; Biological process=amino acid metabolic process
  Homolog annotation: Hit_ID=Q6QP54; Match level="QueryCoverage=47%, HitCoverage=36%, E-value=3e-21, Identity=57%"; Hit description =Putative kinase
MAPPVDVAGLRPRLGDVEAPPKPRSSLSSMAEVESEPLVRVRRRPSAEARAESEPWGRAKRSSSSSRAEPESEPWVGQSGDFSPSLSPGSGGAEFVVFRDFSPSPSPGSGRAEFAVFRGLARVRALGRAERSRSVERRSDGGHFGSVGWGARVRIKGLGRTGNMFAAGGGPRARRKSSGLYANGGYQLRIRSLEGTPNYGPRHLLS

SEQ ID NO: 70642 - protein, 315 aa, Zea mays
  Coding DNA Sequence Number=SeqID_27267
MGVAAEQQKTDERRAVTRSGSGDDDDFCSGGPNSGSYDLRADAAARRPPPMPKLVRQGRAEGRRVGGPPLRRGGWAPHVMQAGSEQKKPNRRARCVQPPSGCNRLSTFAQTNGREGEQPCRRHATAPNGRTSPTPDTPGMETQAHASCDRRAECFVHAAAPPLAPPPRLLDCGTNTATRGDPAHDPAAPAWRDGQYGQKRAGAGWWQAGRSSGHVVSPAYVPSRGDERTLSHGVKTTRPCSVPRTARARATAAPPTTRPVTLTPRRDRRRLWQEKRAMLRLRHNDRVKKKGPGKGDTPKRILPREGTRLRASLLI

SEQ ID NO: 70643 - protein, 93 aa, Zea mays
  Coding DNA Sequence Number=SeqID_27268
  Subcellular localization annotation: CTP_CleavageSite=82; ConfidenceScore=5.51e-01
MASSLAIGFAVAPSPSLPNSGDPGATLARACLNSVDLTTAERSGATRSHLFPRSDPLRPIQIERLGPRVPPRARTWRPGLPVSAIRSRSSFPV

SEQ ID NO: 70644 - protein, 145 aa, Zea mays
  Coding DNA Sequence Number=SeqID_27269
  Subcellular localization annotation: CTP_CleavageSite=26; ConfidenceScore=5.34e-01
MGQPCQLRPLRAHPSPHFAQLHPLSRSAHAASRRRRPAPASPAIQLAGDHPKPPRAPPRGETPVPMPNFPYCVMCSANFTLAGVRPRRSTVLARCPADLARFSSPESNGSDRGYRLAHAHLAPWPACQYHSQPLIIPDLISPVRS

SEQ ID NO: 70645 - protein, 173 aa, Zea mays
  Coding DNA Sequence Number=SeqID_27270
MEVRCQTSFCQNEDGFPKLLRACTVRLEIRSQPEYDGREFVEHGTEKCVVIEEQLLEDDPTVMYLTTYLLTLDTQYDFLARHHRQMIAREEDAEKRNRKLHVDLTTAQAHVAALESREVIAVEALKQAKDELVQKLMGAYLVTHNQRRALRIQEPAPSNPVQPIKAKDPQILE

SEQ ID NO: 70646 - protein, 325 aa, Zea mays
  Coding DNA Sequence Number=SeqID_27271
  Gene Ontology: Mol. function=protein kinase activity; Biological process=protein amino acid phosphorylation
  Homolog annotation: Hit_ID=A7PJ50; Match level="QueryCoverage=51%, HitCoverage=19%, E-value=3e-32, Identity=47%"; Hit description =Chromosome chr12 scaffold_18, whole genome shotgun sequence
MVANTGKDCSSGLVHRRWVTLLCGRCAEALLPEGDEILSSEAPTPCSPAWPLWACGAAMGWVAEAVAVAHAPGVVVGSARPSCFVVSPPFARVAFIESAFGSDASGSCSGSDADPDASPPRRGDGAGRGEERAGKSFPLKSVLAMELNWYTSPEEADDSAATFASDVYRLGVLLFELFCTFETMEDKMRAMATANLRHRVLPPQLLLKWPKEASFCQLLMHPVPETRPKMSKVTGVDEAKAELEEIVHYLRDPKAALEEILYQFEEKLQAEREEAARKQEELQAQVQAQQAAFEENQSLLRQAKHNYLARTYLWLELCQNYVQSV

SEQ ID NO: 70647 - protein, 155 aa, Zea mays
  Coding DNA Sequence Number=SeqID_27272
  Subcellular localization annotation: CTP_CleavageSite=42; ConfidenceScore=5.28e-01
MRKHRGASASMGKKGSRLGGRRVGRCREGTTSPHPSKASNNRGAMGGEEPSSERGVAAGRRPWSSCWAPWKERKQRPGKEALCARTGKTEGRDVGEKWRGALASCCWRYKERGRCAGRNEGATGLRKKGLGAIHGSGCSLLAAVCALNRGEESCA

SEQ ID NO: 70648 - protein, 60 aa, Zea mays
  Coding DNA Sequence Number=SeqID_27273
MERHGGDEGAPVSNPKAHDSVLGLRRSQASTVILHKLPVGYYKSPLLLVGTPTSPFSYHN

SEQ ID NO: 70649 - protein, 145 aa, Zea mays
  Coding DNA Sequence Number=SeqID_27274
MGDDSSPARTRGSVRPQESRGEGRGSCCSATPWESFSAPRQKGQRARREVEAPWGGGEQSCLLQPWEENLPAAKRREEGDSAEAGLRKGGAGRKGAAMRFLILALTPIIISCKAKQETPFICVEVLGELGVPNEEKKTRPDFVTV

SEQ ID NO: 70650 - protein, 143 aa, Zea mays
  Coding DNA Sequence Number=SeqID_27275
MEFLLGAMEGEETAARKEALYARTGKTEGRDVGENGEGRSLLAAGGTRKGVLRREESGRRWLEEEEGLGRHPWERLLPACSCVRAEQRRRELCVRGKREKREWRLGVGSERTSVSTNGRLSDQFSREFDLNSLGNNSLSMIQK

SEQ ID NO: 70651 - protein, 132 aa, Zea mays
  Coding DNA Sequence Number=SeqID_27276
MPSPFCALVRLLLLPWPHLIALRVLQPGSFARDWFPCRRESQHAASRCPGVQTPRALALLIRAATSTLFVVTSLFSRVRALAFACAQCVDGTPSTFAYPSSTPRRLSSTPVYPPPSNPVSVCVVRHRPRVAQ

SEQ ID NO: 70652 - protein, 78 aa, Zea mays
  Coding DNA Sequence Number=SeqID_27277
MGDSDDCARCARILCTAGSPLAPQGAGLSAGTPDSPVHTGTVRCKPNSLSEDVKDAGDCTALLDAFVYIETSSAALRV

SEQ ID NO: 70653 - protein, 240 aa, Zea mays
  Coding DNA Sequence Number=SeqID_27278
MQAACNHAKWAQPSDSNAPSMEAQAHTSCNWRAGCYVRATAPPLAPLPCLLDCGTSTATRGNPAYDPTVPARRDGQYGQKWAGSNGGGRRAEAAVASTGGALGRRSEQRFAFAIMTASKKGPGKGDTPKGILLREGNGPRAPLLIRGSKAGPSEGFNSRLRALGLRARYWSEVRRPAPRKGSTAASGHSGSAPTTDQGFIGWPSKAKSGLRRHRKLRFARPQGSDSGLAPEDDELRIAQP

SEQ ID NO: 70654 - protein, 301 aa, Zea mays
  Coding DNA Sequence Number=SeqID_27279
METRFWELRIAFGNYPSSSRAQPYMLLLIIDRLEHSLEHIRPLIFPAKRRKVVTMKKRKERVSSESTLPLVVGITAEESTALIPAASESKAQKDLTPVGRDALSRIRGRDFDSACGLTEDTGALIVWQAPPILEEMAAHNQLDSKQDPDSFRPPATSVIEYQRQGPTAQMTNISFMVGNSSHARPTDQDDENLRGDVLTLINELEDERAAALERTRILEERLQQELENERTVAAERTTILKSKEAAIERTRVLDENLEVRAIERTRVLDERLQREYEIARTAASQNEALKEEIFKLQEFVF

SEQ ID NO: 70655 - protein, 64 aa, Zea mays
  Coding DNA Sequence Number=SeqID_27280
MARRQAYGKVADSGSLPVPRRLAVLVSFTIAPIPLLSATYMEPCLPLSVGLICYVAEGQTRAGP

SEQ ID NO: 70656 - protein, 428 aa, Zea mays
  Coding DNA Sequence Number=SeqID_27281
  Gene Ontology: Mol. function=malate dehydrogenase (NADP+) activity; Cellular component=chloroplast; Biological process=tricarboxylic acid cycle intermediate metabolic process
  Homolog annotation: Hit_ID=P15719; Match level="QueryCoverage=100%, HitCoverage=100%, E-value=0.0, Identity=85%"; Hit description=Malate dehydrogenase [NADP], chloroplast precursor
  Pfam annotation: Domain name=Ldh_1_C; Domain location=185-409; Score =204.4; E_value=2.8e-58; Accession=PF02866.9; Description =lactatemalate dehydrogenase, alphabe
  Pfam annotation: Domain name=Ldh_1_N; Domain location=90-246; Score =172.1; E_value=1.4e-48; Accession=PF00056.14; Description =lactatemalate dehydrogenase, NAD bind
  Pfam module annotation: Pfam domain module=Ldh_1_C::Ldh_1_N; Domain location=185-409::90-246
  Subcellular localization annotation: CTP_CleavageSite=39; ConfidenceScore=5.51e-01
MGLSTVYSPAGPRLVPAPLGRCRSAQPRRPRRAPLATVRCSVDATKQAQDGVATAVATEAPASRKECFGVFCTTYDLKAEDKTKSWKKLVNVAVSGAAGMISNHLLFKLASGEVFGQDQPIALKLLGSERSFQALEGVAMELEDSLYPLLREVSIGIDPYVVFQDVDWALLIGAKPRGPGMERAALLDINGQIFADQGKALNAVASRNAKVLVVGNPCNTNCGLPLTQCADLFEKCPKHTGKKLSCIDELALKAGVFYDKVSNVTIWGNHSTTQVPDFLNAKIDGRPVKEVIKDTKWLEEEFTLTVQKGVLIQKWGRSSAASTAVSIVDAIRSLVTPTPEGDWFSTGVYTTGNPYGIAEDIVFSMPCRSKGDGDYELASDVLMDDFLWERIKKSEAELLAEKKCVAHLTGEGNAFCDLPEDTMLPGEV

SEQ ID NO: 70657 - protein, 45 aa, Zea mays
  Coding DNA Sequence Number=SeqID_27282
MTVASYVEGGVTTGALGEGRGKDDNTFLFPDSSHNHLNSGEDYNQ

SEQ ID NO: 70658 - protein, 82 aa, Zea mays
  Coding DNA Sequence Number=SeqID_27283
MGGADLSLFDDPLPPRSLSVCKLQSLSALLFHGGLACIARRWLAAKGFILEQDVIVDITPQPITLNQRSKSYKYHKNKHSSV

SEQ ID NO: 70659 - protein, 90 aa, Zea mays
  Coding DNA Sequence Number=SeqID_27284
MSDDLVVPVHFEVGQEPCFRLLDHPLLVLLELELLVSRQDVDVPSGVVKKYVDAFSERQILKKNRRRCSLVTRGRSAAWGRTVRDLAQGL

SEQ ID NO: 70660 - protein, 96 aa, Zea mays
  Coding DNA Sequence Number=SeqID_27285
MGVPAICTRRACIKCAAESRWREDSRCSGVAPDSPQSFQDNMGALSSQFDNLSTNDRMQEISQRQQQLQQDFGQFSSLFDTFSTHYYNMQPPPSDQ

SEQ ID NO: 70661 - protein, 38 aa, Zea mays
  Coding DNA Sequence Number=SeqID_27286
MWRVWFDHVTHVVIDVKWVEAPDLCFGRRDVAARPPHF

SEQ ID NO: 70662 - protein, 132 aa, Zea mays
  Coding DNA Sequence Number=SeqID_27287
MGREIDPNPYPNRAKTHRVLGSGYPLPSLVPPVSPSEVGPDSTEGGNDDEAEVPSLPLGSLGAEPFGRGSIAETADTTPSVVRPHPEPLPAEVQELFPSELQAIVGDDGVWDPKAMDDICEECHRLLEPDAG

SEQ ID NO: 70663 - protein, 220 aa, Zea mays
  Coding DNA Sequence Number=SeqID_27288
MWKHSRLGVALVAEAVVIVGAAREAVVTCGHEVSHGTGITEPGEIPTEVGVVLFLGTRGCEDNTRHVPRRGAGVVDSLWSDSRRGAASCLAKVAPSPPPPARRVAVQTRVFLFHHGGKSSSSSPPPGEPTAIVVVVLQGEEYHVVAAVGGHELETPEVEHRLGLKRLLKTTHLELNGKVFVNTQQSPTWRANCRRFGPTRTLNRPVNLSLRVPAQMGEST

SEQ ID NO: 70664 - protein, 29 aa, Zea mays
  Coding DNA Sequence Number=SeqID_27289
MAVRRGVPALELPRAVAAGNPHQHKAAKA

SEQ ID NO: 70665 - protein, 80 aa, Zea mays
  Coding DNA Sequence Number=SeqID_27290
MAPPFLSRRRLEFAGKWKTRLSRLIPSKRSRLKGKGVDFTDPLILDGSRWMAGRPLGLATSVGGFWSWDPDPRAPVEAGL

SEQ ID NO: 70666 - protein, 402 aa, Zea mays
  Coding DNA Sequence Number=SeqID_27291
  Gene Ontology: Mol. function=nucleotide binding; Cellular component =cytoplasm; Biological process=response to stress
  Homolog annotation: Hit_ID=Q9AQZ5; Match level="QueryCoverage=97%, HitCoverage=46%, E-value=0.0, Identity=92%"; Hit description =Putative heat shock protein
  Pfam annotation: Domain name=HSP70; Domain location=3-401; Score =220.6; E_value=3.6e-63; Accession=PF00012.11; Description=Hsp70 protein
MSVVGFDLGNESCIVAVARQRGIDVVLNEESKRETPAIVCFGDKQRFIGTAGAASSTMNPKNSISQIKRLLGRKFSDPELQRDLASFPFRVTEGPDGFPLVHVRYLGEERTFTSTQLLAMVLSNLKGIAEGNLNAAVVDCCIGIPVYFTDLQRRAVLDAATIAGLRPLRLFHETTATALAYGIYKTDLPENDQLNVAFVDIGHASMQVSVVGYRKGQLKMLSHTYDRSLGGRDFDEALFKHFAAKFKEEYKIDVYQNARACIRLRVACEKLKKVLSANPEAPLNIECLMDEKDVRGFIKREEFEQISASVLERVKGPLEKALAEAGLTTENVHFVEVVGSGSRVPAIIKIITDFFGKEPRRTMNASECVARGCALQCAILSPTFKVREFQVLAPQLTYVYLF

SEQ ID NO: 70667 - protein, 181 aa, Zea mays
  Coding DNA Sequence Number=SeqID_27292
  Homolog annotation: Hit_ID=Q6J9V9; Match level="QueryCoverage=54%, HitCoverage=34%, E-value=6e-38, Identity=83%"; Hit description =Putative uncharacterized protein
MEVVEAEGMRCAVFSVYSLRLRKQKQKASANGRVKNHHQPLFRGKRHLWQAKRAPFHLRHDDRVKKGTGKGDISKRILLSEGNGPRALLLIRGSKVAPSGVRQPPLSTRAPSPLLIRGSKAGPSEGFDSRPRACRVRDDPGYVRYMAEARATLSRDRLTPYPDMHASVGKVEVTAVTSTLY

SEQ ID NO: 70668 - protein, 253 aa, Zea mays
  Coding DNA Sequence Number=SeqID_27293
MKECVAPPPSGSVSHDYSVAESGCLLQAETHSALLGHWDLTATGLPSLDIASPSGLALHSGNMLCFQPELVLPDCSAGLLGQEDEVPADSASRTDLLLTDCSDDSDTGAEDTAFGTADAKRVDQASQETILSLGVGVDIFRSIARQLQKPVPHACPWASEASEAEVGPTAVAAAEWRPESDRWLELPESASGTSARWTSGAGAAVAVAEAPHPAERLAPAEHAFLLCACSLTSAECNHTSELILRILQHKKRV

SEQ ID NO: 70669 - protein, 132 aa, Zea mays
  Coding DNA Sequence Number=SeqID_27294
MESENEKLRKALATLFRVVQKRSCHIVDVVNTAFQPFNSPLLDEMNQALVEIDDLAKDLEDVVVQTQWKVDNMDQCEVNKIPPQEEAVDELLIQDGSEDELLIEESPLTMTKLSAMTMVVTTQPTTHVPTSM

SEQ ID NO: 70670 - protein, 338 aa, Zea mays
  Coding DNA Sequence Number=SeqID_27295
MAPKPLGFYTKNVGVSSIGTHTCEIALGARKRPAPDSWQDSHVCDLWRRLNTGRNTPPRVRRLLPAPEHAHARPRMPSAAPEPSQHHGRARAYKTLPDLDCSLPRTLKPHRSRARRRLPVRSESAAAQPLCHHRPASGAIPNPVQPSEKTGHTSVKLPERGIGVYFAGEASPRSPELSTPPEYVDRVNHFTVLRFLVHTVATLPHEAHRALGLNQLAVVWPVYSPPTRTPACTRGPGDSGHPRRQAVPRRDRQSLPEPTPPFARPPSPPIALLTRPETRSPIPVMVGTSAVTARRPVGVSEALYAKAEMVAGVTWPSILPPGWTVEWDPASAEEEHEE

SEQ ID NO: 70671 - protein, 262 aa, Zea mays
  Coding DNA Sequence Number=SeqID_27296
  Gene Ontology: Mol. function=translation elongation factor activity; Cellular component=mitochondrion; Biological process=translational elongation
  Homolog annotation: Hit_ID=Q9FE64; Match level="QueryCoverage=89%, HitCoverage=24%, E-value=4e-88, Identity=71%"; Hit description =Elongation factor G, mitochondrial precursor
  Pfam annotation: Domain name=EFG_C; Domain location=118-251; Score =66.5; E_value=9.1e-17; Accession=PF00679.15; Description=Elongation factor G C-terminus
  Pfam annotation: Domain name=EFG_IV; Domain location=7-116; Score =105.6; E_value=1.6e-28; Accession=PF03764.9; Description=Elongation factor G, domain IV
  Pfam module annotation: Pfam domain module=EFG_C::EFG_IV; Domain location=118-251::7-116
MESSLPLDILIKMQMHDILVFMCSEGKWYIEPLPSGSDGKFEFDNMIIGQAIPSNFIPAIEKGFKEACNSGSLIGHPVENLRIVLTDGASHQVDSSELAFKLAAIYAFRQCYTSAKPVILEPVMKVELKFPTEFQGTVTGDMNKRKGIIVGNEQEGDDTIVVCHLLKKFSLSTNELKTFGSLNYSIIILDQTNVCGHNFVIAYTFLGFQMVPLNNMFGYATAIRSATQGKGEFTMEYLEHNVVSQDVQMQLVTSYQAAKGTE

SEQ ID NO: 70672 - protein, 150 aa, Zea mays
  Coding DNA Sequence Number=SeqID_27297
MGHQNQHANVVPTQSNTIDVDAEESVPTSIISKRPLGRDSSKEKAKRTRSVDTSSSDSEFMTWMEDLSLERLSMYKTTVTTEEKKLDSMNKNERQKLLLEKKKLNLEKLRMERQKLKEDKEEEPSNKRYWQELLAHPHLLVVMTVLISHG

SEQ ID NO: 70673 - protein, 168 aa, Zea mays
  Coding DNA Sequence Number=SeqID_27298
  Subcellular localization annotation: CTP_CleavageSite=90; ConfidenceScore=5.45e-01
MQAACNRAKWTRFSDSQRASMEAPAHASRNRRAGCCMQATAPPLAPPSCLFGCGTNAATRRRPSGASLARRTGGASGRRSGRRFAFAEITAPKKGPGKGDTPKRILPHEGTRLRASLLIRGSKAGPPKGSTAASDRVGPTPTTGQRFEGRPPEGFHGRLRLPGLRAHY

SEQ ID NO: 70674 - protein, 83 aa, Zea mays
  Coding DNA Sequence Number=SeqID_27299
MEFKSCSLLWGERLQIRGQRVSAFRDRGVPEPTSECAACPSPDGSSAWASAKGGSEAAGDGRERGGNQAAFVFVPRPGRVRLQ

SEQ ID NO: 70675 - protein, 640 aa, Zea mays
  Coding DNA Sequence Number=SeqID_27300
  Gene Ontology: Mol. function=sugar:hydrogen symporter activity; Cellular component=integral to membrane; Biological process =carbohydrate transport
  Homolog annotation: Hit_ID=Q9LLD9; Match level="QueryCoverage=86%, HitCoverage=99%, E-value=0.0, Identity=84%"; Hit description=Hexose transporter
  Pfam annotation: Domain name=MFS_1; Domain location=193-587; Score =76.6; E_value=8.1e-20; Accession=PF07690.7; Description=Major Facilitator Superfamily
  Pfam annotation: Domain name=Sugar_tr; Domain location=189-636; Score= 340.0; E_value=4.2e-99; Accession=PF00083.15; Description=Sugar (and other) transporter
  Pfam module annotation: Pfam domain module=MFS_1::Sugar_tr; Domain location=193-587::189-636
MAGSSSRRRHPLMYSPDEKQQHPFRKHHIARHRLLKRRLLLSGSPLPLATSTTTTAQEKEHGDCFKVIFCGGGDVRSQEQSPITILKKMMRCTVTGGGCVASWIGDRRSPAVNPFSVRMSTGNGGWCGGLRSRAAELSGLEMAHLRGGIGGLFRASPRYGRLQATAAVDPEDIPLEKVQVKSSGHVMPYVGVACLGAILFGYHLGVVNGALEYLAKDLGIAENAVLQGWVVSTSLAGATLGSFTGGSLADKFGRTRTFILDAAPLAVGAFLSATAQDIRTMIIGRLLAGIGIGISSALVPLYISEISPTEIRGTLGSVNQLFICIGILAALLAGLPLAGNPAWWRTMFGIAVVPSILLAVGMAFSPESPRWLFQQGKVIQAESAVKRLYGKEMVTEIMYDLRASGQSSSETEAGWFDLFSKRYWKVVSVGAALFLFQQLAGINAVVYYSTSVFRNAGITSDVAASALVGAANVFGTMVASSLMDKQGRKSLLMTSFSGMQMEGSYSLFSPLKGASMLLLALSFTWKALAPYSGILAVVGTVLYVLSFALGAGPVPALLLPEIFASRIRAKAVALSLGMHWVSNFFIGLYFLSVVNKFGISNVYLGFASVCVLAVLYIAGNVVETKGRSLEEIERELSVAE

SEQ ID NO: 70676 - protein, 194 aa, Zea mays
  Coding DNA Sequence Number=SeqID_27301
  Homolog annotation: Hit_ID=A2WKB8; Match level="QueryCoverage=92%, HitCoverage=85%, E-value=2e-16, Identity=39%"; Hit description =Putative uncharacterized protein
MAAILALPLTPITKAKLGLLLFKKRASAAAGRRRCYKPFRHYNYAYVGEYQFSPSRSPLLPAPPPGVTTWRRAAAAAARRRRGRARMVLASLFCGGGGADELDVAVLDGLARRTDGRAERDQLVVLAPALEWARGRDDGAAYACSSNDEDEEVAVVDYGEEGDVEVDDRAERFIERFYQEMRLQRQRSLVQRLL

SEQ ID NO: 70677 - protein, 925 aa, Zea mays
  Coding DNA Sequence Number=SeqID_27302
  Homolog annotation: Hit_ID=A2ZNX9; Match level="QueryCoverage=71%, HitCoverage=83%, E-value=1e-171, Identity=52%"; Hit description =Putative uncharacterized protein
MAEDLASSAGHPRDADDSVEEGRLTAWAHVPGRHLLFALTDKGGREATPTLDSLASVYLLAARAEVEEEQGKGSYLPLRASYYTFQLPDRSTGRLKHGAPSGTADLAAASRLFSPRRLLPSSLRSSSPRRLPCPPPAASPPPPTLPHPADGAAPGVVARLMGLESWPATATAAPPRPQKQRKVEASRADGADSAVVLVLPTTRSRRPPASAPVPTARSHHGADLPARSPRRTRLVHAAAAKLLHPGARAGSRASARLALAYACSSPQHRKDDHAGTLFQGSGMTDDFLSRSESLPLERSALLQVQPPGLPAETDCDTAVVSRRHDHCSTNNVDAAISASTVVLPRMGFGDGNRSKRSSDVDAKHKGSGIRNDVTRTCARARSSGAAVQTGDERLLRKRATPTRPEVSGMPESGDLAGSTRLAGGARDLVSATRKFAHGGSGPRREFAGSISGQGSTTHRDLNSQNGLASTSRISSNGSGHKRGSGRKVGHDRAISNRDDRNAIAFTSRSSTKPVARASSQSNLLKSGSPNRLAPDTTRTRVLAPEKRYIEASPSFMSTSEKGEFSRLLKAKINELGMSDRIECTPDDSPSGKLTVPVLQELISALTNDMSTPISQCSNYSAASAPLSCNGNVDCINEPHCIFSNDQSPDFQKCFKGEQDVDSSAASLNNEPNQPSPTSVLEASFSNDTSLGSPVEKNEGKDLIMSIENKMEDLFNLESDIVDLAMSIDTRKTDAEETHRDNDKLSCLQNFLAHDFNILESRLCSIREAISNAELLVGSSLSRSTASGLPLHPFIVEMLENTMDMFSGGEYSGFTEDKKYQRTNFLFDCIIESLDSKFCNFGKCGYKAWLSLPLSLSEDLLKRQVLEDIGNWRESSGTALRQVSDKEVDQVTDRWDASQVEAFDISIAIENDILEALAGEFALDLW

SEQ ID NO: 70678 - protein, 100 aa, Zea mays
  Coding DNA Sequence Number=SeqID_27303
NGQSVFPKEVAEEVPEQQFGEGKGIRGVVASPSCRQWGPGTVLALSRLSVEPNGAFAEYVDVYSSLLYHKTPGCPHCNHCSGEDEAVEGDFQEFQDYDEF

SEQ ID NO: 70679 - protein, 496 aa, Zea mays
  Coding DNA Sequence Number=SeqID_27304
  Homolog annotation: Hit_ID=A8Y4K5; Match level="QueryCoverage=90%, HitCoverage=85%, E-value=1e-10, Identity=30%"; Hit description =Putative uncharacterized protein
QPTGSQCKISSLGLSIHPFPSSQYSDLLSSDLLPPFGKAESCVAKKGSAHLLPPFAEAESGVGMKGSAHLLDEAESSVGEKGSSYLLPPFDEAEIGVGMKGSAHLLDVAESGVDEKGSAHLLDEAESSIGENGAADLLPPFDEAESVVWLEVTEETMEGGVGEKGSAHLLDEVESSVAHLLPPFDEAKSVVWLEVTEETTEGDVGEKGSAHLLDEAESSVGEKGAAHLLPPFDEAESIVWLEVTEETTEGSVGEKGSAHLLDKAESSVGENGAAHLLPPFDEAEGVIWLEVMEETTDAPPFDEAESVVWLEVTEETMEGGVSEKGSAHLLDEAKSSVGEKGAAHHLPPFDEAESVVWLEVTEETMEGGVGEKGSAHLLDEAESSVGQKGAVHLLPSFDESVVWLEVTEETTEGGVGEKGSAHLLDEAESSVGEKGAAHLLLPFDEAESVVWLEVTEEMTEGGVGEKGSAHLLDEAESSVSEKGAAHLLPPFDEAER

SEQ ID NO: 70680 - protein, 101 aa, Zea mays
  Coding DNA Sequence Number=SeqID_27305
MESVVWLEVTEETTEGGVGEKGSAHLLDKAESSVGEKGAAHLLPPFEEAESVVWLEVTKETTEGGVGEKGSAHLLDEAESSVGEKGAAHLLPPFDEAESVV

SEQ ID NO: 70681 - protein, 748 aa, Zea mays
  Coding DNA Sequence Number=SeqID_27306
MGVSDNFAVELMGTCAAPRGRMSSPELRESSARMLEVTEGRWPKNLPIPWAEGEDMSTSRITRGLRIFPYGRNIVAVVSAVMNKDRQDAVQKRQAVIRIADPRREAKKARGSTKAAAPGSSQPMPAAKLAMPGSSKSSASAKTVGAGGTKPPPVEAAKVRELPSPGKRVADFGTNISVEDYFVGPGEGQMVVVPPLVETTSPSAVVRAKGTAQDLWAAFCTSGEILTAAAAKDVAGTMSQRLRDASQRLSQQLSQAADFADRVASGILTADVAAEVERLRAQHADAIREKSAAESKNRRLAEKVAALEAEKTDLRRQLVEERKEANHAIAEAQATQAEAKVARAEASLASQRAEEWEARFNALHGRVDKVEASTRSEVERTLAQFVNSYRELGARTADFEVPDREAGLRFLEWLQEELLVLPTIVEGFMSFASLVTCEGAMNVLSREGCRHYEVFDQSNESFEREIFKAEDPVVKQSAGALFDRMWGGAWSGGCQGAIRPGERAGEGYYFCVMERAKDVEDLGGLVGVPPEAAEGNPVLPLDAGEGPSAVPVPAMADEDPASAPEPTVEGAPEVVAEPAVEDPTAAVVPSQVQGFGPAHATATNNANFVVASTVVAENDSDDSVSKIFESDDSGSSVVWTKESSDEDLDYFAALDVAVAEASPRVIDAKLPGPSAGHRRRRAVAKRRVSEVEGGRLRVDGASKRELLSLPVGASVGEGELRNLFEGEELRIMLFNYREMGIIPKVEPM

SEQ ID NO: 70682 - protein, 411 aa, Zea mays
  Coding DNA Sequence Number=SeqID_27307
MHVVGDFLKHRIAPMQRRARLCCWLTGANDIGRIQRGPGTNLSWDELAVLVGGITGETFVPESLILPQNIPALCDDLGLRTAILAMLPTLDESGIAVRQTGGRDPHYRIRISDAPAGGPQPSSAAPSAPAVAPSPLDKGKGAASNASAQVASGGRRKRGDAACVALTGRSFQSLPRSARGPQAGPRRRAPRTMARRGASVLQSRRYHHHRARHHHHHHHHRSRRHHHHHLGVISPRGTNSNNNNSSKSGDLASRGFLPLNSQGHTSSAGFQAHRRVWLSAAGICWKWCQRSTPSCCQDNASSFPCSSRGSGGSGASVGQRRSGGGGPSWGSTPPPDAEGDVGGASSSNPPPAPEEMEVVFGRRLQSGAEQEAAPVPLPRMLSRAHQVLSDTGVAILREWEALEDEHQRLSD

SEQ ID NO: 70683 - protein, 121 aa, Zea mays
  Coding DNA Sequence Number=SeqID_27308
  Subcellular localization annotation: CTP_CleavageSite=64; ConfidenceScore=5.17e-01
MCHLITRPFSSKKLEEAGYHSALPLKRRPWVQSLGVTSKMSTPTFNHSALPLKRRPRVQSLGIASKMPTPTFNHSALSLNTDHVFNRLALLLKCRRRHSITRRCLYNADHVFTRPALLLKC

SEQ ID NO: 70684 - protein, 219 aa, Zea mays
  Coding DNA Sequence Number=SeqID_27309
  Pfam annotation: Domain name=Transposase_28; Domain location=1-174; Score=-35.6; E_value=0.00047; Accession=PF04195.3; Description =Putative gypsy type transposon
MALLDPPECFQSEVALNLVRNLLGWGALALAGRIRVGASPLGDLAAREFVLFVSNFPCGLVLPISSFFVLLLEELGLQPQHFTPCFILQAAVFAYLCEMSVGATLLPLAFGRKGAVQRPSRGGKQAELWLHLLRLHLFGSNGLDVTSNGDRWSDCRYGRRRPGDQSIRLTRADLTRLAYTYAQPSYKKKKPQPLRLAPMYRTFEDALCSKGWEEALLQL

SEQ ID NO: 70685 - protein, 117 aa, Zea mays
  Coding DNA Sequence Number=SeqID_27310
MAGEASTALVPLGMSPIPVSELPTSISDMLPVLDFAADRLRRLDQILGARLEAKGGKLYRAVIEYVLTCFRSHDPAISLESVIAGPEAATEDAARESVQNAMELVAERFQHDPADDE

SEQ ID NO: 70686 - protein, 150 aa, Zea mays; identical to SEQ ID NO: 59385
  Coding DNA Sequence Number=SeqID_27311

SEQ ID NO: 70687 - protein, 354 aa, Zea mays
  Coding DNA Sequence Number=SeqID_27312
MDEGCIQPLSSDPMINLNTTVFPLDDYSRLRGISTRLESLALTTKITMKARISEKGSAHLLDEVESSIGKKHAAHLLPPFDEAESVVWLEVTEETIEGGVGEKGSALLLDEAESSVGEKGAAHLLPPFDEAESVVWLEVTKETMEGSIGEKGSAHLLDEAESSVGEKGAAHLLPPFDEAEGVVWLEVTEETTEGSVGENGSAHLLDEAESSVGEKGAAHLLPPFDEAESVVWLEVTEETTEGSVGEKGSAHLLDKAESSVGEKGAAHLLPPFDEAESVVLLEVTEETTEGSIGKKGSAHLLDEAESSVGEKGAAHLLPPFDEAESVVWLEVTKETTEGSVGEKGSAHLLDEVES

SEQ ID NO: 70688 - protein, 157 aa, Zea mays
  Coding DNA Sequence Number=SeqID_27313
MGRGKRRRGLPRRADGKRKRAPSPPSEDFGDSEYLEEASTELDRSDDSEEVSSEEVDSSDSFEEWSGREGDDGEDDGSSGDDDDKGDSGGECEGDDGEGDGDDKGDDGDDKGDSDGKGDDGNKGDDDGSKGDGGEGDDDGMKGDDGDDKASGIMLLV

SEQ ID NO: 70689 - protein, 820 aa, Zea mays
  Coding DNA Sequence Number=SeqID_27314
  Gene Ontology: Mol. function=metal ion binding; Cellular component =nucleus; Biological process=transcription from RNA polymerase II promoter
  Homolog annotation: Hit_ID=Q2QPI8; Match level="QueryCoverage=76%, HitCoverage=91%, E-value=0.0, Identity=74%"; Hit description=PHD -finger family protein, expressed
  Pfam annotation: Domain name=PHD; Domain location=190-239; Score =14.0; E_value=0.0003; Accession=PF00628.20; Description=PHD-finger
  Pfam annotation: Domain name=PHD; Domain location=274-331; Score =28.9; E_value=5.5e-06; Accession=PF00628.20; Description=PHD-finger
  Pfam module annotation: Pfam domain module=PHD::PHD; Domain location =190-239::274-331
MAFHVACPITCRRVCDCELGFGASASRKGGGGALAAVWAGTAAALEDFLADPWLLRPAGAVDADAATVQVEVPPLEPAPEDGEDEARRAAAQRGAAAAEDLARRFESGAYGSPEAEGDEDEWDREDQGNAAVKTFSTGAHGSVLLAAVVRLVVFLFPAIIMNFYPSVKFGLFILVLVLCLNLHLDSIYHFCYMVCRRPGDPNKLMFCKRCDDPYHCYCQQPSHKNVTHGPYLCPKHTRCHSCGSGVPGSGHSTRWFLGYTCCDACGRLFVKGNYCPVCLKVYRDSEVIPMVCCDVCEKWVHIECDGISEEKYQQFQADQNLQYTCAACRGECSQIRDTEDAIRELWKRRDVADHELMITLRAAAKLPSLEDVSPLYPNSDDEKLGAYVLKSESRNTLKFSLKSNSSKPPPDTPEQEKVVFKSSGSNKKPSKKKGGQGNKTNDGHDEIFLERRHDVKSSNSRLGDQSIDGNHDMSPFKNDDNAYISSSTRSSEKNLKSPSMKAVTNNADMIPKVKIKGSKVSSLHYKDGEENTSKADTGKATKLVIHLGSRHKTRSGSPKSELSNYQREQDLGSIHGRKLDVTSQLKGSRSEVKERSVMKLVRETGVQQRNSLLGDLGTSKKHATGKRSNALISGMENGNETGTRNRPFAQKQSHSSQVDENQGTADSPDNLKPSLLKLKFKRPHYEQLNTQASQPEEPTSWVSQQEDQFNVAKGQRSKRKRPSMEKADGLDGTTPAKRHHQSTDDEVMDANWILRKLGKDAIGKRIEVHLTSDGKWHQGMVSNVMGGTLCIQLDNGRSENVELGKQAIRLIASRSKGRKR

SEQ ID NO: 70690 - protein, 159 aa, Zea mays
  Coding DNA Sequence Number=SeqID_27315
  Homolog annotation: Hit_ID=Q7XBD9; Match level="QueryCoverage=19%, HitCoverage=1%, E-value=8e-08, Identity=77%"; Hit description =Putative gag-pol
MSPPCKGRNLPIEKHDDEGTDVGTCGNIMKPGNGIRRSLYPETKPQRWEKLLTNECTKKGATLAAAITDKPKTGSESWPSRTLGFGERTLSSLETSLTPRLRAIRWPPNFKVSNINKYVPKKDPGKPCCIGSDIYLGTASMIGATLVWRNCLNYSNLSA

SEQ ID NO: 70691 - protein, 161 aa, Zea mays
  Coding DNA Sequence Number=SeqID_27316
MEQRITRSTFTGGRAKSGDRGLASPAKQILIPCSGSFTEARARAGDAGMAWRGAGRVGSGAGVLWRAQNASNTWRCSSTRVQKLARAYGYLPMCKRANLGKNPAQTSSWRLWLSLVCEFQGKISPRSEDMRTPNLACLTAHFATKNLGGFGAIYKVNTVDL

SEQ ID NO: 70692 - protein, 55 aa, Zea mays
  Coding DNA Sequence Number=SeqID_27317
MESHDLRAEWESQLVGNVCNLCRVLETGCPDCIQCSGGDAGNMENFEEFQDYDKF

SEQ ID NO: 70693 - protein, 167 aa, Zea mays
  Coding DNA Sequence Number=SeqID_27318
MGQRTLAFTKLMLRDFFCNFLGKHRLPVVYANREQGREKERAGEIPYLKAYPRDLSVAAKARRRLGSTVADHGGCAEDGGVGGGLRRGSAGAQMREGEGERGSRAQVAEGGAVASSTRDVDAESSVRAARAGGYAGTRELTEGAREQRERGSGRTREESGRADRRAR

SEQ ID NO: 70694 - protein, 325 aa, Zea mays
  Coding DNA Sequence Number=SeqID_27319
MHELRLELRIWSSENGLMLRKPKTKDPLYAEPARAQSDVGLILPDCVLEPLPKNRIFRESPRKISQNHALAAFAPQRDLVQKTLLTQRPISKTASLTLLLSVLLSPHLSPPPVSPAPPNPLPNANPTKPSPNPAQISSKRVKPHPFRPNSFRIRLTRPPIWALAASAPIASLPWRFTSRAPSLGKLPQSLSHHSYLFFITPARSDGRVASPPPSLSLFLCSRRVCDCELGFSASASRKGGGGTSAAVWAGTAAALEGFLADPWLLRPAGAVDADVATVQVEVPPLEPAPEDGEDEARRAAAQRGATVAEDLARRFESGAYGSPVS

SEQ ID NO: 70695 - protein, 615 aa, Zea mays
  Coding DNA Sequence Number=SeqID_27320
  Gene Ontology: Mol. function=3,4-dihydroxy-2-butanone-4-phosphate synthase activity; Cellular component=chloroplast; Biological process=riboflavin biosynthetic process
  Homolog annotation: Hit_ID=Q6Z234; Match level="QueryCoverage=71%, HitCoverage=81%, E-value=0.0, Identity=80%"; Hit description =Putative riboflavin biosynthesis protein ribA
  Pfam annotation: Domain name=DHBP_synthase; Domain location=205-398; Score=401.7; E_value=1.1e-117; Accession=PF00926.10; Description=3,4- dihydroxy-2-butanone 4-phosphate synthase
  Pfam annotation: Domain name=GTP_cyclohydro2; Domain location=403 -572; Score=387.0; E_value=2.9e-113; Accession=PF00925.11; Description=GTP cyclohydrolase II
  Pfam module annotation: Pfam domain module=DHBP_synthase::GTP _cyclohydro2; Domain location=205-398::403-572
MRSPGLNIGQPRPVAWQRSAYATELVVVLCRFGESKAGKTLAFSRPSRIDVWLFCISSSDPAFQSSMASIPPPSSSVAALTRQPAQFLKWCSVSKETKASVCSFLATNSNSTRVKSVGLRVALSFKNDGGYPADGFSGNGNTLLPKSTSVRGEDHPVADPVLPMDSMMTPEILSANLALVMDKFSDDDTDTELDLDSPTEGFASIPDAIEDLVIVVDDESRENEGDLIMAASLVTPEAMAFIVRHGTGIVCVSMKEDDLERLSLPLMVTTKENEEKLCTAFTVTVDAKEGTTTGVSAKDRAKTVMTLASPDSRPEDFNRPGHIFPLKYREGGVLKRAGHTEASVDLAMLAGLPPVAVLCEIVDDADGSMARLPKLRVFAERENLKIISIADLIRYRRKRDRLVERASVARLPSQWGNGHGYCYRSAIDGIEHLAMVKGDIGDGQDILVRVHSECLTGDIFRSARCDCGDQLAMAIEMIEKAGRGVIVYLRGHEGRGIGLGHKLRAYNLQDDGRDTVEANEELGLPVDSREYGIGAQILRDLGVRSMKLMTNSPAKYSGLKGYGLSIAGRVPLVTPITSENRKYLETKRTKMGHVYGLANAQVNQPSGSQSTEEKH

SEQ ID NO: 70696 - protein, 164 aa, Zea mays
  Coding DNA Sequence Number=SeqID_27321
MGKGNKRKREPTPPSEDFGDSEYSEEEFSSESEGSPAPVSPPASSDDSDDSEGIAAEVWTYIRVVERSGLEGSDESEFSSDEEDSDGGEDKDDDDDDGDDDDGGGGDDDGSNGGGGSGGKGSTRGGSSTGSTRGGGGKGSTRGGSSTGSTRGGGGKGSSSKASG

SEQ ID NO: 70697 - protein, 46 aa, Zea mays
  Coding DNA Sequence Number=SeqID_27322
MAVLEGTIGGSWCQRKGCFKEKQFRVELSYTVGPEAVTSTPASWRF

SEQ ID NO: 70698 - protein, 190 aa, Zea mays
  Coding DNA Sequence Number=SeqID_27323
  Gene Ontology: Mol. function=two-component response regulator activity; Biological process=two-component signal transduction system (phosphorelay)
  Homolog annotation: Hit_ID=Q7FS86; Match level="QueryCoverage=38%, HitCoverage=83%, E-value=2e-12, Identity=58%"; Hit description =Putative response regulator
NPGLCITIGSPDHPPTRAHDPTHALAVIQSHAATIKTPPRRQGLGFSGGGGSLKRASVSDPRGQQRCRPEAGDLRRRSTRNERQRRSRGGRASGDGVLEADGRRQRTLGPMATTFVPFVSAMATTAAAPTSVASSPAPKANNSRKAVVPRMTGYKLPKRVKESAVLRDILVVIMSSENVPTRIIPLPGGV

SEQ ID NO: 70699 - protein, 179 aa, Zea mays
  Coding DNA Sequence Number=SeqID_27324
  Gene Ontology: Mol. function=transferase activity, transferring glycosyl groups; Biological process=sucrose metabolic process
  Homolog annotation: Hit_ID=P31927; Match level="QueryCoverage=46%, HitCoverage=7%, E-value=7e-39, Identity=94%"; Hit description =Sucrose-phosphate synthase
MDEQSANHKLSCSWLMEMDCSMRESLDGQFSNISTDPINGAKLEAEVATKTIEMSKVHRLQDGFEQPLADASCDGQENSDAPVSHPALDTKEQVRREATEDLAEDLSEGEKGDTIDEFAPVETTKKKFQRNFSDLTVWSDDNKEKKLYIVLISMHGLVRGENMEIGRDSDTGGQAWVSL

SEQ ID NO: 70700 - protein, 428 aa, Zea mays
  Coding DNA Sequence Number=SeqID_27325
  Homolog annotation: Hit_ID=Q6J9V9; Match level="QueryCoverage=25%, HitCoverage=29%, E-value=4e-07, Identity=41%"; Hit description =Putative uncharacterized protein
MNKNTGIQSAITNGTPVPPPQVRTTPLDRGGPAEQQKTDERRAVTRSSSGDDDDFCSGGPNSGSTDLRADAAARRPPPMPKLVRQGRAEGRRVGGRSVAGLGYLAGGRTSSSCCGRRRRRERLRSHSRPRARHGAAAGATDDNRPSLPSLSEGAGRRPRRGRPQLGTLPSPALVMKILEAEGGAEAAARLAFPHHQAGGHHLGRSGRRFAFAVITAPKKGPGKGDTPKRILPHEGTRLRASLLIRGSKAGPPKGFNSRLRSRGPYTHYWSEVRRPAPRRVPRPPQATRASRPLLIRGSKAGPRRVHSRLRRRARDDQGYVRYITEARAALPSSPETPCSAPIEGNMALSPLLLAERRRRGVCKKAESVPDRPLALCGGSGAALANPAPAEPLTASTYQPENLGPDRTPGLRPIRMREQPDQPKHYARH

SEQ ID NO: 70701 - protein, 208 aa, Zea mays
  Coding DNA Sequence Number=SeqID_27326
MGKAGQRFHTFAGSTSTNTKLAFLDLPLEINEKAPRCHPNATLSPIEAPEFRIKSEANGYTFLKCSAVWSAFLCTSVASSSRKFFFPQPQLHKYAESPRGLQRLLNLFHQSYNDPGLEMPRRKDRLAQERILPHASAENGQSLHKWATVSCDKLHRQQIGLQGHPRFRRLSAVRILLCNKVHAKKRHLGSVLAFQIGQIFILQKFVVN

SEQ ID NO: 70702 - protein, 690 aa, Zea mays
  Coding DNA Sequence Number=SeqID_27327
  Gene Ontology: Mol. function=hydrolase activity, acting on acid anhydrides, catalyzing transmembrane movement of substances; Cellular component=integral to membrane; Biological process=calcium ion transport
  Homolog annotation: Hit_ID=Q9LM01; Match level="QueryCoverage=20%, HitCoverage=13%, E-value=6e-44, Identity=62%"; Hit description =Calcium ATPase
  Pfam annotation: Domain name=PPR; Domain location=449-483; Score =27.3; E_value=5.5e-05; Accession=PF01535.11; Description=PPR repeat
MSLEPVKPKEGEDEAKSSCPYALGGTRATMGGTKSRDLARMDEGRCQVLYNGIIICIHDSIILDPLAVLPRLPRSSAMEHQDAAICKLLDEMRLMEARLSERISGRCDDVEHHLDEHREEPCDETSRFDKGIRRPQEDRELVQPPRRVESATCVESSVPRASSTELDREFIAASAFVTASVASSTSALEAGAHVDVAGEPEFPPRVTLDGHPDDELLHVEGAVVRPLLEEREQQHGTAQRVIVARGQSVLHRQYQLDSSPLDSCNIFAPERPADREMVEASAVMVVWAYDAACDRVGVQEVKHACEVGCSGGEMCLFTDLLGDLLCRIHRSPDSLMLVVETTIGTNSTEIAGIVRGCAKTAVSVGTTQQAKDDPIYTKVGSILGLRVSPSHWRKGMGKKLADREEDEVVQASYTYNIYNNWAPLEDALRLFDRMCMEHDSPRTSAVNLGSFNVMVDAYCHAGRGQYAIKVFGKMPRRGLCQMYSSNNLIDWLGKNKLVGKSEGWYMEEAARAVLGEWNKAIMATTCANGKIATICHDASIAHSEHQYVATGMPTEVVLEVLVENMGLPGGYTPSFDSSDLRRSCQWWNNLAKRVATLEFDRTRKSMGVIVKANSGKNSLLVKGAVENLLERCTYIQLLDGSVVLLDDGAKALILFTLHDMSASALSCLGFAYNPMKVKLAWSGMDPALPT

SEQ ID NO: 70703 - protein, 469 aa, Zea mays
  Coding DNA Sequence Number=SeqID_27328
  Gene Ontology: Mol. function=protein-tyrosine kinase activity; Cellular component=integral to membrane; Biological process=protein amino acid phosphorylation
  Homolog annotation: Hit_ID=A2ZCS9; Match level="QueryCoverage=18%, HitCoverage=35%, E-value=6e-19, Identity=57%"; Hit description =Putative uncharacterized protein
  Pfam annotation: Domain name=Pkinase; Domain location=287-418; Score=- 107.6; E_value=0.037; Accession=PF00069.16; Description=Protein kinase domain
  Pfam annotation: Domain name=Pkinase_Tyr; Domain location=287-421; Score=-105.0; E_value=5.6e-06; Accession=PF07714.8; Description =Protein tyrosine kinase
  Pfam module annotation: Pfam domain module=Pkinase::Pkinase_Tyr; Domain location=287-418::287-421
MADLDLACPSAVVAPMDMGTTTSIWCQGAHVSSRGKYGDDVYGKGDVLGLYISVPHGERFELQDTSGRPFSAHRKPTSRNPTAAAAASPDPVPVEQVALLAATPRRRNGDPTGPEPPARGGRRGQPRHLGLLPPPLGRPPQQALHRRAWQHCRRLPGASARGAGRAYLPTELLLPAVVLSARGSLLGLCSSRARFPSPLSSPAAPCPLFCSARRALNLAPARRLDLPSVAPLLIFLARASSPWPAAGRQVLADCLRLGLPLSRALHDEGVGPIDLPFMLLRAITKDFSDTQLIGRGGFGEVYKGVLPNGMVVAVKKLLDKIDVLEANFQSEVACLIEVKHRNIVRCLGGYLAPEFLSSNAITFKADIYSLGVIITEILTGHKECTSVDKCTPRLSPLLVHSVRSSARALVSRRFHELIPVFDSVLVRVDCVIPTTPSSSSSSSTPSSPTASVRTRGVFSQIARIVLGNI

SEQ ID NO: 70704 - protein, 229 aa, Zea mays
  Coding DNA Sequence Number=SeqID_27329
  Subcellular localization annotation: CTP_CleavageSite=54; ConfidenceScore=5.09e-01
MGHVRPLGLPASSSLETPCSVPSKGNMALFPLLLAGSDSGSAPEDDELRLARPRARTRAQPRKTTNSASPDPGLGLGLSLGRRRTLPRPTQGSDSGSAPEDDELRFARPQCSDSALASADGLRLARPRGSNSTSALEDRLDLDLGGASTSPNPGLGSTTSQEVPSLPYPKLTQATGNKTGVPSGSPRLQCSSDGHDTTRTGCQNLSGCHDGMALLQRVGRAGKDGTALA

SEQ ID NO: 70705 - protein, 148 aa, Zea mays
  Coding DNA Sequence Number=SeqID_27330
MNKTPALKVPLQTELQFRPRGYVQPPTLEGPRDDKAPGRPPSPAPAAATTTSAPGGRTAAAMASGWTPLQQCPRPHLRSRGVDKYKEPEARSADGGGDPVGDEDFSSRRHLGTDDRSRLPTGRSPLGSSRTSGAPTSVQRRRTGAKAG

SEQ ID NO: 70706 - protein, 114 aa, Zea mays
  Coding DNA Sequence Number=SeqID_27331
MGRPIKTQAPGFNPTYDEPAAQSRSDDPKIAPNLSPTGERRRDNPTAELVADAHRPTPPSPNPMITCPRTTTRPPEFEDRQQGQAPAPMAESTELISLHAPVDLHVLVHHPRAT

SEQ ID NO: 70707 - protein, 49 aa, Zea mays
  Coding DNA Sequence Number=SeqID_27332
MGVGGCGAAWGRGGWAGLARSGVGQDGWRRRYYESEGRRAATSLIPNMN

SEQ ID NO: 70708 - protein, 103 aa, Zea mays
  Coding DNA Sequence Number=SeqID_27333
MCHAEQSVDVVPPLLHSPWVRSWSLEGVTATPWLLTMLPESPSTESGMSVRRAQQQCPAQGGCEPVVWKKQLLPPPRNPPKSRRGAQRFAPSSERENKQKPKA

SEQ ID NO: 70709 - protein, 120 aa, Zea mays
  Coding DNA Sequence Number=SeqID_27334
MAQRTLKRNQIPTPGRDPIREDGFWGCFGVGSEGEEEAARVKKRKSEEEAAAGTRVERRQQRLHEGDKETAMGTPGNWTRGFQGQGISRNPSGIPDYQRRPRDRGAAESLPPTAEERVTS

SEQ ID NO: 70710 - protein, 78 aa, Zea mays
  Coding DNA Sequence Number=SeqID_27335
MQLRSYTDRGRTVKRVRKLQLDRWGAESLLPTAENTTNQLTNFALALCKFQELRNQQAICCVGCNKCMHGRMEDASGG

SEQ ID NO: 70711 - protein, 245 aa, Zea mays
  Coding DNA Sequence Number=SeqID_27336
  Gene Ontology: Mol. function=iron ion transmembrane transporter activity; Cellular component=vacuolar membrane; Biological process =intracellular sequestering of iron ion
  Homolog annotation: Hit_ID=A2Z104; Match level="QueryCoverage=67%, HitCoverage=67%, E-value=1e-58, Identity=70%"; Hit description =Putative uncharacterized protein
  Pfam annotation: Domain name=DUF125; Domain location=46-241; Score =119.8; E_value=8e-33; Accession=PF01988.10; Description=Integral membrane protein DUF125
MTYNLRPVIEEIQRSAEDSGDKRNLKMCLGMLKSMRNRCDQNFVAYRKGLGVVCNKKGGFGVDDFVVEFFGEVYPSWRWYLAAKSEADHYNRELQREQDEIDTVPDVEAAEIADILSEYGLGPQEYGPVVTSLRNNPKAWLEFMMKFELGLEKPEPRRALVSAATIALSYVAGGLVPLLPYMFVPEAGRAMAVSVAVTLAALLFFGFVKGRFTGDRPFFSAVQTTVVGALASAAAYAMARAVQSI

SEQ ID NO: 70712 - protein, 268 aa, Zea mays
  Coding DNA Sequence Number=SeqID_27337
MGSARVAFVLLLLEERNLTVVGTFQPSLGFKDFHQAARLHPLTNGHAGGGEVLTGLAEGADFDNAGPIGRKRPGSGAASGATSHRWAECGYLPAVWAVVAPRAPGDRSRRRMPLGRHSCSWVVLPLLRHDASARRSVLARPGGLEWGSAGGPVAAVVGAEVVAAREGFSADETVSATRGPTFGSLALIACPRPSSGDTGEGLVTAASALRSSLLLFSRPERRSLSLLMERAAASQLEFVVPQAPPMWRYFGCNTVFLPHFEHQDSPVG

SEQ ID NO: 70713 - protein, 304 aa, Zea mays
  Coding DNA Sequence Number=SeqID_27338
MGACKVPSLLVYRGEPDGTPVLFPAEPWGRARRRPSSEVEVEPEPWGRARRRPSSEVEVESEPWGRARRRLSSEVKAGAEPWGRARRRPSSEVEAGAEPRGRARWSFLWRLRLDSAAVSLTLAGGTTVGAGQATLFSCQAILASNAPAIWSVGEAIWPRLLHCEACPSWGLGRVEACADGDFQPSLGVLGASASASASEEDLRLARAQPRPRKKISASPEPSLGLRAQGTSPMATLARVQGSRRFSDGHISSQLYPITDVATLPTLVGALSLSPSLSRDACNPYYKHPEVPGASTISLEAQGSQ

SEQ ID NO: 70714 - protein, 177 aa, Zea mays
  Coding DNA Sequence Number=SeqID_27339
  Subcellular localization annotation: CTP_CleavageSite=97; ConfidenceScore=5.21e-01
MARIPSSPTRAARDDGEFTTGHSGDDAVTTVRSASATQRNSNEQFTGLLRTTGPDFPRSRSSSTGKSARPLIASGAAMQALGHGGGRFAPHGDERTRDEAEVRISVNGSEVRGKLRHGRDSVEGDGQLTYAADRWVPDVGAPLLVAASGASGSVIGSHAWAEWVKGRAAWFADGPNS

SEQ ID NO: 70715 - protein, 74 aa, Zea mays
  Coding DNA Sequence Number=SeqID_27340
MAPHGIVRSGARGWDQQRQQPAGSYMIIAQAVAAARSASDACAGSTRSEGHRRAFSQRRSCWIHPHATAAALKP

SEQ ID NO: 70716 - protein, 50 aa, Zea mays
  Coding DNA Sequence Number=SeqID_27341
  Gene Ontology: Mol. function=catalytic activity
  Homolog annotation: Hit_ID=A3B342; Match level="QueryCoverage=100%, HitCoverage=15%, E-value=1e-09, Identity=62%"; Hit description =Putative uncharacterized protein
MSRAFDDYYIKNYGVISGPEMTQRRTDNNDQFVILATIGVRDMLSNDETM

SEQ ID NO: 70717 - protein, 229 aa, Zea mays
  Coding DNA Sequence Number=SeqID_27342
MDWASITENSRGYGANIPKTQKVPGVDGGLIYQYWKGSFLQNGMAKGVSVDYGRWIKSRALGLNRSPREPIRNGRPGFAVRESLCLIDLSRTVKIRWPGSHHPQHRPRATTASSQQGTPATTPSCAVEPHEPFPTRLFEVQNKVNRMGEVLPRDSEPVSQTTVRSASTTQRNSNEQFTGLLRTTGPDFPRSRSSSPGKSARPLIASSAAVQALGHGGGRFAPHGDERTR

SEQ ID NO: 70718 - protein, 158 aa, Zea mays
  Coding DNA Sequence Number=SeqID_27343
MQAIKPKKAYAACAAEDAVLVWKYAGNQTTSTAWSTHGKSLRWRVQTTNQMDTHDAGKGKETVGGGRVCYASLFRSVHALAGIQLARKKVLDLVLAEAMLSVRGDKESRIFLYQMQGESRWKGSVGRSHLNGIRYAKYDDLSTNFAMDLRRKRPNDPA

SEQ ID NO: 70719 - protein, 366 aa, Zea mays
  Coding DNA Sequence Number=SeqID_27344
  Homolog annotation: Hit_ID=A2X9L1; Match level="QueryCoverage=30%, HitCoverage=8%, E-value=8e-12, Identity=33%"; Hit description =Putative uncharacterized protein
MGLLASHSIQANFASRSNYAKSNPLKMMVRLGGLRDPMRYLGCGGVGHKAWQCPNKPASTTAATFSPSPHVPPASTVRISHPCARQAWQGPAMQLSVRKKHLLFLLPLGAWIRISSSTSSTSTTVTRRWHDAISPTTTLTFGLGHGSSLFTVTASTSTTMFVSASKAFPLHAWNEGITKRAVAKSCVLDYVESQSLRKEDTRTLNLWAWTRNPSDIPKVTWLTIVGRNIIVHNVPPAGQSGLTFRVIVHLDLVEGSPGNEGQGSTHVFDWRLGVVDGKRSRLDHRHYTSRRYMSGDGPGGVRQVQQPRQVAAMPAAASHIGTPGRGVANMGSRPHTGLTHQLHDGSLVTRGRSRTRHLPQGAGRRT

SEQ ID NO: 70720 - protein, 57 aa, Zea mays
  Coding DNA Sequence Number=SeqID_27345
MWNAIDLMVKRRSEQTEEGVEIDSKPRRHPDPVPGSKGTFRNLHNFGVSHPYTIDHN

SEQ ID NO: 70721 - protein, 137 aa, Zea mays
  Coding DNA Sequence Number=SeqID_27346
MASLEGEGTQTWLLRTPFRRRTCDDATSPTPEHGSPLRTGDTGTAEAAGQAREARNAAGRAVLLARQGAGRTAKWAAAWATSEAGSSEVAALENSPATYGYNSPDCPVCTGLSGEPTVGRANGRPRDLRGTRGRANG

SEQ ID NO: 70722 - protein, 481 aa, Zea mays
  Coding DNA Sequence Number=SeqID_27347
  Gene Ontology: Mol. function=protein binding; Cellular component =chloroplast; Biological process=iron-sulfur cluster assembly
  Homolog annotation: Hit_ID=A2ZNT6; Match level="QueryCoverage=92%, HitCoverage=93%, E-value=1e-160, Identity=65%"; Hit description =Putative uncharacterized protein
  Pfam annotation: Domain name=UPF0051; Domain location=208-443; Score =125.4; E_value=1.7e-34; Accession=PF01458.8; Description =Uncharacterized protein family (UPF0051)
  Subcellular localization annotation: CTP_CleavageSite=33; ConfidenceScore=5.48e-01
MSSPSPLCAASCSTALRAPPPPLLRFRRSYAPVAASVPRTAPAVSDDLVLRIAEQLEDSVTSTSPLLDPLRSASALSLLSTRWPTRRSSEAFRFTDISYLRSLPISLPSREPDLKLPSSPFSSHVLFSDGILVSSSGAHVSALADLPPGRARDRAAAALAAAAEFAHKDLFYDFNAVGARDVVVVHVPEGVKVADDPIHIMFAYTNSFAESMLMSNPRVLVVAEKSAEVAIVEEHFGAGEEGGCYWANPVAEIIIDEGARVVHSYVQHQSFAAAHTKWTVVQQDTTSKYEFVEVSTGAKLNRHNLHIEQLGPETETELSTLHLTSQNKQIHDLHSRLILDHPRGFSRQLHKCIACGTGNSIFDGNIKVNRYAQQTDAGQETKCLILSPKALVNVKPNLQIIADDVKCTHGAAISGELDPNELFYFQARGINTETATDALLYFFGAHVIKRIPFKQITEKALAQFKELLASSRQTTDEALRS

SEQ ID NO: 70723 - protein, 455 aa, Zea mays
  Coding DNA Sequence Number=SeqID_27348
AVPKVPGWGAEYGGYLMSSSLLRQRNNRGKEKGGAAYRRRGRSGEGWGRLGETLAVTSRYGSAPEVAGIARSTRAGGCPRRRRVYRPNYGELAQSEGTVSITGSRNDCVHKESKDGGVDYPVHMARLRHTARKSVIPFLPSRLAERPLRRPVASQSSHLERLHHRLHEEQEQQGSSFSLQQEIESVRSCSPVLPLESPPTPPLGAPASGVAAGGDPDDGGGDDSSSHDTDFPADQEPEGWVARPITRDAARGCHFHNALDTLLRRALDRRTWSIEYRCVVYQHSRGVYPDRWEATCLVRRPENSFQGAEASSEHYSISERDSAEAAMQDAARHALSHYCSVLGGVADDLDLKYYPRRPSCSTGGVIVSPVGEDNPRLSSTVNLAAVLNTELDHALDELSRARAEIALLRAEHAERRHLDDGSPAPIGTQHPYRSPRRGHRSYGNPDCKTKINLEP

SEQ ID NO: 70724 - protein, 110 aa, Zea mays
  Coding DNA Sequence Number=SeqID_27349
MALFSQSQLGLGAPDCVRWCTEQCPVRQTGSDELAALWTSTAVYGYNSPDCSVVHRTVRLVCVAHPSLTPCFFVNFKCKGERLQVVEIPRKRDIVKQAKHRGIQVGLWTA

SEQ ID NO: 70725 - protein, 198 aa, Zea mays
  Coding DNA Sequence Number=SeqID_27350
  Subcellular localization annotation: CTP_CleavageSite=84; ConfidenceScore=5.67e-01
PRPAPAPRPRHRPQPPPSPTSAESSPTSAALSPALAAPAPARPPRVRLVPAAPPRARPPRPAVPTRPYPRPTRAPCLPAHPGVPCSRRDGPGAALELGPSVPMVRGLELGQRAAPTCVRLVRGACVRPYARARVPSCRQWGSVYATRSAKVDLSLGEECETSWFTGGNETDGFGYDYGAGEDEAMEGDFQEFQDYDEF

SEQ ID NO: 70726 - protein, 247 aa, Zea mays
  Coding DNA Sequence Number=SeqID_27351
  Homolog annotation: Hit_ID=A2WKB2; Match level="QueryCoverage=61%, HitCoverage=54%, E-value=1e-15, Identity=43%"; Hit description =Putative uncharacterized protein
  Pfam annotation: Domain name=DUF1639; Domain location=153-202; Score =67.0; E_value=6.4e-17; Accession=PF07797.5; Description=Protein of unknown function (DUF1639)
  Subcellular localization annotation: CTP_CleavageSite=51; ConfidenceScore=5.38e-01
MVISAEPPPPPPPDPVADAAAAAATSNARQAAAAFSSFPSLKTWGSHRALRCAHVNRAGDATATATARRSPGKLAAVAGEKALGNLHEVEAGSSDADHVAAAPALPPWKLRTRRRRPTPTVAAPSASTSRTPERRPSRACAEALGRARFSVALTREEIEEDVFAVTGARPRRRPRRRPRPVQKQLDDASSSPRKQQVTLSACLSLAKVQMKPTHDSFGTIGFSSNLNDSKASIREAELVDTFKSHLV

SEQ ID NO: 70727 - protein, 216 aa, Zea mays
  Coding DNA Sequence Number=SeqID_27352
  Homolog annotation: Hit_ID=Q53MM2; Match level="QueryCoverage=34%, HitCoverage=40%, E-value=2e-08, Identity=41%"; Hit description =Transposon protein, putative, CACTA, En/Spm sub-class
MESAGFDGRLGLNSFIQTGQILSHIHTHGTIFVQYPYHNRGIPHGLSGIGSPLTSLVASLPALAALALAQAREYEQKSLPGSLSTSCLFSGMATAVNTTVHWTLAVNVSSTLAGCALDAAALIEIGTHRTSRLTQLHHSSLSNLPSFSLRKKSKIIIACMTLHNFIRDNALHDRDFDQLVPTTLAHDVPIDESSSTISDELDMSAFRDAIANALVL

SEQ ID NO: 70728 - protein, 156 aa, Zea mays
  Coding DNA Sequence Number=SeqID_27353
  Subcellular localization annotation: CTP_CleavageSite=72; ConfidenceScore=5.17e-01
MMVLTSVATTLFVMLLLFSLPSYLHLRATPFSAEGVGACASSPYSSDTSPDTDSRSGYCTSTRTFHIMRAPSFSLLSDIPFIFPTFALFFLPNLLPPLTVAAASRPTLVNAGTARVGHAPGLSPFMSSRRTWWRLPHLGYLGDEESRSEILDNQGP

SEQ ID NO: 70729 - protein, 232 aa, Zea mays
  Coding DNA Sequence Number=SeqID_27354
MPPAPPQGIPAAGGDLDGDRDDDDAGGSSSHDTMLSEEPEPEGWIARPITRDAARGCHFHDALDTLLRQAFDPHTWSIEYRFVVYQHRRGLYPDQWEATCLVRRLDDDLRGAEAFSEHYSITERDTAEAAMQDAARRALSQYCSLFSGVADGLDLKYYPCRSTDSAGGVIVSPVGEGNPRLNSMVNPVAVLNTELDHALDELGKVRVEVVELRAECAAHRYLDGGSPAPVGI

SEQ ID NO: 70730 - protein, 311 aa, Zea mays
  Coding DNA Sequence Number=SeqID_27355
  Subcellular localization annotation: CTP_CleavageSite=49; ConfidenceScore=5.01e-01
MGRAGGTAGPAGAAHAKVVYRSRSRRGCLPRVVDNSFIHVGIQPRHIKPASQAGGQEYLTKIGKSLRAGSKERVPVPWGGLEPVWPQESRWKLGLSSLTGSGDHLYTDGSPATATTSAPAATTTSAPSGLPAVATTLGCAPLQGGPRPHSPTGGDNEAIKAKESETRRQVALMVPPAEATTSTMGSPTSGGDHLSTDDSEHLCTGGRRLPQRARRGPRSRPPMGVRTRPSKNVAATSMACDVLSSPPGSVGTMWPTAHGTLRVRQTCARRDRRPRGGRTALPRLAAGGSVGGDTKAIQPKGPDTLQLTACS

SEQ ID NO: 70731 - protein, 282 aa, Zea mays
  Coding DNA Sequence Number=SeqID_27356
  Gene Ontology: Mol. function=nucleic acid binding
  Homolog annotation: Hit_ID=Q7XI13; Match level="QueryCoverage=13%, HitCoverage=12%, E-value=4e-09, Identity=78%"; Hit description =Glycine-rich RNA-binding protein-like
MAAAEQLKELGEKLQAVVPAPADELAKLLEMTEEKVGRIFVGGLSWNTTERTLERTFGQYGKVIEAQPAGRWLWLWFECSQGVKARGRGRCRCGLPDAAGVHVSRSPPAPGDSLLTLRAAVSQSVAPPHSMQRQSAPPPSQLRHCRHAGPEPASSAPLAPAPPSDVEVTYFDSTIDSRELRRRGRQSISSSSQMEYQRQHAEYRKKDGMPPPNLALPLPMMSPPPPPQFHVGFDTPPASVVAPRDVSGQDDASTSWVNNIFNTQSLAGGSGYNSDQPGDRYV

SEQ ID NO: 70732 - protein, 211 aa, Zea mays
  Coding DNA Sequence Number=SeqID_27357
  Gene Ontology: Mol. function=binding; Cellular component=nucleus
  Homolog annotation: Hit_ID=Q6K7F3; Match level="QueryCoverage=90%, HitCoverage=19%, E-value=9e-91, Identity=86%"; Hit description =Cyclin-like protein
MGAVSREVSSACERLCFICPSLRTRSRHPVKRYKKLLAEIFPRTQDEGPNDRKIGKLCEYISRNPMRVPKITVYLEQKCYKEFRAERYGSVKVVMAIYRKVICSCQEQLPLFANSLLTIVETLLEQNRQDDLRKLACQTLFDFINSQVDSTYMFNLENQIPKLCHLAQEMGEKEKICILHAAGLQALSSMCNDTQLSCVFQEKICCLLGPA

SEQ ID NO: 70733 - protein, 182 aa, Zea mays
  Coding DNA Sequence Number=SeqID_27358
MAAAAAAPPWASLGPDKTCGQNQLRCINFTAYPLDVSGIQQNPESVRRWMFRDKHGQSLHTKMMIELHKAGELHPFLDGRPRPAEVQLLLPCHVIVVVSYAVHTSNVHSGEYDVPMVGTGGHAVEYGVVLTVSPLAINVKNESLISTTRRHAANLVRGAHGAEAVPSRVVPEGILEVSGAPT

SEQ ID NO: 70734 - protein, 131 aa, Zea mays
  Coding DNA Sequence Number=SeqID_27359
MTVLNKKVCTAEFGTEEAAIPPDLNQASVVNGGEDDISVEFEDGQIHVVQDQEDNAALISEDRTHFDLNMSAARHRLYGGMGMGFAVRGNENDRYRMELFDLANKIGEGGFGSVYKVPLITHPHIGLGNKT

SEQ ID NO: 70735 - protein, 95 aa, Zea mays
  Coding DNA Sequence Number=SeqID_27360
  Gene Ontology: Mol. function=catalytic activity
  Homolog annotation: Hit_ID=Q5NKP3; Match level="QueryCoverage=82%, HitCoverage=40%, E-value=7e-14, Identity=51%"; Hit description =Putative uncharacterized protein 9C20.7
MYDKLRRSRRLDAVQSGCSALSIVKQGDLMVIANVGDSRPSQESSVLGMSRAFDDYYIKDCGVILALEVTQRRTDNNDQFVILATVGVTFVPACL

SEQ ID NO: 70736 - protein, 131 aa, Zea mays
  Coding DNA Sequence Number=SeqID_27361
MSSSRGFGGLRKKLAGRFKSKRPRGNDDDYTPTTDSEAQSSAGGTESMDAEDFLHVHPDDPIMSRLNNMQQSFQDNMGALSSQFDNLSTTDNLHDISQRQQQLQQDFGQFSSLFDTFSTHYYNMHPPPSDQ

SEQ ID NO: 70737 - protein, 150 aa, Zea mays
  Coding DNA Sequence Number=SeqID_27362
  Subcellular localization annotation: CTP_CleavageSite=63; ConfidenceScore=5.26e-01
MMVLVSVATTSFTILLLFSLPSCLHLRTTIFSTEGVGAGASSPPDTYSRSGYCMSTRTFHIMRAPSFSPSSDITFVFPAFVMFFLPNMLPPPTVAVASRPALVDTGTGRVGHAPGLSPCVPSRRAWWRLPRLGYLGNEESRSEILDNQGP

SEQ ID NO: 70738 - protein, 466 aa, Zea mays
  Coding DNA Sequence Number=SeqID_27363
  Gene Ontology: Mol. function=phosphatidylinositol phosphate kinase activity; Cellular component=plasma membrane; Biological process =phosphatidylinositol metabolic process
  Homolog annotation: Hit_ID=A3A7I4; Match level="QueryCoverage=39%, HitCoverage=52%, E-value=7e-70, Identity=60%"; Hit description =Putative uncharacterized protein
  Pfam annotation: Domain name=PIP5K; Domain location=163-390; Score= -87.1; E_value=1.3e-05; Accession=PF01504.9; Description =Phosphatidylinositol-4-phosphate 5-Kinase
  Subcellular localization annotation: CTP_CleavageSite=51; ConfidenceScore=5.26e-01
MPRGFLPTNDTLPKTLDALLSPRSRTYARLPSPGCRDASLFPSCSPPPNPRCAASTEPQPEPIPPSMPDHAPSPPTVPQTLDARLQRSPSPSPSRLQRRILPHHHQRRCQASGSSADDVKWSNIDVQEFIAFDPVYGPQTIYSELEHRTLRKLFKVDAADYMLSLCGNEALMELSSPGKNGSFFYLTNDDRYMIKTMKKSEVKMLLKMLPAYYNHVRAFENKMMKFGRLSILATTLLLIVDNFGENNLDLPSLESAPKSFFIVLSQLIDTFSQCWKKVRIAIAYLLAAVCEIWLKGDDDVDSGYGLLRRYRYQLFVGLVLSIAYSILLYGIYVPDWEYQIAGPGSSSTKKSFFECSIDYLENGPLPPDAPSWCQAPFDPEGLLSFVMAIVTCLIGLQFRHVIIHFEKHRGRIASWLVPSFSMLALAFVMDFVGMRMNKPLYTMSYTLAAGAAGLLFPGIYVLVGPS

SEQ ID NO: 70739 - protein, 73 aa, Zea mays
  Coding DNA Sequence Number=SeqID_27364
MPSTPVATVCNALLCVLRDRRIIGGGRYKMSSVKAKRGLVFVLLLVVLPALSIGERKLTDEKDHKLYIPSGSY

SEQ ID NO: 70740 - protein, 65 aa, Zea mays
  Coding DNA Sequence Number=SeqID_27365
MEGKPSRERKSELKRVSPPLAGVGEFICGRELKVKIMAEGKKKKRARMVLKKLWRNHPNYSSLSA

SEQ ID NO: 70741 - protein, 98 aa, Zea mays
  Coding DNA Sequence Number=SeqID_27366
  Subcellular localization annotation: CTP_CleavageSite=30; ConfidenceScore=5.31e-01
MACQGTPTPHMTIVPIDSPFASRPQRLGIQCSTDPGCRRAVTALVPTIASMGDPVSGRMRDKVRARLHSGILPGSKSIDQHRSRYQDEYNQFLTSREC

SEQ ID NO: 70742 - protein, 155 aa, Zea mays
  Coding DNA Sequence Number=SeqID_27367
MAGDMDIFDPTERYIGGIIQHLPSYAGKFDPHAYIDWELKRTVCCQEEENDENITCSNMTMSMAPAAKVELFHNITTIDIFEELILHRKVHQESMTETKQGVQKLPREFRSPLELLSIPLFKQLAATKELGFLFDVQGYSWHGKSSNNKSRCNYR

SEQ ID NO: 70743 - protein, 92 aa, Zea mays
  Coding DNA Sequence Number=SeqID_27368
MAEMMPLRESVSGLVSDEYGEEARAPTSSAENGVARSLLLRPRHSEQCWARFARAIASVSLSPATTLLTGERLMVFLFAAPTHLAASLAILM

SEQ ID NO: 70744 - protein, 107 aa, Zea mays
  Coding DNA Sequence Number=SeqID_27369
  Subcellular localization annotation: CTP_CleavageSite=45; ConfidenceScore=5.08e-01
MAQGHISLSLSLIGDLPSLATTDPPAISSLCSSSDCLPSSSSRLSSSLLPSYHSHHCYHSTTYFACSLHSYAIHHLSHTHHLYYSSFHCSFRSPFRSTYPTCLLLGA

SEQ ID NO: 70745 - protein, 640 aa, Zea mays
  Coding DNA Sequence Number=SeqID_27370
  Gene Ontology: Mol. function=oxidoreductase activity, acting on the CH-CH group of donors; Cellular component=peroxisome; Biological process=fatty acid metabolic process
  Homolog annotation: Hit_ID=A2Y8A0; Match level="QueryCoverage=99%, HitCoverage=98%, E-value=0.0, Identity=76%"; Hit description =Putative uncharacterized protein
  Pfam annotation: Domain name=ACOX; Domain location=448-633; Score =224.4; E_value=2.7e-64; Accession=PF01756.10; Description=Acyl-CoA oxidase
  Pfam annotation: Domain name=Acyl-CoA_dh_1; Domain location=246-411; Score=-18.5; E_value=0.011; Accession=PF00441.15; Description=Acyl -CoA dehydrogenase, C-terminal doma
  Pfam annotation: Domain name=Acyl-CoA_dh_M; Domain location=77-137; Score=70.6; E_value=5.3e-18; Accession=PF02770.10; Description=Acyl -CoA dehydrogenase, middle domain
  Pfam module annotation: Pfam domain module=ACOX::Acyl-CoA_dh_1::Acyl -CoA_dh_M; Domain location=448-633::246-411::77-137
MAEVDHLAAERATARFDVEEMKVAWAGSRHAVHVADRMARLVASDPGMFVPAIKGQGTEEQQHKWLPLAYKFQIIGCYAQTELGHGSNVQGLETTATFDPKTDEFVIHSPTLTSSKWWPGGLGKASTHAVVYARLITEGKDYGIHGSVLLLGNAFLDAVLSSFVTYGITHVGVPGFIVQLRSLEDHSPLPGVTLGDIGGKFGSGAYNSMDNGVLRFDHVRIPRDQMLMRLSQVTREGKYVHSNVPKQLLYGTMVYVRQSIVADASKALSRAVCIAVRYSAVRKQFGSQDGGPETQVLNYKTQQSRLFPLLASAYAFRFVGDWLNWLYTDVTQKLEAKDFSTLQEAHACTAGLKAVTTSVTADAIEECRKLCGGHGYLNSSGLPELFAVYVPACTYEGDNVVLLLQVARILMKTVSQLASGKQPVGTMAYMGKVQYLMQCKSAVSSAEDWLNPDAIQEAFEARALRMAIGLLWETGSMTISFPAAAGFYERSPDLLEAAVAHIQLIIVTKFIEKVHQEIPGHGVKEQLQALCNVYALYILHKHLGDFLATGCITPRQGALANEQLGKLYAQVRPNAVALVDAFNYTDHYLGSVLGRYDGDVYPALYEEAWKDPLNETVVPEGYHEYLRPLIKQQQLKLSRL

SEQ ID NO: 70746 - protein, 223 aa, Zea mays
  Coding DNA Sequence Number=SeqID_27371
MACWKVRTEEAEEPRWLAADTVEEVEASPSAADRGRRGRRHGRWRGAQKRMEAGGSKAEGAVSSGVCREAAVGERRGGGGAIIKVGSACQVEVEEDKGGGDGQAVAAAEAGKKKMLYPRVELTLRLSLPRLELALGPGSSHSSLCPHLELTLGFLSQSSLLRSDSAFSSHPPALSLSHLLSPSSSPSPVSSPRSEHWLGPSRSAHAGAAASCLVRFLVRDVAT

SEQ ID NO: 70747 - protein, 101 aa, Zea mays
  Coding DNA Sequence Number=SeqID_27372
  Subcellular localization annotation: CTP_CleavageSite=54; ConfidenceScore=5.55e-01
WISNPWVGAERSSPFFRGLSPSPSPGVGRSGVRRLSGLSPESEPWGSGGAEFPMAPSARPDCLSVSLYQVALQSEWRRRHCPSVRPLYADGSYQLRIRRLE

SEQ ID NO: 70748 - protein, 213 aa, Zea mays
  Coding DNA Sequence Number=SeqID_27373
MGLIKKNETLKAKLASSQEAIENLLGKMEILIIHNDELTTKLENIGSIPEVSLVEIPKIIKKDASTSCFDLIDDYNPCNQVLVKNERKIQTNPTSQDNTTTRVNKPVEGENVICGLCHKEGHKYFQSKAKTGDKQKQKLKKKPTSKISNTYINKVDKMAPTPYLIKKKKNGKVIAIKANKQANKGKGVKRIWMPKEIISTLKSTKKVWMPKGK

SEQ ID NO: 70749 - protein, 141 aa, Zea mays
  Coding DNA Sequence Number=SeqID_27374
MGKSNKRKREPTPLSEDFGDSEYSEEEFSSESEGSPAPVSPPASSDDSDDSQGIAAEVWTYIRAVERSGLEGSDESEYSSDEEDSDGGEDEDDDDDGGDGDGDGSGGGSGGGDGSKGSTRGGSSKGSTRSGGGGSSSKASG

SEQ ID NO: 70750 - protein, 569 aa, Zea mays
  Coding DNA Sequence Number=SeqID_27375
MELPSSNDEAERRWVSPIRGLGRWKDTMHKGARRHGRLPKGVTLLLKATLPTCAHNRRGLSLLQQTPRSSPAARGLGPTRHANRLRAEEAKPPCAVRTTAQRLQATLHFCPDQRAKGRAAMQAACNRAKWAHFSDSQHARHGAQAHASCNRRAKCFVHATASPLAPLPRLLDCGTNTATRGDPARDPAVPAWRDGQCGQKWAGSNGGGRRAGAAAPSSAKLTSHPRAAREPSLTTLRASLLIRGSKAGPPEGFDSRLRSRGPYTHYWSEVRRPTPRKGSTAASGYSGSAPITDQGGNDLVTESHQREASSPRTPSPGDRLTGDTMFGAHRGQHGAFPPSSLRKGDAGAVNIPARELGTRPYTRATASSHEGTTRPAEALREALRPRRSETTPPRPRGLHLAGALARTHRNKTQPRKAGPLAKKCDESLQASANTPFEARGLLSGTIIRGTLKAPNSQLGSDLGSALEDDELRLARPRGSDSTSATEDRLDLGFGGAFTSPNLGRRPATSTGEELVRPEMADKGKGKGIVIGDPRMSIISQKEIARKASSEKAKRFEDAGGQAQLMNQTR

SEQ ID NO: 70751 - protein, 128 aa, Zea mays
  Coding DNA Sequence Number=SeqID_27376
  Pfam annotation: Domain name=Transposase_21; Domain location=1-112; Score=-114.5; E_value=8.1e-05; Accession=PF02992.5; Description =Transposase family tnp2
MAFRAAVIYHRPSSGLDPNGGSAGRCLTKESALDVAWAVSMYHPEKKLNAMLQPLIEELKGLWKGVKAYDVFKRKHPFRSNKKNFIKNNLVTKGTPKCLKATKIYAQLNNLVLNEEGNKYQGFKVENN

SEQ ID NO: 70752 - protein, 174 aa, Zea mays
  Coding DNA Sequence Number=SeqID_27377
MASIGSHVSPMPIYEYGPINDDKEGEHVHDKNYSKLSPKFSEKKNYGQVPLSKQKSQGHGGKRKSIPVAKIYSSQPNSTTHAIDLKEPDHQSSLPSKFSKRRKQQLQKSSSIYSRKKMDPYLGVITIGAVFTRLGAKIDGTEILLRSDDVASMWQRVCAVTIGANPRRLPRLMR

SEQ ID NO: 70753 - protein, 54 aa, Zea mays
  Coding DNA Sequence Number=SeqID_27378
MAALSPLTEARGRQQGLDSPDSCPSAGLQRSSDGHDTTRTGCQNVSGCHDGIAR

SEQ ID NO: 70754 - protein, 332 aa, Zea mays
  Coding DNA Sequence Number=SeqID_27379
  Gene Ontology: Mol. function=cysteine-type peptidase activity; Biological process=proteolysis
  Homolog annotation: Hit_ID=Q2QME9; Match level="QueryCoverage=45%, HitCoverage=21%, E-value=3e-18, Identity=37%"; Hit description=Ulp1 protease family, C-terminal catalytic domain containing protein, expressed
NNAYDCGIFMLYYIEQFIKKAPARFTTDKLGMFNRSWFKPEEASGLRQRIRELLLQEFGSARPDEAASEADVAAKRKEGISAAEWNEEEAGRVVSESDSCSYGAGDEKGTVKADSGSAEAEKEGGLVVTASSQKRSKGTAEEEEEVRGSSMPVPDAVCEITGTKVWIKRVYRRTGWPPGNWCWSSGGSSRDARRAFIEQFSRNAACAAPTAEPLDRVRLTAAKSGPRRHGKLRFARPQGSDSGSAPEDDELRFARPQGSDSGSAPEDDELRFRPTPGLGLGLSLRKDDELRFRPTTGLGLGLSPGRRRTPLPPDFRLDSAQPGRRRNSLADP

SEQ ID NO: 70755 - protein, 204 aa, Zea mays
  Coding DNA Sequence Number=SeqID_27380
MAGSKDHTKISTTNIIKLAMEALPADDQRPFEDLVMRDEKEVMRQWNEQCDKEEAELLHKLSERRKEAAEKYLSHFMVDRHQKIIRQGEIDMESLLPPLQGPAPQPLGTRQVLDAAGPSEHHLRHSGYTADRPVYFAGPSDPMQVRTQNAQVAPYMAGPSGYNPEQFGPITDRPVHHTGPSGYVADRPPSYIGPSGYGMNRPTY

SEQ ID NO: 70756 - protein, 35 aa, Zea mays
  Coding DNA Sequence Number=SeqID_27381
MSQEAPSLPYSKLTQATGNKTGVPCGSPRSYQGWQ

SEQ ID NO: 70757 - protein, 110 aa, Zea mays
  Coding DNA Sequence Number=SeqID_27382
  Subcellular localization annotation: CTP_CleavageSite=16; ConfidenceScore=5.31e-01
MSCKPAQSRRSQSAARGAHNRPAVTSDPPLLPRPTGGRSGQPCRRHATAPKEGSGKGDTPKRILPCERTGLRAPLTDQRFEGWPSEGFNSRLRSRGPYTHYWSEVRRPAP

SEQ ID NO: 70758 - protein, 76 aa, Zea mays
  Coding DNA Sequence Number=SeqID_27383
MEPCPSMNRASDCVIIAPDMVGYRALGSVVASVSNVHHRGEAGGLPWMRLEEEDRRAPLIRYGTTKIRRLGAPSRV

SEQ ID NO: 70759 - protein, 669 aa, Zea mays
  Coding DNA Sequence Number=SeqID_27384
MSSPELRESSARMLEVTGGRWPKNLLIPWAEGEDMSTSCIARGLRIFPYGQNIAAVVSAVMNKDRQDAAQKRRAVIRIPDPRREAKRARGSSKAAAPSGGQPTSAAKPAAPGSSKVSESTKAVVAGGTKPTPGEAAKVRELPSPGKRVADFGTNISVDDYFVGKVGRGANGCCPAYGGNHGVNRIGWGEGWRFLRERRDFVGRCRQGRGGLHVPPVEGGLAAAVAVAVAAAKSSKLSRTSAVDFADRVASGALTADVATEVERLRAQHADAIREKSAAESKNRRLAEKVAALEAEKTDLQRQLVEERREANQAIAEAQAAQAYAKLARAEGSLASQRVEEREVRFNALRGRVDKAEASTRSEVERTLAQLVDSYRELGVRTADFEVPDREAGLRFLEWLQEELLVLPTIMEGFMSYASLVTYEGAMNALSHEGCRHYEVFDQSDESFECEIFKAEDPIVKQSAGALFDRMWGAHGREAVRERSDRAREQMERVEDVEDIGALVGAPPEAMKVQGFGPAHATAADSANFVAASTVVAENGSDDSVSKFFESDDSRSSVVWTEESSDEDLDYFAALYVAAAEASPRVEDAEVLPGLSAGCRRRRAVAKHRVSEVEGGRLRVDRAGKRELLSSPVGASVGEGELRSLFEGEELRIMLFNYREMGIIPKVEPM

SEQ ID NO: 70760 - protein, 581 aa, Zea mays
  Coding DNA Sequence Number=SeqID_27385
  Gene Ontology: Mol. function=sequence-specific DNA binding; Cellular component=nucleus; Biological process=regulation of transcription, DNA-dependent
  Homolog annotation: Hit_ID=A9PJI8; Match level="QueryCoverage=42%, HitCoverage=45%, E-value=3e-56, Identity=53%"; Hit description =Putative uncharacterized protein
  Pfam annotation: Domain name=WRKY; Domain location=292-352; Score =138.5; E_value=2e-38; Accession=PF03106.6; Description=WRKY DNA -binding domain
METKPEPHRQNHVRHEEAQEGEQAAVMEHGALSLQRGVTNLFGRRHDEKQAVGRRGEIREVDFFSRVSRPRDQDSGGGGGRGVSGGGRDDVYIELDLLTTTTAATTCAGDEVMQTKNQKIEASAVEAELRRVVEENRRLRGILEELTRSYGALYQQLLLVTQGQHHQHRLHPADLMISRPSLAHTHLTSTAASQYSASTRLLLEARASSSAVAQPRAVEDEVVSGAGDGAGVVEASPSLSNGGNNDNDAAAADGKRKTSPPRESGEQAAASSELPGRKARVSVRARSEAPMISDGCQWRKYGQKMAKGNPCPRAYYRCTMAVACPVRKQVQRCAEDKTILVTTYEGHHNHPLPPAATTMANTTSAAAAMLLSGPATSRDGAAALLGHPAAALFHHSSSSIPYASTMATLSASAPFPTITLDLTQQAPGGLLPHGLHRPPGGMHPVVAAPAAAMPFPAPSPLAMFLPQRAPTVPTGLPVAPRQQQQQQSVMETVTAAIAADPNFTTALAAAISSVMAGAAHQAQQPTPRASNIIGIPGDEANGGSAGAATAGPSPTTTAAGAHAASGGSPRFATQSCTTSTT

SEQ ID NO: 70761 - protein, 72 aa, Zea mays
  Coding DNA Sequence Number=SeqID_27386
  Subcellular localization annotation: CTP_CleavageSite=28; ConfidenceScore=5.06e-01
MATRRIALTHTTRSHPYTVGGLRLPKVPSDSDQNHSVRSTNNTKVDAAPKLRTRKLQRDNRKGNRLKGEKAI

SEQ ID NO: 70762 - protein, 533 aa, Zea mays
  Coding DNA Sequence Number=SeqID_27387
  Gene Ontology: Mol. function=pyridoxal phosphate binding; Cellular component=cytoplasm; Biological process=metabolic process
  Homolog annotation: Hit_ID=Q9LGZ2; Match level="QueryCoverage=82%, HitCoverage=91%, E-value=0.0, Identity=86%"; Hit description =Isopenicillin N epimerase-like
  Pfam annotation: Domain name=Aminotran_5; Domain location=56-445; Score=-57.8; E_value=7.9e-09; Accession=PF00266.10; Description =Aminotransferase class-V
MASDPAPDDAAAAVNGHGNDNGHGNGPSPSKRPRAVISEAEIRVEFAHHDAAVARVNNGSFGCCPASVLAAQAHWQRLFLAQPDAFYFHVLQQGLLRSRAAVAEVVGAGDVSEVSLVDNATTAAAIVLQHAAWSFAEGHFARGDAVLMLHYAYGAVKKSIHAYVARAGATVVEVPLPFPVASADAIIAEFRAALAVAKEGGRRVRLAVIDHITSMPSVVIPVKELVAICREEGVDKVFVDAAHSIGQVPVDVRDIGADFYTSNLHKWFFCPPAVAFLHTRKDDPIASQLHHPVVSHEYGNGLPMESGWIGTRDYSAQLVVSEAIDFVNRFEGGIEAIRNRNHEKVIEMGRMLAEAWGTFLGSPPELCGSMVMVGMPGCLGVESDDDAMRVRTMLRKDFQVEVPVYYNSRRVEGQEMTKDKNGDPVTGYVRISHQVYNVTEDYERLRDVVNKLVSEGFTSSKLRPSEKCLVPKNRNERKPNTDEQIRKMKSKELTGGGGVNIQMRSSSQDGEQELLLAIWRRGRSAAGAGKQKR

SEQ ID NO: 70763 - protein, 26 aa, Zea mays
  Coding DNA Sequence Number=SeqID_27388
MQLHTLRDDVVLYSQRCLLLIKGSGK

SEQ ID NO: 70764 - protein, 194 aa, Zea mays
  Coding DNA Sequence Number=SeqID_27389
MAAAMAGSRYFGTGDNEIDGSDYDYDAASPLQPNRILAEYVDVYSPLLYTPNTPQVVSIATTAQAKMKLWKETSRSSKITTSSRCGLAATPSRLPVKAAVIYVSFPHFDLLIGLMFLFEGVISGAEDARKILNNHGTCPILSMTNRGEKKKKASVRWDAIAHRAWIEIVLEEIAAHNRPQWVLNIIGNANLVAK

SEQ ID NO: 70765 - protein, 152 aa, Zea mays
  Coding DNA Sequence Number=SeqID_27390
  Homolog annotation: Hit_ID=A2XFR6; Match level="QueryCoverage=95%, HitCoverage=41%, E-value=2e-27, Identity=44%"; Hit description =Putative uncharacterized protein
MDAGDRGFRTLSAHVSLTPLSTYAASVSNAARRALWSLSHTYRQQLHDMRYKHLPLRLRGESQTSIVPSEAGEDCLNALVGVVAGLNTDLDSATLDLSGVHEELEDAHARIAALEAQLEGRTPPEVEVPTMAVSLPGKRIRYGELGSITRLL

SEQ ID NO: 70766 - protein, 266 aa, Zea mays
  Coding DNA Sequence Number=SeqID_27391
  Gene Ontology: Mol. function=transcription regulator activity; Cellular component=nucleus; Biological process=regulation of transcription
  Homolog annotation: Hit_ID=Q5GAP8; Match level="QueryCoverage=71%, HitCoverage=73%, E-value=2e-78, Identity=76%"; Hit description =Putative uncharacterized protein
  Pfam annotation: Domain name=PPR; Domain location=134-168; Score=9.7; E_value=0.55; Accession=PF01535.11; Description=PPR repeat
  Pfam annotation: Domain name=PPR; Domain location=99-133; Score=35.4; E_value=2e-07; Accession=PF01535.11; Description=PPR repeat
  Pfam module annotation: Pfam domain module=PPR::PPR; Domain location =134-168::99-133
MVSSYTQNGRHEEAVRTFLDMWDGAGVRPNELIVSSVLPACAALGALALGRKVERYSRGRGMLRNVYVANALVEMYAKCGSIRRAWKVFRGMGTRRDLCSWNSMIMAFAVHGLWTEALALFHKLRMTGAKPDGITFVGVILACTHGGLVDEGKLLFNSMRGEFGQVSVELQLLREKWGLLLADLIFQSCSVCWYFTDSWEQFRISGSIDVIDASTTDPTKLQHKEKAWFSSSVKSRLQYFGPQPGIPVLDDEHVMMSMLRAFISIL

SEQ ID NO: 70767 - protein, 152 aa, Zea mays
  Coding DNA Sequence Number=SeqID_27392
MAGFISYSSGAYLQMRPTEGYRGGSGRPIYVGRPGLHPHVIEPVRAMGPWITNLRSRFNALNQCLRFNLDRTPHDRWWGAFPPILNAELGGDPNHSGGDITGLGPNYESAPKRSLTKWLHEAGAILELYDEFSPEITCDEALPTAISGPTTT

SEQ ID NO: 70768 - protein, 91 aa, Zea mays
  Coding DNA Sequence Number=SeqID_27393
MERRSGAQGTTLYGRNKPHDAEKKEGTDKRGPPTCDWPRRQNRVVGVRWAEGWKGKWAAKEKRMGQPGKEMAEAQGQTALGAEVAQGARLR

SEQ ID NO: 70769 - protein, 55 aa, Zea mays
  Coding DNA Sequence Number=SeqID_27394
MESHDLWVEWESRLMGKVCNLCRVLESGISVVLMCSGGDAGNMEDFEEFQDYDEF

SEQ ID NO: 70770 - protein, 86 aa, Zea mays
  Coding DNA Sequence Number=SeqID_27395
MAQRRSRVKLRAGIEATRPWLVLDALHEVESGRQPSPTPQPEMPPAPLQGIPAAEGDPDGDKGEDEDGDDDDDGGSSSHNMELSEE

SEQ ID NO: 70771 - protein, 105 aa, Zea mays
  Coding DNA Sequence Number=SeqID_27396
MGLAVACALCRYCCSCALPCFKLYFNFQRYLDLSLSLYVQVSYRLQGAWTGKHDDPMTRHCASATAAAIHTNLQSNGGLLSTFEAMRDMARDGQIVFVCISQVLF

SEQ ID NO: 70772 - protein, 71 aa, Zea mays
  Coding DNA Sequence Number=SeqID_27397
MEHLFAIVRQMLALLHIELLYNLVHVSRRTWLVRDCFYIIHRDGSSIWVSILPWKSIAGHMLASSSSQLYP

SEQ ID NO: 70773 - protein, 268 aa, Zea mays
  Coding DNA Sequence Number=SeqID_27398
  Gene Ontology: Mol. function=sodium:hydrogen antiporter activity; Cellular component=integral to membrane; Biological process=sodium ion transport
  Homolog annotation: Hit_ID=Q0J2X1; Match level="QueryCoverage=24%, HitCoverage=12%, E-value=2e-18, Identity=75%"; Hit description =Sodium/hydrogen exchanger
MPNATSCSYAFLTVTDDWSSPSLHLSLAHNCPVEVYMDAYTSTCMHDQQEYLIATNLVKRPHIVEKVGFLYGKRASLKPITQVTGQPTSKRNKPFFANFGAIVTFAILGTFIASVVTGVLVYLGGLTFLMYKLPLVECLMFGALISATDPVTVLSIFQIPKLQCKMNKRWLAVLHTAHTILNLKLPEKEKAHSHYLIKKGRTQCRRLPALCGVWGRVSLSAKPYPHNMQRLGLEPGTIQLQTELGSDVNLYALVFGESVLNDAVCLWL

SEQ ID NO: 70774 - protein, 120 aa, Zea mays
  Coding DNA Sequence Number=SeqID_27399
MAAAMAPSGEGKGEGGWEREERGRRGGSPALESDGEGRPAGGGGRAGGGGGLGQGRFLVENRSYGQTVRSKAPSLVWLLGATAPQLQQHCSRSGRSPMKTRPAGSFLWFILDQQEPELEL

SEQ ID NO: 70775 - protein, 226 aa, Zea mays
  Coding DNA Sequence Number=SeqID_27400
  Gene Ontology: Mol. function=hydrolase activity
  Homolog annotation: Hit_ID=A7P397; Match level="QueryCoverage=58%, HitCoverage=63%, E-value=5e-48, Identity=68%"; Hit description =Chromosome chr1 scaffold_5, whole genome shotgun sequence
  Pfam annotation: Domain name=4HBT; Domain location=91-176; Score =46.4; E_value=9.7e-11; Accession=PF03061.13; Description =Thioesterase superfamily
MALRGGQPAATLPRSSDSDAPETGEQVPAAGCLPSSYCPLIHWSSWQAAAPPARTSPLRSPALALLAAMHHRPEKFFEVEMKVRDYEIDQYGVVNNAIYASYCQHGRHELLESVGISADAVARSGESLALSELNLKYFAPLRSGDKFVVKVRLAGIKGVRMIFDHIITKLPNHELILEAKATAVCLNKDYYPTRIPRELLSKMQLFLPVDSRGSNEDVNNRNNSCN

SEQ ID NO: 70776 - protein, 123 aa, Zea mays
  Coding DNA Sequence Number=SeqID_27401
MAVPMPSSTLQAHRGGRAPLQRIQQSMRTPDVYVRDRVLVPLKPGCDIGAMANPPLAKSMFDKDVIKQKYLHKAKLKECAFLDSFNDLDNDYDHISSLLSNDELKRRVEDKLNELSFFIDTTK

SEQ ID NO: 70777 - protein, 240 aa, Zea mays
  Coding DNA Sequence Number=SeqID_27402
  Homolog annotation: Hit_ID=A3A9U2; Match level="QueryCoverage=63%, HitCoverage=65%, E-value=1e-36, Identity=52%"; Hit description =Putative uncharacterized protein
  Pfam annotation: Domain name=4HBT; Domain location=108-204; Score =26.1; E_value=0.00013; Accession=PF03061.13; Description =Thioesterase superfamily
  Subcellular localization annotation: CTP_CleavageSite=42; ConfidenceScore=5.29e-01
MQQQMAGLVHHQAIGMVSFSSGANARHHVAVHAGRARLGRVTAAARPKYCPLRGAAAVAAPLASGRELLDQHTRPSNTTSSQQLTTTVRKDKFFEIEMEVRDDELDEYGVVNNAIYASYLHSDYLTEPVRYVSGRDVVLEKLGISVDYWTSTGNAMALSELNLKYFAPLRSGDRFVVKVKPVQIKGVRMIVEHMIEALPDRKLVMEGRATVVCLNKDFRPTRVFPELAARAKEVFSCKVA

SEQ ID NO: 70778 - protein, 584 aa, Zea mays
  Coding DNA Sequence Number=SeqID_27403
MSSPELRESSARMLRVTGGWWPRNVPIPRAAGEDFFTSRMVREWRVFPYGRNIAAVVSVVMDKDRQGGAQKRQAVVRLHEARPKRQRGAAKAAAPGGGKPPLAAKSGVPPSSKAPEAAAGAGGSKSTKAVPPSGRVAEVAKAARVLPSSGKRVADFATDISVDDYLGGSDEGQLVIVAHAAATMAAAVVPKAKGGALGAGGEMSALAAVRDEAGAASRRLKEVTEALSQVADFANRTASGALTTVVSAEVERLRTQHADAVREKSAADSKCRKLADKVATLEGEKTDLRRQLAGERRETNEALAKAQAAQAEANLARAEGNLARERAEQLQERLIALESRVERAEAATRAEAERTRKQLMDLYHELGARTGDFEVPEREPGLRCLEWVQEELQALPTIVEGFMSYASLVTCEGAMNALSREGCRHFEVFDQADEDFERDIYKVEDPVVKESAGAIYDWMWGPHGREVVRERAETARAQAARGERVDDFGALNSVLPDPEPTPAEAVSGAALEPPPETAEGASDAPASAAAGEDLPPETAEGAPDAPAAAAPSAEVLRRFKILGLRTQPPLLNFWRLRPWMVELG

SEQ ID NO: 70779 - protein, 506 aa, Zea mays
  Coding DNA Sequence Number=SeqID_27404
  Gene Ontology: Mol. function=protein binding; Biological process =regulation of transcription
  Homolog annotation: Hit_ID=A2X817; Match level="QueryCoverage=76%, HitCoverage=53%, E-value=5e-74, Identity=46%"; Hit description =Putative uncharacterized protein
  Pfam annotation: Domain name=GRAS; Domain location=340-499; Score= -114.7; E_value=0.0053; Accession=PF03514.5; Description=GRAS family transcription factor
MRAAPFSADGNGAGTIEALLWPHGKGGGGGHLLLEPTSVLDCRRSPSPPYSTSTLSSSLGGAAGDSFSGVAAVSENSAAAAAEATKWAAPGEHGSGGGGGGSGGGRKEEWPGGDLPPIPGALDIGFVGEEGWDAMLGDAAAAAGQDQTFLNWIMAAPGDMEPPPPPPPLLGNAAGFGFPAPDPLGFSLQHHPGGGGASAGALASDLSSPGARSLSGSSGSGSKATSTFGLLPTEAVLQPPPPPAATTMRFHDGADIKPPLLGVPSAGLLHQHQTLPAASFFMPLPSFPDHQHQPHLPPPPKRHHSMPDNLFLLQNQLQPPPSQGLPFPPLHTTTPFQLQPPLQPPRGAMKTTPAAQQHQQLLDELAAAAMAAEVGNSIGAREILARLNQQLPPIGKPLLRSASYLREALLLALTDGHQGSTRVTSPLDVALKLGAYKSFSDLSPVLQFANFTATQALLDEIASTTSSCIRIIDFDLGARIPPWNWERSPANVEAHSLRVKCFPPPA

SEQ ID NO: 70780 - protein, 496 aa, Zea mays
  Coding DNA Sequence Number=SeqID_27405
MSSHSMYRVLPPSEPPDGERSCRFCLAVVGGTQLRGSWYLSAIARLQGFSSGSPAASPHRWSPKTVTTSSMVGRSELGCDLSPALSFKDLHHPCWGRERGESGPAFAWTGVPSLSASRGGNHPPALRRRRPLAMPGKANCCCPARVQHSVLCPGDGGQPHREVDAAVGAEVVAAGEVGFSADETVSATRGPTSGSLALISGSRPLSGDANESLPVAASVLGPWLLLWRLLASRPESVVPQALRCGGCSYLQGRNRSSVCNGTLSDGVCSLWLSGPEHESLGSVGLAARGFTCLVKETLGRSAASRGRGQRCQRGQRRSWLEKGSFVGRGLAGSSTSETNTAVELPRPRAGLVSSGDSWLRLWGDRPSRLLGPGSWRRPWRRWPGRGADVVLRSGDPPTVLPSEARSDFAEGGVDAEGAAAPPPSMSEPAGSVRLYIRACSSVAESFIRARVTSHGRSPGTFCSELGAVVGDDGVQDPEAMDDVGEECHRLFGPDAV

SEQ ID NO: 70781 - protein, 317 aa, Zea mays
  Coding DNA Sequence Number=SeqID_27406
  Homolog annotation: Hit_ID=Q6J9V9; Match level="QueryCoverage=37%, HitCoverage=43%, E-value=4e-16, Identity=46%"; Hit description =Putative uncharacterized protein
MQAACNRTKGVHPFDFDASSMEAQAHTSCNRRAGYYVRETAPPLAPVPRLLDCGTGAATRGAWPNSANQAYRSRGPEKGDTPKGILLREGSGPRAPLLIRGSKAGPSEGFNSRRRALGLRAHYWLAPEGFDNCLRARRARDDPGYVRYITKARATLPRYPRTFSETDGNDFVTESYQREASSPRTPSKGDRLVNPISTKLRRPDGRDSGQGSAQRTRSRLARARPRAKTADPGRFTPRPRIPSSNGRTVDSPEAQLGAACPAPTAVPLARVRSTAAKSSLGRHRKLRLARPQGSAPVSASEDGLRLARPQGSDSTTT

SEQ ID NO: 70782 - protein, 222 aa, Zea mays
  Coding DNA Sequence Number=SeqID_27407
  Gene Ontology: Mol. function=beta-amylase activity; Biological process=polysaccharide catabolic process
  Homolog annotation: Hit_ID=Q10LG9; Match level="QueryCoverage=69%, HitCoverage=30%, E-value=1e-44, Identity=63%"; Hit description =Glycosyl hydrolase family 14 protein, expressed
  Subcellular localization annotation: CTP_CleavageSite=34; ConfidenceScore=5.27e-01
MPHSSTINCNDQGQQRAGAVRLGAARRAVSGAVRASSSRHLGPVRALVSEEAAGGERAAEGEGEDVEVRLFVGLPADTVVSDGRGVGRPRAVSASALKLLGVDGMELPVSWAVAQPGPGGWFEWVGYRGVAAMVRDAGLDLRVSLRTDGDALPGWVADAAAADPDVLFTDRSGHRRVGCLSFAIDELAVLVGKSPLQAYEAFFRSFADEFDDLFGSTITRDI

SEQ ID NO: 70783 - protein, 99 aa, Zea mays
  Coding DNA Sequence Number=SeqID_27408
  Gene Ontology: Mol. function=transferase activity, transferring hexosyl groups; Biological process=carbohydrate biosynthetic process
  Homolog annotation: Hit_ID=A3AW87; Match level="QueryCoverage=56%, HitCoverage=14%, E-value=1e-20, Identity=87%"; Hit description =Putative uncharacterized protein
MGWSAGLWWLLAAVWVVVAAAATAEGEVAVGAAPRRHAYASMMYMGTPRDYEFYVATRVMMLSLRRLSPNADRVVIASLDVPPLWVQALSSFIVFVTFP

SEQ ID NO: 70784 - protein, 291 aa, Zea mays
  Coding DNA Sequence Number=SeqID_27409
  Gene Ontology: Cellular component=integral to membrane
  Homolog annotation: Hit_ID=Q69IU6; Match level="QueryCoverage=37%, HitCoverage=18%, E-value=1e-32, Identity=64%"; Hit description =Ankyrin-like protein
MVERRAKKRMVFVMNKLMWLVCLFISVAFIALTYVVVGHDDWWLAWCTMGIGAAIMLTTLGSMCYCIVAHRLEEKNTRKIRRASASQSRGSWSRSVDSDKEILNSEYKTKIGCGTTSVFFNQRTEGPSCGTKFRSLDRPMRRGAYKQCVDFSPSRRHREDGLLALCCLDRDVGLFKRRHDEPAPAVAVSDSTPTPLKSTHPLMSKELFGYFVAPSSSPYYGRHTTVPTAPGGRPANRNVVVCNIDVVVPFYSTGVIFFGPLGHGFFSSPPGSSCASVTCPLVSSRRVVIFL

SEQ ID NO: 70785 - protein, 336 aa, Zea mays
  Coding DNA Sequence Number=SeqID_27410
  Homolog annotation: Hit_ID=A2ZZS9; Match level="QueryCoverage=72%, HitCoverage=85%, E-value=4e-36, Identity=43%"; Hit description =Putative uncharacterized protein
MPQVDLVCGASGAGAGAGDRKVSCETVIAGGSGDASPPPPPPPDPDFPPDSITIPIGDDAAFSELNPMYERDDSTKGSTNPKSAAAAVANPIVAAKTRSNSTRAAGGAPPRPPASGTTFFGLPARIRPTFSRRRPSQSQSQSQSQGRILRDKRAGGEVEPRSPKVSCIGKVLSDRERHGRRRGWWHGVAAMFRCDGCARVARGASRNMAALEDDGVEQQQQQQAGVAGMRRFKSGRRAASWGDEALATAAVVARRRETTGVAGTRRLWSPIGETDCPRRLELVVSSVSARDGRSQTGLELRVLDFGGLFLHAISQPLWKGLFVEKFNRSSGNAVYK

SEQ ID NO: 70786 - protein, 27 aa, Zea mays
  Coding DNA Sequence Number=SeqID_27411
MTDAEKKETRKCNWESYDDKGERLDVA

SEQ ID NO: 70787 - protein, 104 aa, Zea mays
  Coding DNA Sequence Number=SeqID_27412
  Gene Ontology: Mol. function=metal ion binding; Cellular component =nucleus
  Homolog annotation: Hit_ID=Q6PGH1; Match level="QueryCoverage=64%, HitCoverage=87%, E-value=1e-17, Identity=51%"; Hit description =Protein BUD31 homolog
  Pfam annotation: Domain name=G10; Domain location=1-76; Score=48.7; E_ value=2e-11; Accession=PF01125.8; Description=G10 protein
MPKIKTSRVKYPEGWELIEPTIRELDAKMREGYERLCCLRCIQTRDHNFATTCVCRVPKHLREEQKVENTRYRCPRLLPVTYIDRTQLGKSEKHDTSSCVRVLH

SEQ ID NO: 70788 - protein, 105 aa, Zea mays
  Coding DNA Sequence Number=SeqID_27413
MRDAIIAYPAELARWDAGLVSCGPSQLGVGLGEVEAPPKLRSSLSSVAEAESEPLVGRGGGRRLRPGRSPSPGVGQSGVRRLPGLSSSPSPGSGGAEFAVFRDLA

SEQ ID NO: 70789 - protein, 334 aa, Zea mays
  Coding DNA Sequence Number=SeqID_27414
  Gene Ontology: Mol. function=ATPase activity, coupled to transmembrane movement of ions, phosphorylative mechanism; Cellular component=integral to membrane; Biological process=phospholipid transport
  Homolog annotation: Hit_ID=A2YW15; Match level="QueryCoverage=28%, HitCoverage=9%, E-value=4e-48, Identity=93%"; Hit description =Putative uncharacterized protein
MTRLEDEFCHVLSARALDLEIEALSSLSSLSMASDWSNSDATEAAAGEEDDGSVSSSVGRRSSYRSLQSIREIDLFPVDAISDLHTKVRSARACHPSPIMRTDIILFLKEGSQGWLLALVMLSSVPPIAIAGAIVSKLMTGLSTRMQANYSDAGNVVEQTLGAIRTLWSLITPVNPANTWGPLIFIFAVSATKEAWDDYNRYISDKQVNAKEVWIVKNGTRKHIQAQDIRVGNIVWIRENEEVPCDLVLLGTSEPQGICHVEGGLPPEAVYNIIIDPKNKRVFMISKFPSEKEEMASKYCSTEQVPDEWVFGNAFTKLKMMRPFVNSWDSTVAI

SEQ ID NO: 70790 - protein, 234 aa, Zea mays
  Coding DNA Sequence Number=SeqID_27415
  Subcellular localization annotation: CTP_CleavageSite=34; ConfidenceScore=5.07e-01
MGEGLRSNGRLTGGSPPPALTATTTTPAPGGRTAAAQASGWALLQSCPHPRRRSRGEDKYKEPEARSTDGGGDPVGDGDFSSRLHLGTGARSHQPSGRSPLKSSRTSGALIPARRCHTSAKAGPPQNMNAALAACGVLGGGAAKGQADELDTLGVTTPAVDQPRVVKVRAARRDSERPLPRTPQERATHEPAREVELRLSPASTPARMMNILEAEGGTKIAARLASPHPGAGGY

SEQ ID NO: 70791 - protein, 133 aa, Zea mays
  Coding DNA Sequence Number=SeqID_27416
MQTANVHPVCTGAGARSSGTTAATGGAQLGSADCGHRLQKQGDNARQTAGVGCACWMHGQQRLVVAITSSPRVDSKAWPACASRLPDPDARGRLEAGGSLPASAAPEELEMRGVCLWSAELDVNSVLVLVGKP

SEQ ID NO: 70792 - protein, 466 aa, Zea mays
  Coding DNA Sequence Number=SeqID_27417
  Gene Ontology: Mol. function=hydrolase activity, hydrolyzing O -glycosyl compounds; Cellular component=anchored to membrane; Biological process=carbohydrate metabolic process
  Homolog annotation: Hit_ID=A2WX75; Match level="QueryCoverage=73%, HitCoverage=73%, E-value=1e-146, Identity=73%"; Hit description =Putative uncharacterized protein
  Pfam annotation: Domain name=Glyco_hydro_17; Domain location=52-376; Score=408.4; E_value=1.1e-119; Accession=PF00332.9; Description =Glycosyl hydrolases family 17
MGLRVRASSLLLSLVLELAVALVSEQHQLFECASNVLPRVCVNLAVSAQHKFGINYGQIANDLPDPAQVATLLQSMGVNKVKLYDADPRVLTAFANTGVGFTIAVGNEDLQAMAASPDAARRWVAANVQPYVPATRITCVTVGNEVLSGNDTAAMASLLPAMRAVHAALGDAGLGQPVAVSSAHSVDVLATSFPPSSGAFREDLAGYVRPILDFHAQTGSPFLVNAYPFFSYKASPGPGPGGVSLPYALFQPNPGVRDPGTGLTYDNMLYAQIDAVYAAMQAAGGRADVGVTVSETGWPSRGDDDEPGATAQNAAAYNGNLMRRVAAGQGTPLRPAVPVDVYVFALFNEDLKPGPTSERNYGLLYPDGSPVYALDAGGPGPGGSLNPYYTSMFSSSSSSGSAVGKDSAACAAPTAVPLDRVRLTGSQVLQKAPQETPLRPTQGSDSGSAPEDVELRSAPTQGSDSG

SEQ ID NO: 70793 - protein, 84 aa, Zea mays
  Coding DNA Sequence Number=SeqID_27418
  Subcellular localization annotation: CTP_CleavageSite=50; ConfidenceScore=5.28e-01
MAGAWPQRAGHGWSMATGLHTAVVQGRWHRKARCSQGTWGTAAGSQAAAQAAARRGTHGRAVLSARGRGTGPDRHAGNARCDRA

SEQ ID NO: 70794 - protein, 404 aa, Zea mays
  Coding DNA Sequence Number=SeqID_27419
  Homolog annotation: Hit_ID=Q6J9V9; Match level="QueryCoverage=16%, HitCoverage=33%, E-value=5e-07, Identity=44%"; Hit description =Putative uncharacterized protein
MRRKDGGYPPSGGLEGGKTRCIREREDMVAFQGGHPPFKGGSPYLRPQSSRAESSPTHPKDLPCGAGAGSHTSCKPAQSRRSQTAVRGAYNRPAVTSDSPLLPRPTGERSGQPCRRHATAPSGRTSPTPNTPIMEAQAHASCNRRTECFVHAPAPPLVPLPRLLDCGTNTAGRSSGPVISQAHVPSGGSERTLSHGVKTTRLTGGASGRRSGRRFAFAIMTASEKGPGKGDTPKRILPREGTRLRASLLIRGSKAGPSEGFDSRLRSRGLYTHYWSEVRRPAPRKGSTAALGYSGSAPITDQGSPETPCSAPIEGNMALSPLLLAERRRRGVCKKVESVPDRPLALCRGSGAALANLAPAKPLTASTYQPENLGPNRTPGLRPARMRDDQTSRSITRGIKTSEE

SEQ ID NO: 70795 - protein, 95 aa, Zea mays
  Coding DNA Sequence Number=SeqID_27420
MARLTFGSRVWRVWWGVCGWMRGARRGGSNTHGRGPLPKCRSKLKLGKQKPKLRKLRKLRLKPKPGPQRLSQRSLPRMRKKQQDIFVGVLRPGGP

SEQ ID NO: 70796 - protein, 55 aa, Zea mays
  Coding DNA Sequence Number=SeqID_27421
  Subcellular localization annotation: CTP_CleavageSite=17; ConfidenceScore=5.08e-01
MAAQRRPDGAEPKAQARASSGARVSRARWWLARRRPNRQGRSADPSAREREADVV

SEQ ID NO: 70797 - protein, 321 aa, Zea mays
  Coding DNA Sequence Number=SeqID_27422
  Gene Ontology: Mol. function=catalytic activity; Cellular component =cytosol; Biological process=trehalose biosynthetic process
  Homolog annotation: Hit_ID=A7PC59; Match level="QueryCoverage=74%, HitCoverage=28%, E-value=3e-89, Identity=63%"; Hit description =Chromosome chr2 scaffold_11, whole genome shotgun sequence
  Pfam annotation: Domain name=Glyco_transf_20; Domain location=10-320; Score=103.4; E_value=6.8e-28; Accession=PF00982.12; Description =Glycosyltransferase family 20
  Subcellular localization annotation: CTP_CleavageSite=48; ConfidenceScore=5.20e-01
MVLLGLPRGRGLARLAYRLPPPPPPPARLPDLRKSRLRKPRRRLLFLPCSPRPSAAPICLRCGGRCGHPCPVPPLVLNPFLSANRAFADCLTEVLCPDEDLVWIHDYHLLALPTFLRKRFPRAKVGFFLHSPFPLSEIFRTIPVRDDLVRALLNADLVSFHTFDYARHFLTACSRLLGLDYQSKRGYIGIEYYGCTVTVKILPVRIDMGQLRSVVSAPETEDAMRRVTEAYKGRRLMDGVDDVDLFKGIGLKFLAMEQLLVEHRELHGRAVLVQIANPARSEGRDVQGVQDKARAISAQVNARFGTPGYTPIVLIDAPVTL

SEQ ID NO: 70798 - protein, 235 aa, Zea mays
  Coding DNA Sequence Number=SeqID_27423
MDKRNVSQNYFPQPKSRIIQNHPCDFLIPITPILAKSRAQCEFEETTERGNGVQWGLGGLGAQQHRADAASQNGQEVVTSQEAASTDITTMALRRQEEQVGAGQPKEKQRRRRREQLVKIHESSDIRLHPYRAAEEKADEEEEDVAMEEKIKLVEAEMPELQEVRLQSSEVAETETEAHGRTDDGSPVVVGEEAATPEGEDELATSTTKEKIIEEIQRAEATENLGQGWCTGSSG

SEQ ID NO: 70799 - protein, 55 aa, Zea mays
  Coding DNA Sequence Number=SeqID_27424
MAGAWPQRASHGRSTATRLCAAAAQGRWHRKAGCSRGTWGTAAGSQAAAQAAARY

SEQ ID NO: 70800 - protein, 108 aa, Zea mays
  Coding DNA Sequence Number=SeqID_27425
  Gene Ontology: Mol. function=molecular_function; Cellular component =cytoplasm; Biological process=protein modification process
  Homolog annotation: Hit_ID=Q2QXT9; Match level="QueryCoverage=79%, HitCoverage=34%, E-value=2e-37, Identity=82%"; Hit description=GRF zinc finger family protein
MAASNKKPIAATALLFVAVALGRGEGSALRVREAKMIEVVLNDRLGKKVRVKCNEDDTIGDLKKLVAAQTGTRPEKIRIQKWYNIYKDHITLKDYEIHDGMGLELYYN

SEQ ID NO: 70801 - protein, 257 aa, Zea mays
  Coding DNA Sequence Number=SeqID_27426
MQPGCTPPPVVTPDGDLQLDGGGKRAGLRPLPLPQPQGFSSPGLGRGVCRVEVGPRVGGGPLLHSVIGGKGGRRPWRWQLHRAWLSDASGFGAARGAGVRHGSLKRFFCRRDSQGRPRTDLQLLRPSARPCLTSFGMGGGLLAAASALRSVLPLFGPPEQKSSSSPLLEQPGCPSVGPTPELTSRGLGPGWRPRGMVGRGSWGNRPSRLLEPDSRRSPWTASPSEAGSDLAEGVVEAEGATAPFQREDPSLQDQIVL

SEQ ID NO: 70802 - protein, 239 aa, Zea mays
  Coding DNA Sequence Number=SeqID_27427
MGQQPKPPASPSPPPCPPSDPDPGSGFDPIEEWLVDFDPAMLSELEAKGPELAEQAAVPHTLETAAQKSFDLEFGVKDQKVEVVSSELDGLLALDHLLVSGIDDLAMREDIPEKAVAMKMAATPPAAADTEMNATISVEVESEGGKEGQEAPATPADAEMMNTMVSVEVEAQGGKEGQESSDEESELESSEDDDELSSSEDSSSSEDEKEQGVNNDEESSEASSSEEEGREVRRHGGNW

SEQ ID NO: 70803 - protein, 171 aa, Zea mays
  Coding DNA Sequence Number=SeqID_27428
MTVGGGCLSYGAPDSPMYTGNARLDVRCTPDMYYSMSGVPARACLTSARFWRALNALQIPEAAKFQSRVLLEHRTLSAPPAVVVLGFVAVLCASLGAAARASGLRGSPVPVPSAWLVACAAHPCSWPAGAASPAWRPGAARQRRCLADTSPAPGRCVEELRSLAIGTPSSN

SEQ ID NO: 70804 - protein, 265 aa, Zea mays
  Coding DNA Sequence Number=SeqID_27429
MAERYQLPRSCVPPTTRREDGGYPPSGGLEGGKTRRIRKREDMVAFQGGHPPFKGGSPYLRPQPSRAESSPTRSKVFPYGAGAGSHTSCKPAQSRRSQIAVREGGIEPSDPVARGPGPADHPQRLGGCSRKPGSSRTVDSVNIPAQELGTRPYTRATASSHEGTTRPAEALREAIRPRRSETTPPRPRGLHPAGALARTHRNKTQPRKAGPLAKKCDESLQASANTPFEARGLLSGTIIRGTLKAPNSQLVTPISIKLQRPDGCD

SEQ ID NO: 70805 - protein, 263 aa, Zea mays
  Coding DNA Sequence Number=SeqID_27430
  Gene Ontology: Mol. function=carboxyl- or carbamoyltransferase activity; Cellular component=ornithine carbamoyltransferase complex; Biological process=amino acid metabolic process
  Homolog annotation: Hit_ID=Q8SA97; Match level="QueryCoverage=47%, HitCoverage=21%, E-value=5e-12, Identity=40%"; Hit description =Ornithine carbamoyltransferase
MAPPVDVAGLRPRLGDVEAPPKPRSSLSSVAEVESEPLGRARRRPSAEARAESEPWGRAKRSSSSSGAEPESEPWVGRSGVRRLLGLSPSPSPGSGGLSPSPSPGSGGAEFAVFRDLARVRALGRAKRRFLWCLRSGLTACQPHSVKWHRSRSGAGGVVLLSGRSVERQSDDGHFGSAGWGARVRIKVSSYLCIKCSCDLVGWCGDLVRVAPWRRQGLGRARNMFAAGGGPRARRRSSGLYADGGYQLRIRSLEGTPNYGPRQ

SEQ ID NO: 70806 - protein, 45 aa, Zea mays
  Coding DNA Sequence Number=SeqID_27431
MPNYAFFDCLEMGLERFLECLSVRTCSMDDRPRKQCNHEGGMGCP

SEQ ID NO: 70807 - protein, 109 aa, Zea mays
  Coding DNA Sequence Number=SeqID_27432
  Subcellular localization annotation: CTP_CleavageSite=25; ConfidenceScore=5.07e-01
MTVTRSAITKRRRRRRSGQGLGETRSTLRPNPPRNSKLEGLGLSLDLGRRTPPRPTPGLGLNLDPGGRSPPRSTPGPGLSLDLGGASASPDLGLGQTTSQGGHHYPTPS

SEQ ID NO: 70808 - protein, 146 aa, Zea mays
  Coding DNA Sequence Number=SeqID_27433
MADDGSVSSGVRTARGEGESSEEVAHLYPQVMLPICQEMANPIHLYRGGEAGIYGDDIVFHPTAQTPSSSLVLALYGGGPADPLRLNTITEPARSSVFAVQALTSTRTTSFDTPVFCAILERPTTIYTLTIPCDASRKIATEDPPA

SEQ ID NO: 70809 - protein, 130 aa, Zea mays
  Coding DNA Sequence Number=SeqID_27434
  Subcellular localization annotation: CTP_CleavageSite=41; ConfidenceScore=5.28e-01
MAGKNHLSIYGDNIVFHPTAQTPSSSLVLALYGGGPADPLRLNTITEPARSSVFAVQALTSTRTTSFDTPVFCAILERPTTIYTLTIPCAKNIAARIAEKELTPPRQGRGWAQFGRYESTGVTHEQMQSA

SEQ ID NO: 70810 - protein, 78 aa, Zea mays
  Coding DNA Sequence Number=SeqID_27435
MDLPSSKLSWHERPISGRSGSYPSSGATISGESDPLRLAKTATGERREKLTGEKGGDGAELDWFQGRGEEVAEASAGR

SEQ ID NO: 70811 - protein, 2085 aa, Zea mays
  Coding DNA Sequence Number=SeqID_27436
  Gene Ontology: Mol. function=binding; Cellular component=ubiquitin ligase complex; Biological process=protein ubiquitination
  Homolog annotation: Hit_ID=Q2R9P0; Match level="QueryCoverage=95%, HitCoverage=94%, E-value=0.0, Identity=77%"; Hit description =Armadillo/beta-catenin-like repeat family protein, expressed
  Pfam annotation: Domain name=Adaptin_N; Domain location=1195-1765; Score=-177.6; E_value=0.062; Accession=PF01602.11; Description =Adaptin N terminal region
  Pfam annotation: Domain name=Arm; Domain location=110-151; Score =11.9; E_value=0.34; Accession=PF00514.14; Description=Armadillobeta -catenin-like repeat
  Pfam annotation: Domain name=Arm; Domain location=1186-1227; Score =6.4; E_value=1.7; Accession=PF00514.14; Description=Armadillobeta -catenin-like repeat
  Pfam annotation: Domain name=Arm; Domain location=1271-1309; Score =5.7; E_value=2.1; Accession=PF00514.14; Description=Armadillobeta -catenin-like repeat
  Pfam annotation: Domain name=Arm; Domain location=1357-1395; Score =11.5; E_value=0.38; Accession=PF00514.14; Description=Armadillobeta -catenin-like repeat
  Pfam annotation: Domain name=Arm; Domain location=1438-1478; Score =4.0; E_value=3.5; Accession=PF00514.14; Description=Armadillobeta -catenin-like repeat
  Pfam annotation: Domain name=Arm; Domain location=152-192; Score =23.0; E_value=0.0011; Accession=PF00514.14; Description =Armadillobeta-catenin-like repeat
  Pfam annotation: Domain name=Arm; Domain location=1524-1564; Score =2.4; E_value=5.5; Accession=PF00514.14; Description=Armadillobeta -catenin-like repeat
  Pfam annotation: Domain name=Arm; Domain location=1565-1605; Score =11.8; E_value=0.35; Accession=PF00514.14; Description=Armadillobeta -catenin-like repeat
  Pfam annotation: Domain name=Arm; Domain location=1639-1680; Score =12.9; E_value=0.25; Accession=PF00514.14; Description=Armadillobeta -catenin-like repeat
  Pfam annotation: Domain name=Arm; Domain location=1722-1763; Score =8.1; E_value=1; Accession=PF00514.14; Description=Armadillobeta -catenin-like repeat
  Pfam annotation: Domain name=Arm; Domain location=1765-1805; Score =11.6; E_value=0.37; Accession=PF00514.14; Description=Armadillobeta -catenin-like repeat
  Pfam annotation: Domain name=Arm; Domain location=198-241; Score=7.9; E_value=1.1; Accession=PF00514.14; Description=Armadillobeta-catenin -like repeat
  Pfam annotation: Domain name=Arm; Domain location=243-283; Score =15.3; E_value=0.13; Accession=PF00514.14; Description=Armadillobeta -catenin-like repeat
  Pfam annotation: Domain name=Arm; Domain location=285-326; Score =25.3; E_value=0.00022; Accession=PF00514.14; Description =Armadillobeta-catenin-like repeat
  Pfam annotation: Domain name=Arm; Domain location=328-377; Score =16.1; E_value=0.099; Accession=PF00514.14; Description=Armadillobeta- catenin-like repeat
  Pfam annotation: Domain name=Arm; Domain location=496-536; Score=6.2; E_value=1.8; Accession=PF00514.14; Description=Armadillobeta-catenin -like repeat
  Pfam annotation: Domain name=Arm; Domain location=538-578; Score =33.6; E_value=7e-07; Accession=PF00514.14; Description=Armadillobeta- catenin-like repeat
  Pfam annotation: Domain name=Arm; Domain location=580-620; Score =19.2; E_value=0.016; Accession=PF00514.14; Description=Armadillobeta- catenin-like repeat
  Pfam annotation: Domain name=Arm; Domain location=658-699; Score=7.7; E_value=1.2; Accession=PF00514.14; Description=Armadillobeta-catenin -like repeat
  Pfam annotation: Domain name=Arm; Domain location=701-741; Score =12.8; E_value=0.26; Accession=PF00514.14; Description=Armadillobeta -catenin-like repeat
  Pfam annotation: Domain name=Arm; Domain location=746-786; Score =15.8; E_value=0.11; Accession=PF00514.14; Description=Armadillobeta -catenin-like repeat
  Pfam annotation: Domain name=Arm; Domain location=787-827; Score=3.1; E_value=4.5; Accession=PF00514.14; Description=Armadillobeta-catenin -like repeat
  Pfam annotation: Domain name=C2; Domain location=1940-2030; Score =46.4; E_value=9.8e-11; Accession=PF00168.21; Description=C2 domain
  Pfam annotation: Domain name=HEAT; Domain location=117-153; Score =3.7; E_value=7.5; Accession=PF02985.13; Description=HEAT repeat
  Pfam annotation: Domain name=HEAT; Domain location=1276-1311; Score =2.0; E_value=14; Accession=PF02985.13; Description=HEAT repeat
  Pfam annotation: Domain name=HEAT; Domain location=1530-1566; Score =8.1; E_value=1.7; Accession=PF02985.13; Description=HEAT repeat
  Pfam annotation: Domain name=HEAT; Domain location=158-194; Score =17.8; E_value=0.041; Accession=PF02985.13; Description=HEAT repeat
  Pfam annotation: Domain name=HEAT; Domain location=1856-1892; Score =4.5; E_value=5.8; Accession=PF02985.13; Description=HEAT repeat
  Pfam annotation: Domain name=HEAT; Domain location=249-285; Score =0.5; E_value=23; Accession=PF02985.13; Description=HEAT repeat
  Pfam annotation: Domain name=HEAT; Domain location=291-328; Score =16.6; E_value=0.088; Accession=PF02985.13; Description=HEAT repeat
  Pfam annotation: Domain name=HEAT; Domain location=666-701; Score =4.8; E_value=5.2; Accession=PF02985.13; Description=HEAT repeat
  Pfam annotation: Domain name=HEAT; Domain location=707-743; Score =6.7; E_value=2.7; Accession=PF02985.13; Description=HEAT repeat
  Pfam annotation: Domain name=HEAT; Domain location=793-829; Score =9.5; E_value=1; Accession=PF02985.13; Description=HEAT repeat
  Pfam annotation: Domain name=HEAT_PBS; Domain location=1255-1291; Score=8.4; E_value=5.7; Accession=PF03130.7; Description=PBS lyase HEAT-like repeat
  Pfam annotation: Domain name=HEAT_PBS; Domain location=1508-1546; Score=4.8; E_value=20; Accession=PF03130.7; Description=PBS lyase HEAT-like repeat
  Pfam annotation: Domain name=HEAT_PBS; Domain location=1651-1677; Score=3.3; E_value=33; Accession=PF03130.7; Description=PBS lyase HEAT-like repeat
  Pfam annotation: Domain name=HEAT_PBS; Domain location=313-350; Score= 3.0; E_value=37; Accession=PF03130.7; Description=PBS lyase HEAT-like repeat
  Pfam annotation: Domain name=HEAT_PBS; Domain location=523-560; Score= 2.7; E_value=41; Accession=PF03130.7; Description=PBS lyase HEAT-like repeat
  Pfam annotation: Domain name=HEAT_PBS; Domain location=728-787; Score= 1.2; E_value=68; Accession=PF03130.7; Description=PBS lyase HEAT-like repeat
  Pfam module annotation: Pfam domain module=Adaptin_N::Arm::Arm::Arm::A rm::Arm::Arm::Arm::Arm::Arm::Arm::Arm::Arm::Arm::Arm::Arm::Arm::Arm::A rm::Arm::Arm::Arm::Arm::C2::HEAT::HEAT::HEAT::HEAT::HEAT::HEAT::HEAT:: HEAT::...
  Pfam module annotation: Pfam domain module=HEAT::HEAT::HEAT_PBS::HEAT_ PBS::HEAT_PBS::HEAT_PBS::HEAT_PBS::HEAT_PBS; Domain location=1195 -1765::110-151::1186-1227::1271-1309::1357-1395::1438-1478::152 -192::1524-1564::...
  Pfam module annotation: Domain location=1565-1605::1639-1680::1722 -1763::1765-1805::198-241::243-283::285-326::328-377::496-536::538 -578::580-620::658-699::701-741::746-786::787-827::1940-2030::117 -153::1276-1311::...
  Pfam module annotation: Domain location=1530-1566::158-194::1856 -1892::249-285::291-328::666-701::707-743::793-829::1255-1291::1508 -1546::1651-1677::313-350::523-560::728-787
  Subcellular localization annotation: CTP_CleavageSite=25; ConfidenceScore=5.31e-01
MTQTGNYLLCSLLSFLSCKMCNKSRCKAGMDLSMASLNLSEPRDSRESTSPAPSTSSSISREKGDLAEVDDPESAMSTVARLLEDLHASMVSPSGKEATTRRLLELARAKKEARILIGSHSQAMPLLISTLRVGSSAAKVNAAALLSALCKEEDLRVRVLLGGCIPPLISLLKSESAEAKKAAAEAIYEVSSGGLLDDHIGRKIFVTEGVVPTLWDLLNPRSHQDRVVEGFVTGALRNLCGDKDGYWKATLEAGGVEIITGLLSSKNTASQSNAASLLARFISASGDSIPKVIDAGAVKALLHLLNRDNIISVRESAADALEALSSKSSIAKKAVVDAGGLPILIGAVVAPSKECMQGGTCHSLQSHAVRALSNICGGTTSLLLYLGELCQAPRSPVPLADILGALAYSLMVFDGSDDKSFDPVEIEITLVALLKSHDSKLDRILEALASLYGNDCFSDRLDHSYSKKVLVGLITIAPADVQELLVRALTSLCCDGVGIWEALGKREGVQLLISLLGLSSEQQQEYAVSLLAILSDEVDDSKWAITAAGGIPPLVQLLETGSQKAKEDAAYIMWNMCSDSDDIRACIESAGAVMALIWLLKSGSPGGQEASVKALKKLIRSADSAMINQLLALLLSDSLSSKAHVITVLGHVLVLAPQRALIQSGAPANKVLRSLVLVLESSNEETQEIAATVLADIFTMRQDICDVMAIDEIVQPCMKLLTSGNQVIATQSARALGALSCSASSMSKNKMSCLTEGDVRPLIEMAKTSSIDVAETAFAALANLLSDAQIAKEALDDNIVLALTRVLKDGSLEGKISASRSLRQLVNQFPLSEVLPDYLQCCFIIHALLVCLSGISLENVTSLEPLDVLTLMATTKEGSHYSPPLCTGFLEVPESLEPLVRCISIGLPPVQDKSIQILASLCQGRPSLLGEYLNRSQGCITSLATRVIESNDMEIRISSAVILISAMRDSRERSIDVLEASKVLKNLISALIDMLKQHSSLTSLDIEIWKPSTEKSSLNYEQDVLSVPELGKVSEETVALWLLSLICSYHGRSKYTVMELNGVDTVSDRLASYTANRQALASLVSTGSRGIQLAIANSGAVLGAVALIGQVESDMPNLVTMAEEFKLSDNPCQIMLRSLFELEDVCTGASARRSIPLLVDLLKPMPDRPGAPLIALHLLTQLAEGSESNKIAMAEAGALDALTKYLSLSPQDSTETTITNLLGILYTNPDLLYHESSRSTSNQLVAVLRLGSRSSRLSAVRTLQKLFDSENIRDTEVARQAIQPLLDMLESGTEIEQQAALGALIKLSAGNIAKDSAMFDVEGNTLENLYKVLSFSSSLELKKDAAQLCYILFENSTVRASPIATECLQPLISLMTSGSSLAIEPAVCALNRLLDEDYNAEIAATSEVIDLLVSFVPGTNYQLSEACIGALIKLGKDRPNCKLDMVKAGIIEHALDMILDVPVSVSSSIAELLRILTNNSGIAKSSAAAKMVEPLFLLLRRPDVTMWDQHSALQALVNILEKPQSLAALKLTPSQIIEPLISFLESPSQAIQQLGTEVLSHLLEQEHFQQDITTKNAVVPLVQLAGIGILSLQQTAVKALENISQSWPKAVADAGGIFELSKSTVTIALSALLVQEKSSSRCAVAMAEAGAVRALLELLKSHRCEESAARLLEALINNSRVRETKVAKYAIAPLAQYLLDPQSKNQSAKFLVTLALGDIFQHEALARASDSVSACRALVSLLEDQPTDDMTTVAICALQSLVMHSRTNRRAVAEAGGILVVQELLLSPNVDISGQAALLMKYLFSNHTLQEYVSNELIRSLTAALERELLSTSTINEVILKTIYVIFSNFKKVRFSEAATLCIPHLVCALKDGNEAAQESVLDTLCLLKESWPQMNEDIAKAQSLISAEAIPVLQMLMKTCPPSFHERADSLLHCLPGCLTVTIIRGNNLKQTMGGTNAFCCLQIGNGPPRQTKLVTYVCAERQVVNHSMCPAWNEGFTWLFDVAPKGQKLYIICKSKNTFGKSTLGRVTIQIDKVVTEGVYSGFFSLSHDGGMFVYLFGSGYAKLFFYIHLAIAVPAAYLQLYK

SEQ ID NO: 70812 - protein, 200 aa, Zea mays
  Coding DNA Sequence Number=SeqID_27437
  Subcellular localization annotation: CTP_CleavageSite=13; ConfidenceScore=5.01e-01
MPSSTSPYRQSPQAMRSRPPHPIFRWALAESPLKTKSDPLPPAARRRPREADAAGGRNWGRGSTSGELREGSEAVTVGGGSAGGGWDGGGRPRGRRRGKKRRMVSRGPSKLRRVELSVSETPVAPRELLQLGDIDGREIEKGAWTHRWRVDGGGRRRRFVSLSLHSLAHCAGATCASLGKFHFGCGQLRYGVQSYNVRAA

SEQ ID NO: 70813 - protein, 304 aa, Zea mays
  Coding DNA Sequence Number=SeqID_27438
  Subcellular localization annotation: CTP_CleavageSite=67; ConfidenceScore=5.07e-01
MAKNLAAKQYNSNECCDYTFPAQKRGVKRKTAVATSSTALKLKRAKVFTHRPKSYYSEQAAKLSVAETSMVENAEAVEDTTSPSKEMKGIGATARWYPLPTSHVTRLPRDCDFPYTSTKEARQVVIKGTTCLRLEIPGPHILYPTVRMISATFFPTRGPIAKAGNPRGGALAGDRAPVLPCPRHPRDSSTENSIDRKLQNKPITRSDAVGGSQPTTMCSHGSRKLSGEKSQRRSPRALRGASNNTFYRSLGRLRAYLGGPVEGFTELASEKSHGVEEQPKVQDLPKVRLDLRNLIHENKILKAY

SEQ ID NO: 70814 - protein, 126 aa, Zea mays
  Coding DNA Sequence Number=SeqID_27439
MAGLARYGDKVIIIGISFLNISFLRFGSSLFCIGNSLFCLGSGDSFRGKKVNHQDFYTRQTAARTRCAVGRKDQIVNLQGGTVTRSETVSFLDNKLREGVFRTFGFLKPKRLFSRIKLVTKNDLAP

SEQ ID NO: 70815 - protein, 54 aa, Zea mays
  Coding DNA Sequence Number=SeqID_27440
MAVMGSTSEKMYLYQNKITRNGSGEMVRVACTLFGKRLDGGVSMLSIGVNLIWS

SEQ ID NO: 70816 - protein, 191 aa, Zea mays
  Coding DNA Sequence Number=SeqID_27441
MPPCMRKTARKSTGPIGVLRHQLAPRHEDSSSGNNDPIRDLEAQVEQLRMELRHRNSVWVEDGQCINELRTDIRHLQDELAERDLAVDWVVNSRSIAWDREAKARARVEELSTAVDNLQVYCNTLHEEVHELYSRLHPNVPADPIGMGAGPSGTAGEALGGELDLFKPPPSMDLADEWSPTPDNEATKDDK

SEQ ID NO: 70817 - protein, 52 aa, Zea mays
  Coding DNA Sequence Number=SeqID_27442
MTVMGSTSEKMYLYQNKITRNGSGEMARVACTLCGKRLDGGVSVLSVGVNLI

SEQ ID NO: 70818 - protein, 140 aa, Zea mays
  Coding DNA Sequence Number=SeqID_27443
MTLAHRTVRCTIGQSGEIIALVISEIDSSAATWLQAVKLLALYLTGDKVSAQDLNYVASDLALIALYWSGPGSLVPECLPSSDKDVYALGNPEYLQNIPPRGDIVGVLPSSCNGEERRVAAESNPEVLIRPASLSSLVKR

SEQ ID NO: 70819 - protein, 690 aa, Zea mays
  Coding DNA Sequence Number=SeqID_27444
  Pfam annotation: Domain name=MAP7; Domain location=197-350; Score= -80.3; E_value=0.059; Accession=PF05672.2; Description=MAP7 (E-MAP -115) family
MSSPKLRESSAQMLEVTGGRWPKNVPIPRAAGEDFFTSRMVRDLRVFPYGRNIAAVVSTVMNKDRQEAAQKRRAVIRLPEARPKRARGTAKATVPGGSQPTPAAKSAAPGSSKVPESVKAAGAGGTKSAPDGAAKVRELPSSGKRVADFGTNISVDDYLVGSGEGQLAVVPPAVATTVSAVVPGVKGSALSAGGEISAAVDFADRVASGALTADVSAEVERVQAQHADAVREKSAANSKCRKLVEKVAALEGKRTDLRRQLVEERREANQAIAKAQAAQAEANLVRVEGSLANQRAEEWEVRFNALQARMERAKASTCSEVERTRKQLVDSYRELGARTADFEVPDREAGLRFLEWLQEELLALPTIVEGFMSFASIVTCEGAMNALSREGCSHYEVFDRSDEDFEREIFKVEDPMVKDSAGALFDRMWGPHGREVVRERSDRARDQAARAEDVEDFGPLNSMRPEAEANPVVAEAEVDPAPPPETGEGSLAAPAATVSSGGSTPTAVPRVEDPLKAATEPAAEDTMAAAGSSQVQDFGPAHATATANFVAASTVDAGNESDESASKFSDFGDSGSSVEWTEESSDEDLDYFAALDVATAEASPRVADAEVVRGPSAGRRRRRAVAKRRVSEVDGGRLRVGRAGKQELLSSPAGASVGEGELRSLFEGEELRIMLFNYREMGIIPKVEPM

SEQ ID NO: 70820 - protein, 608 aa, Zea mays
  Coding DNA Sequence Number=SeqID_27445
  Homolog annotation: Hit_ID=Q6QP54; Match level="QueryCoverage=13%, HitCoverage=29%, E-value=9e-07, Identity=40%"; Hit description =Putative kinase
MAPPVDVAGLCPRLGEVEAPPKPWSSLSSVAEVESEPLGRARRRPSAEARAESEPWGRAKRSSSSSGAEPKSEPWVGRSGVRRLLGLSPSPSPWSGGADEGVYMLHHAPASADHAFARDALALLASAATAAAARLRSAATNDVSPVQLDAPPPLSPLSTALYAPSAKMAWEIRHLNSPLPRSHISSPHYCGPWISRVSGRSVIHGSYVSNAVWIFDGRTTYVRSLQPIGKDEEGKLHVEGITQCAAWHGHTVRQQTQQACRLLDDLDAAYQRMGRDTLNAERARRPLGPMAYVMGHKQRAFACAGSGEQGLHMCQHRTPAYPKVLLVPEPCWGSDLPGGSGPICIYRGPVTLCGGLVLLRHGAFPRHMAPFGPPIRWSASVFSGGIRVKAVSSGDFTVGERALVVVSPILSSFRCCWRGATPWELPSFHHHLASRIFIMQPGCNPPLAVTQEDDHQPCGGEKQAGLRPPTLSFKDVHHPRWGGRRVELGPYPPYGLVTRFFLQHSEGKGVHQSYNPAGGLVYMGPADYRLSAATCLALWGWMALVPPPAVWSGHGCPSTAWATVAPCTGLPHPWLPLPAGRTGGPYKTSYAAAVAAAFLDGLVLTPVG

SEQ ID NO: 70821 - protein, 371 aa, Zea mays
  Coding DNA Sequence Number=SeqID_27446
  Gene Ontology: Mol. function=sequence-specific DNA binding; Cellular component=nucleus; Biological process=regulation of transcription, DNA-dependent
  Homolog annotation: Hit_ID=A2X7S9; Match level="QueryCoverage=92%, HitCoverage=84%, E-value=3e-39, Identity=63%"; Hit description =Putative uncharacterized protein
  Pfam annotation: Domain name=GATA; Domain location=291-326; Score =74.1; E_value=4.5e-19; Accession=PF00320.18; Description=GATA zinc finger
MDALKCNNNSAPPEETAEDADAAGALVEKDGFSVEDLLDLEEFGEPDKDGAEPEDDDAPPVPAAAEERSKDDSQPLSVVTYDLPSPPPEMVELPSHDVEELEWVSRIMDDSLSELPPQAQPPPAVVASLAGRPPLAQQRRPFAHDGAYRAVAPPPGPLRTPTICALSTEAMIPVKAKRSKRSRGPAWWRSGAPFLSDSASSSSTTTTSSCSSSGSFSPFLRLDSSPFGGLEVGEGYYGHLLPRPPSKKSKHGAKGSKHKPKKRGRKPKHLPTNSSGAGAAASQPGPSDRRCSHCGVQKTPQWRAGPEGAKTLCNACGVRYKSGRLLPEYRPACSPTFVSSIHSNSHRKVLEMRRKKEGDMVATAAPAVASF

SEQ ID NO: 70822 - protein, 136 aa, Zea mays
  Coding DNA Sequence Number=SeqID_27447
MQGKLLVEGITQCAAWHGRTVRQQTQQARRLLDDLDAACQRMGRDTLNAERARRPYIETAIVTKKRYNDLKRGSGARTKHVMVFYCPTQDKQLKSHPPKNVESKILCEHIKKEREAAKAGKRPYYLKKCEFLNPNT

SEQ ID NO: 70823 - protein, 188 aa, Zea mays
  Coding DNA Sequence Number=SeqID_27448
MPSSPRFTNDAKDADNTPQEASEDEALSKRQRHEHPTPEGTLRTCSSGGLPQVPPPGFAPPEGEDAAEDDEVIDISVEEQLQLQALRIKNRNLQKQKDILEAKRQHVTAQAKVHQMIRDEEQRARELKQEIALMQSEGQHDLQHDPLLQQRVPAGDLFIPQRGPFIPHVAAFQGINYLDERSPLAPQL

SEQ ID NO: 70824 - protein, 172 aa, Zea mays
  Coding DNA Sequence Number=SeqID_27449
MANRSTVKALLPQSADPRWRHRAITAVDSHPPRRAEPQQCSHIVEEFRSPWRSKWADSGIKGDGPPMEISAHVRFRGPSWEARSRSTVKETTLCAIVDRPALCRGPFTPPQRARQVVRVFGAQIGAKSIVIGDPRTSNISQGGLARKAPDKKTNKSGGAWGAGSIEQPSMTP

SEQ ID NO: 70825 - protein, 262 aa, Zea mays
  Coding DNA Sequence Number=SeqID_27450
  Pfam annotation: Domain name=zf-CCHC; Domain location=192-209; Score =18.5; E_value=0.0024; Accession=PF00098.14; Description=Zinc knuckle
MRRKGNEDDPQESNGCAPAGLLEKFETLANLNCDLSTKIEQLESSAPSTATDDDLIKKNEKLKAKLATSQEAIENFLGKMEILSIRNNELTTKLENIGSTPGASLVEIIKKDASTSCFDLIDDSYPCNQVLVENIIVETCSDEVAKENEQLRQEVARLGKALYDKKGKAKQIQPPQDNTTTGVNKPVEGKTVICRLCHKEGHKSFQCKAKTGDKQKLKQKPTSKISNTYINKVDKKAATPYLIKKKNNGNVIAIKANKQANK

SEQ ID NO: 70826 - protein, 72 aa, Zea mays
  Coding DNA Sequence Number=SeqID_27451
MEHTVTHTHRDMTAKDQETSIFSSTESRKSVRAIGLQGLLIGEGRILWLRRGFSHICTHLSLSQTTTGFSCF

SEQ ID NO: 70827 - protein, 140 aa, Zea mays
  Coding DNA Sequence Number=SeqID_27452
MDGHSSNTAVTVPESFSMVCLDGVMVRVPVPEDSASLIPLAGGGFKFPAHDGHRAMIKTAKQMDHYQRVRRNARGMPEVAARLGGEDALVELMYGDVDEACSVFRVPPIAPTTGPYANYYVPRSCSYTREDAAVRPSAAR

SEQ ID NO: 70828 - protein, 364 aa, Zea mays
  Coding DNA Sequence Number=SeqID_27453
  Homolog annotation: Hit_ID=Q6QP51; Match level="QueryCoverage=24%, HitCoverage=40%, E-value=4e-09, Identity=44%"; Hit description =Putative growth-regulating factor 1
  Subcellular localization annotation: CTP_CleavageSite=53; ConfidenceScore=5.26e-01
MTGKKTTTSSDSGTPKKAKVKAPSKGHDLASPEPSLGQEQQTQVDSRLARGPPQATVKGRTTMQAAYSCTMGMHPFDFNAPSMEAQAHTSCNRRAGYYMRKTAPPLTPILRLLDCGTGAATQGDPAHSPTVPTRRISHRSVSRGRRRDDRYGQKWADSNGGSRRTEVVVKSSAGSRPLLGQQESPLPWREDDALVFRSLNGSRNSCPASHSSRRINFAAGQATTFGRLAPRKGSTTTPEHSGSEPSYWSEVRRLAPRKGSIAASGHSGSAPTTDQGFEGWPPEGFDSCLRTRRARDDSGYVRYMAEARATLPRGSGAALANPAPAKPLTASTYQPENSEPDYAPTLRPVRMREQPDRPRRHERH

SEQ ID NO: 70829 - protein, 167 aa, Zea mays
  Coding DNA Sequence Number=SeqID_27454
  Gene Ontology: Mol. function=carboxyl- or carbamoyltransferase activity; Cellular component=ornithine carbamoyltransferase complex; Biological process=amino acid metabolic process
  Homolog annotation: Hit_ID=Q8SA97; Match level="QueryCoverage=88%, HitCoverage=20%, E-value=8e-10, Identity=36%"; Hit description =Ornithine carbamoyltransferase
MYPLRRGRPEPEVGRGGDSSEVEAESEPWGRARRRPSSKVEVESEPWGRARRRPSSEVEVESEPWGRARRRPSSEVEAESEPWGRARRRPSSEVEAESEPWGQARRRPSSEVEAILALNAPAIRSAGGAIWPRLLLREACPSWASGESKLCADGGYQPSLEAPWGYP

SEQ ID NO: 70830 - protein, 140 aa, Zea mays
  Coding DNA Sequence Number=SeqID_27455
MDGHSNNAAVAVPESFSMVCLDGVMVQVPVPEDSASLIPLAGGGFKFPAHDGHRAMIKTAKQMDHYQRVRRNARGMPEVAARLGGEDALVELMYGDVDEACSVFRVPPIAPTTGPYANYYVPRSCSYTGEDAAVRSSAAR

SEQ ID NO: 70831 - protein, 641 aa, Zea mays
  Coding DNA Sequence Number=SeqID_27456
  Gene Ontology: Mol. function=molecular_function; Cellular component =nuclear pore; Biological process=transport
  Homolog annotation: Hit_ID=Q10R44; Match level="QueryCoverage=78%, HitCoverage=48%, E-value=0.0, Identity=72%"; Hit description =Nucleoporin family protein, putative, expressed
  Pfam annotation: Domain name=Thaumatin; Domain location=38-180; Score= 48.5; E_value=6.6e-12; Accession=PF00314.8; Description=Thaumatin family
  Subcellular localization annotation: CTP_CleavageSite=40; ConfidenceScore=5.40e-01
MLLVHLGRACRARRPRSPSSSSPSKVRSICGITFTFTNRCGDTVWPGLLSGSGTPPLETTGFALAPGQLRSLYAPQGWSGRFWGRSGCTFDASGKGSCATGDCGSGEVECRGAGASPPATLVEFTLDDDGGKDFYDDSVCHWVQGEVGSLNDARYLENILLLLTGRQLDTATEIAASRGDVRLAILLSQAGGSMSNRSDLAQTLDQWKMNGIDFDYIEEDWLKAAFLDLPIDWKRYLGLIMWYQLSPDTPLDIIIRSYDQLLGEGKVPYPVPVYIDEGPLDEAPQWSSGDHFDISFYLMLLHANKDEKFGLLKTMFSAFSSSFDPLDYHFIWHQRSILEAVGAFSSNDLHLLDLSFVYQLLCLGRCHWAIYVILHMPYLDDAPYIHEKLIREVLSQYCESWSRDDAQRQYIVELGIPEEWMHEALALYHEYYGDKQGALENLIQCGNRKKAHTIFVTSVAHSMFLSSNHQEVWRITSALENHKYEIADWDLGVGIYIDFYVLKNSMQERNAMDDSGSLEEMSESCRSFFGRLNKSLLVWGSKLHVESSSSAPFGILKHSCLGLYLEYSLTGLADSVVFDRACYSKMAEELCALLVDTPSETLNLPMGCLLTMLNAPVPDESRSSYLQDALSVFTEILCSDP

SEQ ID NO: 70832 - protein, 193 aa, Zea mays
  Coding DNA Sequence Number=SeqID_27457
  Gene Ontology: Mol. function=oxidoreductase activity
  Homolog annotation: Hit_ID=A3AJL2; Match level="QueryCoverage=29%, HitCoverage=17%, E-value=6e-24, Identity=87%"; Hit description =Putative uncharacterized protein
MGDFDITYYRSRDPGRARLFEDVLEEVEQMGIIKYGGLPHWGKNRNLAFVGAVRKYPGLPRASTPACRASCASRTPTTPMASSPAAAASAAASCAHWSCSWSTTSVSGASAAGGARTEESGSRTRRSAAARSPGTSGAMASRGCSPATSASSRSECRRSGVLSVAEVVGSTAGRDLNLIRARQSKINTPESRS

SEQ ID NO: 70833 - protein, 43 aa, Zea mays
  Coding DNA Sequence Number=SeqID_27458
MATMNRTSPYFEANSEANMTLFLERVREMDCPISFPGSNIRAK

SEQ ID NO: 70834 - protein, 49 aa, Zea mays
  Coding DNA Sequence Number=SeqID_27459
MAVGVSEALCAKAIGSLEDMVARVTWPSILPPGWTVEWDPASAEEEHEE

SEQ ID NO: 70835 - protein, 221 aa, Zea mays
  Coding DNA Sequence Number=SeqID_27460
MTSHGSSDEGNAQSHTDGLAREGFPCILWEVLQGAGYTTPPQAEGTMEAIALHGLTTFCGFHPLELSTHPIGQTAHLTVRCMNALYRLQVMRGEAMSHLMAFLEVTKITLDNREELVVDLSTEMVEKDLQVEQLSNEIQELEELVGTRENTIEVLEDQLINTQQQLAEANQHLDMHHQEIQDMEANEDVDIEGGEEPASSLDTAGSGRPPSPESSVASFAH

SEQ ID NO: 70836 - protein, 115 aa, Zea mays
  Coding DNA Sequence Number=SeqID_27461
MSGFSERQSIYLHSAWDGTWPSRFGPASSFDEHAILAPVSHPAEHPYGTRLRHNICKPKQHTDGTFTYSVVRSSDSAPTSHIFALNDPLWRRAMDDEYCALVKMLLGTLFLLDLG

SEQ ID NO: 70837 - protein, 793 aa, Zea mays
  Coding DNA Sequence Number=SeqID_27462
  Gene Ontology: Mol. function=iron ion binding; Cellular component =integral to membrane; Biological process=transport
  Homolog annotation: Hit_ID=Q6H7J6; Match level="QueryCoverage=80%, HitCoverage=87%, E-value=0.0, Identity=76%"; Hit description =Oligopeptide transporter OPT-like
  Pfam annotation: Domain name=OPT; Domain location=77-698; Score =584.3; E_value=1.2e-172; Accession=PF03169.6; Description=OPT oligopeptide transporter protein
MATATHHSDAPGLNGAEGMEMMAEANELRRRGKPSDDRTASYGAGAEEDEAAAAAAPSSSSVERAFADQPVPSWREQLTLRAFVVSFFLAVMFSVIVMKLNLTTGIIPSLNISAGLLGFFFVRLWTKAIESVGLLRQPFTRQENTVIQTCVVASYGLSFSGGFGNYLLAMSDKIAAMVTEANNAQNIKNPQLGWIIGFLFLVSFIGLFGLVPLRKIMIVDYKLTYPSGTATAYLINGFHTPQGAKLARKQVKKLGTFFVLSFVWGFFQWFYTANPDECGFQKFPSLGLQAFDNKFFFDFSPTYVGVGMICSHIVNVSILLGAILSWGIMWPLIAKKKGVWFSADLDDNSLHGMQGYRVFIAIALILGDGLYNFLKIFILTVVSLRSQVRKANASTLPISDDGTVTSTAPTSYDEERRNEHFLKDQIPWYAALGGYVAIAAISIGTVPQIFPQLKWYHILVAYIFAPILAFCNAYGNGLTDWSLVTTYGKLAIFAFGAWVGASNGGVLAGLAACGVMMNIVGTAADLMGDFKTGYLTLASPRSMFISQVIGTAMGCVIAPCVFWLFYKAFGNIGVAGSEYPAPNAVVFRSMAVLGVDGFSSLPENCLTLCYVFFAAAIVINLIRDLVPKKVSRFIPIPMAMAIPFYIGAYFAVDMFVGTVILFVWQRLDRAKADTFAPAIASGMICGDGIWVLPQSVLALAKCTDAVWGDQCTDAKFLVDELKMVVRLRGPLRRDAVWEAVDADVAEPVADEMLASARRWSAAAWDAMAPDGSSNVLTRLSACLGVRGQGVPAS

SEQ ID NO: 70838 - protein, 112 aa, Zea mays
  Coding DNA Sequence Number=SeqID_27463
MAITEFFLDGCPDSNRLLKILGDFKVMESGTCGWRWKSWSLNKRETNSSICTVEVSWRHAIKPTVVPEFGCLAISNGDDGGGAKEEPVRKVTRHIKPFPRVILCRPALPKPS

SEQ ID NO: 70839 - protein, 77 aa, Zea mays
  Coding DNA Sequence Number=SeqID_27464
  Subcellular localization annotation: CTP_CleavageSite=47; ConfidenceScore=5.18e-01
MAKPGHITPPGPHLRKHTMDQAVSLAARSRRFESSFNLARTHRLGIQCSTDPGCRHAVAALVPTISEMGDYVSGQVR

SEQ ID NO: 70840 - protein, 253 aa, Zea mays
  Coding DNA Sequence Number=SeqID_27465
  Gene Ontology: Mol. function=hydrogen ion transporting ATP synthase activity, rotational mechanism; Cellular component=proton -transporting two-sector ATPase complex; Biological process=ATP synthesis coupled proton transport
  Homolog annotation: Hit_ID=A7R482; Match level="QueryCoverage=16%, HitCoverage=3%, E-value=1e-09, Identity=82%"; Hit description =Chromosome chr18 scaffold_628, whole genome shotgun sequence
MGVAYETAKSGVGVASMGVMRLKLVMKSIVLVVMARVLGIYDLIIAAIISAGLAGLAVGMAIRIIRDTRVRRPHLVLSSRFLRAPPAASFIGQPRSASLESCSRIPHPRWPAPQRLVGLREEEQGTGRLGLCHMPLWGTAASTQPAAKGDAACAPLGSGGGGVKHGWPVEKKAPFNHESGKQVRSAVRIKNISKSHVAFKTREPLRQQQIHFNGKEVEHREAQCRWGPTMLSNTFVADDPNVVAIHMKKGVRR

SEQ ID NO: 70841 - protein, 100 aa, Zea mays
  Coding DNA Sequence Number=SeqID_27466
MTVAGAREQRSRHLPSSCPIRRQQENPLSRREDDAPVTRTSNGSRTRNGNLANYSPRRINSAARRKAPRVGAAGDVSPSPKRPRRKRDRERGYPQRDPSP

SEQ ID NO: 70842 - protein, 239 aa, Zea mays
  Coding DNA Sequence Number=SeqID_27467
  Gene Ontology: Mol. function=kinase activity
  Homolog annotation: Hit_ID=Q6QP54; Match level="QueryCoverage=21%, HitCoverage=18%, E-value=5e-12, Identity=70%"; Hit description =Putative kinase
  Subcellular localization annotation: CTP_CleavageSite=57; ConfidenceScore=5.27e-01
MELDGGTAVGTAVLLLTSPCFRKGAGSRRRHGLVRRHHCLSGGAGQMGRRSCPLRPKSAQGRVMMTLPVDVAVSCPRSGVVEAPPKLRPRRSPSPGSGEAEVVVFRGLSPSPSPGSGGAEFAVFRGLSPSPSPGSGGAEFAVFRGLSPSPSPGSGGAEFAVFRGLSPSPSPGSGGAEFAVFRGLSPSPSPGSGGAEFAVFRGLSPSPSPGSGEAEFPLALLAKPGYPSVLPFALKAPGI

SEQ ID NO: 70843 - protein, 173 aa, Zea mays
  Coding DNA Sequence Number=SeqID_27468
MRFITSHLIESLPRVTGLSIAYFQDLPLSQITDNLVMLEDVPTEGYFAHEQETELIGPEVEIPESCFRALNKPNGTTSDFVKNKTNLKAQTSCCAHYMTSLKSQMGIAYSISQMECSHPRTLHTLNMTSDKCFRSWNYENIDSNVRCSRLITSMINGSRYIVVALIESDKVYA

SEQ ID NO: 70844 - protein, 295 aa, Zea mays
  Coding DNA Sequence Number=SeqID_27469
MARERMGRARKLSFPHAGKASSVPPPAGGLSTAIVAVARRWKEYHVGAAVERHELEAPETEHRPGLKRSLETTHLGLDGKPLVNTQRAPTWRANCRRFETGGSPSRRRQSPSPGSGEAEIVRQRPRRSPSPGSGEAEVVVFRGLSPSPSPGSGGAEFAVFRGLSPSPSPGSGGAEFAVFRGLSPSPSPGSGGAEFAVFRGLSPSPSPGSGGAEFAVFRGLSPSPSPGSGEAEFPLALLAKPGYPSVLPFALKAPRDLSGWRGDLVRVTSYRRRGLGRAGDASAVKEETSGETESS

SEQ ID NO: 70845 - protein, 301 aa, Zea mays
  Coding DNA Sequence Number=SeqID_27470
MAACPFRPLVWAKVEDCFPAAPLHRAVTQEGDLRLDGGGKRAGLRHPPLPQPQGFSSLGQEGGRGESGGCLRVGRLPSSSPFVGGERHPPASRRPPPAMLGEAGCRRTARAPCRVLRSDDDCAAHREGSAYALDGPGMGEDLLAHSEASADGGGISTDEIADSASSPGFPSPGLDGSASSSGGGTSNASVSVHYGFRGLNESLGSVGPVVRGSSSSVKETPRPLFDEPRPGVAISAGTEVELAQKWDLVGRSLAELSVGRFSVGVDQPRLRAGLAPSEGGRPRPRRWPAPKKSLTVIARAW

SEQ ID NO: 70846 - protein, 140 aa, Zea mays
  Coding DNA Sequence Number=SeqID_27471
MAGWGVFIAPNTNRAVGEKLLLSVSHRTVWWCTGQRTVAYPVRQAIVLSEQVIVGAAGFPHRTVRSSHRIVRWSSLRVPPGTSRWAAIPWCIGQSGVWAPDSPTVWCPGSYDFKLATFGFLKKLLRYNSPECPVCHRSNG

SEQ ID NO: 70847 - protein, 291 aa, Zea mays
  Coding DNA Sequence Number=SeqID_27472
  Subcellular localization annotation: CTP_CleavageSite=10; ConfidenceScore=5.13e-01
MSSHSLHASRPSTFRAPGWGAPTLLLSCRRWRNATSRKLGEGRAEPELYLPHEFVGHLLPQYSGERALTGLAEGADFDNTGPSGRKHRQLPRARFAGSAGSGAASCAAFHRWAECGHLPVVRAAVAPRAPGDRPRRRALLGRRSCSWAVLPLLRYDAPARRSVFARPGGPEWGSAGGQTAAVVGAEVVAAGEVLVTDEIAATIRAPGLRLFGFDSLSSPLEWGRGRGPCRSSVCPEVIAAAVWPPGAEVVVAAVGAGVGELSGVLSPRRPSNVGGCSYLRGGTGVPFVMAP

SEQ ID NO: 70848 - protein, 66 aa, Zea mays
  Coding DNA Sequence Number=SeqID_27473
MARTGRAQKNRSVGPRRPRRWATSAPGWSGLGEACRRGLAAGIDKLADAVSVTLGPKGEKRVRKQP

SEQ ID NO: 70849 - protein, 189 aa, Zea mays
  Coding DNA Sequence Number=SeqID_27474
  Subcellular localization annotation: CTP_CleavageSite=25; ConfidenceScore=5.30e-01
MPLQGVPSLHPLAGPSLFRVLLLLRSNPPRGSVHRVLRDRWQRRFVKPQLLETDGNLGCENQGQSDTRRKKERTLTRDMHPRSGRIEGWVRAPASSLPTMPATRLWRSSAGRGTEDICEPSKSTPGVISESSSRRSVKGSTLRRWMAATTHAAGPGKGILRKGSFPAKEASPEPPTNKRFEGWPLGRVR

SEQ ID NO: 70850 - protein, 94 aa, Zea mays
  Coding DNA Sequence Number=SeqID_27475
MPHGRECVAAMREETTAITKHAERDVEVASIAICLRRWLSPADSPKGFAGEHGSCVWPHLARSLRERIAIARWGVLRRGAVVHRRLDPSLPQSR

SEQ ID NO: 70851 - protein, 81 aa, Zea mays
  Coding DNA Sequence Number=SeqID_27476
MSSRDEEKRENRDEINSELDRLHLTPRVLQTIEGDAISGARGELNALVLELVSQEFVERAEVNEERECEGYIKEPPKAGGR

SEQ ID NO: 70852 - protein, 47 aa, Zea mays
  Coding DNA Sequence Number=SeqID_27477
MTGPVELPPRAVELPPDNSSDLTASLTGRLQMAPPKCVHECESSELT

SEQ ID NO: 70853 - protein, 207 aa, Zea mays
  Coding DNA Sequence Number=SeqID_27478
  Gene Ontology: Cellular component=centrosome; Biological process =oviposition
  Homolog annotation: Hit_ID=A3ADM2; Match level="QueryCoverage=79%, HitCoverage=33%, E-value=2e-36, Identity=52%"; Hit description =Putative uncharacterized protein
  Subcellular localization annotation: CTP_CleavageSite=3; ConfidenceScore=5.25e-01
KPRAKAVQCHCARPAKKKKSEPPAHAARTRPWRRPPPTPASRTVYSDRFIPSHTGSNLALFDLAPSPSSAASSSHDGGPAASSGSAQPAASPYCTLLRAALFGPDTPDCVASSAAACSSSSSPGPSPVGTPAIGNIFRFKDGAGTPRGRFFSGDQEEDALFPGIFTTTGAGARKVPRSPYKVLDAPALQDDFYLNLVDWSSHNVLAV

SEQ ID NO: 70854 - protein, 26 aa, Zea mays
  Coding DNA Sequence Number=SeqID_27479
MRLHTLRDDVVLYPQRCLLLIKGSGK

SEQ ID NO: 70855 - protein, 53 aa, Zea mays
  Coding DNA Sequence Number=SeqID_27480
MAMCQIMKFGCIMVRSFPVDMLQKIILRILNRRKLKNSLNFSRQQKSRCTNTR

SEQ ID NO: 70856 - protein, 144 aa, Zea mays
  Coding DNA Sequence Number=SeqID_27481
  Homolog annotation: Hit_ID=A2XHS3; Match level="QueryCoverage=59%, HitCoverage=41%, E-value=1e-29, Identity=66%"; Hit description =Putative uncharacterized protein
  Pfam annotation: Domain name=DUF581; Domain location=46-103; Score =79.0; E_value=1.5e-20; Accession=PF04570.5; Description=Protein of unknown function (DUF581)
  Subcellular localization annotation: CTP_CleavageSite=39; ConfidenceScore=5.24e-01
MARRLEIPQWKADGLPSPTSPLGPRVGVAPWVAPPRRPCAAASARPPARPGGGAAFRVAEFLSCCDMCRRALDGRDIFMYRGEKAFCSMECRYHAMVSDEFQQEKERKRRAAVSRTSAAEMAGSPCSGGGGGGQIFFTTGIVAA

SEQ ID NO: 70857 - protein, 157 aa, Zea mays
  Coding DNA Sequence Number=SeqID_27482
MGVGKGRLGKNNKRKHEPTPPSEDFGDSEYSEEEFSSESEGSPAPIPLRESSDDSDNSQGLTAEVWTYIRAVERSGLEGSDDSEYSSDEEGSDGGGEDEDDDDEGGGDGDGDGSGRGGSSDSKDGDGGDSRGDSGGGGSSRGSNRGGSGDGNNRASG

SEQ ID NO: 70858 - protein, 98 aa, Zea mays
  Coding DNA Sequence Number=SeqID_27483
  Gene Ontology: Mol. function=zinc ion binding; Biological process =regulation of transcription, DNA-dependent
  Homolog annotation: Hit_ID=A2YPZ1; Match level="QueryCoverage=54%, HitCoverage=6%, E-value=2e-14, Identity=73%"; Hit description =Putative uncharacterized protein
MFTGSGRLEMRNTLRPVTFSHIDPGGKLVMGCRKATNTVSLLDSQISAIADGSLLSETLFSTANESIGVETEKHLSDMVNSKSLTAKIDNVVVSIGRP

SEQ ID NO: 70859 - protein, 54 aa, Zea mays
  Coding DNA Sequence Number=SeqID_27484
  Gene Ontology: Mol. function=nucleic acid binding; Biological process= DNA integration
  Homolog annotation: Hit_ID=Q8W0X6; Match level="QueryCoverage=72%, HitCoverage=12%, E-value=1e-08, Identity=69%"; Hit description =Putative prpol
MGKGPYLVVSSSRPGSYRLKDMDDNDIPRSWNAGRASAFFLMAPFSFPKGEKGF

SEQ ID NO: 70860 - protein, 53 aa, Zea mays
  Coding DNA Sequence Number=SeqID_27485
MEGGCHRGRGRPAKGEKKGVAAKRGGYKIKGLFGWAVAVEKVAVGCELWKKLL

SEQ ID NO: 70861 - protein, 344 aa, Zea mays
  Coding DNA Sequence Number=SeqID_27486
DALLDHLGSDQWRVMISGQNGNHGLWRHCGTGGYEIDGSGYDYGAGKWYSFRLERMARLRHTARKSVIPFLPSRLAERPLRRPVAGQSSHLERLHHRLREEQERRRQEQRSSSLSLHQEIESVRSCSPVLSLEPPPAPPLGAPASGVAAGGDPDDGGGDDSSSHDTDFSANPEPEGWVARPITRDAARGCHFHDALDTLLRRAFDRHTWSVEYRCVVYQHSRGVYPDPLGGDLLADGLDLKYYPRRSSGSTGGVIVSPVGEGNPRLSSTVNLAAVLNTELDHALDELSRARAEIALLRAERAERRFLDGGSPAPVGTQHPYRSPQRGHQSYGNPACKTKITLEP

SEQ ID NO: 70862 - protein, 29 aa, Zea mays
  Coding DNA Sequence Number=SeqID_27487
MAMAQFSISLDWASKTEKHRGLGVILPKT

SEQ ID NO: 70863 - protein, 287 aa, Zea mays
  Coding DNA Sequence Number=SeqID_27488
  Gene Ontology: Mol. function=calmodulin binding
  Homolog annotation: Hit_ID=Q6YU05; Match level="QueryCoverage=97%, HitCoverage=42%, E-value=9e-76, Identity=58%"; Hit description =Putative calmodulin-binding protein
MGPDGISIEVFADTLVKQAYADWINVLEYDGKALLKFNQKKKYVTTRSETAKASASYPASNGLVNSQKELPGGPVNAEQSSLNNASQDRTRIPSMSMGNQVAREYAGNPQHMTPSITMQCDTRSLIPGGQFSGGSSVQTQTSRSSNMLALRPTQQPQNLDFSGLGQSTQPSGTNPFADWSRLQESSVDEYLMDEIRARSHELLENDEMQHMLRFLSVGGAPTGLNNVDGFLSYPSPAPAFGFDEDDRARSSGKAVVGWLKIKAAMRWGIFVRRKAAERRAQLVELED

SEQ ID NO: 70864 - protein, 306 aa, Zea mays
  Coding DNA Sequence Number=SeqID_27489
MAGGSLRETGGCHSPPDARGRKGQPTHAEAAPRLASSSILAWMTKILEAEGGERPQPGSLSPTIKLETNGRKERAAMQAACNRAKQLHRHLRHHRASSVAEPMPRLEATQRTTQQRQPGATVNAAESGPAVMTVAGGREQRSRRQPGSRPIQGQQESLLSWREDGAPVIRSSNGSRTRNDRPANHSPRRINSAAGQAALLAGEGGATLRPSPDRERGIPRKGSFPMKEPGSEPPLLIRGSKAGPPRGSTVASDHVGPTPTTGQRLAPEGFTVASDAERGMTRGLGLGLSPGRRRTPLRPTQGSDSG

SEQ ID NO: 70865 - protein, 309 aa, Zea mays
  Coding DNA Sequence Number=SeqID_27490
  Subcellular localization annotation: CTP_CleavageSite=69; ConfidenceScore=5.33e-01
MNSASPDPRARTLPWPLPNDLRLARPRGSGSASATEDRLNPGFGGAPTSPDLRRGPATSTGSAIITLPRADSGRREQDRLRHSSDGHDITPTGCQDLSGCHIGMAFLEKVGRAGTRTRPALSWGRSLRSPAWTLYNGSSSLISCEKQTIRIEFLSLQVTALVPTIIGMGDHVSGRVRGKVCCKILEGSLWCWILGYLLSNSLLRHKDAGELVGGVCSGLSTAIQVNPRARGASWGAKESTRARNRRITQRGARSMFVGGRVKSGDLDPASLARQSSIPRSWSFTEGKLWRSRAPMRSRAREGLKPWLAL

SEQ ID NO: 70866 - protein, 257 aa, Zea mays
  Coding DNA Sequence Number=SeqID_27491
  Homolog annotation: Hit_ID=A7QEQ5; Match level="QueryCoverage=50%, HitCoverage=57%, E-value=3e-22, Identity=46%"; Hit description =Chromosome chr16 scaffold_86, whole genome shotgun sequence
RHLHKLTKNMSAVIIQEEALLSLDPVAAACSMMNQTIKDAGIQNDALLSEVLYECKKELMEKSAIEETISELMDVKIPMLQAEQLPAMENEKRSIPECSLQKSVSSGCLNSADRMNGAVRPNFLDFQGLDFEATFGLRRAYSEGDIQNLGANTPRPAANVCVTISDLKAEERKQKLSRYRKKKIKRNFGRKIKEGSGRQPAKGEREICQDRRMRLAAAEFRHLYGGSIDHSAVQNPPPLPSRFGASRGSEELKVVVV

SEQ ID NO: 70867 - protein, 21 aa, Zea mays
  Coding DNA Sequence Number=SeqID_27492
MGKGPIPSISQCSALTTEVYI

SEQ ID NO: 70868 - protein, 70 aa, Zea mays
  Coding DNA Sequence Number=SeqID_27493
MDGRFPPCPSSTDGPRNRRGYNGFEKELLVTNHPELRSFYRMRRRPRHTDTDDRRPNTPETRKSRIKDRV

SEQ ID NO: 70869 - protein, 320 aa, Zea mays
  Coding DNA Sequence Number=SeqID_27494
  Gene Ontology: Mol. function=nucleoside diphosphate kinase activity; Cellular component=mitochondrial intermembrane space; Biological process=CTP biosynthetic process
  Homolog annotation: Hit_ID=A2Y865; Match level="QueryCoverage=37%, HitCoverage=72%, E-value=6e-36, Identity=65%"; Hit description =Nucleoside diphosphate kinase
  Pfam annotation: Domain name=NDK; Domain location=177-296; Score =110.6; E_value=4.7e-30; Accession=PF00334.10; Description=Nucleoside diphosphate kinase
MEKLVGVHHHHHSLSHRAPRTPTRPQPQPHPLLHHLPSNRFRDLHSQIHNHIHPTVPAASRVLRATPPFFLILLSSVYLLASVTIFSAPTPLLRLRLASPRPLILSKLAPPRPAPELFDLDGGSVRVHLTNVGAAVTSFLVPDKNGAGSLWYLPSVCLCSTMALTLPFHDARLVFLPGVLADVVLGFNSLDPYLRKGYKLVAIKLIVPSKGFAEKHYHDLKERPFFNKLCDFLSSGPVLAMVWEGEGVIKYGRKLIGATDPQKYEPGTIRGDLGVVVGRLVRHKERKEYTVKFVNLHESVFALVFIKAQGVQCQASRGES

SEQ ID NO: 70870 - protein, 474 aa, Zea mays
  Coding DNA Sequence Number=SeqID_27495
  Gene Ontology: Mol. function=calmodulin binding; Cellular component =integral to membrane; Biological process=cell death
  Homolog annotation: Hit_ID=Q94CH2; Match level="QueryCoverage=100%, HitCoverage=100%, E-value=1e-159, Identity=62%"; Hit description =Seven transmembrane protein Mlo3
  Pfam annotation: Domain name=Mlo; Domain location=2-467; Score=352.5; E_value=7.3e-103; Accession=PF03094.6; Description=Mlo family
MSEEATLEDTPTWIVASVCSVIVLISFVFERALHHLGKALERRRKTLYEALLKLKEELMLLGFVSLLLVVSQDLIQKICIDDSLMEHWMPCRGASATASAHYGVSSSSSSSAVGGGRRMLKGGGAAFGHCSSKGKVPLLSLHALEQVHIFIFVLAITQVVLSVATVLLGLLQMRIWMHWENTIQQEGSSAPKMIARVQKIRFIQDRCKGFCSSESMLSVTLFCNWRISDLPPNIVDGWHSYFWISLVPLALLLLIGTKLEHIINRLAYEVASKHAAGQGEGGIVVSPSDELFWFRSPRLVLVLIHFILFQNAFEFAYFFWTLLRRRVVVVVRRPNLATGPVTTCVAVFLNPDPYDDVDVHRPDAVFWWLHGCWFLLFSVVVQVLCSYSTLPLYAIVSHMGSSFKSAVFADDVADNLRGWADGARRRVRRSATGVDASCLGTPAAAGRGWEGAAGWRLIAGRPSRPTQQPRSISF

SEQ ID NO: 70871 - protein, 162 aa, Zea mays
  Coding DNA Sequence Number=SeqID_27496
MPMPMTRKKAGAACLPRRQLWQPGVGAARRIQKPRRWQREARPRGQAAGRHSVAAIQGRCGQPPRGDEPPPGSRRKAPPFSAKSALPELARGPMTNCARCTASGRSNPSLSLASLLCLSLRVRQCVCVSLAASLRLRVCVSVTGLVLPTTELKLACGHQDML

SEQ ID NO: 70872 - protein, 51 aa, Zea mays
  Coding DNA Sequence Number=SeqID_27497
MACGFLEMGTVVCSFLGMGTVACAFVEMGTLACAFVEMGTLAYAFLETFEL

SEQ ID NO: 70873 - protein, 82 aa, Zea mays
  Coding DNA Sequence Number=SeqID_27498
  Subcellular localization annotation: CTP_CleavageSite=51; ConfidenceScore=5.60e-01
MKVQGPLTRGVGRAGKDGTALAPSPKRMPTLVTRAPSTPPPFPPSEAAAASASAKMSGGLFRGTCADQDTRFSNKQAKLFKT

SEQ ID NO: 70874 - protein, 361 aa, Zea mays
  Coding DNA Sequence Number=SeqID_27499
MQAACNRAKWAHPFNSNAPGMEAQAHTSCDRRAGCYGPRKGDTPKGILLREGNGPRAPLLIRGSKAGPSEGFNSRLRALGLRARYCSEVRRPAPRKGSMAASGHSGSTPTTDQGGNDLVTESHQREASSPRTPSKGDRVWQITRRGSGAALANPAPAKPLTVSTYQPENLGPDPSGKGSRPGGFTSRPKAPQATDTPLARPRPVFGKKHLGPIATPTDHTAGAFNAKGSDSGSAPEDDELRLARPRARTRAQPRKTTSSASPDPGLGLGLSPGRRRTPPRLTQGSNSGSAPEDEELCLARPRARTRAQPRKTTNSASPDLGLGLDLDLGRQTQPRPRRSLRLALPRARTDHVIGGAILPYP

SEQ ID NO: 70875 - protein, 706 aa, Zea mays
  Coding DNA Sequence Number=SeqID_27500
  Pfam annotation: Domain name=Transposase_28; Domain location=32-187; Score=-61.2; E_value=0.045; Accession=PF04195.3; Description =Putative gypsy type transposon
  Subcellular localization annotation: CTP_CleavageSite=19; ConfidenceScore=5.24e-01
MPSSSSSAAATPPADPSPSAAASSEETLGSLMAEDLRAGDSVDFGVSRMSSVRVQDMQRLGYFGGGVARVPGTEEVPEPEGELVVFEAFFAAGLRLPAHRFVGEVGGQPSVEVFAKYYCLHWQKKMIGDKVAQFGSCTFTPKTGKTTMQVVELVPCARNKWGNWNEYWFYVAEGTVEGHEGLPVSEMCSHFYSVYPPFEVAEGDVDEGALRCAAGLSSGRDLVEEFVAYGVWPLAHGWALGEVCPRQMPSHGGKMVRSPAFALSLQNRDSAAFVREAEGGAVRLVGRYVPRTEGQRSWDIRGSNDRLNMRADEDVRGPRGKDVFARAPGVFGSDAEVMDKDRQGAAQKRQAAVRLVEARPKRQRPPAEASRRCRRSRGAPASSKAPEATAGAGGSKLTKVVPPAGGVAEVAKAAQALPLSGKRVADFAPNISVDDYLGGSDEGQLAIVAPAAATTMAAMVPKAKGGALSAGGEASAFAAVRDEAGAASRRLEEVTEALSQASRRLKEVADFANPYSVGGPSRRLCLPKSRDFGHNMPTPSVKKLAADSKCRKLTDKVAVLEKEKGDLRRQLAGERREINEALAREKAAQAEAKLARAEGNIARERAEQLQERLTALESRMERAEAMSRAEAERTRKQLMDTYRELGAGTGEFEVPDREAGLRCLEWVQEELQALPTVVEEFMSYASLVTCEGAMNALSREGCRHFE

SEQ ID NO: 70876 - protein, 474 aa, Zea mays
  Coding DNA Sequence Number=SeqID_27501
  Gene Ontology: Mol. function=oxidoreductase activity; Cellular component=integral to membrane; Biological process=electron transport
  Homolog annotation: Hit_ID=Q43246; Match level="QueryCoverage=89%, HitCoverage=83%, E-value=1e-160, Identity=64%"; Hit description =Cytochrome P450 88A1
  Pfam annotation: Domain name=p450; Domain location=43-473; Score= -3.7; E_value=3.8e-13; Accession=PF00067.13; Description=Cytochrome P450
MSVPGLWAAVAAVAVVIIDALVRRAHRWAWEASLGGSRRARLPPGDMGWPVVGAMWAFLWAFKSGNPDSFIGSFIRRFGRTGVYMTFMFSKPTVLVATPEACKRVLMDDDSFLEGWPRATVALIGRKSFLTLPCEEHRRLRKLTAAPINGFDALTTYLGFIDRTVVATLRGWSDAGEIEFLTELRRMTFKIIVQIFLTAADDATTLALESSYTDLNYGMRAMAINLPGFAFHRAFKACPILQAKYNQWRLLLDLKKVDTARGVLNERRARKRLPRSSVDMMDRLIDAEDEHGRRLDDEEIIDILVMYLNAGHESSGHICMWATVYLQKHPEIFAKAKAEQEEIMRSIPSSQMGLSLRDFRRMEYLSQARGFSNAQRILTIYFNLWYRSVHMDPEVYRDSKEFNPSRWEGYTPRAGTFLPFGLGTRFCPGNDLAKLEISVFLHHFLLGYKYANHTIKIIFCFIVSPCTISDLGGV

SEQ ID NO: 70877 - protein, 341 aa, Zea mays
  Coding DNA Sequence Number=SeqID_27502
  Homolog annotation: Hit_ID=A5JV22; Match level="QueryCoverage=43%, HitCoverage=29%, E-value=2e-24, Identity=40%"; Hit description =Putative uncharacterized protein
  Pfam annotation: Domain name=DUF668; Domain location=3-96; Score =36.2; E_value=4.2e-09; Accession=PF05003.3; Description=Protein of unknown function (DUF668)
MELRYANVILAAKTLLAALRPPAGDNEEAHEGMIDLSKRDALYKMLPVGIRKAMNAKLREIWKKAQPVDEVSAAASKDAVECLLRWLSPMAHDTVRWNDEQSMERAQRFSMQPRALMVQTLHFADRKKTDAAIVDVLIGLTCVCCQHNQDDPTSIAVLINEPLLVGQPSAHKQGDCSDAQLQEFVAHIALPKDQPLIHSPPIDIPDSFSALLGQSTESAAVLSNQTTTFKKRSSIRLAAKKKTMMGRSRDAISKAQDILIAKLNNTATNQKQNQNSIASCSSNQDNSFEQIARLFSRPLTKEQMEAIMELVNQGVEKTGHKRRGRKVTPIASPTIRAVGDA

SEQ ID NO: 70878 - protein, 328 aa, Zea mays
  Coding DNA Sequence Number=SeqID_27503
MNKNTDIQCAITNGTLVPPPQVRTTPLAGGGPAEQRKTDERHAVTGSSNGDDDDFCSEGPNSSSEDLRADAAARRPPPVPKLVRQGRAEGRRVGELRSSNDKAKGLRASPIRGLEGGKTRCIREREDMVTFQGGHPPFKGDSPYLRPQPSWAESSPTRSKVLPLRCGGWVPHVLQAGLGQKKPNRRARCMQPPSGYKQFSTFAQTSGRKGGQPCRQHATVPSGRTSPTSNAPSMEAHAHASCNRRAGRDVQATAPPLAPLPRLLDCGTSTTTRGNPAYDPAVPARHDGQCGQKRADSDGGGRRAGAAVTSSAKLTSHPGAVREPSLTA

SEQ ID NO: 70879 - protein, 54 aa, Zea mays
  Coding DNA Sequence Number=SeqID_27504
MFWEPYIRSEDSYSKGTQCSLTSLSLVFTYTYTYRTSVLDEMCLIMTMDEAFVM

SEQ ID NO: 70880 - protein, 117 aa, Zea mays
  Coding DNA Sequence Number=SeqID_27505
MAPKRASSKAVPSIDDAAKAALLVEKKGKALAHPTPQEAFEDDAVNSKRQRQDHPTPDGTVCTCSSEGAPRAPPPGFTPPKGEDTIEEGEKQKEILEAKRQRVTMQAKVRQMIQDEE

SEQ ID NO: 70881 - protein, 55 aa, Zea mays
  Coding DNA Sequence Number=SeqID_27506
MAGRPADQPAGEIAAGKCGTDNKIAACRRSTEGGGPGEAELQGHWAVAATMREYM

SEQ ID NO: 70882 - protein, 267 aa, Zea mays
  Coding DNA Sequence Number=SeqID_27507
  Gene Ontology: Mol. function=transferase activity, transferring glycosyl groups; Biological process=sucrose metabolic process
  Homolog annotation: Hit_ID=O24301; Match level="QueryCoverage=76%, HitCoverage=34%, E-value=4e-52, Identity=45%"; Hit description =Sucrose synthase 2
MRLTDAGDGQMKTLHLDDGLRVCFKWITIRAIACENYIPRKQDNLQLVMERVHIKKRSNTQKDAAGEIAAELQGTPDFIIGNYSDGNLVASLLSYKMGITHCNIAHALEKTKYPDSDIFWKNFDEKYHFSCQFTTDIIAMNNADFIITSTYQEIAGSGHLDDRSKPILFSMARLDRVKDITGLVEAFAKCAKLRELANLVVVAGYNDVKKSKDREEIVEIEKMHELIKTHKLFRQFRWISAQTNRARNGELYRYIVDTHGAFVQIYS

SEQ ID NO: 70883 - protein, 53 aa, Zea mays
  Coding DNA Sequence Number=SeqID_27508
MGHLVPTRTTTQLVSLALITKVLETRIEEEEKRSKRKMSQNLPSYQVFKYMLA

SEQ ID NO: 70884 - protein, 114 aa, Zea mays
  Coding DNA Sequence Number=SeqID_27509
MEETEAEHSERRPMLGKKRRTKLEECWRSDHGRRKELGGCYRLGETDWEKAPVERSLVLNVLAENLDSLKRVLSYPMVWIKLQLFELVSLSLYKSGPQCVAELADFARHCITLR

SEQ ID NO: 70885 - protein, 62 aa, Zea mays
  Coding DNA Sequence Number=SeqID_27510
MEFPLQMLVCDFCLLNPAILAAAIWNIYFSGIQYPMDVYGYTNMGILRSVMYLQRRTYAQVH

SEQ ID NO: 70886 - protein, 98 aa, Zea mays
  Coding DNA Sequence Number=SeqID_27511
MAAAAITSPCTPHPCAYDTKLYTASAGWGVIILVLYSVAAEFGQRGSWGGVRSLFRVEFVVAHGDKVAHDAMFREDEEGGAAASIYSRRGSLGQASTS

SEQ ID NO: 70887 - protein, 147 aa, Zea mays
  Coding DNA Sequence Number=SeqID_27512
MGKNNKRKREPTPPSEEFGDSEYSEEEFSSESEGSPAPIPLRESSDDSDDSQGLAAEVWTYIRAVERSGLEGSDESEFSSDEEDSDGGEGEDDDDDDGDDDDGDDGDGDGGNGGGGSGGKDGTKGGSSVGSTGGGGGRASGLSPLVF

SEQ ID NO: 70888 - protein, 88 aa, Zea mays
  Coding DNA Sequence Number=SeqID_27513
MKTPNDFKDRAAEAAKTIRLCPPQREEGAMFQHLAPTVRATKQHPTMAPKRASSKAAASIDDAAKAVLLAEKKGKALADSNPSGGLRR

SEQ ID NO: 70889 - protein, 275 aa, Zea mays
  Coding DNA Sequence Number=SeqID_27514
  Gene Ontology: Mol. function=CoA-transferase activity; Cellular component=cytoplasm; Biological process=metabolic process
  Homolog annotation: Hit_ID=Q57TI9; Match level="QueryCoverage=100%, HitCoverage=98%, E-value=1e-117, Identity=91%"; Hit description =Crotonobetainyl-CoA:carnitine CoA-transferase
  Pfam annotation: Domain name=CoA_transf_3; Domain location=64-241; Score=256.6; E_value=5.4e-74; Accession=PF02515.8; Description=CoA -transferase family III
MPKFGPLAGLRVVFSGIEIAGPFAGQMFAEWGAEVIWIENVAWADTIRVQPNYPQLSRRNLHALSLNIFKDEGREAFLKLMETTDIFIEASKGPAFARRGITDEVLWQHNPKLVIAHLSGFGQYCTEEYTNLPAYNTIAQAFSGYLIQNGDVDQPMPAFPYTADYFSGLTATTAALAALHKVRETGKGESIDIAMYEVMLRMGQYFMMDYFNGGEMCPRMSKGPNIMPKFKNNPGQIWRGMPSHGMDTAAILKNIGYSENDIQELVSKGLAKVED

SEQ ID NO: 70890 - protein, 801 aa, Zea mays
  Coding DNA Sequence Number=SeqID_27515
  Gene Ontology: Mol. function=metal ion binding; Cellular component =intrinsic to membrane; Biological process=innate immune response
  Homolog annotation: Hit_ID=A5B4Z5; Match level="QueryCoverage=98%, HitCoverage=69%, E-value=1e-166, Identity=38%"; Hit description =Putative uncharacterized protein
  Pfam annotation: Domain name=DZC; Domain location=755-790; Score =71.2; E_value=3.4e-18; Accession=PF08381.2; Description=Disease resistancezinc fingerchromo
  Pfam annotation: Domain name=FYVE; Domain location=355-423; Score =28.7; E_value=4.7e-07; Accession=PF01363.12; Description=FYVE zinc finger
  Pfam annotation: Domain name=RCC1; Domain location=149-198; Score =26.3; E_value=0.00011; Accession=PF00415.9; Description=Regulator of chromosome condensation (RCC1)
  Pfam annotation: Domain name=RCC1; Domain location=253-301; Score =11.9; E_value=0.038; Accession=PF00415.9; Description=Regulator of chromosome condensation (RCC1)
  Pfam annotation: Domain name=RCC1; Domain location=304-353; Score =29.0; E_value=1.7e-05; Accession=PF00415.9; Description=Regulator of chromosome condensation (RCC1)
  Pfam annotation: Domain name=RCC1; Domain location=42-91; Score=11.9; E_value=0.038; Accession=PF00415.9; Description=Regulator of chromosome condensation (RCC1)
  Pfam module annotation: Pfam domain module=DZC::FYVE::RCC1::RCC1::RCC1 ::RCC1; Domain location=755-790::355-423::149-198::253-301::304 -353::42-91
MSDNGHVSGTNISLPRLLKSSQILDVQSIACGEKHAAIVTKQGKVFSWGEENGGRLGHKTSDSVSDPKIIDSLASTPMKTIALGAKYTCAVSVSGELYEWGEGIHSLGFKNNQCQRSPWFPHKLIRTSDGISVAKIACGQWHTAIVSSTGKLFTYGHGTFGVLGHGDTRSVVQPKEVESLRGLRVKSVACGPWHTAAIVETSGTPKSNAPGGKLFTWGNASGEKLGHTDKKSKLVPTRVESLIDCDFTQVSCGVVFTIGSKDHGQLGNPRSDSACICMVEGPLKTEFVKDISSGNSHVAVLTMNGKVFTWGKGTEGQLGLGDYLDRTFPTLVEALEDKQVDSIVCSSNFTAVICVHGEISSKDTVCSSCRLAFRFTRKKHNCYNCGSMFCNSCSSNKVQRATLAPDKSKRCRVCDACFNELNKTAEHGKMSCESKIQKEPPLTETRTYTPKLSRMLKEANFIMEKMGSIRSPNQRNQESATLNQMQKQRWGQVECPDQFKCARDNISHCLTSKKQPVDIGRIGRMNDPVSQKTAAPLTRTTDKRRKEQDLIEKIMLEEVKQLQAQVTTLAEECRHRSLKVQLYKRKLEETWLIARDEATKCNAAKEIIKILTNQNFSDTVVRNLSSEPKVLCSMQHLCKNAERNALSNKLLDDLELDDSRIVPDPPDKTPVTGKIPPLNSIRDQHNIEEVDMQSTTSSNTVVADDSAVHQNGRRASNSSRGYDGGTDSTVAPTDSSGMIEQIERGVYISVVTSPDGKKGIKSIRFSRKHFGETEAQKWWEENESRVFAKYNSMEYLAAQCR

SEQ ID NO: 70891 - protein, 22 aa, Zea mays
  Coding DNA Sequence Number=SeqID_27516
MTTSVDLGEKATGAREAAAGGD

SEQ ID NO: 70892 - protein, 195 aa, Zea mays
  Coding DNA Sequence Number=SeqID_27517
  Homolog annotation: Hit_ID=A2X8E0; Match level="QueryCoverage=96%, HitCoverage=64%, E-value=3e-75, Identity=69%"; Hit description =Putative uncharacterized protein
MQRSGATIAFDFFRNKLLTEVSTSRGNESGKDVAKVKYVPDNKAETVHKLFKFIEDGDLWRWKIPNSKAFSSGLKDLDIEFNVNANNKLFDQLLELDPEHVISHGQATLLEKQRLIDDCLEKSYEISLGCGQFGSCLFCSTSRGIGAVVYKVPELNNDQILKEYGGGGHRNASSFILSVTEFDRWKVGSSRPKGA

SEQ ID NO: 70893 - protein, 154 aa, Zea mays
  Coding DNA Sequence Number=SeqID_27518
  Gene Ontology: Mol. function=phosphoprotein phosphatase activity
  Homolog annotation: Hit_ID=A3AA74; Match level="QueryCoverage=29%, HitCoverage=4%, E-value=8e-18, Identity=95%"; Hit description =Putative uncharacterized protein
MTYFMANTDALASRYMSKDILDAIVEPTEEPSRLFEEAVEGAIERAIPKRLPVAVTGVICQEDGANSWCYLKETPSGAVLGFEERRGRWEMRDVVVVDEDCVRVLGPGPEANEALEDHSQVETGSAATFVGVYDGHGGAEAARFISDHLFAHLI

SEQ ID NO: 70894 - protein, 55 aa, Zea mays
  Coding DNA Sequence Number=SeqID_27519
MDGGLDGELEDAGFLDEVLRATDEVIASRNPNPAPAPAPIPMLGNLAEQTVCRQS

SEQ ID NO: 70895 - protein, 154 aa, Zea mays
  Coding DNA Sequence Number=SeqID_27520
MGKSKKGSGSSPRSGDKRKREPTPPSEDFGDSEYSEEEFSSESEGSPAPVSPPASSDDSDDSQGIAAEVWTYIRAVERSGLEGSDESEYSSDEEDSSDSSEESSGGDGGDDGDDGGDNGRGGDGGRGGDGDRGGDGGSKGGNGSGSKGSNKASG

SEQ ID NO: 70896 - protein, 115 aa, Zea mays
  Coding DNA Sequence Number=SeqID_27521
  Gene Ontology: Mol. function=DNA binding; Cellular component=nucleus; Biological process=response to salicylic acid stimulus
  Homolog annotation: Hit_ID=Q6ZHD2; Match level="QueryCoverage=77%, HitCoverage=18%, E-value=2e-35, Identity=79%"; Hit description =Putative late elongated hypocoty
  Pfam annotation: Domain name=Myb_DNA-binding; Domain location=41-86; Score=55.9; E_value=1.3e-13; Accession=PF00249.22; Description=Myb -like DNA-binding domain
MATGETAVDRCKDPLGPRDMDLSGEEHVPKARKPYTITKQREKWTEDEHRRFLEALQMHGRAWRHIQEHIGTKTAVQIRSHAQKFFTKVVYPFWPFIRLSPQSQRKRKRILSSLP

SEQ ID NO: 70897 - protein, 77 aa, Zea mays
  Coding DNA Sequence Number=SeqID_27522
MSYSFPLKKPLTKTFLVELAKSYLEAHGGILRKRKYPQMKSGKKLSEKLLSVLLIHLTELHLYFVELFASPLFSVEF

SEQ ID NO: 70898 - protein, 96 aa, Zea mays
  Coding DNA Sequence Number=SeqID_27523
MSRAFDDYYIEDCGVILAPKVTQGRIDNSDQFIILATVKPRWVEREGEREGGRARRPETGVREVGISRPSCSSRAQVGRKERIQVYNGGCSRVLRV

SEQ ID NO: 70899 - protein, 220 aa, Zea mays
  Coding DNA Sequence Number=SeqID_27524
MAERYQLPQSCVPPTTRRKDGGYPPSRGLEGRKTRCIREREDMVASQGGHPPFKGGSPYLRPQPSRAESSPTHSKVLPCGAGAGSHASSKPAQSRRSQTAARGAYNRPAVTSDPPLLPRPAGERGPGKGDTPKRILPREGTRPRASLLIRGSKAGPSEGFDSRLRSRGPYTHYWSEVRRPAPRKGSTTASGYSGSAPTTDQGFEGWLPKGSQPPQTPSEG

SEQ ID NO: 70900 - protein, 70 aa, Zea mays
  Coding DNA Sequence Number=SeqID_27525
MADDNSIKGLTSVLSVNRCLSETRVRSSETTDQAKDGGKKSFEVPSAWEKVKEAEEPKAKGEEEGLQSQG

SEQ ID NO: 70901 - protein, 177 aa, Zea mays
  Coding DNA Sequence Number=SeqID_27526
MARKLRWSPPLERLPGAEVVAAAEVVASAGEPLGASYPRGPTGVETSIPKKSLAMAPRRYLDTHRRVVERAGPRYGTRLSGYTGSRPPQETNQQAGLMRADLTGLAYTDALVVRKRYSFSHSKIVTPGSAYSRHLGGSFPVEGELQSPSCHFCMDLSEAWTHGESRRVSGGRQASAP

SEQ ID NO: 70902 - protein, 159 aa, Zea mays
  Coding DNA Sequence Number=SeqID_27527
MGVRTRPSKPWSWEHGGMRCLRSGRDRVAEVRVFHKAGDHPFPPNAGGRGGHQPMWEAKPWLNSLPTTARLMNILEAKHRWKSAAPTRPRTSSRGKTRPAVYHFEHSLSLGALGMKSQGHGKQRQHEAETLKAKGRGELGEKSHRRSRQCRVSSGHSKD

SEQ ID NO: 70903 - protein, 131 aa, Zea mays
  Coding DNA Sequence Number=SeqID_27528
MTNSKRHVRLSDASATSVVSRVIYQRWNREDEQEMKQSGLGYLCKSRNWYLKFIICVASYGLVFPLHHGLILDTMHSKIAKDDNSIKGLTSVLSVEQVLKDVGAKKCQSRSSQADLMIYESNIKAQACEML

SEQ ID NO: 70904 - protein, 95 aa, Zea mays
  Coding DNA Sequence Number=SeqID_27529
MPHLFGGWHVVDRRRAFFGSRSGRIARMPSGRAILACGDKSREEAGTKIYGQSDLYVKADITPSNNVYTSTYSYASEKPLQQDKPDEEGYVDNCF

SEQ ID NO: 70905 - protein, 696 aa, Zea mays
  Coding DNA Sequence Number=SeqID_27530
  Gene Ontology: Mol. function=iron ion binding; Cellular component =integral to membrane; Biological process=iron ion transport
  Homolog annotation: Hit_ID=A2XW10; Match level="QueryCoverage=92%, HitCoverage=95%, E-value=0.0, Identity=77%"; Hit description =Putative uncharacterized protein
  Pfam annotation: Domain name=OPT; Domain location=69-680; Score =549.9; E_value=2.7e-162; Accession=PF03169.6; Description=OPT oligopeptide transporter protein
MKQEGRRRQHQHQHHRPPPRLELAMAHARGGGGHGHGHEEEAEAAVCLDGDSEAGEARSAGRAPPWRDQLTARGMVASLAVGAMYSVIVMKLGLTTGLVPTLNVSAALIAFVILRGWTQALARFGVATRPFTRQENTVVQTCAVACYSIAVGGGFGSFLLALNKRTYEMAGEDTEGNLPGSYKEPGIGWMTGFLFAVSFVGIVALIPLRKIMIIDYKLTYPSGTATAVLINGFHTTHGDATAKQQVNGFTKYFAISFFWSFFQWFYSGGDNCGFSQFPTFGLRAWKQTFFFDFSLTYVGAGMICSHLVNLSLLLGALLSWGIMWPLVSDLKGDWYPADMPESSMRSLQGYKAFICIALLLGDGLYNFVKVVAFTVKSLLGRSRLKNAKKEEDIPVLDEIQRNEIFTRDSIPTWLAYSGYLALSAVAVFAIPLMFHEMKWYYVIIAYLLAPALGFCNAYGAGLTDINMAYNYGKVALFILAAWAGKDSGVVAGLVGCGLVKSLVSISADLMHDFKTGHLTLTSPRSMIIAQAIGTAMGCVIGPLTFLLFYKAFDIGNPDGYWKAPYALIYRNMAILGVQGFSALPLHCLQLCYGFFGFAVAANLMRDLLPPKYGKWVPLPMAMGVPFLVGASFAIDMCVGSLMVFIWHIIDRSKASLMVPAVASGLICGDGLWIFPESLLALAKISPPLCMAFRSSH

SEQ ID NO: 70906 - protein, 172 aa, Zea mays
  Coding DNA Sequence Number=SeqID_27531
MAEKPSVLPPRDPWPISSVTDENLQALVDAGLLHPPLLRGAPRVVRFSLSSTLPHPQAPDDHQISYSLSLGSGSSPSTPESGVPICFGNCSASSHGWQALRLDCSCHNVFVGTRFLRSSSRPLALPLLDDIPAFASLDVWGHSGSRADLVPHPVSSRIVLPSFGTLLGTRSL

SEQ ID NO: 70907 - protein, 64 aa, Zea mays
  Coding DNA Sequence Number=SeqID_27532
MGTNGHLDLDGEVSPWIKRCRKFIYNYAKSTVRNTVDYSGQEKLFGKTGQARTVRALAADLPQL

SEQ ID NO: 70908 - protein, 136 aa, Zea mays
  Coding DNA Sequence Number=SeqID_27533
MASTDDFLAGLLNEVHPGLISENNPRVAGVGNDYEVPRLNMDSGVAALDRVQVRAASELAEHSDACGQVGLLSEVELAVVKLLLIVDERRQRERLLPVVFVRGFQAWDARGNENELCGERKMRKDSAGKGAHGEWE

SEQ ID NO: 70909 - protein, 255 aa, Zea mays
  Coding DNA Sequence Number=SeqID_27534
  Pfam annotation: Domain name=IQ; Domain location=158-178; Score=23.7; E_value=0.0007; Accession=PF00612.18; Description=IQ calmodulin -binding motif
  Pfam annotation: Domain name=IQ; Domain location=200-220; Score=10.2; E_value=3.5; Accession=PF00612.18; Description=IQ calmodulin-binding motif
  Pfam module annotation: Pfam domain module=IQ::IQ; Domain location =158-178::200-220
MWGRTYARQKREAAGGAGSSACKEGTSAGSSARKEGMAKESAHKEGMAKESARKEGMAKEKPSLRQRGITSPEKTAILMDRRSMTPGISSRLSSPPPAAHPSPPPAAAPSAAATPSHPPSPTPDAFTRLKESFGRFAEQWDQFVVMFHRYKEKTEKELQAAVRLQTAARGFLARRQVQSLRGEKHLVVPSRATPWPSSHEQAVVRLQAAVRLQAAVRDFLVKRAKSRSGYAVPLHGQRGLSPSFGHLSWCWTDPT

SEQ ID NO: 70910 - protein, 304 aa, Zea mays
  Coding DNA Sequence Number=SeqID_27535
  Gene Ontology: Mol. function=RNA polymerase II transcription factor activity; Cellular component=nucleus; Biological process =transcription initiation from RNA polymerase II promoter
  Homolog annotation: Hit_ID=A2Z5M1; Match level="QueryCoverage=95%, HitCoverage=53%, E-value=3e-95, Identity=60%"; Hit description =Putative uncharacterized protein
  Pfam annotation: Domain name=TFIIF_alpha; Domain location=22-304; Score=-69.0; E_value=7.8e-06; Accession=PF05793.3; Description =Transcription initiation factor IIF,
MGSVAPAELVLKAACERCGAASGLYATSCRHTTLCSDCGMTLALARGRCTVCSAPVTRLIREYDVRVDTSAEKEKTHYIGRFTTGLPPLSNERSAGNRWTLRKDVPHGQQLTGNMRDKHYSKMPWILEDETGEHQYQGQTEDPPATYYSLTQKGNDMIAVQVGSWYNFSKIAQYKQLTLEEAEEKMNRRRSSASGYERWMMKAATNGPDAFSSVVKRLDDVNRGATNGVHPKKGDRNENGNQSDKVDDKEEEGAARKNRLGLTMKDMGEDYEDSGNDIEFDLDDEIEKGVYISNTTRKNEYYFC

SEQ ID NO: 70911 - protein, 318 aa, Zea mays
  Coding DNA Sequence Number=SeqID_27536
  Gene Ontology: Mol. function=RNA polymerase II transcription factor activity; Cellular component=nucleus; Biological process =transcription initiation from RNA polymerase II promoter
  Homolog annotation: Hit_ID=A2Z5M1; Match level="QueryCoverage=75%, HitCoverage=46%, E-value=5e-57, Identity=52%"; Hit description =Putative uncharacterized protein
  Pfam annotation: Domain name=TFIIF_alpha; Domain location=1-315; Score=-102.6; E_value=9.1e-05; Accession=PF05793.3; Description =Transcription initiation factor IIF,
MGWPWRAQQVGEGGWEGVAAADGAAAGGGEGWAAGGGEDNLELIPGVMDLRSMRIAVFSGEVIPLCRRLGSRGFPRDDWEHEEIFTDDDEVVDVDIEQRPELADPEAAPPEIKQDDNEDELGCSDNLSKSGQELKRLLRRAAGENESDVDDKSTYEDDLPSPKPAPKLVPKSEPDDSSPAKPTPSGHAQSATPSSKSTQKRKSGGGDANISNGAPSKKIKMEHETGTLAVKDENPSYLEPTSKASLSARRESSPITEEEVRTVLRAISPTTSQDLVSRFKTRLITQEDKKAFLGIVTKISRILKHNGGRYIVLRHEHM

SEQ ID NO: 70912 - protein, 47 aa, Zea mays
  Coding DNA Sequence Number=SeqID_27537
MAGKRGLDASAWNLGFSTHQSGRGVGPRGEGNSAVGRAKGIWPNELF

SEQ ID NO: 70913 - protein, 63 aa, Zea mays
  Coding DNA Sequence Number=SeqID_27538
MGLGVCGSLCQGGNETDGFGYDYGAADPKPVQPVIKPVQPVLQQCEQLKRAEKDADYAEFLPD

SEQ ID NO: 70914 - protein, 304 aa, Zea mays
  Coding DNA Sequence Number=SeqID_27539
  Gene Ontology: Mol. function=nucleic acid binding
  Homolog annotation: Hit_ID=Q60EK4; Match level="QueryCoverage=86%, HitCoverage=51%, E-value=4e-12, Identity=24%"; Hit description =Putative uncharacterized protein OSJNBa0032D15.11
MARRRSQKNKKTQENKEVTLEILLSDCSNYDSWSTRVIKAFRAIDPQLEQILDKSIIPPNYARENASEEDLRCIRLNYLAYDILSKSLSKEDYHAFIIKYDKPICDVHDIWTRIKSKINKSKHDSSFCASTSFGICDTNPCKEEEENERWRPNDESTSAKGLSSHFNSHMCCVANANDSGSTNEDEEEERSFMHLYARLSQEDKAVMLKLLERAREQSEARQRLEDILSIKMQHFDELTKEHEELKCSHVDLVQSKSSFELEFAGTNDDTYQKLKEENERLKMSLTQLKGKCIAQPSQDNRDHM

SEQ ID NO: 70915 - protein, 227 aa, Zea mays
  Coding DNA Sequence Number=SeqID_27540
  Gene Ontology: Mol. function=transferase activity; Cellular component= cytoplasm; Biological process=phosphorylation
  Homolog annotation: Hit_ID=Q10NZ7; Match level="QueryCoverage=73%, HitCoverage=32%, E-value=4e-69, Identity=79%"; Hit description =Phosphomevalonate kinase, putative, expressed
  Pfam annotation: Domain name=GHMP_kinases_N; Domain location=38-134; Score=41.7; E_value=2.6e-09; Accession=PF00288.17; Description=GHMP kinases N terminal domain
LNITIIGHNDFYSYRKQIEARGLPLTPEVLLSLPPFSSITFNSEVANGTMTGEKCKPEVAKTGLGSSAAMTTSVVAALLHYLGAVNLSCSGQSSGDNASGRELDLVHAIAQSAHCLAQGKIGSGFDVSAAVYGSQRYVRFSPEILSSAQAIGGTVLPDVVSDVLTQRNPSYSAVAGPGLPPSEKGPGGKILHRKTKRVKLHGTRVVSSELTYGKKILNDVGGNKDVG

SEQ ID NO: 70916 - protein, 723 aa, Zea mays
  Coding DNA Sequence Number=SeqID_27541
  Gene Ontology: Mol. function=hydrolase activity; Cellular component =membrane; Biological process=proton transport
  Homolog annotation: Hit_ID=Q10P12; Match level="QueryCoverage=97%, HitCoverage=82%, E-value=0.0, Identity=78%"; Hit description=V-type ATPase 116kDa subunit family protein, expressed
  Pfam annotation: Domain name=V_ATPase_I; Domain location=1-716; Score= 722.1; E_value=3.9e-214; Accession=PF01496.10; Description=V-type ATPase 116kDa subunit family
MIQLDSWHVTSVEMLYIRGPNSQRTAASQQRELEANQSGQTSLESPLLEQEMSTDPSKQVKLGSLSGLVPKEKAMAFERILFRATRGNIFLRQEPVDEPVTDPVSGEKVTKNAFVIFYSGERAKTKILKICDAFNANRYPFPEDVSKQLHAVQEVSGKISELKATIDMGLAHRDSILKNIASDFEQWNHLVKKEKAIYHTLNMLSVDVTKKCLVAEGWSPVFASIQIQDALQRATVNSKSQVGSIFEVLNTKESPPTYFQTNKFTSAFQEIVDAYGVAKYQEANPGVFTIVTFPFLFAVMFGDWGHGICLLLATLYLIIREKKLASQKLGDIMEMMFGGRYVIMMMAVFSIYTGLIYNEFFSVPFGLFGKSAYACRDSSCRTAHLSGSLISPLVHSDATTEGLIKVRDAYPFGVDPVWHGSRSELPFLNSLKMKMSILLGVAQMNLGIVISYFNAKFFRNSLNVWYQFIPQLIFLNSLFGYLSLLIIIKWCTGSKADLYHVMIYMFLSPTDEIGENQLFSGQKTVQLVLLLLALVSVPWMLIPKPLLLKKQHQQFTFTLTVFPFLFNQRHQGHQYAMLQGVDESVGAELGEHHEEAHDHEEFEFSEVFVHQLIHTIEFVLGAVSNTASYLRLWALSLAHSELSTVFYDKVLLMAWGFNNVIILIIGIIVFIFATVGVLLVMETLSAFLHALRLHWVEFQNKFYEGDGYKFAPFSFALIREEED

SEQ ID NO: 70917 - protein, 46 aa, Zea mays
  Coding DNA Sequence Number=SeqID_27542
MAMMGSTLEKMYLCQVKKQQTFVASVPRWCPKKKIKTEAVGGSVIL

SEQ ID NO: 70918 - protein, 70 aa, Zea mays
  Coding DNA Sequence Number=SeqID_27543
MVLPEQEPSTTSAACARGQSSSSHRRCRPAHRRDRRDLPDVTDHPTGALLPPENEEKGLKMETRGQPYFS

SEQ ID NO: 70919 - protein, 51 aa, Zea mays
  Coding DNA Sequence Number=SeqID_27544
MGKPVPSLLMLLLSRVTALVPTITRMGDHVSGRVRRAICGQVHSGGFELQQ

SEQ ID NO: 70920 - protein, 85 aa, Zea mays
  Coding DNA Sequence Number=SeqID_27545
MGKFTSSEAQSVAEHRLMAADHESKLASRYMLGLLELRDPRLAIALLIHMNYYYFFANDEGVSFKTFVRESLYPKGDDVLKDEGP

SEQ ID NO: 70921 - protein, 121 aa, Zea mays
  Coding DNA Sequence Number=SeqID_27546
  Gene Ontology: Mol. function=microtubule motor activity; Cellular component=microtubule associated complex; Biological process =microtubule-based movement
  Homolog annotation: Hit_ID=A2XIZ8; Match level="QueryCoverage=56%, HitCoverage=6%, E-value=7e-17, Identity=64%"; Hit description =Putative uncharacterized protein
MAGSLCRSSYRRMGSREPFEGNVRLSAMSMIKNALAGFNTSLVCYGQIGTEKTYTMLGPLGTMVDSGSNHADCGVVPRVVQKRFSRIQREREDELDFVEALFASGGINHHSSLYPDGDRRS

SEQ ID NO: 70922 - protein, 228 aa, Zea mays
  Coding DNA Sequence Number=SeqID_27547
MRSRSTDAKSGSSRTLPPRLNRRWSLEGHPAAGGDPKGDDDVGGSSSHNSVLLEEQKPEGWIARPITHDVAHSFHLHDALNTLLRRAFDQHTWSIEYRCVDYQHSRRLYLDQWEATCLVCRPDYDLQGAEAYSEHYSITEWDTAEGNPRSSSIVNLVIVLNTELDHTFDELGKARAEIAKLRAERAERRHQEDGSPTPIGTHHPYYSPPHGHHAYGNPDCRIKIVLEP

SEQ ID NO: 70923 - protein, 78 aa, Zea mays
  Coding DNA Sequence Number=SeqID_27548
MARVSLEHSDHFASVDQPHVATSAMEFPGRAIGVLSVDGERRKGVSTTRIYIHTLVKKGKNLNNRTESGGIGFGVREL

SEQ ID NO: 70924 - protein, 70 aa, Zea mays
  Coding DNA Sequence Number=SeqID_27549
MAMMGSTSEKMYLCQVPNFGFEIVKLRPGGRECHGRSSDSTWAKEGTGRLRLARGSRYDGVVPVSMITSG

SEQ ID NO: 70925 - protein, 309 aa, Zea mays
  Coding DNA Sequence Number=SeqID_27550
MRVVRIVTTAQEKAKPWKETSRSSKITMNSRWLVLDTLHEVETVRPRSSVAQLEAPLVPPRDVPAVGGATGGDPDDDDSDHSTESSEPQEAEGWVARPITHDAARGCQFHDALDTLLRQAFDRHTWSIEYRCVVYQHSRGRYPDRWEATCLVRRPEDDLRGAEAVSEHYSISERDTAEAAMQDAARRALSQYCSLFGGVADGLNLRYYPRRPTGSTESVVVSPVGEANPRLSSTVNLVAVLNTELDHSLDELSRARTEIAELHAELAERHHQEGGSPAPVETQHPYRSPPRGHHTYGSPVCKTRIDLDP

SEQ ID NO: 70926 - protein, 680 aa, Zea mays
  Coding DNA Sequence Number=SeqID_27551
MEVVELVPCARNKWGNWHEFWFYVAEGTVEDHPGLPVAEMCSHYYSAYPQFEVAEEDANEGALRCAAGLSSGRDLVEEFVAYGVWPLAHGWALGEVCPRQMPSRGGMLVQSPAFALDLHSRDPAAFVREAEDGAVRIVGRYVPKTEGQRSWDIRGSNDRLNRVFELNRLPYGGYPGQADVDRRGKKPAAETGDDPTPAVAPSSKKRKLGIATGGLGVSDGFARELMRTCAAPGGRMSSPELRESSARMLRKRQAVVRLHEARPKRSRGTAKAAAPGGSQPMLAAKSAAPGSSRVPEAVKAVAVGGTKSVPAGAVKARELPPPGKRIADFATDISVDDYLVGSGEGQLVVVPPAVATAAAAVVPRAKGSALSAGGEIPALTAVRDEAGAVSRRLKEALSQAADFADRAASGALTAVVSAEVERLQAQHADVVREKSAADSKCRKLADKVAALEGERTDLRRQLAEERKEANEALAKAQSAQAEANLARAEGSLARQRAEELEERFNALQTRVERAEASTRSEAERTRKQLMDSYHELGARTADFEVPDREPGLRCLEWLQEELLALPAIVEGFMSYASLVTCEGAMNTLSREGCRHYEVFDQADEDFERDIYKVEDPVVKESAGALFDRMWGPHGREVVRERSETAARNEKVEDFGALNSAQPDSELNRWRLCPRPPRRRP

SEQ ID NO: 70927 - protein, 376 aa, Zea mays
  Coding DNA Sequence Number=SeqID_27552
  Gene Ontology: Mol. function=transporter activity; Cellular component= mitochondrial inner membrane; Biological process=transport
  Homolog annotation: Hit_ID=A7PZS6; Match level="QueryCoverage=24%, HitCoverage=26%, E-value=1e-28, Identity=68%"; Hit description =Chromosome chr15 scaffold_40, whole genome shotgun sequence
  Pfam annotation: Domain name=Mito_carr; Domain location=295-376; Score=31.9; E_value=2.2e-06; Accession=PF00153.18; Description =Mitochondrial carrier protein
  Subcellular localization annotation: CTP_CleavageSite=38; ConfidenceScore=5.59e-01
TAPAPTRTRMPRMQRPHAPHAPPSAALPRVPRRRRETVARPRQRIPHARNGRIRRTTHRPPLPPIPQRPPATAASAALPAVRRTTTRPRRLCEITALARLRFHHRLARLRFCTNNIDASAHARRTRPASNAHLRNRHSDGEDAAAQDDKLVGDLAGPPASLAFASTIASLAFVSAQTTSMHPPHARRTRPASDAHLRNQRSDDEDAAAQDDELVVDLADLAPAPMATRKRMLLKFVIVGNSIVRQVTIGGVTIDGLLAATTRFSIRLAFVLIGFFTTQCAPDTNSFGLANDNEIHVVTRLECGAVAGTIGQTVAYPLDVISRRMHMVGWSHADSIVIGQVKEALQYNGMIDAFKKTVRHGVGALYKGLVPNSVKAG

SEQ ID NO: 70928 - protein, 195 aa, Zea mays
  Coding DNA Sequence Number=SeqID_27553
MGKPVPSLLMLLLSRGGVPLDSPTRWQDGRPSHSSNHVLQRTCKNYATSKAEYTNTQLDLPGQHGSSSLISCEKQTIRIGFLSLQVTALVPTITGMGDLVSGRVRGYVYCQVHSGLNSTRGNEKDGAAYRRRERSGEGRGWLREVLAVTTMYGSTAEVAGIVRSTCAGGCSRRRRVFQLNHGDLVQSNGTMSFTG

SEQ ID NO: 70929 - protein, 357 aa, Zea mays
  Coding DNA Sequence Number=SeqID_27554
MAPSPLDKGKGVASSASAPGSSGGSEEERQRRLQAVPLPQKRQKAADGTEEASSQAHNVQRRVSPPISPPPPPSGASAATVAGASITSLLGASSFTAPKATPPPPDTRPTDESGSQQQESAEGGAGGPLPAAARTAPLASHAPAGDPAAVAPASGGVAAAEKVPARGSAPAPEEMEVVFGRRLRSGAEREAAPVPLPCMLSRSHQVLSETEAAILREWEALEAEHQRLSDWRTQLEERTKTTSRQFTSVRSQLEWDCKEYKKDLQRVCARELEATQREKKVSRREEAVTQREALTTEYQTKLSALDKNLEAYHDTAISLASVIDGPVAATEDAARESVQDVVEMVAARFQRDPADAE

SEQ ID NO: 70930 - protein, 47 aa, Zea mays
  Coding DNA Sequence Number=SeqID_27555
MGSTSDKMYLGQGFRTHVVVSEETVFKGGIQGRAPTVKSREDVGLPL

SEQ ID NO: 70931 - protein, 403 aa, Zea mays
  Coding DNA Sequence Number=SeqID_27556
MGGTEEGPSQDATPAAKRRKLGPSEGQMVVVPPLVATTSPSAVVRVKGTAQDPWAAFCASGEILTAAAAKDVVGTMSQRLRDASQRLSQQLSQAADFADRVASGVLTADVAAEVERLRAQHADTVREKSAAESKNRRLAEKVATLEAEKTDLWRQLVEERKETNQAIAEAQAEAKVARAEGSLASQRAEEWEARFNALCGRVDKAEASTRSEVERTLAQFVDSYRELGARTADFEVPDREAGLCFLEWLQEELLVLPTIIEGFMSFASLVTCEGAMNALFREGCRHYEVFDQSDDSFEREIVKAEDPVVKQSAGALFDRMWGAHGREAVRERSDRAREQMERAEDVEDLGGLVGAPPKAAEGNLVLPSDAGEGPSAVPVPAMARRRPCVGPCADGRRCPRGGG

SEQ ID NO: 70932 - protein, 181 aa, Zea mays
  Coding DNA Sequence Number=SeqID_27557
MTKEASFRGHSIARSLQDSSKAPSGHQLQRAEAARASEVDMGISLEKSIAYSVVKTRATRQEHVRSPFKSKKRSPKQKPSRISRSRSYILLRATLPTYQNIWATNLQLLLLRQAIHKLPGLSSHRHHHCNLLTPEASSQKGANTHNSNMTLGRSPKLIYEVQKSFLRECRAKIDEATKSRS

SEQ ID NO: 70933 - protein, 72 aa, Zea mays
  Coding DNA Sequence Number=SeqID_27558
  Subcellular localization annotation: CTP_CleavageSite=44; ConfidenceScore=5.05e-01
MSVLPPLRLLWTGACALAHVARFLGHDTRPHRMARTKDNASRMRALTRWPACQRPSPLALGPLGQCALPLCR

SEQ ID NO: 70934 - protein, 129 aa, Zea mays
  Coding DNA Sequence Number=SeqID_27559
  Subcellular localization annotation: CTP_CleavageSite=68; ConfidenceScore=5.10e-01
MGVTRGARQALSHRPLRRRRRWFLGGGSDPAPSQKRRQFPSPGCCLVPIRPFKRPSDWRTQLEERTKAASHQFAFERSELARDRKDYKKDLQKVYARELEASRKEKRLAKKEEAKRECALGPFLVYFGD

SEQ ID NO: 70935 - protein, 273 aa, Zea mays
  Coding DNA Sequence Number=SeqID_27560
MNKRPTHKVPLQTEPQFHLHRYEQPHTIGGPAEQQKTDERLTVARSSSGDDDDFYSGGPNSSSDDLRVDAAAMRPSPMPSLERQRRAEGRRVGGPPPTTRGLGPTRHASWSRAEGAKPPRAGHATAQRLQSFLHFRPDQRVKGWTAMQTACNRAEWARPFDSNAPSMEAQAHTSCNRRAGCYVRATAPPLAPLPRLLDYGTSAATRGSPACDPTVPARHIGHGPVSRGRRRNSRCGQKWAGSNGGGRRAGAAVTSSAKLTSHPVAAREPSLTA

SEQ ID NO: 70936 - protein, 158 aa, Zea mays
  Coding DNA Sequence Number=SeqID_27561
MAPPVDVVGPCPRLGEVEAPSRSRSSLSSKVKVESEPPGEAEFIVFRGRARVRALGSGGAEFVVFWGRARVRALGSGEAEFPMTPKAGLGCCQPHSVEWLSSRSGAGGAVLLSDRSVERRSDCGHFGFVDWRACVRIKTGPQASRRCVRCWRGSSGET

SEQ ID NO: 70937 - protein, 116 aa, Zea mays
  Coding DNA Sequence Number=SeqID_27562
MKQREEVVTKLQAKLSAFNEILEEQRVQQTAAVESLQKLQRELEGKAHDAALAEEKLKVKGESLDRRETDLARWEKDLAFKEEMLERREKLLAEHELEAEEKERTLEEWVRRFQAT

SEQ ID NO: 70938 - protein, 241 aa, Zea mays; identical to SEQ ID NO: 70574
  Coding DNA Sequence Number=SeqID_27563
  Gene Ontology: Mol. function=lipid binding; Cellular component =anchored to membrane; Biological process=lipid transport
  Homolog annotation: Hit_ID=A2XMU5; Match level="QueryCoverage=42%, HitCoverage=57%, E-value=8e-13, Identity=37%"; Hit description =Putative uncharacterized protein
  Pfam annotation: Domain name=Tryp_alpha_amyl; Domain location=34-111; Score=45.1; E_value=2.5e-10; Accession=PF00234.13; Description =Protease inhibitorseed storageLTP f
  Subcellular localization annotation: CTP_CleavageSite=19; ConfidenceScore=5.13e-01

SEQ ID NO: 70939 - protein, 324 aa, Zea mays
  Coding DNA Sequence Number=SeqID_27564
  Gene Ontology: Mol. function=nucleic acid binding; Biological process= RNA-dependent DNA replication
  Homolog annotation: Hit_ID=Q53KQ2; Match level="QueryCoverage=99%, HitCoverage=60%, E-value=4e-30, Identity=27%"; Hit description =Transposable element protein, putative
MPIVGLAADGLGFYLSHFAKPLTKKPKRVFIGLVKVIEGLVSAEDLERDFGFHFPWNKMWKATKCHSGFLMQFPSQERLDEMISFPELKMKMSGAKIAVVPWSSRAKPKSRLHTVWVIAENVPEELQNYQSICEIGSMIGAVEEVDLMSLDSDDIVRFKIHIKSVAMIPPVVEVAVKPFLYDIFFRIESICDEGWNDDSVNLGKRASVQIHGSNDPLFDKSGKKPKNVDEVTLEDDPNPSLKIGESSSQGKEFAKLSEPNLVSSKIISDEEQKLDNLSDEKPLDMPTNTVDGVRKSSRLEKNDDVKVADKAISRAEAKDAFLNK

SEQ ID NO: 70940 - protein, 64 aa, Zea mays
  Coding DNA Sequence Number=SeqID_27565
MGKLSLGWTNTRKASPQWEWRDGESIVYPPGKRLDDPQLGINRFGSPNFSDMKTGSSTLIVDNK

SEQ ID NO: 70941 - protein, 36 aa, Zea mays
  Coding DNA Sequence Number=SeqID_27566
MGYTTCGSRVQPLQGVKLVKNMYHRMRRMEDDAMCS

SEQ ID NO: 70942 - protein, 91 aa, Zea mays
  Coding DNA Sequence Number=SeqID_27567
MTTASTATAGVAGSLADALEEWSTLSGVNGRSNDGEGDDPRRWVGYSSLSKSRLTRASASSNLLLISSRRNLSAARSIGARPRIDSFDTNC

SEQ ID NO: 70943 - protein, 478 aa, Zea mays
  Coding DNA Sequence Number=SeqID_27568
MGDRMEISYWKENHSHWGSYDWNTGLTSLRSIGDNKFVMRFPDPKMIGDLGYFRPLGMRTAKAQITIDPWTHAVNAKGSLQKGWFRISGIPMEQRSLVTIAKVGGLVGKVVEVDEKTRLRNEYVRARIAYRDVTAVLGVVESALGMFLYDFFIEREILTEDEEGNAEIEVKVDESYQKDAKRFKYEGKMPKGKRQDMGLFDEGNMKVDKGKGKGKENEGSTLKAGKNYFNCADDEKDKVHITDSEEDDVSDLLGDDLLTVKTGVGSSSHSAWNTQLKCMNTMNTNVGQRSKNAQCSIIIEELDPNDKKEGNSDEMIFDNTQGSVILNTSQEDESIPKNSGSRLMTWAKMMSNRRKFLPQFLKGGGIRKKGVAPFIRNLIGLHKFKFIGLQETMVVEVLDLVVRDPKGIHGGGIPLLFKIELQVNFYHMDPDGGRMTVIPQSGVNPSSRRGYWETVLVIWVLRLPDIRARHLKRVTRTR

SEQ ID NO: 70944 - protein, 136 aa, Zea mays
  Coding DNA Sequence Number=SeqID_27569
  Gene Ontology: Mol. function=catalytic activity; Biological process =metabolic process
  Homolog annotation: Hit_ID=Q2R712; Match level="QueryCoverage=46%, HitCoverage=8%, E-value=1e-13, Identity=57%"; Hit description =Cycloartenol synthase, putative, expressed
  Subcellular localization annotation: CTP_CleavageSite=47; ConfidenceScore=5.48e-01
MASLGERCGSSTPPQARRRSAPRSIGCARSTPATASRDGNAVTFSCACRKVQSRPGHNKALNYISPPFFRPNLYAKQNLHNTNLPAIKIDQDSDVTEETILITLRRALNQYSSLQGPAGHWPGDYGGISFILPLMV

SEQ ID NO: 70945 - protein, 81 aa, Zea mays
  Coding DNA Sequence Number=SeqID_27570
MWPEKMIYSKGKCRTPVYTDWAFGVPGFWDRECPGLNQGQARVRSRHVSGPYRLRFCSPPRRSPDAATWHGARDAVYRLRI

SEQ ID NO: 70946 - protein, 152 aa, Zea mays
  Coding DNA Sequence Number=SeqID_27571
MWPFLNAVHFGAAVTSGSLAALHEFNRRDGQSERVLRSEVVEGFRRQPHPTEPFSTACTDVRLCRLLSLSGYRPYQSKSKTQRSQWRCPTSSLAFLTKSCGGSELTEVEVDACPWQRYGGELGTSERNHGATVKLKGGTYKDAEPQHVGPGT

SEQ ID NO: 70947 - protein, 76 aa, Zea mays
  Coding DNA Sequence Number=SeqID_27572
MSKPDKTFPLLILLVLPSLLNPGVGPHEFGLSDCPHSLEWLYDKGVQNVYVNADPFSLTMQYSPIIPGLGSGRENK

SEQ ID NO: 70948 - protein, 94 aa, Zea mays
  Coding DNA Sequence Number=SeqID_27573
MDMANCIRVMQSIAIRWTSFLCQSPIHMSPTYPPYSLPGAPFTIGVGALGEDGQGRATFGLIIDATIATDDGVLRVGVVGREGGGSTPSAAPRY

SEQ ID NO: 70949 - protein, 230 aa, Zea mays
  Coding DNA Sequence Number=SeqID_27574
  Homolog annotation: Hit_ID=O48967; Match level="QueryCoverage=100%, HitCoverage=44%, E-value=1e-48, Identity=51%"; Hit description =Putative uncharacterized protein
MVQIVEHYDFVPEDFPTEKEAASSTPRASGRPAPGVAAVCSARQHTPAQTSRASRAASGALSAATELLRHPPSSTASPGAMKQWRDDVDRLLGMAHSGSARPRPRPRSSQRQHEASASVRSPSVRAAPTKDLRAELNRRRAGEDAPVSLERPDDLRAELNRRRAGKDARVSLERAHERRLNFEGRNLDLDFFAVAPQTPRGARIQAGVPLAGVGCAALADHLCAVTWPSK

SEQ ID NO: 70950 - protein, 99 aa, Zea mays
  Coding DNA Sequence Number=SeqID_27575
MEAEGRSMAYRAMTYAFTCLKSKNKDLALDPFFEGPKEETEVEAKRVVHDTMEHVVKGFVGRPQPTLVMTRTTLCRTRGRPEPGPPTLVYFSFLYWSSL

SEQ ID NO: 70951 - protein, 120 aa, Zea mays
  Coding DNA Sequence Number=SeqID_27576
  Gene Ontology: Mol. function=catalytic activity; Cellular component =cellular_component; Biological process=metabolic process
  Homolog annotation: Hit_ID=A2ZDF9; Match level="QueryCoverage=80%, HitCoverage=68%, E-value=7e-38, Identity=78%"; Hit description =Putative uncharacterized protein
MSHPVLEGKPNANHVLTKRYSEKWPESPKEYVDSGSPHGVNTAQAMLALLYAGQVEQDPAPLYRAAKELINMQMENGEFPQQEIVGNFNSSLFFNYPNYRNLFPIWALGEFRRRLVAKKG

SEQ ID NO: 70952 - protein, 215 aa, Zea mays
  Coding DNA Sequence Number=SeqID_27577
MPGKANYCCPARMQHSVLCPRFRGEDGSEDLPVRFGAADARWCGVGGQVVTAVGAEVVVAGESFSAVETVSATYGPTSGSLALMSGSRPLSGDANESLPAAAFVLGPSLLLQRSPASHQEFVVPQALRCGGCSYPRGRNRSSVRNGTLSAGVCSLWLSGPEHPEPEAAVSAWTEAELARKEDFVGRSLAGPSTGGTNAGVELPRPRAGLVSSGDS

SEQ ID NO: 70953 - protein, 238 aa, Zea mays
  Coding DNA Sequence Number=SeqID_27578
  Subcellular localization annotation: CTP_CleavageSite=42; ConfidenceScore=5.07e-01
MGASSTFPVLDATQKLLHGRRPGELPPMALGSLFPGALWLPPSSPGRAHPSSGSPPFRQDQLQLCAPPPMAPLRLPWPPALPASSAPPHSWRPLLFPAQPGNAQARSALSSPLLLSLYQAPPCNLPQAVFLLSPTAPSSFPLCSRPASGQCAQTLPAKDSTIPSPAAARPLPPFPLFDRLRVSLRRICAAPTSTSFTPARNPMFCVEKKARRQRSSDVWSDAQIGITVILANTVWVCL

SEQ ID NO: 70954 - protein, 151 aa, Zea mays
  Coding DNA Sequence Number=SeqID_27579
MESSLGKPRWSSMLLAVLLTLAARCFLHHQELNIGRHVLTYGERYDNMCGGGYGGGAQGGESRGAKGRAGTTTGKDLIVRLTLLRRALDLRAATSWWLDKTSFKGSFGNQGQRTPREPSPGRAKSCHVDSLDGIALWGCPALWPFRATAMN

SEQ ID NO: 70955 - protein, 121 aa, Zea mays
  Coding DNA Sequence Number=SeqID_27580
MYLVFWLLHLSESLCKDDVRCTACVNQDIVDPKSLDDTRYNHGIIVRIVFKLKIFLGEAGSEFEPPVIGSTSFVTEGATAWLLYEAIVTTVEVSSPEVGANVGHLFSKAINQEQGNTNVNG

SEQ ID NO: 70956 - protein, 116 aa, Zea mays
  Coding DNA Sequence Number=SeqID_27581
  Subcellular localization annotation: CTP_CleavageSite=53; ConfidenceScore=5.16e-01
MAHRSHSSPSEAFSPPFSPLCPWIHGLFPAIEFAVAPSPSLPNSGDPGATLTRASLNSGYLTTAERSGAARSRLFPLDNEQSEVPECVVGDLPKQQPGGDAGNMDDFEEFQEYDEF

SEQ ID NO: 70957 - protein, 53 aa, Zea mays
  Coding DNA Sequence Number=SeqID_27582
MAGTSAVNARRQSVSVRHCSLEDMVAGVTWPSILPPGWTVEWDPTSAEEEHEE

SEQ ID NO: 70958 - protein, 226 aa, Zea mays
  Coding DNA Sequence Number=SeqID_27583
MPPALPQGIPATGGDTDGDGDDDDAGGSSSHGTELSEELEPEGWIARPITLYQHHRGLYPDQWEATCLVRRPDDDLQGVEAFSEHYSITKKDAAEAAMQDAARRALSQYCSLFSGVADGLDLKYYPRRSTGSAGGVIASPVGEGNPRLNSMVNLAAVLNTELDHALDELGKVRAEVAELRAECAARHYLDSGSLAPVGIQHPYRSPPRGRFDYGTPDCRTRIDLDP

SEQ ID NO: 70959 - protein, 72 aa, Zea mays
  Coding DNA Sequence Number=SeqID_27584
  Subcellular localization annotation: CTP_CleavageSite=15; ConfidenceScore=5.04e-01
MALRQSQLLGTFGIRRSSKTGFNSISGVQCVNRYPRTQIGIAVLTERYSGKRPEPPKVSQDHPHNQDNSIVS

SEQ ID NO: 70960 - protein, 216 aa, Zea mays
  Coding DNA Sequence Number=SeqID_27585
MQLFEKHRVPRCRVRMTLEPHPLQLGWCSLDSESFGYRAEDTIETIALHGLTTFCDEHLHVFDAFCARQSTPAPDLACPVSRQSPAGAVARARAYKAPRYFGRTPPRTLDLTGARNHRRLPRARRARGHPSPCHRRLANRALPNPVQPSEKTVHTSVKLPERGIGVCFAGEASPRSPDFTRPPVNVDRVILCSILRFLVHIASTSPREAHRAIGLN

SEQ ID NO: 70961 - protein, 135 aa, Zea mays
  Coding DNA Sequence Number=SeqID_27586
MANQIQEFEELVGARENTIEVLEDRLINTQQQFEEANQHLDMHHQEIQDMEANKDVDIKGGVEPEPASSLDTAGSGIPPSPESSVASVSRHLSIMVVVITISVPQQLPLIRSSSALSRRCSLGQRIRLMLMFGLG

SEQ ID NO: 70962 - protein, 102 aa, Zea mays
  Coding DNA Sequence Number=SeqID_27587
  Subcellular localization annotation: CTP_CleavageSite=51; ConfidenceScore=5.57e-01
MASAPSPGAPCSPTARPRRPGGPAPPRPHSCASVPRRPGGLVPHDPAPSCPGMASRAPTWPRVPPARATCGDEDDDFDYTYGTGEDEAVEEDFQEFQEYDEF

SEQ ID NO: 70963 - protein, 73 aa, Zea mays
  Coding DNA Sequence Number=SeqID_27588
MATGSNNSSTSVAMGHEVQTIGIAWLPNELSFMKLILSKARLLRTLYVDRNPDDFDNQASTIHNFLPFPFIGN

SEQ ID NO: 70964 - protein, 49 aa, Zea mays
  Coding DNA Sequence Number=SeqID_27589
MTPLTMLLSLMALLPYDGRVMLGDDEPVLLTHLFCAADLGTDALNPLSA

SEQ ID NO: 70965 - protein, 232 aa, Zea mays
  Coding DNA Sequence Number=SeqID_27590
  Gene Ontology: Mol. function=isomerase activity; Biological process =histidine biosynthetic process
  Homolog annotation: Hit_ID=Q53LS7; Match level="QueryCoverage=84%, HitCoverage=50%, E-value=3e-78, Identity=72%"; Hit description =ProFAR isomerase associated, putative
DYKSSLLLFNKCLLLNVEAVRKYNSFSEMLKGEKISNVLPGISSIVEGVKVYRKFYAEEKENSYGVLAISVSKPTSQPYITMNNILAGLGYDGLGRLLGMAKTTGTVPDGLPPPRSALLSSCMGLVQPNVKGCSLTDGARALAKHVHRSRKGWWGSFNGSDSSKNQAASETIESLLRVCCWMNVHLTQPYGPVFEIRVHEGYGARWSQDGSKMEDGVLELFGMTSKRNSGHG

SEQ ID NO: 70966 - protein, 337 aa, Zea mays
  Coding DNA Sequence Number=SeqID_27591
  Gene Ontology: Mol. function=protein serine/threonine kinase activity; Biological process=protein amino acid phosphorylation
  Homolog annotation: Hit_ID=Q6AVR9; Match level="QueryCoverage=86%, HitCoverage=66%, E-value=6e-77, Identity=60%"; Hit description =Putative uncharacterized protein OSJNBa0075M12.3
  Pfam annotation: Domain name=Usp; Domain location=51-175; Score=33.1; E_value=1e-06; Accession=PF00582.17; Description=Universal stress protein family
MKVSSRRKQPPPPPQQQQREEAEAMDADAGVQEVEEEEAAGCSGKAPEAEGRTVVVGVRADAESRALLTWVLVNVAAPLDRVVAVHVALPSAAEAPDFDAMLAVYQGFCNLKQINLKLKICKDSSVRKALVREASLLGAAKVVLGVAKKRRAISSSHSVAKYCAKKLPAKCAVLAVSNGKIEFRRESSAHSGKVSAEVLPCADDEMYCAVRFQAHEPKDGGEGGTTHDVGTKGSELEDTIKHEQLVSSVVLPADLATDQVKIDADLSSSKAVESTVKQRDETAELPVHEFVTEIETVSSLQHENIVALRGFSFENYNLVLAYDYMPQGSLDRALHAV

SEQ ID NO: 70967 - protein, 307 aa, Zea mays
  Coding DNA Sequence Number=SeqID_27592
  Gene Ontology: Mol. function=nucleotide binding; Biological process =defense response
  Homolog annotation: Hit_ID=A2X267; Match level="QueryCoverage=67%, HitCoverage=22%, E-value=9e-91, Identity=73%"; Hit description =Putative uncharacterized protein
  Subcellular localization annotation: CTP_CleavageSite=29; ConfidenceScore=5.12e-01
MDQLRGNVAKAKKVLGSKGKGKGFARLVRSSMVGDPLIKSTPSLVRVKSEHGYPVSKKCSYVRELLERDGAHRVVLIVGLSGIGKSCLARQIASDPPLSFVDGAIEIGFGRWCSTAACNGSRNEYHKRLARKICTFLVQIGSITLKEDTGIDLDDVCCLLQTALVGRSMLILLDDVWEQDIVDRFTRLYDNDYRYLVTTWDEAIYEIAEAEKVEICKDDIKEISTEILLYHSLLSAGELLSLGGYDTEDKAARAYDLAALKYRGPATHVNFPPLQWTRLQVLEDFVSDLDALTQQSRQRHAHKLHGS

SEQ ID NO: 70968 - protein, 460 aa, Zea mays
  Coding DNA Sequence Number=SeqID_27593
  Gene Ontology: Mol. function=tetracycline:hydrogen antiporter activity; Cellular component=cytoplasm; Biological process=response to antibiotic
  Homolog annotation: Hit_ID=Q53LS8; Match level="QueryCoverage=100%, HitCoverage=100%, E-value=1e-136, Identity=72%"; Hit description =Diphthamide biosynthesis protein 2
  Pfam annotation: Domain name=Diphthamide_syn; Domain location=30-366; Score=21.1; E_value=1.2e-14; Accession=PF01866.8; Description =Putative diphthamide synthesis protein
MEADIAFRYEIPRTAQFLRDGAYTRVALQFPDEMLKDAAAVARALRRELASGGADSGVRVFVMADTAYNSCCVDEVGASHIDAQCVVHYGHACMSPTSNLPAFFVFGKAPLDVHACAGTLLECSRKSNKRILVLYGLEYAYALDDLRQTFMESCKSNSGNHEVQYAEVLCSVMSPSSSTTEENKIPQSSGPSCNGDISRNSESATFLNNRNGMECSSSTQKYSLAGMTWNISVEEKMEDYFIFWIGQDSSAFANIVLTFNKCEIVRYDAIENQLTADVSHLMKILRRRYYLVEKAKDANIIGILVGTLGVAGYLHIIEQMKDLIKAAGKKSYTLVMGRPNSAKLANFPERNKKLRAQQEKARFSFIKGVYVEDNCPQENEEQSETSLALAEVTEKALSIQNQHNDAVLYQGRAMSSIDYLKARSYRGLTGEYEGPVPDSVLVGRMGRAAGYSDEKTESAQ

SEQ ID NO: 70969 - protein, 195 aa, Zea mays
  Coding DNA Sequence Number=SeqID_27594
  Homolog annotation: Hit_ID=A5ATX9; Match level="QueryCoverage=84%, HitCoverage=84%, E-value=3e-15, Identity=30%"; Hit description =Putative uncharacterized protein
MGGGRGEVPAMLTAQPPPEVAGEDDSSFHHVFVEFMTKAAQFEELAESGERLLGRFREELVSSSEAGLKDHIKKAKTLLEELECLVENVYGITLTSSLSALEVSDSHCLDNMPSTDCYAMEEDKRADHLDMDVSLVTVMAMVRNMLKLDYTMQEKIVTALSLKTPASELEGYCLMWDLRPYIDDDVMRLAWNMCP

SEQ ID NO: 70970 - protein, 63 aa, Zea mays
  Coding DNA Sequence Number=SeqID_27595
  Homolog annotation: Hit_ID=Q6AVR1; Match level="QueryCoverage=80%, HitCoverage=41%, E-value=3e-09, Identity=61%"; Hit description =Putative uncharacterized protein OSJNBa0075M12.11
MRVTIMLLMPTCSPTTRWASVALGAGVGIGAAYTECSYLFNGAPKCSPKVSTITSAHSDGGDK

SEQ ID NO: 70971 - protein, 283 aa, Zea mays
  Coding DNA Sequence Number=SeqID_27596
  Gene Ontology: Mol. function=structural constituent of ribosome; Cellular component=ribonucleoprotein complex; Biological process =translation
  Homolog annotation: Hit_ID=O22453; Match level="QueryCoverage=90%, HitCoverage=96%, E-value=1e-122, Identity=85%"; Hit description =Ribsomal protein S4
  Pfam annotation: Domain name=KOW; Domain location=195-229; Score =37.8; E_value=3.9e-08; Accession=PF00467.20; Description=KOW motif
  Pfam annotation: Domain name=RS4NT; Domain location=20-57; Score =84.2; E_value=4.3e-22; Accession=PF08071.3; Description=RS4NT (NUC023) domain
  Pfam annotation: Domain name=Ribosomal_S4e; Domain location=111-188; Score=76.1; E_value=1.2e-19; Accession=PF00900.11; Description =Ribosomal family S4e
  Pfam annotation: Domain name=S4; Domain location=59-107; Score=19.5; E_value=0.0092; Accession=PF01479.16; Description=S4 domain
  Pfam module annotation: Pfam domain module=KOW::RS4NT::Ribosomal _S4e::S4; Domain location=195-229::20-57::111-188::59-107
MSSLDAQTFVVSFFDNEQARGLKKHLKRLNAPKHWMLDKLGGAFAPKPSSGPHKSRECLPLILIIRNRLKYALNYREVISILMQRHVLVDGKVRTDKTYPAGFMDVISIPKTMENYRLLYDTKGRFRLHPIRDEDAKDFQALQGEVCSVWPEGHPLPDTYDGRTIRYPDPLIKANDTIKIDLETNKIMDFIKFDVGNVVMVTGGRNTGRVGVIKNREKHKGGFDTIHVEDSMGHQFATRMGNVFTIGKGNKPWVSLPKGKGIKLSIIEEQRRRDFAAQAAAKA

SEQ ID NO: 70972 - protein, 154 aa, Zea mays
  Coding DNA Sequence Number=SeqID_27597
MRQIYMSDMKDEPMHMNPVPERKAIETKEIGIPGRGTDDGDGVDEKERVQSGGKGRQHSRGPHIRDWEKSAAWALQWKDRTQNHMAVWAAHQTATGRTEERGTDRTNSDAPYATDALAATDALGPVRAVARTPRRRPPVPLVTGWSFTSGYHSI

SEQ ID NO: 70973 - protein, 168 aa, Zea mays
  Coding DNA Sequence Number=SeqID_27598
MFGALRGQHGAFPLLLAERQRRGENSAAYPALTDVPPARVRLTTAKSRLMRHRKLRLARPWASASGEVSASPDPRARPRKMDSASPDPRAWPPPRPRKMDSSPDPRARPRPRKVVSASPDPRARPQPRPRAESRPRPTPASALGGVSASPDLGLGPTMPQGGSSLPYP

SEQ ID NO: 70974 - protein, 192 aa, Zea mays
  Coding DNA Sequence Number=SeqID_27599
MNYLHTSKGHGITSPERLTNRGNHTSTDGDDRLCTNDSTAAAIIPACASLRVGSRPCPPTGGDNEATKAKESGTQRQMALMPSPAEATAPARGSLTSDGDHPCTGVRTRPSKNAAATVAAYDVLYGPPVRPAGRGSHECGKPTHGATVARAVGGQPHPDQTAGGSVRGDTRAIQPQRARHAAADSLQSSGPV

SEQ ID NO: 70975 - protein, 473 aa, Zea mays
  Coding DNA Sequence Number=SeqID_27600
  Gene Ontology: Mol. function=DNA binding; Cellular component=nucleus; Biological process=response to ethylene stimulus
  Homolog annotation: Hit_ID=Q5Z5B9; Match level="QueryCoverage=86%, HitCoverage=95%, E-value=1e-116, Identity=57%"; Hit description =Putative MYB transcription factor
  Pfam annotation: Domain name=Myb_DNA-binding; Domain location=56-101; Score=52.0; E_value=2.1e-12; Accession=PF00249.22; Description=Myb -like DNA-binding domain
MAQERDALDSPALSIDKRLRSDAVESPLVDDATQPKEGADGYPVKVRKPYTITKQREKWTEEEHGKFLEALKLYGRSWRQIQEHIGTKTAVQIRSHAQKFFSKVVREPGASNSIEIPPPRPKRKPLHPYPRKCADSTVTNAPMGEPKNAPVSSPSGSDQENGSPVSVLSAMQSDAFGSSISNPSTGGTSPASSDDGNNVPEIVNGEENLLTQQIEDRSHQESKQDNSDGELSEEDSSRVQETSLKLFGKTVIIPDPKKVCSSDGGAGDDTQEVMQTSWVGGGVAAYPAHNGWFLPFHSFPAHMYESGDARISPLHMWWPYYGFPAGHPRGFGTGLLNEGAIESDADNSPSVETNSDRTGNVHVQTTTPTIHNNAVKESVGPVEMPESGPSIELKPSANSAFVRVKPSSSVSGDQSLCRDSSGTHPLFQCACHFLPAKLAAGVCVILSFYCLQRNVTVYPVRPILLVLEQWNAD

SEQ ID NO: 70976 - protein, 1242 aa, Zea mays
  Coding DNA Sequence Number=SeqID_27601
  Gene Ontology: Mol. function=calcium ion binding; Cellular component =cytoskeleton; Biological process=synaptic growth at neuromuscular junction
  Homolog annotation: Hit_ID=Q5Z7N1; Match level="QueryCoverage=100%, HitCoverage=100%, E-value=0.0, Identity=67%"; Hit description =Calcium-binding EF hand protein-like
  Pfam annotation: Domain name=Extensin_2; Domain location=34-413; Score=-130.7; E_value=0.035; Accession=PF04554.4; Description =Extensin-like region
  Pfam annotation: Domain name=efhand; Domain location=4-32; Score=9.8; E_value=1.6; Accession=PF00036.23; Description=EF hand
  Pfam annotation: Domain name=efhand; Domain location=425-453; Score =14.7; E_value=0.34; Accession=PF00036.23; Description=EF hand
  Pfam annotation: Domain name=efhand; Domain location=459-487; Score =25.5; E_value=0.00019; Accession=PF00036.23; Description=EF hand
  Pfam annotation: Domain name=efhand; Domain location=75-103; Score =14.1; E_value=0.52; Accession=PF00036.23; Description=EF hand
  Pfam module annotation: Pfam domain module=Extensin_2::efhand::efhand: :efhand::efhand; Domain location=34-413::4-32::425-453::459-487::75 -103
MEAAFYAYFRPADEDRDGRISGQEAVAFFKGSGLPQPVLAQVVLRSPLSPPQRRAALTTAICAVQPPPVRFESQGAWSIWTYADKNRSGFLGREDFFNALKLVTVAQSGRELTPDIVRSALFGPAAAKIPAPRINVSTAAPQASSVANLPNATQAPGPVQQTPVVRGTQGLPGISSNPQVRPPQPPNANTAPPAHGQGVASRPPVGSGPTGINHTSSTTPSLATDWFSGKRSASPLGATSQTPTRGISPQANLSSAGISVQNSAPVPGYNSHTPGVNAISTNLNVMSSQPSVNDSKALVPLGNGLSSNSTFGADPFSATPRPEQGSPFPPNVPNNLLSSTPPASAAGHHHPPKPMQAGPVQSISSLSPHTSQLPHNQPPPRQQQFNATPSAPGPVSSNIPTGQIPSSPSQPQAPWPKITQVDVRKYMIVFIKVDRDRDGKITGEEARNLFLSWRLPRDVLRKVWDLSDQDKDGMLSFKEFCIAVYLMERHREHRPLPDTVTDAIWAEGTALPSTGQFAENPSAPAPQASAGYTSRTMQGPHHGMLPSSMKPPSRRPLPLDADDTIKPEQQKPKVPVLEEHLVGQLSKEEQDTLDAKFNEASVADKKVQELEKEILDSREKTEFYRTKMQELILYKSRCDNRFNEVSESMSADKREVQSLSAKYDERCKKVGDVASKLTMDEATFREIQEKKLEIYNAIVKLQKGDDSDEKFQERANKIQSDLEELVKSLNEQCKRYGLRAKPTTLVELPFGWQPGIQETAYAWDEEWDNFGDEGFSIIKELTVEVEPPVVAKSQPTEDVKASSNGASTEKEDNKGDKSAAAVEQVVKPETAPSNIKPESAKSPPVSPVKNKEDGPDEHDKKQSGTNDVSPRESISNRGAMDSPTHGDKTHDGHSWGMDNDSLWNFDHKEGENGDSDLFFGPQGLPPIRTGGSSSGNSVVKEQKPFFDSVPGTPVEKSVFDSIPGTPFQKSVFDSIPGTPVQKSVFDYSVPSTPMQNSVFDYSVPSTPMQKSLFDSVPGTPVQRSVFDSVPSTPMQRSVFDSVPSTPTQKPFFDSFPSTPMQRSLFDSGPSRAESPTASSMYGKEQKGFFDSSVPSTPMYNSSFTPRYSEAGDDSFDTMSQYSSFGMHESNSFGQRDSLSRFDSFSSNADNGGNDTFARFDSFRSTSDQGGGNSFMRYDSMNSSSDHDGIGTFARFDSMKSSNYNSRGYSFDDEDPFGTGPFKSTETTSHSPTKHGTDTWSAF

SEQ ID NO: 70977 - protein, 414 aa, Zea mays
  Coding DNA Sequence Number=SeqID_27602
  Homolog annotation: Hit_ID=Q5Z7N2; Match level="QueryCoverage=66%, HitCoverage=69%, E-value=1e-49, Identity=46%"; Hit description =Putative uncharacterized protein P0017G10.33
MEPPPDLNTHLPPRKRLLAGLRTAATAAEPLPPPPAHADLAARLREMALAANASASSPEETIEAARAAAQAAADAAVAARAVAAEKAAVAAKARAAARAAMEFIDSFSTRAGASRNGSGLQFKIRSRKKHVQVKMLYRPNGTLGPAEAPKPRRRKQSDEEVPHNLHRLMNSSPRISHAGLPKRPRTTAAGDAKNGAVAPGGGNGAGVCNGSSVQVPTEAGGWLGNGCSEAKSHERTVPLLNHEVSGEDSSRHAAKSSGGIADNGVGVGNSSAGQKVKVKRKELLLNQNTGKEREEPEEATQTEPFVRSITLDESKPNSKGKGRSNPNGNGTERLAGPADTKGRGEGVTPPKITSVWKIKKLKTSHCSSDSKVLHKISVKLSGDYDNRKVGSSMGTVAGMASMSDGGGPGGHRCT

SEQ ID NO: 70978 - protein, 286 aa, Zea mays
  Coding DNA Sequence Number=SeqID_27603
MEGPWVIRTSYCSEEEGFPHLLRSCTLRMGIRKKPEYVWKEYRENGVEKCSMAVYLGESRNYPNHPPFQVTFIGHRFPDTCQSVARKALKQLCQNYSREISETPLRYFPPSNKNTPTWRKRLQALSGGDPTEDDPTIVYMAGYLHTLDNHYDDLSSHCTHLNSRVESLEQQVKELKQEKASLQECLDIAEGEEANTREAYRTLKMDYDKKLKKLAPKKKIQKKTTNQGDSLPWQMASDKTTPTAFGIGAGFPLRAEGEADREESETHLPAPPQLPLDLAQVLANQT

SEQ ID NO: 70979 - protein, 170 aa, Zea mays
  Coding DNA Sequence Number=SeqID_27604
  Gene Ontology: Mol. function=transcription factor binding; Cellular component=intracellular; Biological process=regulation of transcription, DNA-dependent
  Homolog annotation: Hit_ID=O23594; Match level="QueryCoverage=34%, HitCoverage=26%, E-value=5e-23, Identity=93%"; Hit description=GTP -binding RAB1C like protein
  Pfam annotation: Domain name=LRR_1; Domain location=23-45; Score =11.8; E_value=2; Accession=PF00560.24; Description=Leucine Rich Repeat
  Pfam annotation: Domain name=LRR_1; Domain location=47-69; Score=7.4; E_value=13; Accession=PF00560.24; Description=Leucine Rich Repeat
  Pfam annotation: Domain name=Ras; Domain location=91-169; Score= -45.5; E_value=6.2e-06; Accession=PF00071.13; Description=Ras family
  Pfam module annotation: Pfam domain module=LRR_1::LRR_1::Ras; Domain location=23-45::47-69::91-169
  Subcellular localization annotation: CTP_CleavageSite=68; ConfidenceScore=5.40e-01
MGLHLHRNAFSSALPTALVGLTALQVLDLSFNAFNGVVPGALANLTCLVALDLSNNSLSGCVRVSMMCCAVTTTLNNLPPLVSILNDYLSKLLLIGDSGVGNSCLLLRFADDSYLDSYISTIGVDFKIRTVEQDGKTIKLQIVNYKVKGNFIHATAATLSEHETTELWSE

SEQ ID NO: 70980 - protein, 118 aa, Zea mays
  Coding DNA Sequence Number=SeqID_27605
MGKSKKGGSSSHHSGDKRKREPTPPSEDFGYFEYSEEEFSFESEGSPVWTYIRAVERAGLEGSDESTVSSDEGNSSYSSEEGSDNDDGGEGDGDDGGGSGDGDGDDSKGGNGSDKASG

SEQ ID NO: 70981 - protein, 151 aa, Zea mays
  Coding DNA Sequence Number=SeqID_27606
  Homolog annotation: Hit_ID=Q6QP51; Match level="QueryCoverage=32%, HitCoverage=22%, E-value=9e-07, Identity=57%"; Hit description =Putative growth-regulating factor 1
MQAACNRTKGARPFDFDASSMEAQAHTSCNRRAGYYVQETAPPLAPVPRLLDCGTNAATRGDPTHGPTVPTEHIGHGDRERGYSERDPSPRRKQAPSPPTDQRFEGWPLGRVQQPPQSARAPRPLLIRGSKADPSEGFNDRLRPLRLRAHY

SEQ ID NO: 70982 - protein, 65 aa, Zea mays
  Coding DNA Sequence Number=SeqID_27607
MEGGGIGWRVRLTAAKSGFERHRKLRLARPQGSAPVLASDDELRLARPQGSDSASAPEDDELRLA

SEQ ID NO: 70983 - protein, 89 aa, Zea mays
  Coding DNA Sequence Number=SeqID_27608
MLLGELCGLSATPTGNSCTIQSLNTDLDNATLDLSRVHLELEDAHARIVALEAHLDGRNPPEVQVPAMALSPPRKRIRYKEPGSITRLL

SEQ ID NO: 70984 - protein, 92 aa, Zea mays
  Coding DNA Sequence Number=SeqID_27609
MGSRFDANCWPEQFVSIGLPCAGGRELRCSIGGNVSHTIFVDSPEYDLELRRFNLISAWSPAYALEISISSLGVEDSLGAPEVHPMGVAPEL

SEQ ID NO: 70985 - protein, 208 aa, Zea mays
  Coding DNA Sequence Number=SeqID_27610
MGVAKGRLDNLNGLLNICDCSVTVVGDERLPPASINSLPASLVSSHISQPFFAYSPLFSSLPINYGQEQEGRKFIAPLRRQAEARAKSPSEDFGDSEYSEEEFSSESEGSPVYASPPVSSDDSNDSQGIAAEVWTYIRAVERSELEGSDESEISSDEENSSDSSEEGSGGDGNDEGDGSAGGDSGKGDSGNSKGDSGNSKASGKAPLV

SEQ ID NO: 70986 - protein, 130 aa, Zea mays
  Coding DNA Sequence Number=SeqID_27611
MDPGPHMLCIRFCPQNQMVRTIQTTRINTNFIPPPRLVPVYPVVVEEIPVDLPRIRVENRVILEDNSEEFLHTPTSLAESLAFAAGSSASAPPAPAVQAPAPGGDDPDDSGDDEEEEEDEENLNEEANEE

SEQ ID NO: 70987 - protein, 186 aa, Zea mays
  Coding DNA Sequence Number=SeqID_27612
  Gene Ontology: Mol. function=glucose-6-phosphate dehydrogenase activity; Cellular component=chloroplast; Biological process =carbohydrate metabolic process
  Homolog annotation: Hit_ID=A2XG20; Match level="QueryCoverage=50%, HitCoverage=13%, E-value=1e-42, Identity=86%"; Hit description =Glucose-6-phosphate 1-dehydrogenase
  Pfam annotation: Domain name=AFG1_ATPase; Domain location=1-186; Score=-148.4; E_value=8e-05; Accession=PF03969.7; Description=AFG1 -like ATPase
  Pfam annotation: Domain name=G6PD_C; Domain location=1-186; Score= -114.3; E_value=6.5e-07; Accession=PF02781.7; Description=Glucose-6 -phosphate dehydrogenase, C-terminal domain
  Pfam module annotation: Pfam domain module=AFG1_ATPase::G6PD_C; Domain location=1-186::1-186
MADTLVDIQMHKGVSDPLDVVAAEISYEAIILCLDEFMVTDIADAMILNRLFRQLFSKGVILVLTSNCAPDKLYEGGLQRDLFLPFIDTLKVPGLGLQLDASELNLLYRDRYNTEVPDSYEHLLLDVLDGDSHLFMRSDELVAAWNVLTPIIHEIDQNGVVPELYEAGDRGSINAYHLAAKHGVRG

SEQ ID NO: 70988 - protein, 73 aa, Zea mays
  Coding DNA Sequence Number=SeqID_27613
MVANASSTLRYGLHSSDTIRTPLRPGALPLHLALPTPEKSLSQRTWEEYQVPGTGNQQPREGGHPAHQSWGTR

SEQ ID NO: 70989 - protein, 106 aa, Zea mays
  Coding DNA Sequence Number=SeqID_27614
MESHDLRAEWESRLVGGYEIDGSGYDYGAGKWYSFRLERVVSIATTTQAKMKLWKETSRSSKTMTSSRRGLAATPSRLPVKAAFIYVSFPHFDLLQELYGRLRRMM

SEQ ID NO: 70990 - protein, 263 aa, Zea mays
  Coding DNA Sequence Number=SeqID_27615
MGSGPETSRWATWCFGCGKTPEGGTSSRPPWEGPFVIANVLKPGTYKLTNSQGEPRLTEPRDSYASGIRIPHSSPSAISNSCLDKVIPRTEQVFTFGSSSAEAILRAFSTESVTGPHGRVKVRVSGKADRGEGLPHLRDTDTSLITFHEKQLSLAQTSLRHTLQDTLILQARALTLEGGSSTLGIDDNFGKVRPSLGRRRGPKTSTPKDDVITTPGPSPPGSSPGIRPEQAAWPVTSGASANHLPRAPARPEASADQLRRRSR

SEQ ID NO: 70991 - protein, 163 aa, Zea mays
  Coding DNA Sequence Number=SeqID_27616
MSSRSLMHRVFPPSKPPDGGYPPSFHLIVGGTQLRGSCFKDVHHPRWGGGRAEPALYLPRGFVGHPLPRHSRERALTGPAGGPDFDNAGLVDGGRRHLQRVGLVGLAPGSPSCRRVAVAPCAREDHPRCHALLGRRSCSRVVLPLHRHGIFTRRPVPHSSGRI

SEQ ID NO: 70992 - protein, 46 aa, Zea mays
  Coding DNA Sequence Number=SeqID_27617
MTTDRPLELLHMDLFGPIAYISIGVRKITNTRDLKGILEMGSKNNR

SEQ ID NO: 70993 - protein, 166 aa, Zea mays
  Coding DNA Sequence Number=SeqID_27618
  Subcellular localization annotation: CTP_CleavageSite=36; ConfidenceScore=5.25e-01
EPAPAPLTSHTPPRRPGDYRHCRTPRTRFSSSRPPLALVVGERDLSPSWKLPLASIRDMCHLRVSLLYKASAPLHLTPSEATTLGRSVLRLSNTDLEVCDTSDELLHQVDAWFKGRSRVASRRSPSWCCCNRATRKRLLEGVAMKVAEMVKEVKKSRKGRSNMGGC

SEQ ID NO: 70994 - protein, 1070 aa, Zea mays
  Coding DNA Sequence Number=SeqID_27619
  Gene Ontology: Mol. function=aminoacyl-tRNA ligase activity; Cellular component=cytoplasm; Biological process=tRNA aminoacylation for protein translation
  Homolog annotation: Hit_ID=A5AFM3; Match level="QueryCoverage=98%, HitCoverage=99%, E-value=0.0, Identity=68%"; Hit description =Putative uncharacterized protein
  Pfam annotation: Domain name=Anticodon_1; Domain location=796-933; Score=53.2; E_value=9.2e-13; Accession=PF08264.4; Description =Anticodon-binding domain
  Pfam annotation: Domain name=tRNA-synt_1; Domain location=23-758; Score=-302.0; E_value=1.1e-06; Accession=PF00133.13; Description =tRNA synthetases class I (I, L, M and V)
  Pfam annotation: Domain name=tRNA-synt_1e; Domain location=502-757; Score=-224.4; E_value=0.065; Accession=PF01406.10; Description=tRNA synthetases class I (C)
  Pfam annotation: Domain name=tRNA-synt_1g; Domain location=412-770; Score=-257.0; E_value=0.00041; Accession=PF09334.2; Description=tRNA synthetases class I (M)
  Pfam module annotation: Pfam domain module=Anticodon_1::tRNA-synt _1::tRNA-synt_1e::tRNA-synt_1g; Domain location=796-933::23-758::502 -757::412-770
MSTNPDEPKSRARTDFLLNNELEVQKFWDENKVFQADPGNDSPSPGEKFFGNFPYPYMNGLLHLGHAFSLSKLEFGAAYHRLRGSNVLLPFAFHCTGMPIKASADKLAREIQQYGYPPVFPVAEGSSAAVADATQADQVDVVAPDKFKGKKSKATAKAGAQKYQWEIMKSFGLDDEEIARFQDPYHWLTHFPPLAKEVLKKFGLGCDWRRSFITTDMNPYYDAFVKWQMRKLKKLGKVVKDMRYTIYSPLDGQPCADHDRATGEGVQPQEYVLIKMEVISPFPPKLKSLEGRKVYLAAATLRPETMYGQTNCWVLPDGMYGAFEINDTDVFILTARSAFNLAYQHLSRVPEKPTCLCELSGSDLIGLPLKSPLAFNETIYALPMLTVLTDKGTGIVTSVPSDSPDDFMALQDLVTKPALRAKYGVKDEWVLPYEIIPIIHIPEFGDKSAEKVCHDLKIKSQNDKEKLAEAKRMTYLKGFTDGTMIVGEFSGRKVQEAKPLIKSKLLEEGTAVLYSEPEKKVMSRSGDECVVALTDQWYITYGEAEWKQKAVKCLDHMNTFSTETRNGFEHTLGWLNQWACSRSFGLGTRIPWDEQFLVESLSDSTLYMAYYTVAHLLQNGNMYGKEISSVRPEEMTDEVWDFVFCDGPAPKSEIPAALLNKMKHEFKYWYPFDIRVSGKDLIQNHLTFCIYNHTALLPEHHWPIGFRCNGHLMLNSEKMSKSTGNFLTLEDAIKKYSSDATRFALADAGDGMDDANFVTETANSAVMRLTKEISWMEEVTAAESKLRTGPPTTYADRVFSNEMNIAIKETEKSYNAFMFRDALKSGFYDLQLARDEYRLSCGAAGMNRDLLWRFMDVQTRLITPICPHYAEHVWQKIMKKEGFAIKAGWPAADTPDPTLRIANKYLQDSIVLMRKLLQKQESGSKKPKKGAAPAPPSEEKKMSIGLIYVNEHYSGWKEQCLKVLQSKFDSQSRSFSPDQEIAEALKECPIGQEMNLKQVQKLCMPFIKLKKGRGKGDLELIKRQLGLEQVEVLSASDEAARAKAGEHASLLEKNPPSPGDPIAIFLSKQS

SEQ ID NO: 70995 - protein, 285 aa, Zea mays
  Coding DNA Sequence Number=SeqID_27620
MQPGCTPPPAVTQDGDLQLDGGESEPGCGLSPSLSLKDFDHQGRGGDCSVPGFRTRVASEPLAAPASATAAGRGSSAGAIAKAGHGPTSNSTAFCPSLPYEFWHGRGPPGSSIRPEVSAAAVRPPGAEVVVVVAAAGAGDGAPFVGLPLLRRPSPMEWGYSPVDYLNRFTKHESPRVKVTSEHEQRRSWLENENLVGRSLTGLSVSGADAGVDQLRPRIGLAPLEDGWPRPQGDVCASESCFSRKVTSEKVMSEVSVSRRRRSPSARSALAAYVYSVVFRIRFSK

SEQ ID NO: 70996 - protein, 420 aa, Zea mays
  Coding DNA Sequence Number=SeqID_27621
  Gene Ontology: Mol. function=nucleotide binding; Cellular component =protein complex; Biological process=protein polymerization
  Homolog annotation: Hit_ID=Q9LKX6; Match level="QueryCoverage=84%, HitCoverage=82%, E-value=1e-137, Identity=73%"; Hit description=FtsZ1
  Pfam annotation: Domain name=Tubulin; Domain location=52-260; Score =309.6; E_value=5.8e-90; Accession=PF00091.16; Description =TubulinFtsZ family, GTPase domain
  Pfam annotation: Domain name=Tubulin_C; Domain location=262-384; Score=96.5; E_value=8.2e-26; Accession=PF03953.8; Description =TubulinFtsZ family, C-terminal domain
  Pfam module annotation: Pfam domain module=Tubulin::Tubulin_C; Domain location=52-260::262-384
  Subcellular localization annotation: CTP_CleavageSite=43; ConfidenceScore=5.70e-01
MASSAAAASSASALFRLPGSGHLRAPPRSGWRDHRRSRRATVRCSFAPVETARIKVVGVGGGGNNAVNRMIGSGLQGIEFYAINTDSQALINSQAQYPLQIGEQLTRGLGAGGNPNLGEQAAEESRETIATALRDSDLVFITAGMGGGTGSGAAPVVAQISKEAGYLTVGVVTYPFSFEGPSAESHFFLEDLRRRSIFPTVALEALEKLEKSVDTLIVIPNDKLLDVADENMPLQDAFLLADDVLRQGVQGISDIITIPGLVNVDFADVKAVMKNSGTAMLGVGVSSSKNRAQEAAEQATLAPLIGSSIEAATGVVYNITGGKDITLQEVNKVSQIVTSLADPSANIIFGAVVDDRYTGEIHVTIIATGFPQSFQKSLLADPKGARIVESKEKAATLAHKAAAAAVQPVPASAWSRRLFS

SEQ ID NO: 70997 - protein, 153 aa, Zea mays
  Coding DNA Sequence Number=SeqID_27622
MEEGSATVGEGSAREATAAAGRVGRPIADERDAIGKGPCRIHCRRGRGGGGWPRHGEADDDKGSWGRERARGRESRRPWLLGEVQAGLAGERGESAAPLLVAGARAMGPRRHGERRRRELGGHERVSGQTKREPMPRRLGGAPVGLVGGCTVV

SEQ ID NO: 70998 - protein, 625 aa, Zea mays
  Coding DNA Sequence Number=SeqID_27623
  Gene Ontology: Mol. function=hydrolase activity, hydrolyzing O -glycosyl compounds; Cellular component=extracellular region; Biological process=carbohydrate metabolic process
  Homolog annotation: Hit_ID=Q9ZTQ4; Match level="QueryCoverage=93%, HitCoverage=93%, E-value=0.0, Identity=73%"; Hit description=Cell wall invertase
  Pfam annotation: Domain name=Glyco_hydro_32C; Domain location=441 -559; Score=188.7; E_value=1.4e-53; Accession=PF08244.3; Description =Glycosyl hydrolases family 32 C termi
  Pfam annotation: Domain name=Glyco_hydro_32N; Domain location=48-399; Score=248.7; E_value=1.3e-71; Accession=PF00251.11; Description =Glycosyl hydrolases family 32 N termi
  Pfam module annotation: Pfam domain module=Glyco_hydro_32C::Glyco _hydro_32N; Domain location=441-559::48-399
  Subcellular localization annotation: CTP_CleavageSite=41; ConfidenceScore=5.08e-01
MARLPLAACAVAAAFYLCLHLASSSSSAPRLAPAPSDGGRRAGRTAYHFQPAKNWQNGPMYYNGMYHLFYQYNPHGALWGVGNLSWGHSVSGDLVNWAALDTALDPTSPFDANGCWCRTWRSPGTRRTRSFAGGTSPGYNPVIPLPVRRPGRTSSGTLRRRGLGRDGLWRVAVSAEVRGVASTLVYRSADFLRWERAPAAAPLHASRAAGMVECPDLFPVKEEGDDGDGQGLDASASGAGLRHVLKLSVMDTLQDYYMVGRYDDAADAFVPAEPERGDDVRGWRRLDYGHVYASKTFFDARGSRRVLWAWANESDSQADDVAKYRCPNGPARPARVPQPRPKHGTPAWSPPARMISFLLSSAVRPTPTHSSLAWLACVTQTFPRKLWLDEDGKQLRQWPVEEIETLRRKRVVLRRGTALATGGMNEIVGVAGSQADVEVAFKVSSLAGAEALDPNWLLDPQKLCGEKGASVPGGVGPFGLIVMASSDLREHTAVFFRAFRYHGRYKLLMCTDLTRSSTRAGVYKPPYGGFVDVDVEEHETINLRTLIDHSVVESFGADGRMCITARVYPEHAETSNNHMFVFNNGTGTVEVYKLEAWELAAATVNSVGGNDSLVISKSNDQSESY

SEQ ID NO: 70999 - protein, 205 aa, Zea mays
  Coding DNA Sequence Number=SeqID_27624
  Homolog annotation: Hit_ID=A2XYP0; Match level="QueryCoverage=86%, HitCoverage=28%, E-value=3e-13, Identity=35%"; Hit description =Putative uncharacterized protein
  Subcellular localization annotation: CTP_CleavageSite=72; ConfidenceScore=5.02e-01
MEALLPRSGGVISPKISTILQSHVYPRFGRVLRALARVKSALLDALGKTKWGARRRKQHAPSIARGRRSKKRKSSKGEFSKKPPHLTWSGGLSPLRGAAVDALDVDYHVYPSCDYESVWNAVVVPAATGEYCGYLRWLEEEMPDEVGVVEEEEEEEVEEDDGVASGGGNEIDRLAEQFIARCRANFLLEKQESYDRRQEMIARSL

SEQ ID NO: 71000 - protein, 146 aa, Zea mays
  Coding DNA Sequence Number=SeqID_27625
MDGGEPDGNGYARWVVVIRLSPVHRLPLAPATSALASTLAPAAPVHRLQQATASGYSHEGRMEVSGKKLDFRPQQVEEGHTDVPGMRLEFRLGKLEVDHMKTVDIDTNDRDKGMVVDAQPEIVHGGVRLKHRSDDVVKKTHLTEGL

SEQ ID NO: 71001 - protein, 260 aa, Zea mays
  Coding DNA Sequence Number=SeqID_27626
  Subcellular localization annotation: CTP_CleavageSite=64; ConfidenceScore=5.76e-01
MATTQGVAPFFKGDSPHSRPQASRTKSSPTRSKVPPYDTGAGSHTTCKLAWDRSSQTAARGVCNCPAVTSTPPLSPKPTGERADPACRRHATAPRGCTPSTSTRPAWSPRATRHVTGAPVTTCEKLHRPLHQYRAFSTTEPMPRLEATLRMAQLCQTELIGHGSVSRGRRGDRRYGQKWADSNGGGWRAEAAVKPSAGSRPLLGQQESPLPLREDDVPVFRSSNGSRNSCPANHTSRRINSATGQATPLAGEAGDASPPP

SEQ ID NO: 71002 - protein, 451 aa, Zea mays
  Coding DNA Sequence Number=SeqID_27627
MGSARVVFVSLWEERNLVEVGTFQPSLGFKDFHQAAWLHPLTNASRIFIILAEEEGEVSRGLPSRGLTSRFFLQLLGVETILQLYGGGALQPCRGRRTVAAQPGCNIPSFVRATVASRTGGVSQHVVRREGGTRVPGWSHSRFRGEDGSEDLPVRFGAPGARWCGVGGQLEKAFSAVETVSATRGPTSDSLALMSGSRPSSGDTNESLPAVASALGPSLLLQRSPASHPEFVVPQALRCGGCSYPREWNQSSVCNGTLSAGVCSLWLSGPEHLGILGESLGSVGLATQGFSCSVKENPRPLCDEPEPEAAVRSVDIFLRGGDPSTVLLSEAGSDSAEGGVDAEGAAAPPTDDLFIDSRIAHPSESYLLRKLMSEDSVIDIVEKARKIVSAEKFSSVKTCSVSRIAYPSVSYLSQKVMSEDPTIEVVEKRERRSDRKTFSEENFDAEGVPPF

SEQ ID NO: 71003 - protein, 739 aa, Zea mays
  Coding DNA Sequence Number=SeqID_27628
  Gene Ontology: Mol. function=transcription regulator activity; Cellular component=nucleus; Biological process=regulation of transcription
  Homolog annotation: Hit_ID=Q5Z988; Match level="QueryCoverage=14%, HitCoverage=48%, E-value=2e-17, Identity=56%"; Hit description =Putative uncharacterized protein P0548E04.5
  Pfam annotation: Domain name=F-box; Domain location=174-229; Score =24.5; E_value=0.00038; Accession=PF00646.24; Description=F-box domain
MVESFLLRRLPIASYAQPQPQPAAAPGFDFLSEVYGAASFAGPNAGDYGGEMGFLDIVEPKAASATLVDGATGLGACKVEPGLAKSGGAFGTGAGAAPPAALASKKKRVEGMLSKNLMVEHRRRKRLNDRLHATEMKGKIGAISSRGVLRFRPGGHAGAGRAPAAEPDEASREGCWAQLPFELLRMVLVRVEDQEPRWPARSAIVACACVCRCWRAAVKIVRVPEASGKLTFPISQAGPAGEDQAAAGRDRAVAGGGAGHAQRFPGPQPRRDGGQEHPKSDVVKEGGDTRVEIYYAACTSTVMARGISGGALFSPTLLRGDVSGRALQKKSPAPLRGSCNDQGQQRAGAVRLGAARRAVSRAVRASSSRHLGPVWALVSEEAASGERAAEGEGEDVELYSPARSLSARSRRSGAAFVLGRLYDQTPSPPPLRLRLLPRMGGRRGSRDPDVSSPTAPGHRRGLPLSLSVGELPVLLGKSPLQAYEAFFRSFDDFGKPYGLLSVALPFSLTPDEGDYCCLRYALLSPKPTSAPDGGKFQVDFSSSRRLLATGARRGDATADLAAQGRFRAGGGRRRRRPRPVADEARLDPEFIGSNLVVAARILSSSAHLIMASSKEDNMKALLKVLVDCAEDATKTLGGLVDHALDHMHDEEILARTLYAIKDKLELLQQDALEAKVQAFPEIVKYDGDDISVEPTSPSTPPTVTEPSVDEEEFYCPDVSDEWYFSDSDRSTRNSYWNIY

SEQ ID NO: 71004 - protein, 179 aa, Zea mays
  Coding DNA Sequence Number=SeqID_27629
MGGKGVVPDAIALLRISLPPSRLLPSLFPPPFCSLPLEPSPPIALCPSPPPVAGAQPGHGLVPHSASDRDHNGRKTKTPTPPPANPSDFDSIRLWCLQRREWRTATVRRRRGPVEAHRLRRHNRAILVKADQSAARRLREKAAEAEREARHGPSWRSGWQGQGGERLGQEGKGRGAKEG

SEQ ID NO: 71005 - protein, 156 aa, Zea mays
  Coding DNA Sequence Number=SeqID_27630
MGKSKKGGSSSHHSGDKRKRELTPPSEDFGDSEYSEEEFSSESEGFPAPASPPASSDDSDDSQGIAAKVWTYIWAVECAGLKGSDESEYSSDEENSLDTSEEGGGDGDGSDGDGGDGDGSGDGGEGDGDGGGKGGSGDGGDDSKGSSSKGSSKASG

SEQ ID NO: 71006 - protein, 76 aa, Zea mays
  Coding DNA Sequence Number=SeqID_27631
MANCYCLPPEAGVVVALLVQWSLASRLELVILQPLRCGGFETALNESVKNCKALAEAAGQKEADCVAMSEAISAFC

SEQ ID NO: 71007 - protein, 79 aa, Zea mays
  Coding DNA Sequence Number=SeqID_27632
  Gene Ontology: Mol. function=heat shock protein binding; Cellular component=mitochondrial inner membrane; Biological process =intracellular protein transport across a membrane
  Homolog annotation: Hit_ID=Q5ZCC4; Match level="QueryCoverage=56%, HitCoverage=40%, E-value=3e-14, Identity=84%"; Hit description =Putative DNAJ domain-containing; methylation-controlled J protein
  Pfam annotation: Domain name=DnaJ; Domain location=12-79; Score=-2.0; E_value=0.0066; Accession=PF00226.22; Description=DnaJ domain
MANRSCIWLCKTLFCIVDCTVYKVEFEMTDKDEETANAEKVKEAHKRVMVANHPDAGGSHYLASKINEAKDVLSGKQKE

SEQ ID NO: 71008 - protein, 210 aa, Zea mays
  Coding DNA Sequence Number=SeqID_27633
  Homolog annotation: Hit_ID=Q6QP51; Match level="QueryCoverage=26%, HitCoverage=36%, E-value=3e-10, Identity=49%"; Hit description =Putative growth-regulating factor 1
MPGEEAQNAPRRKHRKYLDVQATETATARTKRFMGARRAVAPEIWFSVLVGAHVPEIRVRVYVAAQPSGTVKAASGHSGSAPTTDQGFEGWPPKWFDSRLRTRRARDDSGYVRYMAEARATLPRGSGAALANPAPAKPLTASTYQPENSEADHAPGVRLTAAKSSLRRHRKLRLARPQGSDSTFDFERRLDLGGVTASPDLGLGSTTPQG

SEQ ID NO: 71009 - protein, 264 aa, Zea mays
  Coding DNA Sequence Number=SeqID_27634
  Gene Ontology: Mol. function=DNA binding; Cellular component=nucleus; Biological process=metabolic process
  Homolog annotation: Hit_ID=A2ZPF8; Match level="QueryCoverage=85%, HitCoverage=87%, E-value=2e-59, Identity=53%"; Hit description =Putative uncharacterized protein
  Pfam annotation: Domain name=Myb_DNA-binding; Domain location=30-75; Score=60.0; E_value=8.2e-15; Accession=PF00249.22; Description=Myb -like DNA-binding domain
MERDYSSTDGGGCEMPGKKARKPYTITKPRERWSTEEHARFVDALLMFGRDWKKIEEHVGTKTTVQIRSHAQKYFLKVQKLGLAAGLPPMYPRRHFAIQQQSSVAGGSSAAAMPLLHGRQPTCAPVGMPGGNRFIGAPSLSGTSIDWAGGGGGGGGSASEASAMGVVEDQQQIELPLSPEDMPFAHVYRFVGDMFDADAPVPVEAHLQKLKEMDDITAKTVLLVLLNLENNLLAPQFEPVVKFVLSVQMEPTRLSDTSKDPRLN

SEQ ID NO: 71010 - protein, 128 aa, Zea mays
  Coding DNA Sequence Number=SeqID_27635
MSEIVDLKKLFAPSTIAVVHWFDDLLALFQYHDYFLRCNLIIVDAELAVHNALDHINVVVKSRTMGLCSQLKPLDFGFEILKEELTESLLPQRRRIADLLMCLALRLLLQPSWVRQIPINKKNKKDSY

SEQ ID NO: 71011 - protein, 149 aa, Zea mays
  Coding DNA Sequence Number=SeqID_27636
  Homolog annotation: Hit_ID=A2X161; Match level="QueryCoverage=42%, HitCoverage=12%, E-value=2e-17, Identity=71%"; Hit description =Putative uncharacterized protein
MAAHPAVPAPYPHQPPEPTSPSRSSGESTCRRRERGAWIQERAGRVGGRGEDLHLCIDDSQARWHAPPEHAHPAVPVGSPLLARLSVRGLNLRAVNNAMVAMLEVIHLHSVFLTDASLRRMVTVCPCLRNLDLRYCCRLATSTSLMSGA

SEQ ID NO: 71012 - protein, 94 aa, Zea mays
  Coding DNA Sequence Number=SeqID_27637
  Subcellular localization annotation: CTP_CleavageSite=8; ConfidenceScore=5.30e-01
MEPTRAVSAMEPTRGSRPRCTPPPSRRWKVPRIPAHPLARISPCPRMDPARSPGLRTLSWWRRPLGRMLMNTVQAREASARLPHRDSICVNETP

SEQ ID NO: 71013 - protein, 146 aa, Zea mays
  Coding DNA Sequence Number=SeqID_27638
MARIRVRTPSIAACRGQARHDFDHRKSVTEPPKSLGPPTIVLVQWTSDNPAGAPGHLTSSISVFFTLPKSVSPVMQILQHIGGTTLEQKQQKFAASSPKTTWDNALSTKCTFASLTRQKKKTLKDMLAFWETRNSLSPEEKEKEKL

SEQ ID NO: 71014 - protein, 161 aa, Zea mays
  Coding DNA Sequence Number=SeqID_27639
  Homolog annotation: Hit_ID=Q5NKQ2; Match level="QueryCoverage=40%, HitCoverage=8%, E-value=8e-09, Identity=46%"; Hit description =Putative uncharacterized protein 9C20.3a
MMISPRYSKINVFSYLKWSYNTIDVNYTYLYEAVVDILMCKQAAASIMRKVDRPPTNLKRLIIESSQECFSVDIPRSADMGDPTNVDAADAKKIPMPNVDGDDDFEPPKKKCNILMDAPNKTQKLDPRDMTLRIGPDKELKITKQTIHQIWSSKFGWWKAP

SEQ ID NO: 71015 - protein, 150 aa, Zea mays
  Coding DNA Sequence Number=SeqID_27640
  Gene Ontology: Mol. function=nucleic acid binding; Cellular component= nucleus; Biological process=mRNA processing
  Homolog annotation: Hit_ID=Q10KN8; Match level="QueryCoverage=42%, HitCoverage=13%, E-value=9e-19, Identity=77%"; Hit description =Polypyrimidine tract-binding protein, putative, expressed
MDELLEMLGRLEPDIGCEDAGGASTGEGNHGEEDAVGNAEGEHVSQCDNEEHVVGHSRQQPLLCGATAAPPLSLCSSSHAASALRSSRDYNNPYLPINYSAMDDTLQPAVGADERKGEAQGNVLLASIENMQYAVTVDVLHTVSQIVKTI

SEQ ID NO: 71016 - protein, 326 aa, Zea mays
  Coding DNA Sequence Number=SeqID_27641
  Gene Ontology: Mol. function=DNA binding; Cellular component=nucleus; Biological process=regulation of transcription
  Homolog annotation: Hit_ID=A2XJP9; Match level="QueryCoverage=100%, HitCoverage=100%, E-value=2e-95, Identity=60%"; Hit description =Putative uncharacterized protein
  Pfam annotation: Domain name=NAM; Domain location=5-131; Score=312.6; E_value=7.6e-91; Accession=PF02365.6; Description=No apical meristem (NAM) protein
MEEGLPPGFRFHPTDEELITYYLTRKVSDFTFSTRAIADVDLNKCEPWDLPGKASMGEKEWYFFSMRDRKYPTGIRTNRATDSGYWKTTGKDKEIFHGGALVGMKKTLVFYRGRAPKGQKTSWVMHEYRLQTKFPYKPSKDEWVVCRVFKKCQVVKVRPPMQDDDASLSPCHDHDASLSLSELDVSSILGGLASAAAAHASSASPHHQGSAAESFAAAHRMDMSAYMSWMAAANPGAAAAMLPWATAPPPGLSSFGNVFAPPSQMLQRPLPFAGCSQPRDLGGVVASGEHAMFGTSVMKAGTMEYDQQQAPPEQQLGVDESTWRAF

SEQ ID NO: 71017 - protein, 250 aa, Zea mays
  Coding DNA Sequence Number=SeqID_27642
  Gene Ontology: Mol. function=protein binding
  Homolog annotation: Hit_ID=Q7XAK8; Match level="QueryCoverage=30%, HitCoverage=9%, E-value=3e-19, Identity=70%"; Hit description =Protein phosphatase regulatory subunit-like protein
  Pfam annotation: Domain name=LRR_1; Domain location=120-142; Score =14.6; E_value=0.38; Accession=PF00560.24; Description=Leucine Rich Repeat
  Pfam annotation: Domain name=LRR_1; Domain location=147-167; Score =12.2; E_value=1.7; Accession=PF00560.24; Description=Leucine Rich Repeat
  Pfam annotation: Domain name=LRR_1; Domain location=98-118; Score =8.4; E_value=8.4; Accession=PF00560.24; Description=Leucine Rich Repeat
  Pfam module annotation: Pfam domain module=LRR_1::LRR_1::LRR_1; Domain location=120-142::147-167::98-118
MDRITALLALFYQVLLAVEVVFSWQMFAFRTLLRGESDMPQAACCWSFYVSPYQICFSLIRELNCCTAHLFREDHTVAFLMFGSFCIVRVIAGALPKGLHMLILSKNNISIIERLRELTRLRLLDINYNRISRIGHDHLLGLASCSSLKELYLVGNKISEVDGLHRLLKLKVLDLCHIQSSVATILGVGAEDARKILNNYGTCPILSMVMSALVNEMYDIKRWLRGVPSFRLEPLFRRRVPQLHTALEHI

SEQ ID NO: 71018 - protein, 118 aa, Zea mays
  Coding DNA Sequence Number=SeqID_27643
  Homolog annotation: Hit_ID=A2XGH6; Match level="QueryCoverage=36%, HitCoverage=13%, E-value=1e-07, Identity=47%"; Hit description =Putative uncharacterized protein
  Subcellular localization annotation: CTP_CleavageSite=85; ConfidenceScore=5.55e-01
MTTTVLGPLRKQGDAGSGHLSPATVGRRIGNRLPPRQGSTPSPSSLKKLSLRSLKRSLDLFAPAHALLFTPDAESKRIRTGCKVSAEYGAVKDLTPEQGRGGQGKGPAPPSSTALALP

SEQ ID NO: 71019 - protein, 246 aa, Zea mays
  Coding DNA Sequence Number=SeqID_27644
MAALGPLTEARGRQQGLNSPDSCPSARLQRSSDSHDITPTGCQNLSGCHDSLVTPISTKLQRPDGRNSVQGSVHSRDTISPRPSPASGKDSRPRRIHVSPEGSLKQQAHLRLARGPARAGFAEKQPWPDRLASRPDRRSIQCKDRLTPYPDARSSVDKAEEAPPHPTPGLGLNLDTGRRTPPRPTPGLGLHLDLGRRTPPRPTPGLGLSLDLGRRSPPRPTPGLGLSLDLGRITASPDLGLGPTTL

SEQ ID NO: 71020 - protein, 32 aa, Zea mays
  Coding DNA Sequence Number=SeqID_27645
MADLPTGCKHVGYKWMFKRKRRPDDTIKKYKG

SEQ ID NO: 71021 - protein, 180 aa, Zea mays
  Coding DNA Sequence Number=SeqID_27646
  Homolog annotation: Hit_ID=Q6J9V9; Match level="QueryCoverage=36%, HitCoverage=33%, E-value=3e-07, Identity=44%"; Hit description =Putative uncharacterized protein
MEAQAHASCNRRVGCFVQATAPPIAPLPRLLDCGTDTATRGDPAHDPAAPAWRDGQCGQKWTGGASGRRSERRFAFAIMTASKKGPGKGDTPKRILPREGTRLRASLLIRGSKAGPSEGFNSRLRARGLHTHYWSEVRRPAPRKGSTAASGYSGSAPTTDQGFEGWPPKGSQPPQTRSEG

SEQ ID NO: 71022 - protein, 89 aa, Zea mays
  Coding DNA Sequence Number=SeqID_27647
  Subcellular localization annotation: CTP_CleavageSite=18; ConfidenceScore=5.58e-01
MASLSPATSSPWTPPAPSSSHGVLLHVVEDKQPHCQSAQPPSSSSRTQDLTSTLLATALINLAPGIASQFQPSTKRSKRPNSPSGKDFL

SEQ ID NO: 71023 - protein, 51 aa, Zea mays
  Coding DNA Sequence Number=SeqID_27648
MGKPVPSLLMILLSRVTALVPTKIGMGDHVSGRVRRAICCQVHSEKDLLDI

SEQ ID NO: 71024 - protein, 89 aa, Zea mays
  Coding DNA Sequence Number=SeqID_27649
  Subcellular localization annotation: CTP_CleavageSite=18; ConfidenceScore=5.57e-01
MASLSPATSSPWTPPAPSSSHGALLHVVEDKQPHCQSAQPPSSSSRTQDLTSTLLATALINLAPGIASQFQPSTKKSRRPNSPSEKDFL

SEQ ID NO: 71025 - protein, 402 aa, Zea mays
  Coding DNA Sequence Number=SeqID_27650
  Homolog annotation: Hit_ID=Q33AL8; Match level="QueryCoverage=43%, HitCoverage=23%, E-value=7e-07, Identity=27%"; Hit description =Retrotransposon protein, putative, Ty3-gypsy subclass
METVDGAGYATPPQYAVQLFEKHRVPRCRDTIEVIALHGLTTFCGFHPLELSTHPIGLFPAKKENDPMWKDRVEHAKDIWALYPGQTAHLTVRCMDALYRLQVRRGEAMSHLMALFEATKITLDNREELVVDLSTEMVEKDLQVEQMSNEIQELEELMGTGENTIEVLEDQLINTQQQLTEANQHLDMHHQEIQDMEANEGVDIEGGEEPEPASSLDTAGSGRPPSPESSVASKIFVLPFRIFRHMAGRACHGQNERIPPPLPPTLQELMAQQNEILRQLAQRQPPPQHYGGGDHQRHPAAATYQEFLGTLRPLFTRAEDPLDADAFNDLCQYAGYHADTDEKKRDRFRRRLSTKLRDRLNTVRANSYNELVNMAISQEDCITARQAEKKRKAPVAGPSAQP

SEQ ID NO: 71026 - protein, 125 aa, Zea mays
  Coding DNA Sequence Number=SeqID_27651
  Subcellular localization annotation: CTP_CleavageSite=37; ConfidenceScore=5.15e-01
MSGAPEDSNSNSSSSGNSRGNSAIIHRTVRYTPDSVRYSKEERPQELASFGNLLQLLRYNSPDCPVYLRGNGYFGANGYLQRIYCAPACAEVRHAHTGAPDSLHYMSGAPPDIQAGPEELCVPSD

SEQ ID NO: 71027 - protein, 94 aa, Zea mays
  Coding DNA Sequence Number=SeqID_27652
  Subcellular localization annotation: CTP_CleavageSite=80; ConfidenceScore=5.07e-01
MGKPVPSLLMLLLSRVIHGIKHLAINDFCQVITFPLVTQCSSMDQAVSLAARSRRFESSFNLASDRTCTHHNRNGRPRLRSREEGNLLPGSLRY

SEQ ID NO: 71028 - protein, 112 aa, Zea mays
  Coding DNA Sequence Number=SeqID_27653
  Subcellular localization annotation: CTP_CleavageSite=53; ConfidenceScore=5.15e-01
MAHRSCSGPPEASSPSFSPLCLWIHGPFPAIEFAVAPSFSLPTSGDPGATLARASLNSSDLTATERSGAACSRLFPPDNEQSEVPECVVGDLPEQPLGEGKCPLTHYILHTL

SEQ ID NO: 71029 - protein, 103 aa, Zea mays
  Coding DNA Sequence Number=SeqID_27654
  Subcellular localization annotation: CTP_CleavageSite=26; ConfidenceScore=5.22e-01
RAPRDSNSLRVRPKSGLARVSFLCISSSTIRSPIMEDFNTSVGATRQPVFLPQQPTRAIKQRQLKEEVMHVSTVGNKAIGQIIAQRKQLSSSQLLMPQSDRML

SEQ ID NO: 71030 - protein, 154 aa, Zea mays
  Coding DNA Sequence Number=SeqID_27655
MHDFLLELALLDCSCWLLGQEDRLPGCSDAGIDFLLAGCSDGTAAAAEETASGTAAIGSDADAGAGSGGEGVVHQLIVEGINQSSQEAGEKLLLPHYHQSLGHMVATKVIPELLPSDSFRVGMGGEVLVDNDDEETKEDEATKEVESKEEVSEE

SEQ ID NO: 71031 - protein, 50 aa, Zea mays
  Coding DNA Sequence Number=SeqID_27656
MPPHRLTVSYLLALESAELGVPAPITEVPKGRTVRTRGADRPRSAERSNG

SEQ ID NO: 71032 - protein, 123 aa, Zea mays
  Coding DNA Sequence Number=SeqID_27657
MTVAGGREQQSRRQPGSRPVQGQESLLPRREDGGASGRRSGRRFAFAVITAPKKVRRLALRRVQQSPQIAWARHPLLVRGSKAGPPKGSMAASGYSGSAPITDQGFEGWPPKGSQSPQTPSEG

SEQ ID NO: 71033 - protein, 190 aa, Zea mays
  Coding DNA Sequence Number=SeqID_27658
MEETHLHVFDASCPRQSTLARAPACPAPHPSQASAVARARAYKALPGFDCTLPCTLKPHRSLVRRRLPVRSVSAAAQSPCHRRPANRAIPNPVQPSEKTVHTSVKLPERGIGVCFTGEASPRSPELSTPPDSPWFGRYTRRRREHPPARVDRAIPAIPDVKPYLDVTARVSPSQPHPSPNLPRRRNFENP

SEQ ID NO: 71034 - protein, 123 aa, Zea mays
  Coding DNA Sequence Number=SeqID_27659
MAAPTDEAAGSGTPGSTDSFLADWRERIILPAVAAGVLGAAFGLLSRHRARLGAARAAVTYAANLAIVAGCYGGLLAAGRISGYYGIARFVKVKLVGVRLLKMTKEVMQLLVTCFSGIARSMR

SEQ ID NO: 71035 - protein, 352 aa, Zea mays
  Coding DNA Sequence Number=SeqID_27660
MKGRITAGQLHAPCAVVRLLRASEERNPMGVGTLPPSLGFKDFHHAARLQSPTSASRMFIIRAGEEGEPSWGPAFRMGWRPASSSSIRGRRAFTSIAEEANFGYAVPAYCRRRQPPHARFLDLGGFGAASDAASCRLVGAWLSVHRTGDGRVVRRSATSTASPASPAAPGGGSYKTSYACGGGGHVLGWSCPHSRWRTGARTSSRVLRQSLPTGAEVAAIVSAEVVAAAEVAATVGAEVVASAGEPLGASYHAALLVWRVAEHAGPRYETRLSGYTGSGPPQETNAHSLAPDPRLRTTPWNGVRSLEPAPRLSDLPTFVSRALNCKPGCSIRMSSYQQAGFMGTDPTGLAYM

SEQ ID NO: 71036 - protein, 94 aa, Zea mays
  Coding DNA Sequence Number=SeqID_27661
RDVHRPVSAVGPSTAGQSSLRSTRDTFADMDDDDDDDDDDAGATGQDVIGPSQLQDAPTTQPSQLTPHRQRPRDPYTPGTDALGAKGKGQTRRK

SEQ ID NO: 71037 - protein, 296 aa, Zea mays
  Coding DNA Sequence Number=SeqID_27662
GRGKEKEKNEWAEELKFDPVLCKYGIEAKYGLVPFELGVGYFCGHMVDYDEETRKYGWESYDNKGEVICTIKSKRLMGQKMRCGSQLVDSNINNHIQDMRRYAKSVSFDSPMRAQQRRLKAENEKRAHDAREWEAARAEKQMLDNLADRLKGKIGCAVNYIVDEAHARYVQEKMATVELMEEDDDDTSRLKEDDTSRLSELITLAEAGLHAQEEEDEFMFQAAEEVEAAYYKQKCDEVEAEDQLFSQAADEAEANYYKRTTEKCDAGQCNKWNEVVVEDCAMDDSEDELLIDCDPD

SEQ ID NO: 71038 - protein, 137 aa, Zea mays
  Coding DNA Sequence Number=SeqID_27663
MRNKLKVMKMKIKKMSHLKRRTMIKGEMKIMKTRKMIKKYRVKGLHTLESTKQFNEITPSTPYLVTFIRGIEDALRDPNWVLAMQEELNNFIRNDDGKLIKTPMGTNGHLDLDMGGKSVDQKADPKEVHLRAVKKIM

SEQ ID NO: 71039 - protein, 1633 aa, Zea mays
  Coding DNA Sequence Number=SeqID_27664
  Homolog annotation: Hit_ID=A2Z149; Match level="QueryCoverage=100%, HitCoverage=100%, E-value=0.0, Identity=78%"; Hit description =Putative uncharacterized protein
  Pfam annotation: Domain name=WD40; Domain location=190-228; Score =24.0; E_value=0.00054; Accession=PF00400.23; Description=WD domain, G-beta repeat
MEWTTVQHLDLRHSGGRRGASARPMQPHAAAFRSSQAIVAVAIGTHVVEFDALSGSKIASIDLGARVVRMAYSPTTSHVVIAILEDATIRSCDFATEQTLVLHSPEKKTDHVSIDTEVHLALTPLEPIVFFGFHKRMSVTGYSLSLAVAVDSTIKLIGAGAFGFHPTLEWIFVGDRGGTLLAWDVSTERPSMIGITQAGSHPITSVSWLPTLRLLVTISKDGALQVWKTRVIINPNRQPMETHFFERAAVETMDITKILTLQGGEAVYPLPRIKNLAVHPKFNLAAVIFADMSGTEAAKNKAAYTREGRRQLFALLQGARGSTAAVLKEKLLALGSSGILAEHQLQAQLQEQHLKGQSQLTISDVARKAFLHSHFMEGHAQSGPIPRLPLVTISDSSNLLRDVPVCQLILQLQPFHLELNFFNKETRVVQYPVRAFYLDGFNLMAHNLSSGADNLYKKLYSTIPSNVECHPTNMSYSPKQHLFLVVFELSGTNGVVHEVVLYWEQTDLQTVNSKGSSIRGRDAAFLGPDDNQYAILEEDRTGLNLFSLKAVATKEALENNAAVLEENTFADNAASATSTERQGPLQFTFESEVDRIFSSPLESTLLYVISGKHIGLAKLLQGYRLSADNGLSITTKTDGKKFIKLKPNETVLQAHWQTTLRGPVVGILTNQRVLIASADLDILSSSSTKFDRALIFSSATAISMLGWDNKVRSILSTSFPRSVLLGALNDRLLLVNPTDINPRQKKGVEIRACLVGLLEPLLIGFATMQQHFEQKLDLSEVLYQITSRFDSLRITPRSLDILTKGPPVCGDLAVSLSQAGPQFTQIMRCNYAIKALRFSTALSILKDEFLRSRDYPQCPPTSHLFQRFRELGYACIKPSIHGIKTVFLDEFDCLSVGGLPVLDILRLWVLVLQFLGQGFFWVISEEQLYGQFDSAKETFEVITDHESMLDLFICHLNPSALRRLAQKLEESATDSELRRYLERILRVRSTGWTQGVFANFAAESMVPKGPEWAGGNWEIKTPTNIKNIPQWELAGEVMPYMKTTDAGIPSVVADHIGVYLGVMKGRGNVVEVSEKSLVKAIAAASSENTQPVSSASAEKSKAIPRGDSVGDTLARQLGVQIASSDEQAKAAEDFKKTLYGVVDDGSSDEDESTSKTKKIHIRIRDKPAAPTVDVNKLKEATKQLGLGPPLSRTRSLSGTPQDFNQAPTQPGGPAAAVSPAMPNSAIDLFGTNTLVQPQAPSSSTGPVIAGMGVTAGPIPEDFFQNTIPSHQLAAQLPPPGIVLSRMAQPAPGIEQGRPVPNQMMANVGLPDDGVPPQAPPQQSQFPPQQSQFPQQPGIPMDSIGLPDGGVPPQSQPLPSQGQFLPSQAQGFQLGIPAPSQPIDLSALEGPGAAKQAARPPAPTAVRPGQVPRGAPAAECYKMALAHLEQNQLTDALSCLDEAFLALAKDQSREADIKAQATICAQYKIAVALLQEIARLQRVQGAGALSAKEEMARLSRHLASLPIQAKHRINCIRTAIKRNMEVQNYAYAKQMLDLLYSKAPPTKQDELKSLIDMCVQRGLTNKSIDPFEDPSQFCSVTLSRLSTIGHDVCDLCGAKFSALSAPGCVICGMGSIKRSDALAGGPGPVPSPFG

SEQ ID NO: 71040 - protein, 57 aa, Zea mays
  Coding DNA Sequence Number=SeqID_27665
MWATILQSLLLRQVSLQLPGNSLRLHLRCNKVCDNKKDLRTTENPSKQQKVVLRNAE

SEQ ID NO: 71041 - protein, 177 aa, Zea mays
  Coding DNA Sequence Number=SeqID_27666
MASACGALCKSTSLASKGLGGAEAVVVEPAPLDGYDNPLLDACSLRHETSNTIITAAGSVLCPFLLRCCCGLEGVFLMACGLSGWVLIGYEGPWASSEIQLCADGAPQAWHTSQIVGRAPRTSLVKIVDSVEGDSWGDEGAALARNFSWSSAKMPMTSPTYMVSSPSGGAKPGGGAC

SEQ ID NO: 71042 - protein, 33 aa, Zea mays
  Coding DNA Sequence Number=SeqID_27667
MDEGCTQPLSSDPVINIAHLSSSTHKRLAYGDH

SEQ ID NO: 71043 - protein, 86 aa, Zea mays
  Coding DNA Sequence Number=SeqID_27668
MSGELAEQQSLRVNGRLQKVKSDEQCAAEVREAKSEILHMDPCWQAERRPVTERLEPVRSDANWPIGQQSCTSGDVQSAGGLVYNP

SEQ ID NO: 71044 - protein, 98 aa, Zea mays
  Coding DNA Sequence Number=SeqID_27669
MGTLPGGLFAECPLGKEGGFAECCQEDTRQRYLRCRVSPLTLGKAAVSVNRRRFAECFRHSAKLLIPVVKVQWGPSIWSSGRHGRVIRASTRSRKAIA

SEQ ID NO: 71045 - protein, 58 aa, Zea mays
  Coding DNA Sequence Number=SeqID_27670
MAPIHRVHKTGLPRASRWPPWIHVCFATDNYFCIVFTYLLGVVFRFMIKTPFWVALHL

SEQ ID NO: 71046 - protein, 136 aa, Zea mays
  Coding DNA Sequence Number=SeqID_27671
MPLASSDPHEDISVDVLGPQIDGSIKVCQSLLYPEYRVSNGPLRSSAASSKCEKLTEEVHFESEKLATSEMRPPQLQGPSFDGEALMHRYSLSRCSLNAPIDGGGGGGGATVWEGDENCGMGGEAAVWEAEVRVRV

SEQ ID NO: 71047 - protein, 228 aa, Zea mays
  Coding DNA Sequence Number=SeqID_27672
AGSPGGDGGRGPGACVLGGDDSRDGVGGLGARGPGKEGGPGAVAPPGAVAPDGDGGRPSSGADIPADERATCWNGQLEALSGGASEEDTSGGTGSKFMGGSGGDVGITLAAEDAKMVIGRGTTIKRKMGGGVVEGAGRVEVEKVCGGVKCLNPIGRRKMGLKKQRANDVVDRAQNTFGTTILLGGVGTGHPKADTVGEKESSCVGVIELTTIVALQAFNGGAKLSENK

SEQ ID NO: 71048 - protein, 598 aa, Zea mays
  Coding DNA Sequence Number=SeqID_27673
MPTSSSSAAATPPANASSEETLSTVAAEELRAGDTVDFGVSQMSSVRVQDMQQLGYFGGGVARVLGTEEVPEPEGELVLTPNAVVALSKYVWATTSYGRQPSVEVFAKYYCLHWQKRMIGNEVAQFGSFEEHPGFPVSEMCSHYYSAYPPFEVAEEDADEGSLRCAAGLGSGRDLVEEFVAYGVWPLAHGWALGEVCPRQMPSHGGKLVRSPAFALDLHSRDPAAFLREAEDGAVRIVGRVFELNRLPYGGYPGQDDVDRRGKKLVVETGDDPAPAAAPFSKKRKLGIAMGGLGVSDGFARELMRTCAAPGGGMSSPELRESSARMLRVTGVMDKDRQGAAQKRQAVVRLHEARPKRPRGTAKAAAPGGSQLPLAAKSAAPVSSRAPEATKAAAAGGTKSAKAAPGSSKAPEAAKASRELPPPGKRVADFATDISVDDYLVGSDEGQLVVVPPAVATAAAAVVPRAKGSALSAGGEIPALTVVRDEAGAVSRRLKEMKEALSQAADFADRAASGALTAVVSAEVERLRTQHADAVREKSAADSKCRKLADKAEANLARAEGSLPRQRAEQLEERLSALQTRVDRAEASTRSEAERTRK

SEQ ID NO: 71049 - protein, 97 aa, Zea mays
  Coding DNA Sequence Number=SeqID_27674
  Subcellular localization annotation: CTP_CleavageSite=59; ConfidenceScore=5.13e-01
MARARAYKAPRDLDRTPPHALDLTGAQTHRRLPVHGVSAAARSPCHRRSANRTLPNLVRPSEKTEHTSVKLPSEELEFASPERPVHGCRIPPDRLRA

SEQ ID NO: 71050 - protein, 834 aa, Zea mays
  Coding DNA Sequence Number=SeqID_27675
  Homolog annotation: Hit_ID=Q9STN9; Match level="QueryCoverage=87%, HitCoverage=82%, E-value=3e-47, Identity=26%"; Hit description =Putative uncharacterized protein T27E11.110
  Pfam annotation: Domain name=DUF125; Domain location=632-799; Score =27.4; E_value=1.4e-05; Accession=PF01988.10; Description=Integral membrane protein DUF125
MEVERPMWELKEEEEEPPQLLMEAEEDDYEEEEDTSALLYTRERESMRKKMTTTMADLDLEMESSDSDSNAAASAAVEEEAAAAAQQSIFLDPTQGLWKCRHCDWTHQRLSGPCTAEIILHSQQGHCKIASNVDSLVQHQPLYSSPHKASDHATGLGAENQVEKQDNVSAQQTNHSSSNGNLENGSHSNGVHEISSSSETVTTIADGLKLITTIREGRQHILPSWSGSLDHVSGGSTSTSQVHEIEVEKEVSKGDVKVEEYDLEKILDEQETHDLYCPNCKSCITRRVILKKRKRTVRQETGKEPPKRPQLVEPPANAPSQTINQDSPEVFRCLSCFTFFIPTGCGFNIFRIFERRDVDQQVQSQHSSASVENCGSWLLSCFRTIDSPKPLHNADSLEEPLVSDSQRTDNITSVEENTPLHSDNTIGKAEQSNKPSPTGSQTTAATYEVKESFSQFHASSKDVTGSTQKEAGHVVTVQRNGARQEQIPLSRPAVDTKTDTSHLGHKEEFTQTEAGHVVTVQRNGARQEQIPLSQPSGDTANDSMHLGHKQDILEDIMAPSDNSTFFSPSFVKPVLTIPIKVLPGEDNQTVEKPTSVIRQPAEPEAPPHRVLAVPEAEALVPAPSAERDEWDILKAVVYGGLVESITSLSVVSAAAASGAKTLDIFILGIANLIGGLPVLYHNIADLRNTGDIAESSEQVGHYWLELGRRSKYQLHMVIAILSYILFGLLPPVIYGLSFRTSDNRENKVLVVAAASLLCIALLAIGKAHVKRHRTYLTTLLYYLSIGFSSSGLSYVAGVLLAKVLAHFGIIDQGGASAPAPPGLSFPEAAAWASY

SEQ ID NO: 71051 - protein, 473 aa, Zea mays
  Coding DNA Sequence Number=SeqID_27676
MRDSPCPRCALITPFEVAEEDADEGALHGAAGQSSGRDLVEEFMAYGVWPLAHGWALGEVCPRQMPFHRGRVVRSPAFALNLRKRDPAAFVRDAEDGAVRLVGRYVPRTEGQRSFDIRGSNDRLNRVFELNQLPYDGYPGQDKADRRGKKPVVETGDDPAPAAAPSSKKRKLGSDEGQLAIVAPAAAIATAAIVLKARGEAPGARGEVSALAVVRDEAGAATRRLKEVMEALSQVADFASRTASGALTAAVSAEVERLRTQHADAVREKSASDSKCCKLTDKVAALEREKADLRRQLAAERREANEAIAKEQAAQAEAKLARAEGNLAKELAEHLQERLTALESRAKGAEAAMRAEAERTRTQLMDTYRELGARTGDFEESAEALYDWMWGPHGREVVRERAETARAQAARGERVDDFGALNSALPDPEPTPAEAVSGVALEPTPETRGDRDGCPHICCGRRRPAPKGGRRRR

SEQ ID NO: 71052 - protein, 54 aa, Zea mays
  Coding DNA Sequence Number=SeqID_27677
MAVMGSTSEKMYLCQNKITRNGSGEMARVACTLCGKRLDGGVSVLSESRLEGGG

SEQ ID NO: 71053 - protein, 96 aa, Zea mays
  Coding DNA Sequence Number=SeqID_27678
MVWRTGLSGVPPDNVRCTRGLQAQLSHLREFSEALRYNSPDMSGALEESDSELASFGDPLRYNSSDMSDAHRTVRHCMFQKKNKTVTVSVAIVQCK

SEQ ID NO: 71054 - protein, 373 aa, Zea mays
  Coding DNA Sequence Number=SeqID_27679
  Gene Ontology: Mol. function=transferase activity; Biological process= biosynthetic process
  Homolog annotation: Hit_ID=A2Y8A6; Match level="QueryCoverage=73%, HitCoverage=83%, E-value=1e-98, Identity=68%"; Hit description =Putative uncharacterized protein
  Subcellular localization annotation: CTP_CleavageSite=39; ConfidenceScore=5.60e-01
PGDSSFSDAIPATPRLPATLTLASRAPPQRHRSSAIATSSSAVVVARPHELPIPTAPNDSPSSKAVHKGNSHLILHPHELVCRLHLIHIELSDVVPFHSTRKAGFMSGGTPAASSSLRTSLSYYVRQVRAYDYHHYLCLLHLAPAVRKAAFTFRTFNIETARAMDVVFDPRAGLMRLLWWKEGVDKIFGNKLVEHPVAQALSSIIADHKVSKHWLKRSVEARINDANREEGTIPRTSAKLERYVEDTQSTILYMTLQAGGIQSTVADHAASHIGKASGLLLLLKALPHHVNNQGTVHYIPASVAEECGLLITREGGRSEVRAGERLLDVVFKVASVAEAHLHKARELAPSVPKEAIPMLLPALPAQVLLDTLR

SEQ ID NO: 71055 - protein, 503 aa, Zea mays
  Coding DNA Sequence Number=SeqID_27680
  Gene Ontology: Mol. function=sodium:dicarboxylate symporter activity; Cellular component=membrane; Biological process=dicarboxylic acid transport
  Homolog annotation: Hit_ID=A7PXX2; Match level="QueryCoverage=98%, HitCoverage=67%, E-value=1e-167, Identity=60%"; Hit description =Chromosome chr15 scaffold_37, whole genome shotgun sequence
MTLLRNAQFEELSAQDLLLTYALNNDYLLTLPIYVDWKKAAQSNAIIFRRGYATERQKGLLLVEKLDYLQSKLLQNVFFSLSKPLKKPGKWLNEALKRSTDNQGFQIWIDKLRLWLKEQTYADNSLLLIESSSWDKLSSDQLPDADVPIWIAAQRAVSRYEGILSPVGPRGRLLRRLLKWTGLIPSLPEATIKSNNETKHLEGHVRPNFLPRITLANIWEPASRESCNNNIWEMVKASFRILFGRSTLQEPAFQELILLYTDEVVPSETKDEMVPLQLKIYERIPIPDLPVVFPHKKLSFRILDTVRLDIATVIGLLAYVVNYKFESLASSPSAFLLDIVAGTALVILVFRVALGYKQTRDRYQLLVNKTLYEKTLASGFGSVYFLLDASEQQQYKEALLAYAMLLCRKKYEVSSRASIRDACEQFMHEKFEAKVKDDGYIIVSVLMIEMPIDKAMETLLRLGLVIELPTDGGSSVIGLPCSEAYRILKSRWDGLLEQDTEQG

SEQ ID NO: 71056 - protein, 227 aa, Zea mays
  Coding DNA Sequence Number=SeqID_27681
  Homolog annotation: Hit_ID=Q8LJX1; Match level="QueryCoverage=38%, HitCoverage=4%, E-value=4e-07, Identity=35%"; Hit description =Putative reverse transcriptase
MAFRRVDPAPFLPHGFVAQQVDYREIMVRTVTRPQPSAHEDWGIVLVQPLPEHEVNFHIFDDIIREYLVEVRRVQVRSIQCSHFGDRLWKCHSSSCSRWLKVSKEFHGLSNVTSCNNLCLVLNLKMRIPCHPTHMMGTNFQLSFFGKGQPVANFQIDLNIPPMEGNNVEEDVAINDDEGWDPWPVQQAQPPEPVANTNNANVVINAEEQFSYQLSGLEDLPSDDLVG

SEQ ID NO: 71057 - protein, 146 aa, Zea mays
  Coding DNA Sequence Number=SeqID_27682
  Homolog annotation: Hit_ID=Q6JAD6; Match level="QueryCoverage=84%, HitCoverage=17%, E-value=1e-19, Identity=45%"; Hit description =Putative uncharacterized protein
MAAASVPGHPRGLTPPVWIISSSPEDPVLVPDLVPDTQAEDAMFHQFETQGTAVPNDDDDDDDFGIPPPLPVPPRSHDHEAGSSSAAPAARPTIDPALAAILQSLTHQQAHLAAEQARQTTVQQQMSEWMLSMFQTIQDGQDTLQQ

SEQ ID NO: 71058 - protein, 148 aa, Zea mays
  Coding DNA Sequence Number=SeqID_27683
MGKNNKRKREPTPPSEEFGDSEYSEEEFSSEPEGSPAPVSPPASSDDSDDSQGIAAEVWTYIRAVERAGLEGSDESEYSSDEEDSDGGDDGEDDDDDDDDDDDDGDGSGRGGGDGSGRGGGDGSRDSTKGSSRGSTKGGGGGRGRASG

SEQ ID NO: 71059 - protein, 129 aa, Zea mays
  Coding DNA Sequence Number=SeqID_27684
MDNGKEVRNIASWMNSDHYSTPAAVPACVTAALDRLARVSHFATLCHVPWCFNHVAMMLQVGWDVFKIKLDGGSIMAVMGSTSEKMYFYQNKLTRNGSGEMARVACTLHGKRLDGGVSMLSVGVNLIWS

SEQ ID NO: 71060 - protein, 191 aa, Zea mays
  Coding DNA Sequence Number=SeqID_27685
MNHVSRSTVHSVGRHAVVPPLRQGIADAQVSILPMPSPQIQPRTQSEPHRPYARPWRGCLQDSPAAAATLPFSRCAAKLGDGALGYGLGTEERHRSYRRRVWGWLRSVCGSRARAEFSATADSVSGIRFSRGRRLPNWAAPPLVSQQREGNNASTRRPGSYGPMVKHPSGIRKMAWRFVYPKFEFPIQDKA

SEQ ID NO: 71061 - protein, 450 aa, Zea mays
  Coding DNA Sequence Number=SeqID_27686
  Gene Ontology: Mol. function=protein serine/threonine kinase activity; Cellular component=plasma membrane; Biological process =protein amino acid phosphorylation
  Homolog annotation: Hit_ID=A3AQ69; Match level="QueryCoverage=88%, HitCoverage=86%, E-value=4e-81, Identity=52%"; Hit description =Putative uncharacterized protein
  Pfam annotation: Domain name=Lectin_legB; Domain location=38-302; Score=15.0; E_value=2.1e-11; Accession=PF00139.10; Description =Legume lectin domain
  Subcellular localization annotation: CTP_CleavageSite=69; ConfidenceScore=5.26e-01
MSCLRILLLVPLFLSSGMSGCLASSSSASSGCSCGDSTAHDLSSFTSDSAAELVLLKDAGISNGVLHLTADSSRNRNRSGAALMPGPVTLWCQDPDDDAEAKQDASFEASFTMGIVSNPSPDEEGAVQRKGDAGGGGGGLALVMVASLNSPALGILGLSNNPSDQVSSSSASSGFVTFTFNTVKLKQSNGDPDDSNGTVINLDVVVSVSGAVFARSPPLTITTATATNNQVAMKNCTVWIDYNNGRVSIYVDVQGRPKPDKAAIDGVALNLSDHLPQRAFVGLLASTDTSTELHSVLSWNLQVSLPGDGPSMDWKVILPAVLGGITFTGIMNLLVAVFYFNSKYNKLKMELVLSETLRRLPGMPREFKHATMRKATDNFHEARRLGKGGFGAVYRGTLRSAGKNDGVTTCVEVAVKKFTRDENRCYDDFLAEVDIINRLRHRNIVPLVDK

SEQ ID NO: 71062 - protein, 203 aa, Zea mays
  Coding DNA Sequence Number=SeqID_27687
MNHVSRSTVHSVGRHAVVPPLRQGIADAQDSPAAAATLPFSRCAAKLGDGALGYGLGTEERHRSYRRRVWGWLRSVCGSRARAEFSATADSVSGIRFSRGRRLPNGAAPPPVSQQREGNDASTRRPGSYGPMVKHPSGIRKMAWRLVELAARITENRGEEVADRRAPRFSATSERARARRPRLMRGKRGLTTGTRSSVAAVRA

SEQ ID NO: 71063 - protein, 137 aa, Zea mays
  Coding DNA Sequence Number=SeqID_27688
  Homolog annotation: Hit_ID=A5B606; Match level="QueryCoverage=89%, HitCoverage=70%, E-value=4e-40, Identity=65%"; Hit description =Putative uncharacterized protein
  Pfam annotation: Domain name=DUF538; Domain location=1-136; Score =139.2; E_value=1.2e-38; Accession=PF04398.3; Description=Protein of unknown function, DUF538
MGLRKAQSFFCPGHKKSLSDLLREHNLPPGLFPRNIICYEYDESTSKLMVHLSKPCEVSFKDSSAIRYAPRVKATLSRGKLSGVEGMKTKVVVWVKVASVSIDSYKSDKICFLAGVKKLRQKDAYEVPREAVSVDEF

SEQ ID NO: 71064 - protein, 1008 aa, Zea mays
  Coding DNA Sequence Number=SeqID_27689
  Gene Ontology: Mol. function=nucleotidyltransferase activity
  Homolog annotation: Hit_ID=Q10Q39; Match level="QueryCoverage=96%, HitCoverage=73%, E-value=0.0, Identity=57%"; Hit description =Nucleotidyltransferase domain containing protein, expressed
MRSVKSCGFAGNFFRIRSAFAYGAKRLGKLLECPKEALIPELNQFFTNTWIRHGSGSRPDVPIPSLVDVRPMKVVSSVVSSSQRSLAAFKKKVENPKLHVNQDNLRPNQDNLTGVGDIHYRNLPRTVNPSVSHVQHQKSYTPQGNAKVSEQLERNNSDGLMQSARDKRVPNGLFVNDRNGQNRSRFARTRSSPELTDSSTEGFRGRRTNAVGMEKSFGVDYSRRNILIPEVSSNHSTKSSQDESVSSMNGSSHPSALAASDSNSVSSSFRDDNGFVMNEELPSVSESSDMHHDEQVLANLMESMKLHGFNGQIQLPMQIPSHLSVAHPPLLAPTTYSQKHLAGVPPANLIGTPWLPNMQFLHGFVPPMAHYIHNPNFAPNIEDGTETEKPNTSDVNHDAGKTWQEYGVGFSRHFDPEARDPHFYGIDGKEHSSLPNGVPGAPLERQMKFTVENNVVGDETYTGMFQIHTGREPAVDYSKRSGYGNVPSSHASSSKGKTLDSSSWDEMTVNTTIPPRENWGKRPAFVAPATTTHGNTGWQMGNITEHLAAEVNDGPRNGTVVPIITEASEIVTGSDSFSSKSRTSQVPNELDPSQVGMPNPVFTPFLIGSPQHRQADSSGLTFVPTGPPVPFVVLPFVPGNNDGSGPQFERSEGIDQLPANTVGQFFGSLNDVHQQDSSAISTVSSSTMTEPSGEHKPDILHSDFVSHWHNLQYGRLCQNPRPMGPVLYPVPVPPMYLQGHVPWDGPGRPAAPNVNWTQMVGGQRVFPVMPVQPATERTGVFQHYGEDAPRYRGGTGTYLPNPKVHFRDRHSNSRNYRGGYNGDRGDYNDKEGSWINSKQRNPNRGYGRSQSERSGMRSDRQVTDESRSDRQRRTYRNDSYRHEASSQYLVQGQPFGSTSSMRKPGNTVHGVYTPPSTYSNGTSALSGPPGPPFFMVYSYEQGSNHAASSSEPIEFGSLGPLPAADGDDIPRSTRQVMPNGFYGQRRGRYRGGSSHSSPDQPSSPQPRR

SEQ ID NO: 71065 - protein, 324 aa, Zea mays
  Coding DNA Sequence Number=SeqID_27690
  Gene Ontology: Mol. function=nucleotidyltransferase activity
  Homolog annotation: Hit_ID=Q10Q39; Match level="QueryCoverage=93%, HitCoverage=23%, E-value=1e-150, Identity=88%"; Hit description =Nucleotidyltransferase domain containing protein, expressed
  Pfam annotation: Domain name=NTP_transf_2; Domain location=41-133; Score=12.8; E_value=0.008; Accession=PF01909.14; Description =Nucleotidyltransferase domain
MTRRLDPERWAVAEDRTAELIACIQPNVYSEGRRLAVYHYVQRLIMNCLSCQVFTFGSVPLKTYLPDGDIDVTAFSNSEELKEIWANLVRDALEREEKDENAEFHVKEVQYIQAEVKIIKCLVENIVVDISFNQVGGLCTLCFLEEIDNLISQNHLFKRSIILIKAWCFYESRILGAHHGLISTYALETLVLYIFHIFNNSFTGPLEVLYRFLEFFSNFDWEKFCLSLWGPVPISSLPDMTAIPPRMDSGELLLNKSFLDTCSSAYGVVPHTQENQGQPFVSKHFNVIDPLRTNNNLGRSVSKVFLLLFGDFLWQYSFAVTVAV

SEQ ID NO: 71066 - protein, 432 aa, Zea mays
  Coding DNA Sequence Number=SeqID_27691
  Gene Ontology: Mol. function=structural constituent of ribosome; Cellular component=intracellular; Biological process=translation
  Homolog annotation: Hit_ID=A3BFW3; Match level="QueryCoverage=43%, HitCoverage=11%, E-value=5e-54, Identity=56%"; Hit description =Putative uncharacterized protein
  Pfam annotation: Domain name=Ribosomal_S12; Domain location=314-393; Score=-10.0; E_value=0.0059; Accession=PF00164.16; Description =Ribosomal protein S12
TLYEFDDLESIIDRTLKRDFDTEEALWLLKIGLVCIPDSPKIKPSMSMVAKILQGPFGGPGCQNQEHEKHFEHFTPNMSKTRNESAFPQDEIDSHREHIYNELTSDSIASKKPKIRKRENNNSVSSSAPNIPNTQDFITTFCEVVEDFCGKTEIPEDGNCGDWLSIPLGDVKVLVNEITSVRSKRILHEVPMDTVTRLLDVIDRQIRYSQVSMNKVEALYRLFKKIGNTFIDDGLINKALSNGKPTVVEFYANWELDSENPVADVESIVAKGIRDGAINATIDQANGWMVYCVLALTRRHVVWELGASSRATAGTRGGLTKHTKSHLGNEWKKPFAGSSHAKGIILEKMYAKYGNDLCFCYVVLLVLGLRFKVVKVSGVSLLALFKEKKPRSVWKKHSPLFTNYVDFLTKCPSIQIHRKYSTGGSTEKTFER

SEQ ID NO: 71067 - protein, 67 aa, Zea mays
  Coding DNA Sequence Number=SeqID_27692
MTVGGGCLSYGAPDSPVYTGHVRMGVPDACALWRALIAVAGDRWREVAVAPLLHRTVRCTPDMSGDL

SEQ ID NO: 71068 - protein, 356 aa, Zea mays
  Coding DNA Sequence Number=SeqID_27693
  Gene Ontology: Mol. function=hydrogen ion transporting ATP synthase activity, rotational mechanism; Cellular component=proton -transporting ATP synthase complex, catalytic core F(1); Biological process=ATP synthesis coupled proton transport
  Homolog annotation: Hit_ID=A2Y790; Match level="QueryCoverage=14%, HitCoverage=9%, E-value=2e-16, Identity=86%"; Hit description=ATP synthase subunit beta
MGDSDRRTRFKRGPWACGAGSFTTGFLTIRFTAAAWVSSPYASPTAALHGTGEGGPCADVAPGLSPDGSALPHRPPGASGRGAAPTRRRGRGTRASRRGGRGPWPQRRRADPWPRRRRARSPLQISPSARVQIEESASEGDRLRCAPTLGRHHRPRPMRPGSRSFARAPFIDLSAFSHLEAHTHVGSDAHGHAHQETPYALCPKKHASLDDDREDPASPAWHLHLRDDVVLQAEVPHSERHFGRDIIMPNLKSSVTTTASAVEYRDEVLKALPPAKAKEAGVDGIIVQGREAGGHVIGQVAFSVFAGVGERTREGNDLYKEIIESVVTKLGDKQSERKCDLVYGQMNVPPGVLVLD

SEQ ID NO: 71069 - protein, 238 aa, Zea mays
  Coding DNA Sequence Number=SeqID_27694
  Gene Ontology: Mol. function=kinase activity; Cellular component =nucleus; Biological process=cell division
  Homolog annotation: Hit_ID=Q40492; Match level="QueryCoverage=98%, HitCoverage=60%, E-value=5e-57, Identity=48%"; Hit description =Cyclin A-like protein
  Pfam annotation: Domain name=Cyclin_C; Domain location=102-229; Score= 128.7; E_value=1.7e-35; Accession=PF02984.10; Description=Cyclin, C -terminal domain
  Pfam annotation: Domain name=Cyclin_N; Domain location=1-100; Score =99.7; E_value=9.4e-27; Accession=PF00134.14; Description=Cyclin, N -terminal domain
  Pfam module annotation: Pfam domain module=Cyclin_C::Cyclin_N; Domain location=102-229::1-100
MRAVVVDWLVVLAEEFELHAETLHLAVSYVDRFLTMNVVARDKLQLLAVTALLVAAKYEEIESAEMKVNIYINSMDNTYTKQQVVKMEADLLKSLNFQIGGPTVTTFLRQFIASCRGGNSTSREKLEFVCSYLADLSLLDYDCISYLPSVVAAACLFVARFTIHPKTRPWNLTLEQNTGYKVFDLQKSIYVIHELQLTIRCPDQEATRKKYKDPKFGCVSTMVSPREIPTSFPEDCHK

SEQ ID NO: 71070 - protein, 307 aa, Zea mays
  Coding DNA Sequence Number=SeqID_27695
  Gene Ontology: Mol. function=nucleotidyltransferase activity; Cellular component=cytoplasm; Biological process=biosynthetic process
  Homolog annotation: Hit_ID=Q10Q59; Match level="QueryCoverage=88%, HitCoverage=96%, E-value=1e-112, Identity=92%"; Hit description=ADP -glucose pyrophosphorylase family protein, putative, expressed
  Pfam annotation: Domain name=Hexapep; Domain location=222-239; Score =7.3; E_value=19; Accession=PF00132.15; Description=Bacterial transferase hexapeptide (th
  Pfam annotation: Domain name=Hexapep; Domain location=240-257; Score =15.4; E_value=0.22; Accession=PF00132.15; Description=Bacterial transferase hexapeptide (th
  Pfam annotation: Domain name=NTP_transferase; Domain location=9-240; Score=33.0; E_value=2.7e-09; Accession=PF00483.14; Description =Nucleotidyl transferase
  Pfam module annotation: Pfam domain module=Hexapep::Hexapep::NTP _transferase; Domain location=222-239::240-257::9-240
MAGSEQRVVAVIMVGGPTKGTRFRPLSLNVPKPLFPIAGQPMVHHPISACSRAFGSQIPHLAQIYLIGFYEEREFALYVSSISHELRIPVRYLREDKPHGSAGGLYSFRDYIMEDSPSHIVLLNCDVCSSFPLPDMLEAHKKYGGMGTLLVNKVSAESANQFGELVADPETNELLHYTEKPETFVSDLINCGVYIFTPDILSAIEDVLKQKKDRASGDGKRTATIVGDVYIHPSAKVHPTSKIGPNVSISANARVGAGARLINCIILDDVEIMGEGDHNAKLGITILGEAVDVEDEVVVVNSIVLPK

SEQ ID NO: 71071 - protein, 57 aa, Zea mays
  Coding DNA Sequence Number=SeqID_27696
MQHWHCNCRVAATQASSNSKVDGRNNSNWVISQLAVLDSRMSSLQDQTEPQKILNEK

SEQ ID NO: 71072 - protein, 174 aa, Zea mays
  Coding DNA Sequence Number=SeqID_27697
  Subcellular localization annotation: CTP_CleavageSite=46; ConfidenceScore=5.15e-01
MTRIYSRLKMKRDTEGLLGAPLQSPSPKQSPKLNSKNPLLPSPEMSAFPVSSELRHVFGHSSYSSQTEYSRGTVTPVTSAINWDGGFSPQRLHWIVQSKPCTCRTISGDDELQGALLDTAPESADCNGIEFTRSSSDGCETSGGDDTDCIPSRIVHCTGHRIGPVQLYIPVRVA

SEQ ID NO: 71073 - protein, 468 aa, Zea mays
  Coding DNA Sequence Number=SeqID_27698
  Gene Ontology: Mol. function=binding; Cellular component =intracellular; Biological process=RNA processing
  Homolog annotation: Hit_ID=Q10Q44; Match level="QueryCoverage=63%, HitCoverage=37%, E-value=1e-109, Identity=68%"; Hit description=Pre -mRNA processing protein prp39, putative, expressed
  Pfam annotation: Domain name=IQ; Domain location=34-54; Score=24.1; E_ value=0.00053; Accession=PF00612.18; Description=IQ calmodulin -binding motif
  Subcellular localization annotation: CTP_CleavageSite=41; ConfidenceScore=5.02e-01
MQAMLQKVEQGLLQIKVSVQHEQHQLALSARLQTSATVGIQAAARGFLARRGVREMRRQMLEAALVTVDLGTRGRDLALSDGHQQRLRAAISKCEHVIDNARETNDQIIPWRTSSNPVTPWEMKFSYTPVLFSVSQKQPEIHLFSARFKELNGDISGARAEYQHLYSDLCPGFLEAIVKHSNMEHRLGDKELSCSVYEKAIAAEKGKEQSQLLPTLLIQYSRFLFLAIRDLEKAREILTVLHEQLNVTKTVLEAVIHLESIFPCEKRIDFLDSLVEKFVTPESSQGEVASLVDKEEISSIFLEFLDLFGDAKSIKKALTRHTTLFSCKRSILPSKKRKADDTVVSDRDKFAKTVVTQSATGTDPNASNPPVWPATSEASGQQWGASYAQQAAYPAYGTYDYSHQMPQPAPQAAAYGAYPPTYSAQAYTQQSYPQPAVIPAAPVPAPTAPSAYPQQPAAAQPYYGTTYY

SEQ ID NO: 71074 - protein, 417 aa, Zea mays
  Coding DNA Sequence Number=SeqID_27699
  Gene Ontology: Mol. function=binding; Cellular component =intracellular; Biological process=RNA processing
  Homolog annotation: Hit_ID=Q10Q44; Match level="QueryCoverage=85%, HitCoverage=45%, E-value=1e-169, Identity=79%"; Hit description=Pre -mRNA processing protein prp39, putative, expressed
  Subcellular localization annotation: CTP_CleavageSite=33; ConfidenceScore=5.03e-01
MEQDQSPAVDSADSGAAAFDFATGNAPSSAVTSGSAVAPDGGAQAADTSAYQAEHTELNGTTGDMSNYQSAGAAENGTAVTEIGEPVPEPSYEEAVLSAEEARLWSVVTANCLDFNAWTTLIEETEKNAENDILKIRKVYDSFLTEFPLCFGYWKKYADHEARLDGVNKVIEVYERAVLAVTYSVDIWYNYCQFAISTYDDPDIVRRLFERGLAYVGTDYRSNILWDEYIKYEESLEAWSHLAVIYTRVLEHPIQQLDRYFNCLKELASKHSFSEILTAEEASVYVVTSETSAQAPDGDTHPDDIDKAGQPELSSLADAENLAKYVSMREEMYKKAKEYESEIIGFELAIRRPYFHVKPLDNPELENWHSYLDFIEKEEDINKVIKLYERKGKLSGPKEAHGGAAVAAAMVPPRGIR

SEQ ID NO: 71075 - protein, 657 aa, Zea mays
  Coding DNA Sequence Number=SeqID_27700
  Gene Ontology: Mol. function=transporter activity; Cellular component= membrane; Biological process=transport
  Homolog annotation: Hit_ID=Q10Q65; Match level="QueryCoverage=75%, HitCoverage=92%, E-value=0.0, Identity=83%"; Hit description=Metal transporter Nramp3, putative, expressed
  Pfam annotation: Domain name=Nramp; Domain location=82-459; Score =744.9; E_value=5.4e-221; Accession=PF01566.9; Description=Natural resistance-associated macrophage protein
MASSDLAESLLPGGGGGASASHDEYEERAYDSEDKISIAVSDSDGEDDGTPASRPPFSWRKLWRFTGPGFLMCIAFLDPGNLEGDLQAGAAAGYQLLWLLLWATIMGALMQLLSARLGVATGKHLAELCRQEYPPWATRALWAMTELALVGADIQEVIGSAIAIKILSGGAIPLWGGVVITALDCRTDTFDSWYFPDASFIFLFLENYGVRKLEAFFAVLIATMAVSFAVMFGETKPSGKELLIGLVVPKLSSKTIKQAVGIVGCIIMPHNVFLHSALVQSRKIDTNKKSRVLEAVYYYNIESILALIVSFFINICVTTVFAKGFYGSKQADSIGLENAGQYLQEKYGTAFFPILYIWAVGLLASGQSSTITGTYAGQFVMGGFLNLRLKKWLRAMITRSFAIIPTMIVALFFDTEDPTMDILNEALNVLQSIQIPFALIPLITLVSKEQIMGSFVIGPITKVISWIVTVFLMLINGYLILSFYITDVRGALLRSSLCVVLVVYLAFIVYLIVRNTSLYSRLCSSTSKSSSSMHILLKLEWNVVHGWTGSPRRIPKNAASVSAEASVIPHSKRPWRSCWRSGENTPPEDKGEVVTARPRDQVSCPRARSMCALLRRRVLDSYRRRRLGKLHNGVEWPVGEQRRTRCARCDEPPTTDQ

SEQ ID NO: 71076 - protein, 91 aa, Zea mays
  Coding DNA Sequence Number=SeqID_27701
MATRPRLHTLVGWLSGSYKFLTPSHHASAYCCLNSALTFETEATTAVRMEVGTTKKGRVKSVFHVNPSCWRLDPKTKMFDRIMATIGKREL

SEQ ID NO: 71077 - protein, 793 aa, Zea mays
  Coding DNA Sequence Number=SeqID_27702
  Gene Ontology: Mol. function=actin binding
  Homolog annotation: Hit_ID=Q10Q45; Match level="QueryCoverage=28%, HitCoverage=55%, E-value=1e-41, Identity=43%"; Hit description =Expressed protein
MDHGGPDTRQNLCPARSNSPEHARDSVRRSGRRHRTPASREGGRADEAKRPHRARGLHAQSASWAFSLDCNGSGQHASFATAPRLCRLREEDQIAILSKELATCKLQLEVRENQQKQATMQIEALQKAVQELSDQYEKDCMDAHLRIAQLEAENTGIMSRQAEADGEREALRGELAAVRADLDAARASVAFVLREVEAVETRAILEREGTKDALARILQLNEAVLSSAVAAIRAEEERSVFFQEAMLRFFDSDGSNLEVVRRQMEMVERMEAELLAKTVEVEYLRAELKQASEIYVAPQGDSDATVTVVAADGCDGHDQVQVQRRETAVEDTGTEPEFTFQHSPGLSFVSDEIFRVDCDAVPSGGSKMEADTSEDLAENESKQGAAVMVGETTVAEGNSDAQETRCLVAKTSGEDRSIEANTNSNQEPDESDGAVPDFAACQGNDVLVKDHEETKADASFVLASSRDDFQNAHSDDAKDVISIAEPDNQEPRAEPAAAPISTPREGRSDACVVVATEIFSKDEHEFYTKELEPDPGQGAKLDGYVLVSKGADVAVKNNQLDEARAEISDLRFSLEEAVRRAELAEEAKAALERELREEIRRKHTPSRRRATSDSEDGWRPAREGARPTPSHASASGTPSRAMRSARPGGEDMPTPRCLTLGKVLNMKYKAKKYCALHGGIHPSCDFRFLRVSVLHPALENKTRSRTQTQTHTQRAFSTAKSSFRAAAAALARCNSARPLGLKARCCGSGVGFCVAASECHCYPSPDNMVSFEMNDLKICGLDKKIVELAQWLV

SEQ ID NO: 71078 - protein, 76 aa, Zea mays
  Coding DNA Sequence Number=SeqID_27703
MTQAFILVRASRGPTSIRGYEAYITRTMVPVVGVYKHNGRWEVPKSLEMVHKGSTQTNKRLKLEIKFKGAKKPSVL

SEQ ID NO: 71079 - protein, 138 aa, Zea mays
  Coding DNA Sequence Number=SeqID_27704
MVQTPTYGELGPNEERGKRRNQGGFPVHRAQAELTVAKATTGAQQRRQNDLHDGGGVAACWGVTEHKLLLSSSRLHLKSNTKTKIHFLLPVGVGSKEVSSQYPFLAEKHLTQEARGHGALMLNIDDVIPADGVFGHAL

SEQ ID NO: 71080 - protein, 74 aa, Zea mays
  Coding DNA Sequence Number=SeqID_27705
MELILVNENRGAVDVRVGVIGTRFSFVIDITSVPSLQVLELVIEVDVIKSCDDPIVVSVSTRPIFSSIEWSHTS

SEQ ID NO: 71081 - protein, 142 aa, Zea mays
  Coding DNA Sequence Number=SeqID_27706
MGKNNKRKREPTPPSEEFGDSEYSEEEFSSEFEGSPAPIPLRESSDDSDDSQGLAAEVWTYIRAVERSGLEGSDESEFSSNEEDSDGGEDEDDDDDDGDDDDDGDGDGDGGNGGGGSGGKGSTGKGSTRGGSSTGSSGKASG

SEQ ID NO: 71082 - protein, 79 aa, Zea mays
  Coding DNA Sequence Number=SeqID_27707
  Subcellular localization annotation: CTP_CleavageSite=28; ConfidenceScore=5.09e-01
MEEELKRTATPSSLMSSLLRPSLTSHPRTSNAPASRLIGDNIGTGLVTSRKDQATGFSGLEGMRGCVVGDTGGYGSLQT

SEQ ID NO: 71083 - protein, 118 aa, Zea mays
  Coding DNA Sequence Number=SeqID_27708
  Subcellular localization annotation: CTP_CleavageSite=68; ConfidenceScore=5.37e-01
MPRLEATQRTTQQRQPGVTVNATKNGPAVMTVAGGQEQRSRRQPSSRPIRWQQENPLSRREDNAPVLRSSNGSRTRNGRPANHSRLWQEKRATLRLRHNDRVKKGTGKGRYPEKDPSP

SEQ ID NO: 71084 - protein, 57 aa, Zea mays; identical to SEQ ID NO: 56679
  Coding DNA Sequence Number=SeqID_27709

SEQ ID NO: 71085 - protein, 133 aa, Zea mays
  Coding DNA Sequence Number=SeqID_27710
  Gene Ontology: Mol. function=RNA-directed DNA polymerase activity; Biological process=RNA-dependent DNA replication
  Homolog annotation: Hit_ID=O48967; Match level="QueryCoverage=98%, HitCoverage=57%, E-value=2e-21, Identity=74%"; Hit description =Putative uncharacterized protein
MGTRSQTGVPLAGVGCAALADHLRAASWPPKFRSHLPEKYDGTSNPSEFLQVAAEGRAWHSAPQIGATQSGGSGVVPRDGKKKKKKDRDYQKPRSTALVVAAVTVGQGDPQQNAHAHRGVTAAHAPVHPNGSP

SEQ ID NO: 71086 - protein, 258 aa, Zea mays
  Coding DNA Sequence Number=SeqID_27711
MAITSARAPLRKGPRPRLPTGGNNEAIKAKESEARRQVALMVSSAEATTSAVGSLTSGGDHLSADDSGHLRTSAVPANGGRPSARRGPRSCPHCGSEDKTIQERGRRPRDVRRLVPPPVRPPAREKQWMWQTCARRDRRPCGGRIATPPTRRQKAASEAAPRPSKPGNRARSGRRHPQLAGPAYPKFASFARLVNALLPQMLEEEAGHQSTRKAGPQLGSPSSPARMMNILEAEDRGRPQPGSLLSTTRLVVIPLDDH

SEQ ID NO: 71087 - protein, 551 aa, Zea mays
  Coding DNA Sequence Number=SeqID_27712
  Gene Ontology: Mol. function=aspartic-type endopeptidase activity; Cellular component=membrane; Biological process=RNA-dependent DNA replication
  Homolog annotation: Hit_ID=A3AJR2; Match level="QueryCoverage=91%, HitCoverage=87%, E-value=1e-139, Identity=54%"; Hit description =Putative uncharacterized protein
  Pfam annotation: Domain name=MatE; Domain location=347-491; Score =88.8; E_value=1.7e-23; Accession=PF01554.9; Description=MatE
  Pfam annotation: Domain name=MatE; Domain location=68-286; Score =110.2; E_value=6.4e-30; Accession=PF01554.9; Description=MatE
  Pfam module annotation: Pfam domain module=MatE::MatE; Domain location=347-491::68-286
MDSTTTTAPLLQPAAAASSKEEPAPASPHGAGSWELEAVLADASSPVLRRAWEGARLELPLLLRVALPAVGVYVINFVMSMSTQIFCGQLGNLELAAASLGNTGIQSLAYGLMWSQLASQSRGPRIWQTPSAQYSYSTAQYHLTYVKTQVSFFWSISSSLMVGRRPPDGVQLGMGSAVETLCGQAYGAHKHGMLGVYLQRSTVLLMATAVPLTVVYAFSARILVLLGESERISRAAAVFVYGLIPQIFAYAANFPIQKFLQAQSIVAPSAYISVATLGLHLGLSWLAVYRLGLGLLGGSLVLSFSWFVIVAAQFAYIVTSPRCRDTWTGFTMQAFSGLGTFFKLSAASAVMLCLETWYYQIIVLIAGLLKNPEISLDSLSICVRVGNELGAGNPRAASFSVLVVTSLSFAVSAVCAVAVLCLRDQLSYLFTGGEAVARAVSDLCPLLALTLVLNGVQPVLSGVAVGCGWQAFVAYVNVGCYYVVGVPLGVFLGFYLDLGAKGIWSGMVIGGTMMQTLILLWVTFRTDWTKEVENARARLDKWDDKKQPLLA

SEQ ID NO: 71088 - protein, 475 aa, Zea mays
  Coding DNA Sequence Number=SeqID_27713
  Gene Ontology: Mol. function=drug transporter activity; Cellular component=membrane; Biological process=multidrug transport
  Homolog annotation: Hit_ID=A2YLV0; Match level="QueryCoverage=73%, HitCoverage=69%, E-value=1e-142, Identity=77%"; Hit description =Putative uncharacterized protein
  Pfam annotation: Domain name=MatE; Domain location=271-431; Score =76.8; E_value=7.2e-20; Accession=PF01554.9; Description=MatE
  Pfam annotation: Domain name=MatE; Domain location=50-210; Score =150.9; E_value=3.6e-42; Accession=PF01554.9; Description=MatE
  Pfam module annotation: Pfam domain module=MatE::MatE; Domain location=271-431::50-210
MGRTGDGRRRDVDGRLEALLSGAGGEEPWLRRVALATALELRLLAPLAAPAVVVYMLIIVMSSTTQIVCGQLGNVQLAAASLGNNGIQVFAYGIMLGMGSAVETLCGQAYGAEKYEMLGVYLQRSTVLLTATGVPLAAVYALSEPLLLLLGQSPEIAGAAAEFAYGLVPQIFAYAANFPIQKFLQAQSIVAPSAYILAASFALHVPLSWLAVYGLGLGLLGASLTLSLTWWVLVLGQFAYIVWSPRCRATWTGFTWAAFADLPGFAGLSAASAVMLALEVWYFQVLILLAGMLPDPQIALDSLTVCTSIQSWVFMISVGFNAAASVRVGNELGAGNPRSAAFSAWVVTALSAFVSGIAGLVTFLLRDKLSYIFTGGEAVSRAVADLCPLLVGTIVLCGIQPVLSGTHASELLKTTFSGSARLAVASFHGLITGKKRRAAETVPSMSFCLCNALRLDGHRSSLPMLVLVIFQSPCC

SEQ ID NO: 71089 - protein, 223 aa, Zea mays
  Coding DNA Sequence Number=SeqID_27714
MKHNEFTTRTELKSLTKSIKCAETECGRLRMLKICLGGSSMRLEVPFIAPRQIGVVGGILGRLILPSVGWHTGQPLFMSVFCDGPEETRYWREQRCDFSAPRNRCAGCMTCGPMPPCQRLDCWLRRSRGGAQPRGGCTLLVRRFTFLTVGCGEDEGAHYRGAVACSLCDDSPFSRFGPACMTCEAWPPFHRMGTLVRIGGDLARDASGCERGNLPLKRGSSLK

SEQ ID NO: 71090 - protein, 112 aa, Zea mays
  Coding DNA Sequence Number=SeqID_27715
  Subcellular localization annotation: CTP_CleavageSite=29; ConfidenceScore=5.50e-01
MANYPRKGKVSKQLVCSWSSNTTLHCAAAAAVRRGRGRRKATARQNGGSTTAPPNELTSVALALHSSLQRATFDTVCRLTRVDVDDEPATGGAALESKHALQLTVSPQGFDI

SEQ ID NO: 71091 - protein, 123 aa, Zea mays
  Coding DNA Sequence Number=SeqID_27716
MAPKKGTSKAMTSIDDPAKVVLLAEKKSTASDTAKRTRLRYRAAFAHATLRDYLGPLYQASPPEDDDIIEDSQVLGISAEDQLKLCALCIKNNHLQKQKEILATKRQLITMQAKVKQMILDEK

SEQ ID NO: 71092 - protein, 381 aa, Zea mays
  Coding DNA Sequence Number=SeqID_27717
  Homolog annotation: Hit_ID=Q8H614; Match level="QueryCoverage=63%, HitCoverage=99%, E-value=2e-33, Identity=39%"; Hit description =Putative uncharacterized protein OSJNBa0035I03.14
MEEAMREQQERFREELQQQQMAFVQQQWEAGTTTTIRLPSISVADDSVVITCSDTSTSEVMGHNMPPPVIQAPGGAFGMEGATTEDTPNQTDDFANNFFASGAPREHETRLTTPRAASLTAAAVVAARRARSDEADERMDWYAWLCRAGLHPDVAFEYALLFARNELGATDVRHLDHDFLLSMGVAVAKHRLEILKLARKETSSHGRAAAITVLPWRATRLLAAAVHRSASSALGRLRASVSRGQDRDRDRARAAAAVLATPRLPLLRHRGGRVAHSWSKIASPVAIRGGKPRALPMLTRISKPVVLTNSCADKWRGDGAAVKTLPAPAGSIAACLESTDVCSCDEYEDGEVSDEEEVVVKHSGDGEEMRWESMFQDLKPN

SEQ ID NO: 71093 - protein, 561 aa, Zea mays
  Coding DNA Sequence Number=SeqID_27718
  Gene Ontology: Mol. function=binding
  Homolog annotation: Hit_ID=Q8H613; Match level="QueryCoverage=100%, HitCoverage=100%, E-value=0.0, Identity=67%"; Hit description =Nodulin-like protein
  Pfam annotation: Domain name=MFS_1; Domain location=18-484; Score= -7.0; E_value=0.032; Accession=PF07690.7; Description=Major Facilitator Superfamily
  Pfam annotation: Domain name=Nodulin-like; Domain location=14-261; Score=400.5; E_value=2.5e-117; Accession=PF06813.4; Description =Nodulin-like
  Pfam module annotation: Pfam domain module=MFS_1::Nodulin-like; Domain location=18-484::14-261
MRGPASVKAGSRPPWLGLGAAAWVQVAGGAGSTFALYSHALKVALGADQSRLALLGVACDVGENLGLLPGVLCNRLHPALLLIIGAGACLLGYGTAWLLVSGVAPALPYWLIWFGLCLATNGGAWLATAVLVTNMRNFPVSRGAVAGILKGYSGLSAAVYTEIYTGVLRDSPINLLLFLTLGIPAVCLLAMYFVQPCEPSLVETNAEQVHFMFAQVASVFLGVYLVGATILDHIVTLNDIMNYSLLVIMVLLIFAPLAIPLKMTLFLKKKSRSDSHSPTTDNGHTEPLLPSSSESNLGNLEDDTTDIDILLAEGEGAIKPKRRRPRRGEDFRFREAILKADFWLLFAICFVGFGSGITVLNNLAQIGIAAGAVDTTISLSVFSFCNFFGRLGGGVVSEYLVRSRTLPRSVLIIGTQAVMIITYLLFALGRLATLYVSVALLGICFGISLSVIISTSSELFGLKHFGKIFNFIALANPVGAFLFNTLAGYVYDLEVEKQHATTSGSDVACHGPNCFRLTFCVLSGVACLGTLLSTVLTVRVRPVYQMLYAGGSFSQPRNPAH

SEQ ID NO: 71094 - protein, 168 aa, Zea mays
  Coding DNA Sequence Number=SeqID_27719
  Subcellular localization annotation: CTP_CleavageSite=38; ConfidenceScore=5.23e-01
MGVAAAFLDGLVLTPVGGRGRGPLRTRCGGRHRRQATSAKAKQPHRLRTTPWNELPFFRIGPQAVGPSCFRREVLNYQQARLMRADLTGLAYTYAVPSYKREKNSTLKFAPMDRTYRDAPVVRKRYSFSHSKIVTSGSAYPRHLEGSFPAGGDEREMCPWAISKDFGD

SEQ ID NO: 71095 - protein, 866 aa, Zea mays
  Coding DNA Sequence Number=SeqID_27720
  Gene Ontology: Mol. function=actin binding; Cellular component =cytoskeleton; Biological process=cytoskeleton organization and biogenesis
  Homolog annotation: Hit_ID=A3B030; Match level="QueryCoverage=80%, HitCoverage=84%, E-value=0.0, Identity=71%"; Hit description =Putative uncharacterized protein
  Pfam annotation: Domain name=Gelsolin; Domain location=144-224; Score= 26.3; E_value=0.00011; Accession=PF00626.13; Description=Gelsolin repeat
  Pfam annotation: Domain name=Gelsolin; Domain location=24-107; Score =48.0; E_value=3.3e-11; Accession=PF00626.13; Description=Gelsolin repeat
  Pfam annotation: Domain name=Gelsolin; Domain location=260-336; Score= 27.5; E_value=4.9e-05; Accession=PF00626.13; Description=Gelsolin repeat
  Pfam annotation: Domain name=Gelsolin; Domain location=395-476; Score= 29.0; E_value=1.8e-05; Accession=PF00626.13; Description=Gelsolin repeat
  Pfam annotation: Domain name=Gelsolin; Domain location=606-683; Score= 5.5; E_value=0.12; Accession=PF00626.13; Description=Gelsolin repeat
  Pfam module annotation: Pfam domain module=Gelsolin::Gelsolin::Gelsoli n::Gelsolin::Gelsolin; Domain location=144-224::24-107::260-336::395 -476::606-683
MKGVDDGFLGAGDKPGLDIWCIFGSSVVPVAKSQHGKFYTGSTYIILNTTQLKSGVRRHDVHYWVGEEAKEEDCFMASDKAVELDAALGSSTVQYRETQGEESDKFLSYFKPCVIPIQGRFFSHLKGSGDRSSATTMFRCQGEHVARVTQVPFSRSSLDHKSVFIVDTPSKLFLFSGCNSRMQTRAKALDVVKHLKENRHLGRCEIATIEDGKLVGDSDAGEFWNLFGGYAPIPRDLPDAIKEEPLTAPSKKLFWINKKNLVPLEAHPLDREMLNSDRSYMLDCSTEIFLWMGMTTLVSERKSSVAVLEDYVHSQGRSFNVHTFIMTEGHETVDFKLHFQHWSRNVELKLYEAGREKVAAIFKHQGYDVTEIPEDKPQQFINCNGSLKVWLVDHGCTNLLSTEDQEKLYTGDCYIIRYSYFENGKNYHLFFAWSGKNSVKDDRMAATSLMSSMVDSVKGHPVVAQVFEGGEPELFLSVFKSLIIFKGGRSAAYKSSVLQKSPRNGCHESEGVALFRVQGLKHYCVQAIQVDLVSLVKLQVHLIPRTVIFCKTTPMEQSLLVREGSEPDHFWKALGGRSEYSKEKRVKGWPADPHLYACRFEQGLLKVKEVFSFCKDDLATEETLILDCNEEIYVWVGLHSDITSKEQALNVGKMFLKDAVHGGRSMETTVYAVTEGDEPGFFTSFFDWDNSKQSYMVGNSFERKLAVLKGVSPKLETPDRSLRRPSRRPGVSSEPTTPEHQQPTARRAFGSTSAGRFARERSPAVAPPTLSPSPKSRSSSSTPTTVARRLFPASVHASEAVHVVSTATARRRPNRLSVRNVKPSPSTPRLTIALEVTRDFARQRLRRHRSLACGDEGVGVLDHLKE

SEQ ID NO: 71096 - protein, 34 aa, Zea mays
  Coding DNA Sequence Number=SeqID_27721
MVVDGLRLRLIGLLRPHTQSHASLTDQPPFLAYS

SEQ ID NO: 71097 - protein, 249 aa, Zea mays
  Coding DNA Sequence Number=SeqID_27722
  Gene Ontology: Mol. function=transferase activity
  Homolog annotation: Hit_ID=A2Y092; Match level="QueryCoverage=46%, HitCoverage=24%, E-value=2e-27, Identity=55%"; Hit description =Putative uncharacterized protein
MNFPLPSLLTAAPVEYADPPQAAAGNGIRGRAIRGPSPIGRALLTEPVWCREILDARSPQRPSFPHREYDPVPPSLSFPPPGDMVMRTFTFGPGHVAAIKKSISAQRGSGGGKATTFKTLAAFVWRARTVALEIPADEDARLVIAASVRGVRDLGLPTGYYRIDPQLSDLELGLLGRELGLQERDDGDSLLDGARAAGRTCAEERGKYASKDRASADALDGADPAVDTDPDVGARDGDAASGTCDLGLR

SEQ ID NO: 71098 - protein, 225 aa, Zea mays
  Coding DNA Sequence Number=SeqID_27723
  Homolog annotation: Hit_ID=A7QG38; Match level="QueryCoverage=87%, HitCoverage=42%, E-value=9e-24, Identity=46%"; Hit description =Chromosome undetermined scaffold_91, whole genome shotgun sequence
MKKTRWWSRLKAKLKSFRPHGHPQRIADASRSPEPPGAPCAEQAPGSYNYARHAPQPTLAFVAPPPSPATSVLTSESPSPVVLLNANASSYSSPTASIFAIGPYAREPQQLVSPPAFSASAGLTEPSTAPLTPPPESSLQLLATTPSSPEVPFAQFLWSSAAADQQAHCFGGGTGTGTGTASDGFLHAYQLQPGSPVLKSPGSTCLVAATMEHGAAALGAKAQCW

SEQ ID NO: 71099 - protein, 151 aa, Zea mays
  Coding DNA Sequence Number=SeqID_27724
  Homolog annotation: Hit_ID=Q6JAD6; Match level="QueryCoverage=53%, HitCoverage=11%, E-value=1e-19, Identity=64%"; Hit description =Putative uncharacterized protein
MVRTKNVSASRGGDDEDPLRPFRQVKGKTVYLEQQEGRKKRRMDRAAHAALAAVAAVEQAEQGGQLQIPSDQIAYRVRRLASRPRSITPSTPSTTISTPPPTSPTHVAPEPSSTFAIPTTSTTPASTIPPPAPISAPPISPPRFRERVKGN

SEQ ID NO: 71100 - protein, 87 aa, Zea mays
  Coding DNA Sequence Number=SeqID_27725
MGLLVAERAYVRSVERAGLEGSDDSEEEDSLEDYEEEDSEEEGGSGSDGNGYEAMTRVAATAMRAARAASAQAATTIVAMMRRQGRQ

SEQ ID NO: 71101 - protein, 459 aa, Zea mays
  Coding DNA Sequence Number=SeqID_27726
MAVTEEGPSQEATSATKKRKIALGGRMSSPELRESSARMLEVTGGRWPKNVPIPRAASEDFFTSRMARDLKVFPYGRNIAAVVSAVMERDRQDAAQKRWAVVRIADPMREAKKARGSAKAAASGSSKPVPAAKPASPGHSKALASVKVAASGGSKPPPGGPVKGRRLPSRRDVLPTSARTSVSMIILLYHGAGSGEGQLAIVPPPVATTSPTAVAGAKGAARDPWATFCTSGEILSADAAKDVAGSMSQRLREASRQLSQQLKRAADFADHVASGALTADVAAEVESLQAQHADVVREKSATERKNHRLSEKVAAMEAEKTDLRRQLAEERREANKAIADAQAVQAEAKVARAEGSLARQRAEELEARFNALRSHVDKAKALRARRSSERTRNSWMRTGSWEELLLLPTIVMGFMSFASLVTCEGAVNALSREGCRHYEVFDQADETLNVKSSRSKTLC

SEQ ID NO: 71102 - protein, 117 aa, Zea mays
  Coding DNA Sequence Number=SeqID_27727
MAATEGIGHRNCSLRLHLGRSREGHRAQGGISPTMPAGRAEASAIGTAPCTCTKEGVVGRRMNKRWLGDAAPWRRGGAAARLHEWSRGEEGRPAWEELYVRTGNRENKKLLVAARKK

SEQ ID NO: 71103 - protein, 167 aa, Zea mays
  Coding DNA Sequence Number=SeqID_27728
  Subcellular localization annotation: CTP_CleavageSite=38; ConfidenceScore=5.05e-01
MARAHAYKAPRDFDRTPPHALDLTGAQTHRRLPVHGVSAAARSPCHRRPANRTLPNPVRPSEKTEHTSVKLPEQGIGVCFAGEASSRSPDSTRPPASVDREVAPDPAPEPAPEDLPATALEGKPRNPIEMNTRSLEDMVAGVTWPSILPPGWTVEWDPASAEEEHEE

SEQ ID NO: 71104 - protein, 161 aa, Zea mays
  Coding DNA Sequence Number=SeqID_27729
MGPLGFELGIKVNIPDLWLKQPSRLHLTHCIDVEWTLVVRPRLPRVVAPEAVFLAAEAAWELAVAVGGLEPCPGAKSISWSVVDARVGGLGVREFPHRSTSTTVEPRDAMGDGLQTAAQELGRVDLMTHAIDPTAGEGPAASCVGLREEECAATVDLFADG

SEQ ID NO: 71105 - protein, 168 aa, Zea mays
  Coding DNA Sequence Number=SeqID_27730
  Homolog annotation: Hit_ID=Q6JAD6; Match level="QueryCoverage=44%, HitCoverage=10%, E-value=2e-07, Identity=41%"; Hit description =Putative uncharacterized protein
ATFSVKRLRCDYWLLIRVSSTFSFLLQPEYTDSDTHRCQFRGSSYLSARTAFTIDHEWQGTLEASLLQLSSYLPTPEDPVPVPDSVSDIWAEDETFRQFETQGAVANTSSDNDEGLGIPPPAPVPPRSHDHEAGSSSAAPALLTLLWPLFFSHLCNIRLIWQQSRLNR

SEQ ID NO: 71106 - protein, 605 aa, Zea mays
  Coding DNA Sequence Number=SeqID_27731
  Homolog annotation: Hit_ID=A2Z497; Match level="QueryCoverage=33%, HitCoverage=65%, E-value=2e-64, Identity=64%"; Hit description =Putative uncharacterized protein
  Pfam annotation: Domain name=C2; Domain location=288-376; Score=51.8; E_value=2.4e-12; Accession=PF00168.21; Description=C2 domain
  Subcellular localization annotation: CTP_CleavageSite=30; ConfidenceScore=5.12e-01
MAAPTRDGAESVIHPRAPTSTRPCGPLVPRTPTKRTSDKPKVTGELDPFSLLVSFWWDGGVDARTWHHGAEIGVLGIYGQGTVNVGQVRHARRPLEGLPGRAGSGELDLRGEDRSVGKDPRVSARDGRQTRGPSVPESSPSARGIPLADKPAPEVSEGIEGQRGKAVRSRGEVAGRRMSGQTWAGGNRHARTQQARPGPGSRVEIPSMTRFHWHTSPRSSRQGRKAGRQNPASRRPLFPDPAAKSLFMYAGPVRAIHAEAKVFPFYPSSPLIHPIRPPATAMGSRYEVEVTVGSARDLKNVNWRNGELKPYAVVWIDSGAKCSTRVDLDNGENPTWDEKLLVPLPPTSRLDDAVLYIDVVHANAAEGVKPLVGSARLPLRDVLDDAGIGGKASRNLRLKRPSGRPHGHLDVRVAVKEPSRYYDPNPYPAPAGYANAGTRDPYGSSAAAGGYYGSGGGYGSGGGYGGSGSYGAAQPYTAAPPAGYPSTYGSAPPPQPGYGAPPVAAAYGAPPVAAAYGAPPVDAATAAYGTSAVGADGKKKNKMGMGTGLAVGAAAGVLGGLALAGGASYLEDKFEERVSERVEENLEREDSYGGGYDNYGGDDDY

SEQ ID NO: 71107 - protein, 222 aa, Zea mays
  Coding DNA Sequence Number=SeqID_27732
MTSIFLPRYPKPRKVPTNPRWCPNAKGIPCEGQAPRSSNSVESRDSSPHASGAPLLAPLGRSHPSPLSSFRPKTPRASFPQWFGGLKKKFAGRFLSKHRRADDIDYNLATDSEAQSLAEGSVSLDTEDAPHTHPDYPIDVTGWTYPKGTLMNTKFHKHQAKTIFEGQCETAHTPFRPFKNEIDFLTRHLTPFPDDEGVPADDFAAQPEAHPAQQMPPPHEQG

SEQ ID NO: 71108 - protein, 61 aa, Zea mays
  Coding DNA Sequence Number=SeqID_27733
MGHSASGSGRNACLRSLLIRHPLKYSFLAFEGKTSDEMPFSPCNDGTRIEYRYYRVVLDKI

SEQ ID NO: 71109 - protein, 255 aa, Zea mays
  Coding DNA Sequence Number=SeqID_27734
  Gene Ontology: Mol. function=potassium ion transmembrane transporter activity; Cellular component=integral to membrane; Biological process=potassium ion transport
  Homolog annotation: Hit_ID=Q94J37; Match level="QueryCoverage=36%, HitCoverage=23%, E-value=2e-27, Identity=63%"; Hit description =Pentatricopeptide (PPR) repeat-containing protein-like
  Pfam annotation: Domain name=HMG-CoA_red; Domain location=11-211; Score=-277.1; E_value=1.3e-05; Accession=PF00368.9; Description =Hydroxymethylglutaryl-coenzyme A reductase
  Pfam annotation: Domain name=PPR; Domain location=110-144; Score =25.7; E_value=0.00017; Accession=PF01535.11; Description=PPR repeat
  Pfam annotation: Domain name=PPR; Domain location=74-108; Score=8.1; E_value=0.86; Accession=PF01535.11; Description=PPR repeat
  Pfam module annotation: Pfam domain module=HMG-CoA_red::PPR::PPR; Domain location=11-211::110-144::74-108
  Subcellular localization annotation: CTP_CleavageSite=8; ConfidenceScore=5.06e-01
MRKPASTPATVLSSHPLTLRLLARLLALLAPRLIRPSHPALSSLPLHPTSPAADPSQEDLDHTDAVAGCPVDTRTVNVLIRGYGQSLHLNDVLRLLHQMRPLYGCEPDAFTYRYLVHGLSAQGRTRNARELFDEMRGSGLLGSHTSSQCITMMEAVNDGGDLHISVTMPSIEGTCLNLLGVRGPNRDSPGANARDVGVVHILGNTVIGARRDLGFIKKIAINYLYAFLRKIYRENNTIFNDPHESLLNVGQVFYV

SEQ ID NO: 71110 - protein, 179 aa, Zea mays
  Coding DNA Sequence Number=SeqID_27735
  Homolog annotation: Hit_ID=Q6Z8P2; Match level="QueryCoverage=30%, HitCoverage=12%, E-value=2e-08, Identity=59%"; Hit description =Putative aminoacylase
  Subcellular localization annotation: CTP_CleavageSite=33; ConfidenceScore=5.02e-01
MYCLMSGAPVWASLTSARALNAPQGAVGAKESRCSAGKGLTRRHHRVGPTLSQQPLPWLGGLAGPPGCPWRAPSTAPYFLSFTCVSSSSQSPDLEAISRFQEHLRIDTVQPAPDYAVAFPRRQSSMAGCVARTLWLVAGYPVSSRGDTPVAESGRRMEARKVRDAAEDPCWACRSGLGS

SEQ ID NO: 71111 - protein, 106 aa, Zea mays
  Coding DNA Sequence Number=SeqID_27736
MSDGDGPPPVFDGDDFPYWNIRMEAYLEAIDIGIYKAATQGFLEPRDPTNLVGEEYDADINTNTSTSTPAAPSPAQAPPLPPGPVTRARARELNYIMLLKNEGPEE

SEQ ID NO: 71112 - protein, 129 aa, Zea mays
  Coding DNA Sequence Number=SeqID_27737
  Homolog annotation: Hit_ID=Q8SA86; Match level="QueryCoverage=21%, HitCoverage=3%, E-value=6e-08, Identity=92%"; Hit description =Putative retrotransposon protein
MCNEILGNYTKKEDQLMTAAFGTRPKRRQAARMVKEDEEILKRRKSSPEPKKKGEPSAVKKSVGPKRQRIITVIEAIEETPPPASASKTPAAENDAATEAAPPKLQLPKLKRSKIQIWRTLFVILIKRF

SEQ ID NO: 71113 - protein, 140 aa, Zea mays
  Coding DNA Sequence Number=SeqID_27738
MGAASLNLTPWRHWIGKSREQGKEKGVRALNRRERGLEGEAGRRGLTSTAQDPRSAFRGDVEEHPDKWVPHGSGTPMAKPVKRARWEFAAGWLACGPPHARTVARTGEHSDGRGPAVGARDTAGCAKGYSGGPSKGNQPR

SEQ ID NO: 71114 - protein, 150 aa, Zea mays
  Coding DNA Sequence Number=SeqID_27739
  Gene Ontology: Mol. function=3'-5'-exoribonuclease activity; Cellular component=nuclear exosome (RNase complex); Biological process=RNA processing
  Homolog annotation: Hit_ID=A2X5Y3; Match level="QueryCoverage=53%, HitCoverage=19%, E-value=8e-37, Identity=87%"; Hit description =Putative uncharacterized protein
MEMTLLNISGADLSDLAVEHSLCPSKENGDNSKFLLARENLLGVLHSNEFYGHFLRNLIDAANIAALAALSTFWRPECTVGGDDGQQVTVHDPEVRDPLPLTIHHMPIAITFAYFGEGNIVVLDPTYKEEAVMGWRMTAIVNSNGDVCAI

SEQ ID NO: 71115 - protein, 189 aa, Zea mays
  Coding DNA Sequence Number=SeqID_27740
MGAAGHLAEREVGCVCLANGGAEARGTRAASGEAHPSLERGERVALQLDQAARTRALGSGAGIAATAAVSPARAGGRLGLRLSRGRDVDGERSATRRRSARLPRETGWSGLAMREWEEREEGSEIVFGDAACLVLSTVEERWVWRWHGGRGWARLGATDAVGHGSGGGSVGAVGRGGGSARGGGAVVEA

SEQ ID NO: 71116 - protein, 65 aa, Zea mays
  Coding DNA Sequence Number=SeqID_27741
MAASELFPLPCAAAAPWPWISNGARAVSRVPLHDDEDGYDHAYGNGKEGVEADLQEFQDVDEFED

SEQ ID NO: 71117 - protein, 203 aa, Zea mays
  Coding DNA Sequence Number=SeqID_27742
  Homolog annotation: Hit_ID=Q2QNH3; Match level="QueryCoverage=88%, HitCoverage=10%, E-value=8e-09, Identity=25%"; Hit description =Retrotransposon protein, putative, Ty1-copia subclass
MFNIIEPTKLGIPKKRGETLGLRHHAAIINKIALVTILPKSGDKSKIKDKFLNIIDHVMKGEVMNVVLFKMRQLNDLKMDKNQNLVYAPYIMALIKAKTIFEGRYFDPYFQQMQHRLQTHMDGRFQGMMMHVDGRFDAMQTHFDGQYSALNTRFNAVDNHLDGMHSQFDYLRSRIQDTVHDPIMSKMNNMQQSFQDNMGALSN

SEQ ID NO: 71118 - protein, 374 aa, Zea mays
  Coding DNA Sequence Number=SeqID_27743
MAERYQLPRSCVPPTTRRKDCGHPPSGGLEGGKTRCIREREDMVAFQGGHPPFKGDSPYLRPKPSWAESSPTRSKVLPLRRGGWVSRVMQAGPERKKPNCRARCMQPPSGYKRLSTFAQTSGRKDGQPCRRHATAPSGRTSPTSNTPSMGAQAHASFNRRAGCCVRATAPPPAPLPRLLDCGTNNATRGDPAHDPAAPAWRDGQCGQKWAGSNGGGRRQEQRSRRQPSLRPIRGQRENPLSRREDDAPVFRSSNGSRTRNGRPANRTPSRINSAAGKAGPEKGDTPKRILPREGTRLRASLLIRGSKAGPSEGFNSRLRARGLHTHYWSEVRRPAPRKGSTTASGYSGSAPTTDQGFEGWPSKGSQPPQTQSEG

SEQ ID NO: 71119 - protein, 74 aa, Zea mays
  Coding DNA Sequence Number=SeqID_27744
MDRVQYSDLMPLSFASEPASDNSKREALSSIQVAALLDQHVSASTFTRWYRWTQNELTIPLTLRHTKNNNMDMY

SEQ ID NO: 71120 - protein, 96 aa, Zea mays
  Coding DNA Sequence Number=SeqID_27745
  Homolog annotation: Hit_ID=Q6QP54; Match level="QueryCoverage=57%, HitCoverage=19%, E-value=5e-07, Identity=52%"; Hit description =Putative kinase
MAPPVGVVGPRPRLGDVEAPPRSRSSLSFAAVVEPEPLGRAKRRPSAKARAESEPWGRAKRSGAAQAALSLCQVGQWSGEVTAVTSALSTEGRASG

SEQ ID NO: 71121 - protein, 86 aa, Zea mays
  Coding DNA Sequence Number=SeqID_27746
VCTRIENDPVEEPEELAGEAPEQESVGGGKIRGVVRFAVVPSMGLGVCGSLCQGGYEIDGFGYDYGAGEFEAVEGDFQEFQDYDEF

SEQ ID NO: 71122 - protein, 95 aa, Zea mays
  Coding DNA Sequence Number=SeqID_27747
MPCFHPELVLLDCSAGSQGQEDEVPADSASRTGLLLTDCSSDSDADAEDIAFETAAAEINAAFTGSRLGDAANPRLEHVVVLKLLEVSFHGFIFS

SEQ ID NO: 71123 - protein, 162 aa, Zea mays
  Coding DNA Sequence Number=SeqID_27748
MGAASLNLTPWRHWIGKSREQGKEKGVHALNRRERGLEGEAGRRGLTSTAQDPRSAFRGDVEEHPDKWVPHGSGTPMAKPVKRARWEFAAGWLACGPPHARTVARTGEHSDGRGPAVGARDTAGCAKGYSGGPRRHPKQLAMNQQGPTRYHQQSPKLGQRER

SEQ ID NO: 71124 - protein, 148 aa, Zea mays
  Coding DNA Sequence Number=SeqID_27749
MAAPSAVCPGRAHGCALARPYPSPCPGGNEIDGFCIGIDSGNAFENKSPTLAPTSGELTSTLELMASFSSHAEASSAMKLVLPITGGSAEFAIRPYLARWCNLLALRLIGHLMDVLWLVFTSLLSVRFCTSPAIFGFPLILTDISFLS

SEQ ID NO: 71125 - protein, 147 aa, Zea mays
  Coding DNA Sequence Number=SeqID_27750
MARAHAYKTPRDLDRTPPHALNLAGAQTHRRLPVDSVSAAARSPCHRRPGQQDPSQPRPALGGDCAHLGEAPRARNRSLLRRRAKSTVAGLHPTAGERRPDCNLADGEYVLVPEQGAAQEVAPDPAPEPAPEDLPATALEGKPRFYA

SEQ ID NO: 71126 - protein, 52 aa, Zea mays
  Coding DNA Sequence Number=SeqID_27751
MATTLFGGRGPPHGSSEATEPSFIVWTPNPTQREKISTPRRFRQVSIIKKST

SEQ ID NO: 71127 - protein, 313 aa, Zea mays
  Coding DNA Sequence Number=SeqID_27752
  Gene Ontology: Mol. function=drug transporter activity; Cellular component=membrane; Biological process=multidrug transport
  Homolog annotation: Hit_ID=Q6Z493; Match level="QueryCoverage=61%, HitCoverage=43%, E-value=3e-45, Identity=46%"; Hit description =Putative MATE efflux protein family protein
  Pfam annotation: Domain name=MatE; Domain location=121-261; Score =47.8; E_value=3.7e-11; Accession=PF01554.9; Description=MatE
  Pfam annotation: Domain name=NAM; Domain location=27-122; Score=43.4; E_value=1.6e-11; Accession=PF02365.6; Description=No apical meristem (NAM) protein
  Pfam module annotation: Pfam domain module=MatE::NAM; Domain location= 121-261::27-122
MRAHGRPVSHPQLTLLVRLHTAARRPLRALHALSRFRHEFDVEVYKSHPSHLPERSALQTGDRQWFFFSRMDRKYPNGSLASRTTGDGYWKATGKDCFICGGVRAVGNRKTLVYHHGRARLEFWCFPLVGVPSQNTEAISYMITYGFAAVISTRVSNELGARNIANAKKALTVSLALSLMLGVAFLLLLGLGHDLLVRLFTTSEVVVSAFASMTPLLIGSVVLDSTQGVLCGVARGCGWQHLVAWTNLVAFYVIGLPLAILFGFTLGFQTKGLWMGQICGLLCQNCVLFFITLRTNWQELDLTMFNKDNDFVC

SEQ ID NO: 71128 - protein, 113 aa, Zea mays
  Coding DNA Sequence Number=SeqID_27753
  Subcellular localization annotation: CTP_CleavageSite=44; ConfidenceScore=5.28e-01
MAQWLTRSTFAGGRRDSGDRGLASPAKQTSIPRSGSFTEVCSVVSEGRTGLGKAGLAGLRRQWLGWPRTRRARPNDARPSRKRANLGKNPARVFSWHLGLSLIRESPWQICPR

SEQ ID NO: 71129 - protein, 278 aa, Zea mays
  Coding DNA Sequence Number=SeqID_27754
MTSHGSSDDGNALSHTDELAREGFPCILWEVLQGAGYTMPPQYAVQQFEKHRVPRCRPGWRSLDSESFGYRAEDTIEAIALHGLTTFCGFHPLELSTHPIGLFPAEREDDPMWKDRVEHAKDIWAIYPGQTAHLTVRCMNALYRLQVMRGEAMSHLMALLEATKITLDNREELVVDLSTEMVEKDLQVEQLSNEIQELEELVGTRENTIEVLEDQLINTQQQLAEANEHLDMHHQEIQDMEANEDVDIEGGEEPASSVDTAGSGRPPSPESSVASFAH

SEQ ID NO: 71130 - protein, 82 aa, Zea mays
  Coding DNA Sequence Number=SeqID_27755
  Subcellular localization annotation: CTP_CleavageSite=33; ConfidenceScore=5.35e-01
MAQWLTRSTFAGGRRDSGDRGLASPAKQTSIPRSGSFTEVCSVVFEGRTGLGKAGLASLRRQGLGWPRTRRARANDGEFELR

SEQ ID NO: 71131 - protein, 74 aa, Zea mays
  Coding DNA Sequence Number=SeqID_27756
MAMMGSTLEKMYLCQVKKQQTFVASVPRWYQKKRIKTKLREESFGRDCFSFDSNIFALASFFQLLVVPIEILKS

SEQ ID NO: 71132 - protein, 97 aa, Zea mays
  Coding DNA Sequence Number=SeqID_27757
MGARNWRMAHRIARPTRGGGRPKSSDGDLAVPMRQGFDPCLKKLHGSSGKLSKGSVEAEGLWKWLAAVTGARVAQAGGAELAGAKESVWSAKAYGFC

SEQ ID NO: 71133 - protein, 78 aa, Zea mays
  Coding DNA Sequence Number=SeqID_27758
MTHDFAMTAKLPPYEDMMDEFKVADLLIKLLFSGWWASDLLLLFPCFSNESFVPLIRIKGKAAAIQATVVHCRLSSQP

SEQ ID NO: 71134 - protein, 84 aa, Zea mays
  Coding DNA Sequence Number=SeqID_27759
MALDYGHNYQNPQGLPYKSLDGGLFLNKDMVSLAKFLGRRGTLRLGPSDLSPTLQIKSSIFRIDGIKIRALDMSNLGFPLGVQQ

SEQ ID NO: 71135 - protein, 432 aa, Zea mays
  Coding DNA Sequence Number=SeqID_27760
  Gene Ontology: Mol. function=protein serine/threonine kinase activity; Cellular component=microtubule organizing center; Biological process=microtubule cytoskeleton organization and biogenesis
  Homolog annotation: Hit_ID=A2YPQ7; Match level="QueryCoverage=21%, HitCoverage=19%, E-value=3e-35, Identity=78%"; Hit description =Putative uncharacterized protein
  Subcellular localization annotation: CTP_CleavageSite=55; ConfidenceScore=5.62e-01
TAPAPDNPTPASARTPETSLQETAGITTRPPYRPPANPSANRPNTRRNPASFSCYSSSLRERTSGTTSGAGGRPGSRAHGAPPGGLVLVSKDLDNIREIALREYTELVIDETKVSEAALVRNVLYACQGVSDREPWRNPSCPAPPPRRRARPLFSYLVVFSNCPLVAAVPFALSIYVLATWHAKLNLLPNQQATNEVWGFISDNISRSPSDAAIEVGTVTQAFCSALQEELSDYYKLLAVLESYSLNPIPTPGSNSARYLLILYLRGQGQASMHWTVLFESVLASFAPPVVGFLVEHVYGEPVHRQVIDNGLLPILVKIMKKKKRRLITHANAKSKSEKFPPLHQDGALGFPLGCSNHMEPSFEPPDPSSFSTVFPYEKSTVPTWSGPLADSAAGNQKRKHKSGRSSKQPATARARKSGHRRLFGTIWNVRF

SEQ ID NO: 71136 - protein, 114 aa, Zea mays
  Coding DNA Sequence Number=SeqID_27761
MTRGPGAAVYRLYSSLPNHLASAYIGGRVPPTPLPHTSVPEFHVIESRSRTAPEDRIWNLAVYKGSSSLISCEKQTIRIEFLNLARLESLFLIFLVDSSLLENEHVLSVSEVAI

SEQ ID NO: 71137 - protein, 114 aa, Zea mays
  Coding DNA Sequence Number=SeqID_27762
MKNPVFSFLMLKGCKINADTQAVQAIGQTLAAMQQAQQQPQPQLQVQMPQMPRDKRGRVLYGPRQLREQPSPGGESYLATHADPEASLGDSAKSFADTMCQRTDDREKEEFLPL

SEQ ID NO: 71138 - protein, 57 aa, Zea mays; identical to SEQ ID NO: 64452
  Coding DNA Sequence Number=SeqID_27763

SEQ ID NO: 71139 - protein, 130 aa, Zea mays
  Coding DNA Sequence Number=SeqID_27764
MAFFYLDLVLVCRELDGQGGSTAAGGFGRAGSGTWGLGIGRGSGVAARRAGRGSGGYGEARRNFDEQSASAGRGREERESLSESGREGADLGRSTYREGRGERDARGVDGFKVLQTYPLKRISSSRLRNF

SEQ ID NO: 71140 - protein, 57 aa, Zea mays
  Coding DNA Sequence Number=SeqID_27765
MALLSTVETCPVSNLSWCCLTVLLICWGSDGVGVGMGGEVYLGLAGGIAIRLVSTLR

SEQ ID NO: 71141 - protein, 207 aa, Zea mays
  Coding DNA Sequence Number=SeqID_27766
  Homolog annotation: Hit_ID=Q93FQ9; Match level="QueryCoverage=49%, HitCoverage=56%, E-value=3e-10, Identity=36%"; Hit description=Cell surface mucin-like protein
MGYLSGTVIRGTPKTPKLGWSKLRPLKGHDLASPEPSLGQEQQTQENSAACPAPTTVPPARVRLTAAKSSLRRHRKLRLARPQGSDSTTTPEDGLRLARPQGSDSTSTPEDGLRLARPRGSDSTSTSEDGLRLARPQGSDSTSTSEDGLHLARPQGSDSTSTPEDGLCLARPQGSDSASTLEESPPRPTSGSDRPRYRGVHHYPTPS

SEQ ID NO: 71142 - protein, 106 aa, Zea mays
  Coding DNA Sequence Number=SeqID_27767
MQVACNCTTEMHPFDFDASSVEAQAHTSCNWRTGCYVRKTAPPLTPMSRLLDYGTDAATRSNPAHGPIVPTKHIGHRDRERGYSERDPSPRRKRAPSPPTDQRFEG

SEQ ID NO: 71143 - protein, 99 aa, Zea mays
  Coding DNA Sequence Number=SeqID_27768
MPRVAAIAGDDRASRGRQSDLRLLWQPQPLPKPIAQPPSPPGLGCAAVARLLRECRRRLPTRLGSIAVARSTAGRPPRGGTAVGPRDRRSHAQENHHHR

SEQ ID NO: 71144 - protein, 167 aa, Zea mays
  Coding DNA Sequence Number=SeqID_27769
MPALSPFTAVWARLVSQRTSLFSPRCNLRGDLGHLGDFRDFTCRQDRVSEIRAPLAIKLCPVTPFPSVLARAAATEIHRTLNSPALPFCTNGVALGHRKRARNPLWVGAQLGVVGGLGNCSPEHSPAAHPPFAVARHHLGTIAGKYTSIVFALRSSRHSIGEFGHGA

SEQ ID NO: 71145 - protein, 110 aa, Zea mays
  Coding DNA Sequence Number=SeqID_27770
MDQLLAMEYCIDCNPSWAGLEGSSGCGKENNDTAEPQAPMDCPSVSVPHLLVAPATRLEGDDLLVARSAHPSSIAAAAGMGMVNTSILGQSSHGASTSTIEAEELPSSAF

SEQ ID NO: 71146 - protein, 68 aa, Zea mays
  Coding DNA Sequence Number=SeqID_27771
MELKETNICCPIHRQGQVCCRSEAMGFKATRFSVLVLNAKGGEIKAKATGSTATCDFKKPFCVLNVSI

SEQ ID NO: 71147 - protein, 104 aa, Zea mays
  Coding DNA Sequence Number=SeqID_27772
  Gene Ontology: Mol. function=pyrroline-5-carboxylate reductase activity; Biological process=amino acid biosynthetic process
  Homolog annotation: Hit_ID=Q4TZJ2; Match level="QueryCoverage=33%, HitCoverage=12%, E-value=1e-11, Identity=97%"; Hit description =Pyrroline-5-carboxylate reductase
MATQDDENRVRKLLSAIGKVWTAEEKYFDAVTGLSMPWLWGINRGTTAAGKLSLPIFGLAPYKLRASIWTSDKTQEWDRVTSLMQEADSWLRTIQVQRGDDPWL

SEQ ID NO: 71148 - protein, 374 aa, Zea mays
  Coding DNA Sequence Number=SeqID_27773
MTVAGGREQRSRRRPDSRPVKGQQENPLSQREDRAPVEKRTTLRLRRNNRAKKGCPSEGFNSRLRSRGPYTHYWSEAGPRRVHSRLRRRARDDQGYVRYITKARVALPRARTQAKPRKTANSAPPAPGLGLGLSPGRRRTPLRPTQGSDSGSAPEDDELHFARPRARTPPGPLPNNLRLARPRGSGSASAMEDRLDLSFGGASTSPDPGHRPATSTGSAIITLPQADSGRREQDRSLTEAGGRQQGLNRSDSCPSARLRCSSDSHDITTAGCQDLSGCHIGMAFLEKVGRAGTRTGQALSWGRSLPSPAWTLVTPYCKRTRPGRGTNTKAAGFPPLSRPSPATSLPPFALAHALDPSGLGHAAHSLVGLGTPRS

SEQ ID NO: 71149 - protein, 534 aa, Zea mays
  Coding DNA Sequence Number=SeqID_27774
  Gene Ontology: Mol. function=transferase activity, transferring glycosyl groups; Cellular component=integral to membrane; Biological process=metabolic process
  Homolog annotation: Hit_ID=Q8LJ11; Match level="QueryCoverage=89%, HitCoverage=98%, E-value=0.0, Identity=72%"; Hit description =Glucosyltransferase-like
  Pfam annotation: Domain name=UDPGT; Domain location=14-477; Score= -58.0; E_value=1.1e-07; Accession=PF00201.9; Description=UDP -glucoronosyl and UDP-glucosyl transferase
MEATAAETGLAQRPVVLYPSPGMGHLVSMIELGKLLGARGLPVTIVVVEPPFNTGATAPFLAGVSAANPSISFHRLPKVERLPLVSTKHQEALTFEVIRVSNPHLREFLAAATPAVLVVDFFCSIALDVAEELRVPAYFFFTSGAEVLAFFLHLPALHERATASFQDMGEEPVQVPGIPPFPATHAILPVMERDDAAYDGFVKGCADLCRSQGVLVNTFRLLEQRAVETVAAGHCTPPGLPTPPIYCIGPLIKSEEVLGKGGEECLAWLDAQPRASVVLLCFGSIGRFSAEQIREVAAGLEASRQRFLWVVRAPPSDDPAKKFEKPPEPDLDALLPEGFLARTKDRGLVVKSWAPQRDVLAHASVGGFVTHCGWNSVLEAIMAGVPMVAWPLYAEQRLNRVFLEKEMQLAVAVAGYDSDKGLVPAEEVAAKVRWIMDSEGGRMLRERTLAAMRQAKDALREGGESEATLAGLVDDWKHLPDDEWSALGSDARVPIPKVSIKYFIGGDRTFGPDPSSQSCLFSLLPSSVARITNA

SEQ ID NO: 71150 - protein, 84 aa, Zea mays
  Coding DNA Sequence Number=SeqID_27775
MGSRHSACSAEAGCRGSFVLLLLVTLLREERYLIRDVWFTGGDEEDGYDYDYDNGCLWCNLCSGKEEGVEADLQEFQDFGEFED

SEQ ID NO: 71151 - protein, 353 aa, Zea mays
  Coding DNA Sequence Number=SeqID_27776
  Gene Ontology: Mol. function=methyltransferase activity; Biological process=metabolic process
  Homolog annotation: Hit_ID=A3C311; Match level="QueryCoverage=27%, HitCoverage=61%, E-value=8e-22, Identity=59%"; Hit description =Putative uncharacterized protein
MRLGVPFIAPRQLGAVECIPGRQFLPSVAWRTGQSGAPPDTVRFYLRGHWIGRAWSDEATLSRLVGALIAFKPLYSVLKLASREVIIRTAEKSNIPWREMTKEVLESDVNDILDIGCSVGVSTRYLAEKFPSAQAVHVVFEEQFGSGRLLACIYARHGYYILEGKELEFYMKKLQRTGDAEDQGDDEVSGLRVAAEAWATFRRQRGLREGARGREAESRCTDDDIPNVILANTANASSSSFWHNDAYEHFDRYLVRRFFLTSSGVPYDVLTSPKAMARRSLWYMSARALASSSMSWSTWHATYPIAWICAWSSRTFVYASHRLAWTAVSSSPAERRSPLLEDPPLVAASAELE

SEQ ID NO: 71152 - protein, 176 aa, Zea mays
  Coding DNA Sequence Number=SeqID_27777
MVMLATLGCTLLLMCCARSRWRNDLHRARPILWGCLHRSALRTGIRSKPCMPIVGMAVDGLGFYSSHFAKPLSKKPKRSFIGLVKVVEGLVSTEELEKDFEFHFPWGETWKVSVFGTRPRTRGYPSRCFCVGISNTCARPVLSGLPAYTQAAMRIRLGYLVGTKRAHLPICRPGWS

SEQ ID NO: 71153 - protein, 218 aa, Zea mays
  Coding DNA Sequence Number=SeqID_27778
  Gene Ontology: Mol. function=RNA-directed DNA polymerase activity; Biological process=RNA-dependent DNA replication
  Homolog annotation: Hit_ID=Q10RS3; Match level="QueryCoverage=55%, HitCoverage=25%, E-value=1e-13, Identity=32%"; Hit description =Putative uncharacterized protein
MGPKPFARPSSLLVYPGDICPPQKATKCHSLLDDMIDFPKLKMKLSRSKIVVTPGSSQAKPKSKLHDVWFVAENVLEELQNYQAICELGSKVGAVEEVDLLSLDTKDIVRFKVHFKSVAMIPPIIEVGVQPFLYDIFLKIDSIIEEGWNDDSINLGKRASVERHGFDDHAFEKYGKAKNEEDFFEDVDIPAVDDKIHDKILGNDDEDFNESEDDLMSS

SEQ ID NO: 71154 - protein, 105 aa, Zea mays
  Coding DNA Sequence Number=SeqID_27779
MLPSPTASPPNQGRSPHGLRRVNVGAGAETFDVITRPESRIPLNPYLETRNPKQKKLLTTGIFANVKTLDVVITFTPRSSSGNERSMMPNIGATMRSFPGTCYPT

SEQ ID NO: 71155 - protein, 61 aa, Zea mays
  Coding DNA Sequence Number=SeqID_27780
  Subcellular localization annotation: CTP_CleavageSite=26; ConfidenceScore=5.04e-01
MDVFLVFAVVEHVCTPSDTLVLCRCRASHTASLHVPSRACKPSPTRVASPLHFTVRRSDTT

SEQ ID NO: 71156 - protein, 244 aa, Zea mays
  Coding DNA Sequence Number=SeqID_27781
MAERDEVGVLGEVVDHGPNPVLDQCLMARDVEFRAKAVKRLMNALVTHRVGQTQHLVAQVVVSQHKIRGAYSDNPFYRRHGLGSMPSCRWRVSSCASRASLVVVRMSSIWANKGARESAGSCLIAFPCSSDTPREVVPKEITDPLMLWHRGEALVQQVLEAVVIGADDGEECHTACTRPINSHSYAASLRCRAANDRLTKARGSTPWCSTASIPMPNTSQSTMNGLSKYDIYRTGSVVSAPFSA

SEQ ID NO: 71157 - protein, 532 aa, Zea mays
  Coding DNA Sequence Number=SeqID_27782
  Gene Ontology: Mol. function=zinc ion binding; Cellular component =intracellular; Biological process=intracellular transport
  Homolog annotation: Hit_ID=A2Y3G8; Match level="QueryCoverage=84%, HitCoverage=99%, E-value=1e-152, Identity=63%"; Hit description =Putative uncharacterized protein
  Pfam annotation: Domain name=NUP50; Domain location=68-340; Score =176.7; E_value=6e-50; Accession=PF08911.2; Description=NUP50 (Nucleoporin 50 kDa)
  Pfam annotation: Domain name=Ran_BP1; Domain location=370-489; Score =23.0; E_value=6.9e-10; Accession=PF00638.9; Description=RanBP1 domain
  Pfam module annotation: Pfam domain module=NUP50::Ran_BP1; Domain location=68-340::370-489
MNVIPPTSTAGSTHCLRIGAVPLDHCMCRSTSEHTLGLPVADWPVPLISRGIVLSIWKMADEEQAPSSRKRVAGTQINKDNPEPDDEGTEQEMGTFKKATEEVMATRRIVKVRRQQTSSASSNPFSAIRFAPTDSSAQTSAPVPEVQPSDVKVDEGSNGSGKDTLSLPDKTAGSGVNTDSSASTEAPPQPVETSDKAEDTKDESSGDKVVVGEPNEGSCMPSEVEGKTKEGDAEEKERTDEAGNIDKISKDDTGKKDGDDTEKKDGGDDTGGESEQKGQTPSATPLFSFKNLSSGQNAFTGLTGTGFSSTSFSFGSASKDGSSAGPLFGLKADGSSFPSFNLGAATNGGSATALATSAEAPKMFAMTEGPVETGEENEKAVFSADSALYEYLDGGWKERGKGELKLNVPVSGGERARLVMRTKGNYRLVLNASLYNDMSLKDMDKKGVTFACMNSIGESPSSLATFALKFKDTATREEFKDAVESHKTSKAQELPLKTPENSPKAAEARADGPKAVKDERWVLANVPEQLSD

SEQ ID NO: 71158 - protein, 70 aa, Zea mays
  Coding DNA Sequence Number=SeqID_27783
  Gene Ontology: Mol. function=zinc ion binding; Cellular component =nucleus
  Homolog annotation: Hit_ID=Q94IQ6; Match level="QueryCoverage=88%, HitCoverage=20%, E-value=5e-22, Identity=83%"; Hit description =Putative methyl-binding domain protein MBD111
MWVQSKFCEVNPIAWAVPTKHEGDASEEASLADETLASEVVLTRKRKIGSSLSVEPNHLSDELEPKLEDA

SEQ ID NO: 71159 - protein, 55 aa, Zea mays
  Coding DNA Sequence Number=SeqID_27784
MTIDKPLYEAPQILWDSNVIQLLVLGDLLKRDKPIKVAINFKSWSTTRDISSEWG

SEQ ID NO: 71160 - protein, 629 aa, Zea mays
  Coding DNA Sequence Number=SeqID_27785
  Gene Ontology: Mol. function=ATPase activity, coupled to transmembrane movement of substances; Cellular component=integral to membrane; Biological process=transport
  Homolog annotation: Hit_ID=Q7FMW3; Match level="QueryCoverage=99%, HitCoverage=98%, E-value=0.0, Identity=61%"; Hit description=MDR -like ABC transporter
  Pfam annotation: Domain name=ABC_membrane; Domain location=64-342; Score=158.9; E_value=1.4e-44; Accession=PF00664.14; Description=ABC transporter transmembrane region
  Pfam annotation: Domain name=ABC_tran; Domain location=414-599; Score= 233.2; E_value=5.7e-67; Accession=PF00005.18; Description=ABC transporter
  Pfam module annotation: Pfam domain module=ABC_membrane::ABC_tran; Domain location=64-342::414-599
MGNSSQHFLTLPIGMPGSVELLEGNDENWEEDEKEQARDGDREAPKKAPMGRLASLNKPEVPILVLGSLAAGVHGVLFPLFGLMISNAIKTFYEPPHQLKKDASFWGLMCVVLGIVSILSIPVEYFLFGVAGGKLIERIRALSFRSIVHQEVAWFDDPKNSSGALGARLSVDALNVRRLVGDNLALAVQVTSTLIAGFVIAFVADWKLTLIILCVMPLSGVQGYAQVKFLKGFSQDAKILYEDASQVATDAVSSIRTVASFCAEKRVTTIYDDKCEASKKQGVRTGMVGGLGFGFSFLMLYLTYGLCFYVGAQFVRHNKSTFGDVFKVFFALMLATIGVSQTSALASDSTKAKDSAVSIFALLDRKSQIDSSIDEGSTLDEVRGDIDFRHVGFKYPSRPDIQIFSDFTLHIPSGKTVALVGESGSGKSTVISLLERFYNPDSGTISLDGVEIKSLKVNWLRDQMGLVGQEPILFNDTIRANIAYGKHGEVTEEELVKVARAANAHEFISSLPQGYDTTVGERGVQLSGGQKQRVAIARAILKDPRILLLDEATSALDAESERIVQDALDNVMVGRTTVIVAHRLSTIKSADIIAVLKDGVIVEKGRHEALMNIKDGFYASLVELRSASS

SEQ ID NO: 71161 - protein, 437 aa, Zea mays
  Coding DNA Sequence Number=SeqID_27786
MGSARVAFVLSSLEERNFAEVGTFQPSLGFKDFHQAARLHPLVSASRIFIILAGAEGGLSRSSTSRTGSWVTLSFSIQGRGRSPAKREGQTPTTRGWSTASVVSFSALGSLAQLALARLPVPPPAVRAVVAARAPEGHPRRRALLGRRSCSWVVLPLLQYDASARRSVLAYPGGSEWGSAGGQMAAVVDAEVVAAEEVLVADEIAATIRALGLWLFGFDSLSSPLEWGRGQGARRSSVRPEVIDAAVWPPGAEESLGSVGLAARGFSCLVKGTLGRSAMSRSQRQRCQHGQRQSWLEKRLRWLEPGRAVHWRDRRRSRVAEAMSRADVLGGQLAEAMERPVEPSARTGRGADMFLRGGDPPTVLPSEAGSDSAEGGVDTEGAVAPPLMFDPAGTVYLYGIAYPSVSYLSQKVMSERGCPLLAPEGGSGFAEARLTLP

SEQ ID NO: 71162 - protein, 256 aa, Zea mays
  Coding DNA Sequence Number=SeqID_27787
  Homolog annotation: Hit_ID=Q6J9V9; Match level="QueryCoverage=44%, HitCoverage=31%, E-value=7e-15, Identity=50%"; Hit description =Putative uncharacterized protein
MQAACNRTKGAHPFGFDASSMEAQAHTSSAGEGATVDMARSGPTVMAATGGRKQQSSRLQAHIPSWDSERTLSHGVKTTRPCSVPRTARARTTAAPRTTRPVALTLRQDRRHLWQAKQATLHLRHNDRVKKGTGKGDTPKGILLREESGPRAPLLIRGSKAGPSEGFDSRLRALGLQALLLVRGSKAGPSEGFDSRLRPLGLRAHHWSEAGPEGFDSRLRASRARDDSGYVRYMAEARATLPRYPRTFLRPAGAIL

SEQ ID NO: 71163 - protein, 147 aa, Zea mays
  Coding DNA Sequence Number=SeqID_27788
MFGALRGQHGAFPRPPCGKATQGRMKKAESVLDRPLALCGGSGAALANPAPAKPLTASTYQPENLEPDYAPGLRPVRVKAPSTQGTRSRLARAQPRAKAADPGGFTSRPRENSAACAAPTAVPPVRVRLTAAKTGLRRHRKLRLARP

SEQ ID NO: 71164 - protein, 140 aa, Zea mays
  Coding DNA Sequence Number=SeqID_27789
MGKNNKRKREPTPPSEDFGDSEYSEEEFSSESEGSPAPIPRCESSDDSDDSQGLAVEVWTYIRAVERSGLEGSDESEYSSDEEDSSEGGGSDGDDDEGGGGNDGDGGGRGGSCGSKDGNGGSSRGSNRGGSGRGSNRASG

SEQ ID NO: 71165 - protein, 240 aa, Zea mays
  Coding DNA Sequence Number=SeqID_27790
EQQDSSPSPQREVESERLPSPAPQPEMPPAPPQGIPAAVGYPDGGRDNDDAGGSSSHDMERSEEPEPEGWISRPITRDAARGCHFHDALDTLLRRAFDRHTWSIKETAEEAMQDAARLALSQYCSLFSGVADGLDLKYYPRRSTGSAGGVIVSPVGEGNPRLNNMVNLATVLNIELDHTLDELGKVRAEVAELRAECAARHYLDGGSPVPVGIQHPYRSPLRGRFDYGTPECRTQIDLDP

SEQ ID NO: 71166 - protein, 67 aa, Zea mays
  Coding DNA Sequence Number=SeqID_27791
  Subcellular localization annotation: CTP_CleavageSite=55; ConfidenceScore=5.15e-01
MEPGGGTAVGSVESLLTSSCFRKGAESRRRHRVGRCGSSSEAEVESVFRGRGRVRAPGSGEAEFVVF

SEQ ID NO: 71167 - protein, 387 aa, Zea mays
  Coding DNA Sequence Number=SeqID_27792
  Subcellular localization annotation: CTP_CleavageSite=45; ConfidenceScore=5.52e-01
MQAACNRAKWVRFSDSQHAQHGGPGPRVMQPARRMLRACNCTATCATTASPRLRNQYRDSRRPSARPSSASLARRSARAKNGLAAMTVAGGQEQQSRRQLSSRPIRGQRENPLSRREDNAPVFRSSNGSRTRNGRPANHTPRRINSVAEQAAPLAGEASDASPSPLRATLLIRGSKAGPPEGFDSRLRSRGPYTHYWSERLGGCSRKPGSGQTVDSVNIPARELGTRPYTRATANSHEGTTRPAEALRKALRPRRSETTPPRPRGLHPAGALARTHWNKMQPRKAGPLAKKCDDSLQASANTPFEARGLLSGTIIRGTLKAPNSQLGSDSGKVPEDGELRSAQTRARTRAKSRKTANSAPPKPGLGLGLSPGRRRTPPRPTQGSDSG

SEQ ID NO: 71168 - protein, 176 aa, Zea mays
  Coding DNA Sequence Number=SeqID_27793
  Subcellular localization annotation: CTP_CleavageSite=61; ConfidenceScore=5.98e-01
MSSSSSSSSSSGVSGDGSLRSPSLSCRRRSLSKASQTRVRSRARAFFASFFSFLFSAATLRAARSTASSGTGGREGLWCPTSWRQTKSLSCENQGQSDARRKKERILTRDTHPRSGRIKGWEKVSASNFATVPATRLWRSSVGRGSEDICKPFRSTPGVISQSGSRRSVKGSTLRR

SEQ ID NO: 71169 - protein, 165 aa, Zea mays
  Coding DNA Sequence Number=SeqID_27794
  Subcellular localization annotation: CTP_CleavageSite=39; ConfidenceScore=5.61e-01
MGRITRGPPLQTRSRDETTSSWVFVRRRMRRRRVRRRPRAKGGVFAFAPTVVSLSSLTRLLLQLSLTGLLYSRPLSARSWTSCPPARSQFRPTAGTCTAEEAGPEIRAPSSTTISAGSGPPCPPCPPGWTRRPSSPTPTSASCATVEQLEADAKRQAATTSAAAT

SEQ ID NO: 71170 - protein, 46 aa, Zea mays
  Coding DNA Sequence Number=SeqID_27795
MAPRPAANHQATAEQAAKHLGRPSATDQQAASEGKLPEQEARRLLP

SEQ ID NO: 71171 - protein, 52 aa, Zea mays
  Coding DNA Sequence Number=SeqID_27796
YFEKQSLKAAFASALADPTVDLNMQIQDIAKGGVRMEEDLNVVGILCRLNRF

SEQ ID NO: 71172 - protein, 476 aa, Zea mays
  Coding DNA Sequence Number=SeqID_27797
  Gene Ontology: Mol. function=binding; Cellular component=cytoplasm; Biological process=protein amino acid phosphorylation
  Homolog annotation: Hit_ID=Q6Z901; Match level="QueryCoverage=22%, HitCoverage=24%, E-value=2e-27, Identity=52%"; Hit description =Kinesin light chain-like protein
  Subcellular localization annotation: CTP_CleavageSite=22; ConfidenceScore=5.10e-01
MVSGFGPNGRSVPFGHIYPPAPAQHAVACVHRLLALLACLGSSGSECKVVSRSDNPARDRRAPETIPPKIAAQISYGRRMVVSPCDAPTHPAALAPGETPARVGLLLRLQRRCRPPPPHPQPHLSKAPGRGVADSAPPCALTARSSTLLQEASRASFARGPHAPPCVPPAILALVRHSPSLAQISPIEVEHASWRTPGRELFARVAKGRLMEDTARRYFQQLKVSDFGLSVVADQFHPDGLLHTFCGTPSYVAPEVLARRGTKRIRLLRDALRQPVLAQRLLAAYARSGSLASRRRSRALTIPSPPPSSDLTPPHVSAARADILVHGGRRGWVHHAEAFEALPKERAANRAATTTSSCNLSSPTRGVSGAAPDEIVGGLMEIPAIYEALGDLDVAQKLYQRELRLLEGSSREWSIVCRCCGTNGCSVLHGGELFKIDEVAHLFEEAREVLEQECGASHPNTLGVYNNLAAIYDAMG

SEQ ID NO: 71173 - protein, 106 aa, Zea mays
  Coding DNA Sequence Number=SeqID_27798
MSDDLVVPVHFEVGQEFCFRLLDHPLLVLLKLELLVSQQAESPKRARRSVAWCEARWCSLRKGGLSAAWGRTVRGLGRRKIADGAWISLSGGTPSGSRDLRWCLGS

SEQ ID NO: 71174 - protein, 78 aa, Zea mays
  Coding DNA Sequence Number=SeqID_27799
MSWVLVVVSKWAVVDLLVDLNVDQGALRHGTQPGQITFMSLIIDYNHDTNYHGLIGLFLFKSVQPFVSRRVTMPKLLG

SEQ ID NO: 71175 - protein, 59 aa, Zea mays
  Coding DNA Sequence Number=SeqID_27800
MAPYSSHELPPLMVNTRKGGGIDLPINPHNQRVLRQQQAEMNPLNPPPAGIDPVVATQM

SEQ ID NO: 71176 - protein, 62 aa, Zea mays
  Coding DNA Sequence Number=SeqID_27801
MGVSPCAVWPPLCWPGKMSGMGMRLVPLSGGCVAMIRQGAHLFGHLIRATRSLANGRDWISG

SEQ ID NO: 71177 - protein, 62 aa, Zea mays
  Coding DNA Sequence Number=SeqID_27802
MGLSPCAVWPPLCWPGKMSGMGMRLVPLSGGCVAVIRQGAHLFGHLIRATRSLANGRDWISG

SEQ ID NO: 71178 - protein, 57 aa, Zea mays
  Coding DNA Sequence Number=SeqID_27803
MESHDLRAERESRLVGGNETDGFGYDYGTGCQHCNHCSGEDEAVEGDFQEFQDYDEF

SEQ ID NO: 71179 - protein, 695 aa, Zea mays
  Coding DNA Sequence Number=SeqID_27804
  Gene Ontology: Mol. function=amine oxidase activity; Cellular component=peroxisome; Biological process=amine metabolic process
  Homolog annotation: Hit_ID=A7PCT5; Match level="QueryCoverage=36%, HitCoverage=31%, E-value=8e-31, Identity=38%"; Hit description =Chromosome chr17 scaffold_12, whole genome shotgun sequence
  Pfam annotation: Domain name=Cu_amine_oxidN3; Domain location=351 -466; Score=-14.6; E_value=0.096; Accession=PF02728.7; Description =Copper amine oxidase, N3 domain
  Pfam annotation: Domain name=Thiolase_N; Domain location=383-575; Score=-167.0; E_value=0.037; Accession=PF00108.14; Description =Thiolase, N-terminal domain
  Pfam module annotation: Pfam domain module=Cu_amine_oxidN3::Thiolase _N; Domain location=351-466::383-575
  Subcellular localization annotation: CTP_CleavageSite=48; ConfidenceScore=5.63e-01
MSSLRVVTRGANPPSLGTVSLKTKAPKMAGMPIMSLANQDASTPVTVTATHASVLSFTASTRYQMQGPTEHVCPYELEHQGSLIRPSEGKLWCTEIMEDSGNGNLDGVGKSSNEDLVLPGLLGGMTLPMFDEMSPNSGEEEIALFSEGFDYPVFDDMPLEKVVWDEEPGYDDLLNQLAQGADHLVDATMQPTIHPIAVDKQLQLGVNQGCFEMLVNTDDTEDLFQNYDVAASDVQVIDEDEVVLIEGKYTVDWKILQARETSEEEVEDYLAESKEGAMDEVLQVELIDDEVQWDEESPNQSVHKGLLPHTVRKMVYLKGFSQGGGISTMTQVQRCHPLAPLSTAKISVAIAIVRAAGCEFAVKYYPSFNEAIQRIDVNDIALVMVDHSCSGYCSEADAHYCRTGNSPLCCRTDSDSLMENGYARPVEGISVAALYAGFADTVLLKTKHRQCTSGLQDVADVAVAIKAGPYDIGIVAGLQSKTVNKVSLVEQMNSKVELFSQAHGCFFPNGLTYENIAHCFGTTRLQPDQADVESHPGKSKEGLVIYSVAYVGDSCEHRFITHRPSFVGMVILYGDPNELHYRQNAFDAGEEGLEIKVHSREKGCECLDNLLVSKTRHEYLNLIRNDALLLMPAELQVLPSVRVLLLWMIRPWNPGVFSSPKTAPLTEAQNEAVATKVESFALRDKLKEKKGSSRV

SEQ ID NO: 71180 - protein, 37 aa, Zea mays
  Coding DNA Sequence Number=SeqID_27805
MSKVDALPKVVETMVMKDIPSSFPHININANKKVKEH

SEQ ID NO: 71181 - protein, 339 aa, Zea mays
  Coding DNA Sequence Number=SeqID_27806
  Subcellular localization annotation: CTP_CleavageSite=44; ConfidenceScore=5.59e-01
MAAAGGRKQRSSRLQAHITSWSNRRTLSHDVKTTHPCSVPRTARARTTAAPQTTRPVALTLRQGRRHLWQAKHATLHLRHDDRVKKGTGKGDTPKGILLREGSGPRALLLIRGSKAGPLEGFDGRLRALGLRAHYWSEVRRLAPRKGSTAASGHSGSAPTTDQGFIGWPPKGSTAASEHTGRGMTLGTSDTWPRLGLRSRGTLGHFQDQQERFCNGIPSEGGIEPSDPIKRDRVRQITCRYVRSAPLGPLADPYRMGHDVHSDHPLATHWRHHIRRPPRATWRFPPSSLRKGDAGAYEKSRVSPGPSTRSVRRLGGCSRKPGSGQTVDSVNIPARELGT

SEQ ID NO: 71182 - protein, 131 aa, Zea mays
  Coding DNA Sequence Number=SeqID_27807
  Subcellular localization annotation: CTP_CleavageSite=10; ConfidenceScore=5.33e-01
MESSASPDPRARTRPRKTVSASPDPRGSDSTSTSDDGLRLARPLGSNSTSTSDDGLRLARPLGSDSTSTLDDDLRLARPPRLGLYLDLGRRSPPRPTPRPGLSLDLGGASASPDLGLGPTTSQGGPSLPYP

SEQ ID NO: 71183 - protein, 141 aa, Zea mays
  Coding DNA Sequence Number=SeqID_27808
MMTGDKQRQKLKQKPSSKISNTYIKKVDKKAATPYLIKKKKNGKVPLWRLEQSNADILLIKEENPLDDVLCVTHLAFQSSSGSSGFDDWFGSESSIDGEDLGVSTEMDHESSREDLDFFIAMDIVTSKTSSAIRGPSVGVD

SEQ ID NO: 71184 - protein, 125 aa, Zea mays
  Coding DNA Sequence Number=SeqID_27809
MKKSKRDLEMKHKNRSSQAHSKISLQRFEMGEARDVRERVGGVSQVGNGVQIVLYCFGERDCRSEVRGVRDQLNCPSGPVQPVLTSEFRRENPSSTARRQVQLVYGQRGSQLKLSSAEVEKAQLS

SEQ ID NO: 71185 - protein, 471 aa, Zea mays
  Coding DNA Sequence Number=SeqID_27810
  Gene Ontology: Mol. function=nucleotide binding; Cellular component =Golgi apparatus; Biological process=regulation of transcription, DNA- dependent
  Homolog annotation: Hit_ID=A2ZIJ9; Match level="QueryCoverage=61%, HitCoverage=62%, E-value=1e-107, Identity=59%"; Hit description =Putative uncharacterized protein
  Pfam annotation: Domain name=DUF246; Domain location=184-446; Score =204.6; E_value=2.4e-58; Accession=PF03138.5; Description=Plant protein family
  Subcellular localization annotation: CTP_CleavageSite=52; ConfidenceScore=5.75e-01
MYVSAHLPFLVTLSSPAFPSSPPFRTSSTPANNFTSHDLAGALEDMQVAAAAASMRGTETVGAKSAARRLSRVLVGRRRRAAVLLLALAYAAAMLMLTIGGSEGSGSSGVVAGVLRRGAQSAPPGSVYRSHLVFERLLPEMRAFASRPNPLVTSQYKKFGKQWEPCISKGLIHSELPPSNGFLIVEANGGLNQQRISICDAIAVAKILNATLVTPAFHLNSVWRDSSKFGDIFDEDHFIESLRKYVRVVKDLPEDVFLRFNHNISIIPNMRTKAFSPPSYYLQHVLPKLLELGAVRIAPFSNRLAHSVPMNIQALRCLTNYKALRFSEPIRILADNMVDRMIKRSFLSGGNLYKVGMMLRGMGFDNTTSLYVASGKIYNAEKYMTPLRRLFPFLQTKHALVTPEELAQFKPSVCPEECLLNVPNNDVHCNVEEGLSIARDLSWEACPKATRNSFLSHNQQIRNAQPSRYRL

SEQ ID NO: 71186 - protein, 343 aa, Zea mays
  Coding DNA Sequence Number=SeqID_27811
  Gene Ontology: Mol. function=methyltransferase activity; Cellular component=nucleus; Biological process=activation of protein kinase C
  Homolog annotation: Hit_ID=A7QUP3; Match level="QueryCoverage=80%, HitCoverage=82%, E-value=6e-77, Identity=43%"; Hit description =Chromosome chr10 scaffold_179, whole genome shotgun sequence
  Pfam annotation: Domain name=PPR; Domain location=184-218; Score =49.7; E_value=1e-11; Accession=PF01535.11; Description=PPR repeat
  Pfam annotation: Domain name=PPR; Domain location=219-252; Score =10.9; E_value=0.39; Accession=PF01535.11; Description=PPR repeat
  Pfam annotation: Domain name=PPR; Domain location=82-116; Score=30.4; E_value=6.7e-06; Accession=PF01535.11; Description=PPR repeat
  Pfam module annotation: Pfam domain module=PPR::PPR::PPR; Domain location=184-218::219-252::82-116
MDVAAHRLGACLPLVPVAWADMAPLPSQTHRKDNGAAEGPRSGYWCLVEARKVFDEMLVKNVVSWNVMITGFAGWDEVENVVSWTGLIDGYTRACLYAEALTLLHHMMAGGINPSEIIVLAVIPAISNLGGIVMGEMLNGYCEKKGIMSDVRVGNSLIDLYAKIGSVQNSLKVFDEMLDRRNLVSWTSIISGFAMHGLSVEALELFAEMRRVGIKPNRITFLSVINACSHGGLVQQGLAFFKSMVYEYNIDPEIKHFGCIIDMLGRAGRLCEAEQIIEGLPMEVNVTVWRILLGCCSKYGEVEMGERAIKMISDLERESGGDFLQVLRTAVGHILARVQGFLV

SEQ ID NO: 71187 - protein, 479 aa, Zea mays
  Coding DNA Sequence Number=SeqID_27812
MACIRCTARKLVIPFLPSRLAERLLRCTVKGQSSHLERLHRRLHEEKERRCLEQEQQDSSPSPQQEVESRRQPSPAPQPEMPPAPPQGIPTAGGDPDGDGDGDDGGSSSDNTKLSEEQEQEAWIARPITRDATRGCHFHDALDTLLHRAFDQHTWSIEYRCVVYQHRRGLYPDQWEATCLVRRPDDDLRGAEAFLEHYSITERDTAEAAIGVADGLDLKYYPRRSTGSAGGVVVSPIGEGNPRLNIMVNLATVLNTELDHALDELGKAPVKIVELRAERAEAFTIKTVEFSAVRASWAVDLDPTVGNPLVPPLNPSRPSIPIRLQPPPALFLCGPLPPSLPHSQVLAAAIPYNPGRHPPIFSSPSVVLPRLDLLRVGASFKWRIGGKKEGGKVETQGDLEVIYVFALKFNWLYVYLCKSVEVMSRIFVGGRTTAILVVSGDFSWVTIGNQWENHVELCHTIPRVLMRSIRSYILGDITV

SEQ ID NO: 71188 - protein, 177 aa, Zea mays
  Coding DNA Sequence Number=SeqID_27813
MQSLQRKINADSAEIEGEEAPKGGLQRKINADSAEIEGEEAPKGGLQRKTYIGSLSSYHTEKADASAIRIKLREEQKEEIFMLRCVRKEGKVFFAFGSKIKFRPQQSTSYMDKGVKIYYEPVFRKAVAMPREANKAQKSACPAITSSSASTSPSIYSKVLGRFSTEGVNLSELAPIE

SEQ ID NO: 71189 - protein, 414 aa, Zea mays
  Coding DNA Sequence Number=SeqID_27814
  Subcellular localization annotation: CTP_CleavageSite=51; ConfidenceScore=5.32e-01
MSSRSLMHRVFPPSEPPDGGCPQSFRLVVGGTQLRGSWYLSAIVRLQGFSSVSPAASPRRWSPETVTTSSWVGRSKPGCDLGPTLSFKDVYHPRWGGGRAEPELYLPCGFVGQPLPHRSRERALTGPARGADFDNAGLADCGRRQPRRVGLAGLAPGAPSCREGGCRAVRTGGPPKMSRAARAAFVFWGGPAFAPVRRLHVEVGEGKAAAASAPEAIAAAVRPPGAGVVVVAAGAGDGEPPVGLLLLRRLPPSNGVESLGSVSLVVRGFSCLVKGTPRPLFDEPRLGVAVLARTEAELARKEDLVGRSLAGSSVSRTDAGVDLPRSRAGLMSSGDSWPRPRGDQPSRLLGPDSRRRPGRRWPGRDDEVVLRSGDPRTASPSEARSDLAEGVVDAEGAAAPFNRQDPSLRDRIIL

SEQ ID NO: 71190 - protein, 90 aa, Zea mays
  Coding DNA Sequence Number=SeqID_27815
  Subcellular localization annotation: CTP_CleavageSite=45; ConfidenceScore=5.43e-01
MQAACNRAKWVHFSDFQHAQHGGPGPRVMQPARRMLLASHCTAARATTAPPRLPPQSAWAPHPLLVRGSKAGPSEGFNDRLRLLGLRAHY

SEQ ID NO: 71191 - protein, 191 aa, Zea mays
  Coding DNA Sequence Number=SeqID_27816
  Subcellular localization annotation: CTP_CleavageSite=91; ConfidenceScore=5.55e-01
MQAACNRAKWAHFSDFQHAQHGGPGPRVMQPARRMLRASNCTAARATTAPPRLRNQYRDSRRPNARPSSASLARRASGRGSGRRFAFAIMTASKKGPVKGDTPKRILPHEGTRLRASLLIRGSKAGPSEGFNSRLRARGLHTHYWSEVRRPAPRKGSTTASGYSGSAPTTDQGFEGWPSKGSQPPQIQSEG

SEQ ID NO: 71192 - protein, 283 aa, Zea mays
  Coding DNA Sequence Number=SeqID_27817
  Gene Ontology: Mol. function=kinase activity; Cellular component =ornithine carbamoyltransferase complex; Biological process=amino acid metabolic process
  Homolog annotation: Hit_ID=Q6QP54; Match level="QueryCoverage=29%, HitCoverage=29%, E-value=2e-09, Identity=46%"; Hit description =Putative kinase
MALPVDVVGPCPRLGNVEAPLRSRSSLSSVAVVESEPPGRARRRPSAEARAESEPWGRAKRSSSYSGAEPKSEPWVGRSGVRRLQGPSPSPSPGSGGAPESEPRVGRSGVRRLSGLSPSPSPGSGGAEFPMGPEAGPDRLASGEPGIYSLLEGRLRRNGDPPGPLQLYADGGYQLRIRSLEGTPNYGPRQVDKVQIMSKAQSGCTRQCPVRQAGSGELAALGKKLTAYGYNSPDCPVCTGLSGEPTVGRAIRARHMAKPTVRRGHRTVWCANGSQAPTVGFAK

SEQ ID NO: 71193 - protein, 209 aa, Zea mays
  Coding DNA Sequence Number=SeqID_27818
  Pfam annotation: Domain name=zf-CCHC; Domain location=12-29; Score =19.2; E_value=0.0019; Accession=PF00098.14; Description=Zinc knuckle
MGVNKPVERETVICRLCHKEGHKSFQCKEMTGNKQRQNLEQKPTSKISNTYINKVNKKAPTPYLVKKKKNGKVISIKANKQANKGKGAKRIWVLKEIISTIKSEREKGCQRFNSNQSKEQVRSQKKGAKRKPKAALVWRTGQSDGPPDSVRCTRVNQLELSTFRFPKHSSAIIHRTVRVLTPIELPPKFWRLVKAKQETPKSVVILVGS

SEQ ID NO: 71194 - protein, 76 aa, Zea mays
  Coding DNA Sequence Number=SeqID_27819
  Subcellular localization annotation: CTP_CleavageSite=53; ConfidenceScore=5.30e-01
MRSPCLTMDNVVQPLWISSKRQLRQSLSYTAAHAAMWDCFQRSNWQSSSFFSSSMSDANGMGMREHENGLCGEKGM

SEQ ID NO: 71195 - protein, 226 aa, Zea mays
  Coding DNA Sequence Number=SeqID_27820
  Gene Ontology: Mol. function=catalytic activity
  Homolog annotation: Hit_ID=A3B342; Match level="QueryCoverage=23%, HitCoverage=16%, E-value=4e-10, Identity=61%"; Hit description =Putative uncharacterized protein
MSRAFDDYYIMDRGVISAPEVKQRRIDSNDQFVILPIVGAWGVLSNDETMEIVAYTNLFGDLYLRTIDGPRLSCHHLVRHSTSFLSPLTPPPPRHPFSAKGVGAGASSSYSSDTSPDIDSRSGFCTSTRMFHIMHAPSFSSSSDVPFVFPAFTLFFLPNLLPTVAAASRPTLVDAAGPGLGRHSHSLALLGLMPGADAQIFVVSFSGNEHVFPPLPFPSCSTKPWK

SEQ ID NO: 71196 - protein, 89 aa, Zea mays
  Coding DNA Sequence Number=SeqID_27821
MASTIPFEKRAHSQPGGVDMPVSTEERFLLPLSCSATHRRHRHLLLSLDYSCPLPIEVHGGGESAIQEESQILGHRSSLESRMPTRWTT

SEQ ID NO: 71197 - protein, 250 aa, Zea mays
  Coding DNA Sequence Number=SeqID_27822
MGSARVAFVLLWEERNLVEVGTFQPSLGFKDFHQAARLHPLTNASRIFIILAGAGGRAEPELYLPYGPAFAWAGVPLLPPASGGGNHPSALRRRRPPAMPVKANCCYPARVQHSVLCPGDGGQPHRGVSQHVVRREGGTHVLGWSHSRFCGEDRSEDLPVRFGAAGARWCGVGGQVDAAVGAEVVAAGESFSANETVSATRGPTSGSLALIACHRPSSGDAGEGLVAAASALRSSLLLFGRPERRSLSLM

SEQ ID NO: 71198 - protein, 280 aa, Zea mays
  Coding DNA Sequence Number=SeqID_27823
  Homolog annotation: Hit_ID=Q6J9V9; Match level="QueryCoverage=30%, HitCoverage=27%, E-value=9e-07, Identity=44%"; Hit description =Putative uncharacterized protein
MLVACICTTGMHPFDFDASSMEAQAHTSCNRHAGYYVRKTAPPLTPMPRLLDCGTGIATRGNPTHGPTVPTKRIGHGSFSRGRRRDSRYGQKWAGSNGGSRRAEAAVKSSVGSRPLLEQQGSPLPRREDDVLAKRATLHLRHDDRIKKGTGKGDTPKGILLYEGSGPRALLLIRGSKAGPSEGLAPRKGSTTASGHSGSAPTTDQGFEGWSPEGFDSRFRTRRTRDDSGYVRYMAEARATLPRGSGAALANLAPAKPLTASTYQPENSKPDHAPSHDQIA

SEQ ID NO: 71199 - protein, 262 aa, Zea mays
  Coding DNA Sequence Number=SeqID_27824
MAERYQLPRSCVPPTTRQKDCGCSPSGGSEGGKTRCIREREDMIAFRGGHPPFKGDSPHLRPQPSRAESSPTRSKVLPLRRGGCVPRVMQAGPEQKKPNRRARCMQLPSGYEHSSTIAQTSGPTRHAIGAPVATCEQLHRHSHHYRASSTAEPVPRLEATLRMTQQCQPGATVNTAKNGPAVMAVAGGRKQRSRRQPSLRPIQGQQGNPLPRREDGAPGFRSSNGSHTRNGCPANHSPCRINSAAGQAAPLAGEASDASPSP

SEQ ID NO: 71200 - protein, 76 aa, Zea mays
  Coding DNA Sequence Number=SeqID_27825
MELVEKIYGPHAWAQRARGIAQHARAASGLLTKRPQREVGGAAARPRWRKARRAVARRSRQSPRLWGKIYKSLVWE

SEQ ID NO: 71201 - protein, 340 aa, Zea mays
  Coding DNA Sequence Number=SeqID_27826
MLKGATAPSTSTTPSARSDLASDGDAVGGSPTPKDDISITPGPSLPGPPPGIRLEQTARAGHPEASASCPLRTSARFVASATRLRRRSRQWTTRPGSGRPNLLFEANSASVRADTATSGFGSSKSGRGVPLTNQEKPRTARPTEPRDSYASGIRIPHSSPSHEATHTCLRGNKFRATRQRPLQQQLWSQHERGHRKALVRVPAQGTLTRHQSQRAGGRPVGGADGVDGGESSPGCHHVNTDGGVRLSTNAAPANAGRSKVHRQVLAPVLATKARKRTECCILAGQEQFAFPGMAGGRLLRRAGGWFPPPEAGRGGGQPTRAGGRAPARLALRPSKDDKHP

SEQ ID NO: 71202 - protein, 74 aa, Zea mays
  Coding DNA Sequence Number=SeqID_27827
  Homolog annotation: Hit_ID=Q33AV8; Match level="QueryCoverage=91%, HitCoverage=48%, E-value=3e-07, Identity=40%"; Hit description =Putative uncharacterized protein
MDSNNTPLVDVQGMKERTRKDVVKDLEAWKASKDVQIKVEAYNLSRQELALMARSIAQCTVDNQMRSGAAIAGF

SEQ ID NO: 71203 - protein, 22 aa, Zea mays
  Coding DNA Sequence Number=SeqID_27828
MDSMVFEVSKLDGVRATPTEES

SEQ ID NO: 71204 - protein, 230 aa, Zea mays
  Coding DNA Sequence Number=SeqID_27829
  Gene Ontology: Mol. function=3'-5'-exoribonuclease activity; Cellular component=protein phosphatase type 2A complex; Biological process=RNA processing
  Homolog annotation: Hit_ID=Q84T68; Match level="QueryCoverage=57%, HitCoverage=43%, E-value=9e-37, Identity=61%"; Hit description =Putative exosome component
  Pfam annotation: Domain name=WD40; Domain location=117-164; Score =2.0; E_value=18; Accession=PF00400.23; Description=WD domain, G-beta repeat
  Pfam annotation: Domain name=WD40; Domain location=168-205; Score =33.2; E_value=9.7e-07; Accession=PF00400.23; Description=WD domain, G-beta repeat
  Pfam module annotation: Pfam domain module=WD40::WD40; Domain location=117-164::168-205
MEGGSRADGQNPNQLRLFTCTGNLLHRAHGCARWAQGGIVVLATVYGPKPGTVRGRTPEKASIEAVWKPRTGQIDTPLFPSSSFCPTAVRVTGSLKWRVVFVGRQDREYEMTLKRTLQSICLLTVHANATTSVVLQGGSTQLRFQPRYGGLLATASDNVVSILDVERQAFVRRFESHTKGVDSVCWDPTGEYVVSVSEDTVKVWSLNDESFMNELSCGGRKLSRYYMFQM

SEQ ID NO: 71205 - protein, 318 aa, Zea mays
  Coding DNA Sequence Number=SeqID_27830
MESSTTATSTTLSPIASIRASLRLTHVTTIAVTCKGKREYTFDKHKSERGFDKEALKKKYLQKAKIKECVFLASLSDVDHDSDDASSSFSDEETHKRVKDKLNELFFLTNIAGGFCTMAFGDDAVGGHDQDIGDGSASDVSHSTDDLTAEAEEPISYLASQDKLLRLAARERKDFKFKYESTLKETESTRASIVVFDETECDECALHMLNITTLQTKYATLLDECDKLGSPSILIGVSSSEPQLGMMVSRLVRGTSEPGLGFAAKDGSAACFGKVGEWSGWKPSEKPSSTPKLMKITPPKPTTNVRDGVIEEPVRAPP

SEQ ID NO: 71206 - protein, 293 aa, Zea mays
  Coding DNA Sequence Number=SeqID_27831
  Gene Ontology: Mol. function=carboxyl- or carbamoyltransferase activity; Cellular component=ornithine carbamoyltransferase complex; Biological process=amino acid metabolic process
  Homolog annotation: Hit_ID=Q8SA97; Match level="QueryCoverage=31%, HitCoverage=21%, E-value=3e-11, Identity=47%"; Hit description =Ornithine carbamoyltransferase
MALPVDMAGLCPRQGDVGAPPKPSLSSVAEAEPEPWGRARRKSFGRGQGGVRALGSGEAEFRRLPARVRALGSGGAEFAVFRVLARVRALGSGGAEFRRLPGLSPSPSPGVGRSGVRHLPGLSPSPSPGVGRSEVRRLPGLSPSPSPGVGRSGVRRGAFGKACLPVRLTLSSGTAVGVAQAALSFYQTGQWSGGVTAVTSALPGARVRIKLYADGGYQLRVRRLEEDVAGDSRLAPARHPKGFCILNIEDQMVLYVLQQRPLNGRDLEDVVEEEGDIENEIFLKETVKDGYRG

SEQ ID NO: 71207 - protein, 69 aa, Zea mays
  Coding DNA Sequence Number=SeqID_27832
  Homolog annotation: Hit_ID=Q5W7C2; Match level="QueryCoverage=79%, HitCoverage=100%, E-value=7e-19, Identity=80%"; Hit description =Unknow protein
MLHWLISAVPMGFLQSTFSLLIGTGCGIYIAQNYDVPNIKKLMRSLVGKAKEVEESYKKTGNSKNKDNE

SEQ ID NO: 71208 - protein, 318 aa, Zea mays
  Coding DNA Sequence Number=SeqID_27833
  Gene Ontology: Mol. function=phosphoprotein phosphatase activity; Cellular component=nucleus
  Homolog annotation: Hit_ID=A2YWZ7; Match level="QueryCoverage=22%, HitCoverage=16%, E-value=5e-27, Identity=85%"; Hit description =Serine/threonine protein phosphatase
MGLSKISPGILHYLVPPQMLRDRRIIGGGRYKMSSVKANRGLVFVLLLIVLPALSIGERKLRDEKDHKLYIPSDSTIENTSKNKNVELVFSDEERDQELPDFSSFIPFLPPLSAANIKVYYATRFTIIVGIMVFGDFLAPIIDTKWLSCFDGSSDSNEQCLLPFVWTGLNNNYRCYSQIVCSVSGETTNPLIWFREGGENTRRILLLIMTSMKLGSLDELLKARRTVVTPPWEGSNLIPRDVLWSDPSLQMGLSLNKEQGIGLLSGPDITQQFLRTNHLKRLWVCLLRLFPVSSFSLVANFEACVDMSMSIAIGILKE

SEQ ID NO: 71209 - protein, 391 aa, Zea mays
  Coding DNA Sequence Number=SeqID_27834
  Homolog annotation: Hit_ID=Q2EN88; Match level="QueryCoverage=58%, HitCoverage=79%, E-value=3e-86, Identity=69%"; Hit description =Guanylyl cyclase-like protein
MESFLMLRMVTIDVGFQAVHPRERNMMLQKWGHTQIAVGTRMASYHDEVKISLPALLTPQHHLVFTFFHVDLQMKLEAPKPFSYHDEDKVPHVQQAFTWDCGLACVLMVLRTLGIDCCDGIADLERLCHTTSIWTVDLAYLLNKFSEQLQEDIDRVDELFGKALDVGISIQCRSITAYDIAFLLLSGHCIAIALVDKSKLKLLRCKIIWFSTENKWSYIVVVMKVEVPTEHNDNRNLECSLPCMSDYDVQQHNDEPDYMGHYVVIFGYDADDCEFEIRYPASARKRERVTMKSLDEAQKSFGKDEDILLWWCTGVSYKSSLVGLSNRKEWDEAVASYDCRVPVLYVAENILAVTADSSSVVVSLVSILYVGPCRSPNHGRAKGFSGSKRLC

SEQ ID NO: 71210 - protein, 60 aa, Zea mays
  Coding DNA Sequence Number=SeqID_27835
MPTYGMLPLDFALLPTMLSPPHPPQIPVGFETPPASVVVPGDVSHQDDASTSWVNNIFNT

SEQ ID NO: 71211 - protein, 100 aa, Zea mays
  Coding DNA Sequence Number=SeqID_27836
MSSPACARGPVDSGQHRRRAVPRCDRQNLPEPTRPSSDLSCRRIHVSYSLHSIDCNLADGEYILVPEQGVAQEVTPDPAPEPALEDLPAPALEGKPRFYA

SEQ ID NO: 71212 - protein, 250 aa, Zea mays
  Coding DNA Sequence Number=SeqID_27837
MARIRGTARKSMIPFLPSRLTERPLRRIVPSQSSHLERLHRRLHEEQEHRRQEQEQDQEQDQQDSSPSLQQESHNTNLSEEQELEGWIARPITRDVARGCHFHDALDTLLRRGFDRHTWSIEYRCVVYQPRRRLYLDQWEATCLVRRPDNDLRGAEAFLEHYLITERDTAEAGIGVADGLDMKYYPRRSTGSVGGLIVSPVGEGNPKLNIMVNLAAVLHTELDHALDELGKMSENRHRGARRAQPGQQAP

SEQ ID NO: 71213 - protein, 34 aa, Zea mays
  Coding DNA Sequence Number=SeqID_27838
MAVGALQKGVWVAVGVRMEAGTRAGGTAYSMLQG

SEQ ID NO: 71214 - protein, 278 aa, Zea mays
  Coding DNA Sequence Number=SeqID_27839
MTSHGSSDERNAQSHTDGLAREGFPRILWEVLQGAGYTTPPQYAVQLFEKHRVPRCRPGWRSLDSESFGYRAEDTIEAIALHGLTTFCGFHPLELSTHPIGLFPAEKEDDPMWKDRVEHAKDIWAIYPGQTAHLTVRCMNALYRLQVMRGEAMSHLMALLEATKITLDNREELVVDLSTEMVEKDLQVEQLSNEIQELEQLVGTRENTIEVLEDQLINTQQQLAEANQHLDMHHQEIQDMEANEDVDIEGGEEPASSLDTAGSGRPPSPDSSVASFAH

SEQ ID NO: 71215 - protein, 30 aa, Zea mays
  Coding DNA Sequence Number=SeqID_27840
MPLGFDRWSSVFWARLDVRWRTGQVTVGAK

SEQ ID NO: 71216 - protein, 162 aa, Zea mays
  Coding DNA Sequence Number=SeqID_27841
MGQSPEYDVYFRKSYPTKEKDSQGYAGFRNQGEAFSKNQLRYFCRKSLLKKRKRKIVNSAGPHSAQSAQIEQETGTRPAARTTLERGRALPEWSGHGAQTLVLAGDREKGKMTSRWLWMKLGGEIGATRPYGTLVSPCTLNLKRGGEGSANFGFFSSLRLRL

SEQ ID NO: 71217 - protein, 136 aa, Zea mays
  Coding DNA Sequence Number=SeqID_27842
METPAERGPLVSDEAGAGHGETRDHGDQRRGRWCKGRRGGSGCSPTGSPPRTKLGSVEIESGEGAVNGEAQSVAELQARGGTMRHNVAEGLDKVHGCDGVELKDGPLVVVHGRDGERESEGVLSEARECAEREKKG

SEQ ID NO: 71218 - protein, 261 aa, Zea mays
  Coding DNA Sequence Number=SeqID_27843
  Subcellular localization annotation: CTP_CleavageSite=74; ConfidenceScore=5.04e-01
MLVDYTTVLDGPSVSVEGPTQQGVESVVEVTPASGVTSNGSSDPSLRLQLLRELCFVARTATDVVVFSVFVSVSSSSRDALWWYRGHLWLRCRGRRPLRLHLLLRRGGRVLLLLLLASVLQLLVQATMQSLQVTGLTWHRATQWTLRQVRRKKGDHRLTCSAPDTGHLEKTSGCTLYPRVVIPFQPGLYRPDLHYRGEWPGIHYVAFTKTPLVYSCTLGFASRTNAVHLPKVLSERYSGKWPESPRVSQDHQHNQDNSIVS

SEQ ID NO: 71219 - protein, 59 aa, Zea mays
  Coding DNA Sequence Number=SeqID_27844
MERERRALLLLSSTFLLLMQAVVQSLQVAGLSGHGTAKRTLSKAGGDIKVKAGTEVYSP

SEQ ID NO: 71220 - protein, 259 aa, Zea mays
  Coding DNA Sequence Number=SeqID_27845
MPPAPPQGIPAAGGDPDGDGDDDDAGGSSSHGMELSEELEPEGWITRPITRDAARGCHFHDALDTLLCRAFDRHTWSIEYRCVVYHHRHGLYLDQWETTCLVRRPDNDLRGEEAFSEHYSITERDNAKAAMQDAARRALSQYCSLFSGVADGLNLKYYPRRSTGSAGGVIASPVSDGNPRLNSMVNLAVVLNTELDHALDELGKVRAEVAELRAECEARHYLDGGSPAPLGIQHPYRSPPRGRFDYGTPDCRSRIDLDP

SEQ ID NO: 71221 - protein, 70 aa, Zea mays
  Coding DNA Sequence Number=SeqID_27846
MHIFFVPSFFSTNSTGAAQGEEDGLPGCSDAGINFLLAGCSDGIAADGEEIASGTAATGSNADAGAGDLA

SEQ ID NO: 71222 - protein, 279 aa, Zea mays
  Coding DNA Sequence Number=SeqID_27847
MAYQRARSTRGGGRPKSGEGDLGLPVKFCRVRGLGKPHGPMAKLTEGVVRLGRDWRELATAAEAWKAWRAVARRARGKFRRPWTGEHARVGAGERGCANGREPGVARVRETVSAIWAVRSRSYGGDQTRKDELLQVALLISAAVRWGRTTVRKPRADQRNSAKGFRPRGGGLRRAKAWKGFSRGSGDIGTYIGALDQAKLASHHVGAADRHDRALAMPKLAEHRAKSGKLGTGKGVSPWGGARGGLARSLASWMAGEAGVGLQRRRRHGQSERERAELC

SEQ ID NO: 71223 - protein, 118 aa, Zea mays
  Coding DNA Sequence Number=SeqID_27848
MTQLQSLTPWLIQVFHNLLSPQLQHMQIHWALVTLREKRYSLCCSAYIDGIKMAGRMVCEEFYGYVTPPSDLVTCIRPSIWSRRTDTDIEGALRDIERPLGGIEGTLIATEGALMAIE

SEQ ID NO: 71224 - protein, 163 aa, Zea mays
  Coding DNA Sequence Number=SeqID_27849
  Subcellular localization annotation: CTP_CleavageSite=53; ConfidenceScore=5.57e-01
MGTVKVKAQSTQGTRSHLARAQPRARAADPGGFASRPRAPSSNGHTFGSPEAQSSQRSNLGQIATPTDPKSSLGCHRKLRLSRPQGLGSTSTLDDGLRLARPQGSNTASASEDGLRLARPRAQTQPRPRKTDSASPDPRARTQPRPRKTDSASTSEEPPPRLT

SEQ ID NO: 71225 - protein, 256 aa, Zea mays
  Coding DNA Sequence Number=SeqID_27850
  Homolog annotation: Hit_ID=A2YLP5; Match level="QueryCoverage=44%, HitCoverage=32%, E-value=4e-51, Identity=88%"; Hit description =Putative uncharacterized protein
  Pfam annotation: Domain name=Transposase_28; Domain location=7-167; Score=-47.3; E_value=0.0038; Accession=PF04195.3; Description =Putative gypsy type transposon
  Subcellular localization annotation: CTP_CleavageSite=32; ConfidenceScore=5.00e-01
MPTSSSSAAATPPADASPPADASSEETLSTLVAEELRAGDTVDFGVSRMSSAFFAAGLRLPAHRFVGDVLRRFNVQIHQLTPNAVVALSKYVWATTSYGGRPSHYKKLAVIKQFSTTGYERSDSIVIDEVELQRHQQLEKLYTSTRSVRDFQKDIVRAAEGLVSIGNKHIEVGTKFSEDCYRYGSENNASDEALRKAASLYGGALRNIEKEYEDFNRILSSQAGNIGVMGIGECIFKGTVTSLPLMERVADWDGFE

SEQ ID NO: 71226 - protein, 85 aa, Zea mays
  Coding DNA Sequence Number=SeqID_27851
MVQLHILRDMEAEVIIAFVAMCIHGSGVESIMWMWIIWTCAWHLISALGIEGCSSTATTPLIKEPPFYNVVNQSWTSLVNCFVLG

SEQ ID NO: 71227 - protein, 146 aa, Zea mays
  Coding DNA Sequence Number=SeqID_27852
MAPKRANSKAAPSIDDTAKAALLVDKKGKALVDSTPNFEGAPQAPSPGFALPEGEDTIEDEEVIGISAKDQLKLRALLIKNHHLQKQKEILEAKHQRVTMQAKVMELPLDAQSSGRRLDVDERVEQCRAVAGVLHVLARFVQVLQM

SEQ ID NO: 71228 - protein, 129 aa, Zea mays
  Coding DNA Sequence Number=SeqID_27853
  Pfam annotation: Domain name=DUF679; Domain location=2-120; Score= -81.0; E_value=0.0013; Accession=PF05078.3; Description=Protein of unknown function (DUF679)
MRSLPPPPRQPACDATTSLLTRGLLALLALANTLAYFTDSPHNDHVYYEVTTRTGLSLLDYTSGASLQSVGATRCYWLAFLDFVQVTLSAAVFGVFACLCGLRPDRGLQDCGRTSQVIGPHGPVLVPRT

SEQ ID NO: 71229 - protein, 129 aa, Zea mays
  Coding DNA Sequence Number=SeqID_27854
MELRDGRQQLLHGDRTTNTSQQAAGKSQKTATLDLGELWSGDEWIRNGGARLYTREGSESRQARNNRGAASLAEIPARWLWTRLVRRFSRDDEDREVEESPQAEEEGSVRMVIRGLGVACQRYSSREHA

SEQ ID NO: 71230 - protein, 128 aa, Zea mays
  Coding DNA Sequence Number=SeqID_27855
RWYPLPTSHVTHLPRDRDFPYTSTEEARQGIPCRTAIAAKSSRGPPYTDHSPTALAPFGYQDDLQVTRALTAKRSNTDKHAEVDQSTRVPTGKHTGARPADHQAPIYPSGLVLREAREMANFLVVSIP

SEQ ID NO: 71231 - protein, 602 aa, Zea mays
  Coding DNA Sequence Number=SeqID_27856
RASPTRSSDVDAEGTGSSCPRDVRIPRADILHPVTARVLIDYRVFPYGRNIAAVVSAVMDKDRQGAAQKRQAVVRLHEARPKRQRGAAKAAAPGGGKPPLAAKSAIPASSKATEAAAGAGGSKSAKTVPPSSRAPEVAKAARGLPSPGKRVADFATDISVDDYLGGSDEGQLVIVAPAAATTAAAVVPKAKGGALSAGGEMPALAAVRDEAGAVSRRLKEMKEALSQADDFADRAASGALTAVVSAEVERLWTQHADAVREKSATDSKCRKLTDKVAALEGEKTDLRRQLVEERREANEALAKAQAALLEERLNALQSRVERTEAATRAEAERTRKQLMDSYHELGARTGDFEVPDREPGLCCLEWVQEELQALPTIVEGFMSYASLVTCEGAMNALSREGCRHFEVFDQADEDFERDIYKVEDPIVKESAGAIYDRMRGPHGREVVRERAETARAQAARGERVDDFGALNSALPDPESNSADAVSEAALEPPPETVEGAPDAPAAAAAGGGPPPETAGGAPDAPAAAAPRAEILRRWRRRRQRRQQRRLPRRLGLRRWRSGCGYSVEWTEESSEEDLDYFAALDVAAVETSPHAADIEDVP

SEQ ID NO: 71232 - protein, 38 aa, Zea mays
  Coding DNA Sequence Number=SeqID_27857
MVNRSGITESGESEKVLLLMESVVRIPWYYPFPFWAWQ

SEQ ID NO: 71233 - protein, 153 aa, Zea mays
  Coding DNA Sequence Number=SeqID_27858
MTSHGSSDDENALTHTDGLAREGFPRILWEVLQGAGYTTPPQYTVQQFEKHRVPRCRVRMTLEPHPLQPGWRSLDSESFGWLPTPLACSPAEKEDDPMCKDRVEHAKDIWAIYPGQTAHLTVRCMNALYRLQVMRGEAMSHLMALLGNKDHIG

SEQ ID NO: 71234 - protein, 67 aa, Zea mays
  Coding DNA Sequence Number=SeqID_27859
MAAAGRKTALAVAAALALEAAPPAAAAMDCKAGCAELRASRLGVANCERRCQAIAAQRNPASKSPLF

SEQ ID NO: 71235 - protein, 69 aa, Zea mays
  Coding DNA Sequence Number=SeqID_27860
MQAACNRTKGVHPFDFDASSMEAQAHTSCNRRAGYYVRETTPPLALGPGKGILRKGSFSTKEAGPEPSY

SEQ ID NO: 71236 - protein, 76 aa, Zea mays
  Coding DNA Sequence Number=SeqID_27861
MESHDLRAEWESRLVGKVHNLCRAFENWYISRARGGYEIDDSGYDYDAGCQHCNHCSGEDEAVEGDFQEFQDYDEF

SEQ ID NO: 71237 - protein, 47 aa, Zea mays
  Coding DNA Sequence Number=SeqID_27862
MSRGRGSRLLTPGSLEEMVAGITWPTTLPPGWTVEWDPASAEEEHEE

SEQ ID NO: 71238 - protein, 197 aa, Zea mays
  Coding DNA Sequence Number=SeqID_27863
MEVLDLTRRSGLYIQGSVTFPWGSGLTVDTLEYIIFSGHVAVPEPSTWWGRALFTTRLEIATWVSRLHTVVRDTPVSGYRQWPPGPTSGEDTSLQVGPKLDWRLVRHFRAFADVITANPPSVTPTAMSVPGSPREPTPKEYDLWAWTRVIDWVVVFGGDEEAHYHGQRFAPRVAVRLLRTRRPAHQLYDLWTRAPVS

SEQ ID NO: 71239 - protein, 91 aa, Zea mays
  Coding DNA Sequence Number=SeqID_27864
MPLIKVDNIDSDPYGLKGHSIFKSVRPYNFGYVVVPELRERCLRHHVQAASAEAVSFCRTFGDEAWSQQFVLSSSKEEYNKVSGLDNAKQI

SEQ ID NO: 71240 - protein, 99 aa, Zea mays
  Coding DNA Sequence Number=SeqID_27865
MEKLEESETKVGFLWYEHIYKLDKDYPMLNFMLTTSIYLLVIWLLVFSVACFGGMSLLTGCVSAIEEWLGVTITIIILQLVFLKFDYKLLLLIDSPSRI

SEQ ID NO: 71241 - protein, 153 aa, Zea mays
  Coding DNA Sequence Number=SeqID_27866
MLNKKHNRKKREILGEIDGVQPKPSRDLMEPRYIIKECEFIHNLKDCNLADGEYILVPEQGVAQEVCIVQLSVGVVWNLSCMDSGFSLVMDTSMLDRVAALLIRDLSRSRVIFLALARGSLEDIVAGVTWPSILPPGWTVKWDPTSAEEEHEE

SEQ ID NO: 71242 - protein, 117 aa, Zea mays
  Coding DNA Sequence Number=SeqID_27867
  Subcellular localization annotation: CTP_CleavageSite=64; ConfidenceScore=5.41e-01
MSPQNAAVDSSTTGHPIHVDPTDLARALKACSTVGDASGSSCRAKRVVGVVPSVGRVSLNPAIPYMKRQSRTGSGEMARVARTLLAKDRLKRMVCSQVARTCSCSGGSVGMVDMCKG

SEQ ID NO: 71243 - protein, 96 aa, Zea mays
  Coding DNA Sequence Number=SeqID_27868
MARVACTLRGKRLDSGVSVLSVGVNSVWHRGGRCAQPEQQATQDEAPQPQLLLPPPMSIEQMFLMQTQAVQAIGQTLAAMQQVQQQPQPHPQMQMS

SEQ ID NO: 71244 - protein, 79 aa, Zea mays
  Coding DNA Sequence Number=SeqID_27869
MGVYAQLSAKQGNNVVGSLLVFQITQDLYAKTASAENKEEVVVEEEVTPPTEIPPVGDSFYFDICGTDPESPTTQGDRC

SEQ ID NO: 71245 - protein, 83 aa, Zea mays
  Coding DNA Sequence Number=SeqID_27870
MDRPEHPPPTSSPACVRGPADSGHHRRRAIPRRYRKDFPEPTPSFAGPPSALSNQFCQVLNNVNYLGKIQKPLSVAKEFKVLN

SEQ ID NO: 71246 - protein, 167 aa, Zea mays
  Coding DNA Sequence Number=SeqID_27871
MTRTRKTSRKSNGPLGVPRHQLASRHEGSSSGSNDPIGDLEARVEQLRSELRHRNRAHEQDSHRIAELSAEVSRLQYKISEQDTTINWVVNLRSFAWDCEAKALARVEELSASLESLYSEERLRYYSNRKISGAEHLAASTDRRCDSRRIPIKCSMGISSERYSQTG

SEQ ID NO: 71247 - protein, 162 aa, Zea mays
  Coding DNA Sequence Number=SeqID_27872
MQKQKNVWHQYQIILLLGRIRLETYLLPCPEHPRLLRPPGGSPFHGCRPDHGLLVLAVVLLVLLGHSLLAVAGLLSLDNSLPSDYVLHSRSMHDLLLVLGLLGHSGWLWGQEDELPGCSDTGTDFPSDECSDGTAAAAAEETASGTGAGADADAGAGAGGLA

SEQ ID NO: 71248 - protein, 273 aa, Zea mays
  Coding DNA Sequence Number=SeqID_27873
MSGQSSQLERLHRLLHEEQERRCQEQEQEQQDSSPSPQREVESERPPSPASQPEMPPAPPQGIPATGGDPDGDGDDDAGGSSSHGTEHSEELEPEGWITKPITRDAARGCHFHDALDTLLRQAFDRHTWSIEYRCVVYQHRRGLYPDQWEATCLERRPDDDLRADGLDLKYYPRRSTGSVGGVIVSPVGEGNPRLSSMVNLVAVLNTELDHTLDELGKVRAEVAELHAECVARHYLDGGSPAPVGIQHPYRSPPRGRFDYGTPDCRTRIDLDP

SEQ ID NO: 71249 - protein, 54 aa, Zea mays
  Coding DNA Sequence Number=SeqID_27874
  Subcellular localization annotation: CTP_CleavageSite=45; ConfidenceScore=5.03e-01
MGGGLLAAASSPRSALPLLGPSEQKASSSPLLEQAFPLGVGSFVPAEGEPEFRS

SEQ ID NO: 71250 - protein, 72 aa, Zea mays
  Coding DNA Sequence Number=SeqID_27875
  Subcellular localization annotation: CTP_CleavageSite=56; ConfidenceScore=5.50e-01
MGLRAGARAKQGLHARGRGRARAGAAAPRPHKGLRRATPRTAPGPRRRVRSSWTSRSSTGNCPSGTRKHFFN

SEQ ID NO: 71251 - protein, 216 aa, Zea mays
  Coding DNA Sequence Number=SeqID_27876
MGPTGQWLGRAVSGWWLTGGIGVVGPAGGPSTKLRPVLGHGEGMVVWPSDHCEGEARKRRGGEVYAHPSDDDELECGQDDGVEVLDLVGRMARCSDDRRRGIGISGAPSTVGRGSARRRLGDFGSGAAVSSKRGGENKVAWGFKRASRVGGFELDAQRGHDNLGVRAACANEIDKASMLDEIIEYMQEQGPVPASCPSRWRRRYRIKGGVLAAVQP

SEQ ID NO: 71252 - protein, 89 aa, Zea mays
  Coding DNA Sequence Number=SeqID_27877
  Pfam annotation: Domain name=LEA_3; Domain location=1-85; Score=42.1; E_value=2e-09; Accession=PF03242.4; Description=Late embryogenesis abundant protein
MQRASVTSTTLLSLSRRRRGYAAAAELRAAAAAMAARAPGAGGAADGAASSKEVFWMRDPQTGCWAPEDRFADADAADLRARLLATRKD

SEQ ID NO: 71253 - protein, 159 aa, Zea mays
  Coding DNA Sequence Number=SeqID_27878
  Subcellular localization annotation: CTP_CleavageSite=21; ConfidenceScore=5.33e-01
MAPGARLGGCQPHPGGWHSSRSSAGGAVFLSGQPVEGRSDCGHFGSVNRRARVRIRCQAILALNAPAIRSAGEAILAKVASPRSLPELGLGRVEVKMIYFWPLRGLELFLECLSVRTGGDEDDGFGYDHGDGCPRCNHCSGEDEVMEEDFQEFQEYDEF

SEQ ID NO: 71254 - protein, 105 aa, Zea mays
  Coding DNA Sequence Number=SeqID_27879
TTDQAKDGGKKSFEVPSAREKVKETRNPKPGVKKKTCKVKSAVKKIVSSRGFVVTQLNIVEGSICHTDRSEQTEEGVEIDSKPRIFYSAATYSKDLSFHYDLVFE

SEQ ID NO: 71255 - protein, 193 aa, Zea mays
  Coding DNA Sequence Number=SeqID_27880
  Subcellular localization annotation: CTP_CleavageSite=31; ConfidenceScore=5.15e-01
MVLASVAATSFVILLLFSPPSCLRLRATPFLAEGVGAGASSLYSSNTCPDTDPHSGYCTSTRTFHSMHAPSFSTLPDVPFVFPAFALFFLPNLLPSPTVTAVSRSMLFDADVQVFIVSFSGNEQDFEIHAGTTTGCSSLVFLALGSIKDGATMICHTNSKRKVVVNSLLIAPFIGRVVPRYIGWSKQQHQLFK

SEQ ID NO: 71256 - protein, 46 aa, Zea mays
  Coding DNA Sequence Number=SeqID_27881
MANEVATTKARTIIIVLRLAPPWPDRYNNFERMGGCRMTVKTGASM

SEQ ID NO: 71257 - protein, 78 aa, Zea mays
  Coding DNA Sequence Number=SeqID_27882
MRSTTRIFFRRSIRGPQQELFSGETTDQAKDGGKKSFEVPSAREKVKETRNPKPGVKKKTCKVKVDRVKSYGVSRITT

SEQ ID NO: 71258 - protein, 180 aa, Zea mays
  Coding DNA Sequence Number=SeqID_27883
  Subcellular localization annotation: CTP_CleavageSite=46; ConfidenceScore=5.25e-01
MDATAGRTQGPSSLALLPSREGLTAGMTGSGVVASAGASQGAPVGRCGEGRAGAARREMEHAQGTRRRPGRGSWGRARKEQGACADDEQGLGQGRARTGGAELHGRRAPWWGGARGTPWEGSWRKRKETGRSSAGEGRAPGSSARRRPTRVAGRRGGRERNLDLSEKQQTDSGFDILIYN

SEQ ID NO: 71259 - protein, 99 aa, Zea mays
  Coding DNA Sequence Number=SeqID_27884
MAALDRFAGVSHLAVLCHVPRHLPCRSHSRYACPVIAENEKEIEVEEARTTPPSPPEEPQAGNYFYFDICGAEPESPITQGKPRCICHLLAILKSFSLA

SEQ ID NO: 71260 - protein, 571 aa, Zea mays
  Coding DNA Sequence Number=SeqID_27885
MVAPGAEIATAAIVPKARGEALDAGGEVSALAVVRDEAGAAARRLKGVTEALSQATEALSQVADFTGRTASGALTAAMSAEVERLRTQHADAVCEKSASDSKCRKLTDRVAALEREKADLRRQLAAERREANEAVAKGQAAQAEAKLARAEGNLAKELAEHLQERLTALESRAKEAEAAMHAEAERTRTQLMDTYRELGARTGDFEVPDREPGSRCLQWVQEELLELPAVVGGLMSYASLVTCEGAMNALSREGCRHFEAFDQADEDFERDIYKVEDPVVKESAGALYDRMWGLYGREVVRERAEAARAQAERGERVDDFGALNSALPDPESTLAEAATGVALEPTPETAAIATAAPASAAAGEDLPPKVAEGAPDAPAAAVPSVEGPAAVAAETTAEAAAEPTAEAPAAPGPSQVQDFGPAHAIATTEFLAASTAEGGNEYGGSVSEFFDFTDSGSSVEWTEESSEEDLDYFAALDVAAVEASPHAADAPDVPGPSTGRRRRRAVAKRRVSAEEGARLRVSRAGRQELLSLPAAAGAGEGELRSLFAGEELRIMLFNYREMGIIPKVEPM

SEQ ID NO: 71261 - protein, 151 aa, Zea mays
  Coding DNA Sequence Number=SeqID_27886
MTRLKRRTANVKRAEGTRAGVARRGRATAAPRLRHSSDEAARRDRAKQGHARSRGCALVGGHTGQGAGELTRGVPGEGGRVTEVGAPGRGGVPSGGVEAEAARGTTRRTRWCQAAAGKGCRARTAASKGGRAGARLLLGRGTAQVAGPRGE

SEQ ID NO: 71262 - protein, 114 aa, Zea mays
  Coding DNA Sequence Number=SeqID_27887
  Subcellular localization annotation: CTP_CleavageSite=27; ConfidenceScore=5.44e-01
MTPGISSRLSSPPPAAHPSPPPAAAPSAATTPSHPPSPTPDAFTRLEESFGRLEEKWDQSVVMFHRYKEKTEKELQAAVSLWQLKDELVLKGGGDVMGIIGSERQQPGWDKARE

SEQ ID NO: 71263 - protein, 698 aa, Zea mays
  Coding DNA Sequence Number=SeqID_27888
  Gene Ontology: Mol. function=protein serine/threonine kinase activity; Biological process=protein amino acid phosphorylation
  Homolog annotation: Hit_ID=A3B4Y9; Match level="QueryCoverage=55%, HitCoverage=29%, E-value=2e-15, Identity=23%"; Hit description =Putative uncharacterized protein
  Pfam annotation: Domain name=Extensin_2; Domain location=13-319; Score=-138.9; E_value=0.074; Accession=PF04554.4; Description =Extensin-like region
  Pfam annotation: Domain name=zf-CCHC; Domain location=48-65; Score =16.7; E_value=0.0045; Accession=PF00098.14; Description=Zinc knuckle
  Pfam annotation: Domain name=zf-CCHC; Domain location=67-84; Score =6.1; E_value=0.18; Accession=PF00098.14; Description=Zinc knuckle
  Pfam module annotation: Pfam domain module=Extensin_2::zf-CCHC::zf -CCHC; Domain location=13-319::48-65::67-84
MHASLPKGLTAITATQQPAIPSYLKALQSPAKAAHQQPKPPRPITAKAVCYRCLSPEHLVRACRDPVRCRNRHGYGHRSHDCKMPISQTLSPASHHRKTPTIPVPASRLPVHAVPFNYPAAKASSSTPPTPPSSPATQTYLDAYAPKNMLASSSSCPPDFMLPSAGASKASCMEGPLGLGRAALPKAHCSSPPRRMVDICIDSRNGKAPVEPVFAPSRSPSLGRRSPPSGPGSPVPRSGSPPSWTGSGTGNDSGSFPKPDLAIPVQSPSLDLGGTRNSDGSSLDWDGRTPHIEAWVPQGCRETNDKLIYAYLDQHLPLSAAEEFIQNILRTAAPGIQFQMLPSSRGIKLLHFYSRADRDEVRLMSPLLADGLQLKLECPEETDNRFFRQPQWLAFAMIVDFPTEHWSEASIRRCFGACCEVAEVDPRCLTGDNFGPIRVLLELNHYLDLPSEIWVTTMDGVSRGGCIAQVLPLRVWPRADQLGPDGRLRRFFQHMSPPPAPPMLSEVPAALPHVPQQQNASPVRNAQQQANTTTSQTSSAFSTAQLLCLSAMLAQLTGPRTTETQSQLPPQQNTTPQSHCSSKRQPTSPTTFNATRHKRAGRPPRNNVPKPIQRKSSRLAAKANGNFVDMTNKAVKLKELRDTLQGCSTAVKGGVQKKGLLSRSMASISIPALRKLVRAAGLGCSAANAVGVVPLAKE

SEQ ID NO: 71264 - protein, 74 aa, Zea mays
  Coding DNA Sequence Number=SeqID_27889
MSPLDVQVFIVSFSGNEQDFEIHAGTATGCSYHVLLDLGSNKDGATIICHINSKRKGYLWRSHSLHGWMKNNLF

SEQ ID NO: 71265 - protein, 66 aa, Zea mays
  Coding DNA Sequence Number=SeqID_27890
MGEGSRLGRKNRAKAGKTNGTSGSGENDVSGHVLDEYREEALAPTPSAKNGVARRRRHEGERKEVG

SEQ ID NO: 71266 - protein, 97 aa, Zea mays
  Coding DNA Sequence Number=SeqID_27891
MAVRLPCSGLLPMAPSPISASSSPPPQLWCVLGHHDVPSAGEGPSCSSVVVAFDLEHCDDSMLCPLLPPCPSLGSSCGWFIADMGKEPCILIVMILW

SEQ ID NO: 71267 - protein, 168 aa, Zea mays
  Coding DNA Sequence Number=SeqID_27892
  Subcellular localization annotation: CTP_CleavageSite=58; ConfidenceScore=5.09e-01
MASPGLQTPRAIGDYSLGRPTTFYLSLIRRATCDTPSTVGGTHEAPSTLRANDDTRMRSATEKSMTGITASRHGVRPPELSRQQLRLVAPPEDGRGTTTTTPLPGTDIIIDDKKTPVEYQRSIHASGPFSGPLTSRSPTSTNMNLSKIREAGWPSTPLLPKPLGQPKT

SEQ ID NO: 71268 - protein, 125 aa, Zea mays
  Coding DNA Sequence Number=SeqID_27893
MSKLSPIKLRHSDMSQDEGVNRPKDEMTNKPMIVCVMIVTDCEGHKFEGGHAQKDWAPTCGPRDIKNIVLGSSNVCCRGNLLVPCAGDLRVLGVLGKLSCRRDNEHSPLHGTGALFDDRLDRRVI

SEQ ID NO: 71269 - protein, 160 aa, Zea mays
  Coding DNA Sequence Number=SeqID_27894
  Homolog annotation: Hit_ID=Q6J9V9; Match level="QueryCoverage=48%, HitCoverage=30%, E-value=1e-10, Identity=48%"; Hit description =Putative uncharacterized protein
MQVACNRTTETHPFAFDASSMEAQAHTSWTEKGDISKGILLREGSGPRALLLIRGSKAASEHSGSTPTTDQGFEGWPLEGFDSRPRARRARDDSGYVRYMAEARATLPRGSGAALANPALAKPSTASTNKPENSEPEHAPGLRSDRMREQPDRPRHHERH

SEQ ID NO: 71270 - protein, 130 aa, Zea mays
  Coding DNA Sequence Number=SeqID_27895
MSRSRRQRCQHGQRRSWLEKGASSAQEQYQDLFVGSRITYPRESYLSRKVMSEDSVIDIVEKARKIVLAEKFSSVKTCSVSGIAYLSVSYLSQKVMSEDPTIEVVEKRERCSGRKTFSKENFDAEGVPPF

SEQ ID NO: 71271 - protein, 167 aa, Zea mays
  Coding DNA Sequence Number=SeqID_27896
  Homolog annotation: Hit_ID=Q8SA97; Match level="QueryCoverage=26%, HitCoverage=8%, E-value=2e-07, Identity=62%"; Hit description =Ornithine carbamoyltransferase
MAWSVRAQGRARRRLLLRPRPGSGEDAIPPEVEVEAGPWGRAMRRPPSEVGVEAEPWGWARRSPPSEAEAGAEPWGRARRRPSSEAEAGAEPWGRARQRLSSEAEAGAEPLGRARRRPPVAPEAGLSCCQPHPGGWHSSRSVAGGVVFLSGQSVEGRSDCGHQDPAD

SEQ ID NO: 71272 - protein, 108 aa, Zea mays
  Coding DNA Sequence Number=SeqID_27897
MTMAVFSPLRKQGDVSKVNFRHEAGPVGYDTAHDAEVAGDVWRRVKRPVAGAEVGASEDAAPALAYDDGPNEARRVVGRDAEEDLRDELVGQLSHRPCFSLCSARGDG

SEQ ID NO: 71273 - protein, 102 aa, Zea mays
  Coding DNA Sequence Number=SeqID_27898
MRSVGVAIGPRLLLGEDWASSEPKVRPLLEGALGRDVNPPGSAALARGWARARDLQTRTHGMKKHRKNTKDGTEPKLCARELRHDGRKEETDLKRKRLSRPR

SEQ ID NO: 71274 - protein, 941 aa, Zea mays
  Coding DNA Sequence Number=SeqID_27899
MPSSSSSADATPPAAASSEETLSNVMVEELRAGDSVEFGVSRMTSACIEDMQRLGYFGGGVARAPGTEEVPEPEGELVVFEAFFVAGLRLPAHRKGWLRTELPQFGSCTFTPKTGKTTMPVVELVPCARNKWGNWNEFWFYVAEATVEGHEGLPVSLMCSHYYSAYPPYEVAEEDANEGALRCAAGQSSGRDLVEEFVAYGVWPLAHGWALGKVCPRQMPFHGGRVVRSPAFALNLRNRDPAAFVRDAEDLAVRLVGRYVPRTEGQRSFDIRGSNERLNRVFELNQLPYDGYPGQDEADRRGKKPAVETGGDPALVAATSSKKRKLGTAMGRLGVSDSFARELMRTCAAPVERMSSPELRESSARMLRVTGGCWPKDIPIPCPAEEDCFTSRMVHRWRVFPYGRNIGHVVWAVMDKDRQGAARKRQATVRVHEARPKRQRGTAKAEASGGGKPPLPAKVGASAPGKAPEVTVGAGGPKLTKVVSSVSGVAEAAKAARTLPPPGKRVADFGTEINVEDYLGGSDEGPLALVVPGAAIAKAAPAPKAGGETLGAGGEVSALALVRDEAGVATRRLKGATEALSRATEALSQVADFTSRTASGALTAALSAEVERLRTQHADAVCEKSASDSKCRKLAEKVAALEKEKADLRRQLAGERREANEAVAKEQAAQAEARLARAEGNIAKELAGELQRRLTALESRAEGAEAAMRAEAERTRTQLMTAYRELGVRTGDFEVPEREAGLRCLEWVQEELQELPTVLAGLMSFTSLVTCEAAMNALSREGCRHFEALDQADEDFGRDIFEVEDPVVKESAGALYDRMWGSYGCEVVRARAEAARAQAERGERVDDFGALNSALPDPETTPAEAATGVAPGPTPETAEDAPGAPAPAAAGEDLPPKVAEGAPDAPAAAVPSAEDPAEVGAEAAVEASAEAPAAAGPSQVA

SEQ ID NO: 71275 - protein, 149 aa, Zea mays
  Coding DNA Sequence Number=SeqID_27900
  Gene Ontology: Mol. function=carboxyl- or carbamoyltransferase activity; Cellular component=ornithine carbamoyltransferase complex; Biological process=amino acid metabolic process
  Homolog annotation: Hit_ID=Q8SA97; Match level="QueryCoverage=54%, HitCoverage=14%, E-value=1e-09, Identity=44%"; Hit description =Ornithine carbamoyltransferase
MEQCPGLKRLLETTHLELDRKLFVNTQQAPTWRANCQRFDPGGPSPRSGEAETPPEAKAGVGARTRFRPEVKVEAGPWGRAMRRPPSEVGVKAEPWGWARRSPPSEAEAGAEPWGRARQRPSFEAEAGAEPLGRARRRPPVAPEAGLSC

SEQ ID NO: 71276 - protein, 114 aa, Zea mays
  Coding DNA Sequence Number=SeqID_27901
MKESEEWLCAVAPGISSIPFLYRVVNAELRGGLGAWLSGVGLANSGELCHRGAGRAPPWPAVVRGRMKKPLGPLDSIQWSRLDLRVIMFAPLDPHLTATDGSIAFVCLIMSVRS

SEQ ID NO: 71277 - protein, 246 aa, Zea mays
  Coding DNA Sequence Number=SeqID_27902
MARMHALEEQQLLEDDPTVVYLTTYLLTLDAQYDFLAQHHRQMIARAEDAEKRNRQLHVDLTTAQAHATALESREVIAVEALKQAKDEHVQKLMEAYLVTCNQRRALRIQEPASSNPVQPMKAEDPQILEGHPVSTRGEKKAWELPEGAIVLEGIPIFPQAMDKQEHPESSQDPPPELFEPLTMKKIPPPSREKAASTPPAPPPSKELQEPVPLEEEFNPILPSQSLPEEVINISSLLTHPGDISD

SEQ ID NO: 71278 - protein, 125 aa, Zea mays
  Coding DNA Sequence Number=SeqID_27903
MKESEEWLCAVAPGISSIPFLYHVVNAELRGGSEDVRGFVWAGLGAWLSGVGLANSGELCHRGAERAPPWPAVVRGRMKKPLGPLDSIQWSQLDLRVIMFAPLDPHLTATNGSIAFACLFLSVRS

SEQ ID NO: 71279 - protein, 215 aa, Zea mays
  Coding DNA Sequence Number=SeqID_27904
  Subcellular localization annotation: CTP_CleavageSite=71; ConfidenceScore=5.27e-01
MLNPRFHFCLVHNSWKTPLPPLPRCAHARAPPPQIPAVPSSFPGRRLELRRVRCHAAEVRHRRPGPPLRIPAAEESPEPALEVASEPRQTPAPLVSGEFSAAGTSAAAPASRRRSLGRPPDPHRPSQIGRPRFNQAKPNPDRPPEIQRPRPTFPAPRLPAVWAPPVSPPARALCPPAPPVSLSVPRAARPVPPVSRPGRRALARPPAGSNPGRSL

SEQ ID NO: 71280 - protein, 129 aa, Zea mays
  Coding DNA Sequence Number=SeqID_27905
  Subcellular localization annotation: CTP_CleavageSite=63; ConfidenceScore=5.74e-01
MAPPTRCPSAVPPARSPSLARPWQARRGSSVLPRLAQRPPRVPARPRSPPRRAPLAQPWCDPVAGHGGSAPPARYGLALAPRLAPAMARPWCGRGPAMASPGSPPALACPAPARRGRDVPARRAYGARP

SEQ ID NO: 71281 - protein, 43 aa, Zea mays
  Coding DNA Sequence Number=SeqID_27906
MPSMGLGVCGSLCQAWVAMRLMVLGIGSGNDPGTYMVRIRFAF

SEQ ID NO: 71282 - protein, 38 aa, Zea mays
  Coding DNA Sequence Number=SeqID_27907
MYGLQVAMRLMVLGIGSGNGEDEAVEGDFQEFQDYDEF

SEQ ID NO: 71283 - protein, 147 aa, Zea mays
  Coding DNA Sequence Number=SeqID_27908
MPRNMVNRRLYPSRDLIEPGSRLYPSRDLRRGLPFRLWWVQVRSLHDGSRGQGVHYDVEAPRTVHDVEVVAKELADPLVLRHGRQALVQQELQAIMVSTNIKMTPPQVRAPMAHCLHQPNQLALICRQLEVASGSYAEESERLGALV

SEQ ID NO: 71284 - protein, 264 aa, Zea mays
  Coding DNA Sequence Number=SeqID_27909
MAEMMWETMLETMMVIILKAWIPVLVEIPQLAPELPPKSRFLIKLSGKTWIHDSFTGRGHYRQKRYKLPQDGTYDLNARYVFENNANDVVADVMCLCLGWPPDHNVIGPYEGGGLSLSFVPFPKGTGETVVLSRSTTMAAIDMCAWLSEWKLRLQDTSFSLMTKAHKMKIDPKRIKQLAQQAGVPIPTYGMPPLDFALLPPMLSPPPLPQFPVGFETPLASVAAPRDVSGQDDTSTSWVNNLFNTQSPAEGSGYNSNQPGDRYV

SEQ ID NO: 71285 - protein, 101 aa, Zea mays
  Coding DNA Sequence Number=SeqID_27910
MGVGADEAVGAERALVRRPPAGACCGGRRRDGRLHGQEAIAGTVAGTGEAVAGGRGGGGRRRRRDGVYHGSDRVANVIVKNNCICKTKDMLDARLHSIPHE

SEQ ID NO: 71286 - protein, 299 aa, Zea mays
  Coding DNA Sequence Number=SeqID_27911
MRRVGGPPPRGSAAPFFPLRPGVKGVLEPHGDFLQPCQDMRGARGPGSPSPCLNGWFSSSAGGSPSAVTPPPKLLLKLLRCLGQGWWPSRLERAAASRPSFFSYSAGLPLRRGVVRTCGGGNRSSVGCGISYATEPTPKSVSRGLGSGWRPWKPVDRGPRGNRLSRLLGPDSRGSPWTSAPPEAGSGFAGDVVDAEGATAPFGVKTRACRIRSSCSVCFLRPPRPEEHALAVLAKLRLFSSCFEHLDSVGNRDVCVSESCFSRKGRVRYPYPRGVGIPRLGRPCRLCVLSPVHEALSPT

SEQ ID NO: 71287 - protein, 152 aa, Zea mays
  Coding DNA Sequence Number=SeqID_27912
MGFLLHCWHMLALRVEGSVIQPIVVVRGNEMVVRARLQALSAFRDRGVPKPTIGVAQAALSFCQTGQWSGGVTAVTSALPGARVRIEVSGHLCVKCPCNLVSRCGDLVKVASERSQGLGRAGDVSAIKRGPRARRKSLEVGCLRPRLGSGEA

SEQ ID NO: 71288 - protein, 63 aa, Zea mays
  Coding DNA Sequence Number=SeqID_27913
MRNLISTGQADEASSREYAPQKPNRPHTRASVSLRTAILEAYSPTFFVLVEGGMGMGFTNIII

SEQ ID NO: 71289 - protein, 214 aa, Zea mays
  Coding DNA Sequence Number=SeqID_27914
MKACTILMALCLVVFVSSNVVEGGAYMRHEALSRKGLKQQRKLATSGLNPSVSNLSGQTSSSVNNVVNNNYESTNTNMSDAATATTPMTATTTDSHHDLSVDQYRRITHNMVAGHNISPRMRKQLVLELEVRVVRLELVDCLPRCVVFRKAAPLDQHAPNAPAQLRLKGMLRPREDASIHDRRKGGRSCWRFAIVRLQQPYVEDVVDARLVRKL

SEQ ID NO: 71290 - protein, 19 aa, Zea mays
  Coding DNA Sequence Number=SeqID_27915
MPFDSRLKTMSVATGEEKV

SEQ ID NO: 71291 - protein, 80 aa, Zea mays
  Coding DNA Sequence Number=SeqID_27916
MDRRTPGFRRGGLLDSIVASASPPLPLLYVVKFSEIIFPTDFIVGAADLSWILKYWCIFNTTRLFRLADSAGKFPNEARA

SEQ ID NO: 71292 - protein, 185 aa, Zea mays
  Coding DNA Sequence Number=SeqID_27917
  Gene Ontology: Mol. function=structural constituent of ribosome; Cellular component=ribonucleoprotein complex; Biological process =translation
  Homolog annotation: Hit_ID=O22453; Match level="QueryCoverage=46%, HitCoverage=33%, E-value=5e-23, Identity=65%"; Hit description =Ribsomal protein S4
  Pfam annotation: Domain name=Ribosomal_S4e; Domain location=83-158; Score=55.1; E_value=2.4e-13; Accession=PF00900.11; Description =Ribosomal family S4e
MENVYKATVGAIAQNGYYVAYDGWGNREEAEHVLFTAGQQTPGMHFEKDKALAHRFQPVLVNEPSQVLKRDILWEHYMSTKLISETCLQLLRRYDHKPESQRAPLLEEFKLCKVRSVQFSQKGIPYLSTYDDRTIRYPDPLIKVNDTIKIDLETNKIMDFIKLYLPFHGLHQAIYLVRLNVSTNS

SEQ ID NO: 71293 - protein, 217 aa, Zea mays
  Coding DNA Sequence Number=SeqID_27918
  Gene Ontology: Mol. function=hydrolase activity
  Homolog annotation: Hit_ID=A2YJE5; Match level="QueryCoverage=42%, HitCoverage=30%, E-value=2e-37, Identity=82%"; Hit description =Putative uncharacterized protein
MSDDLVVPVHFEVGQELCFRLLDHPLLVLLKLELLVSRQAHRYLAPAPPPHRAPRQGGTAVLAIKRRCGEHLNPQPRNPFLGVPKSFPGVKLEFWDGMRSRLAALRPDGSISRRFLADLPTVLVVGDSVFVHGGLLEANVEYGLERINAEVTLRILFRPPSPGSLGSIWASACPRPPAAATAGSRTTGLLTTGLMLLRFRTAAEPFFCGTISDFGAL

SEQ ID NO: 71294 - protein, 480 aa, Zea mays
  Coding DNA Sequence Number=SeqID_27919
  Gene Ontology: Mol. function=voltage-gated chloride channel activity; Cellular component=integral to membrane; Biological process=chloride transport
  Homolog annotation: Hit_ID=Q8LPA2; Match level="QueryCoverage=50%, HitCoverage=39%, E-value=4e-63, Identity=50%"; Hit description =Chloride channel
MQAAGTRLGRGGEAPKSQSLGVRGGLAGAGSADVDWAAALAAGRVLGLDGPKTPGRRRDRRTANGTAPRRTRARRAAAHWGLGHGGRGRGAGRWASARPRRTLDAWTQTGQADSEWDGAMTDLGAARGGALGAGARWTGTGRDARRAVTRSAVDALLAQDLGSSKKLMGLRPGPWPRRLWAWVRPWNALQLAGLGNFKNFQFPPDYYNGLAALFFNTNDDAIRNLFTSGTKNVFHMSTLFVFFTAILAGATYMQAHSGDPSCGLISDHDPGLFALLGATSFLDRRNNEDDCVSLCDTSGAHVEPYMRHLGCWRCCVEDHRPQWGSSGRRATSIRGSRFQNSLGLCLDPHLLVMLKGKGFMKEKVKTSGSSVLQRFGAFEFAKRGSGKGLKIENLDFSDEEMDMYVDLHPITNTSPYTVVETMALAKAAVLFCALGLKAPARCAKDPRETSDCWNSDEARFHAGAYSWAVPKHTQVALMEH

SEQ ID NO: 71295 - protein, 235 aa, Zea mays
  Coding DNA Sequence Number=SeqID_27920
  Gene Ontology: Mol. function=sodium:hydrogen antiporter activity; Cellular component=integral to membrane; Biological process=sodium ion transport
  Homolog annotation: Hit_ID=A2Y0E4; Match level="QueryCoverage=27%, HitCoverage=12%, E-value=3e-23, Identity=82%"; Hit description =Putative uncharacterized protein
MAKREEQTSKKPERDRNFRKNTQGSSEFRCRKNLRTQSLERRSSDAPSTGAKVRADRWLPATSPPPPDCSAVRGRHLLFASSLNYRRAGSVGSEKGEDARRRVNMQLADHDSADRPCNWCYFLGNIFCLHLTGVNQDETPLLYSLVFGEGVVNDATSVVLFNAIENLDIDNFDAIVLLNFVGKFLYLFFTSTIIGVVVINPLPPLLLRFPYVKDESSWFQDKNGLSFTNFCNSLP

SEQ ID NO: 71296 - protein, 133 aa, Zea mays
  Coding DNA Sequence Number=SeqID_27921
  Subcellular localization annotation: CTP_CleavageSite=65; ConfidenceScore=5.39e-01
MPPSPTTIIHTPSKPALAILGSAILPSTPVMWQPPSAPPTAPVWHNKPPPRNSQSTPSPAVGDVAAVVLSSSDCWRSQSSGDLGPLEILVVESYTNHTLSANLLAYKQSRGQMGAAAPGELRDVDGVRGGCAT

SEQ ID NO: 71297 - protein, 171 aa, Zea mays
  Coding DNA Sequence Number=SeqID_27922
  Homolog annotation: Hit_ID=A2ZCZ2; Match level="QueryCoverage=64%, HitCoverage=60%, E-value=3e-19, Identity=44%"; Hit description =Putative uncharacterized protein
  Pfam annotation: Domain name=DUF538; Domain location=7-148; Score =52.8; E_value=1.2e-12; Accession=PF04398.3; Description=Protein of unknown function, DUF538
MEAAASALLLLGLSASLAPFASAAAPYDPPTVPELMDQLGLPRALLPETARRYLLHDDGTFELFLDDGCVVEAGGYRVGYDIKLSGTVSPGSVTGLEGVRVRVLFAWVPITGVEAADGEVTVHIGPIRKSFPAVGFKSSPRKKIANRKKQPKILKICIEDDEATENIKKAS

SEQ ID NO: 71298 - protein, 218 aa, Zea mays
  Coding DNA Sequence Number=SeqID_27923
MSFASVLASSVCLELPVLRGNDARLRLRREVDARRVPRWGAGAVDSLDSRRGAASYLAMPAPPPPPSAGKVMGQTRVLLFRHVGKTSSIPPPAGGLTAAIVVVARRRKEYHVVTAVEGHELKTPETKHHSGLKRLLETTHLELDGKLFVNTQQAPTWRANCRRFNPGGSLDRRVNCRRVSQPRWVGARRNTKGRKTAKGKPAAFVLSCAQVGSEPEVG

SEQ ID NO: 71299 - protein, 148 aa, Zea mays
  Coding DNA Sequence Number=SeqID_27924
MESSPMSSATLTANDLLKRVKGMVGKADYNVLPQVFCLFPGVAGLQIRPASSPEGRGEPSVAQRDMQDSRDGTVSGLGWVQCPCTHPETRHQIPTRLEPQCELKTTPPEHNGDPKTYGSPKTHMELGDWDGRGAHREVVAGSRASWYK

SEQ ID NO: 71300 - protein, 262 aa, Zea mays
  Coding DNA Sequence Number=SeqID_27925
  Gene Ontology: Mol. function=two-component response regulator activity; Cellular component=nucleus; Biological process=two -component signal transduction system (phosphorelay)
  Homolog annotation: Hit_ID=Q2HWG4; Match level="QueryCoverage=96%, HitCoverage=97%, E-value=2e-67, Identity=58%"; Hit description=TypeA response regulator 1
  Pfam annotation: Domain name=Response_reg; Domain location=12-135; Score=82.0; E_value=1.9e-21; Accession=PF00072.15; Description =Response regulator receiver domain
MEAGGAGAEGVMRVLLVDDSPVDRRVAQLLLSSNSCAGSFHVIAVDSAKKAMEFLGLKDGGKEQAIDMVLTDYCMPEMTGYDLLKAIKALNPLKPIPVIVMSSEDEPQRISRCLNAGAEDFIVKPLQSKDVQRLRNCSTVGRPSNKGGATLPCEENAVAKWSNNKLPPSAGAGAGASATSPSGRRANLAGVAMIKAQRLSDRDRDRVFLCQRQVLHSSRVEISQYLPLLLKLVVLAYAALCLGELLHRWSSGGSCSLSPWCA

SEQ ID NO: 71301 - protein, 29 aa, Zea mays
  Coding DNA Sequence Number=SeqID_27926
MAYFIHPAVTKMGKKLPSGPRSQRLGRGS

SEQ ID NO: 71302 - protein, 274 aa, Zea mays
  Coding DNA Sequence Number=SeqID_27927
  Subcellular localization annotation: CTP_CleavageSite=93; ConfidenceScore=5.61e-01
MSQRRCWCLHGTWGCKPGPTHQPRSPSLPRNRPLSNKRAPLVSPFIAPVTKLSARSPPVATRPVAMPLTRSPARLAPCAPVSLRQPEPSCHPPAQAIPSPPLCAVIAVVASSPVLATSPPFPALGAYKKDRSSTILLHTGLGHSLSPPLSRIELRAVAPSLRSALKVYHSLTNTTHHSPSPIAPGNLAGDPTTADACDLAVDRPSRAPFGQINPSTMIPYPHPCLATSPTTRNRDPDGEPPWNHTGGRLRPEKRDPILRNLQLWKRGRNPTSPK

SEQ ID NO: 71303 - protein, 57 aa, Zea mays
  Coding DNA Sequence Number=SeqID_27928
MGRREAEREGGRKVAGDRRERGGNPAAFVFVLRKERIQVYNGGVAECYVSSGGELAP

SEQ ID NO: 71304 - protein, 144 aa, Zea mays
  Coding DNA Sequence Number=SeqID_27929
MEVPRWAGVFERGDETAAFYEHLGEETTMFCSGAPTTMCPHSPTLLLLGDARDHLCKVVEALSLDPFGGCNAHISVRLSPTSFAYTVNVEYAHKAAIRKHALWSSISVDLLMAFVLGAAFLLNTETICIWTIALVHNMTEVKGN

SEQ ID NO: 71305 - protein, 213 aa, Zea mays
  Coding DNA Sequence Number=SeqID_27930
  Subcellular localization annotation: CTP_CleavageSite=28; ConfidenceScore=5.09e-01
MSGATAMSPKPLGSDRWSSDFWARLDVAVGARSSRCPAVTPDSPVYTGQSGKADRAEGLLRLWDTDTSLIAFCEKRTDPAGSDVDGGGAAAPSASTPPSTKSDRASDGNTGEGSPLRRTASAPRPGHHRQGLLQEPGPSRRLGRPPRSLSQLSPEDTSPAHGLGNPTPALVSLVDGPARLRPTKSSFRANSASVHADTAASGSGSSQSGRGFL

SEQ ID NO: 71306 - protein, 95 aa, Zea mays
  Coding DNA Sequence Number=SeqID_27931
MANHGQDGKGLTSGAGLSERESGCEEKGRAWLMGGAGLSGKSAAVAEPPKLSDPHAPVLVSKTSDSYACAPNNLTGSVRVPRGPRINDLPPRSQD

SEQ ID NO: 71307 - protein, 70 aa, Zea mays
  Coding DNA Sequence Number=SeqID_27932
MALSGEEADCTQAPGANGGECSSTRNNYWHHHQQPQPPGPRVVRGQPQSNLTSLMDSSICVMICHTPSSR

SEQ ID NO: 71308 - protein, 74 aa, Zea mays
  Coding DNA Sequence Number=SeqID_27933
EVEIGEGPASLKMHADGGEFLSEAMDDIDDEEAQHFNTIPTNSSQSMDIQSGRVGSSVLKAPRRASAPANRLSA

SEQ ID NO: 71309 - protein, 76 aa, Zea mays
  Coding DNA Sequence Number=SeqID_27934
MGEEFMPPRVVARGEVKDERHPGMDVLCTLRRDMLVVNSVIAILGRGSGFMLSSLKGVSIIGARVSPRALAEAVMC

SEQ ID NO: 71310 - protein, 265 aa, Zea mays
  Coding DNA Sequence Number=SeqID_27935
  Subcellular localization annotation: CTP_CleavageSite=45; ConfidenceScore=5.29e-01
MVAIQGGHPPFKGDSPHLRPQPSRVESSPTRSKILPLRHGCWVPRVMQAGPGQKEPNRRARSVQPPSGYKHSSTFAQTSGVKRADRHAGGHATTPRGRTLSTPTHLAWRPRPTRHVTGAPVTTCEKLHRHLRQYRAFSTTELVPRLKATQRMAQQCQPSTSITGTEKGDTPKGILLCKGGRPRALLLIRGSKAGPSEGFDSRLRALGLRALLLIRGSKAGPSEGFDNRLRALGLRAHHWSEVRRLAPRRGSTAASSHLGSAPTTD

SEQ ID NO: 71311 - protein, 421 aa, Zea mays
  Coding DNA Sequence Number=SeqID_27936
  Homolog annotation: Hit_ID=A7PQU5; Match level="QueryCoverage=13%, HitCoverage=8%, E-value=2e-07, Identity=53%"; Hit description =Chromosome chr6 scaffold_25, whole genome shotgun sequence
MLSCFAFERVTDSGDRDRGGLCGGLAGGDGGEDDGCHDASRVDVEERMAGAAMRGIHKFLVHGSVDPPSTRTRPLLPAINAHCMSASRTPHPPPPLLLAINAQADVADPPTLLPLCSLPSTRNWMSRILLSAINTDPGIHARPASYDLQPPPSVILAPPAPHPWITAHAPSMEDVAGEEALCVPQPGAQIGYWGRTPWRPTREDEITVCISSSPSWSSNSCRGHHRLLHAIPLSGFKRISNEVSPKATSCPTMGTSSEDLIEATTGSEVDLALGGLCNNVFMSISLASMYDSVAITKDKVFDAVPSKPSTEFPNAAWWYKTVFESVFDFFTDCKFILYNVVGVNMHASSAPAAATLAAERVDAPRDVETDEDLSNEEKDMLHMHEIDVGSMDEHSTKSDEEYDGLAMCDVMATGPTMSSKL

SEQ ID NO: 71312 - protein, 647 aa, Zea mays
  Coding DNA Sequence Number=SeqID_27937
  Gene Ontology: Mol. function=amine oxidase activity; Cellular component=peroxisome; Biological process=amine metabolic process
  Homolog annotation: Hit_ID=A7PCT5; Match level="QueryCoverage=39%, HitCoverage=31%, E-value=2e-30, Identity=37%"; Hit description =Chromosome chr17 scaffold_12, whole genome shotgun sequence
  Pfam annotation: Domain name=Cu_amine_oxidN3; Domain location=327 -442; Score=-14.6; E_value=0.096; Accession=PF02728.7; Description =Copper amine oxidase, N3 domain
  Pfam annotation: Domain name=Thiolase_N; Domain location=359-551; Score=-164.2; E_value=0.025; Accession=PF00108.14; Description =Thiolase, N-terminal domain
  Pfam module annotation: Pfam domain module=Cu_amine_oxidN3::Thiolase _N; Domain location=327-442::359-551
  Subcellular localization annotation: CTP_CleavageSite=5; ConfidenceScore=5.61e-01
MSSLRVVTRGANPPSLGTVSLKTKAPKMAGMPIMSLANQDASTPATVTATHASVLSFTASTRYQMQGPTEHVCPYELEHQGSLIRPSEGKLWCTEIMEDSGNGNLDGAGKSSNEDLVLPGLLGGMTLPMFDEMSPNSGEEEIALFSEGFDYPVFVDMPLEKVVWDEEPGYDDLLNQLAQGADHLVDATMQPTIHPIAVDKQLQLGVNQGCFEMPVNTDDTEDLFQNYDVAASDARETSEEEVEDYLAESKEGAMDEVLQVELIDDEVQWDEESPNQSVHKGLLPHTVRKMVYLKGFSQGGGISTMTQVQRCHPLAPLSTAKISVAIAIVRAAGCEFAVKYYPSFNEAIQRIDVNDIALVMVDHSCSGYCSEADAHYCRTGNSPLCCRTDSDSLMENGYARPVEGISVAALYAGFADTVLLKTKHRQCTSGLQDVADVAVAIKAGPYDIGIVAGLQSKTVNKVSLVEQMNSKVELFSQAHGCFFPNGLTYENIAHCFGTTRLQPDQADVESHPGKSKDGLVIYSVAYVGDSCEHRFITHRPSFVGMVILYGDPNELHYRQNAFDAGEEGLEIKVHSREKGCECLDNLLVSKTRHEYLNLIRNDALLLMPAELQVLPSVRVLLLWMIRPWNPGILATLCVTVAWGQATF

SEQ ID NO: 71313 - protein, 52 aa, Zea mays
  Coding DNA Sequence Number=SeqID_27938
MSSHSLHASRPSTFRAPGWGAPAPGRIPSPVVIQDGDHQFDGGEKQAGQRPL

SEQ ID NO: 71314 - protein, 140 aa, Zea mays
  Coding DNA Sequence Number=SeqID_27939
  Gene Ontology: Mol. function=transcription factor activity; Cellular component=transcription factor complex; Biological process =regulation of transcription, DNA-dependent
  Homolog annotation: Hit_ID=A2XCL9; Match level="QueryCoverage=40%, HitCoverage=20%, E-value=3e-16, Identity=76%"; Hit description =Putative uncharacterized protein
MNSRCITHGGAELLQGIRPAVQKVVLAIMTEGQIWRLAGASALQDLVLKLDHFGSFLEVSVEVKKKKRGARAVGPDKNGRGLRQFSMRVCEKVESKGRTTYNEENYAPLYNKKETKRVYRRPKYKTLLMEARNKHTYNCP

SEQ ID NO: 71315 - protein, 107 aa, Zea mays
  Coding DNA Sequence Number=SeqID_27940
MAGPGWLPAGVIDEDGAREDTVSAGEQGAKALQPARTIGDEVEQPPARVYDRLRRVAASAADGGGGRGERDRGENLTVAQGHEDGGAVMGTGTITSEETLGDKNSAA

SEQ ID NO: 71316 - protein, 91 aa, Zea mays
  Coding DNA Sequence Number=SeqID_27941
  Subcellular localization annotation: CTP_CleavageSite=56; ConfidenceScore=5.36e-01
MVAGSLLLHSVPLVQGRSTSGDLLPMAQQADAPASTPSSPLDSTSSSSPIRQQPCSSATRSPLYVNNSNPDPIHVPSVDVTLRSSLLDEEP

SEQ ID NO: 71317 - protein, 220 aa, Zea mays
  Coding DNA Sequence Number=SeqID_27942
  Homolog annotation: Hit_ID=Q6QP51; Match level="QueryCoverage=19%, HitCoverage=19%, E-value=2e-08, Identity=66%"; Hit description =Putative growth-regulating factor 1
  Subcellular localization annotation: CTP_CleavageSite=47; ConfidenceScore=5.40e-01
MVAFQGGHPPFKVALPTCVPSRHGLSLLQHTPRSSPTARGWVPHVMQADSEQKKPNRRARCVQPPSGYKRPSTFAQTSGRKGGQTCRRHATAPSGRTSPTPNTPGMEAQAHASCNRRAECFVHATAPPLAPPPRLLDCGTNAATRGTGKGGYPEKDPSPRRNQAPSPPTDQRFEGWPPGRVRQPPQIAWALHPLMVRGSKAGSSKGFHGRLWLHGLRAHY

SEQ ID NO: 71318 - protein, 283 aa, Zea mays
  Coding DNA Sequence Number=SeqID_27943
MAKRPSPSPPYGGDDKTIQAKELEARRLTAPAPDSLMNILETEHWRKSANPHEVALLQQQQEEGEIGSAIVQETKSVSSPAARSPRGKALTQILPPNADALHPGRRRARLLRSCPERPREVSLEAHRSTQPMTRGPAPQVIRLVRWSPSAQKANRRAGSESPRLFTPPRAAVQPLAQGPGSTSHTPRASTSVCGEGEPPRKEHTTSYGKKLNRRSHQYRASSGLPQKTEKDQFSWSRPESFGEKTPAQLPGGKFSWVWSKRSTAEVEVQLELKKFNSAEVQLS

SEQ ID NO: 71319 - protein, 586 aa, Zea mays
  Coding DNA Sequence Number=SeqID_27944
  Homolog annotation: Hit_ID=A2YHP3; Match level="QueryCoverage=89%, HitCoverage=95%, E-value=1e-105, Identity=41%"; Hit description =Putative uncharacterized protein
  Pfam annotation: Domain name=DUF1719; Domain location=146-389; Score =287.7; E_value=2.2e-83; Accession=PF08224.2; Description=Domain of unknown function (DUF1719)
MVPSVSRRSLAWGRREALTNTRRKRGADPGKLDRRPWAERWVGGGINGQRREEEAEETVSQILSGIVRRYEGKENSTPNDDLERLEMAHIKLEAVLETSSRWQITTGSPLSRWRKKLKRAAQECDDTLCEHKKMVLEEEETEQEVRNSSFPRRLAHATRSFVFSALGRRSNDGECSSSRSAVVRRFEWFADSASEFLRFVELGGTPSCRRHMPLASFARHLFAGKELQHRIVGGDEHEERHSSLLWLAPFVTEEHGTEACLVLIKKDRGGDTLGVGGSFFFSVILQLSESTDMVGTAVECLNLFPAHFQPAADTIRKELTQLPTTQDFSWAPYAGHWHKRHWDDLHSFSTRWFRPDPLCCKQQQHGQHSRCTADAALGSVVEVNLQCQISLLPSEHNNGHRTTSPSPTSEGRGRHPLRDRQDLEAGLLFSPHGSSESMLPPPADTASSTTVSVHGGEQHTGVTLEQLEEIVLPRAVDHFQRNTEATVYQTLWKAVHGAAYIHFAKPATGSAEAAPPGARRASRGASSWRRRRKLQVRRRREDLELHRQTRVISHVLDLWGAHAPVELRGLVLNWIRKEKERQCLRF

SEQ ID NO: 71320 - protein, 74 aa, Zea mays
  Coding DNA Sequence Number=SeqID_27945
  Subcellular localization annotation: CTP_CleavageSite=34; ConfidenceScore=5.18e-01
MSDRTPALARPGYSLPQSPGTRLRVVRIPRREVRDPTRRSGLHSRGPGPCSRGLVYMYKGPALSYGGPDPLLAS

SEQ ID NO: 71321 - protein, 140 aa, Zea mays
  Coding DNA Sequence Number=SeqID_27946
MGKNNKRKREPTPPSEDFGDSEYSEEEFSSESEGSPAPVSPPASSDDSDDSQGIAAEVWTYIRAVERSGLEGSDESEYSSNEEDSDGGDEGEDDDDDDDDDGDGDGSGSGRGGGDGSRDSTKGSSRGSTKGGGGRGRASG

SEQ ID NO: 71322 - protein, 280 aa, Zea mays
  Coding DNA Sequence Number=SeqID_27947
  Gene Ontology: Mol. function=metal ion binding; Cellular component =nucleus; Biological process=cell differentiation
  Homolog annotation: Hit_ID=Q7X9M7; Match level="QueryCoverage=90%, HitCoverage=85%, E-value=2e-84, Identity=62%"; Hit description =Yabby9 protein
  Pfam annotation: Domain name=YABBY; Domain location=42-249; Score =248.4; E_value=1.6e-71; Accession=PF04690.4; Description=YABBY protein
  Subcellular localization annotation: CTP_CleavageSite=41; ConfidenceScore=5.35e-01
MSSSSSSSSSSAATVFPRSPQLPPPVLVENGLTPLHQLTPVAAAAPAAEQLCYVHCYFCDTVLVVSVPTSSLFKTVTVRCGHCSSLLTVDMRGLLFPGTPTDTVAGAAPPPAADTSTTTTTITTAPPPANSVNNGQFHLPHSLNHPHHQSLLVDEISSAANPSLQLQLEQHGGLGGLILGGSRNTAAPPPPQPPAAAPEKRQRVPSAYNRFIKDEIQRIKAGNPNISHREAFSAAAKNWAHFPHIHFGLMPDHQGLKTTSLLPQGQGVPPSNTIRARSFL

SEQ ID NO: 71323 - protein, 540 aa, Zea mays
  Coding DNA Sequence Number=SeqID_27948
  Subcellular localization annotation: CTP_CleavageSite=56; ConfidenceScore=5.35e-01
MNKDTGIQSAITNGTPVPPPQARTTPQDWGTCGAIAGRRAARRHPVRQQRQPPSPRAAKQLRQRLRGGGYGRGALTRRGQEPAIQAGRRRPRATGGVGNLVGREATTGCRRLEARRQASAPVRTAQSMGAALAVRSATIVRAEGVALRPSRVTAAHLSRLGWRKSPRNWRDAILPQTPGEEKGSRPTRRQPPRLASSSILAWMTKILEAEGGAEAAARRASPHPGTGSHRLGQLHRHLRHRRASSVAEPMPRLEATQRTAQQRQPGATVNAAESGPAVMTVAGGREQRSRRQPGSRPIQGQQESLLSRREDDAPVIRPSNGSRTRNGRPANHSPRRINSAAGQAAFLAGEAGDASPSPDRERGIPPKRILPCEGTGLRAPPTDQRFEGWPSEGFNSRLRSRGPYTHYWGSKAGPRRVHSRLRRRARDDQGYVRYITKARAALPSSPETPCSMPIEGNMAHSPLLLAERRRRGVCKKAESVPDRPLALCGGSGAALANPAPAEPLTASTYQPESLGPDRAPGLRPVRMREPPDQPKHYARH

SEQ ID NO: 71324 - protein, 101 aa, Zea mays
  Coding DNA Sequence Number=SeqID_27949
MEKSPKAELSISETEIAPEGRIQRQARQRFAPEGWSASPVVLNVPTGDGSRRACTIAGGVIMLLRLDMSVVLLSTVLLLPWRGVGMAQDSTPEDGADVFFI

SEQ ID NO: 71325 - protein, 263 aa, Zea mays
  Coding DNA Sequence Number=SeqID_27950
  Gene Ontology: Mol. function=metal ion binding; Biological process =double fertilization forming a zygote and endosperm
  Homolog annotation: Hit_ID=A3C6C2; Match level="QueryCoverage=95%, HitCoverage=57%, E-value=1e-104, Identity=75%"; Hit description =Putative uncharacterized protein
LIRLSAGVFDSVLRDGHHVAHRFARALAEVLRRAGWDLAAAAEAAYPGVSYSKAGHCRYALLSRVCLSMFDGFDSHQFGATAGTAELGGTEPATTRRNESLRQFIEHSDADPMELVNSRPDCEFARFCDRKYKQLIHPGMESSLFGNAGCGTLPVMSVAGPLYELFVAMASSVWTLHRLAWAYDPAVGVFQVGRGAEFSMVYMENIVRSSKGLAGSREPGKPARRPKVGFTVVPGFRLGGTVIQCRVYLDHGKRGEETIIDSI

SEQ ID NO: 71326 - protein, 65 aa, Zea mays
  Coding DNA Sequence Number=SeqID_27951
MEKGSWGCLGIDRPSKMSLDDIESKIGVSSFLEAYLERTSKLSVLGLDQFRMGDRPINEKIFNRF

SEQ ID NO: 71327 - protein, 28 aa, Zea mays
  Coding DNA Sequence Number=SeqID_27952
MVARMTATARGLCGSGGNGSRLGIWATG

SEQ ID NO: 71328 - protein, 82 aa, Zea mays
  Coding DNA Sequence Number=SeqID_27953
MEQVLRGSGCDKGRGPGVAGDDGGGRCAAKGVWGGGSAHGGGHACEGHGLFQASRVSFPVSSWGSSQSEEKLHYPMHAEDWA

SEQ ID NO: 71329 - protein, 205 aa, Zea mays
  Coding DNA Sequence Number=SeqID_27954
  Subcellular localization annotation: CTP_CleavageSite=85; ConfidenceScore=5.66e-01
MRRRLSQNQPCVSHFSAACSSSSSRRRPHNTLVMRYFKEFKTPRFKSSTLILFKWGSVPARFLLWRKRRRPVAILWRTRSPKLISFWMRSGHPSFVDEAPEDQSRKESMWKFARESSQDARTTWTKELRKATPQKKTLRRSRKVQERRRVLPADCLCVEHRTVRCPHAGLSGAPGNCSPTASSRWHPEPAAPTVTCSDRRQTGNG

SEQ ID NO: 71330 - protein, 59 aa, Zea mays
  Coding DNA Sequence Number=SeqID_27955
MCSQLQLSLAHRTIWWCTGLSVGAPDSVRCPRLVNDEVAGLENRRSCMTINHRTVRDKW

SEQ ID NO: 71331 - protein, 107 aa, Zea mays
  Coding DNA Sequence Number=SeqID_27956
  Homolog annotation: Hit_ID=Q7XBD3; Match level="QueryCoverage=32%, HitCoverage=6%, E-value=2e-07, Identity=77%"; Hit description=Zeon1 gag protein
  Subcellular localization annotation: CTP_CleavageSite=57; ConfidenceScore=5.60e-01
MPPKKASAPGAGTLQPLDPNQDVLSLREARSQKRKPTAKATMLLTGFWTTAKLSPATSSKRQRRQGLRRKIWRSTEKNLLLILRLKDMDGNEIPRSWNADELRRYYV

SEQ ID NO: 71332 - protein, 1358 aa, Zea mays
  Coding DNA Sequence Number=SeqID_27957
  Homolog annotation: Hit_ID=A2Z149; Match level="QueryCoverage=99%, HitCoverage=81%, E-value=0.0, Identity=76%"; Hit description =Putative uncharacterized protein
MEHSKCGKTRVIINPNRQPMETHFFERAAVETMDITKILTLQGGEAVYPLPRIKNLAVHPKFNLAAVIFADMSGTEAAKNKAAYTREGRRQLFALLQGARGSTAAVLKEKLLALGSSGILAEHQLQAQLQEQHLKGQSQLTISDVARKAFLHSHFMEGHAQSGPIPRLPLVTISDSSNLLRDVPVCQIPSNVECHPTNMSYSPKQHLFLVVFELSGTNGVVHEVVLYWEQTDLQTVNSKGSSIRGRDAAFLGPDDNQYAILEEDRTGLNLFSLKAVATKEALENNAAVLEENTFADNAASATSTERQGPLQFTFESEVDRIFSSPLESTLLYVISGKHIGLAKLLQGYRLSADNGLSITTKTDGKKFIKLKPNETVLQAHWQTTLRGPVVGILTNQRVLIASADLDILSSSSTKFDRALIFSSATAISMLGWDNKVRSILSTSFPRSVLLGALNDRLLLVNPTDINPRQKKGVEIRACLVGLLEPLLIGFATMQQHFEQKLDLSEVLYQITSRFDSLRITPRSLDILTKGPPVCGDLAVSLSQAGPQFTQIMRCNYAIKALRFSTALSILKDEFLRSRDYPQCPPTSHLFQRFRELGYACIKPSIHGIKTVFLDEFDCLSVGGLPVLDILRLWVLVLQFLGQGFFWVISEEQLYGQFDSAKETFEVITDHESMLDLFICHLNPSALRRLAQKLEESATDSELRRYLERILRVRSTGWTQGVFANFAAESMVPKGPEWAGGNWEIKTPTNIKNIPQWELAGEVMPYMKTTDAGIPSVVADHIGVYLGVMKGRGNVVEVSEKSLVKAIAAASSENTQPVSSASAEKSKAIPRGDSVGDTLARQLGVQIASSDEQAKAAEDFKKTLYGVVDDGSSDEDESTSKTKKIHIRIRDKPAAPTVDVNKLKEATKQLGLGPPLSRTRSLSGTPQDFNQAPTQPGGPAAAVSPAMPNSAIDLFGTNTLVQPQAPSSSTGPVIAGMGVTAGPIPEDFFQNTIPSHQLAAQLPPPGIVLSRMAQPAPGIEQGRPVPNQMMANVGLPDDGVPPQAPPQQSQFPPQQSQFPQQPGIPMDSIGLPDGGVPPQSQPLPSQGQFLPSQAQGFQLGIPAPSQPIDLSALEGPGAAKQAARPPAPTAVRPGQVPRGAPAAECYKMALAHLEQNQLTDALSCLDEAFLALAKDQSREADIKAQATICAQYKIAVALLQEIARLQRVQGAGALSAKEEMARLSRHLASLPIQAKHRINCIRTAIKRNMEVQNYAYAKQMLDLLYSKAPPTKQDELKSLIDMCVQRGLTNKSIDPFEDPSQFCSVTLSRLSTIGHDVCDLCGAKFSALSAPGCVICGMGSIKRSDALAGGPGPVPSPFG

SEQ ID NO: 71333 - protein, 139 aa, Zea mays
  Coding DNA Sequence Number=SeqID_27958
MRNKLKVMKMKIKKMSHLKRRTMIKGEMKIMKTRKMIKKYRVKGLHTLESTKQFNEITPSTPYLVTFIRGIEDALRDPNWVLAMQEELNNFIRNDDGKLIKTPMGTNGHLDLDMGGKSVDQKADPKEVHLRAVKKIMRV

SEQ ID NO: 71334 - protein, 80 aa, Zea mays
  Coding DNA Sequence Number=SeqID_27959
MRAQLNGSAAKLMLFEEILNGRGDVCAFSAELSPPPEPFDSLVDPEAEKEDEITKMAEAIMDEAVTRLLNEAAEAVLKEE

SEQ ID NO: 71335 - protein, 200 aa, Zea mays
  Coding DNA Sequence Number=SeqID_27960
MAPRTLYDDGGSQPPYGSKRTALLQRVGRAGKGRDRRSRTRASEGWDARRATWLGARLHGYGSTANRGCRDETRRLAGEDGTWTTTENSSARRGTNCSVRVAVVRADGREVLRRRASESPLQHAETAAAAVVVALDLAPGTDRAPGTRAAGQLQDVVDPAPVRGRWASSWGARRAKGAAGRWAGERAVGRGQARGKARAG

SEQ ID NO: 71336 - protein, 237 aa, Zea mays
  Coding DNA Sequence Number=SeqID_27961
MSFCFVRSLLCLCVWCCCNCSLVCISTPLLTPDLIVNNCVRRERLQFVEIPHSWDIDIRKTLWCSHYFKIPLQTSVRYEGELFYVKNLADNATCFIGQELVPTDDWNHGAEPGLNGKVEPILVALKTLKEKSLTGPLMARRRPLHKYSSVNDPDGHSSEPFALSEIEARVKYVTALSLGFFMDEDFMDPFLGAYRVAYQRVCATQVREGRNLGGQSDASISPGLWVAATGKYAPSGS

SEQ ID NO: 71337 - protein, 175 aa, Zea mays
  Coding DNA Sequence Number=SeqID_27962
  Gene Ontology: Mol. function=kinase activity; Cellular component =ornithine carbamoyltransferase complex; Biological process=amino acid metabolic process
  Homolog annotation: Hit_ID=Q6QP54; Match level="QueryCoverage=35%, HitCoverage=21%, E-value=2e-10, Identity=61%"; Hit description =Putative kinase
MAPPVDVVGPWCPRLSDVEAPPRSRPSLSSVAEVESEPLGRARRRPSAEARAESEPWGRAKRSSSSSGAEPEPESEPWGRAKRSSSSSGAEPESEPWGRAKRSSSSSGAKPESEPWGRAKRSFLWRLRSGLADVSLTLSSGTAVGAAQAALSSCETGKGVEADLQEFQDFDEFKD

SEQ ID NO: 71338 - protein, 342 aa, Zea mays
  Coding DNA Sequence Number=SeqID_27963
  Gene Ontology: Mol. function=transporter activity; Cellular component= membrane; Biological process=transport
  Homolog annotation: Hit_ID=Q2QN30; Match level="QueryCoverage=88%, HitCoverage=55%, E-value=1e-141, Identity=84%"; Hit description =Metal transporter Nramp2, putative, expressed
  Pfam annotation: Domain name=Nramp; Domain location=1-302; Score =460.4; E_value=2.4e-135; Accession=PF01566.9; Description=Natural resistance-associated macrophage protein
MAEVALVSADIQEVIGSAIAIKILSHGLLPLWGGVVITALDCFMILSLENYGVRKLEALFAVLITTMACSFAWMFVETEPSGKDLFIGILVPKLSSRSIKQAVGLVGCVITPHNVFLHSALVQSRKIDPDKEYEVREALRYYSIESTLALVVPLMINLFVTTVFAKGFYGTKEADSIGLENAGKYLQEKFGGDFFPILYIWGVGLLAAGTSSTITGTYAGQFIMGGFLNWRLKKWIRALITRSFAIVPTIIVALYFNNSGYELDVLNEWLNVLQSVQIPFSLIPLITLVSKEEVMGVYKIGPRMKWSVDGRVLVTWISQKSPPWEIESPHRGHVSEVPPRHL

SEQ ID NO: 71339 - protein, 407 aa, Zea mays
  Coding DNA Sequence Number=SeqID_27964
  Homolog annotation: Hit_ID=Q75I52; Match level="QueryCoverage=87%, HitCoverage=84%, E-value=1e-148, Identity=77%"; Hit description =Expressed protein
  Subcellular localization annotation: CTP_CleavageSite=47; ConfidenceScore=5.63e-01
MPTAYSLRAPPSASQQRLRLPLPPPPPPLPFCPGGGAARRRRGVGVASASASPFDELHARGEARTWTLQGKQKSDAPAVLFIIKKSMLWNLIQDIEPLDLSVIQKDVAPETVDAMKRTISGMLGLLPSDQFRVIVEALWNPFFKLLVSSIMTGYTLRNAEYRLSFERNLELPEEGVECLKSDVTEDNHHNINLGRPVTIFRLSEEDMPQDPGKTDEASSYENMGEELGDLTPQAEEYIIQMQSHLNAMKKELHDLRRKNSALQMQQFVGEEKNDLLDYLRSLTPEKVAELSESTSPGVQETIHSVVHGLLATLSPKVHSKAPPPLDNISGGVLNLGGEDDDRAELVENASLPFQPLISVPRDYLARLLFWCMLLGHYIRGLEYRLELARLLRISSVGSFSGGDDHVV

SEQ ID NO: 71340 - protein, 91 aa, Zea mays
  Coding DNA Sequence Number=SeqID_27965
MAGKILDKEMSVIGANIPHQVKQVVPAAFDGGPASFESAVDEWHTPPSPELTVQNTTPPPRTDGVRLHTPVAKNAVRVCRDSGTAARPPLP

SEQ ID NO: 71341 - protein, 104 aa, Zea mays
  Coding DNA Sequence Number=SeqID_27966
MGKGKRGRGSPRRAGDKRKRDPSPPSEDFGDSEYSEEEVSSESKGSLALASPPTSSDDSDDSQRIAAEVWTYICSVKRTGLEESDESEELLWLVRGAEWQRQRR

SEQ ID NO: 71342 - protein, 16 aa, Zea mays
  Coding DNA Sequence Number=SeqID_27967
MGPRFIRSTSTSTRGK

SEQ ID NO: 71343 - protein, 69 aa, Zea mays
  Coding DNA Sequence Number=SeqID_27968
MAGRGGRSEGEIKEHGEEVEEGESEFLSFLEDALESGFMMEGGSRYAKERMRGQPKGVDGDGRIVARLS

SEQ ID NO: 71344 - protein, 207 aa, Zea mays
  Coding DNA Sequence Number=SeqID_27969
MQYKESSSLISCEKQTIRIEFLTLQGLTALAYNAPLTPAAAVHNRGGRKGGGAYRRRDCSGEVVEDVGEVSGITTVCGSPSERGSRDAREDMGARNWSETHWIARCTRGGGRPKSGEVDLGPPVKSGWVRGLGKLHGLLAELAEALARLEDGWSGLATVAEALAAMAGGIELAGAKERGLAGEEIWSQEIRSVSLPKPEANPRFCRV

SEQ ID NO: 71345 - protein, 37 aa, Zea mays
  Coding DNA Sequence Number=SeqID_27970
MVPRRCKLTADEQATVETEVQQVEIAEQELVEGKLCP

SEQ ID NO: 71346 - protein, 140 aa, Zea mays
  Coding DNA Sequence Number=SeqID_27971
  Subcellular localization annotation: CTP_CleavageSite=53; ConfidenceScore=5.27e-01
MPGQHYKPRLRPKHRTTLVPGAGASSPYSSDTSPDTDSRSGYCMSTRTFHIMRAPSFSPSSDIPFVFPAFVMFFLPNLLPPPTVAAASRPTLVDAGTERVSHALGLSLCVSSRRTWWRLPHLGYLGDDESRYEILDNQGP

SEQ ID NO: 71347 - protein, 401 aa, Zea mays
  Coding DNA Sequence Number=SeqID_27972
MEKDRQDAVRKRLAVIRVRDPFREAKKAWGTKLAAAAGPSKLPSAGAKAAASGVGKLPSAEAAKERRASSPARTDMVARVADFDTDICVGDYLIGSDAGQMSVVPTTVVATSPTAVGGAKGASQDSWSNFCVSGKISSVAAAKDVASSVSQHLRHVSQQLKHAAAFTDHVASGVLTSELAAKVERLPAQHADAVREKSAAENKSRKLMERFAAVEAKKGDLRRQLAEERRDANKSIADAQAAHAEAKLARAGASLACQRAEELESRLNGLHNRVDKAETSTRAEVGRTHAQFVDVYRELGARTAAFDALGQEVGLRFLEWLQEELGVLPMIMTGLMSFASLVTCEGAVNALSCEGCGHVEVFDQSNEGYKHEILQVEDPVLKRSAGALFDRMWGPHGRETV

SEQ ID NO: 71348 - protein, 52 aa, Zea mays
  Coding DNA Sequence Number=SeqID_27973
MARVACTLRGKRLDSGVSVLSVKKQPTFVASVQRWYQRKRIKTRTAGGKVLN

SEQ ID NO: 71349 - protein, 132 aa, Zea mays
  Coding DNA Sequence Number=SeqID_27974
MEALLADDQQPFEDLVRRKEKEVMRQWIEQHDKEEAELLHKLSEWCKKAAEKYLPHFTVDRHQKIIHLGEIDMESLLPPLQAPALIAATRHATGSGDNRTIQESSRIVWLYRRPSSIFRQPFDPTQARARNT

SEQ ID NO: 71350 - protein, 126 aa, Zea mays
  Coding DNA Sequence Number=SeqID_27975
MESHDLRAERESRLVGGNENDGFGIDSGDGKWYSFHLERVVRIATTAQEKMKPWKETCMSSKIMTSSRCGLAATPNRLLVKATCIYVSFPHFDYCKDYVDVWGVKPTSEGSRLRTDSLKTRSNPER

SEQ ID NO: 71351 - protein, 221 aa, Zea mays
  Coding DNA Sequence Number=SeqID_27976
MPSMGLGVCGSLCQVWFAPWGEVRDQWRVMISEQKGNHSLWVKCATSAECLKTDISAVLAVMSGQGSSSDQWYLIRDVRITGGNENDGFGIYSGDGKWYSFRLERMARLRHTAWKSVIPFLPSRLAERPLRRPVTGQSSHLERLHHRLHEEQEKQGSSFSLLQEIESVRSCSPVLPLEAPPAPPLSALAPGVAAGGDLDDGGGDSSSSHDTDLSADQELEG

SEQ ID NO: 71352 - protein, 105 aa, Zea mays
  Coding DNA Sequence Number=SeqID_27977
MPSMGLGVCGSLCQAWVAMKLMVLGIGYGNGKWYSFRLERVVSIATTAQEKMKPWKETSRSSKTTTSFRRGLAATPSRLPVKAAFIYGSFSHFDYCKDYVDVSDI

SEQ ID NO: 71353 - protein, 241 aa, Zea mays
  Coding DNA Sequence Number=SeqID_27978
MESHDIRAERESRLLGKIARLRHTARKSVIPFLPSRLAERPLRRPVTGDRVCEELLPCASPGGAPCTTTESRKDGLLDPSLATLLAGVTSTMRSTPCYVGHLTDNSLWGAEVCSEHYSISERDSAEAAMQDATRRALSHYCSVLGGVADGLNLKYYPRHPSGSTGGVIVSPVGEDNPRLSSTVNLAAVLNTELDHALDELSRARAEIAQLRAERAERRHLDDGSPAPVGTQHLYRSPRRGH

SEQ ID NO: 71354 - protein, 115 aa, Zea mays
  Coding DNA Sequence Number=SeqID_27979
  Subcellular localization annotation: CTP_CleavageSite=71; ConfidenceScore=5.04e-01
MPVAGPPWSLPFSGHPLISPAAIALWLHRTICTYLIRLLSLTLVMIPLFMSVAWPTNKMSRNKKSTLAQGSAAAVFGGEFVMLLRLHGSPDRVYLYILIDQKRCWKHVGSDRVDA

SEQ ID NO: 71355 - protein, 79 aa, Zea mays
  Coding DNA Sequence Number=SeqID_27980
MESGEESEVIEEKAQPPPLESRARTWLYFDICESKPDSPHTLESLFLSQVRKRQSFVAFAPRWYLMKKNKNEDTGASST

SEQ ID NO: 71356 - protein, 166 aa, Zea mays
  Coding DNA Sequence Number=SeqID_27981
  Homolog annotation: Hit_ID=Q6H6M0; Match level="QueryCoverage=26%, HitCoverage=32%, E-value=3e-07, Identity=61%"; Hit description =Vesicle-associated membraneprotein-like
MKTTRRTPKGPRVPRSTELKHAFLRRPLRIPHGSGLRTGTYRSGHSQRRGLPCQMHMGTLGQDLAPQQVPCQEGLRNSPPAGKDPSRLASSPEVGPRATVGTLNQGYPLLRYEGVAPVPHLQFGKVQGKLVEEIKLRVVYVPVNPLSPVPKETKECDGSLDSNVDY

SEQ ID NO: 71357 - protein, 746 aa, Zea mays
  Coding DNA Sequence Number=SeqID_27982
  Gene Ontology: Mol. function=catalytic activity; Cellular component =nucleus; Biological process=metabolic process
  Homolog annotation: Hit_ID=Q10K51; Match level="QueryCoverage=99%, HitCoverage=99%, E-value=0.0, Identity=79%"; Hit description =Pentatricopeptide, putative
  Pfam annotation: Domain name=PPR; Domain location=134-168; Score =25.7; E_value=0.00017; Accession=PF01535.11; Description=PPR repeat
  Pfam annotation: Domain name=PPR; Domain location=235-269; Score =40.0; E_value=8.4e-09; Accession=PF01535.11; Description=PPR repeat
  Pfam annotation: Domain name=PPR; Domain location=337-371; Score =28.8; E_value=2e-05; Accession=PF01535.11; Description=PPR repeat
  Pfam annotation: Domain name=PPR; Domain location=439-473; Score =33.4; E_value=8.3e-07; Accession=PF01535.11; Description=PPR repeat
  Pfam annotation: Domain name=PPR; Domain location=474-508; Score =14.8; E_value=0.14; Accession=PF01535.11; Description=PPR repeat
  Pfam annotation: Domain name=PPR; Domain location=510-544; Score =13.7; E_value=0.19; Accession=PF01535.11; Description=PPR repeat
  Pfam module annotation: Pfam domain module=PPR::PPR::PPR::PPR::PPR::PP R; Domain location=134-168::235-269::337-371::439-473::474-508::510 -544
  Subcellular localization annotation: CTP_CleavageSite=77; ConfidenceScore=5.05e-01
MPPSALPRGVHAVLITSGHLRNLDPHLQVPPLLLVNSLIAAFSRAALPRLALPLLRRLLAGAHPLRPDSFTFPPLVRAAPGPASAAQLHACALRLGLLHPNVFASGSLVHAYLRFGRVAEAYRVFDEMPERDVPAWNAMLSGLCRNTRAADAVTLLGRMVGEGVAGDAVTLSSVLPMCVVLGDRALALVMHVYAVKHGLSGELFVCNALIDVYGKLGMLTEAHWVFGGMALRDLVTWNSIISANEQGGKVAAAVELFHGMMESGVCPDVLTLVSLASAVAQCGDELGAKSVHCYVRRRGWDVGDIIAGNAMVDMYAKMSKIDAAQKVFDNLPDRDVVSWNTLITGYMQNGLANEAIRIYNDMHNHEGLKPIQGTFVSVLPAYSYLGGLQQGMRMHALSIKTGLNLDVYVTTCLIDLYAKCGKLVEAMFLFEHMPRRSTGPWNAIIAGLGVHGHGAKALSLFSQMQQEEIKPDHVTFVSLLAACSHAGLVDQGRSFFDLMQTVYGIVPIAKHYTCMVDMLGRAGQLDEAFEFIQSMPIKPDSAVWGALLGACRIHGNVEMGKVASQNLFELDPENVGYYVLMSNMYAKIGKWDGVDAVRSLVRRQNLQKTPGWSSMEVKGSVSVFYSGTQTEPHPQHEEIQRGLHDLLAKMKSAGYVPDYSFVLQDVEEDEKEQILNNHSERLAIAFGIINTPPGTPLHIYKNLRVCGDCHSATKYISKITEREIIVRDANRFHHFKDGHCSCGDFW

SEQ ID NO: 71358 - protein, 163 aa, Zea mays
  Coding DNA Sequence Number=SeqID_27983
  Subcellular localization annotation: CTP_CleavageSite=35; ConfidenceScore=5.31e-01
MAGMYCCARACLNWRMQPPARTVMRTFFSPVVKAKGSTEKRWVHRSRSARMKRLVGTPNPRSWKETKLSTYPGGGVGPAPLGGTIHSGCGSPERGQSKPSATRASRSSTVTVEKGHGSRGGTTVTRSAIAKRRGGGGADKGPGKGIFRKGSFSAKEAGPEPSY

SEQ ID NO: 71359 - protein, 50 aa, Zea mays
  Coding DNA Sequence Number=SeqID_27984
MHQGSLCKGYVVYPWPFTSVVKIRRRYIRCSGGDAGNMEDFEEFQDYDEF

SEQ ID NO: 71360 - protein, 71 aa, Zea mays
  Coding DNA Sequence Number=SeqID_27985
  Homolog annotation: Hit_ID=Q2QSC3; Match level="QueryCoverage=66%, HitCoverage=3%, E-value=3e-08, Identity=54%"; Hit description =Retrotransposon protein, putative, unclassified
  Subcellular localization annotation: CTP_CleavageSite=41; ConfidenceScore=5.05e-01
MGTNGHLDLDMGGKSVDQKGVKLIKKSTLRTCEFLGRSLVSWAQRNKTQQLFLPPKLSTLLQAIVVRNYFG

SEQ ID NO: 71361 - protein, 43 aa, Zea mays
  Coding DNA Sequence Number=SeqID_27986
MTTDRPLELLHMDLFGLIAYISIGGRKITKPRDFKGILETGSK

SEQ ID NO: 71362 - protein, 299 aa, Zea mays
  Coding DNA Sequence Number=SeqID_27987
MARIMCTASERPLRRTVPGQSSHLERLHRRLHEEQERRRQEQEQEQQDSSPSPQREVESERPPSPTPQPEMPLHHLRASQLLEETLTETETTMTSVAVQATTQSFRRSRSQRDGSLDPSLVTPLAEAFSEHYSITERDTAEAAMQDAARRALSQYCSLFSGVADGLDLKYYPRHSIDSVGGVIASPVGEGNPRLNNMVNLVAVLNTELDHALDELGKMSENRRRGARHAQPEQQAPQEGAAPQHLPLPPPMTIEQMFLMQTQVVQAIGQTLAAMQQLRGATQSWWESYLATHANPEAIT

SEQ ID NO: 71363 - protein, 554 aa, Zea mays
  Coding DNA Sequence Number=SeqID_27988
  Gene Ontology: Mol. function=two-component response regulator activity; Biological process=two-component signal transduction system (phosphorelay)
  Homolog annotation: Hit_ID=A3BTT9; Match level="QueryCoverage=33%, HitCoverage=31%, E-value=3e-22, Identity=33%"; Hit description =Putative uncharacterized protein
MNQEMTTMFPSGIKALIVEDDARFIKSSSMLFSLLNFKVASCGSPISALRLLSGDKIKDVHVVLVNAEKATTCGFDFRAIVETDLCIPVIYFLPRDHVATGDEADELLRTLRDSTYVLRSPLQASDVGDLWTVVAWRKCYLENKAKKAADRRRRVVPAAVQAFLAGGYSTVGEGRNDDESRVHFKAVSAGGRRGRKRKSGGHTVVVGSSGDDQTGKGHGKMNATGGHENDDDDDGGVSSQQQQQQQPVATAATSRWNQPAAGSVAPPTAAVGNMATTVTDEPEFSRGSHHHQAVSLPLMFGPFPYQGPRPQVLKQAMFVPLPRYSGTESIGGATVAADAREYGNAAGSLLQPLNLGTGPHGHDELAAMTAYTESNDPPVAEAATNPTIEEVLNNGDSFSTYSTSLMAPNQVLDDMASDVNELAMAGGAIFSNDDASFTAPQDLAAALDGGQLAPGALDAISASLMETDGNPGLELEAMFSPDQYENTLFPLEALLGLDDAPVYEDGQDYRQGGGSADDEAAGTSLIGGADDSLDVLDDYLFMDSAGDFNDDERD

SEQ ID NO: 71364 - protein, 847 aa, Zea mays
  Coding DNA Sequence Number=SeqID_27989
  Homolog annotation: Hit_ID=Q6ZBZ9; Match level="QueryCoverage=75%, HitCoverage=73%, E-value=1e-156, Identity=49%"; Hit description =Putative uncharacterized protein P0493A04.31
  Subcellular localization annotation: CTP_CleavageSite=40; ConfidenceScore=5.32e-01
MPRPSSRAKAASPPEAVAGASQRTPAPSPSTSLRLGIGPVASDDNRGAGSLDLKQPAAGPRRHSLRLMGAALGLGLGPVSHHDDCGAGCPNLSPPAAVPPRRSLRLAGPALGTPNTLSARDGSSSGFGSGGSEKRSGRARARVPASSLATSISPRTGNSNSDGGGSGADRVSASGDSSGGSDPFTTLRSGFRIAKRRMEAGGEAETGSSRRGQVHNEMLHQHVDTPTKRCKTILVGGVETEHVSDTKGDSDEDCMMLGPSGTELNYVATKTEKGDVDDPANASNGESLQTHNLLPAANGGVVEQLVYASGSPASFEAQVSADMCLKEGSSQCSSRKEGKVKEKLVLGNNKSCAYANVGSAVDTCSHKFNPDSKGKEKMVAEDSLSSLTSSEDEPDFDPVDSKETQLNSGSVSASMESYRRQTVKERAIKLAPKFAFFKADKDEHSEDDDEELEPGPDTEDWPGPFATAARIYEEREAKLRARELNSLKLDESANRVIRWSPSKDRKNLVQAQVAPSLTSVCLNTLAEHSEWIQSLEGVPEELKHKLLKILCDSRKMNTHLLNKLLCDSPTELHLSECSWLSEDDFEKTFGKCSTESLQDLQLDISGRCIPDYILPTTLAKVPNCMPLLRKISLKGNYRLSDNGLVTIISAAPSLCSLNLCECSLLTSSGIDILANKLCSVLRELYIDDCTNVDAMTILPSLQKIKHLEVLSMSRIQSVCDKFVKGLIPVHGLNLKELAFAGCLKLTSSSIKTIGEYCQKITSLDLCNLNRLRDSAMMHLRGCRLIRKLKLQRNAFSDEAVSQYLEASGGCLTELMLNNVEVLVPTDVFRCHRCAALGEIISTGAAPS

SEQ ID NO: 71365 - protein, 617 aa, Zea mays
  Coding DNA Sequence Number=SeqID_27990
  Subcellular localization annotation: CTP_CleavageSite=27; ConfidenceScore=5.12e-01
MDKDRQGAAQKRQAVVRLHEARPKRPRGAAKAAAPGGSQPPLAAKSTVPASSRAAEAAKAAAAGGSKSVKAAPASSRVPEAAKAARELPPPGKRVADFATDISVEDYLVGSDEGQLVVVPPAVATAAAVVVPRAKGSALSAGGEMPALTAVRDEAGAVSRRLKEMKEALSQAADFADRATSGALTAVVSAEVERLRTQHADAVREKSAADSKCHKLADKVAVLEGEKTDLRRQLAEERKEANEALAKAQSAQAEANLARAEGSLARQRAEQLEERLSALQARVERAESSTRLEAERTRKQLMDSYHELGARTADFKVPDREPGLRCLEWIQEELLALPAIVEGFMSYASLVTCEGAMNALSREGCRHYEVFDQADEDFERDIYKVEDPVVKESAGALYDRMWGPHGREVVRERAETARGQAARGERVDDFGALNSVLPDPEPNPAVVVSEAALQPPPETAEGVPDAPAATAAGGGLSPTAAPRAEDPVKVAAEPTAEDPATAGSSQVQKFGPAHATATTNFLAASTVDDGNKSDGSASKFSDFGDSGSSVEWTEESSDEDLDYFAALDVAAAEASPHAADAEVVPGPSTGRRRRRAVAKRRVSGADGGRLRVSRAGR

SEQ ID NO: 71366 - protein, 178 aa, Zea mays
  Coding DNA Sequence Number=SeqID_27991
  Homolog annotation: Hit_ID=Q8W1D4; Match level="QueryCoverage=21%, HitCoverage=10%, E-value=1e-07, Identity=78%"; Hit description =Cinful1 polyprotein
  Subcellular localization annotation: CTP_CleavageSite=41; ConfidenceScore=5.41e-01
MGGAWDELAWAPCSPSRASGVTNLTPLTGISPPRFKKKLARQQAFENKSPTLVPTSGELTSTFELMALFNNQAEVSSATKLVLPITGGSGSEPANKKQKKEAKEGYNMLECRDPSSSQNGPTSQSPSPRRTFSSNITLTMMLWSYLVSSRDFWSIMFWMIHVVQWISYLLRPSDRCKN

SEQ ID NO: 71367 - protein, 60 aa, Zea mays
  Coding DNA Sequence Number=SeqID_27992
  Subcellular localization annotation: CTP_CleavageSite=45; ConfidenceScore=5.23e-01
MAAGLPSHDPYMVKPRSNPLSHRIGTASPCQLSSSSTFSSHAWARCLHAPTHLAVRHRRK

SEQ ID NO: 71368 - protein, 77 aa, Zea mays
  Coding DNA Sequence Number=SeqID_27993
MAYSEWTTRILASQPRPHARRRWQEQGERGRCTLDRLGAQGCMGRSEPRLFVRRQGPWGAWDELARAPGSPSRAAAS

SEQ ID NO: 71369 - protein, 45 aa, Zea mays
  Coding DNA Sequence Number=SeqID_27994
MESYDLRAECESRLVGCLWCNLYSGKEEGVEADLQEFQDFDEFED

SEQ ID NO: 71370 - protein, 263 aa, Zea mays
  Coding DNA Sequence Number=SeqID_27995
  Homolog annotation: Hit_ID=Q6JAD6; Match level="QueryCoverage=100%, HitCoverage=37%, E-value=1e-79, Identity=58%"; Hit description =Putative uncharacterized protein
  Subcellular localization annotation: CTP_CleavageSite=60; ConfidenceScore=5.32e-01
MCYGTSDPPRHPHGGVAPDTAHVVALFRPPFSDGSRRSPADFTTAARFLYQLMRRMLLPRMGYREAATHIQLWLLGALVSHSEFDVVDFLICDIKDIVLDGLRARRQLPYAHYLCHIFAQLIWPPQFQGTLEASCLIFGSYRPALEDHVPAPTPVTDTQAKDTTFHQFETQDATVHDDDDDFGIPPPPPMPPRSHDHEAGSSSATPAAPPAIDPALASILQTLTQQQAHLAAEQARQAASHQQMSERMLSMFQTIQDRQDSLQ

SEQ ID NO: 71371 - protein, 152 aa, Zea mays
  Coding DNA Sequence Number=SeqID_27996
MGKSKKGSGSSPRCGDKRKREPTPPSEDFGDSEYSEEEFSSESEGSPAPVSPPASSADSDDSQGIVVEVWTYIRAVERSGLEGSDESECSSDEEDSSDSSEEDSGGDGGDGGDDRGDGDGGDDGGRGGDSDGKGDHGSGSKGSSKGSNKTSG

SEQ ID NO: 71372 - protein, 309 aa, Zea mays
  Coding DNA Sequence Number=SeqID_27997
  Gene Ontology: Mol. function=DNA photolyase activity; Cellular component=cytoplasm; Biological process=DNA repair
  Homolog annotation: Hit_ID=A2X273; Match level="QueryCoverage=91%, HitCoverage=54%, E-value=1e-98, Identity=62%"; Hit description =Putative uncharacterized protein
  Pfam annotation: Domain name=DNA_photolyase; Domain location=8-193; Score=189.3; E_value=9.9e-54; Accession=PF00875.9; Description=DNA photolyase
MEAATAATAAMMWFRKGLRVHDNPALDAARRHGAGAASARLYPVFVLDPRYLRPDAVAASPGSARAGVARIRFLLESLSDLDARLRRLGSRLLLLRARDDVADAVCAALKDWNIGKLCFESDTEPYALARDKKVTDFALASGIEVLTPVSHTLFDPEEIIKKNGGRPPLTYQSFVSIAGEPPAPAMEEYSELPPLGDTGEYELLPVPTVEELGYGDISQEEIPPFHGGETEALRRMKESLQNKEWVAKFEKPKGDPSAFVKPSTTVLSPYLKDVHRSVRNHTKPPVSLTGQVLLDIKEQSGYTASLLRF

SEQ ID NO: 71373 - protein, 170 aa, Zea mays
  Coding DNA Sequence Number=SeqID_27998
  Subcellular localization annotation: CTP_CleavageSite=60; ConfidenceScore=5.05e-01
MVPIRGGRVAPPVEAAISVDPVAAAGSTVGASTPVWAAAACALAQSVVSASAPIWAATTRAPMGVRGCPLCRLLSRYFPRQPELFVGVVVDRSRATSSTAAQNLELCCRRTCSIRRLRCFYFRSRCYQFRCRQPCCPRRCRCSRCCCSLSFLCRDDLGFLLAPRTRSDRE

SEQ ID NO: 71374 - protein, 153 aa, Zea mays
  Coding DNA Sequence Number=SeqID_27999
MGKSNKRKREPTPPSEDFGDSEYSEDEFSSESEGSPAPVSPPASSDDSDDSQGIAAEVWTYIRAVERSGLEGSDESEYSSDEEDSSDSSEEGSGGDGGDDDDDGGDGDDGDDSSRGGDGGSKGGNGGSKGGNGGSSRGSNGGGSSKGSNKASG

SEQ ID NO: 71375 - protein, 77 aa, Zea mays
  Coding DNA Sequence Number=SeqID_28000
  Subcellular localization annotation: CTP_CleavageSite=14; ConfidenceScore=5.34e-01
MSATGFSKHKPTPNATMTVTIATRSLQWVIGSGCAFLTDRLRPWCIAPTSSWVLARGQAVFGGQERCYDWHSVSPPT

SEQ ID NO: 71376 - protein, 205 aa, Zea mays
  Coding DNA Sequence Number=SeqID_28001
  Gene Ontology: Mol. function=DNA photolyase activity; Cellular component=cytoplasm; Biological process=DNA repair
  Homolog annotation: Hit_ID=A2X273; Match level="QueryCoverage=81%, HitCoverage=30%, E-value=1e-73, Identity=77%"; Hit description =Putative uncharacterized protein
  Pfam annotation: Domain name=FAD_binding_7; Domain location=2-161; Score=45.8; E_value=2.7e-15; Accession=PF03441.5; Description=FAD binding domain of DNA photolyase
MATGQMKMRINSLVLLGAWTLWKHRSQCVFEGGNPSIAAILEQFIHWEKGRDVFERLLIDSDWAINNGNWLWLSCSSFFYQYHRIYSPITFGKKYDPNGNYIRHFIPVLKDMPREYIYEPWTAPTSIQKKANCIIGKDYPKPVVDHETASKECRKRMGEAYALSRVDAKPSKGKTLNSRRKMLHGDRDTSNSTIAKRLKRNSRAE

SEQ ID NO: 71377 - protein, 311 aa, Zea mays
  Coding DNA Sequence Number=SeqID_28002
MQRLGYFGSGVGRAQGAEDVPEPEGELVVFEAFFAASLRLPAHRFVVEVLRRFEMVGNHLLKSSRKITVCTGKKRKLGGMIAQFGYCTFTPRTGKTSAEVIEIVPCAKISGVTSGSSGFMWHHATSKVAQFAPCYLVLVLLYGVSTVKVAKGDQDEEVVRYVARLSSGCDLVEKFIASGVWPLAHGWALGVNGDVHDSRGIVVFARAPGNFFAHAEAVMEKDCQDAQRKKRAEAGQFAVVPSIVAAGLMGTAKGDAGTSEDPWLKFCAVAGGGGELASAAAAAGDCLHRASCLRGADLAVCFLEEMTRGKD

SEQ ID NO: 71378 - protein, 167 aa, Zea mays
  Coding DNA Sequence Number=SeqID_28003
  Subcellular localization annotation: CTP_CleavageSite=75; ConfidenceScore=5.01e-01
MASSLLDASQIFGRARAERASKQMKELGFQQRALKQVKSSSLGPTFYRPGAAPRELNSPTVTRLVNGHISKKTCRTTSSEGSIFAILRQISSPADLVELVPRSANVGAKAQRPLAREAIVRGFKIGDPEGLKSELHYEVHGENAQAKTRVLPPPGQARAKTIKDFGD

SEQ ID NO: 71379 - protein, 195 aa, Zea mays
  Coding DNA Sequence Number=SeqID_28004
  Homolog annotation: Hit_ID=A2XFR6; Match level="QueryCoverage=58%, HitCoverage=33%, E-value=4e-11, Identity=35%"; Hit description =Putative uncharacterized protein
MDLPRICVENGVILEDSSKEFLPTPSPLTESLAFTAGSSSSAPPAPAVQAPALEGDDPDDSGDDDENFKEEEEGDHQRGSQRHTYWQQLHNTKYRHLPLRLRGESQTSIVLGGAEEDRLNTLIGVVAGLSTDLDSATLDLSRVHLELEDAHVRIAALEAQLEGRDPLEAQVPAMALSPPRKRIRYGEPGSITRLL

SEQ ID NO: 71380 - protein, 106 aa, Zea mays
  Coding DNA Sequence Number=SeqID_28005
  Subcellular localization annotation: CTP_CleavageSite=51; ConfidenceScore=5.36e-01
MKDHHRASPMATSAPMTDGPASSFAVPHPRAPAITVVWVLFVSALLKLRILAESLGEGKGISHRHDTVAAVLSYRVDNLILVTTDGPSAMKQTPNSSPFVVLDRFS

SEQ ID NO: 71381 - protein, 38 aa, Zea mays
  Coding DNA Sequence Number=SeqID_28006
MARCPCFAAVDHYVNGNMERPPGKTVLPQRFNGTPLAD

SEQ ID NO: 71382 - protein, 112 aa, Zea mays
  Coding DNA Sequence Number=SeqID_28007
MTKEGRRNRSTSQPHNWRIIRQQQTEMNPPNPPPVGTDPVVAAQMLVLQQMTNMVNEMQNHIRQERQEMHQDRLEMHQETRQGRLERQQQQHPLPPPPPQAPLSYIYIYYYL

SEQ ID NO: 71383 - protein, 122 aa, Zea mays
  Coding DNA Sequence Number=SeqID_28008
  Subcellular localization annotation: CTP_CleavageSite=57; ConfidenceScore=5.62e-01
MTDHHRASPVATSAPVTDGPASSSAVPHPRAPTITVVWVMFVSVLLKLRMVTNPALLADMGGRQWSQLAKSVGKGKGISHQHASVAAVLSYRVDNLILVTIDGENASVWLAFISAPSTVPWI

SEQ ID NO: 71384 - protein, 146 aa, Zea mays
  Coding DNA Sequence Number=SeqID_28009
MASPALHCPARKRPGQEHLELALACSGCSSSPAPSGSSMAVGPLQLPKRPLSPWRAASWRPPAPSHGVQKILPPSPKQRLLPRHLPLSSNRDNFALWRLPVLRSPVDSTTPPSTLAKACPTLYSAAPRSRDFPHNPATLALRGCSM

SEQ ID NO: 71385 - protein, 63 aa, Zea mays
  Coding DNA Sequence Number=SeqID_28010
MTNILEAEGGPRSQLGLPLPIQGLEVTVLGDHRRRGATGLDRERGIPRKGSFPVKEPGFEPPY

SEQ ID NO: 71386 - protein, 165 aa, Zea mays
  Coding DNA Sequence Number=SeqID_28011
MRSKGLCSEGQRHHQARAIATRVFSENPARAGGSAGHPEASASCPPRTSARPEASAGLDSHDEQKHWHSKCHYKRNSGSVPAGYVQPPHRGACGATGTGGPASDLCSSSHGPRTDAAAGGLSFAFPLKGREPAIKAKERAAPKGTGRSSLPSSPRKRGRGWNVAS

SEQ ID NO: 71387 - protein, 146 aa, Zea mays
  Coding DNA Sequence Number=SeqID_28012
  Subcellular localization annotation: CTP_CleavageSite=55; ConfidenceScore=5.07e-01
MASPALHCPARKRPGQEHLELAPACSGCSSSPAPSGSSMAVGPLQLPKRPLSPWRAASWRPPAPSHGVQKILPPSPKQRLLPRHLPLSSNRDNFAIWRLPVLRSPVDSTTPPSTLAKACPTLYSAAPRSRDFPHNPATLALRGCSM

SEQ ID NO: 71388 - protein, 21 aa, Zea mays
  Coding DNA Sequence Number=SeqID_28013
MAAGRALLLATSELEFGRTKD

SEQ ID NO: 71389 - protein, 183 aa, Zea mays
  Coding DNA Sequence Number=SeqID_28014
MAGATVIDGDGATGRMAGELPGRARAAAACAGCGDSARRGGGARGRARAGEAARGRARAWGRGRVQVAARAGYGGDAWGGGERGRERTRAAATALLGGGEGGWERARDFAECGSRQRLLCQVPNKKHSAKLLALVKGPDSGSKLGACVKLRPRSPYGVVYWVVLLGLVAPMVSSAGSCAAVPL

SEQ ID NO: 71390 - protein, 155 aa, Zea mays
  Coding DNA Sequence Number=SeqID_28015
  Homolog annotation: Hit_ID=Q6J9V9; Match level="QueryCoverage=32%, HitCoverage=17%, E-value=4e-08, Identity=62%"; Hit description =Putative uncharacterized protein
MDGGNHSRSGESPLPQHFQGLEKGFEVLLSLVRGPMTPGVGGGGDYPLGERWEQLTVIPEGPGKGDPPKGILPREGTRLRASLLIRGSKAGPRRVQQPPQIAWALHPLLVRGSKAGPPKGSTAASGYSGSVPITDQGFEGWPPKGSQSPQTPSEG

SEQ ID NO: 71391 - protein, 396 aa, Zea mays
  Coding DNA Sequence Number=SeqID_28016
  Gene Ontology: Mol. function=heat shock protein binding; Biological process=protein folding
  Homolog annotation: Hit_ID=Q84R00; Match level="QueryCoverage=94%, HitCoverage=95%, E-value=1e-120, Identity=60%"; Hit description =Putative AT hook-containing MAR binding protein
  Pfam annotation: Domain name=DnaJ; Domain location=82-144; Score =21.0; E_value=3.7e-05; Accession=PF00226.22; Description=DnaJ domain
MDFSTGGSVSGGGGGASDGPAQAERWLEIAEKLLAARDLVGCKRFAERSVEANPLLAGVDELLAVADVLLASQFMGTSGQPDPLAILQLPPGVSPDQAAVSRAFRRLALLLGPSNPHPGAEMALRLVNDAYAFLSDPSRRPPPPADPATGTPYSSQYPAAAAPASDTPEFWTACPFCCYVHQYPRSLIGRALKCPNAGCRRGFVASELPTPPTVVPGTEMYHCAWGFFPLGFPNAADLGANWKPFYKMFPWNTAPSGQGGGGRSHGNHGGRQPQNDSARGGSSRGRIKKTTARKKVGVGLRRRSLGVESGIDSSMLGQEGWAGDENAGDGRAEEVRRININEAAHATDGTGRVNVSGAGGVEDIGNFHIDVDASEDILGNLHNMHFLRVDNLGRMI

SEQ ID NO: 71392 - protein, 97 aa, Zea mays
  Coding DNA Sequence Number=SeqID_28017
  Gene Ontology: Mol. function=nucleotide binding; Cellular component =intracellular; Biological process=small GTPase mediated signal transduction
  Homolog annotation: Hit_ID=A2XHK2; Match level="QueryCoverage=98%, HitCoverage=75%, E-value=5e-31, Identity=53%"; Hit description =Putative uncharacterized protein
  Pfam annotation: Domain name=Arf; Domain location=2-97; Score=-62.1; E_value=8.4e-05; Accession=PF00025.12; Description=ADP-ribosylation factor family
DEFRVLILGVDRAGKTTLLEKLKSIYLKGEGLPPDRVVPTVGLNIGRIEDAKAKLVFWDLGGQDLPGAIDEEELAKFLHKELDERPYTFQAVSAYDG

SEQ ID NO: 71393 - protein, 232 aa, Zea mays
  Coding DNA Sequence Number=SeqID_28018
  Gene Ontology: Mol. function=carboxyl- or carbamoyltransferase activity; Cellular component=ornithine carbamoyltransferase complex; Biological process=amino acid metabolic process
  Homolog annotation: Hit_ID=Q8SA97; Match level="QueryCoverage=49%, HitCoverage=13%, E-value=1e-17, Identity=49%"; Hit description =Ornithine carbamoyltransferase
MAPPVDVAGPRPRLGDVEAPPRSRSSPSSVAEAEFEPLGRARRRPLAEARAEFESWGRAKRSSSSSGAKPKSEPWVGRSGVRRLLGLCPSPSPGSGGAEFAVFRGLARVRALGRAERSSPSSGAEPKSEPWVGRSGVRRLPGLCPSPSPGSGGAEFAVFRGLARVRALGRVERSFLWCAAGPDCLSASLCQVAPQSERRRRRCLSVRPLYADGGYQLRIRRLEGIPNYGPRQ

SEQ ID NO: 71394 - protein, 127 aa, Zea mays
  Coding DNA Sequence Number=SeqID_28019
MSLSFCHDVIVPGRREEYHVCATLQTAMMKDFAMTAVLPPYEDIVASYLIRNCFGSECPSYMGSWGGFGCNAAPSPEAFFGGMTKVAFCRRWSNEFTGGYNDLQTRVMKVIPSLSQYKSMKGEAYEA

SEQ ID NO: 71395 - protein, 197 aa, Zea mays
  Coding DNA Sequence Number=SeqID_28020
MTKEASFRGHNTVHNLQDSSRAPSGHQLQGAEAARASEEDMGINPGKSIAYFVVRTRATLQERVKSPFRSKKKLPKQKPSRISRSRSCILLRATLPTYQNMWAINLQPLLLQQATHKLPGLSFHRHPHYNLLIPEASSQKGANTHNNNVTSGRSPKLVRSTAPYQNQNTSTEQYPSSEILLLSMPFYFLYEEQAMET

SEQ ID NO: 71396 - protein, 1360 aa, Zea mays
  Coding DNA Sequence Number=SeqID_28021
  Gene Ontology: Mol. function=nucleic acid binding; Cellular component= intracellular; Biological process=regulation of transcription
  Homolog annotation: Hit_ID=Q5N712; Match level="QueryCoverage=96%, HitCoverage=97%, E-value=0.0, Identity=55%"; Hit description =Putative floral activator, relative of early flowering 6
  Pfam annotation: Domain name=JmjC; Domain location=237-343; Score =130.7; E_value=4.4e-36; Accession=PF02373.13; Description=JmjC domain
  Pfam annotation: Domain name=JmjN; Domain location=44-84; Score=24.1; E_value=5.3e-05; Accession=PF02375.8; Description=jmjN domain
  Pfam annotation: Domain name=zf-C2H2; Domain location=1234-1259; Score=13.0; E_value=0.44; Accession=PF00096.17; Description=Zinc finger, C2H2 type
  Pfam annotation: Domain name=zf-C2H2; Domain location=1287-1311; Score=20.9; E_value=0.0048; Accession=PF00096.17; Description=Zinc finger, C2H2 type
  Pfam annotation: Domain name=zf-C2H2; Domain location=1317-1343; Score=22.2; E_value=0.0019; Accession=PF00096.17; Description=Zinc finger, C2H2 type
  Pfam module annotation: Pfam domain module=JmjC::JmjN::zf-C2H2::zf -C2H2::zf-C2H2; Domain location=237-343::44-84::1234-1259::1287 -1311::1317-1343
MVNREPPARSIPARPRIIGRHGVLARGVGTPVAQVSPSGARVPPTVAEFADPIAYLLKIEPAAAPFGICKIVPPLPPPPKRTTLGNLSRSFAALHPDDPTPTFPTRHQQLGICPRRPRPALKPVWLSPHRYTLPKFEAKAGASRKALLARLNVPASKQLSPLDVEALFWRSSADRPVVVEYASDMPGSGFAPCAARLTQLPPANVGETAWNMRRVARSPASLLRFVREEVPGVTSPMLYVGMMFSWFAWHVEDHDLHSLNYMHYGAPKTWYGVPRDAALAFVEVVRVHGYGGEVNSLGEAAALHRFPTLLLLVQSAGEFVVTFPGAYHSGFSHGFNCGEASNIATPEWLIVAKEAAVRRASINRPPMVSHCQLLYELALSLCLRDPSNDVMEPRSCRLKEKKKSEGDQLIKKIFVQNVIEDNKLLGHFLSDGSPCIILPVNYNDGSPLSTLLSKFQSTTDSRISHGQCSKAEAPKDSRRLPMDGADKNRELSSSNKNSLSAFSGKTVPLPPRICIHECANVTGASHAHNAENDKVDMNSAAGLLDQGLLSCVTCGILSFSCVAVIKPRECAAKWLMAADSSLINDRLASSGEHDIDALQGGRTTGGILRSDSEMNGNSIVSDADAAPLNGHSALDLLALAYGDPSDSDEDVMNIKNQVPNVSNELINHTIESQPYTSCNGDYDGTKVSSSSKEREQGPTSHSSKCIGNSNTLNGPKGVRTRNKDLLKMVLSEGFQPKGICSETHKKVQCEPSSSKKTSMEIPCGTDYHVSHNSGTICMDSSRGSTTTTMVNNLVTSVVKPDKDSSRMHVFCLEHAIEVEKQLQAIGGADIFLLCRPEYPRIEVEAKLLAGEMDFEYDWKDILFKEVTIKDREKIQEVVRDEEAIPTNSDWAVKLGINLYYSANLAKSPLYSKQVPYNRVIYEAFGCGSPNDSPVKLKTYSRRQCRAKKIVLAGRWCGKVWMSNQVHPYLADRIKNHEPKEIDETFPSDQKSHAEPVENSSREAASTRKSSSRTIEGKTSKREKEQLEKANAKKPKFTEEDNSKSLEGTAEASTQKIKGRSVLEKTSKKEKAYTKKLKHTEKVSEALKGPSEASFPAPAGMVVRSSSRIANRKIMLKSKMEEEDNGSADRPKSKVEDDKDNPAGRSRAKPLRQKTKVDAKKKTKETRVEKRKAPSPASQKDEEEQSDDVEGRSTTKQRLSLRKKGAKTEGKQRMEKPRFGGSAPPPSSPKRKEEYVCDIEGCSMSFGTEQALSLHKNDICPEKGCCRKFFSHKYLQQHRKVHADDRPLKCPWEGCGMAFKWPWARTEHVRVHTGDRPYVCLEPGCGQTFRFVSDFSRHKRRTGHGASKKAKAKKQGKAAVT

SEQ ID NO: 71397 - protein, 29 aa, Zea mays
  Coding DNA Sequence Number=SeqID_28022
MEAAVDAMLAAASRAFTSTFAIAIQIQDT

SEQ ID NO: 71398 - protein, 122 aa, Zea mays
  Coding DNA Sequence Number=SeqID_28023
MVGPRRGEATRANPGSEYAGTTGVGEGAPRTCAEEGKDGEVCGRAWGEDGVDGRGAGAWCCLVDGGGEDGGGEQAGRGLWDLLGRQSLEPCPSIDGVLGEGENGRAECWARARMAGRLQRLP

SEQ ID NO: 71399 - protein, 92 aa, Zea mays
  Coding DNA Sequence Number=SeqID_28024
MKLKQFASSCGWCKVILHCDGNANSELGGVAALHTSCSSSSLTLLIEAAKLTSTATRLEGFDGTGRIEPRKRRSGPHKTDAYNLSIKEITVI

SEQ ID NO: 71400 - protein, 322 aa, Zea mays
  Coding DNA Sequence Number=SeqID_28025
MEGARWLQGARRLPSAANAVGAGKPLQPPCHSRPRPTLRPAILALAQHSIDGRAWFQGLPPQQIPQSSPRLLAATILAATIHKATPCPRSSTIHAILAPRPPTHLAILALLRAGPRCPFPHPCRPRIFGSGVRSGCLASPGTHHGGQGAWWVGEMGRSGGSTTSSRKKHSRSRPQAMDDDIDSSCSTPVRQRAIQPRTSPRHRPQMPVMTSSSVSPPAGWLRTASGPGPGSDATHTSPGTRKIPPDAISARHAMPQKPVRGCCSNPFRGCRIIPTDAAPPQVVLLRRRVRPSGCVGLGGTDGSSLDKALIGMPTRTMLLPEP

SEQ ID NO: 71401 - protein, 51 aa, Zea mays
  Coding DNA Sequence Number=SeqID_28026
MAHISDIKLIRTDTTLDLSQKAEKGRSVGVERTTKSLGPKMSIGIPENNVP

SEQ ID NO: 71402 - protein, 247 aa, Zea mays
  Coding DNA Sequence Number=SeqID_28027
  Homolog annotation: Hit_ID=A2XD85; Match level="QueryCoverage=91%, HitCoverage=42%, E-value=3e-77, Identity=64%"; Hit description =Putative uncharacterized protein
  Pfam annotation: Domain name=DUF936; Domain location=1-247; Score= -193.5; E_value=3.3e-06; Accession=PF06075.3; Description=Plant protein of unknown function (DUF936)
MASLTPGILLKVLKNINSDVKFIYVEKVQSSIPVPILVRVRPVPGRNPCIGNPKDLMQMSTPSGITEAPDHQRRTSKSADMSESEKENLQRKVVIKEQKIVVASRYMLGVSSNNGKITSLNSSIDSDKSNGGSTISEPNKKSVAPKVRQEAKPQLVSTKQEISKDTRKNGGASPSPNGCAVVKKQMPKESKKESATERRSPPKLYKSSPTPARTSPTKLGPAAKQNGNSSPVPSISTVKRRVTETIY

SEQ ID NO: 71403 - protein, 66 aa, Zea mays
  Coding DNA Sequence Number=SeqID_28028
MDLGDAYANKFMLITCLWCTDSGEFQPVVPVVKAEPLKNQWADEDVEEDDVKESWEEEEEEANEII

SEQ ID NO: 71404 - protein, 488 aa, Zea mays
  Coding DNA Sequence Number=SeqID_28029
  Gene Ontology: Mol. function=nucleic acid binding; Biological process= lipid metabolic process
  Homolog annotation: Hit_ID=A2XNG1; Match level="QueryCoverage=25%, HitCoverage=28%, E-value=2e-44, Identity=70%"; Hit description =Putative uncharacterized protein
MVAQLYSGLVKVPHDVTGCMITARKRMPVTAGDMHSRYIPQQDYFSEGLYTFDIGQNDLAGEFYSRTEDQVIVSIPTILLEFENGLKAVISSRRLSNYLSTPEHHSSELNASADLLNHHFKRYTKKPDALQKGISPSDAAFTLGIAPALAKEHLLNAENKGLLCRDVSPDGFRFFSNLFKVVFVEAIEAQYAFKKLLYTRYKDTPLYLECAPENILSPTSAPVDEEVKNEDGKRILTKANIDQTVEGVSAEDIDPDRVEVASDALQKGISPSDAAFTLGIAPALAKEHLLNAENKGLLCRDVSPDGFRFFSDLFNDIDPPKYSLAKTPWDVQCVDLRCDGVSLKSSTGNQQQQDLSEASLWLPLQVLKPTTKQKLRFEGDSYKKALAEFLQAVPAFLGGKCSCLRCESPRDDSVIQAGEGSKKQPRLVSVDDGSPVTDLDFDLDEEEIPSPYSCENAIRAVIIDLLMVCIFVAFLAGMIDPASVPASA

SEQ ID NO: 71405 - protein, 230 aa, Zea mays
  Coding DNA Sequence Number=SeqID_28030
  Gene Ontology: Cellular component=endoplasmic reticulum
  Homolog annotation: Hit_ID=A7QN57; Match level="QueryCoverage=51%, HitCoverage=20%, E-value=4e-22, Identity=45%"; Hit description =Chromosome undetermined scaffold_130, whole genome shotgun sequence
MVHLHLHPYVVGKAADEEFHPLNRGYTVDVTRKRLEALGELLHRGLKGKPTQLRKSAALYWRPETQVAEFSEPFPRRHALVLLEGVVPRLGRAPQVMWGGVLIWNSPDCSLGSKKTHGTQKKMSSQELMEALEIFVGQLRQLFGLKPSYFSQDMDVPTKFLVSEKGFTEWELDLLYRHHARSNLLSCLTTLESLSSLVHSLPRMIVMDEIGRQVLPRTTLARWELISIDL

SEQ ID NO: 71406 - protein, 117 aa, Zea mays
  Coding DNA Sequence Number=SeqID_28031
  Gene Ontology: Mol. function=Rab GTPase activator activity; Cellular component=intracellular; Biological process=regulation of Rab GTPase activity
  Homolog annotation: Hit_ID=Q5N703; Match level="QueryCoverage=89%, HitCoverage=27%, E-value=5e-46, Identity=85%"; Hit description =RabGAP/TBC domain-containing protein-like
MASGEGRKPRAMGEMKRWEQISRGLVVERVNPQFYAFRWITLLLTQEFNFADTIHIWDTLLSDPGGPQETLLRICCAMLILVRKRLLAGDFTSNLKLLQNYPPTNISHLLYVANKLH

SEQ ID NO: 71407 - protein, 278 aa, Zea mays
  Coding DNA Sequence Number=SeqID_28032
  Gene Ontology: Mol. function=Rab GTPase activator activity; Cellular component=intracellular; Biological process=regulation of Rab GTPase activity
  Homolog annotation: Hit_ID=Q5N703; Match level="QueryCoverage=94%, HitCoverage=72%, E-value=1e-119, Identity=82%"; Hit description =RabGAP/TBC domain-containing protein-like
MASSPRSPPPAPTPEFEISRQSRLFAALSKKVIDLDELRMLAAQGVPDAAGVRATVWKLLLGYLPNDRSLWEQELAKKRGQYAAFKDEFLTNPFMATNAWLNPLPKIEVLNPEFARSEVTREEHPLSLGKTSAWNQFFEYSEIMEQIDRDVKRTHPDMQFFCGDSSFAKSNQESLKNVLLIFAKLNAGIRYVQGMNEVLAPLFFVFRSDPDDKNAEFAEADSFFCFVELLSGFRDNFCQKLDNSAVGIRGTLAKLSQLVAKYDGELQQHLEITTEVTY

SEQ ID NO: 71408 - protein, 165 aa, Zea mays
  Coding DNA Sequence Number=SeqID_28033
MEPTSYTRIVTRNRFEFTRREKGRDRATDAAPAKYLLVLVKGDPDVDPVHGLPEEERPEVVKQKQVSWRLRARRRNGAVVVGWDMGGPRRHCLDWRASCPGARRSKRREDQFARNGGGSGGSIRESLACAMLYQCTPRFNGFITGCVDVCREPGTEGQQPPGPGR

SEQ ID NO: 71409 - protein, 192 aa, Zea mays
  Coding DNA Sequence Number=SeqID_28034
MGRLGAGSRAASSGAAAVWRDGQAVVRVEAACMAASGRGFCARTGSCAPAQEGRRGVPTPCGWQIRPDPAAIRGRAPGPPWPAPGRSRLRSQGAPHLRLAGSPPRPGPTAPALAPDRAEDPCCGSRSRPVWPSRARATRWPWADPVEPALAQNLPIGGVAREIPRPTSTWHRTRWVSRRGTGIRNLRCVCLI

SEQ ID NO: 71410 - protein, 345 aa, Zea mays
  Coding DNA Sequence Number=SeqID_28035
MADKDKGKGIVISNPRMSDISQKEIARKASDEKAKRDGVASEKITNNDERGYIGSTLPCHCCLHNNEKVSYLNFPPEPAGGVLPAQQDDFGQGEWDQWIVNEQPIQQAPQPFLPEEQHIQQEELQLSNQHSGLSSDSSIGAGQLAPLPNGHLAVNGHALLGDGIDINVAPFIGPQEVDGLVPQVDHVHDLEVVPPQAHVDEPNNNNPQNLEMNFMLHQEWQPDPVFQMFEERRRAVQFTWLWAKYFAPSGSTDHSVDIPKKHGACPKRNCLMCKHNFDGPPPLSSKVLWNLGTRRCNLSEDDLSEQRLKQKKSTVGPIGPWRVDRKDLVDDKTDDSSDEDKQGNQ

SEQ ID NO: 71411 - protein, 109 aa, Zea mays
  Coding DNA Sequence Number=SeqID_28036
EAAPGNWRMSQSLVPITFSTPQVDEQVSAELNKDNLASPPKNLRRVFRLEHSSSLPHTPRLASAARTRASPPLKDWTLPLQATARLALHPAAAMAEPRGGKRDALGWLE

SEQ ID NO: 71412 - protein, 141 aa, Zea mays
  Coding DNA Sequence Number=SeqID_28037
MLEFMTQLRVLNVIGAKDWDIRQLQGQLPNICKLGVAKSTIQCGTTLWKDDLLAGSKSLRFLDLSGNNEIISGKSCISATEKSCSLETIVIHQGCAGLEKISLAGCAKLENVLLTGSFNELVLTQIVAAVKVKQRCSLCTA

SEQ ID NO: 71413 - protein, 77 aa, Zea mays
  Coding DNA Sequence Number=SeqID_28038
  Gene Ontology: Mol. function=7-dehydrocholesterol reductase activity; Cellular component=membrane; Biological process=cholesterol biosynthetic process
  Homolog annotation: Hit_ID=Q66WR9; Match level="QueryCoverage=63%, HitCoverage=17%, E-value=3e-13, Identity=67%"; Hit description =Sterol delta-7 reductase
KWLTSICSDLDNLPWFVVGHVFPSSSDSGSSGNVIIDFYWGMELYPRIGKYFDIKVFTNCRFGLSEIIFLLKGMQTK

SEQ ID NO: 71414 - protein, 216 aa, Zea mays
  Coding DNA Sequence Number=SeqID_28039
MAPPVDVAGLRPRFGRCGSSSEAEVEPLQLYADGGYQLRIRSLEGNPNYGPRHGCARAHPPGVAPEASEEWFDSSEVLMPRVMLRLVWSFPHASWPQPGCTVGSQVLGLGERAIRDRLDFFTYAPASPFRKEEGGKAPCCPRWAPNMVSPVSCRRVIQVDVRAPFIRGRLEAQRHAQKYLRVIYRTRSPGDGVRGLDASLRWDSVTRSFPLVSEMS

SEQ ID NO: 71415 - protein, 263 aa, Zea mays
  Coding DNA Sequence Number=SeqID_28040
  Subcellular localization annotation: CTP_CleavageSite=43; ConfidenceScore=5.26e-01
MNNNTGIQSAVTKRNSGSTSTGTNNPTRPGGPAEQQKKTDERRAVARSSSGDDDDFCSGGPNSGNDDLRADATARRPPPVPKLPSRAESSPTRSKALLLRRGGWVPHVMQDGSKQKKPNRRARCVQPPSGYKRLSTFAQTSGRKSGRPCRRHATTPSGRTSPTPNTPSMEAQAHASCNRRAECFVHATAPPLAPPPRLLDCGTNTATRGDPEHDPAAPAWRDGQYDQKWADCNGGGRRAGAAVTSSAKPSSHPGATREPSLTA

SEQ ID NO: 71416 - protein, 329 aa, Zea mays
  Coding DNA Sequence Number=SeqID_28041
  Gene Ontology: Mol. function=peptidase activity
  Homolog annotation: Hit_ID=Q6Z5N1; Match level="QueryCoverage=70%, HitCoverage=37%, E-value=2e-71, Identity=60%"; Hit description =Putative potyviral helper component protease-interacting protein 2
MGIDVEVTASITCLRDAIASDDWAARKAAAEALVALALEHTDLLTTYKSSCVTFFEARRFDKVKVVRESMNRMIEVWKEISGAEEDECSSALPPASQSQRRPSLTATRKSILSVSKSSLPDVSTSVTKTNSPSSIRNKKLSPPSYHKVRQANNCDYKVDIVVSLDATPIKVVMEEKLLKGRGVRDRLESRRTLFKGSEDRSTKLAAHKAGSRVVPYEGGGNLEEISEVEGGSERGENGLCVVGRGPVHVARGSSLFQLHHALVPRESALYGLWSSMNGAATASPSWYKELKTAPGAGMESPPKNSVCCSTELFGATRRQQCQRSTAPEP

SEQ ID NO: 71417 - protein, 118 aa, Zea mays
  Coding DNA Sequence Number=SeqID_28042
  Gene Ontology: Mol. function=7-dehydrocholesterol reductase activity; Cellular component=membrane; Biological process=cholesterol biosynthetic process
  Homolog annotation: Hit_ID=Q6S5A3; Match level="QueryCoverage=76%, HitCoverage=20%, E-value=9e-30, Identity=68%"; Hit description =Sterol delta-7 reductase
  Subcellular localization annotation: CTP_CleavageSite=8; ConfidenceScore=5.28e-01
MSKPKPSSAGAKPTAAAPPVTVHSALVTYTSMLALLSLCPPFVILLWYTMVHADGSVVRTYEHLRDHGVLEGLKAIWPMPTLVAWKIIFGFGLFEAVPPGMLPGKRFEGPTRLTERIL

SEQ ID NO: 71418 - protein, 138 aa, Zea mays
  Coding DNA Sequence Number=SeqID_28043
  Gene Ontology: Mol. function=7-dehydrocholesterol reductase activity; Cellular component=membrane; Biological process=cholesterol biosynthetic process
  Homolog annotation: Hit_ID=A6MZJ3; Match level="QueryCoverage=71%, HitCoverage=37%, E-value=2e-42, Identity=81%"; Hit description=7 -dehydrocholesterol reductase
MGNARSGARLHLRLEYLRYNRFQINWLYSHTRTTLMKKFQIVASYQTTKGETKTSLLLTSGWWGLSRHFHYVPEILSAFFWTVPALFNHFLPYFYVIFLTILLFDRAKRDDDRCSSKYGKYWKIYCNKVPYRVIPGIY

SEQ ID NO: 71419 - protein, 294 aa, Zea mays
  Coding DNA Sequence Number=SeqID_28044
MVGSGAIHRAARDRRTGTVPSYCSKGEDEGTHYHGGGSTLLVRRFAFLTVGHSEDEGAHYRGVVACSLCDDSPSSRFGPATEWVLDMVCRLLGWDAPAFGGRICAGAILPEEKDDHQPCEGGELRLRGPGQTASTAFRRAPSSMAWMVLSSPRMRAGARASSPWARDEVAAITGKPPMQRWLPPLVRLPGAEVVASIGEPLGVEVVASAGEPLCAEVVAAADQQVGLMREDLIGLAYTDAPVVRKRYSFSHSKIVTPGSAYSRHLEGSFPASHFCMDLSEAWTRGESRKVSGGR

SEQ ID NO: 71420 - protein, 107 aa, Zea mays
  Coding DNA Sequence Number=SeqID_28045
MAPGKRQSELKRLLNVKGGVGVLLAAGFEYGQVAKVVAVEAEARKLVNGLPKQQKLQVGCPHILVCKESSTKQCVKSASAGSSELLLQQSLFASECSYHLCPLELAA

SEQ ID NO: 71421 - protein, 206 aa, Zea mays
  Coding DNA Sequence Number=SeqID_28046
  Subcellular localization annotation: CTP_CleavageSite=76; ConfidenceScore=5.29e-01
MCFVHTLSIIQLASTVGLFCHTALRRAPSLHARNPRRHPRGLRARKSLQQLQLRKPPRHHRMNHRVVSRPAIIAPRTFLRQQSQITPHLCSPRAILGNLHRPASVLLPRPTFLQQLQLPPASGGLARRLLAQICPWSAPPALALSSAPLAFVPRPRPAPSRKDPLPLLPPPAWSPTPAHGGAGHCPAGSRSHRDPTTRRPRKADTR

SEQ ID NO: 71422 - protein, 162 aa, Zea mays
  Coding DNA Sequence Number=SeqID_28047
  Gene Ontology: Mol. function=transcription regulator activity; Cellular component=nucleus; Biological process=regulation of transcription, DNA-dependent
  Homolog annotation: Hit_ID=Q652L2; Match level="QueryCoverage=39%, HitCoverage=5%, E-value=2e-11, Identity=56%"; Hit description =Protein HIRA
MVDLAVVFEMLFGSDYFERLRWPACSSIYSFRWRLKKTQTDKKQEQKFKKKIKSMFFPPAVFPNHLHPGSYKMKENKSLLNIGGSRAVLAQRTESDLSRALVAPRPDAKAVVAGWTSQESSVVKVISAKFLRCGFPLIVLVSRHAFLFDMSMKCWLRIAGDG

SEQ ID NO: 71423 - protein, 71 aa, Zea mays
  Coding DNA Sequence Number=SeqID_28048
MKIKLNRKDCYQSPFGVGHIDSLLAVDPVAVEVEAEAAARKLEVDLPKLQKLQGGCLCIVGCKVDDTKQYA

SEQ ID NO: 71424 - protein, 160 aa, Zea mays
  Coding DNA Sequence Number=SeqID_28049
MAELKAREGCSPRVQTLERLGDDGGVVEPLVDGGGLRLRKKCSGERGPGKPGREKANRRVSRVADGEAELIEVMDGARARRRSQNGRRSSVSSDGATWSRGQSERGGERVRLRAQGVTDDCQAGSGRQSPLALTPILSLSRGARGLLRRRSNVPASIRRR

SEQ ID NO: 71425 - protein, 206 aa, Zea mays
  Coding DNA Sequence Number=SeqID_28050
  Homolog annotation: Hit_ID=Q2QNE1; Match level="QueryCoverage=87%, HitCoverage=86%, E-value=4e-59, Identity=59%"; Hit description =Thaumatin family protein, expressed
  Pfam annotation: Domain name=Thaumatin; Domain location=28-188; Score= -49.3; E_value=0.00019; Accession=PF00314.8; Description=Thaumatin family
  Subcellular localization annotation: CTP_CleavageSite=80; ConfidenceScore=5.33e-01
MAGALVFVAVLLAASVGATTATTLTIHNLCPHPVWPLVTPSSGFPSISTNTARLGPNALLSLSFPPTFWAGRVAARTGCDAAASGCWTGTTPARHRRAGHRPRRRETWTRPPTAPQAVGGGQCPALGCPINLNCDCPPQNRTAEGAACRGPPEYFKNRCPLTRTTPTDVEPVPQSCRAPGELKVIFCQATIVTCGGEAERTVLADS

SEQ ID NO: 71426 - protein, 74 aa, Zea mays
  Coding DNA Sequence Number=SeqID_28051
  Homolog annotation: Hit_ID=Q8SA97; Match level="QueryCoverage=71%, HitCoverage=9%, E-value=3e-08, Identity=60%"; Hit description =Ornithine carbamoyltransferase
MEPGGGTAVGAVESLLTSSCFRKGAESRRRHRLCADGGYQLRIRNLEGTPNYGPRQLYTLALSERVSGDLDRRI

SEQ ID NO: 71427 - protein, 244 aa, Zea mays
  Coding DNA Sequence Number=SeqID_28052
MEDVEGKRIRGHPRALQVSLRCHLPKRQPSLRQGKHPPAVDGGNHSRCGESPLPQRLQGLEKGFEVLLSFVRGPVAPSIGGSSDYSLRERREQLTVIPEWCKIARMKRLAGTPNPRSWKEKKLTMYPGGGDRAAPPTGGIHSGRCSSQGPGKGDTPKRILPREGTRLRVSLLIRGSKAGPSKGFDSRLRSRGHYTHYWSEVRRLAPRKGSTTASGYSGSAPTTDQGLEGCPPKGSQPPQTQSEG

SEQ ID NO: 71428 - protein, 311 aa, Zea mays
  Coding DNA Sequence Number=SeqID_28053
  Gene Ontology: Mol. function=nucleotide binding; Cellular component =Golgi apparatus
  Homolog annotation: Hit_ID=A2YXZ2; Match level="QueryCoverage=86%, HitCoverage=23%, E-value=1e-124, Identity=79%"; Hit description =Putative uncharacterized protein
  Pfam annotation: Domain name=DUF246; Domain location=2-198; Score =198.1; E_value=2.2e-56; Accession=PF03138.5; Description=Plant protein family
MGEKLIQRNEGEGACILFALHLRFEPDMLAFSGCYYGGGEKERRELGAIRKRWKGLHPNPEKGRRQGRCPLTPEEVGLMLRALGYRKDVHIYVASGEIYGGARTLAPLKALFPNLHTKETISSKEELAPFSKYSSRMAALDFIVCDESDAFVANNNGNMAKILAGRRRYFGHKRTIRPNAKRLYPLFLNRGNMSWDAFSSKVHMVQKGFMGEPKELRPGRGEFHENPSTCICERTDGKAVARAKSQDDQVLNSVADQGKGIGEPAVPNHTDEEAGEPDDDEDVPADKEVVDAEMVDDVLAGDPELEQILSD

SEQ ID NO: 71429 - protein, 83 aa, Zea mays
  Coding DNA Sequence Number=SeqID_28054
MPLMGLGVCGSLCQGGDEDDGFGYAYGNASDIAEVPDLLASRDNSDLAEDDPCDPTTTSKPEAPMQSLNQLPVVTDPANARSA

SEQ ID NO: 71430 - protein, 136 aa, Zea mays
  Coding DNA Sequence Number=SeqID_28055
  Subcellular localization annotation: CTP_CleavageSite=48; ConfidenceScore=5.44e-01
MPCAAVPCALCACGLADRGHRGRVTVVVHRVEVFASSSSCSASMPQCRASAPRRSLSSKIVNCFRASRNRQSSFGDQMIELFKFYEIEDPEHLFGGDEDDGFGYAYGNGCPCCNHCSGEDEVMEEDFQEFQEYDEF

SEQ ID NO: 71431 - protein, 135 aa, Zea mays
  Coding DNA Sequence Number=SeqID_28056
MELAACLGHAGLAAQAASCVGHRAHRVGLRRGTARRDAGRWLAADHHVGWPCRAAARWLATDSSGVTCFSTLKGFHSESRDEILLRGEGCYTPGVYFSCDNEYGLKHGMSMRIVISIFWSFSPITILMSHLFLAI

SEQ ID NO: 71432 - protein, 42 aa, Zea mays
  Coding DNA Sequence Number=SeqID_28057
MASVACTLRGKRLDGGVSVLSVGVNPIPSWVLIDSDHRYKKT

SEQ ID NO: 71433 - protein, 100 aa, Zea mays
  Coding DNA Sequence Number=SeqID_28058
MAADFTDEALQGRSERRGELGGGRRWEACGRDSQRIKGEGDGEGLPDGEQYEQGKQGCAHDRRSSRGTTADSRKIRAQSGELQPWGGDLGATAREELDLV

SEQ ID NO: 71434 - protein, 525 aa, Zea mays
  Coding DNA Sequence Number=SeqID_28059
  Subcellular localization annotation: CTP_CleavageSite=85; ConfidenceScore=5.21e-01
VPWYRLSHDDHHQSRRHRRHHHLAYHRHRSSSVNNNSSKGSGRPASKVIGRSRALSKCPLLFSPIGLAYMLTGINPSLIRTSSSSASKVAPIGESGSQQQVSAGSDAGDLPPTATIEVASSGPQAPATVVAAPSDPQVLAGTAEAVPSGPQAPVGGPVAASPGPQVPAGTAEAVPSGPQAPAGGPVAALPGPQVPAGIAEAVPSEPQAPAGSPAAAALPTAMADPTAAATDIPSVMAEPMGGVPDPVSPPVLEEPEVVLGRRLQTGAGPDTAPPPLPQKQRDKQTVTEAALQKLQQELDDKAGKISFAEENLRAKDASMEKRATDLIQQEKDLAWREEMWERRDKLLAEHELEAEKKEKNLEERVRWFQAAQVAQMAQAALVSQAAETMKKTLEDLQAKHHIGVQRIAAWADEASSALVPLGVSPIPVSKQLVSISDALPVLDSAANRLRCLDQILGARLEAEGSRLCRVVIEYILTCFRSHDPAISLGPMIAGPVADAEDAARGSVQDVVDVVAKRFQRDPSDE

SEQ ID NO: 71435 - protein, 235 aa, Zea mays
  Coding DNA Sequence Number=SeqID_28060
MNLIFWLLHLSEGFSKYDVSCTACVNQDIVDQKSFDNTRDNHGIVVWVTFELKVLLGEAGSEDEPPVIGSTSFGSEAAPAWSLNEAISSKKWKEIETISNYKCTFGLEGDENTSVTQKQMPSQREQYGGTVHLFIGTGYDPYKITYMPFTFGDNSIALYRGLNGLFIFKSVPFSANMPKLPCLAASALCHPLYLLSFSLEDLRRRSIDPTESIKDRLDVGLLIEDPLAGHMPRHG

SEQ ID NO: 71436 - protein, 209 aa, Zea mays
  Coding DNA Sequence Number=SeqID_28061
MMKFNSLAWARVTGPGGKGGAWTGKDGAWAGEGAAGVDVLVLVLMSLSAPVPIKAIGPGHPCLSLAHSPRSPSQPIELFRREQAGTLAPTSSPAFARGPTDSGHLLRQPTHRRDRRNLPDLPGHLTGARSPPGATSLTDSTCSFPSKELSKKKSRSQLQSLPLRISPQPQLLKDLGRSRVIFLAIVRGSMMVYELGSRVDALSMRRKWN

SEQ ID NO: 71437 - protein, 54 aa, Zea mays
  Coding DNA Sequence Number=SeqID_28062
MAMMGSTSEKMYLCQNKITHNGSGEMARVACTLCGKRLDGGVSVLSVGVNLIWS

SEQ ID NO: 71438 - protein, 85 aa, Zea mays
  Coding DNA Sequence Number=SeqID_28063
MGNHRPHGGGLRLPRTRARAVASRDALGTPAEVGELPTDETHAGGQHTGPRLLTRFRRARQNAQLIYGGMPREAHGDRVLIPRFG

SEQ ID NO: 71439 - protein, 130 aa, Zea mays
  Coding DNA Sequence Number=SeqID_28064
MRATSNIIGNDGASSNRLSSDHDWVIGWYYCKRTNTYYRRLAECLAGRGGGSSEVEVEVEPPGRARRSSSSSGVEPMSEPWGRARRSSPSSGAEPESEPWVGRSGVRRLPGLSPSPSPGSGGAEFAVFRG

SEQ ID NO: 71440 - protein, 288 aa, Zea mays
  Coding DNA Sequence Number=SeqID_28065
  Gene Ontology: Mol. function=aspartic-type endopeptidase activity; Cellular component=chromatin; Biological process=chromatin assembly or disassembly
  Homolog annotation: Hit_ID=Q2QRU8; Match level="QueryCoverage=22%, HitCoverage=3%, E-value=3e-09, Identity=40%"; Hit description =Retrotransposon protein, putative, Ty3-gypsy subclass
MPPRTRRTARKHTGPIGVSCHQLAPRHDNSSSGSDDPIGDLEAEVSRLQAELRRRTDIWVADGDRINELRRDVRHLRDQLADRDLALDWVVQSRSLAWAKEETAQARVAELNLAVDNLQTYCNTLHEEVHVLYSQLHPSEPVDPVESEAGPSHVAGEALGDAFQDSRTGRSQYLPWEGGHTESTSSPSHTCRGYRRLGKRDRGQYPFSERDGGSTVSTTRRAGLSTGPRETSYLDFSETRPPLFVKAEDPLEADEWVRVIDQKFGLIRCSEIQKPLFAAQQLRGPAST

SEQ ID NO: 71441 - protein, 379 aa, Zea mays
  Coding DNA Sequence Number=SeqID_28066
  Gene Ontology: Mol. function=sugar binding; Biological process =ubiquitin cycle
  Homolog annotation: Hit_ID=A2YR74; Match level="QueryCoverage=87%, HitCoverage=95%, E-value=8e-71, Identity=49%"; Hit description =Putative uncharacterized protein
  Pfam annotation: Domain name=F-box; Domain location=53-100; Score =30.9; E_value=4.8e-06; Accession=PF00646.24; Description=F-box domain
MERSQSPWMLARFWHFVIMGEKGVVCLSRNESLKTRASSDMEEAAVARTTSETQVGDLPEVCLAQAIARTSPRDACRCAAVSPAFRAAADSDQVWRAFLPEQLEAAEDHLDSRRVSPPSQAAHPAATVRGLSKKDAYLSLCDAAGAVAVDGSGCRVWLERASGATCYALSARRLSLPWDDGEFSWRFTHHPRSRLAGFLKWYGGFGADRIGVLEHSAVLVRRSFFQFAEVAELVDCTCLDIYGSLPLAALTPATVYAAFLVYGTAPEGAYRGLSYPDQETAVAVGGRVVARHAVCLRPDDAEARKFRGRGAGEEARRPSLRADGWEEMEMGRLRTPPVESGGGGGDVCVVQASFEVLGWYPKRGLVVEGIEFRALHDAS

SEQ ID NO: 71442 - protein, 274 aa, Zea mays
  Coding DNA Sequence Number=SeqID_28067
MQPGCIPSPVVTQDGDLQLDGGEKRAGLRPLPHPQLRGSSSSLLGWRMRRVGGLPPRGPRYVLRPDDGRAADGAATSRPSLRRRPHQWVAQHVGRREGGAHVLGGSGEGEDLPTCFEASGACWRGVEAVAAGEGFSTDEIANSARTPGPPSPGLNGWFSSSVNESPPAVAPAPKPLLKLLRRPGRRSLSLLPGSGGGEPPVGPQLLPRTRLVDYLNRFTERELPRAKVTSESGGPPTASPSEARSDPAKGVVDAEGAAAPFGCRRPSLQDQVVL

SEQ ID NO: 71443 - protein, 136 aa, Zea mays
  Coding DNA Sequence Number=SeqID_28068
SDTSTEWSWAYDGESSDVESLDNDDDPMSGHWMGMVSSDDEDDENDDDGNSDYDCSDEDSDDSGDDDDDDDGGASQCDEMPPSKPMLEHINRKGWPSYSVFESRLEGGLVLANLLPVEVVTKTGSLSTLSLSQTVT

SEQ ID NO: 71444 - protein, 279 aa, Zea mays
  Coding DNA Sequence Number=SeqID_28069
MARLRHTARKSVIPFLPSRLAERPLHRTVSGQSSHLERLHHRLREEQERRRQHREQQGSSSPPQREVESVRPRSSVAQLEAPPAPPRDAPAVGGATGGDPDDDDSDHSTESSEPQEAGGWVARPITRDAARGCHFHDALDTLLRQAFDRHTWSIEYRCVVYQHSRGRYPDRWEATYLVRRPEDDLRESVVVSPVGEANPRLSSTVNLVVVLNTELDHSLDELSRARTEIAELRAELAERHHQEGGSPAPVGTQHPYRSPPRGHDTYGSPFCKTRIDLDP

SEQ ID NO: 71445 - protein, 119 aa, Zea mays
  Coding DNA Sequence Number=SeqID_28070
MGKSKKDGSSSHHSGDKRKREPTPPSEDFGDSEYSEKEFSSESEGSPVHASPLASSDDSDDFQGDSSDSSEEGSNGDDGGEGDDGDRGDGDGGGDGSKGDGGSGSGSGKGGSGSGKASG

SEQ ID NO: 71446 - protein, 300 aa, Zea mays
  Coding DNA Sequence Number=SeqID_28071
  Homolog annotation: Hit_ID=Q6QP51; Match level="QueryCoverage=19%, HitCoverage=37%, E-value=2e-11, Identity=50%"; Hit description =Putative growth-regulating factor 1
  Subcellular localization annotation: CTP_CleavageSite=30; ConfidenceScore=5.20e-01
MQAACNRTTRMHPFDFDASSMESQAHTSCERMRRSNRLQAHVPSWGSRRALSHGVKMTRPCSVPRTAHATAAPRTTRPVALTPRQGRRHLWQAKRATLHLRHDDRVKKGTGKGDTPKGILLREGSGPRALLLIRGSKAGPSEGFDSRLRALGLRAHYWSEVRRLAPRKGSTAVSGHSGSAPTTDQGFEGWPPEGFDNRLRTRRARDDSGYVRYMAEARAMLLRLGGCSRKPGSGQTVDSVNIPARELGTSPFRVKAPPTQGTRSRLARAQPRARTADPGGFTSRLRISSSNGRTFNSPEA

SEQ ID NO: 71447 - protein, 362 aa, Zea mays
  Coding DNA Sequence Number=SeqID_28072
  Gene Ontology: Mol. function=racemase and epimerase activity, acting on carbohydrates and derivatives; Cellular component=integral to membrane; Biological process=carbohydrate metabolic process
  Homolog annotation: Hit_ID=Q304Y2; Match level="QueryCoverage=37%, HitCoverage=31%, E-value=5e-59, Identity=81%"; Hit description=UDP -glucuronic acid 4-epimerase
  Pfam annotation: Domain name=Epimerase; Domain location=85-312; Score= 10.2; E_value=6.5e-08; Accession=PF01370.12; Description=NAD dependent epimerasedehydratase family
  Pfam annotation: Domain name=adh_short; Domain location=83-236; Score= -33.0; E_value=0.0018; Accession=PF00106.16; Description=short chain dehydrogenase
  Pfam module annotation: Pfam domain module=Epimerase::adh_short; Domain location=85-312::83-236
  Subcellular localization annotation: CTP_CleavageSite=22; ConfidenceScore=5.47e-01
MACLASELWSTTTSTRFRAAAVASSVLQNPSPRGVTAPCPSCVGEGLPALRERGLRGHPGAGCPGSARSGRRRRRGSGRRLGLSVLVTGAAGFMGAHCSLALRKRGDGVVGIDNFNSYYDPSLKKARRALLGSHGVFVVEGNINDGLLLAKLFDVMPFTHVLHLAAHAGVRYAMENPVAYVHSNVAGLVSLLEACKDADPQSAVVWASSSSVYGLNDRVPFSGLRGRGHRGRSRAGARSRGSGAAPPTALADPPSTPIPSMEGERGGRVDGGEQRSRSVDGGSVDCGSRISDRGCVGRAAGAPVHRIDVDGGSASRGWRGAEGRWVGRGNQQNKHMASDFTGMALDTGFLSGVDLLWRSSSH

SEQ ID NO: 71448 - protein, 69 aa, Zea mays
  Coding DNA Sequence Number=SeqID_28073
  Gene Ontology: Biological process=response to stress
  Homolog annotation: Hit_ID=Q75HQ2; Match level="QueryCoverage=76%, HitCoverage=20%, E-value=2e-12, Identity=69%"; Hit description =Putative uncharacterized protein P0636F09.16
MWALTHVANRGDFLTLLHVLQSESGHNNRGAAEDASALANSLGALCKACKPEICFLPVAGDYTYLYHHE

SEQ ID NO: 71449 - protein, 634 aa, Zea mays
  Coding DNA Sequence Number=SeqID_28074
  Gene Ontology: Mol. function=racemase and epimerase activity, acting on carbohydrates and derivatives; Cellular component=integral to membrane; Biological process=carbohydrate metabolic process
  Homolog annotation: Hit_ID=Q304Y2; Match level="QueryCoverage=20%, HitCoverage=30%, E-value=2e-63, Identity=90%"; Hit description=UDP -glucuronic acid 4-epimerase
  Pfam annotation: Domain name=Epimerase; Domain location=412-625; Score=19.4; E_value=1.3e-08; Accession=PF01370.12; Description=NAD dependent epimerasedehydratase family
  Pfam annotation: Domain name=NAD_binding_4; Domain location=414-627; Score=-106.6; E_value=0.073; Accession=PF07993.3; Description=Male sterility protein
  Pfam annotation: Domain name=adh_short; Domain location=410-571; Score=-34.5; E_value=0.0023; Accession=PF00106.16; Description=short chain dehydrogenase
  Pfam module annotation: Pfam domain module=Epimerase::NAD_binding _4::adh_short; Domain location=412-625::414-627::410-571
  Subcellular localization annotation: CTP_CleavageSite=60; ConfidenceScore=5.13e-01
MQAACNCTLGRHPFDFDTSSVEAQAHTSSGRRKQQSNHLQAHVPSWSSRGALSHGVKTTRLDRERGYSERDPSPRRERALSPPTDQGFEGWPLGRVRQPPQSTRASGSLLIRGSKAGPSEGFDSHLRALGLRAHYWSEVRRLAPRKGSTATSGHSGSAPTTDQGFEGWPPKGFNSRLRTRRARDDSGYVRYMAEARATLPRRPLGSPVSNSLETPCSAPSEGNMALFPLLLAERRRRGENSAACLAPTAVPPARVRLTVAESSLRRHRKLRLARPQGSDSTSTSEDGLCLARPQGSDSASTSEESPPRPTLGSDRPRYKGSSGDSSANVKSLEEETAAKIEQLTQQAASISLTAMNSSPRGVTAPCPSCVGEGLPALRERGLHGRPGAGCTGSARSGRRCRRDGGRLLGLSVLVTGAAGFMGAHCSLALRKRGDGVVGIDSFNSYYDPSLKKVRRALLGSHGVFVVEGDINDGRLLAKLFDVVPFTHVLHLAAQAGVRYAMENPAAYVHSNVAGLVSLLEACKDADPQPAVVWASSSVYGLNDRVPFSGLRGRGHRGRLRAGARSRGSGAAPPTTLADPPSTLIPSMEGERGGRVDGGEQRSRSIDGGERRLRIEDLGSRDWFVCLDGRQNRRQ

SEQ ID NO: 71450 - protein, 319 aa, Zea mays
  Coding DNA Sequence Number=SeqID_28075
MHCALPPSEPPDGERPHCFRLAAVGGAQLRGGWHLSAIARLQGFSSGSPVASPHQWSPRTVTTSSMVGRSKPGCDLCPALSFKDLHHPCWGGGRAEPELYLPYGPASHLFLQHSGEKALTGLAEEVDFDNAGPIGRMRPGSSAASSATSHRWAECGYLPAVRAAVALCAPGDRPRRRALLGRRSCSWAVLPSPRHDASAWRLVLARLGGLEWGSAGGQAATVVGAEVVAAGESFPADETVSATRGSTTGSLALIACPCPSSGDAGEGLVAAASALRSSLLLFGCPERRSLSLLQWSAASHLELVVPQFIPAGVEPEFCS

SEQ ID NO: 71451 - protein, 113 aa, Zea mays
  Coding DNA Sequence Number=SeqID_28076
  Gene Ontology: Mol. function=nucleic acid binding; Cellular component= ribonucleoprotein complex
  Homolog annotation: Hit_ID=A2X2I9; Match level="QueryCoverage=64%, HitCoverage=20%, E-value=4e-12, Identity=43%"; Hit description =Putative uncharacterized protein
MQQRPSPGRAALPRRLMSKRRLFPKVCSMAGFPEDNQHELNGYDEEVDEEEGHPGRRVGRDGGSGKIFVGGVTWETTEGSLEDMVAGVTWSSILPPGWTVEWDPTSAEEEQEE

SEQ ID NO: 71452 - protein, 467 aa, Zea mays
  Coding DNA Sequence Number=SeqID_28077
MSSSSSSSDTTPPAAASSEETLSSVMVEELRAGDSVDFGVSRMTSARVEDMQRLGYFGGGVARAPGTEEVPEPEVAEEDADEGALRCAAGQSSGRDLVEEFVAYGVWPLAHGWALGEVCPRQMPFHGGRVVRSPAFALNLRNRDPTAFVRDAEDLAVRLVGRYVPRTKGQRSFDIRGSNERLNRVFELNQLPYDGYPGQDEADRRGKKPAVETGGDPALAPAPSSKKRKLVMDKDRQGAAQKRQATVRIHEARPKRQRGTAKAVASGGGPGEGQLAIAAPGAAIATAVMVPKARGEALGAEGEVSALALVRDEAGVATRRLKGVTEALSQATEALSQVADFASRTASGALTTAVSAEVERLRTQHADAVHEKSASDSKCRKLTDRVAALEREKADLRRQLAAERREANEAVAKGQAAQAEAKLARAEGNLAKELAEHLQERLTALESRAKEPRPRCMRRPNGRARSS

SEQ ID NO: 71453 - protein, 241 aa, Zea mays
  Coding DNA Sequence Number=SeqID_28078
MASHGSSNDENALSHTNGLAREGFPRILWEVLQGAGYTTPPQYAVQQFERHRVPRCRLATHPIGLFPAEREDDPMWKDRVEHAKDIWAIYPGQTTHLTVRCMNALYRLQVMRGEAMSHLMALLEATKITLDNREELMVDLSTEMVEKDLQVEQLSNEIQELEELVDTRENTIEVLEDQLLNTQQQLAEANEHLDMHHQEIQDLEANEDVDIEGGEELASSVDTAGSGRPPSPESSVASFAH

SEQ ID NO: 71454 - protein, 216 aa, Zea mays
  Coding DNA Sequence Number=SeqID_28079
  Gene Ontology: Mol. function=acid phosphatase activity; Cellular component=cellulose and pectin-containing cell wall; Biological process=translation
  Homolog annotation: Hit_ID=A7PVK3; Match level="QueryCoverage=72%, HitCoverage=61%, E-value=5e-44, Identity=53%"; Hit description =Chromosome chr9 scaffold_33, whole genome shotgun sequence
  Pfam annotation: Domain name=Acid_phosphat_B; Domain location=36-216; Score=176.8; E_value=5.4e-50; Accession=PF03767.5; Description=HAD superfamily, subfamily IIIB (Acid
MALEPLRHGLVSLLVLLLLLVHAASAARARDLHLEMVTTSAATARAVPSCASWRLGVETNNIRDWYSIPAECRGYVRDYMYGDLFRQDCAVVAREAAAYAEGLELGGDGKEVWVFDVDDTTLSNLPYYADTGFGAEPYNATYFDEYVANATAPPLPEVLQLYETLLSLGIKVVFITGRHDYEKEPTIKNLRSAGYHTWDKLVLKYVNFLIFAYQVG

SEQ ID NO: 71455 - protein, 63 aa, Zea mays
  Coding DNA Sequence Number=SeqID_28080
VSPIHPPLGDFHPYTSDALTHAVSDTRKMTARAGGAISYLVEKGKGADVGTCHDTASCHVCET

SEQ ID NO: 71456 - protein, 173 aa, Zea mays
  Coding DNA Sequence Number=SeqID_28081
MDEVQINKKNQKKKSIGKELAVYSQLQLSLAHRTVRCARLDSGELATLGKLWRHTVIIHRTVRWCIGLSGEPTAASITVGRAIRARRVAPANGRLGAPDSVWCANQPEDPTVGCARNGRRSTSDNEQWMSGGAPDCPGESVAELPELFQLKCLSPALEARPHLNGNNPSIPRI

SEQ ID NO: 71457 - protein, 125 aa, Zea mays
  Coding DNA Sequence Number=SeqID_28082
MALATWMIICHLGHLLLGVRLDLDLLLMGLPLGGLGFYQRVCRSKILYITRRPATRSSWSRQLGMGRPGRQQAGHRLSGADARIHTRGDTAHRVCRGIYGISCSSATVFTPSNMCWYNTTNEVND

SEQ ID NO: 71458 - protein, 117 aa, Zea mays
  Coding DNA Sequence Number=SeqID_28083
MGLCASCCKGAGQRELQGVAVAVQRGPTMGDGELPARARGRPGQGRAGAREAHLRPGQQRERPGIFLGACWLEEEEGGGGVRAQGRLGKNALLDGCQAPWREEAELPAASVREKLLP

SEQ ID NO: 71459 - protein, 154 aa, Zea mays
  Coding DNA Sequence Number=SeqID_28084
  Subcellular localization annotation: CTP_CleavageSite=82; ConfidenceScore=5.53e-01
MAPPFFLLCSRPASGQCAQGSPSRGQHLSLPRIPCSPQPWTIAQSVVGLLSALSTAPAFPPAVPAPSFSRREQQPQRLRAARCFVLRSEQHAVDARRVFAVFAQPHPRRLSPPERHPVFCVEKKASRSTLVDVRSDAQIGIAIVLKNTDWVYLW

SEQ ID NO: 71460 - protein, 106 aa, Zea mays
  Coding DNA Sequence Number=SeqID_28085
MASPTGISSLLKNCEHLVVAPCSIYRHNGPTDDPRPRIAAQAHAYHVGKGYSEGDGGMGDTAAKFNGEKKGEAQGREGEEEEEGEIGEGRGAHLGDPTPTITVSKT

SEQ ID NO: 71461 - protein, 293 aa, Zea mays
  Coding DNA Sequence Number=SeqID_28086
MGLGVCGSLCQGGDEDDGYDYEYGNDTLHGSQSFLSCLLISRSVRFGVRWPQEIESVRSCSPVLPLEAPPAPPLSAPAAGVAARGDPDDGGGDSSSSHSTDLSEEQELEGWVARPSPVTPLAGVTSTMRSTPCFARHSTGNSLRGAEVCSEHYSISERDSAEAAMQDAARRALSHFCSMLGGVADGLNLKYYPHRPSGSTGGVIVSPVGEDNPRLRSTVNLAVVLNTKLYHALDELSRARAEIAQLWAERVEHRHLEDGSPAPVGTQHPYRSPQHGHQTYGDPDCRTKINLEP

SEQ ID NO: 71462 - protein, 707 aa, Zea mays
  Coding DNA Sequence Number=SeqID_28087
MPSLGGQRVRSPAFALDLHGRDPAAFVREAEDGAARIVGRYVPRTEGLRSCDIRGSNVRLNRVFELNCLPYGGYLGEDTADRRGKKPVDWGVGVSESFAMDLMGTCATLGGRMSSPELQESSARMLEVTGGRWPKNVPIPRAAGEDFSTSRMARDFKVFPYGQNIVVVVLALMERDRQDATQKRRAVVRIADPMREAKRARGSAKAAASSGSKPVAAAKLATLGHSKAAASAKAAAPGGSKPPPSRLEKGRRPLSPVRCIADFGTDISVEDYLVGKLKLFSFFDEVSNSYHGVGSGEGQLTVVPPPVATTSPTAVVGAKGVARDPWATFCASGEILSAAAAKDVAGSMSQRLREASQQLSQQLKQATDFTDLVASGALTADVAAEVERLRAQHADVVREKLAAESKNRRLSEKAEAKVAWAEGSLARQRAKELEARLNALRSRMDKAESSTRAEEELLVLPTIVTGFMSFASLVTCEGAMNALSREGCRHYEMAHAEDVEDLVGLDGALPEAAEVGPVPPSDAGEGTSAIPAPTAAGEDPTPAPALMGEAAPKVVAEPAAKDPTAVAGPSQVLGSGPAHATATDNDIFVAASIVAADDDSFGSVSKCFESDDSGSSIAWMEESLDEDLDYFAALDVAAAEPSPRAEGSEELQGASTGYRRRRAVAKRRVSELSRSGEGELQNLFEGEELRIMLFNYKEMGIIPKVEP

SEQ ID NO: 71463 - protein, 101 aa, Zea mays
  Coding DNA Sequence Number=SeqID_28088
  Subcellular localization annotation: CTP_CleavageSite=72; ConfidenceScore=5.47e-01
MVARAPAPCSRLAALVFISSRRYCCSSACPVPAPPSCRGPFLGRARLDRGGVVRGPLRIMLASFSPSAVCCRSSSARCAQQLRPAHVGRRLHRRLAGSCRH

SEQ ID NO: 71464 - protein, 47 aa, Zea mays
  Coding DNA Sequence Number=SeqID_28089
MAVMGSTSKKMYLCQVRKQQTFVAFALRWCRRKKLKNEVAGGCCPPF

SEQ ID NO: 71465 - protein, 195 aa, Zea mays
  Coding DNA Sequence Number=SeqID_28090
  Homolog annotation: Hit_ID=A2XZU0; Match level="QueryCoverage=64%, HitCoverage=21%, E-value=4e-33, Identity=57%"; Hit description =Putative uncharacterized protein
MPPLAQSSLPRNPNQESDSALDESDGRKTRRPRGERGNKEEDEGVLDTEELAIVNSTFRKAQGSRLPGIIEETRRSGESTTSILESETWAMESLETELFDNVCASIQRSLGKPDKLSGRPVAASTPPKATANAPRVAETVMEEASLGTVAEPLLVSAIRGKKVERAPIWLLRQAKRYMKASPLPFCDSLLCWSAK

SEQ ID NO: 71466 - protein, 312 aa, Zea mays
  Coding DNA Sequence Number=SeqID_28091
  Gene Ontology: Cellular component=intracellular
  Homolog annotation: Hit_ID=A2Y0F8; Match level="QueryCoverage=19%, HitCoverage=31%, E-value=6e-20, Identity=80%"; Hit description =Putative uncharacterized protein
MAAARRLSELLQEQQEPFLVEAARARRPRRVRGASAAAEEAGGGLGYCPTAVCRRLLRLCSHGFKKRSTSGLRSALTRPPPPRSNGRDYGIMGGPNDNVVVLATKSTVADTTYERVRDPVMFPHHLLHSLCICDDTITVKEQGLEEEEVLVVGRCIDPTIDGWRFGSRGLPQLFGTLTLDTASFMVSSVPSGEVSSSSQHGCDYRIMGGPNGNTVVLATKSTVVNTTGERAIFDFLFLALLAVARSLDDSLMCFLNALANCREEVCKELGIPEEQGELFVGMSSDFEQAIEMGRSNVRVGSTIFGAREYPKN

SEQ ID NO: 71467 - protein, 95 aa, Zea mays
  Coding DNA Sequence Number=SeqID_28092
  Subcellular localization annotation: CTP_CleavageSite=67; ConfidenceScore=5.38e-01
MAVGSVLSHDASDSPVRHQTLSGALATSADRWGSTVGALTCGASGLSGGAPDRSCRLSDDRCVRSSRCSAFTPDSPVNYSGAPTDFPEGSEFSIE

SEQ ID NO: 71468 - protein, 1067 aa, Zea mays
  Coding DNA Sequence Number=SeqID_28093
  Homolog annotation: Hit_ID=Q53P84; Match level="QueryCoverage=98%, HitCoverage=98%, E-value=0.0, Identity=49%"; Hit description=FHA domain, putative
  Pfam annotation: Domain name=FHA; Domain location=52-120; Score=70.8; E_value=4.5e-18; Accession=PF00498.17; Description=FHA domain
MAAADGDALIAAFAVSKGGIVLKHIFLNAPPPEAMCGSGGREVESDEEDPPVMVGRHPDCHVLVDHPSVSRFHLELRCRRRQSLITVTDLHSVHGTWVSGRRIPPNTPVDLATGDTLRLGASKREYKLLWLSLREAFEMDDLMYMPSLPEEDKEEPYVKEPSSKLLPGHRDSVNMETHQDTSEQIVSEDIAFPAKVAPSAPPLSEFLQPFFVEEHSLSQFHEKRNGVTEEKLVDKNQISESFGSLIIQEMPGTLTNAGKSIQSGEQEDASNKVSKRSKLKSVKSLRVDTGRSSERSSTLSHSFQKGDQNDIVVCSQSCGTECAVCIALFGISEIEKAEEKEELIAEDNVDMNPPASMIMEGNMNERKPDNYIPQDPIGAKLQKKLGLLDSALPLHFKDDVFADKEIPQWNVASVHTESELLSEYLIIPEVKHDDLNHLNLEEGLSKSENINPNKITEGPGNCQLEGTIRGNLFDNLDTDGIEEGEEICPLDKDEITPNGSDHGDFSENENSMLNTGDQMKLNEPVSENLNPLIPTDEKYLKSQTEECMPISYLEFKDDILLDRENSVLAPRKYEAMSPVRQENLFSDKENVTPASKVKTVVRGVLGTRMDNSVSAANASNKNKVLGSRVDNSVSTENSSNKKQCELSSKSKKVHTVDFDVFYSDKENLTPISSGGMKARKCFPKDLSVDLDQDQEAFCSDKENLTPLSSAARKTRDMSGNLTRVESAVTKKRVVGRLPFQTLVSNSPLRPASSHDCTCAVARPAGVAAGDLAIKLEDKLNDLSCNGHESGSAGEGMKTWTMVANTDSLLDDESRKAIMLLKGLKGTRLFIPRIVIRELDSMKQREGLFRRSTKATSILQWIEECMARESWWIHVQSSADMFPVAPTPPATPSAQRIDEEIEISSGSFNPMMALFGPRSSAALADMISPRPEDRVLDCALLVSRVRSNEKVVVLSNSVTLKIKAMAEGLPCEGAKEFRESLVDPSSRRFMWAASAPRGSAWSCLDASALAENYYNSRHHAMKRRVLVAARPSESEAAKGLKLILRHNSLYAQATDAVNKTPLVSLAAV

SEQ ID NO: 71469 - protein, 439 aa, Zea mays
  Coding DNA Sequence Number=SeqID_28094
  Gene Ontology: Mol. function=protein disulfide oxidoreductase activity; Cellular component=cytoplasm; Biological process=cell redox homeostasis
  Homolog annotation: Hit_ID=Q0IWL9; Match level="QueryCoverage=58%, HitCoverage=73%, E-value=1e-114, Identity=59%"; Hit description =Monothiol glutaredoxin-S11
  Pfam annotation: Domain name=Glutaredoxin; Domain location=116-180; Score=62.2; E_value=1.8e-15; Accession=PF00462.15; Description =Glutaredoxin
  Pfam annotation: Domain name=Glutaredoxin; Domain location=223-279; Score=45.7; E_value=1.6e-10; Accession=PF00462.15; Description =Glutaredoxin
  Pfam module annotation: Pfam domain module=Glutaredoxin::Glutaredoxin; Domain location=116-180::223-279
GKDTEEQSHCSPSWSSEDNDVREGMKKFSNWPTVPQLYCKGELLGECDIVIAMHDSGELKDVFEEHNIPLKPQGRKNEEVGQPESATEKGGAVAEPIGLTDAQKARLESLINSSPVMVFIKGTPEEPRCGVQWKLVHILKQENIPFSGFDILSADEVRQGLELIRHWPSYPQLYIKGELVGGSDIVMEMHKSGELKKVMSEKGVIPKESLEDRLKSLVSSAPVMLLMKGTPDAPHCGFSSKVVNALKKEGVSFGSFDILSDEEVRQGVHNLTVAHGSAVSLRAPSTLHQRPQVLPLPLTAPLPPPHPSTAPLPPPCPKAPRIHRTPALAPWFHALDPPPPPPLPITAPSAPAVHLHRAPVSGVGSETPTAVVRSESETPTASLSPSASPSPSAPGTPTAAVASPAPVAGPRLATGFTEKSPLHLAASPTARPQEPRVGV

SEQ ID NO: 71470 - protein, 210 aa, Zea mays
  Coding DNA Sequence Number=SeqID_28095
  Gene Ontology: Mol. function=DNA binding; Cellular component=nucleus; Biological process=regulation of transcription
  Homolog annotation: Hit_ID=A3B4L8; Match level="QueryCoverage=20%, HitCoverage=14%, E-value=2e-09, Identity=69%"; Hit description =Putative uncharacterized protein
  Subcellular localization annotation: CTP_CleavageSite=13; ConfidenceScore=5.09e-01
MGRVTQPGRGARRAATRPVASWAAWKSLQLLRAKYRLPPPSPAHAAKPAPPPPRRDSPPARGSSVAVAAPRARLRLPPHPRRRRSSTPRPTPFVGEPSSPAPPQSRPRDPADPGRSDSEAGEPLVLGAGMLLVHLRAADRWERVAAVLPGRTVADIAAHYDDLEVAVGSIEAGFVPFPRYGGCGGGAVSCVCDPGMQFHIGNLGHHHICT

SEQ ID NO: 71471 - protein, 297 aa, Zea mays
  Coding DNA Sequence Number=SeqID_28096
  Gene Ontology: Mol. function=UTP-monosaccharide-1-phosphate uridylyltransferase activity; Biological process=metabolic process
  Homolog annotation: Hit_ID=A2YGP6; Match level="QueryCoverage=98%, HitCoverage=54%, E-value=1e-133, Identity=74%"; Hit description=UDP -sugar pyrophosphorylase
MAPGTDAGYGQWAAACPPLRRNLQLLSPDEVELAKMLLNEGQIHLFEHWPEPGVDDDNKRGFFDQVRRLNSSYPGGLVSYIQNAKKLLADSKEGKNPYDGFTPSVPSGEVLTFGNDNFVSLETAGIKEACNAAFVLVAGGLGERLGYKGIKVALPRETTTGKCFLQHYIESILAFQEASCKMVDEGCQTKIPFVIMTSDDTNALTIKLLESNSYFGMEPSQVKILKQEKVACLADNDARLALDPSDKYKIQAIPSALGVSATKGYNVNSLAVPRKAKEAIGGITKLTHVDAKRIIQI

SEQ ID NO: 71472 - protein, 537 aa, Zea mays
  Coding DNA Sequence Number=SeqID_28097
  Gene Ontology: Mol. function=nucleic acid binding; Biological process= ubiquitin-dependent protein catabolic process
  Homolog annotation: Hit_ID=Q69UJ1; Match level="QueryCoverage=13%, HitCoverage=39%, E-value=2e-16, Identity=50%"; Hit description =Putative RNA-binding protein RBP37
MRTMLGLFLTKAKKDPINEPYNVGDDYNSDTDEDSKYDEEEELTSSFSARGNQSHELAPRNGDVDICKGCAICNDQRLGRCLIYMVYLVLARRPHTLSAHGSASARDTRVCPRLRRRDARASTPASSALATLRPPPRCPRLRPRDARAYPRLLCPRDTARAASSPRCPPKLPDAAPRLHRVQPARQSSAPRSQSGRRRHHGSLRNPRSRARSPELRWAPALAPDTMLCPTLNLATTPSTTPPSFLATTPSLDGRRDWWHLPDLGARLILAPNATPPPIRAASSDGSQDNAPSPSPEPRRLTFQGCRSAILTSSSLAVARPPDRRLRLRDPPDSPTFPSTAASITHLLHADEKARPPLTPRPPTTRLLNKDLSKHPVDGFSAGLVDDINVSEWQVTIIGPPDTLYPCHLPVNSQNAITICNDASIFTLSCIGLLFPSMDLFCQVTEENLAALFIKLWTKGARAALNLSGTVLRYYPVSVLPSKTVIAPVNPTFLPRVTQADLKLFFESICGEKMTIQPAQYHWLTAMTATGLSAEVAW

SEQ ID NO: 71473 - protein, 164 aa, Zea mays
  Coding DNA Sequence Number=SeqID_28098
MKIQITELAESLCAPARLSEVLRTRTSVGGSNTLGGSVTAAKVNPLQQEIVERDTTIDWVINSRSFALDCEAIALARVAELSTSLENLHAYCNTLHEEVHVLYDRLHPNVPQEVAAMGAGPSGASSGGPDGELDLFGAPPSMNLADERSPKAGSGAGVAKDEDN

SEQ ID NO: 71474 - protein, 110 aa, Zea mays
  Coding DNA Sequence Number=SeqID_28099
  Subcellular localization annotation: CTP_CleavageSite=53; ConfidenceScore=5.12e-01
MKLWKETSRSSKTTTSSRRGLAATPSRLPVKAAFIYVSFPHFDLLDPRLTTIAAKSTRGPPHTDHSPTALAPFGSDQGHNLSGTRDSRYQDDLQMTHNLALVVAIQTNRV

SEQ ID NO: 71475 - protein, 116 aa, Zea mays
  Coding DNA Sequence Number=SeqID_28100
MAGGAPLQVIKGLKPTERCLLLKFLASQPTDKPLRTKHRTRLELEFWFKKARYMSRCLSIVSSVYLPPRTDETMLAEYFGTIGLLMVIAKEKVPFPIPSMIGLMHALAVLFDLSGK

SEQ ID NO: 71476 - protein, 152 aa, Zea mays
  Coding DNA Sequence Number=SeqID_28101
  Subcellular localization annotation: CTP_CleavageSite=5; ConfidenceScore=5.32e-01
MDLTSAAAASDMATATALAAATAPRAGLNASLAAATDLAASVRPLLAHPWGVAPGAATASLLSRLVVDTASQVRLLGLSLSHPRCEHIGPVHQHARRGRPRTSPWSPLTHAAVPSSTPSGFTLTASMWAKTVAPASTAPATGYALVAAIGTI

SEQ ID NO: 71477 - protein, 82 aa, Zea mays
  Coding DNA Sequence Number=SeqID_28102
MEVKPTFREELSPQEKMLPPKGTTGMLVELRRSTQVPQDGQILLEILISPTADLTSPTALFPFLLDVGAVGGWGTVDLGSYT

SEQ ID NO: 71478 - protein, 392 aa, Zea mays
  Coding DNA Sequence Number=SeqID_28103
  Gene Ontology: Mol. function=DNA binding; Cellular component=nucleus; Biological process=vesicle docking during exocytosis
  Homolog annotation: Hit_ID=Q2RA23; Match level="QueryCoverage=43%, HitCoverage=23%, E-value=6e-59, Identity=61%"; Hit description =Expressed protein
MKKGRGKLEFARIGQGTIIFLDGPGPRTRQQPCDIRDITIRKEDNKEQKADFRRKLSLFSAFHSPSSSPILFLSTTTLTGASQWAAGFTFEWDGDAGRTGFKRSCHVVGGGKRERGPDHERKKGIPWTEEEHKTLNHLGNLMQIGHSAYVDSPLGPDAFREYETLLIQDHDELLKKSENLDRHKESIHKEASDFTSNVDNYSKWGSGVHYGSNSESSPTKRDFLMTKWARVFVLPSEGIIADSSLSNHHEDSLGSGLPSISTSKPFDSDEVPPGVTLTTQFLYHLANKMDLKLDIFSLGDTSKPANGEAASPKKQSPSGSRSPDSLELSALQERKAFSAGNWFAEDKPEGSSAEDNHPSCCSAERQRRKVNKRRKKRICGCPAASGGGYINK

SEQ ID NO: 71479 - protein, 78 aa, Zea mays
  Coding DNA Sequence Number=SeqID_28104
MGPGCQRPLPSVLADRWVPWMGDVATTPQMWLMWSRKTTSPSKYNNSARKHRVMITNVPLKYLKVVRRSKRSKVSYTK

SEQ ID NO: 71480 - protein, 473 aa, Zea mays
  Coding DNA Sequence Number=SeqID_28105
  Gene Ontology: Mol. function=pyridoxal phosphate binding; Cellular component=cellular_component; Biological process=amino acid and derivative metabolic process
  Homolog annotation: Hit_ID=Q75PZ8; Match level="QueryCoverage=99%, HitCoverage=99%, E-value=0.0, Identity=70%"; Hit description =Tryptophan decarboxylase
  Pfam annotation: Domain name=Pyridoxal_deC; Domain location=27-400; Score=477.1; E_value=2.3e-140; Accession=PF00282.10; Description =Pyridoxal-dependent decarboxylase con
MGSLDTNPNAFSAFGVDATTGFQPLHPDDVRAYLHKAVDFISDYYKSVESLPVLPDVKPGYLRQQLSAAAIAGDLIASAMNTVGFTWQAAPAATEMEVLALDWLAQLLRLPPSFMNRTGAAGRGTGGGVILGTTSEAMLVTLVAARDAALRRTGSQGVSGLPRLAVYAADQTHSTFFKACRLAGFDPANIRSIPTGPETDYALDPARLFEVMQADVDAGLVPTYVCATVGTTSSNAVDPVGAIADVAAVFNAWVHIDAAYAGSACICPEFRHHLDGVERVDSISMSPHKWLLTCLDCTCLWVRDTHRLTDSLETNPEYLKNDASDSGNVTDLKDMQVGVGRRFRGLKLWMVMRTYGAAKLQEHIRSDVAMAKMFEDAVRSDNRFEVVVPRNFALVCFRIKPHGGGIMTEEDADEANRELMERLNRTGKAYLAHTVVGDRFVLRFAVGSSLQEERHVRSAWELINKTTTEIMQK

SEQ ID NO: 71481 - protein, 516 aa, Zea mays
  Coding DNA Sequence Number=SeqID_28106
  Gene Ontology: Mol. function=pyridoxal phosphate binding; Cellular component=cellular_component; Biological process=amino acid and derivative metabolic process
  Homolog annotation: Hit_ID=A2YR36; Match level="QueryCoverage=97%, HitCoverage=96%, E-value=0.0, Identity=78%"; Hit description =Putative uncharacterized protein
  Pfam annotation: Domain name=Pyridoxal_deC; Domain location=57-441; Score=561.8; E_value=7.2e-166; Accession=PF00282.10; Description =Pyridoxal-dependent decarboxylase con
MGSLDTTPTAAFADVAGGGFEPLNADDVRSYLHKSVDFIYDYYKSVESLPVLPGVEPGYLRRLLQSVPPTSSAPFDIALKEVRDAVVPGMTHWASPNFFAFFPSTNSAAAIAGELIASAMNTVGFTWQASPASTEMEVLALDWLAQLLRLPPTFMNRTAAAGRGTGGGGVILGTTSEAMLVTLVSARDAALRRAGSVGVAGITRLAVYAADQTHSTFFKACRLAGFDPANIRSIPTGPETDYALDPARLLEVMQADVDAGLVPTYVCATVGTTSSNAVDPVGAIADVAAVFNAWVHIDAAYAGSACICPEFRHHLDGVERVDSISMSPHKWLMTCLDCTCLWVRDTHRLTDSLETNPEYLKNDASESGTVTDLKDMQVGVGRRFRGLKLWMVMRTYGSAKLQEHIRSDVAMAKMFEDAVRADHRFEVVVPRNFALVCFRIRPQGTDLTEEDADVVNRELMERLNRTGKAYLAHTAIGGKFVLRFAVGSSLQEERHVRSAWELIKKTTTEIFEEETM

SEQ ID NO: 71482 - protein, 198 aa, Zea mays
  Coding DNA Sequence Number=SeqID_28107
MVARMTNWSLLLFLLRVTSSAKMTPQSLIYLSTNARDMALIGTQGWATHFYWVNAGSMWLPIAHGDRQSTLTQSLGPSDRATGLWVSVTICPIGGIARQLQPMAGPPHMPSKHPAKGGPMLLRVWAITNEIRTSISVIRMPSQGRYIIDKGFICYSPSTQPGIGEMIVFSSGGDANPDEWLMYLSSNPSPSSAVERLE

SEQ ID NO: 71483 - protein, 68 aa, Zea mays
  Coding DNA Sequence Number=SeqID_28108
MTGAHLAKGIKSPMFDQGHREPKGKVACLNPAIGLGPPRAREHRAPRPCKVIGGARARGRPPWDPKPS

SEQ ID NO: 71484 - protein, 88 aa, Zea mays
  Coding DNA Sequence Number=SeqID_28109
MEILKLKLGLGTGDVLPRSSAEYNRFGSPYLRGYEDLVTFYNHTLESLFLSRVRKRQIFVAFAPRWYQMRKNKTEVREDLVLHIGSFA

SEQ ID NO: 71485 - protein, 211 aa, Zea mays
  Coding DNA Sequence Number=SeqID_28110
MNVCELTLAVSHPPTGQEQVPQDEAHGGCCDVFVRGPFTVSCWISDALDLGTTRGVLLLRVDLELRLGPQPCGHGRHSVWPSCRAEPRLANLGISSSIPLGAQCSRRGWSDLGQKWEPRQTHAPQGQLRGSSSSSVAATRHDGVGSHKEQQDPSHATACARILGKRRPPPWGQWFLVVDKSGHGPPFTMVDSLSIPSSGRDPSTGFAFLSN

SEQ ID NO: 71486 - protein, 282 aa, Zea mays
  Coding DNA Sequence Number=SeqID_28111
MGLRKNSKQPASVDASPQSAETPGLLQEIDDAWLAAHFVEHTESVNGTLRSSREEASAEGSRPREEHRGALRCGDEGSSFRQPNDMENREGVAGGKGRAACGHGGEKKGRRRGSFNSGALGCWVAHRGQQRKADAVEKGRSKLLAGARARPWERRGKEEGEPAGGDGRARLHADVELAIWSSGRRRPWLLAEQRRQRAPKELLLLRTRSREGGGRPSEGGRGCCSPGRGEEVRPWGESHVHACCREVKQGGRRCVGKEGEERVAARGVDANFPICKGRHFYL

SEQ ID NO: 71487 - protein, 194 aa, Zea mays
  Coding DNA Sequence Number=SeqID_28112
  Subcellular localization annotation: CTP_CleavageSite=62; ConfidenceScore=5.02e-01
MRSMPPSAVVCLFNSAESSGPASDTGAQAHESYSSGVGLRVRGRRTAVEVEPPLAPVPRPLRATAEDGEGVAVGVTEGGLAVIMPASTHKQRGNRQSSFGPTCKLSSGEQHPTPPRGQLRGRHMARGDDILQGGDSGSGPPWESAGPLDAQPGLPGGVQDLDRYKPDLQDGSRTPQEGSGLLTVGPQDSKEKNT

SEQ ID NO: 71488 - protein, 122 aa, Zea mays
  Coding DNA Sequence Number=SeqID_28113
MALLDPPERLQPEVALNLVRNLFGWGAPAFAGRICVGASPHGNLAAGEFVFFISNQPSGLVLPIPPFIVLLLKEVGLQPQHFTPCFILQAAIIAYLRRMSVGVTLLPASSSSIWGEGCSPAS

SEQ ID NO: 71489 - protein, 488 aa, Zea mays
  Coding DNA Sequence Number=SeqID_28114
  Homolog annotation: Hit_ID=O48967; Match level="QueryCoverage=79%, HitCoverage=92%, E-value=1e-100, Identity=51%"; Hit description =Putative uncharacterized protein
MEPDVRPLGRGFIAEEARRLSSWQVMCRLSIKYALSTPLTSDVPPQHLMCPVHSTDGRRPGHPAGGVPVRSGGRQYARVVAYIVLIITRTLPVKLPLHADTTMMVQIVEHRAETSVDFLMEEEAASSTPQVPNRPMPGIAAAHAAQPHTTTQISRTPSRAAPGALSAARELLHHPPSSTASLGAMKQWRDDVDRLLGMAHSDSTRSRPWSSRRQHEVTASVRSPSVRGAQTNDVRAELNRRRAGEDARVSLERARERRQNIEGRNLDQDFAAVAPQTPSGRSDQGRCPVSWRGLCHARGPSPRGDLATQVPAALAGEVRRYVQPVEILAGVRHRHYGNKWRHRRNGNIFSCCLVWAYPDLAHEPYPRINLLLGRALHEEPGETLWTFISRFTRGVRDEKMLEKLATHDVETVTTLFALADKCARATEGRAWHSAPQTRVAQTSGSGAVSQDGKKKKKKNRGSERPSSAAPVIAPATRGRNERNKRPRP

SEQ ID NO: 71490 - protein, 105 aa, Zea mays
  Coding DNA Sequence Number=SeqID_28115
MARARAYKAHSGVDHTLPRMLNLTGAQTHRRLPPSEKTEHTSVKLLERGIEVCFAGEASPRSPEFTTPPECVDRDMVAGVTWPSILPPGWTVEWDPTSVEEEHEE

SEQ ID NO: 71491 - protein, 177 aa, Zea mays
  Coding DNA Sequence Number=SeqID_28116
MARAHAYKAHSGVDHTLPRTLNLTGAQTHRRLPPSEKTEHTSVKLPERGIEVCFAEEASPRSPEFTTPPECVDRSLPEPALPLARPFSPPIDCNLADGEYILVPEQGAAQEVAPDPAPEPAPEDLPATALEGKPRNPIQMNTSSLEDMVAGVTWPSILPPGWTVEWDPTSAEEEHEE

SEQ ID NO: 71492 - protein, 117 aa, Zea mays
  Coding DNA Sequence Number=SeqID_28117
  Subcellular localization annotation: CTP_CleavageSite=27; ConfidenceScore=5.19e-01
MASPFRLCSFPACVVISQLLNTCSVVSKSQKSGKDGVSSAIFPKQESGEDGVSSAIFPKRSTNCLDRKIATDLADSCQLWKRCSINCASHETLVDFAVLAIIEPGSVIASYFTIPVN

SEQ ID NO: 71493 - protein, 114 aa, Zea mays
  Coding DNA Sequence Number=SeqID_28118
MPLLIEDIATDAQILESFGIRYRSLGRPNHGTPARARPRGCPTQLCLWSGSEKCRGPLIGEPTVLVRWVGWQPLDLDPTIQNRLSQGVIWAIDWSSCGPDLGKWYRFVKVDLDR

SEQ ID NO: 71494 - protein, 67 aa, Zea mays
  Coding DNA Sequence Number=SeqID_28119
MGQELLVDDYLVGGFTMFDAQTGLPPAGADAGQLAVVPSTVPIDLVGTSNGDTGDFAGPMVEILCRC

SEQ ID NO: 71495 - protein, 100 aa, Zea mays
  Coding DNA Sequence Number=SeqID_28120
MARVACTLSGKRLDGGLYNKIKAGTLHNNFDVVALAVCHIKIQEKRPSMCPVRRFKEDLHGTVSENISDAVHLAAGDLHATIRTGRCGSCSAQGGYYRGT

SEQ ID NO: 71496 - protein, 57 aa, Zea mays
  Coding DNA Sequence Number=SeqID_28121
MASSSSGRTPGSSEAKLGQTLSYGNLGHIALPPTVSHAHLMKTTLFTLFRLLCQPPG

SEQ ID NO: 71497 - protein, 95 aa, Zea mays
  Coding DNA Sequence Number=SeqID_28122
  Subcellular localization annotation: CTP_CleavageSite=88; ConfidenceScore=5.61e-01
MAGTPSAAATFLWCLANSPSGWLKPHRGTPARLVSAPRHSLCRLGSLGLKFQRLAASPYSRGSATAGASLAVAVLWCGDVVRVATAVLAAKQSAP

SEQ ID NO: 71498 - protein, 323 aa, Zea mays
  Coding DNA Sequence Number=SeqID_28123
MVVMGSTSKKMYLSQVKAFTDHVALGALTSQLISKRKRLEGRIECILTQHTDTIRDNSVAKNKSQNLLDKVTALEKEKEDLSRCLNDEKEDAEIAHTEAQAARKRVVDLEFELKNMRDHREKTEYATRAGDELESLPSIMTGLMSYASLVTFEGVVNALSRKGCRHFEAFERVNEDFGAGVFQVEDDVLKHSTGALYDRMWALMAAAMRDEEVEDLTSLESLVAWKDAAVEVSASGPAQANLDDRANDDMLVCENVVILSSDASDESDVGSWSSEGEGLGSPFAWIDDESSEDDLDYFAALDLAISESLLKVAALEAVTTLVG

SEQ ID NO: 71499 - protein, 175 aa, Zea mays
  Coding DNA Sequence Number=SeqID_28124
MASACGALRRSTSLASKVDWRSVLVWVLVGVVVDFGDVVVEEGLGSLGVGGTYGFAGGGMELFIVELSLVVLLGVVGLCNNSLVINLLISGHPVFGSLGFRAVPGGVHGVFAVKKSIKPSWLRDSAFASASASASGVAAVALLCGVLLATSGVSSLLLIGDGVHSGLCNTSNSIN

SEQ ID NO: 71500 - protein, 123 aa, Zea mays
  Coding DNA Sequence Number=SeqID_28125
MTCKFTAIRCMRKSIYYTHIYTQVSLHNLLRRKPDHLTLRDMPTRTRGQDAAGTSGGRDVTPNPPPVPPTLAEAIAALVNATADNTRFLREMAEVVVCRITAEYPPVPGGEITWLSNLSDESS

SEQ ID NO: 71501 - protein, 24 aa, Zea mays
  Coding DNA Sequence Number=SeqID_28126
MAMMGSTSEKMYLCQVVPKEEADH

SEQ ID NO: 71502 - protein, 240 aa, Zea mays
  Coding DNA Sequence Number=SeqID_28127
  Gene Ontology: Mol. function=transferase activity, transferring hexosyl groups; Cellular component=membrane; Biological process =carbohydrate metabolic process
  Homolog annotation: Hit_ID=Q8H5W0; Match level="QueryCoverage=75%, HitCoverage=28%, E-value=3e-67, Identity=74%"; Hit description =Putative UDP-glucose:sterol glucosyltransferase
  Pfam annotation: Domain name=Glyco_transf_28; Domain location=53-200; Score=69.1; E_value=1.4e-17; Accession=PF03033.11; Description =Glycosyltransferase family 28 N-terminal domain
MATLKDDGTVVIDIPTTIEAASLDLHSEDHQNVAFGGEPLDSSDLQDRPPMQIAMLIVGTRGDVQPFIAIGKRLQIFHGVLIEDQYVGQFIYDELATHANFKDFVMTTGLEFYPLGEDPKNLAGYMVKNKGFLPATPSEIPIQRKQIRDIIFSLLPACKDPDIDTGVSFSANAIIANPAAYGLPVALWFVGPTFAVLMASSSRKGAIRDKSVFMFNTLLEEEKKAWIQKLERQKGQELFE

SEQ ID NO: 71503 - protein, 162 aa, Zea mays
  Coding DNA Sequence Number=SeqID_28128
  Subcellular localization annotation: CTP_CleavageSite=22; ConfidenceScore=5.24e-01
MVVSFGNGDFGSIPVSASSGCRARLGPKGTGERSLLSLQLHQSLRRRLAAKTRLLLLVDIPAGVEEIGSVIDWRWISSSNVACRGNLRSRWDNGDLRHSHSDSSHSERLGDRFLSNKFSVVALCYQPLLIRLFQEIAPPESIKTYPEVDFSVSLHPPQSASA

SEQ ID NO: 71504 - protein, 50 aa, Zea mays
  Coding DNA Sequence Number=SeqID_28129
MGRLKGKCAFGPFLSILVIECQRKCFCVDLCNMVDKVQIMSKASRALVEL

SEQ ID NO: 71505 - protein, 338 aa, Zea mays
  Coding DNA Sequence Number=SeqID_28130
  Gene Ontology: Mol. function=triacylglycerol lipase activity; Biological process=lipid metabolic process
  Homolog annotation: Hit_ID=A3ABY9; Match level="QueryCoverage=73%, HitCoverage=42%, E-value=9e-49, Identity=76%"; Hit description =Putative uncharacterized protein
MKKECLIIVKKEEVCQCFSYKGQVIASAWLNDLRHQIEQTRILSTFYRSASALGSRLPSMANAKARVAGAGAILRPVSTGTQVVIRRARSVAQAAWTRPALQLSSWTCIGPRRRNNISTSTVTSEEIITSTGGGSESTSLLTETTTETTETVTSEAVSEVVQSSVSVAVDAVDLVDDKGDSDDDIVDHHGDEDRMTDVELWQQLESELYRKREGEEDDIAKEMAESTIAEEVGGVAGDVLSETKEVHRFYPPGKIMHILFSSSEEAVRGEEPNDDVTDGEAQSSLGIFLTPRSLYDKLRLSKMMINDHYMPIYRRNIEQLIAKLEKDSSDQIGCVRSS

SEQ ID NO: 71506 - protein, 259 aa, Zea mays
  Coding DNA Sequence Number=SeqID_28131
MGWVGWRWPRRSLVSGSLLPLRLALPHQYCLRKIGGWNEGGGRGHEAASGRASWARSAGGFHARTRRGGAQAEGEAVWGGPGSAAPSIGGAVEACIVGEIRGWVPCADTARSTGGGERRCGEEGRDPRHLPSAARGPRGTGRTVHAYTPLLRSITETCLTKITSDKEFVESFLGFAEWQQLRLPYMIGNLRVTKVHGNPDRAGDRDDSTSDEKLVAGRLDEDRKTDEQVIRHCSLQNGYRSRYAVATKRRVIGLTGIPR

SEQ ID NO: 71507 - protein, 122 aa, Zea mays
  Coding DNA Sequence Number=SeqID_28132
MEEMSQPLQQQDGAITTVKTNTSDGHVISDGHAGDRRSATVVPSPSSRRRHGLPAAALPAPPAAALHARGRARRAAAPPTRCAAAPLTTQSSPSTPCCLVAADRSHAHIGSPARPAPHSQCA

SEQ ID NO: 71508 - protein, 62 aa, Zea mays
  Coding DNA Sequence Number=SeqID_28133
MAARAEATGDGVNLPWQGRSYCKGEVVEVSIACSSIKTFSFERKYRVKVKDIGNSDAFYSLS

SEQ ID NO: 71509 - protein, 40 aa, Zea mays
  Coding DNA Sequence Number=SeqID_28134
MAPPRGGVCAAVLAIGERMFSLELILVRDLFRSRDLRSNG

SEQ ID NO: 71510 - protein, 104 aa, Zea mays
  Coding DNA Sequence Number=SeqID_28135
MGRLEPRAEWESRLVGKVCVGTCYQVQGDPTGVRVDVNRVLAWDGKSSVNLASHGHCAGARNAQRPRRACYNGPDHTWASMLDEVTMMGRPRHRSSSDDVWDEG

SEQ ID NO: 71511 - protein, 162 aa, Zea mays
  Coding DNA Sequence Number=SeqID_28136
  Gene Ontology: Mol. function=ATP-dependent helicase activity; Biological process=DNA recombination
  Homolog annotation: Hit_ID=A3ABZ4; Match level="QueryCoverage=85%, HitCoverage=38%, E-value=1e-31, Identity=53%"; Hit description =Putative uncharacterized protein
MTNAKKGCRVLAIDVTDERCGDEAFATHLETECFKKYEKAGKTFYNSQIAATVRWLSSATPSQMCDCLDALIDRTKDDGASGCPDIVPESPPASPEIVVGARSGETSNDKPQHICELKSSDESAKGAAASTGNMVLPAVPTFKEFLSQKGRDRVLGTRSQML

SEQ ID NO: 71512 - protein, 40 aa, Zea mays
  Coding DNA Sequence Number=SeqID_28137
MAPSWATLLRGRYASQHHCRGCVGLLWSMVDAAGEASTTA

SEQ ID NO: 71513 - protein, 67 aa, Zea mays
  Coding DNA Sequence Number=SeqID_28138
  Subcellular localization annotation: CTP_CleavageSite=57; ConfidenceScore=5.51e-01
MASYGDRTAKPDPTDVPAARPGRSSTFAVSPARLRRRDFVYARLPPVYPSSTPVCIRVARHRPRIAH

SEQ ID NO: 71514 - protein, 61 aa, Zea mays
  Coding DNA Sequence Number=SeqID_28139
MAMAMALLDRAKGVVRRCSRPIDAILEDLLDLWVRTHTRFRYATLILLVDVVRIVFIGVSG

SEQ ID NO: 71515 - protein, 126 aa, Zea mays
  Coding DNA Sequence Number=SeqID_28140
MDNWVLLCDDDRVINVGLKKIPGPWVMDSRVSVEDGRIGKLDFLKGVHSLQRDVSHSVLRAPRHCGLMHAEAPDIRGIRWRRLNIIVLSDVFFLTGGRGSALKLKAGLLSMWDEVKRKKGVTVKKA

SEQ ID NO: 71516 - protein, 254 aa, Zea mays
  Coding DNA Sequence Number=SeqID_28141
  Homolog annotation: Hit_ID=Q1HA65; Match level="QueryCoverage=30%, HitCoverage=10%, E-value=2e-07, Identity=35%"; Hit description=Vasa
  Pfam annotation: Domain name=zf-CCHC; Domain location=165-182; Score =27.2; E_value=5.9e-05; Accession=PF00098.14; Description=Zinc knuckle
  Pfam annotation: Domain name=zf-CCHC; Domain location=225-242; Score =14.7; E_value=0.0092; Accession=PF00098.14; Description=Zinc knuckle
  Pfam module annotation: Pfam domain module=zf-CCHC::zf-CCHC; Domain location=165-182::225-242
MSTTNDVTKCKECGVLASQNNTINKTADEQTFKTQKDAQLNQQTSDLGTCCCCEYYGIPCCQINANESETAKQKNQILFSGIKRQMSPQEQLIADSLIPNALSVFELRSIPKRKHHKDAQPQEETHECYIDGWTITCTQFQPRNRFRSKKRKGKHGQSQEITSRKACYQCGREGHYFRNCPEKSSLQITSEMKLSQSSDMEYEQKCTETSTNNVKTTPPYNLSSRACFGCGDTGHLVNSCVGGRRLPKVLKNII

SEQ ID NO: 71517 - protein, 148 aa, Zea mays
  Coding DNA Sequence Number=SeqID_28142
MGGKGRGLVGVMPLMAFKDLEWREREEETEAMNSNNVEGEWTARNPLGAQLGGCRGRAGGLGVRLAAGSARMARRLGCTITGAGRRVNSGQRPGVRCRRAIGRAGAVESCLGAVRRAGQGAGRLCEGENRREGRREKNGWEGEVPGGG

SEQ ID NO: 71518 - protein, 166 aa, Zea mays
  Coding DNA Sequence Number=SeqID_28143
MARVAVRLLYTQEPVPKEDDSWARAPVSETGPLVSAEMKRRTTAGGGSLLTRQFAFFAPGDRRPKKAYYRGRWTAPHAAVRLLRTRSPTPKEYESWGLGPRVRDWAVGFGGDEEVRRFTPRVAVRLLSTWRPAHQLYDLWAQAPVSEAGLPWCASGEVFYGVLGRE

SEQ ID NO: 71519 - protein, 96 aa, Zea mays
  Coding DNA Sequence Number=SeqID_28144
  Homolog annotation: Hit_ID=Q8H6I4; Match level="QueryCoverage=38%, HitCoverage=1%, E-value=4e-08, Identity=62%"; Hit description =Putative gag-pol polyprotein
  Subcellular localization annotation: CTP_CleavageSite=62; ConfidenceScore=5.06e-01
MEFWVTSNMHGYYRYLNSLSRMTVLPKGGSQMNVLGESHAFVKALNRAKGVPARFVSVRPATAAEASSEGWRLCLRPNICPPRDQFDKVTWCRRRR

SEQ ID NO: 71520 - protein, 176 aa, Zea mays
  Coding DNA Sequence Number=SeqID_28145
RRLVGQCCPRQAWWLGLSHASLVPSPAEPTPVASARAGESVAKLMDGAAARPGAAERLGVQTPARPRPAMLFPARSGMEVGSSRCARGRAVELLLARPPSAFQPRSLVRPPLLFPGPWPWPSSAVGAKAKTPPFARGLRCSRWSDRDKTGGDTLRSIRHQTKACGDAIPQRGLVQL

SEQ ID NO: 71521 - protein, 51 aa, Zea mays
  Coding DNA Sequence Number=SeqID_28146
MGSRHSACSAEAGCRGSFVLLLLVTPPAGRGKEEGVEANLQEFQDFDEFED

SEQ ID NO: 71522 - protein, 149 aa, Zea mays
  Coding DNA Sequence Number=SeqID_28147
  Subcellular localization annotation: CTP_CleavageSite=56; ConfidenceScore=5.01e-01
MQAACNRARWTRFSDSQHAGMEAQAHASRNRRAGCCMQATAPPLAPPPRLFGCGTNAATRDGPAHDPAAPAWRDGGASSGRSGRRFAFAVITVPKKGPGKGDTPKRILPCEGTGLRAPPTDQGFEGWPPEGFNSRLRSRGPYTHYWLEV

SEQ ID NO: 71523 - protein, 425 aa, Zea mays
  Coding DNA Sequence Number=SeqID_28148
  Gene Ontology: Mol. function=catalytic activity; Cellular component =integral to membrane; Biological process=recognition or rejection of self pollen
  Homolog annotation: Hit_ID=A2X5J0; Match level="QueryCoverage=92%, HitCoverage=100%, E-value=1e-155, Identity=71%"; Hit description =Putative uncharacterized protein
  Pfam annotation: Domain name=Peptidase_C12; Domain location=39-357; Score=79.0; E_value=1.5e-20; Accession=PF01088.12; Description =Ubiquitin carboxyl-terminal hydrolase, family 1
MAWRWLRSATRRGWWNAAPSGTPLFAAEQRATLVNVKVKWVKDRALDAAVSRERHLRTAHHLLDLVFSRPGHRVSRSDLLAEKSARRICGSAHSLLEFLRRYHTMFTLSRGGVSPTDMAFVLRQREVDCLFATEGDLVARLRRLLMLTLPRSLPLHTVDLLRWDLGLPSDYQDSILPRYPDHFALEQPEGDERVWLRLLSWDDLLAVSELEKSADGGDTTCIPFPVSFTRGYGLRSKCMSWLREWQALPYTSPYADASGLDRRTDVSEKRNVGVFHELLHLTVAKRTERQNVSNMRKLLGMPQKFTKVFERHPGIFYLSRVCGTQMVVLREAYGGGSQLLEKHAHPLVAIREEYSTLLRAALPPRTRGRERHGSFSRQHEGCVVGGDEFELSKLFQIVGLQILDIQIGEEFFDDSWEKIILAAGG

SEQ ID NO: 71524 - protein, 293 aa, Zea mays
  Coding DNA Sequence Number=SeqID_28149
  Gene Ontology: Mol. function=protein transporter activity; Cellular component=mitochondrial inner membrane; Biological process=protein transport
  Homolog annotation: Hit_ID=A7QES3; Match level="QueryCoverage=81%, HitCoverage=95%, E-value=6e-54, Identity=51%"; Hit description =Chromosome chr16 scaffold_86, whole genome shotgun sequence
  Pfam annotation: Domain name=SAM_1; Domain location=225-286; Score =22.1; E_value=0.00093; Accession=PF00536.21; Description=SAM domain (Sterile alpha motif)
  Pfam annotation: Domain name=Tim17; Domain location=50-193; Score =8.6; E_value=9.1e-05; Accession=PF02466.10; Description =Tim17Tim22Tim23 family
  Pfam module annotation: Pfam domain module=SAM_1::Tim17; Domain location=225-286::50-193
MADGKRGEDSAVALKTSPSSAVMAGGLRGVSNPLEEWSGRVKAIEAGFRAWMAKQPIQIEAAVTTAVGAVQGGALGGLMGSLTADGGSPFPIPQPPPNANPEAMASFKQAQALAGGPLVQARNFAVMTGANAGISCVMRRIRGKEDIQGSMAAAFGSGALFSIVSGMGTPNPVANAVTTGVAFAVFQGGFFMFIAISSLREIELETGMLSYLWKIGQKFSKPPSEDTYYSRTRSMLHKLGLEKYEKNFKRGLLNDQTLPLLTDSALRDVKIPPGPRLLILDQIKRDPELVQAK

SEQ ID NO: 71525 - protein, 887 aa, Zea mays
  Coding DNA Sequence Number=SeqID_28150
  Gene Ontology: Mol. function=nucleoside-triphosphatase activity; Cellular component=chloroplast; Biological process=protein metabolic process
  Homolog annotation: Hit_ID=Q6H795; Match level="QueryCoverage=88%, HitCoverage=91%, E-value=0.0, Identity=75%"; Hit description=ATP -dependent Clp protease ATP-binding subunit
  Pfam annotation: Domain name=AAA; Domain location=285-494; Score=6.2; E_value=5.2e-06; Accession=PF00004.20; Description=ATPase family associated with various cellular activities (AAA)
  Pfam annotation: Domain name=AAA_2; Domain location=582-756; Score =343.6; E_value=3.4e-100; Accession=PF07724.5; Description=ATPase family associated with various
  Pfam annotation: Domain name=AAA_5; Domain location=586-756; Score =22.3; E_value=5.9e-05; Accession=PF07728.5; Description=ATPase family associated with various
  Pfam annotation: Domain name=Clp_N; Domain location=174-228; Score =12.1; E_value=0.052; Accession=PF02861.11; Description=Clp amino terminal domain
  Pfam annotation: Domain name=Clp_N; Domain location=88-138; Score =21.2; E_value=0.0039; Accession=PF02861.11; Description=Clp amino terminal domain
  Pfam annotation: Domain name=Sigma54_activat; Domain location=556 -678; Score=-185.6; E_value=0.066; Accession=PF00158.17; Description =Sigma-54 interaction domain
  Pfam annotation: Domain name=Torsin; Domain location=535-785; Score= -179.8; E_value=0.035; Accession=PF06309.2; Description=Torsin
  Pfam module annotation: Pfam domain module=AAA::AAA_2::AAA_5::Clp _N::Clp_N::Sigma54_activat::Torsin; Domain location=285-494::582 -756::586-756::174-228::88-138::556-678::535-785
  Subcellular localization annotation: CTP_CleavageSite=83; ConfidenceScore=5.21e-01
MEVCCCSTSSSVLTAGGRGAAARRLAAPAARWGAAGFGRAVVLAHPLPRPASAAAAAPTRRARRGGVGVVRAVFERFTERAVKAVVLSQREARGLGEPAVAPRHLLLGLVAEDRSSGGFLSSGINIERAREECRGIAASARDADSATAASRPGSSGLDTDVPFAAPTKQVFDVAVVLSKNMGSSFVSPEHLAIALFSLDDPTTNNLLRRDPAEPSSFKVPKKAPAAAGRSAFSQSLTKKKDKGALDQFCLDLTTQASGGFIDPIIGREEEIERVVQIVCRRTKNNPILLGEAGVGKTAIAEGLALRIANGDVPIYLVAKRILSLDVGLLIAGAKERGELESRVTNIIREVREAGDVILFIDEVHNLIGSGTVGKSKGSGLDIGNLLKPALARGELQCIAATTLDEHRMHFEKDKALARRFQPVLVDEPSQAGSRARMESFNRKKEGQSSILLKSPDEYWQEIRAAQAMHEVVLSNKEKYSPNENAEESGSANVEALHRDNIESTSTSSLSADEPVVVGTEEIARVASLWSGIPVQQLTADDKKLLVGLDDELRKRVIGQDDAVVAISRAVKRSRVGLNDPDRPIATLLFCGPTGVGKTELTKALAASYFGSESAMLRLDMSEYMERHTVSKLIGSPPGYIGYGETGTLTEAVRRKPFTVVLLDEIEKAHPDIFNILLQIFEDGHLTDSQGRRVSFKNTLIVMTSNVGSTSISKGRQSIGFLKEDTESGSYFAMKSLVMEELKAFFRPELLNRIDEMVVFRPLEKTQMLAILDIILKEVKGRLLALGIGLEVSDAMKDLICQEGYDKSYGARPLRRAVTHIIEDVISEAILFGEFKPGDTILMDIDAEGKPCMGHLDQQIVQKHGHGHGHTHQVTGSSSPPVRLFELA

SEQ ID NO: 71526 - protein, 309 aa, Zea mays
  Coding DNA Sequence Number=SeqID_28151
  Homolog annotation: Hit_ID=Q6J9V9; Match level="QueryCoverage=38%, HitCoverage=40%, E-value=2e-32, Identity=60%"; Hit description =Putative uncharacterized protein
MPRLLGTIEPVQRLEAAPRMTQQCQLRVTVMGQSSVGIDVTAGMTIGGPAIIAATGGGSGPTTNQALVPPAGSHPPLKRQGSPLLQHKDDTPMFHSSNGSRTRNRYPTSRLSRRINSLAGHTSPLAGGRASLCLRHDDCLKKGFGECPRALGLRALLLIRGSKAGPSKGFDSRPRTCRVRDDPGYTRYTAKARATLPRYPKTFPRPAGTICNGIPPKEGTEPSDPIEWVRVQRITCRVRLTTVSHDFSRVQPQAQQRAPPRPTPGLGLGLGRRSPPRPTPTPGLSLGLRRRSLPHPTSVSASGEGLRHA

SEQ ID NO: 71527 - protein, 266 aa, Zea mays
  Coding DNA Sequence Number=SeqID_28152
MARRRSQKNKKTKENTTQKEVALTVSSAEATTSAVGSLTFGGHHHLSTDNSGHLRTNVAPANGGCPSSHKEVLAPVVATGVRTRPSRNVDTAPRRTMSYMTPGVAGGAGQAMDVADLCTARPSPVRWTNSHIPTRQQVAVRLLRKAARMMNILEVEGGREATARLALLRHKEEEGNAGAPHLEAWKMERCDEYEKSKGMATTREIDPFLKTDLPTRAPKHHGQRLPRRAPGFPPYDTGARSHMSYKLTRNTKMANRYTRSMQPPCG

SEQ ID NO: 71528 - protein, 390 aa, Zea mays
  Coding DNA Sequence Number=SeqID_28153
  Homolog annotation: Hit_ID=Q6QP51; Match level="QueryCoverage=40%, HitCoverage=68%, E-value=2e-23, Identity=48%"; Hit description =Putative growth-regulating factor 1
  Subcellular localization annotation: CTP_CleavageSite=48; ConfidenceScore=5.29e-01
MAQGHISLSPGLGLGLSPRRRRTPLRPTQGSDSGSAPEDGELRSARPRARTRAQPQKTTNSASPDPRARTPPWPLPNDLRLARPRGSDSASAMEDRLDLGFGGASTSPDLGHRPATSTGSAIITLPRADSGRREQDRLRRSSDSHDTTPAGCQDLSGCHIGMALLERVGRVGTRTRQALSWGRSLPSPAWTLVTPYCKRTRPGRGTNTKAAGFPPLSRPSPATSLPPFALAHALDPSGLGHAAHSLVGLGTPPGRSDRSHFAPLLIVLTGKQHYSPRSDYCANHQVKTNNSESRLLPSSASGATGSSVLPDPRPRPREKVSASPDPDLRPQPRPREKVSATPDLCLGLGRRSPPRPTSASGSGRVTTSPDPNLGLGPTTLQEIHHYPTSS

SEQ ID NO: 71529 - protein, 112 aa, Zea mays
  Coding DNA Sequence Number=SeqID_28154
MVAAACETASVLTHCLGSKLMVIGPVKVKIKMMAASGIHVLLPVSCEQELDLVVSRLGLLVTGHEDQGIPCPSTRGACYRTGLRPVVLKAYNNGYTYRDGRYSHICVTNGTS

SEQ ID NO: 71530 - protein, 129 aa, Zea mays
  Coding DNA Sequence Number=SeqID_28155
MQAKLDEETRRLISSDKTSSKSGQAERSPEERVIGLGTSSAALLTMPGAMLPPAFNGAGQNLAAAAMLLRTMPERHLPPRGGVSRANSRTSWKMSQPDGPRALPPEGEDAERITMPKRGGELGFSKNQH

SEQ ID NO: 71531 - protein, 41 aa, Zea mays
  Coding DNA Sequence Number=SeqID_28156
MANSISRSGGIPGNSSGKTSAYSQTTGIFFRGVTIMNDPLE

SEQ ID NO: 71532 - protein, 93 aa, Zea mays
  Coding DNA Sequence Number=SeqID_28157
MSEVLSPHNSRLHHGQSTTEQGFIPNTADNSTTTIEDTIHQPSRNYTNFSKKYAQSEELHYQKVELQRKPKADSKSSKPWNRGLQQEYHRQHH

SEQ ID NO: 71533 - protein, 145 aa, Zea mays
  Coding DNA Sequence Number=SeqID_28158
MTVSEIRLVCSSVKLYRCQRKRKTIKRPSIGFKQRSKGQSKAPLVWRTGQSGVPPDMSGAPDDSDSKLLTFGKFQRQLRYNSPDCPVYTGHVRCSKEERPPELASLGNSLRLLRYNSPDCPVYTGLSGVTAGQQLFRHQRLPATH

SEQ ID NO: 71534 - protein, 54 aa, Zea mays
  Coding DNA Sequence Number=SeqID_28159
MGIGCLRDGKIGIRIKVWYRSLEDMVAGVTWPSILPPGWTVEWDPTSAEEEHEE

SEQ ID NO: 71535 - protein, 193 aa, Zea mays
  Coding DNA Sequence Number=SeqID_28160
MPSSSSSAANTPPADASSEDTLSNVAAEELHSGDTMEFGISWISSVRVQDMQQLGYFGSGVGRVPGTEEIPEPEGELVVFEAFFTAGLRLPAHRFVAEVLQRFEDFWFYVSEGEVEDHPGLPVVMMCSHYYVTYPQFEVAEDDEDEGALRCTARMSSGRDLVEEFIGYGVWPLAHGWALGEVCPREMPSLGGQ

SEQ ID NO: 71536 - protein, 324 aa, Zea mays
  Coding DNA Sequence Number=SeqID_28161
  Homolog annotation: Hit_ID=Q6J9V9; Match level="QueryCoverage=20%, HitCoverage=33%, E-value=3e-07, Identity=45%"; Hit description =Putative uncharacterized protein
MAERYQLPRSCVPLTTRRKDCGCPPSGGSEGGKTRCIREREDMVAFQGGHPPFKGDSPYLHPQMSWAESSPTRSKVLPLWRGGWVPRVMQAGPEQKKPNRRARCMQPPSGYEHSFTFRPDQRAKGRAAMQAACNRAKWARPSDFQRTPAWGPTPTGHATGAPVATCKQLHRHSRHCHASSTAEPAGRSSGHVVGQAHVPSRGSERTLSHGVKTACQGSKRRFAFAIMTASKKGPGKGDTPKRILLREGNKLRASLLIRGSKAGPSKGFNSRLRARGFCTHYWSEVRRPAPRKGSTTASGHSGFPPTTDQGFAGWPSKGSQPPQT

SEQ ID NO: 71537 - protein, 58 aa, Zea mays
  Coding DNA Sequence Number=SeqID_28162
ASFAHTPARSEYSEEGARGEPRATVPPPEKLRGPPTRPIRAKTPPPLLSVRRHVACGV

SEQ ID NO: 71538 - protein, 88 aa, Zea mays
  Coding DNA Sequence Number=SeqID_28163
MAELGSQEWDEGGQMMEEGLGQTKECSSKQYTPQLMGDNPLHRCRHFNTPGFSCSVEEIGRICKWTHGHHMAKSEFQWNGVNFGALYL

SEQ ID NO: 71539 - protein, 92 aa, Zea mays
  Coding DNA Sequence Number=SeqID_28164
MELLLATLELLRWLLLPWEDSCARRSMRLTRNERFRQINIRYLRTSYSIYPDNRAGLIGDPEIRMISHNMIHQGKDLPDSDEGEVGKQDLLG

SEQ ID NO: 71540 - protein, 113 aa, Zea mays
  Coding DNA Sequence Number=SeqID_28165
MGAKSAWGQQRAQNTARRPTTARINSGEEFRGHWGGTWRNKATERLGNGRDAMEPQVDGGGLRLHGEDSGERGPNKLEGLGANRGVSQATGGAAELTEETGATRAQRRPWNGR

SEQ ID NO: 71541 - protein, 138 aa, Zea mays
  Coding DNA Sequence Number=SeqID_28166
  Gene Ontology: Mol. function=catalytic activity
  Homolog annotation: Hit_ID=A2Y3P0; Match level="QueryCoverage=92%, HitCoverage=42%, E-value=3e-31, Identity=51%"; Hit description =Putative uncharacterized protein
KQSYVVACIAMYDKLPRSRRLDAVRSSCTALSIVKQWGLMVVANVDDSRVVLNTTSDDDRVRWCNGQGYYLADEPGVHFVWQPDQESSVLVMSHAFDDYYIEDCGVILAPEVTQRKIDNSDRFVILAIVRVAFVPVCL

SEQ ID NO: 71542 - protein, 263 aa, Zea mays
  Coding DNA Sequence Number=SeqID_28167
  Homolog annotation: Hit_ID=Q7XBD4; Match level="QueryCoverage=17%, HitCoverage=4%, E-value=5e-08, Identity=59%"; Hit description =Cinful1 polyprotein
IRVEEFVSIVEATASQAKGGSVSPSKDRDKLTLRNTTLSYVLWSQAMWTLANLTSKEDILRFFYPGYPNMVQDSKKRKKKIAPEAKVAAEIEELPSMSVEEAKIKEVIALISQRVPLELLPESEEEEDERIAPMMSSFFDVDEDETDEIDIATVTPSLIMVVEEKGSSKPTLAEDKGKGPAKIEEAKKSTEDDTPLAEGPFDQDLGGRRRLLYCCPENMETEVCRYMADNIGFPKLEAMLSSMSSEDFSDCFAYTYLKYDLME

SEQ ID NO: 71543 - protein, 171 aa, Zea mays
  Coding DNA Sequence Number=SeqID_28168
MALGDDAVDDDGKDHNDDSTYKVAYSADGLVVEVEELMTTLASQDKLLRLVARERKDFKSKYESMFRELEYARVSIVVSDETDRNKCALHTSNITTLQTKYATLLDERDELRYKSSLLALSAAYHACRDFGKLGMYMPREGKDKGSFGFGMKACDMRIQPEGNMDGRRSYG

SEQ ID NO: 71544 - protein, 190 aa, Zea mays
  Coding DNA Sequence Number=SeqID_28169
  Homolog annotation: Hit_ID=Q8SA91; Match level="QueryCoverage=48%, HitCoverage=4%, E-value=1e-07, Identity=37%"; Hit description =Putative gag-pol polyprotein
MWKKVVIESTCFKEGPMVWSIGMMVVNEGEGHAGHGRAGRVDTCLGHGGRTHNMILRMVWWLNLEKTPSATDDRFSIKFGLKTRRWHFRWESEVAHGIITEGVSRRSNFVLSVWPSYTIVKTLNLMAYELGLPAGTTIHLVFHVSQLKLVIGTITRVPKEILETHLIRRAAKVTTQFLIKWIGCHHSLAT

SEQ ID NO: 71545 - protein, 128 aa, Zea mays
  Coding DNA Sequence Number=SeqID_28170
MTKKNRNDIKLQMYLRLERSSPAHSFGSAPTFVFFVLLHTVVLIRVRRYLFMYYTPKTLLNHVFEDLRKMKAPNMVDEEFDRCDRDENYMPFTTTHQDNTIQMGDDEGEGDMNNIQGQIVNALFARRM

SEQ ID NO: 71546 - protein, 84 aa, Zea mays
  Coding DNA Sequence Number=SeqID_28171
MACLVEAAPHTGGAVGKAASVVPHAMDRGVASSARDANWICHAATNWSSHAVVNCITYGVSYGRRALFRSWFLPFASPSVRNPG

SEQ ID NO: 71547 - protein, 143 aa, Zea mays
  Coding DNA Sequence Number=SeqID_28172
  Subcellular localization annotation: CTP_CleavageSite=31; ConfidenceScore=5.18e-01
MDGVEGILFIRAKTHQPSTVVPQLARWRSLTGASVPHLRPSSSNGSIAIGRGNNEGRHEEVLTGGNDVQRPAHGGFVVRGGAGFPARNSWGVRRGFRGGGARCNKLPKKADLGWCVEIDPAEGKELMTRPTWRREGRLCASEW

SEQ ID NO: 71548 - protein, 65 aa, Zea mays
  Coding DNA Sequence Number=SeqID_28173
MEGLGQGEEGGAGQGDELSTGREVLRCTGGRDARAMEGSSAAMELLLATLELLRWLLCRGRLLRE

SEQ ID NO: 71549 - protein, 52 aa, Zea mays
  Coding DNA Sequence Number=SeqID_28174
MDLTIGRTWRREGKLCAAEWESDVIVDITPQLITLNQRSKSDKYHKNKHSSI

SEQ ID NO: 71550 - protein, 82 aa, Zea mays
  Coding DNA Sequence Number=SeqID_28175
MATAAACPAPPPFLAGGGGRHVDRCSKIRRRRLEDVDTCSCVGLDRLFAIGRVVSNPIYVKPGPLDRDPAAINAYQFCAGQI

SEQ ID NO: 71551 - protein, 254 aa, Zea mays
  Coding DNA Sequence Number=SeqID_28176
MRLGVCGLFCQGGNEDDGYDYAYGNGEDEVVEEDFQEFQDHLERLHHRLHKEQERQQQELEQQGSSSSLQQEVESVMSCSPMPPLEAPPAPPLGVPADGLAAGGDPDDGDDDSSSSHNIDLLEEQEPEGWVARPITRDAARGCHFHDALDTLLRQALDRQNSLWGAEVCSEHYSVSERDLAEAVMQDAARRALSHYCSVFGGVVDGLNLSTVNLATMLNMELDHALDELSRARAEHGHHAYGNPDCRTRINLEP

SEQ ID NO: 71552 - protein, 198 aa, Zea mays
  Coding DNA Sequence Number=SeqID_28177
MDQPTPTTSDANPYLYVTAVTSPTSLDASPELSRRRYGGYKCGHCTTAAGVSGALYAKAKGANLDDFTHPINGGDTRFSSDYLFHEGFPSILWEVLYSAGYPTPLSIRCNYTRSIGCHVPSWRSLDSKTIGFRADDTTEDAAMKTLTTFYGYHPLEMVMHPLVLFPVEKRDDPMWCNRVSHVKDVWAMLSDQVGRITV

SEQ ID NO: 71553 - protein, 607 aa, Zea mays
  Coding DNA Sequence Number=SeqID_28178
MPTLGDQLVRSPAFVVDLLGRNATAFVREVKAEAAKIVGKYVPKTKTLRSWDIRGSNVRLNRVFELNRLPYTGYPGDDYADVAVRHGEKGDDNDGQGPFARNSTRRGHQEEEIRQNVGDVVSAVMEKDRQDAPRKRWAFARLADLRREAKMARPSAKPAAPGASMPPPIAPTHEQRLPSPPRAAEAAVAGAEASMDIFVDDYLVGGVAMFDAHTGLAPAGAESGQLAVVPVAVAAGLVAVATVAKGSSQDPWSKFCAGDKIASVVATKDVVASVAQQLKHAIRDKSVVENRSRNLLEKLTAAEAEKEDLSRRLAALRGDAEKARAKAQVARAEASHALKCATDVESGLKSLRGYMDKTEASTRATGVRPSTRHCSWMRTVSLEELETLPSIATGLMSYASLVTCEGAANALSHEGCRHFKVFDRVTKDFGHGIFQVGDEVLKSPLGRFMIGCGASHGRDTVRERADRALEQMLNDKEVENFSGLESSVTHIEDAKTGAEEQRAPQADPSRDPAAAATPAGEDPAAAAAPSQVPTSGPTQATHIDIDINFVVAANAVPVNGNSSGSKTESWSSDGDDFGSPFSWIEESYDEDLDYFAALDVDAAGSLP

SEQ ID NO: 71554 - protein, 136 aa, Zea mays
  Coding DNA Sequence Number=SeqID_28179
MAMALADDFWPLSKPKPPILAATNGTTSRETWAWDEFAGDHGGRGAGSVGVGAIDLTAWSHRAETSGEAKHLQPLAARARQAVAHDSFVRADKNCEAGVQVPHVCSCYDEHMTHKSKEINYILIVYIFGYYKSYPP

SEQ ID NO: 71555 - protein, 249 aa, Zea mays
  Coding DNA Sequence Number=SeqID_28180
MALPVDVAGLCPRQGDVGAPPKPRLSLSSVAEAESEPWGRARRRSFGRGQGGVRALGSGEAEFRRLPGLSPSPSPGVRRSGVRRLPGLSPSPSPGVGRSGPESEPWGRAERSSVVFRVLARVRALGSGGAEFAVFRVLARVRALGSGGAEFAVFRVLARVRALGSGGAEFRRLPGLSPSPSPGVGRSGAALSFCQTGQWSGGVDGGHFGSAGGARVRIKGCFLSEAKASGEPVMWSAVKRGPRRDEPQS

SEQ ID NO: 71556 - protein, 70 aa, Zea mays
  Coding DNA Sequence Number=SeqID_28181
MDRAILAIPAVEPYIAVTARASPSQPAPRRTYLAAGSLEDMVAGVTWPSILPPGWTVEWDPASAEEEHEE

SEQ ID NO: 71557 - protein, 98 aa, Zea mays
  Coding DNA Sequence Number=SeqID_28182
MVVGSFRVFPGCWIMATGKGMVSYLYTETIIARKIRVSGRSPEVSVDPFAIVPSESNREEDPTVEGVPQVATEWGGTHASRTGSTSQCQVYVRASFGE

SEQ ID NO: 71558 - protein, 47 aa, Zea mays
  Coding DNA Sequence Number=SeqID_28183
MASPWANSTATCVGLGEKEEMWGSSISVLTVMIIAPITGLARNSTIF

SEQ ID NO: 71559 - protein, 118 aa, Zea mays
  Coding DNA Sequence Number=SeqID_28184
MATGATRGKVPPQGDDGGQRPYTTATPRGHRGNHLLELRKERNVGGLRIKSDTKRLRKDRMWAYMKAWDLRENRSALSQDNCPEMFSGHGMNLGDITRDVISGEMNKQSEKINKRVPT

SEQ ID NO: 71560 - protein, 46 aa, Zea mays
  Coding DNA Sequence Number=SeqID_28185
MAMMGSTSEKMYLCQVKKQQTFVASVPRWCPKKKIKTKAAGGRVLH

SEQ ID NO: 71561 - protein, 109 aa, Zea mays
  Coding DNA Sequence Number=SeqID_28186
MELPLDAQSSGRRLDVDERVEQCRAVAGVLHVLARFVQVLQMQHLRGHISNTRTGGEGAQKLRVPRKYRRIRFIAVRGPAVETLPYVSTGVAQGLHPAMPARPRRSTVY

SEQ ID NO: 71562 - protein, 223 aa, Zea mays
  Coding DNA Sequence Number=SeqID_28187
  Subcellular localization annotation: CTP_CleavageSite=45; ConfidenceScore=5.40e-01
MTGRSPFPTSSTATPISGDSFPPLPLSYEAALTAPGSVRAPTPILVAAVAPPPPLAISAAPQQALTESTSPPTSAPPSSTSLQAPTPTTAALHPGFPSSALSLPDAALFRSQLLAPGFLLDMPVWAPRQYAETYRRLTGKAFRMALPRLLDTTPTPSSQWPPQPLPFAPLFMLRRRPSLASRPQSPTSSRRTPLSTLDGVTRSCRPCAATPSQTTSSLRSLTR

SEQ ID NO: 71563 - protein, 130 aa, Zea mays
  Coding DNA Sequence Number=SeqID_28188
MLSTPCCIEPSTDTLDPSSTADGLDLKYYPRRSTDSAGGVIASPVSEGNPRLKSMVNLAVVLNTELDHALDELGKVRAEVAELRTECAARHYLDGGSPTPVGIQHPYRSPPCGHFDYGTPYCRTRIDLDP

SEQ ID NO: 71564 - protein, 82 aa, Zea mays
  Coding DNA Sequence Number=SeqID_28189
MVVQGASLAEVQRKAASQTPPPAEARGKSHAAPAPGVGAPAARADNDAVSPGDWTDLAPCDTVDAPPGEKAKRGSQTYVQCT

SEQ ID NO: 71565 - protein, 469 aa, Zea mays
  Coding DNA Sequence Number=SeqID_28190
  Homolog annotation: Hit_ID=Q6JAD6; Match level="QueryCoverage=66%, HitCoverage=60%, E-value=1e-117, Identity=68%"; Hit description =Putative uncharacterized protein
DLSCLHARLRANLDSLFLVSTQVRMVRTKNVSAPEGGDNEDPPRPFRQVKGKTMYLEQQEGQKKRERDETEVRPLAADPRLLDLQRATAAGTQKSFFRALLSAQIALRAHRLLDLPAFLLAAGADSEVHLSYLPGLLSLLTASGRYIEEWVRVFYATVWIVIDHQWMMFRFEREDVTLHASQICRLFGFPESSIRLHSLCYGTLDPPRRPHGRVAPATAHAAALFRPPFTDGSRSSPADFTTAAKYLYELMRRTLLPRMGYRETTTHIQLWLLGALISHSKFDVVDFLICEIEDTILDGLHAHRQLPYAHYLCHIFAQLIRLPQFQGTLEASRLYAAPAAPPAIDPALAAILQSLTEQQAHLAAEQAAVVPAIQAGPPLPPFGPSPSSLWSVTLDFSSPVVGTVSAQPPVPPAPTVTTVVVAVSVTAPAPADPASQPLLESVPAPASTANPGSETDSDPQLVFVFLPRP

SEQ ID NO: 71566 - protein, 46 aa, Zea mays
  Coding DNA Sequence Number=SeqID_28191
MAMMGSTSEKMYLCQVKKQQTTVASVPRWCPKKKIKTKAAGGRVLR

SEQ ID NO: 71567 - protein, 282 aa, Zea mays
  Coding DNA Sequence Number=SeqID_28192
  Homolog annotation: Hit_ID=A2GBN7; Match level="QueryCoverage=88%, HitCoverage=32%, E-value=2e-07, Identity=28%"; Hit description =Putative uncharacterized protein
MQELGHGKQRRLKARLLRDILEPDTLSKSAQSSPGGHFRNPSMPRGYPTVISKKADVPPHHSVIFLKVTCEAGYHSALPLKRRPRVQSLGVASKMPKPTFNHSALPLKHRPRVQSLGVTSKMPTPTFNHSALPLKRRPRVQSLGVASKMPKPTFNHSALPLKRRPRVQSLGVASKMPKPTFNHSALPLKRRPRVQSLGVTSKMPTPTFNHSALPLKRRPRVQSLGITSKMPTPTFNHSACPLTRRPRVQSLGITSKNADADLQSLGVVSKTPTPYSVARHYF

SEQ ID NO: 71568 - protein, 267 aa, Zea mays
  Coding DNA Sequence Number=SeqID_28193
  Homolog annotation: Hit_ID=Q8H6I2; Match level="QueryCoverage=78%, HitCoverage=100%, E-value=5e-81, Identity=66%"; Hit description =Putative MURBZC
  Pfam annotation: Domain name=Zea_mays_MuDR; Domain location=65-267; Score=-38.4; E_value=0.0071; Accession=PF05928.2; Description=Zea mays MURB-like protein (MuDR)
MSMPHPVTGENFAIMAPPRAGFRNMARPSPQLHSWHYNLSRFEHLASDPGFAQLEAAMEPAAELCSQKLSAAVDAALDTMKASSTACMVAGDYCATFSLGNDVVSTLDVLESAVAAEKSAMSSYSQASAAVDCAKETIAKYCEVNQKLAQALRYSLSLMSDTAKKLQETASLCYTDEDVVDGFNVTQVARSLDELAETLEVTAIDCQVSMMDPTTILEAGYGSEDSAVWEDVFRDREIMNQPLEVETTTEHCAKWGLNYNEIRDRSV

SEQ ID NO: 71569 - protein, 150 aa, Zea mays
  Coding DNA Sequence Number=SeqID_28194
MKSRFQKRREKAGSSYDPLVIEDFDWDNEWIDSLVVHPGSDNDDNALTWDHVDVAIGASESLQGRNLPRQARQTQTYTRRARMRTQVEDGEEAHDSSVDDIGVDPEDDIDVSDDDEANGGEEGGQDNVDPTVDEFDDGYRKLRLESLRLH

SEQ ID NO: 71570 - protein, 231 aa, Zea mays
  Coding DNA Sequence Number=SeqID_28195
  Homolog annotation: Hit_ID=A5ASU7; Match level="QueryCoverage=69%, HitCoverage=33%, E-value=5e-09, Identity=27%"; Hit description =Putative uncharacterized protein
  Pfam annotation: Domain name=zf-C2HC_plant; Domain location=37-92; Score=46.0; E_value=1.3e-10; Accession=PF07567.3; Description =Protein of unknown function, DUF1544
MESAGSVGGGQTDVAGTSSADAYDPMADPKRRAKSNDPGWKYGYWTEIGNRDKVTCNLCKTVTTRGIKRLKEHLAGGFVDTLMCSKTTTEIGKEMKAYLDKNKRYRPIFLAVGHEQQGQQDTTSVHQPSSGTAAKRKRAAFQFRTAAPQPSNMEKEKGKVATMLRRTPKQVVDDRRSSGSHQTTIEAARYVAELRSCFNDVLARMEPDEEIRSKIDEYAMHYEDRRVTYLF

SEQ ID NO: 71571 - protein, 455 aa, Zea mays
  Coding DNA Sequence Number=SeqID_28196
  Gene Ontology: Mol. function=nucleic acid binding; Cellular component= transcription elongation factor complex; Biological process =transcription-coupled nucleotide-excision repair
  Homolog annotation: Hit_ID=Q5WMW4; Match level="QueryCoverage=93%, HitCoverage=49%, E-value=0.0, Identity=86%"; Hit description=Uknown protein
  Pfam annotation: Domain name=DEAD; Domain location=31-203; Score= -28.1; E_value=0.0053; Accession=PF00270.20; Description=DEADDEAH box helicase
  Pfam annotation: Domain name=ResIII; Domain location=27-197; Score= -11.4; E_value=0.00044; Accession=PF04851.6; Description=Type III restriction enzyme, res subunit
  Pfam annotation: Domain name=SEC-C; Domain location=308-328; Score =13.8; E_value=0.029; Accession=PF02810.6; Description=SEC-C motif
  Pfam annotation: Domain name=SNF2_N; Domain location=33-370; Score =231.9; E_value=1.4e-66; Accession=PF00176.14; Description=SNF2 family N-terminal domain
  Pfam module annotation: Pfam domain module=DEAD::ResIII::SEC-C::SNF2 _N; Domain location=31-203::27-197::308-328::33-370
MPPQVKTFPAAAATSSDPNRWVPPSINCRLLAHQRDGVRFLYNLYRNNHGGVLGDDMGLGKTIQTIAFLSSVIGKGNGHGQSTNKGKMTGPVLILCPTSVIRNWENEFSEWAEFSVAVYHGPNRDLVLGKIENQGLEVLITSFDTFRIHDKVLCGISWELVVVDEAHRLKNEKSKLYTACLGITTQKRFGLTGTIMQNKIMELFNLFDWVVPGCLGDREHFRAYYDEPLKQGQRLSAPERFVQVADARKKHLVSILREFLLRRTKEETIGHLMLGKEDNIVFCKMSDVQKRVYRRMLQQPDIQILINKDVRCSCGSPLPQVECCKRTEPDGVIWSYLHRENPEGCSICPFCLVLPFLVKLQQISNHLELIKPNPKDELEKQKKDAELAAAVFGADIDLVGGTAKSENFMGLSDAENCGKMRALERLLSLWTGQGDKILLFSYSVRLFIYALTFSS

SEQ ID NO: 71572 - protein, 145 aa, Zea mays
  Coding DNA Sequence Number=SeqID_28197
MEGTTVEVEQQKWSVVARAQAQSMRTAIVGGSEQDTYARERARALNQNQGAMSREKEMISSLNCSSQDVSLYEESPQVGVSHPYNIDHNENHESKGGKETQAKARVAATTRTQVKKRAHKHSATSSQLDKCSISITMIQMGACGV

SEQ ID NO: 71573 - protein, 118 aa, Zea mays
  Coding DNA Sequence Number=SeqID_28198
  Subcellular localization annotation: CTP_CleavageSite=15; ConfidenceScore=5.39e-01
MSSPRPGHRCQGLLRESGSSRRLGWSPRGLGRSTPASVPLTDDPARLRPTKSSFRANSASVRADTATPGFGSSKSGQGVPLTKQEKPRTTRLTEPRDSYASGIRIPHSSPLHGATHAW

SEQ ID NO: 71574 - protein, 375 aa, Zea mays
  Coding DNA Sequence Number=SeqID_28199
MVVIPTHKNSWPNNPRVVGIGNDHEVPLFDDGQRGAAALDRVQAVAAPELAVHSGACGYVGLLPEVELAVAKLLLIVDEQRERLVLVVFVRVFHLSAEQLNGNATLSCLPPSASAACQLPDLPRVPSPPSSPSGDLLEFSSAGAMRRVFSTGDLRGAEERREKIERYRTKRNFDKKSRRSITEDAGGQQAQGAGPLREEWRDGGRAGFLQATRGRPSAAATSTATATAATSSPPPPPPAAAAATPNAGEVASKPQQHLTTASGGGKRRWPLQLRSGILRAAQRWTDADRVPVPQITVHAEAVAWRRRLPLVPAGRLSFCCWLGRRHQRIGSKTAGETPAQQPSGLARACGRGLVGVGLVDLETRGGPDVPRRIAK

SEQ ID NO: 71575 - protein, 304 aa, Zea mays
  Coding DNA Sequence Number=SeqID_28200
  Gene Ontology: Mol. function=aldehyde dehydrogenase [NAD(P)+] activity; Cellular component=chloroplast; Biological process =aldehyde metabolic process
  Homolog annotation: Hit_ID=Q67B30; Match level="QueryCoverage=100%, HitCoverage=57%, E-value=1e-101, Identity=61%"; Hit description =Fatty aldehyde dehydrogenase 1
  Pfam annotation: Domain name=Aldedh; Domain location=1-260; Score= -258.8; E_value=0.001; Accession=PF00171.13; Description=Aldehyde dehydrogenase family
MAAASRHLTPVALELGGKCPCIFDAMGSARDLQISVNRMIAGKWSSCAGQACIAIDYVLVEERFAPILIMRERLHLTYFSLALKIKVLKSTLKRFFPEADHMARIVNERHFERLSNLLKDSDLPTAGFLCVDRDRGVTVLSRNCPRYIEPTILLNPPLDSAIMTEEIFGPLLPIITVKNIEDSIAFVKAMPKPLAIYAFTRDAALRRRIVDETSSGSVTFNDAVVQYAIDGLPFGGVGQSGFGQYHGKYSFEMFSHKKAVMKRGYLVELTLRYPPWDESKVTLMRYLYRFNYFAFVLSFLGLRR

SEQ ID NO: 71576 - protein, 161 aa, Zea mays
  Coding DNA Sequence Number=SeqID_28201
MGKNNKRKREPTPPSEEFGDSEYLEEEFSSESEGSPAPVPLRETSDDSDDSQGLAAEVWTYIQAVERSGLEGSDESEYSLDEEDSDGGGEDDDDDGGDDDGDGDGDGSGSGRGSGGGSKVGDGGGSRGSNQGGSSRGSNQGSSSRGSTRGGGSGGSNRASG

SEQ ID NO: 71577 - protein, 133 aa, Zea mays
  Coding DNA Sequence Number=SeqID_28202
MKRHPGVRVVRSRSEGGSEESEGSEGVRAVRSRSDGGNQTGKDERLRVALTGGPRPVRRACAKQYPTVRVVRSRSDGGNQTGETDVREAALLLTAAVRSPELRQVQARVAPGSPKLGREGEGATANSMAGKRS

SEQ ID NO: 71578 - protein, 312 aa, Zea mays
  Coding DNA Sequence Number=SeqID_28203
  Subcellular localization annotation: CTP_CleavageSite=51; ConfidenceScore=5.07e-01
MQPGCTPPPAVTQDSDHQLDGGEKRTGLLPPPRPQLQGSSSPLLGRRADSRCSARVQHSVLRPDDGCAACGPAMSRPSSRQQPHQWFAQHVVCREGGAHVLGGSGEGEDLPVRSEASGTRWRGAEVVAAGEGFSVNEIANSARTPGPLSSGLNGWFSSSVNESPRAVAPARKPLLKLLRRPGRRSSLLLPERATASHLSAFCCSAGPSPIEWGCSYLRRWNRSSVCNGTSNASVFVHCGCRGLNESLGSVSLVVRGFPCLVRGNPRPLFDEPRPGSGDPWTASPSEARSDLARGVVGAEGAAAPFSRQDPSL

SEQ ID NO: 71579 - protein, 75 aa, Zea mays
  Coding DNA Sequence Number=SeqID_28204
MINPKKVVAQRDLRQHTQEPRAARCLSKVSIHSIHLEETTNQAKDGSKKSFEAPRAREKVKETRNPKARGEEEDL

SEQ ID NO: 71580 - protein, 150 aa, Zea mays
  Coding DNA Sequence Number=SeqID_28205
MALSPLLLAERRRRGVCKKVESVPDRPLALCRGSGAALANPAPAKPLTASTYQPENLGPDRISPFEGLDHASPKPSLGQGQPTPEDLRLARGPPPAANTFPARVRPCLRQEATPTKSQEHLMQRWPDTFILTRAPQLTEPKVTAVTSPLH

SEQ ID NO: 71581 - protein, 122 aa, Zea mays
  Coding DNA Sequence Number=SeqID_28206
MDNAAENGPAVMAVAGGQEQRSRRGASGKRNERRFRLRHNDRVKKGTGKRGIPRKGPFPVKETRLPSLPTDQRFERLAPRKGSTPASEHVGSTPHYWSEVQKVGPSEGFNGRLRLLGLRAHY

SEQ ID NO: 71582 - protein, 73 aa, Zea mays
  Coding DNA Sequence Number=SeqID_28207
MVITDVTCDYICQAHGCQPFSQVERGSGERRVRVRSASKILCPNANPQFLKNRISTRTEEPNQTEPKNRMPQA

SEQ ID NO: 71583 - protein, 53 aa, Zea mays
  Coding DNA Sequence Number=SeqID_28208
MDRSAGCCKKLTCRGRGGSWCPADVADERANWERFNPQQPVFGSKGSRVRMFL

SEQ ID NO: 71584 - protein, 379 aa, Zea mays
  Coding DNA Sequence Number=SeqID_28209
  Homolog annotation: Hit_ID=Q337C1; Match level="QueryCoverage=100%, HitCoverage=100%, E-value=1e-128, Identity=64%"; Hit description=SH3 domain-containing protein 3, putative, expressed
  Pfam annotation: Domain name=SH3_1; Domain location=313-367; Score =43.5; E_value=7.7e-10; Accession=PF00018.19; Description=SH3 domain
  Pfam annotation: Domain name=SH3_2; Domain location=314-367; Score =28.3; E_value=2.8e-05; Accession=PF07653.8; Description=Variant SH3 domain
  Pfam module annotation: Pfam domain module=SH3_1::SH3_2; Domain location=313-367::314-367
MEALWKQASRLKDQVARQGVFKQFGYGNSDNAFTDESEVKMHQRLEKLYLSTRAAKHFQRDIVRGMEGYIVTGSKQVEIGNKLSDDSQKYGAENTCTSGDTLSKAATYFGKARSQMEKERGNMLNAFGTQVYVPNAGFASPCGRATAGNGNGCAPLEDARHLAQRYDRTRQEAEAQAVEVSRRQNRVRESAGNGDMISKLEAAEYKLEELKSNMVALGKEAISAMSAVETQQQWLTLQRLIALVEAERGYHQRVLEILDQLEKEMVSERQKIEAPLTPAADNYMPPPPPSYDEVNGAFASTSVNESVQSVNFFLGEALDSFKAESEFELTLSAGDIVIVRKISSNGWAEGECKGKAGWFPHAYIERREHVLASKVPHIF

SEQ ID NO: 71585 - protein, 335 aa, Zea mays
  Coding DNA Sequence Number=SeqID_28210
MEVRCQTSFCQNEDGFPKLLRACTVRLGIRSQPEYDGREFVEHGTEKCVVTVYIGSSPHHVEWSVTAAGHRFKDNCQVVGRKALRVLCQIYEQEVADTPLRFFPPFQRDRPVWMARMRALEGKQLLEDDPTVVYLTAYLLTLDAQYDFLAWHHRQMIARAEDAEKLNRKLHVDLTTAQARVATLESREVIVVEALKQAKDEHIQKLMEAYLVTHNQGHPVSIRGEKKAWELSEGAVVLEGIPVSPQAMDKQEHPESSQDPPTELFEPLTMKKIPAPSLEVKEEAASTPPALPPSEELQEPVPLEEEFDPVLSSQLPPEEVINISSLLTHPGDVSN

SEQ ID NO: 71586 - protein, 317 aa, Zea mays
  Coding DNA Sequence Number=SeqID_28211
  Homolog annotation: Hit_ID=A2YGC2; Match level="QueryCoverage=48%, HitCoverage=69%, E-value=2e-09, Identity=29%"; Hit description =Putative uncharacterized protein
MACIRCTARQSSHLERLHRRLHKEQERRRQEQEHQDSSPSPQWEVESERPPSPAPQPEMPLAPPQGILAAGGDPDGDGDDDDVSGSSSHDPERSEELEPEGWIARPITRDAARGCHFHDALGTLLRRAFDRHTWSIECLCVVYQHCCELYSDQWEATCLVRRPDDDLRGAEAFSEHYSINERDTTEAAMQDAARQTLSQYCSLFSGVADGLDLKYYPRCSTGSAGGVIVSPVGEGNPRLNRMVNLAAVLNTELDHALDELGKVRAEVAELHAECAAHHYLDGGSPAPIGIQHPYRSSPRGHFDYGTPDYRTRIDLDP

SEQ ID NO: 71587 - protein, 141 aa, Zea mays
  Coding DNA Sequence Number=SeqID_28212
LGVLTVLLLLLRKLPLVLVLVLTLVLATLLELMCHDFPVNQMLEGGESVVHELVVEGINQSSQKAGEKLLLPHYHQSLGHMVKMEVVPKLLASNGFRVGMGGEALVASGLALEAEVGVAAAAPTASLLRPTQLPELPEFAS

SEQ ID NO: 71588 - protein, 174 aa, Zea mays
  Coding DNA Sequence Number=SeqID_28213
MASSGGEQGAAPASVHNGDGSELRRRGRERGGSEKELGQGEGEGEGVDFYREGEAPRGRWPAMAPLMAINGGAIMGRKWREREGETAARFWFLEAEGRDVSVGALLGGCASVACRGTVGLHGVGSGRGLGSRRVGVTGSMGADGVARCRAGWPRADPGGARSGEKGKGRERESA

SEQ ID NO: 71589 - protein, 196 aa, Zea mays
  Coding DNA Sequence Number=SeqID_28214
MEEVVAVPGMEEGAAACCNFYLGLSQTAFSGSTVDRNSGNSEEKRVEDDDEYKLFDEDETPPPKVNFRKKELSEVALDSGTKGKDLKEGWDKILCIQRSNVSAKLCKWAPLKLGRWLAVGAIISNERGRIYLADCVGAKDEIYTWTEVFMFNVGKGINSLSWNSKCKYLLTTCNDVNTVAILKHFSKPSKITYVYV

SEQ ID NO: 71590 - protein, 151 aa, Zea mays
  Coding DNA Sequence Number=SeqID_28215
  Gene Ontology: Mol. function=Rab GTPase activator activity; Cellular component=intracellular; Biological process=regulation of Rab GTPase activity
  Homolog annotation: Hit_ID=A2YX33; Match level="QueryCoverage=54%, HitCoverage=9%, E-value=1e-23, Identity=66%"; Hit description =Putative uncharacterized protein
MDPTFRVLDIGVCPALPSLVERRSALGSPHLRAGAVGSGGRQSNPPAAESGERGRMAEEDRQQRRRFANLRSVQWRIDLGILPASPGASVDKLRHATADSRRRYVSLRRRLMVDPHLPKEEDRSSNLVVDNPLSQNPDVYFVCYPFTFDKP

SEQ ID NO: 71591 - protein, 37 aa, Zea mays
  Coding DNA Sequence Number=SeqID_28216
MDPTFRVLDIGFSAPKVGLDLAPAPKDDNAQVRLIQI

SEQ ID NO: 71592 - protein, 120 aa, Zea mays
  Coding DNA Sequence Number=SeqID_28217
MDSYRELGAWTADFEVPDQEAGLRRLEWLQEELLALPTIVEGFMSFASLVTCEGAMNAMSREGCSHYEVFDRSDEDFEREIFKVEDPVVKDSAGALFDRMWGPPRSGGLGFWAYARNRYC

SEQ ID NO: 71593 - protein, 96 aa, Zea mays
  Coding DNA Sequence Number=SeqID_28218
MGFNISAGDGARGAESNADARYRAEAELDRIRSPVCAMLDPVATVGKGARVRSPVGGEGELWWGRERSPVGKGLDGGGNGVALVMAGEWLRRGNLP

SEQ ID NO: 71594 - protein, 57 aa, Zea mays
  Coding DNA Sequence Number=SeqID_28219
  Gene Ontology: Mol. function=nitric-oxide synthase activity
  Homolog annotation: Hit_ID=Q6YPG5; Match level="QueryCoverage=66%, HitCoverage=6%, E-value=1e-11, Identity=86%"; Hit description =Putative nitric oxide synthase
MAYKDPVATTAQKYKPIQSVIPETTLGPIQIEAFLGGGVVSSRECPVISKYRASVHT

SEQ ID NO: 71595 - protein, 86 aa, Zea mays
  Coding DNA Sequence Number=SeqID_28220
MKRSTGSTRICARIPEMVSGWVRYVKKVLRKMSTTQEPSPSAHARNGSDELARGMMEIREGRTFSTGNVKGTTSTTVRRTTEGHES

SEQ ID NO: 71596 - protein, 101 aa, Zea mays
  Coding DNA Sequence Number=SeqID_28221
MAASYRRAVVRGLGAKVQDSNAQLVIWRRLVGPLGQWPLARAILLHWLVGPFVSESMRVRLPVSLPGGANCAEASPTSPQQTVRISGYWRNNRVHPVEDLS

SEQ ID NO: 71597 - protein, 150 aa, Zea mays
  Coding DNA Sequence Number=SeqID_28222
  Subcellular localization annotation: CTP_CleavageSite=59; ConfidenceScore=5.60e-01
MGRQKWQWQAGGSSGQVVSQAHVPSWDSERTLSYGVKTTRPTGGTFGRRSRRRFTSAIMAASKKAPSPLLIRGSKAGPSEGFNSRLRALGLCTHYWSEVQRPAPRKGSTAASGHSGSAPTTDQGFVGWPPKGSTAASDAKRGMTLGTFDT

SEQ ID NO: 71598 - protein, 72 aa, Zea mays
  Coding DNA Sequence Number=SeqID_28223
MVDAPAMHLDDQLSAPPWLNAKTPAPHSDTSTTAPRPDTLSTERRWEAQPPRLGPMGREGREVLRTEDKAEA

SEQ ID NO: 71599 - protein, 99 aa, Zea mays
  Coding DNA Sequence Number=SeqID_28224
MSRAHVLGGQLAEASGDPPTALPSEARSDFAEGVVDAEGAAGPPPSRIVCPSESYFSRKVMSEKVMSEVSVSRRRRSPSARSTLAAYVYSVVFRIPLSK

SEQ ID NO: 71600 - protein, 40 aa, Zea mays
  Coding DNA Sequence Number=SeqID_28225
MAAYVCAATPVGTDGCDTWVFNIDKTVLSNLPYYTQHGYG

SEQ ID NO: 71601 - protein, 137 aa, Zea mays
  Coding DNA Sequence Number=SeqID_28226
  Subcellular localization annotation: CTP_CleavageSite=94; ConfidenceScore=5.22e-01
MVPIRGGRTAPPVEAAISVDSVAVAGSTAGASTPVWAATACAPAWSAVSASAPIRAAATRAPMGMRGCPLCRLLSRCFPRQPELFVGVVVDRSRAASSTAAQNLELCCRRTCSIRRLRCFYFRSRRCQFRRRQPCCK

SEQ ID NO: 71602 - protein, 94 aa, Zea mays
  Coding DNA Sequence Number=SeqID_28227
  Subcellular localization annotation: CTP_CleavageSite=59; ConfidenceScore=5.13e-01
MAELPSCAARPAYPRLAQERPRHGSRCPRTASAARAAPAQALAPLRVAQDWFVIVSRFRASRNRQSSFGDQETELSEFYENEDPHHLFGEASVL

SEQ ID NO: 71603 - protein, 626 aa, Zea mays
  Coding DNA Sequence Number=SeqID_28228
  Homolog annotation: Hit_ID=Q6JAD6; Match level="QueryCoverage=68%, HitCoverage=61%, E-value=0.0, Identity=84%"; Hit description =Putative uncharacterized protein
KAARSGVRTERLVQQERLPQPLHRQHLEISRMFHQIRLLSVLVISPPGLAPPLTPPLPLRHPLCLLQSPLLLHPPPPPYPLPALRQLPLLPLHPLPLLLHLSLHLASGSVIETEVRPLASDPRLFDLQRATAARVRRFRYVPVESWLPAQRDPAAGVLFSTRIQESFFRAQMSAQIALRVHRLLDLPAFLLAAGAESEAHLTYLPGLLSFLTISGRYVEEWVRVFYASVWIDPDHHWMRFRFEREDVTITASQIRQLFGFPESTNRLHSLCYGTSDPPRRPHGGVAPGTAHVAALFRPPFTDGSRRSPADFTTAAKYLYELVRRTLLPRMGYREATTHIQLWLLGALVSHSEFDVVDFLICEIEDTVLDGIRARRQLPYAHYLCHIFAQLIQPPRFQSTLEASRLVFGSYRPAPEIPVPAYAPVFDTQAEDAALRQFDTQGTAADDDDDDFGIPPPPPPPMPPRSHDHEAGSSSAVPATPPAMDPALASILQTLTQQQAHLAAEQARLSDRMLSMFQNMQDRQDALQQQLIQDRAENREFMGSHASALWYLRTSGSVCSAFFASRSSGAFDIPPVPPASAVTTTAVAVSVTASVPVAPAALPASESVPAPASTADPGSETDSDPPS

SEQ ID NO: 71604 - protein, 89 aa, Zea mays
  Coding DNA Sequence Number=SeqID_28229
  Subcellular localization annotation: CTP_CleavageSite=48; ConfidenceScore=5.27e-01
MPDHGGVITSLYLSLGSVHSFSLGVMPGGGLPPPVSVYSLAMATRWLMASQGRDRGVFKPALRAGQEHGARLLLLHARDGQTSRPARVQ

SEQ ID NO: 71605 - protein, 213 aa, Zea mays
  Coding DNA Sequence Number=SeqID_28230
MPQSPLLRVLREAQDIGNREGWFSPTTRVRSMLSTEDGGNTAGMVLRRAIHWTLKATAAKHMPDHHPHAPAILPDPTMDTEWRQRCRTMVASLPRSISPSAPFTRFLSASCPVAASLPRFLSTLWPWQRGGLWRHKEETEVYMRAHSADSGELARFTATINSVGARLLRGVRQVPGAPAADSGRGKPLTAQARAAERGRAGASTEVHASFTDS

SEQ ID NO: 71606 - protein, 51 aa, Zea mays
  Coding DNA Sequence Number=SeqID_28231
MEYQRQQAEYQKKKDETIRTFWPRIKIYSRPLRHLSLQLPHLEMCLVKTTP

SEQ ID NO: 71607 - protein, 38 aa, Zea mays
  Coding DNA Sequence Number=SeqID_28232
MARPKKQIMTKKKKDWMRRASPITNEEDTEELAKLEKG

SEQ ID NO: 71608 - protein, 277 aa, Zea mays
  Coding DNA Sequence Number=SeqID_28233
MMDSVGRSWCSVGGSTSSSEPRLGEGGRAGRVPPAAVAEAGTGGGCGWGDTGGSGDGRQDGRRLGEGEWGEYRRRLWPGRVRTTATVEITSGDGGGREDGQRRQRCRTRAHRRCQRFIYNFTKSTVQNTVDYSGQEKLFGKTGQARTVRAPAADRPRYQDTLRTEPMQKYKSPLWTVRRKSKDRPSPRADRPASGADRPPLIYRRGPSGSGGRTVRGWQNGATARKWLVAINTTPTTSIHFNQASQPSTFNTRASNPFQDTFKASISPGFTIEKRDH

SEQ ID NO: 71609 - protein, 87 aa, Zea mays
  Coding DNA Sequence Number=SeqID_28234
ELKQVSAPVGGDGIYRYPYFASLYSHLCCAPVPFEDVQSSALATVQGVLLAICKVWDAEKSCNQMQRNGKRGIYAAVPLGYCVVGCL

SEQ ID NO: 71610 - protein, 179 aa, Zea mays
  Coding DNA Sequence Number=SeqID_28235
  Subcellular localization annotation: CTP_CleavageSite=66; ConfidenceScore=5.47e-01
MMILASVAATSFVILLLFSLLSCLRFRATLFSAKGVGAGTSSPYSSNTSPDTDPRNDYCTSTRTFHSMRAPSFLPSSDVPFIFPAFALFFLPNLLPSPTVAAASRPMLFDAGTGVILPMSPLDVQVFVVSFSDNEQVSVLPMMAHGSCKICVRIWRSMRALPHGARPLCSWLLDALGRF

SEQ ID NO: 71611 - protein, 233 aa, Zea mays
  Coding DNA Sequence Number=SeqID_28236
MFSAECSEVYQVQYLDNSAKKDLPSVPLGKECHSAKYQHKALDKEIVADVQFNEYSLSSVTLVKTFVECYRGFPECLRHSEKYSHYRKRALCRVPETLDKAPLGKGFAECRTRQRRLGKQYIGKCFFAEYFFSGTRQRGLPSAREHSAKKSGRYGDEVTETASLPSVKDDTRQRLHRLCRVSSRKHSAKNTSLPSAFWDIRQRARQGGSPCQALRRVLSGTRQSLPLYRVPET

SEQ ID NO: 71612 - protein, 264 aa, Zea mays
  Coding DNA Sequence Number=SeqID_28237
  Gene Ontology: Mol. function=kinase activity; Cellular component =plasma membrane; Biological process=embryonic development ending in seed dormancy
  Homolog annotation: Hit_ID=Q6EST6; Match level="QueryCoverage=96%, HitCoverage=47%, E-value=6e-97, Identity=74%"; Hit description =Putative uncharacterized protein P0521F09.18
  Pfam annotation: Domain name=PRONE; Domain location=2-166; Score= -157.6; E_value=4.8e-07; Accession=PF03759.4; Description=PRONE (Plant-specific Rop nucleotide e
MTHANNTCTEQKGKTSLGDAIYRSITEDTFDPVEFLAGMDLSTEHKVLDLKNRIEASTVIWKRKMQTNKDSKSSWSSIVSFEKREQFEERAETILHLLKLQFPGTPQSQLDISKIQYNRGIETSMIQDVGYALLESYSRVLESLAYSVMSRIEDVLSADAAAQNLTATEAARRVLESADLLAPRKLDAKEELEKLNEAPASMTLFDFMGWHFDQDELMKRREDGTLDADGEAMLLKKAPSVAPKKFSYVDSLSSGGMRSPSARH

SEQ ID NO: 71613 - protein, 113 aa, Zea mays
  Coding DNA Sequence Number=SeqID_28238
MVVAPWVRYLRQEYVPMLTWAASTYRSLSCPYFREQEGEKGSARLFNGAQSDFMTTNGANGYRGRAVGSASLGACLAVRLGAGRGWTDAIVAVRLGVSRLERGVGSAGAGGAS

SEQ ID NO: 71614 - protein, 123 aa, Zea mays
  Coding DNA Sequence Number=SeqID_28239
AVTGEGGCRGATEKQRPRRSAVRRPHDARLEKLGARRLEQEMAGVEGRAEQGGSSKLELDVGGELTTALATGRGRSAGEVGESSDRRGWEKAGRRRGEPRSRGRAGKERRERLSWAGRTSGRD

SEQ ID NO: 71615 - protein, 146 aa, Zea mays
  Coding DNA Sequence Number=SeqID_28240
MGKNNKRKREPTPPSEEFGDSEYSEEEFSSEPEGSPAPVSPPASSDDSDDSQGIAAEVWTYIRAVERAGLEGSDESEYSSDEEDSDGGDEGEDDDDDDDDDDGDDSGRGGGDGGRDSTKGDSRGSTKGSSRGSTKGGGGGRGRASG

SEQ ID NO: 71616 - protein, 164 aa, Zea mays
  Coding DNA Sequence Number=SeqID_28241
  Gene Ontology: Cellular component=integral to membrane
  Homolog annotation: Hit_ID=Q53RC1; Match level="QueryCoverage=78%, HitCoverage=44%, E-value=2e-24, Identity=50%"; Hit description =GNS1/SUR4 family
MARRMPQGLSPHSTGREEGLREQERQPRRSVLASGRTVDATVSFAATVICGYLTAVLVLRCLVLPRLPALPLPALHAASAAHNAVLLTLSATMAAGCALSMVATAPTPWWAWPFCFSPRGTTEASGPVFFWAHVFYLSNVYELGDTLLILLAHRVMRTSLLYIQ

SEQ ID NO: 71617 - protein, 54 aa, Zea mays
  Coding DNA Sequence Number=SeqID_28242
MEALNVSWNGLLALVLNVEDNEQSEVPECVVGDLPEQQPGEGKCPLTHYVLHTL

SEQ ID NO: 71618 - protein, 124 aa, Zea mays
  Coding DNA Sequence Number=SeqID_28243
MGATGILCDSTHDAVIKECVAPVSNKTFAEWYSTENVPSATLGVSWTMSASSGNMHDFLLELALLDCSSWLLGQEDGLPGCSGAGIDFLLAGCSDGTAAAEKTTSGTAAAGSNADAGAGAGDLA

SEQ ID NO: 71619 - protein, 57 aa, Zea mays
  Coding DNA Sequence Number=SeqID_28244
MESHDLRAEWESRLVGGYEIDGSGYDSGVGCQHCNHCSDEDEAVEGDFQEFQDYDEF

SEQ ID NO: 71620 - protein, 197 aa, Zea mays
  Coding DNA Sequence Number=SeqID_28245
MDEGCTQPLSSDPMINLNTMVFFFLISFLVREESPQVGVSRPYNKYHGESTRVRMGSSTHKSAAIHTHTHKPRLELKMKHNEFTTRTELKSLTQLIKCVETDCGRLRMLKVCLGSSYMRLGVPIIAPRQLGAVGGILGRQILPSVGWRTGQSGAPPDSHSACLVRDFLPFLAQPIVATSGWLAHSTLSGAHRTVRCP

SEQ ID NO: 71621 - protein, 473 aa, Zea mays
  Coding DNA Sequence Number=SeqID_28246
  Gene Ontology: Mol. function=transferase activity, transferring glycosyl groups; Cellular component=integral to membrane; Biological process=metabolic process
  Homolog annotation: Hit_ID=A2X288; Match level="QueryCoverage=94%, HitCoverage=93%, E-value=1e-132, Identity=53%"; Hit description =Putative uncharacterized protein
  Pfam annotation: Domain name=UDPGT; Domain location=28-469; Score= -131.1; E_value=0.00053; Accession=PF00201.9; Description=UDP -glucoronosyl and UDP-glucosyl transferase
MAPTDESAADTPAPPPPPPHFVIVPLVAQGHTIPMVDLALLLAERGARASLVTTPLNGARLRGVAEQAARAKLPLEIVELPFPTDVDGLPPGIENMDQVTDNGHFVPLFDALQKLAGPLEAYLRAQAPRPSCIVSDWCNPCAAGAARSLGIHRLFFHGPPCFYSLCDLNATDHGLRELAAAAAAADVDDGQERFVVPGMPVHVEVTKATAPGFFNSPGWEALRGECVEAMRAADGAVVNTFVGLEGQFVSCYEAALGKPVWTLGPLCLRNRDADTMSSRGADGGVGVRVQQHSAVAAWLDSKDTGSVVFVSFGSLARKLPKQLFEVGAWPGGLRQAVPLAILSHRAVGGFVTHCGWNSLLESVAHGIPVVTWSHFADQFLNERLAVDVLGVGVPIGVTAPVMVFDDESVVVARGDVARAVSALMGQGEETGERRRRAREYGEKAHGAMEKGGSSYENLTQLIESFGQVEARKG

SEQ ID NO: 71622 - protein, 89 aa, Zea mays
  Coding DNA Sequence Number=SeqID_28247
MSGSGRTVAVSVMPVGSGTVELLPINGYPSLLDGAAADLFLGYSGSKSGRPWESAPVEDFTRCPAPRSAVADAVGIARGAKDRELCPRA

SEQ ID NO: 71623 - protein, 447 aa, Zea mays
  Coding DNA Sequence Number=SeqID_28248
  Gene Ontology: Mol. function=transferase activity, transferring glycosyl groups; Cellular component=integral to membrane; Biological process=metabolic process
  Homolog annotation: Hit_ID=A2Y0Y2; Match level="QueryCoverage=91%, HitCoverage=84%, E-value=3e-69, Identity=37%"; Hit description =Putative uncharacterized protein
  Pfam annotation: Domain name=UDPGT; Domain location=17-446; Score= -171.2; E_value=0.056; Accession=PF00201.9; Description=UDP -glucoronosyl and UDP-glucosyl transferase
  Subcellular localization annotation: CTP_CleavageSite=21; ConfidenceScore=5.35e-01
MSAGSAAAVPGTDPAPHFVLVPMMVAGHAGLMLDMARTLSGRGTLVTFVMTPLNLPRLGRAPSDDALPIRFLPLRFPCAEEGLPEGCKSLDALPGLGLLRNFNDACAMLRGTLVALLRDREGDAPPPSCVVSDACHPWTGGVPRELGVPRFSFDGFCAFSSFSHDFSSCVHHCMRQMNLHKIFEGVDDDDTRPVHVPAFPIDVEILRARSPGNFTGPGMKEFGQEIMAESARADVLVVNSFAEMEPMFVDAYEAALGKKVWTIGPLFLAPTMPLAATAEDANAVRCVSWLESMKPRTVVFVSFGSRVRSSLPQLVEIEHGLEATKRPFIWVGLGSAEGDPVAPGNGSLCHALRRNSVLECVTAGLPMVSCPHFAEQFMNEKLVVDVLRVGVPVGVKGAAQWGVEAEGVLATRQDVERAVAAVMDCGEEGSARRARAAELGRKAREAV

SEQ ID NO: 71624 - protein, 52 aa, Zea mays
  Coding DNA Sequence Number=SeqID_28249
MDSTAAAVASSGRREEVDHLLVTVDEVEDSKRYQFQQNTERKIDVALANDNP

SEQ ID NO: 71625 - protein, 89 aa, Zea mays
  Coding DNA Sequence Number=SeqID_28250
  Homolog annotation: Hit_ID=Q69LW2; Match level="QueryCoverage=40%, HitCoverage=8%, E-value=3e-07, Identity=67%"; Hit description=Rab3 -GAP regulatory domain-like
MEELDENPFLNACRRKYENNEYQVKIEILKINFHERKKNAWEDSSSDDISGVITRFDGVDLQVYETLTQSLSIISIYETDNLVLSPSDG

SEQ ID NO: 71626 - protein, 55 aa, Zea mays
  Coding DNA Sequence Number=SeqID_28251
MKPNNRMKLDSSERFDDKKHENKYLELRKVLTNSRSCPYAKESEREGQAPRKVTL

SEQ ID NO: 71627 - protein, 275 aa, Zea mays
  Coding DNA Sequence Number=SeqID_28252
  Gene Ontology: Mol. function=nucleic acid binding; Cellular component= nucleus; Biological process=positive regulation of transcription from RNA polymerase II promoter
  Homolog annotation: Hit_ID=A2Z4M2; Match level="QueryCoverage=95%, HitCoverage=76%, E-value=2e-46, Identity=42%"; Hit description =Putative uncharacterized protein
  Pfam annotation: Domain name=CAF1; Domain location=8-255; Score =121.9; E_value=1.9e-33; Accession=PF04857.11; Description=CAF1 family ribonuclease
MVGRLQFVSVGASNFATEMDFIGSLLPRFRYIAIDAEYPGTVHGAPAGAGLSPAARYYAVVKANVEELPVLQLGLTICDEEGNLPVVMDVDGLPLQIAWEFHFSDFDVARDPHSVESVNFLRAQGFDFVRARAHGVASADFAGKLAALLASVPRWCQPPAWVAFGGAFDFAFMVKMLSGGQPLPENPQDMVARASDLLRGPVFDAKYMAEHCGRPELCVGGLRTVAAILGVPQLDPAPPSLAGPKSHTACRIYYNVMRMLEHDGAGYDGLIDGLY

SEQ ID NO: 71628 - protein, 77 aa, Zea mays
  Coding DNA Sequence Number=SeqID_28253
MDNIDEVTDRRVIALGAIEKDKIMVAKAYNKKVNAKLFQVGSTKRQGAYVGHQKEGGRSGLGVGWSAVRTVRARRTD

SEQ ID NO: 71629 - protein, 82 aa, Zea mays
  Coding DNA Sequence Number=SeqID_28254
  Subcellular localization annotation: CTP_CleavageSite=36; ConfidenceScore=5.07e-01
MRHGSVRSDNHGEQLPTVQAFSPLNMDSPLFGIFSRSSSAARLGPNVGVHMEQLWWRALSLLDVGALHARRHLLGVALRLLD

SEQ ID NO: 71630 - protein, 65 aa, Zea mays
  Coding DNA Sequence Number=SeqID_28255
MERSQRGHQLAQPPELAPSRRQQGARAQPRLPSPVLELALSCKGIQQGYLCAQRLVSRTHVPSDT

SEQ ID NO: 71631 - protein, 193 aa, Zea mays
  Coding DNA Sequence Number=SeqID_28256
MGSPATAVSMPGEGPCSPTRHKGPPGHALGARRWGVLGCWAHWEQQPRDDVGRGETTIGAIARSAWRQGVGNAGVQEDGWSSGVARLGSWGHRGVGAKAKTPPFARGLRSSRWSDGDKTGRDTLRSIRHQTKACDEVILLCGLVQLGGPRTIRPIVTGPAWSLRVTGLNCKGIPVITVCNPALWEYSGDNLGV

SEQ ID NO: 71632 - protein, 82 aa, Zea mays
  Coding DNA Sequence Number=SeqID_28257
MSAAPRKGEDEGARGPSPGEGRARVVARAGGRAGCAPWPPGRAAAPRARRSTGARDEDTVGVVLPTCAKMNAGREGEKEHTW

SEQ ID NO: 71633 - protein, 141 aa, Zea mays
  Coding DNA Sequence Number=SeqID_28258
MVPSPPRAVEVATTETGGAYQELSVEDYLLGDIAMFDAQTGLPPAGEGSIGAGTETGQLVVAPVKPTDKGLRGRAERKRLEDKIEHLRMQHTEAIRDKSTIENKSRNLLDKVAMLEKENEYHSRRLNEEKDTAAEAKTEAA

SEQ ID NO: 71634 - protein, 226 aa, Zea mays
  Coding DNA Sequence Number=SeqID_28259
MAVGVSEALYAKVNKGDRGEEALRHVARMSSDRDLVEEFVACGMWPLAHGWDLGEVKLCPMPFLGNQLVQSPTFAIELRGQDVAAFGKEVESEAVKIVGKYSTKIELTKSWDIRGSNVRLNQVFELNVLRYGPYLEGGSADAGDDRGKKVKTRSDECSLKGKVVIAVTQKSRIEVKGTKRTLVGPRVFRCSADELAETCAGPREVITLPDLWELSSRMLKVTGGQA

SEQ ID NO: 71635 - protein, 106 aa, Zea mays
  Coding DNA Sequence Number=SeqID_28260
MVSWRGDLAKVASLRRLGLGRAEDDNSIKGLTSVLSVEQVLNAKLTGFNTKTTDQAKDGGKKSFEVSSAREKVKETRNPKPGVKKKTCKVKVDRVKKSYAASRITT

SEQ ID NO: 71636 - protein, 356 aa, Zea mays
  Coding DNA Sequence Number=SeqID_28261
  Gene Ontology: Mol. function=metal ion binding; Biological process =metal ion transport
  Homolog annotation: Hit_ID=A2X595; Match level="QueryCoverage=73%, HitCoverage=74%, E-value=6e-62, Identity=51%"; Hit description =Putative uncharacterized protein
  Pfam annotation: Domain name=HMA; Domain location=149-211; Score =40.6; E_value=5.5e-09; Accession=PF00403.17; Description=Heavy-metal- associated domain
  Pfam annotation: Domain name=HMA; Domain location=48-113; Score=42.1; E_value=2e-09; Accession=PF00403.17; Description=Heavy-metal -associated domain
  Pfam module annotation: Pfam domain module=HMA::HMA; Domain location =149-211::48-113
MGEEEKAKEAAPPADKVKEAEEKKGEGGGGEEKKNEAPSLPPPPPEEVVMRVFMHCEGCARKVKKILKGFDGVEDVIADTKAHKVVVKGKKAAADPMKVVERVQKKTGRKVELLSPMPPPKEEKKEEEKKEEPEPPKTEKKEEATVLAVVLKVHMHCEACTQVIKKRILKMKGVQSVEADLKASQVTVKGVFEEAKLSDYVYRRTGKHAAIVKSEPVAAENVDDGNAKDDKKAAEGGEEKKDDGKEEKKDEDKKEADNQKDDGNAGDEGKDKDPGAVANMYMHYPRSNHLSEYGYAYQYPPQLFSDENPNAFWPSSAAFFQQMPIDSIHYPVGNGTSHVCASVVELKIKGHARCKG

SEQ ID NO: 71637 - protein, 325 aa, Zea mays
  Coding DNA Sequence Number=SeqID_28262
MDESGDFVIILKNFLLLLERMRFAKKKEIGSQMEVRCQTSFCQNEDGFPKLLRACTVRLGIRSQPEYDGREFVEHGTEKMRALEEQQLLEDDPTVVYLTAYLLTLDAQYDFLARHHRQMIARAEDAEKRNRQLHVDLTTAQARVAALESREVIVVEALKQAKDEHVQKLMEAYLVTHNQRRALRIQEPAPSNPVQPIKAEDPQILEGHPVSIRGEKKAWELPEGAIVLEGIPVSPKAMDKQEHPESSQDPPPELFEPLAMKKILAPSLEVKEEAASTPPAPPPSEELQEPVQLEEEFDRVLPSQSPPEEVINISSLLTHPGDISD

SEQ ID NO: 71638 - protein, 39 aa, Zea mays
  Coding DNA Sequence Number=SeqID_28263
VVMRLMVLVKTMVLHCNHCSGEDEAVEGDFQEFQDYDEF

SEQ ID NO: 71639 - protein, 167 aa, Zea mays
  Coding DNA Sequence Number=SeqID_28264
MRSFEKLEKLRIKMISSDAAAAVPSGVRGGAREQESLGRRGALQPADWRSWRGREEEPQRPRRYSFRRHRSGAAESSLVGFGGLDDNPIKGLTSVLSVEHVLNAKLTGFNTKTTDQAKDGGKKSFEVSSAREKVKETRNPKPGVKKKTCKVKVDRVKKTYGASRITT

SEQ ID NO: 71640 - protein, 123 aa, Zea mays
  Coding DNA Sequence Number=SeqID_28265
MEGRGMSIIKDGAKARIGIDKGENATKGRVDKTCKVSKKGEQSMVKWVRHYHRNKDRKDEAFKRWKRGDLWRAGIKMSVKARLMGGKVEGLNITRVKAITDKGIREKTKAQKSQWYKYNKEWR

SEQ ID NO: 71641 - protein, 179 aa, Zea mays
  Coding DNA Sequence Number=SeqID_28266
  Subcellular localization annotation: CTP_CleavageSite=83; ConfidenceScore=5.68e-01
MARTPGPLASPSLVQPDTTRHASAGPRCAARTASARTAGTARSLARPTIQRLARALRSRPVRPVRQWPSRPWPPWPSRRRLHRADVFANSSSCSVSTPQRRASAPHRSPSSEIAIRFRASRNRRSSFGNQEIKLFEFYEDEDPEHLFGGDKDDVYDYGNGKEGVEVDLQEFQDVDEFED

SEQ ID NO: 71642 - protein, 74 aa, Zea mays
  Coding DNA Sequence Number=SeqID_28267
MADKGKGKDIVIGDRRTSDKSQKEIARKASDEKAKKSEDGSLEDMVAGVTWPSILPPGWTVEWDPASAGEEHEE

SEQ ID NO: 71643 - protein, 213 aa, Zea mays
  Coding DNA Sequence Number=SeqID_28268
  Homolog annotation: Hit_ID=Q8SA85; Match level="QueryCoverage=16%, HitCoverage=2%, E-value=3e-07, Identity=75%"; Hit description=Prpol
MARARAYKAPRDFDRTLSHALDLTGAQNHRRLPVHGVSAAARSPCHRRPANRTLPNHVQPSEETVHTSVKLPERGIGVCFAGEASPRSPDSTRPPVSVDRLPPPTRAPACARGPDDSGHPRRRAVHRCDRQDLLEPTPPLAGPLSPPVQEKQDGQARKQVPVYFVSKVLSASKKNYTELEKGLKKKRKQMMPKPGQYFVMGPGEPSAQEQLLF

SEQ ID NO: 71644 - protein, 61 aa, Zea mays
  Coding DNA Sequence Number=SeqID_28269
MSSSRSEDSVFQGTGSTMSRRRALAEHLPPHDDAGIERQSREDAPFGAVVEDHARDDDEDD

SEQ ID NO: 71645 - protein, 109 aa, Zea mays
  Coding DNA Sequence Number=SeqID_28270
MRNRARPSPLLLLLLSCWSSIPLDRPTRWQGGRPSHTGNHILKRTCKNCATSKAEYTNTQLDLPGFHTLILSFFFSSHGQGIHPGSKSIDHHRSRYQDEYNQFLTSREC

SEQ ID NO: 71646 - protein, 146 aa, Zea mays
  Coding DNA Sequence Number=SeqID_28271
  Subcellular localization annotation: CTP_CleavageSite=81; ConfidenceScore=5.03e-01
MASNEPLGTISDITEGASASKEPCLVGTAGSGSAGASPSHSDYGAASSSGSSGKRRRLSGEELGIMIGLTGAVNKLVEAVQAPVVVQTTDVHLDLYQICMSIPDFTDEDLMTCLTYLLDNKRLGDGFVKMEPKHCVLWLWRHLARI

SEQ ID NO: 71647 - protein, 108 aa, Zea mays
  Coding DNA Sequence Number=SeqID_28272
MAMMDSTSEKMYLCQTRTTVGGPNYLGGSVTIDIEVEGSLYVIMAEAYSSHQLPRFSNEAHNSSGLVLVCPRIAFKLMFEGFFWLWAQAPCVPDDIVIETMIKGFFLA

SEQ ID NO: 71648 - protein, 104 aa, Zea mays
  Coding DNA Sequence Number=SeqID_28273
MGLWWRTTAGELQLRAAWLWFWSQGVTWEGYSSEYWNKVQNICTRTPKKKSYKDLLVTVTRNHHFDAKDRKETKKQEPGLFNNMTESLRRGRIVLKGNGMDKAN

SEQ ID NO: 71649 - protein, 51 aa, Zea mays
  Coding DNA Sequence Number=SeqID_28274
MADCGAGSGERVLRGNARSITGGHRFRATTKRGFQTLLSLAIPPYLPEITI

SEQ ID NO: 71650 - protein, 300 aa, Zea mays
  Coding DNA Sequence Number=SeqID_28275
MGQRTLAFTKLLIRDFLCNLLGKHRLLVVYVKIRSCGRARERAAAWAADRRDRAGSAGRGQADRRGPTGREAGCGGSGPGPLDLRRTARIGLGLIKTGPPDLGRTVGIRWPAWASLTASWGGGARPRGGGLAGDEGRGRLAGLRGDLIGREGWGGHGESSGGVWVGAGAPEGGGSRRSGSAAALIYSGEELSATEGNTRVDRGGRGSLPQGGLRGLPRRRQWRDGGPGRRWRTSAAARGTAGERGQREIGRGRGNWGASRVADAGAKLTVAMDTAELQRRPGNELGTAGICGGGALACAQ

SEQ ID NO: 71651 - protein, 38 aa, Zea mays
  Coding DNA Sequence Number=SeqID_28276
MASGSAWVVRVCLIACNAWVYMKNIYSTHIGGGGGGNG

SEQ ID NO: 71652 - protein, 129 aa, Zea mays
  Coding DNA Sequence Number=SeqID_28277
MHDAARRALSQYRSLFSRVADGLDLKYYPRCSTDSTGSLILSPVGKGNPRLSSMVNLVAVLNTELDHALDESRKAHVEIEELRAEHAEGRHQKDGSPAPARTQHPYRSLPRGHHAYGTPNWRTKIDLEP

SEQ ID NO: 71653 - protein, 122 aa, Zea mays
  Coding DNA Sequence Number=SeqID_28278
MSQLKVAPLELSRLQPRPVARPEDGRDYTPSAPLPGTELMNADGKTHAGSPRLLRVSGPSNGPPTSKSPTSTKVRNLLNPCHGTTRTSNLTGAGRRGLVRRYTLSNHLSLEPMVRRAEVYEH

SEQ ID NO: 71654 - protein, 136 aa, Zea mays
  Coding DNA Sequence Number=SeqID_28279
  Subcellular localization annotation: CTP_CleavageSite=59; ConfidenceScore=5.22e-01
MARRWPGATVADLRGCTGNGGPGSGETVAPPRSRSSLSSEVEVESEPWGRARRSSSSSGAEAESEPWGRARRSSSSAGAKAESEPWVGRGGFRSGAEPESEPWGRARRSSSSSGAKAESEHWGSGEAEFVVFQGRA

SEQ ID NO: 71655 - protein, 39 aa, Zea mays
  Coding DNA Sequence Number=SeqID_28280
MAGERRKATEHDGVQGSRGQLQQFLEESPRDQLVLMSDC

SEQ ID NO: 71656 - protein, 557 aa, Zea mays
  Coding DNA Sequence Number=SeqID_28281
  Homolog annotation: Hit_ID=Q6J9V9; Match level="QueryCoverage=20%, HitCoverage=31%, E-value=2e-10, Identity=45%"; Hit description =Putative uncharacterized protein
  Subcellular localization annotation: CTP_CleavageSite=51; ConfidenceScore=5.07e-01
MHEGSAKTWLPFKGVTLLGNSPHLRPQPLQAESSPTRSKVLPLRHGGWAPRVMQIGPGQKEPKPPRAVRATAQRLRAFLRFRPGQRVKGRTAMQAACNRTKGAHPFDFDASSMEAQARTGYYVRETAPPLAPVPRLLDCGTGTATRGDPARDPTVPTGTSVTGQSAAGEGATVDTARNGPAVMAVAGGRKQRSSRQQDRRHLWQAKQATLRFRHNDRVKKGTRKGDTLKGILLHEGSGPRAPLLIRGPKAGPSEGFNSRLRALGLRAHYWSKVRRPAPRKGSTAASGHSGSAPTTGQRLALEGFDSRQRRRARDDPGYVRYITKARATLPSSLETPCSAPSEGNMALSPLLLAERRRRGPRARAADPRGFTSRPRTPSSNGHTFGSPEAQSSPRSNLDQIATPTDRIAGAFNAKRPSLASGAIGSSASPDPRARTQARPWKTTNSASPDPQCSDSALAPEDDELRLARPQGSDSGSAPERNPPRPTQGSDSALAPADDELRLARPQGSDSASAPEDDELRLARPQGSDSTSTSEDRLDLDLGGATVSPDPGLGPTTS

SEQ ID NO: 71657 - protein, 218 aa, Zea mays
  Coding DNA Sequence Number=SeqID_28282
  Homolog annotation: Hit_ID=Q5Z650; Match level="QueryCoverage=38%, HitCoverage=45%, E-value=2e-16, Identity=54%"; Hit description =Putative uncharacterized protein P0567G03.13-1
MLEEAIPALLSAVHGWFTPAVLFVVLNIVIGTIAVTSKAAASATGGDEEEVAAAGAGWEPHRRLARVPSMAFERLKSFNGRFATAEPRARRDRSGGSGRRSCRCSRRVCTKSASDKSAFAHFGAEEVEETVRAVEARRPATTRENRGRRLPVAEPEPASESSESESESEEEEASGGEVDARADDFINQFRHQLKLQRIDSFIRHRETVRRGQAAAQGV

SEQ ID NO: 71658 - protein, 139 aa, Zea mays
  Coding DNA Sequence Number=SeqID_28283
  Gene Ontology: Mol. function=hydrolase activity, hydrolyzing O -glycosyl compounds; Cellular component=extracellular region; Biological process=carbohydrate metabolic process
  Homolog annotation: Hit_ID=A3AM74; Match level="QueryCoverage=56%, HitCoverage=23%, E-value=2e-16, Identity=53%"; Hit description =Putative uncharacterized protein
MAMMGSTSEKMYLCQTGTSPSSLEVAYVFIGALQSFIGIKYGEPADNLPPLSSTACLVQSTTITKNLHDMLPPSVKLSTVNAMDMLASSDPPSSDPLVAFLSKIGSPFLINPYPYFAYLGDPRPETLAFCGRTTRIIPA

SEQ ID NO: 71659 - protein, 88 aa, Zea mays
  Coding DNA Sequence Number=SeqID_28284
MKDRSDDEQKDGCERPRSRTSGGARHSSRGSRQRRVGSWALIAGFERWWARLWSMADGSRRARHRLQTVDDKQWRLTSRVPAAVFTRV

SEQ ID NO: 71660 - protein, 258 aa, Zea mays
  Coding DNA Sequence Number=SeqID_28285
MNVCELTLAVSHTPTGQDQVPQDEAHGGCCDVFVRELLLYSKDVTFDPVPLYIICVRLGPSTPGVYVRARVLMPRNPGVTPRPFIPARSQDLPKSEITGNRPEHAVPPPAKLSELRPPWPAHSSHPQVEPVLRLAPPVAHEAFQALGPGQTSPEARDRPYRTSVFRRRAWTELTSESPSNSLHPYLLWHPAGLLAADEHPPPVHVDRPTPTIPDGDPHHRCDPQDLPYVLDHFTGAISPPGLIREENLKHPARDPSAK

SEQ ID NO: 71661 - protein, 119 aa, Zea mays
  Coding DNA Sequence Number=SeqID_28286
MQYKGSSSLISCEKQTIRIEFLTLQVTALVPTIASMGDPVSGRMRDKVRARLHSGALDITTLTVYDLLELNKVNFTYVRPLGGILGKLGQTSSKGRRGALNYNYYLTVGNSLKLIFAGF

SEQ ID NO: 71662 - protein, 253 aa, Zea mays
  Coding DNA Sequence Number=SeqID_28287
  Gene Ontology: Mol. function=hydrolase activity, hydrolyzing O -glycosyl compounds; Cellular component=extracellular region; Biological process=carbohydrate metabolic process
  Homolog annotation: Hit_ID=Q53K23; Match level="QueryCoverage=50%, HitCoverage=29%, E-value=3e-49, Identity=75%"; Hit description =Glycosyl hydrolases family 17, putative
  Pfam annotation: Domain name=Glyco_hydro_17; Domain location=1-172; Score=-112.4; E_value=0.00013; Accession=PF00332.9; Description =Glycosyl hydrolases family 17
MEGSGFIPMGRAKSVQARITQPRNQGTACKLAADLAAVRCGREDSEPQPNDGRPDAGFGLMYTNMFDTQVDVVRAELDGKGYKDVDIVVVKTGWPHKGDPDEADATVENARAFVSGLVSHLRSLSGMLRAPGKSVETYIFTMYDEDLKLDKASERYFGLFQTSLAETYPTGLLRNGTARLTPATAPAPTTSAAALKPTLGQQPQVGLQYDTGCCSCFSLPEFGSLPSAIFFAECFFGHSAKKLFAECHTKNSR

SEQ ID NO: 71663 - protein, 588 aa, Zea mays
  Coding DNA Sequence Number=SeqID_28288
  Gene Ontology: Mol. function=protein binding
  Homolog annotation: Hit_ID=A2XIG7; Match level="QueryCoverage=94%, HitCoverage=94%, E-value=1e-158, Identity=55%"; Hit description =Putative uncharacterized protein
  Pfam annotation: Domain name=Prp19; Domain location=255-304; Score= -22.5; E_value=0.1; Accession=PF08606.2; Description=Prp19Pso4-like
  Subcellular localization annotation: CTP_CleavageSite=78; ConfidenceScore=5.15e-01
MAVVAAGAEAFDPAAPSPPRAPASRQDVQAAIAKAVELRQLRATLLQRGAPNARARACASRSPAVIRLPPVASPTRSRAADEEYPVFTPVTAYDDEERVATVALNHICQDNRSRSENWTGVALDHDDAALSDYDGLHAFSSSNSEVLLPYSNDHRIRNRGTVYKIHPAFMHSAPSADRFLPPTGRAAYTTEFKLPPATCGNAFRPTTISSTRVPLPPQSAHSRTKQRGPPQILSWLFPKSRKKAKPPEMASPTAIERGNMPQLLTEWGALSLESLKKELAEANAHRDAALREAAEVRSSLGELATKLVSVEAYCSELKKALRQATNSPSVSRRSTRSVEARRELPTPVSHEVMVEGFLQIASEARLSVKQLCKALIQQGNEESCDGLSDRLNLLLRPYQLALSGSTGKHCSKATLYHLEAIMNQAMFQDFENPAFQRNGSPRCLDPAEDRQQSFAAFVALRNLSWNEVLRKGTKYYSEDFSRFCDRKMSGVVATLGWSRPWPEQLLQSFFVATKCVWLLHLLAFSFGPPLTILRIQDGRAFDEMYMEDILHDRQQVQGPCQVKIMVMPGFYVQDRVLKCRVLTTRSAA

SEQ ID NO: 71664 - protein, 967 aa, Zea mays
  Coding DNA Sequence Number=SeqID_28289
  Gene Ontology: Mol. function=transcription regulator activity; Cellular component=nucleus; Biological process=regulation of transcription
  Homolog annotation: Hit_ID=A3C044; Match level="QueryCoverage=40%, HitCoverage=97%, E-value=5e-71, Identity=48%"; Hit description =Putative uncharacterized protein
  Pfam annotation: Domain name=DUF1645; Domain location=117-332; Score=- 34.5; E_value=0.0047; Accession=PF07816.2; Description=Protein of unknown function (DUF1645)
  Pfam annotation: Domain name=HLH; Domain location=892-940; Score =40.3; E_value=7e-09; Accession=PF00010.17; Description=Helix-loop -helix DNA-binding domain
  Pfam module annotation: Pfam domain module=DUF1645::HLH; Domain location=117-332::892-940
MANVASLLPYIRGIHVLIRNDQTKYLFQHFTSAPASPRRAAAIYAHVAEGSGSDDQEFQPRRRLYATGGSSVSFDWEERPGTPKRGLGGGVPAADVAAWDTGFEFGKAAPAETLTAADELFEKGKIRPLKPRPKKTADDEPKIRPLKPPPGLLDGGSVTPSPRSPVVARGAGATWSPRRRSRVGSGVDFDPFAAALLEATKAPSPLGGKDDEGGVAVAPHGSPPTRPATRPASRSAGWRRWRLSDLLLFRSSSDGGRVNSSTCPSRGRAQQPPVMTIKASAAKREDMGKGWKHGDGDAAAAADSVAGMSSSDPDDAPDGGEDSPLFRRSGGPSSGGTVGDVPVSQSLIKAASNSSAAITTSLSRVLPNSTFLVPDDSLLPTGEDFNSSTAVPAPVRDEDDAAAAVSAASAAAAGNRTCDPDLRPGFAAGGSASRGRFVAGGVRVVGEEFGSGWRAGVAAAGVRRAVRAGGGSLQMGLNSCRDIKCSGWSRGGSWLCGLHVVMWNGPGAGPQERKLFLDTRHKYPYRLHCTVLPRMAAGASTSAPATRALRFFRWGGGSVCVMYGAPVPKDLNLPAALPQPTRAGARTPPQQQQQMSSAGLLRYRSAPSTLLGEVMCGDQDFPATDGGGGHGPPDHAATDNVLALFLAGHHSEARDCKPPRPAAAAHFMDEAAASQQQQLMYQSQQQQQMAAMEGLYHNVSSGGTEHGAGVGAGNNSLIRQSSSPAGFLTNGYGGMLRAGMGMAGGFRNGVSDARLKGQLSFPSRQGSVMSQISEVGSEELDGGGGGSPEAAGSNASGAPRGYVGIPGYPMGGGTSGAWSDEPSPSPTSGAKRRPRDSGPAPQNVQQQPLAPQLSLPSGGKPASAEMAAIEKFLQFQDAVPCKIRAKRGCATHPRSIAERVRRTKISERIRKLQELVPNMEKQTNTADMLDLAVDYIKDLQKQVKVLNDGRANCTCSGGGKLQDPFTS

SEQ ID NO: 71665 - protein, 71 aa, Zea mays
  Coding DNA Sequence Number=SeqID_28290
MDFAADECSLGVEAMELFGPSYDGILVNSIEARPVFSRPPSEAFQVDSFIAKSYHEDVKISLHVKIRVKGL

SEQ ID NO: 71666 - protein, 54 aa, Zea mays
  Coding DNA Sequence Number=SeqID_28291
MDEENDGYTKVPCNFIFYPVMSSHTHGVETIEVDREENKVTVTGAPPMSALRPS

SEQ ID NO: 71667 - protein, 262 aa, Zea mays
  Coding DNA Sequence Number=SeqID_28292
  Homolog annotation: Hit_ID=A2Z2K4; Match level="QueryCoverage=98%, HitCoverage=68%, E-value=1e-61, Identity=48%"; Hit description =Putative uncharacterized protein
  Subcellular localization annotation: CTP_CleavageSite=21; ConfidenceScore=5.50e-01
MVVGAFGEATPPPDLPPSRVSVSSPSPHPRRRCALASRFQEPAAPRRHAWVSLQGRLIGADEASCAASAAPGLLPDEAVAWELFSPLHRVLLVATVAAASSRSHAARRIEQLQRSIHLRDEVLESMQQKLDDLLVEMSSLQQQYVKCDSYISEEREINEIETGSKTIGYGEESRCCVCTKLEAATPQKAKLSFLAADQQLYNLQKECEEKDATIKELAAAAHASSTSDAKRIAELQEVLKRKNMVISKLKKDMSALKHMAKR

SEQ ID NO: 71668 - protein, 151 aa, Zea mays
  Coding DNA Sequence Number=SeqID_28293
  Homolog annotation: Hit_ID=Q6QP51; Match level="QueryCoverage=32%, HitCoverage=22%, E-value=8e-16, Identity=79%"; Hit description =Putative growth-regulating factor 1
MRAACNCTKGAHPFDFDASSMEAQAHTSCNRRAGYYVRETSPPLAPVPRLLDCGTGAATRGNPAHGPTVPIEHIGHRDRERGYSERDPSPRRKRAPSPPTDQRFEGWPLGRVRRPPQSTRAPRPLLVRGSKAGPSEGFDSRLRPLGLRAHY

SEQ ID NO: 71669 - protein, 136 aa, Zea mays
  Coding DNA Sequence Number=SeqID_28294
  Subcellular localization annotation: CTP_CleavageSite=33; ConfidenceScore=5.51e-01
MAQGHISLSGGPVQLAVDVSASSTSNGKRSSARLAAKKKLKIGRNGNAIVKAQGILVAKLNNSASKHFQSSNALNSNNQVDLFEQLGRHFTRPLTKDQMEAIMELANLGKEKEGTKKKGSKVTPLKPPIIEAAKRI

SEQ ID NO: 71670 - protein, 135 aa, Zea mays
  Coding DNA Sequence Number=SeqID_28295
MDGHSSNTAVTVPESFSMVCLDGVMVRVPVPEDSASLIPLAGGGFKFPAHDGHRAMIKTAKQMDHYQRVRRNARGMPEVAARLGGEDALVELMYGDVDEACSVFRVPPIAPTTGPVRLFLAIPIQLHTRSDTHVQ

SEQ ID NO: 71671 - protein, 53 aa, Zea mays
  Coding DNA Sequence Number=SeqID_28296
HTLFILDLKFIGQTTVTKSSLEDMVAGVTWPSILPPGWTVEWDPASAEEEHEE

SEQ ID NO: 71672 - protein, 249 aa, Zea mays
  Coding DNA Sequence Number=SeqID_28297
MTSHGSSDEGNAQSHTDGLAREGFPCILWEVLQGAGYTTPPQAEGTMEAIALHGLTTFCGFHPLELSTHPIGLFPAEKEDDPMWKDRVEHAKDIWAIYPGQTAHLTVRCMNALYRLQVMRGEAMSHLMAFLEVTKITLDNREELVVDLSTEMVEKDLQVEQLSNEIQELEELVGTRENTIEVLEDQLINTQQQLAEANQHLDMHHQEIQDMEANEDVDIEGGEEPASSLDTAGSGRPPSPESSVASFAH

SEQ ID NO: 71673 - protein, 224 aa, Zea mays
  Coding DNA Sequence Number=SeqID_28298
  Subcellular localization annotation: CTP_CleavageSite=77; ConfidenceScore=5.54e-01
MGQSVWSTDATCLDNSYRGATLSPASPSHYFVTSVAAPSCTSLTRYFVASRAASPCASLTRCFVGSWARPSPATLTRCFTGSGVGPLPASPTRCFSSLGVGLSPRLTESLLRRLKGCTTMCLVDLLLHQLGGCTIVCLIGSLLHRLGGCTAARIADSLLHRLEAGSSPVSPTCCFVDSRRLRHRLVNSGAQTFQLIVSQVNLKLGGYTQWMQRRNKIALKSIKQ

SEQ ID NO: 71674 - protein, 146 aa, Zea mays
  Coding DNA Sequence Number=SeqID_28299
MTGSSGYNPGQFGTITDRPVYYAGPSGYAADRPVPYVGPSGYVADRPISYAGSSGYGMNRPTYYVEPSDSTRVHAQTIQVAPYMTEPSGYNLGPFSPIVDRPAHCDGRSGAEYCSATREPERYKAGAGDINRTPNTHLKHPWEESR

SEQ ID NO: 71675 - protein, 75 aa, Zea mays
  Coding DNA Sequence Number=SeqID_28300
MDDSDHESDRKPSNSSDMKEIVMLPKHIKDNANKDRGRSNMPFPGYNAHGLVHLFFFCTQTRGSSCFCKGKRYAF

SEQ ID NO: 71676 - protein, 98 aa, Zea mays
  Coding DNA Sequence Number=SeqID_28301
MSLYPMILRIHLDPKPEDPPMSEVEKEITNEKKCAICGGARSVDVVNEDGRREPVHERASNQSSGDGVTVVSMPLRWLGVGDREESMWTMGFDLSGCD

SEQ ID NO: 71677 - protein, 299 aa, Zea mays
  Coding DNA Sequence Number=SeqID_28302
  Gene Ontology: Mol. function=transcription factor activity; Cellular component=nucleus; Biological process=regulation of transcription, DNA-dependent
  Homolog annotation: Hit_ID=Q6H4L1; Match level="QueryCoverage=68%, HitCoverage=73%, E-value=1e-35, Identity=47%"; Hit description =Branched silkless 1-like
  Pfam annotation: Domain name=AP2; Domain location=36-87; Score=76.6; E_value=8.1e-20; Accession=PF00847.11; Description=AP2 domain
MDFSYLFSSSSSEKKSSKRLQQQQLLQQQDNNSNETRYLGVRRRPWGRYAAEIRDPATKERHWLGTFDTAEEAAIAYDRAARNIRGANARTNFAYPDLPPGSSVTPYLSPDLSADQLQHYYYANNDPVAPAADQPPTPACDQSAHGGAAGTEAYQYYHHVPVEMMSSYGAAEGASVMDYGGNPEMGMYFEGNGSGGDDDRAWCEASSELLFGGYSDDAAAAPANASHGMYFEEGAVLSFGRLSAALVNGGLAPAGGGYIASGVSALDTCRQPNTNSDKVNAHSDAGRDGAANQSHDVLQ

SEQ ID NO: 71678 - protein, 747 aa, Zea mays
  Coding DNA Sequence Number=SeqID_28303
  Gene Ontology: Mol. function=ATPase activity, coupled to transmembrane movement of substances; Cellular component=integral to membrane; Biological process=transport
  Homolog annotation: Hit_ID=A7PMS6; Match level="QueryCoverage=95%, HitCoverage=96%, E-value=0.0, Identity=51%"; Hit description =Chromosome chr14 scaffold_21, whole genome shotgun sequence
  Pfam annotation: Domain name=ABC_membrane; Domain location=1-276; Score=104.6; E_value=3e-28; Accession=PF00664.14; Description=ABC transporter transmembrane region
  Pfam annotation: Domain name=ABC_tran; Domain location=322-455; Score= 128.6; E_value=1.9e-35; Accession=PF00005.18; Description=ABC transporter
  Pfam module annotation: Pfam domain module=ABC_membrane::ABC_tran; Domain location=1-276::322-455
MAAGSAGAVVHGAAMPVFFLLFCELVNGFGKNQHNLRRMTDEYSLYFVYLGLVVCASSYLEIACWMYTGERQVGALRRRYLEAVLRQDVGFFDTDARTGDVVFSVSTDTLLVQDAIGEKVGNFIHYLATFLAGLVVGFVSAWRLALLSIAVIPGIAFAGGLYAYTLTGLTSKSRDSYANAGIIAEQAIAQVRTVYSYVGETKALNSYSEAIQNTLKLGYKAGMAKGLGIGCTYGIACMSWALVFWSLGQSFSNLGAFSKGKIAGYKLLEVIRQRPTIVQDTADGRCLDEVHGNIEFKEVAFSYPSRPDVMIFRDFSLFFPAGKTAAVVGGSGSGKSTVVALIERFYDPNQGQVLLDNVDIKTLQLKWLRDQIGLVGDRGLQLSGGQKQRIAIARAMLKNPKLLLLDEATSALDAGSESIVQEALDRLMVGRTTVVVAHRLSTIRCVDMIAVIQQGQVVETGTHDELLAKGSSGAYAALIRFQETARNRACPSTRKSRSSRLSNSLSTRSLSLRSGSLRNLSYSYSTGADGRIEMVSNADNDRKYPAPRGYFFKLLKLNAPEWPYTILGAVGSVLSGFIGPTFAIVMSNMIEVFYYRNPSKMESKTREYVFIYIGTGLYAVVAYLVQHYFFSIMGENLTTRVRRMMLAVILRNDVGWFDQEENNSNLVAARLSTDAADVKSAIAERISVILQNMTSLLVSFVVGFIIEWRVALLILVTFPLLVLANFAQSDEEGEGPKDAVHGALVHG

SEQ ID NO: 71679 - protein, 91 aa, Zea mays
  Coding DNA Sequence Number=SeqID_28304
MKRSVYGGSSGLGPRALTQYAYAYRLRHRFSGDGHKDRNYLHVLLGISRDVNGDPIPDNPWGIPLLGYGYGTKIIPMGMDMGQNFYSLGKR

SEQ ID NO: 71680 - protein, 280 aa, Zea mays
  Coding DNA Sequence Number=SeqID_28305
  Gene Ontology: Mol. function=structural constituent of ribosome; Cellular component=ribonucleoprotein complex; Biological process =translation
  Homolog annotation: Hit_ID=A2XUJ6; Match level="QueryCoverage=41%, HitCoverage=48%, E-value=4e-50, Identity=84%"; Hit description=60S ribosomal protein L6
  Pfam annotation: Domain name=CDT1; Domain location=31-152; Score =109.0; E_value=1.5e-29; Accession=PF08839.2; Description=DNA replication factor CDT1 like
  Pfam annotation: Domain name=Ribosomal_L6e; Domain location=173-280; Score=233.3; E_value=5.4e-67; Accession=PF01159.10; Description =Ribosomal protein L6e
  Pfam module annotation: Pfam domain module=CDT1::Ribosomal_L6e; Domain location=31-152::173-280
MSPSTGIDRSVETVENYVTTDHLVFPVHNVRHKDLLNLFNRMESYIRLLRLRKRMAKFNNIATQVEILAKRKLSYCHLAQMKYLFREAIQIKRVLLHDEKSLCMYADMEIILVMDVVEYTSPDHSPSMAICDAFYSKLLTFLDAHQKVPAKEQVDALSTELFALSTVTGPFKINGVPIRRVNQTYVIATSTKVDISGVDVSKFDDKYFAREKKQKVKKTGGELFETEKEASKSLPDFKKDDQKAVDAALIKAIKAVPELKAYLGARFSLRDGDKPHEMVF

SEQ ID NO: 71681 - protein, 55 aa, Zea mays
  Coding DNA Sequence Number=SeqID_28306
  Homolog annotation: Hit_ID=Q2R2F0; Match level="QueryCoverage=58%, HitCoverage=7%, E-value=2e-09, Identity=84%"; Hit description=AT hook motif family protein, expressed
MQICICRTKKGWFPTGSVYRKAVGLGYKSVAHFLIAKHNNKQLPTDIVNNAEELQ

SEQ ID NO: 71682 - protein, 75 aa, Zea mays
  Coding DNA Sequence Number=SeqID_28307
MGRGFCPIVYLWVRDCFHTRLYIGVVKLALKTMEENHSIPYPHHVLGTNMDNRFLEEADGWFVNTTYCFCAYRST

SEQ ID NO: 71683 - protein, 201 aa, Zea mays
  Coding DNA Sequence Number=SeqID_28308
  Subcellular localization annotation: CTP_CleavageSite=21; ConfidenceScore=5.47e-01
MGSLAGPAAPWPAQAPCAPPLLGHGRPSRPPTSPFFDDNLSLFLSLSFFPLLAKPPQFHSAKTAAAPESRSLAVGAHRRRARGYERPRELQRLVILDQRYFGTGDNEIDGSDYDYGIASPLQPNRILAEYVDVYSPLLYTPNPPQVVSIATTAQAKMKLWKETSRSSKTTTSSRCGLAATPQSAACEGRVIYVSFPHFDLL

SEQ ID NO: 71684 - protein, 154 aa, Zea mays
  Coding DNA Sequence Number=SeqID_28309
  Subcellular localization annotation: CTP_CleavageSite=60; ConfidenceScore=5.20e-01
MTVAGAREQRSRRQPSSRPIRGQQENPLSRREDNAPVIRSSNGSRTRNVRPTNNSPRRINSAAGQAAIWQEKRATLRLSPDRERGIPRKGSFPVKEPGSEPPLLIRGSKAGPPRGSTVASDRVGPTPTTGQRFEGRPPEGLHGRLRLLGLRAHY

SEQ ID NO: 71685 - protein, 162 aa, Zea mays
  Coding DNA Sequence Number=SeqID_28310
MSSIPPPAGGLSAAIVVVARRWKEYHVVAAVEGHELKTPETEHRPGLERLLETAHLELDGKLLVNTQQPPTWRANCRRLETGGSLSRRVGRRGGSSEVEVESVFHGRGRVRVPGSGEAEVVGKGQGGVRALGSGGAEFAVFRGLARVRALGRAERSSPSSEA

SEQ ID NO: 71686 - protein, 485 aa, Zea mays
  Coding DNA Sequence Number=SeqID_28311
  Gene Ontology: Mol. function=binding; Cellular component=mitochondrion
  Homolog annotation: Hit_ID=Q69MJ7; Match level="QueryCoverage=79%, HitCoverage=70%, E-value=2e-93, Identity=48%"; Hit description =Pentatricopeptide (PPR) repeat-containing protein / CBS domain- containing protein-like
  Pfam annotation: Domain name=CBS; Domain location=337-438; Score =27.9; E_value=3.8e-05; Accession=PF00571.19; Description=CBS domain
  Pfam annotation: Domain name=PPR; Domain location=107-141; Score=9.1; E_value=0.65; Accession=PF01535.11; Description=PPR repeat
  Pfam annotation: Domain name=PPR; Domain location=30-64; Score=22.0; E_value=0.0023; Accession=PF01535.11; Description=PPR repeat
  Pfam annotation: Domain name=PPR; Domain location=72-106; Score=22.6; E_value=0.0015; Accession=PF01535.11; Description=PPR repeat
  Pfam module annotation: Pfam domain module=CBS::PPR::PPR::PPR; Domain location=337-438::107-141::30-64::72-106
MKGYIKSNFPLGALTVKDEILRQGLKPDRLTYNTIISACVKSAENDKAIQFLEDMKEEANTESNPELLPDAVTYTTLLKGLGNSRDLYSVVKIVVEMKSSLISIDRTAYTAMVDALLACGSIDGALCIFGDIIKHAGKNNDLRPKPHLYLSIMRAFATRGDVDMVMRFNKRMWLDSVGSISRAAKEETHELLMEAAINNNQNNPRVAGVDDDYEVPRLNMDSGVAALDRVQATAAPELAEHSDACGQVGLLSEVELAVAKLLLIVDEQRQRKRLLPVVFVWGFQRSPPKHLVANGKHQVLQAATEYMVAVKVESLSGFTNSLLRPHIILNDPVEKYMVPFQESRPLPADLILRKVVMRLLKERAVPLVDDWGGCIGIVHRDDCTKLDAPLISMSRGPPLCVPTSTTVEHVIDLLLRNKSEMVIVVKSGNMYEGSYTSSSRPLGVFSLAILWSFTGDYSSGSDDVPDAGISRAAKPKPDAEACNHS

SEQ ID NO: 71687 - protein, 159 aa, Zea mays
  Coding DNA Sequence Number=SeqID_28312
MWTREATFQESEDAAGNASTYKGINIPYYRATSTQHSDLQAGAEAGEREILGGVIAYKTVSGVTNVECVSVLVVVARCELRRRIAPRPSVVGKGRKDDGVGRASFISHHTVQLINAPPSPAPTRAGLQEQDQGRCGMFNSNACMILPCHESTPRRPQQR

SEQ ID NO: 71688 - protein, 98 aa, Zea mays
  Coding DNA Sequence Number=SeqID_28313
MGRSNVYHELPTGHSIAYGMATCSEILIGSIHLFGPARERLRLLLLCTQRLSGTVAPLQSPASGYTLAGRSKIADPAIVLLLLLTTSHTSKQPGYAEQ

SEQ ID NO: 71689 - protein, 156 aa, Zea mays
  Coding DNA Sequence Number=SeqID_28314
MEILIPVIFVEEALLMKLSVLRPSVLLILSKMANFFRDFVYLPLQASRRERVSWLGSSGCRAAAPVAEVFFGGMTKVYACRGCSKLKKWNGIGTEGAGGRFYRRAVCKVVLKCGVAVMEQVTRGSRHVCRGARVSGGVNDPEFVVSGSKNLCLSVW

SEQ ID NO: 71690 - protein, 135 aa, Zea mays
  Coding DNA Sequence Number=SeqID_28315
  Gene Ontology: Mol. function=kinase activity; Cellular component =ornithine carbamoyltransferase complex; Biological process=amino acid metabolic process
  Homolog annotation: Hit_ID=Q6QP54; Match level="QueryCoverage=62%, HitCoverage=30%, E-value=3e-19, Identity=60%"; Hit description =Putative kinase
PDPSPPTSIPACARGPTDSGHLRRPPAPRCDPRDLPYVLDHFTGAISPLMGRRSGSLLPESAQGRVMMAPPVDMAGLRPRLGDAEAPPKPRSSLSSVAEAESEPLGRARRRSSAEARAESEPWGRAKQSSSSSGT

SEQ ID NO: 71691 - protein, 184 aa, Zea mays
  Coding DNA Sequence Number=SeqID_28316
  Gene Ontology: Mol. function=cysteine-type peptidase activity; Biological process=proteolysis
  Homolog annotation: Hit_ID=Q8S456; Match level="QueryCoverage=98%, HitCoverage=20%, E-value=2e-12, Identity=30%"; Hit description =Putative uncharacterized protein 163K15.6
MIDDVIRLRSQVQGSQQRDTQTEQPTQSDANIPNDVHTDDLNATDHCSDEMHSMLEDISIKIDQTHVPPPPDSPIKPKEYPMKADGDLVSTINKIVDLLGQDKVPETYKDCSPQFDTTPKINVSTTKFLVEVPPKDLPIFDKTPINEGFIDCVRSEHASHTPDPITDVVILDVNVGLMIPMLCW

SEQ ID NO: 71692 - protein, 232 aa, Zea mays
  Coding DNA Sequence Number=SeqID_28317
  Homolog annotation: Hit_ID=Q53KY4; Match level="QueryCoverage=44%, HitCoverage=6%, E-value=6e-07, Identity=31%"; Hit description =Retrotransposon protein, putative, Ty3-gypsy sub-class
MPPRTRKTARKSTGPIGVPLHQLAPRHEDSSSGSNNPIGDLEAQVDQLRTELHRRNDIWVADGERINELRADIRYLQDQLAERDLALNWAVNSRSLAWAKEAKARAGVEELSSAIDNLQMPSKTHSQDGAGTSSGREATPNPPLVPPTLAEAIAALVNATTDNTCFLREMAGKQLQQQGGQAYPQGPRETSYLDFSETRPPLFVKAEDPLEADEWIRVIEQKFGLLRCSEIQ

SEQ ID NO: 71693 - protein, 96 aa, Zea mays
  Coding DNA Sequence Number=SeqID_28318
MVGWEHRTVRCALDSVRCANGSKSSTVDCARIGKKSAPDNVRWCTGLSGRETPSCGDSSQTGKSKEKKNTVVFKLIIGSLQRIKCNSRPLGRHNVE

SEQ ID NO: 71694 - protein, 145 aa, Zea mays
  Coding DNA Sequence Number=SeqID_28319
MGKNNKRKREPTPPSEDFGDSEYSEEEFSSESEGSPAPVSPPASSDDSDDSQGIAAEVWTYIRAVERSGLEGSDESEFSSDEEDSDGGEDEDDDDDDDDDDGGDSDGDGGNGGRGSSGKGGTKGGSSVGSTGGGGGKGSGGRASG

SEQ ID NO: 71695 - protein, 154 aa, Zea mays
  Coding DNA Sequence Number=SeqID_28320
MGITSKMDIAKVILGCVAQRQLIKPRTEARRASRYQVHGRRSRRLRNPKPRVKKKACKVKGDRVENSYGTLRITTKGRDLQPMSSVWHTGLSGGAPDSVRCAWLNSGEQAALGRSLAAYGYNSPDCPDILRQDLLFRCNLLEESSHSTAYYVFE

SEQ ID NO: 71696 - protein, 217 aa, Zea mays
  Coding DNA Sequence Number=SeqID_28321
  Gene Ontology: Mol. function=amino acid binding; Cellular component =chloroplast thylakoid membrane; Biological process=metabolic process
  Homolog annotation: Hit_ID=Q2QXL3; Match level="QueryCoverage=99%, HitCoverage=98%, E-value=1e-69, Identity=56%"; Hit description=ACT domain-containing protein, putative, expressed
  Subcellular localization annotation: CTP_CleavageSite=42; ConfidenceScore=5.65e-01
MALAASHHGLLPFAPAATPTPSRWHLRFRAARPLPRPARRICCQSINSANVLGVSSTTSDEAVPVPVVQIDQDSDRDATIVQLSFGDRLGALLDTMKALKDLGLDVTKGSVTTDSAVTQTKFHIMRFGRKVEDPDMLERIRLTIINNLLQYHPESSEKLAMGEFFGIKPPEKKASAILLNLHSLIYELGLVAKDKFHALTNCLRYYLRRPETDEDSY

SEQ ID NO: 71697 - protein, 133 aa, Zea mays
  Coding DNA Sequence Number=SeqID_28322
  Subcellular localization annotation: CTP_CleavageSite=66; ConfidenceScore=5.75e-01
MAPLLLPYRASDPLLLSPAPSSLFLAQRNFFSFANVCFPRFISSAWQGSRQAPASCSTSTSGRRPRAAAAPSATSSTPQPSTSRSSSDALHCVALAKSDHSPSICAALCAVVKTRDIIVNVTNSLDNANLRGG

SEQ ID NO: 71698 - protein, 72 aa, Zea mays
  Coding DNA Sequence Number=SeqID_28323
MSKPDKTFPLLILPVLPNLLNPRVGPHEFGLSDCPHSLKWLYDKGVQIYFREIGLRPFFRGYGFRINGPRFF

SEQ ID NO: 71699 - protein, 128 aa, Zea mays
  Coding DNA Sequence Number=SeqID_28324
  Gene Ontology: Mol. function=cation transmembrane transporter activity; Cellular component=membrane; Biological process=cation transport
  Homolog annotation: Hit_ID=Q84NH0; Match level="QueryCoverage=96%, HitCoverage=29%, E-value=6e-42, Identity=73%"; Hit description=Zinc transporter
MGAGMENHNPLHSHIAEVKMDISASTSVAVGNKFCKGAACYFSDSSNSSKDAMERSTSMRKLIIAVILCIIFTTVEVIGGIKANSLAILTDATHLLSDVAAFAISLFSLWAAGCSYGYLLAYCYMRLL

SEQ ID NO: 71700 - protein, 85 aa, Zea mays
  Coding DNA Sequence Number=SeqID_28325
MESHDLQAEWESRLVGGYEIDGYDHAYGNASPLQPNRILAEYVDVYSPLLYTPNPPLGCQHCNHCSGEDEAVEGDFQEFQDYDEF

SEQ ID NO: 71701 - protein, 71 aa, Zea mays
  Coding DNA Sequence Number=SeqID_28326
  Gene Ontology: Mol. function=nucleic acid binding; Cellular component= cytoplasm; Biological process=multicellular organismal development
  Homolog annotation: Hit_ID=Q2LFC3; Match level="QueryCoverage=80%, HitCoverage=5%, E-value=5e-25, Identity=91%"; Hit description=AGO1-2
MSGGAPDSPVRQTRGTVVDQKIFHPTEFDFYLCSHAGIQGTSRPTHYHVLYDENEFTADALQSLTNNLCYT

SEQ ID NO: 71702 - protein, 259 aa, Zea mays
  Coding DNA Sequence Number=SeqID_28327
MALPVDMAGLCPRQGDVGAPLKSRLSLSSVAEAESEPWGRARRRSFGRGQGGVRALGSGEAEFCRLPGFSPSPSPGVGRSGVRRLPGLSPSPSPGVGRSGVRRLPGLSPSPSPGSGGAKFAVFRVLARVRALGSGGAEFAVFQVLARVRALGSGGAEFAVFRVLARVRALGSGGAEFVVAPLARPDCLSDSLCRVAPQSEWRRRRCPSVRLLYADGGYQLRIRRLEAPEASEEWLHSFEVLIPCVMLRLVWSFPHANWP

SEQ ID NO: 71703 - protein, 92 aa, Zea mays
  Coding DNA Sequence Number=SeqID_28328
MAHFTPPSRSAPGKLLCQSYVCHCIEVPHVFSSRYHMFLIEVSHVFRVLEEHFVLEVSLLAGIVMGGGAGVSLHGKFRVATDDTVDAKNKFK

SEQ ID NO: 71704 - protein, 76 aa, Zea mays
  Coding DNA Sequence Number=SeqID_28329
MDEVQINKKGERLQVVEIPREREIVKERKTPWYLRTRITKGEAQKIRRLAQRRSCEAGKLRHVRRKGNRLKDEKAI

SEQ ID NO: 71705 - protein, 406 aa, Zea mays
  Coding DNA Sequence Number=SeqID_28330
  Homolog annotation: Hit_ID=Q6J9V9; Match level="QueryCoverage=16%, HitCoverage=33%, E-value=3e-09, Identity=47%"; Hit description =Putative uncharacterized protein
MSPLKGREPYIKAKEPEVGPQVALTVSSAEKLSPAATTSAPTVASTCPPAPHQRAPAASKRTGSNSLPSPAWLEDASSTELGDGFHPRKLKEKVAHEPVREVELRLSPPSAPARMMKILEAKGGAEAAARLASPHHRAGGHRLGAEGAKPPRAERVTARRLQALLHFRPDQRVKGRTAMQATCNHTQGAHPFDFDASSMEAQSHTSYNRRAGYYVQEATPLLTPVPRLLDCGTNTTTQGNPAHGPTVTTEQIGHRVGDTFGRRSRRRFTSAIMTASKKGTGKGDAPKGILLREGNGPRALLLIRGSKAGPSEGFDSRLRALGLRTHYWSEVRRLAPQKGSTAASGHSGSAPITDQGFAGWPPEGFTAASEHAERGMTLGSGAALANPAPAKPLTASTYQPKNLEPD

SEQ ID NO: 71706 - protein, 300 aa, Zea mays
  Coding DNA Sequence Number=SeqID_28331
  Gene Ontology: Mol. function=kinase activity; Cellular component =ornithine carbamoyltransferase complex; Biological process=amino acid metabolic process
  Homolog annotation: Hit_ID=Q6QP54; Match level="QueryCoverage=34%, HitCoverage=31%, E-value=1e-11, Identity=55%"; Hit description =Putative kinase
MGALVLPFIDVRRRPSPSSSGVEAESEPWGRARRSSSSSGVEVESEPWGWARRSPSSSRVEAESEPWGRARRSPSSSGVEAESEPWGQARRSLSSSRVEAESKPWGRARRSPSSSGVEAESEPWGRARRSPSSSGIETGASPGLGEAELPMAPEAGLSYCWPHSGEWHSSRSRAGGAVFQSGWSVEQRSDYGHFGSVDLARVRIRCQATLALNAPAIRSVGVAIWPRLLLREACPSWASGESKVRPLLEGTLRRDVNPPGSAVFARGRARARRDRVPWAEPWPESPPSGLRSFVLMGFTS

SEQ ID NO: 71707 - protein, 156 aa, Zea mays
  Coding DNA Sequence Number=SeqID_28332
MAEKGTDLKGKRLSSPHRFVYKSIVNIKGMNGLNRKFAFFYLGALSQAQGQWRSTNRGLSGRSRQGSKGADGVVGWYGRAPAWASSSDERRCARWQAPATNSRRWRKRMAGSAVGEGEHVGAAVLFIEEREGERAPGRENKQSVGFKAINGGRYLL

SEQ ID NO: 71708 - protein, 142 aa, Zea mays
  Coding DNA Sequence Number=SeqID_28333
MDSGRQRGRDSRDRSMVAAVRAPRFQTTRERRLGWVRRIGPASLFSYAERKSGGFAPVRAKTTAILLWCALDSARKTGMTPTQRPHPAVRQSRRARESKETGNAGPSRKLQDMVDGVTWPSTLPLGWMVEWDATSIGEDHEE

SEQ ID NO: 71709 - protein, 157 aa, Zea mays
  Coding DNA Sequence Number=SeqID_28334
MKALWCGLSTEGGGRATVTLLRRAIQPTPTDLHRTQGHGRVRRCMARVPHTRSKLSQVTDGLRATARTRLSRQIYGGGGPSPEVPNDERAEAGMGSKDRPCVFIQLRGEKIGRVCSCPREDHGDSVVVRARLGEEDGDDTDPTAPPSSETEQARTRE

SEQ ID NO: 71710 - protein, 293 aa, Zea mays
  Coding DNA Sequence Number=SeqID_28335
  Pfam annotation: Domain name=SlyX; Domain location=181-241; Score= -7.7; E_value=0.05; Accession=PF04102.3; Description=SlyX
MTLTSNPLSHMISPTPINRGDTCFSFDYLSHECFPSILWEVLCSAGYPTPPMYTVQLYEEHRVPHCRVWLTLESHPLQPSWRSLDSETVGFRADDTTEAAALKALTTFCGYHSLEMVMHPLGLFPAEKRDDPMWCNRALQSDAIAHLTNLAQATKITLDSREDFVVDLSSELVEKDLQVEQLSQRIATLEQQVEIQDNTIDILEIQLHDMQEELEEANDHLEMHHQDMLANEAGSEEEEDPEELEPSLGPNATPSGVPPSPASNVASTTQMPARQRRRQNEQIPPPPPPAPTM

SEQ ID NO: 71711 - protein, 136 aa, Zea mays
  Coding DNA Sequence Number=SeqID_28336
  Homolog annotation: Hit_ID=A2XFR6; Match level="QueryCoverage=66%, HitCoverage=26%, E-value=5e-14, Identity=45%"; Hit description =Putative uncharacterized protein
MGTYSWLRGDDPDDSGDDDEDDDDEDDEENVNEEANDVQQDYLWGSQTNIVPGGGGEDRLNTLAGVVAGLNTDLDSATLDLSTVHLELENAHTRIVALEAQLQGQNPPEAQVPAMALSPPRKRICYGEPGSITRLL

SEQ ID NO: 71712 - protein, 202 aa, Zea mays
  Coding DNA Sequence Number=SeqID_28337
MALKALTTFYGYHPLEMMMHPLGLFPAKKRDDPMWCNRVSHVKDVWAMHPDQVGRITVQCMSALYRLQAMQSDAMTHLTGLAQTAKVTLDDRENFVVDLSSELVEKDLQVEQMSNRIQALEQQVEIWDNTIEVLENQLHDVQEELEEANVDIEMHHQDMNAMEAGSEEEEDPEEIESASSLDTAYSGVPPTPGASVASATQG

SEQ ID NO: 71713 - protein, 143 aa, Zea mays
  Coding DNA Sequence Number=SeqID_28338
MDLKRASHGKVTLRGVSDRFGGNLKLGLSVGEKGVHWRKRLVAFTVASSPAITRYAYHELLRCAEESKFLLNGPNPFIGFERVFGFDEKKRVFSAVAVTKAAIASANVGGTGGGLGDLSSARFIEGGGLKRSKSPRDRGFENR

SEQ ID NO: 71714 - protein, 261 aa, Zea mays
  Coding DNA Sequence Number=SeqID_28339
  Subcellular localization annotation: CTP_CleavageSite=55; ConfidenceScore=5.69e-01
TPPATRPTAPSLTPRPPAPGVPPDRAPPDSAPGSAVPASSARPRTPAPPAPGCARARSGEPRPRRPRLAPGELAPGRALVRRARAARQLGPAPWPAPAPRPSARPAVVARRPTAARRAPLARARPPPARPPASWRARPPPHRFNRPRAPARPPVLALGLVRPYPRSPALAFPDVLARSPRRALLASCRPSAWPRARPSVPSARGLELGQRTAPTRARLVRSTLSVALRVRVFAQRSGVARRARDTTVYPLTPVYPPVSYMR

SEQ ID NO: 71715 - protein, 115 aa, Zea mays
  Coding DNA Sequence Number=SeqID_28340
MAGMYCNARDCLNKRMQPPARTAARILLSPVDKAKGSAKKKDRGRGIPRKGSFSAKEPGSEPPITDQGFEGWPPKGSTAASDRVGPTPNTGQGFEGQPPEGLHGRLRLLGLRAHY

SEQ ID NO: 71716 - protein, 280 aa, Zea mays
  Coding DNA Sequence Number=SeqID_28341
MAGDWVTTYCLEEDGFPKVLYATIVRLGIMDHPEYVGREYMERGTEACQISVHIGASDKYPEVRPWSVTMTGHRLKDTYQLTARKALWYLCQLFEWHLGSTPMKYFPPLDRNRPAWAARIRNLGSLGSLEAAKKDPTIVAMSGYLLSLDDLCNQLCQRARALTQRAEEAEVRWRKSRLDLAQSEARVANAESRVALAEEKLWEQADHHSKLLRDISLVDRVKRKDPHPQNSDGTNMLEGTPVYLFQPRRRICGPASPTPPASPRTDDEEGPRETIVGTNV

SEQ ID NO: 71717 - protein, 137 aa, Zea mays
  Coding DNA Sequence Number=SeqID_28342
  Gene Ontology: Mol. function=transferase activity
  Homolog annotation: Hit_ID=Q6QP44; Match level="QueryCoverage=43%, HitCoverage=7%, E-value=1e-16, Identity=71%"; Hit description =Putative aminoalcoholphosphotransferase
MDTPAEEPPLVPALGTATVGGLLDMSNIIYGTSRLCLCRRLSSTHDPAHRLNRVWNGLLDAIRKMQVSADDLRRLSRRNHVPEYVEHVHKNSLVNAMSVVNEIAEGLDTVSMDLEEVLISPQPLLEDYEALGLYDDF

SEQ ID NO: 71718 - protein, 99 aa, Zea mays
  Coding DNA Sequence Number=SeqID_28343
MARGTTIELGEVIAVVEVALTCGSTCLRRSSLWCCDMGGVKWERITMLSRVRWSSRVWRGVSGGAGIDHGEVHGIQTETRGKVCYSVVMADTLLLALGK

SEQ ID NO: 71719 - protein, 174 aa, Zea mays
  Coding DNA Sequence Number=SeqID_28344
  Homolog annotation: Hit_ID=A2X8G8; Match level="QueryCoverage=22%, HitCoverage=2%, E-value=1e-09, Identity=72%"; Hit description =Putative uncharacterized protein
  Subcellular localization annotation: CTP_CleavageSite=25; ConfidenceScore=5.03e-01
MAGGGGTPSAGRRTRGVGWRISHCRKSKKNKKKTSKLKPLKRVCLSPKLEVILEETSIDNAPSTEIKVMNRHTIVLTSTGPCIREDIIILVHCCERYKELFCKHGMSATDNSKSENVPSRIGKAILRVPELVQQTKITHKFEGLNLPKYIWELSLRFLGEIDSVNHVENLGIVF

SEQ ID NO: 71720 - protein, 129 aa, Zea mays
  Coding DNA Sequence Number=SeqID_28345
MVKSNKRKREPTPPSEDFGDSEYSEEEFSSESEGSPAPTYIRAVERSGLEGLDESEYSSGEEDSSDSSEEGGGGDGGDDDDDDDGGDDDDGDDGGGGGSGGDNGGSKGGNGGSRGGNGGSSKGSNRASG

SEQ ID NO: 71721 - protein, 162 aa, Zea mays
  Coding DNA Sequence Number=SeqID_28346
MGEAGAGASSDARGSWSKEPVRRKLDAKRHGEQEAEAGASSCEGRRGRKIRVGAWSSAAYGHGKGDPSEQAQGRRADKKQASRGVASLRWPEPEYGELFEESQRRQIRTARDEADGQHSERKSENNPEFLAIAKESTVIVTVDSIQKSDKFNCDLNIWFHSQ

SEQ ID NO: 71722 - protein, 162 aa, Zea mays
  Coding DNA Sequence Number=SeqID_28347
MGEAGAGASSDARGSWSKEPVRRKLDAKRHGEQEAEAGASSCEGRRGRKIRVGAWSSAAYGHGKGDPSEQAQGRRADKKQASRGVASLRWPEPEYGELFEESQRRQIRTARDEADGQHSERKSENNPEFLAIAKESTVIVTVDSIQKSDKFNCGLNIWFHSK

SEQ ID NO: 71723 - protein, 88 aa, Zea mays
  Coding DNA Sequence Number=SeqID_28348
  Subcellular localization annotation: CTP_CleavageSite=28; ConfidenceScore=5.18e-01
MKSPNHNVACTSGRRSSLRTPPAPPSLLADEKNQRPSGWTSQEYMSAFQARYLSLGICPGGVCPKTANFPSISMAMTTSGLNGKDEHG

SEQ ID NO: 71724 - protein, 194 aa, Zea mays
  Coding DNA Sequence Number=SeqID_28349
  Subcellular localization annotation: CTP_CleavageSite=75; ConfidenceScore=5.45e-01
MSRCPRPSIFLPHVAAPNIAPPFSPSWTRGDGLLVPLRSLARARFPRDVTGTLSTAAKTTSDAVRNVFTGSRATSSTMSTSSCVALPVRILHPRVQFGLTQGRYAAGARINHRLGHAQACRSRFLPLAMQPPYRIPLRSCVSAGTVKANGVTHTSQAIRQRRPLGGTRARARGDDATSQSPGVHHLGCGGAYGQ

SEQ ID NO: 71725 - protein, 151 aa, Zea mays
  Coding DNA Sequence Number=SeqID_28350
  Gene Ontology: Mol. function=metal ion binding; Cellular component =integral to membrane; Biological process=ubiquitin cycle
  Homolog annotation: Hit_ID=Q2QM24; Match level="QueryCoverage=49%, HitCoverage=88%, E-value=6e-23, Identity=68%"; Hit description=RING -H2 finger protein ATL2I, putative
  Pfam annotation: Domain name=zf-C3HC4; Domain location=88-129; Score =31.3; E_value=3.5e-06; Accession=PF00097.16; Description=Zinc finger, C3HC4 type (RING finger)
MVRLEAAFAVVSVLAVVTVAALLRACSRRAAPARLRDDDEARRAHRRTVTAVFVGGVEDVEAGLDEAALRALPKVVYGDEEAATRACCAVCLGEYAPGDVLRVLPQCAHAFHQRCVDRWLRLHPTCPVCRSPPVTTPVAAAAKPLAVAPLS

SEQ ID NO: 71726 - protein, 204 aa, Zea mays
  Coding DNA Sequence Number=SeqID_28351
MAPACLGASRRWSSEEAAKLGTKRPCAGGFGGGPLSVAGSKEVGGVESKIQEFGGSFGVGQRRTAIVKRLRRSTPAKKVGAEKRKRSSSPPSTLSSIRSAAPDPKRTRVVEIKNALMYVFMNMFGYQELLNNCLCSLLTMDSENKKLQKALAHLIRVVEQRYADIVDVIHEDELLIDYDLELNNDDIVGYDDGRDYSTDNTYPY

SEQ ID NO: 71727 - protein, 273 aa, Zea mays
  Coding DNA Sequence Number=SeqID_28352
  Subcellular localization annotation: CTP_CleavageSite=72; ConfidenceScore=5.34e-01
MSGAPGGLRLKLATFGNFQRHSRYNSPDCPVYTGQCPVRQGRSASGTRQLRETPTASPLYFTGQSGVHRTVRCDSGATAISAPTALCRAFNARSARAEGRLAHAGTPDSKQYLSVIGARKDVFDGEQTRCKSEQNRHSNDRADSTSMSWGVRSRCILLLGVEQRRLVGSERCPVLVMATVAWKSSKQNSGEVAQHAEETERRAREESMEMGTRRALVGRMQRADSWRGSRAQSARQPDARAARAFEVEDVDRRAPHVREIGRDREELVWASNG

SEQ ID NO: 71728 - protein, 125 aa, Zea mays
  Coding DNA Sequence Number=SeqID_28353
  Gene Ontology: Mol. function=Rab GDP-dissociation inhibitor activity; Cellular component=synaptic vesicle; Biological process=regulation of GTPase activity
  Homolog annotation: Hit_ID=O22470; Match level="QueryCoverage=56%, HitCoverage=15%, E-value=7e-33, Identity=91%"; Hit description=GDP dissociation inhibitor protein OsGDI1
AETDNPQSELKPGIDLLGSVDEIFYDIYDRYEPVNEPSLDNCFVSTSYDATTHFETTVTDVLNMYTIITGKCFLAFVYGGDPLTDLSLLALLDKFMENKPKGSRIAEGRWHGGSQIAPAKKLLIS

SEQ ID NO: 71729 - protein, 103 aa, Zea mays
  Coding DNA Sequence Number=SeqID_28354
  Gene Ontology: Mol. function=oxidoreductase activity; Biological process=electron transport
  Homolog annotation: Hit_ID=Q10BT2; Match level="QueryCoverage=66%, HitCoverage=20%, E-value=5e-21, Identity=75%"; Hit description=Cell death suppressor protein Lls1, putative, expressed
MTILTSLGFLHYWKPRALNIYILGMCPCVATETYNCGRPWQAMKALEAALQVASVAIVGFLAVAKGTVLTSTVQRAAVMSADVLCFAASRWLANFIQNFYFQD

SEQ ID NO: 71730 - protein, 324 aa, Zea mays
  Coding DNA Sequence Number=SeqID_28355
  Gene Ontology: Mol. function=calcium ion binding
  Homolog annotation: Hit_ID=Q5Z905; Match level="QueryCoverage=91%, HitCoverage=95%, E-value=2e-51, Identity=43%"; Hit description =Calmodulin-like
  Pfam annotation: Domain name=efhand; Domain location=257-285; Score =16.5; E_value=0.1; Accession=PF00036.23; Description=EF hand
MGNLDWFGRCRMTEFGSSYHESCHPAKLYRRYVVKRNQRKRQREEDLKKEEKKSSEKRSKTMHETIIESVDNLGGSVEVTKEDEEKMSKDQSANVHAELPKEGQIKLGTDHPIVNHGEPAKEGDENMNTDHSEAVLDKPAADANMAEEDPEYEEDPEEIEIYEDDEDMDDAHAGAQNGEQNENTNDRDVKPEVATADGGNNRSSTQPEVGNITNTHERAASMEDKLSVAEKGDSVEGGEKVVSKEVKPAKDEVVDKDLLQAFRYFDINRAGYLKMDDLKCILHNLGKFLSSRDVKDLVQVALVESNSARDTRIIYPKLVKIVDL

SEQ ID NO: 71731 - protein, 413 aa, Zea mays
  Coding DNA Sequence Number=SeqID_28356
  Gene Ontology: Mol. function=cysteine-type peptidase activity; Biological process=proteolysis
  Homolog annotation: Hit_ID=Q8S456; Match level="QueryCoverage=66%, HitCoverage=32%, E-value=1e-135, Identity=86%"; Hit description =Putative uncharacterized protein 163K15.6
MESHDLRAERESRLVGGNETDGFGYDYGAGKWYSFRLERVVSIATTAQAKMKLWKETSRNSKTTTSSRRGLAATPSRLPVKAAVIYVSFPHYDLLFIQCLIMKSVGRPPSNPKRLTIESSQEKLNIRCISYDVIVSSWIMSDRQLDVVARLGFSSIFDLRTDALESRSLIRWLMDKLDPRDMTIRPGTGKEMKITKDTVRLILGLPCAGGGREFTDWYGEVDAAAKLRRDLNVGKEEFDVVKLQGKIVLGNDDELSIRCFFLILFNRLLFPSASWGITNNEVLMTSNMARMADIDWCQLVYTDFCDAATRWHKRNKTNITATIYGCSLIVLIYYLDHLHHPASPDNKYGTPRIKFFDNETIRELARGDKRPPVKLVNHSAMQSFVAVQKRVTSLLQNGLFLPFSTYMCHVSSI

SEQ ID NO: 71732 - protein, 45 aa, Zea mays
  Coding DNA Sequence Number=SeqID_28357
MAPYNFKDHVICFLIYPKVGKVLVLDSLNYEPSTYANLKFLSILE

SEQ ID NO: 71733 - protein, 66 aa, Zea mays
  Coding DNA Sequence Number=SeqID_28358
MESHDFRAEWESRLVGEVCDLCRGLETDISVVLTVAFGAIYAQVKKKEKDVEADLQEFQDFDEFVV

SEQ ID NO: 71734 - protein, 90 aa, Zea mays
  Coding DNA Sequence Number=SeqID_28359
MGWERRGLGVGSSTSVRVVGAEGSTQWLGEDVGKRKENHGKERITPEFGGYLKRNFIPPNSGCYRSNPLNRNLTPEIQEEASKKTRLVVG

SEQ ID NO: 71735 - protein, 130 aa, Zea mays
  Coding DNA Sequence Number=SeqID_28360
MLTVPSDCTSSPWFGRYTRRRRGHPPARVDRAIPTTSDAEPYLDVTARVSPSQPHPSPDLPRRRFGQKLNNMKLRKTLQKQPQDCNLADGEYILVPEQGAAQEVAPDPAPEPAPEDLPATALEGKPRFYA

SEQ ID NO: 71736 - protein, 183 aa, Zea mays
  Coding DNA Sequence Number=SeqID_28361
  Gene Ontology: Mol. function=carboxyl- or carbamoyltransferase activity; Cellular component=ornithine carbamoyltransferase complex; Biological process=amino acid metabolic process
  Homolog annotation: Hit_ID=Q8SA97; Match level="QueryCoverage=100%, HitCoverage=24%, E-value=1e-22, Identity=40%"; Hit description =Ornithine carbamoyltransferase
MAPPVDMAGLRPRLGDVEAPPKPRSSLSSVAEVESEPLGRARRSSSSSGAEPKSEPWVGRSGVRRLLGLSPSPSPGSGGAELSSCPSPGSGGAEFAVFRGLARVRALGRAERSSPSSGAKPESEPWVGRSGASYGRSVERQSDGGHFGSAGWGARVKIKLYADGGYQLRIRSLEGTPNYGPRQ

SEQ ID NO: 71737 - protein, 116 aa, Zea mays
  Coding DNA Sequence Number=SeqID_28362
MEVVGVVFIASNHFLAIAPFLLTVDVFLSEAHPSVANGLPQGPRRSAHRCFSIPDSRLRIVVDELMHLRNDQLGKQKQCLALAILFGKPYTLHELLPLVKNRYHRMRHMEDAVTSP

SEQ ID NO: 71738 - protein, 119 aa, Zea mays
  Coding DNA Sequence Number=SeqID_28363
MTALARHDNLGSGSQLAVSQTSACSAERAQNRVQASEDADGWGPPIDATSTGSFILYVMTPLHLAHLRHFVSGDSSQDFNDLYRILRLGTHDRLPQPPTVFFGCQHNFSAIIVLSSSSP

SEQ ID NO: 71739 - protein, 136 aa, Zea mays
  Coding DNA Sequence Number=SeqID_28364
MPPRHRQVFLCPFIYSFPFPSATAAAVISRADRRARRWSLKMDPMDAIAAHLKARTLAKRLATARLMHRRHLELQRQSRLNHQDIVRAVVGSSASTTAREVVSTPVHVEPIVLVIILSDDEDEEIDCTTLMDDVDE

SEQ ID NO: 71740 - protein, 41 aa, Zea mays
  Coding DNA Sequence Number=SeqID_28365
MARPTPITIDADPYLDVTARGSPFSPDPSPELYHRQIFGKF

SEQ ID NO: 71741 - protein, 202 aa, Zea mays
  Coding DNA Sequence Number=SeqID_28366
MASPTPIVGGDAPCHTDSLAQRGLSPHSVGSTTGKQDTTHLHGTLCSYSRNMECLLVKVWLALEPHPLHLGWRSLDSETLGFRAHDTTEVAAMHTLTTFCGFHPLEMATHPIGLFSTEKEDDLMWRDRVDHVKEVLQCEAMPHLMGLAQDAKVTILDRKDLVVDLSTELVEKDLQTEQMGTQIHELEEQVQERNHTIEVLEN

SEQ ID NO: 71742 - protein, 52 aa, Zea mays
  Coding DNA Sequence Number=SeqID_28367
MAQCSALTILIGKPYTSRTIQEMVDGVTWPTTLPPGWTVEWDVAPAGEEHEE

SEQ ID NO: 71743 - protein, 62 aa, Zea mays
  Coding DNA Sequence Number=SeqID_28368
MGEDPTGIRMQAAQVEGIPISSGLLRHRRGAHGGDGEMSGNKVQNVYGIKSGLSTGSHVSVR

SEQ ID NO: 71744 - protein, 149 aa, Zea mays
  Coding DNA Sequence Number=SeqID_28369
MPPGVDVQRSKSGEIYSLRHRSSLASKTDVHASSAPGKGESVQREIHWRGREDPEISGDGHGGNHSHPHSFSVRSQLSAWGADSWLESCLFCEGIRMRAAQVEGIPISSGLLRHRRGAHCGDGEMSGNKVQNVYGIKSGLYTGSHVLVR

SEQ ID NO: 71745 - protein, 80 aa, Zea mays
  Coding DNA Sequence Number=SeqID_28370
MAGGIELAGAKERWLAGEVNLMLMLTLVHNKIMVLGLAFLRETLGDTGVSQPSPLKGISSRDSGQSPPRVKRRVRLIGNG

SEQ ID NO: 71746 - protein, 129 aa, Zea mays
  Coding DNA Sequence Number=SeqID_28371
  Subcellular localization annotation: CTP_CleavageSite=9; ConfidenceScore=5.47e-01
MASSPSPPRLQLLDAHYSFSLTQQQPAPLFLLPWSPRQPAGSSVSSPWRSLPAGRQRPLPGRRSLSSPRRVPLRTSPVGSLSPCAQKLPSPLSACSMSMALQQLGVLDEMCSSPDGSARCRLVVLLRSE

SEQ ID NO: 71747 - protein, 118 aa, Zea mays
  Coding DNA Sequence Number=SeqID_28372
MPPRTRRTTRKRTDPIGVPCHQLAPRHEDSSSGSNDPTGDLEEQVNRLQTELRRRTDIWVTDGDRINELRSDIRRLRDPLAVRDLALDWVVQSRSLAWAKEAKAQARVEELSSAIDDL

SEQ ID NO: 71748 - protein, 65 aa, Zea mays
  Coding DNA Sequence Number=SeqID_28373
MAGGIELAGAKERWLAGEGFELGIKVNIPDLWLKVRKRQTFVASVLRWYQRKNTKNEVAGGKDPP

SEQ ID NO: 71749 - protein, 208 aa, Zea mays
  Coding DNA Sequence Number=SeqID_28374
MVGRSKPGCGLCPALNFKDLHHPCWGEGRARGLPSRGLASRFFLRHLGVETILQLCGGGVLQPCGGKANCCCQARVQHSVLCPGDCGRPHRRVSQHVVRRGGGTRVLGRSRSRGKDGGEDLSVRFRAAGARWCGVGGQVDAAVGAEVVATGEGFSADKIVDAICAPGLRLFGFNIWGQLAEATERSVKPSARAGFLEETLAAMAQAWC

SEQ ID NO: 71750 - protein, 22 aa, Zea mays
  Coding DNA Sequence Number=SeqID_28375
MVEAAAFLFFPCFREGHGMQPM

SEQ ID NO: 71751 - protein, 529 aa, Zea mays
  Coding DNA Sequence Number=SeqID_28376
MGCAGVLWRDPRQGRPFQQLRHWRACARGGVADLVFFLLLLEGCNPMGVGILPPPFGFKDFHHAARSQPPAGGHPQGGLPALWWREASRAAASPALSFKDVHHLRWGGGEPSGSFAFRVGWQSASSSSIRGRRAFTVCGAVSCRVSGSAAWAALVPPLVLPPAAGAERGCPSTARATVAPRCPSVQRWSLPLVELVWPLPLVRLPIVEVVASAGETVSATCHQTPGPLALMASLLPPVGGRGRGPIRSSAHPEVIAAAGEPLGAEVVVAAGAEVVAVVGGAVRSSRYGTRLSGYMAPGPTQETSARSSEPDLQGGGACRPTVRDQAEQLHGLRTTPGDQCPQCRTWLSGYTGSGPPYGTGSRSLEPAPRLSDLPTFVSGALNCEPGCSIRVSPCQIDGNRTGGIAERYYLKDCKTNRSGLWGQTPPGCCTRMRFLATKKMVGPRSAHSRYFEGSFPAGESCRALLGMELAVGLGPDPGFSSAFDTRALVSGCGLFCMYLSTARTRGGLEGPPKEGVLHLRRPGNMGSLR

SEQ ID NO: 71752 - protein, 85 aa, Zea mays
  Coding DNA Sequence Number=SeqID_28377
MVGGFLRRRRGRRSRTADDAEQAAQQHEAEQAAQQQAVPQDDDDQQQDASGLGWFWIMLGVIVAPQQHPRSAVQGTLPWTCEYAE

SEQ ID NO: 71753 - protein, 371 aa, Zea mays
  Coding DNA Sequence Number=SeqID_28378
  Gene Ontology: Mol. function=ligase activity; Cellular component =cytoplasm; Biological process=response to auxin stimulus
  Homolog annotation: Hit_ID=A7PZS7; Match level="QueryCoverage=98%, HitCoverage=97%, E-value=1e-120, Identity=55%"; Hit description =Chromosome chr15 scaffold_40, whole genome shotgun sequence
  Pfam annotation: Domain name=GH3; Domain location=8-355; Score=268.0; E_value=2e-77; Accession=PF03321.4; Description=GH3 auxin-responsive promoter
MPICSCEETIHEFEMLTRDAGRVQKDTLKKILELNADAEYLNKFGLNGRTDVESYKSCIPLCVHSDLEPYIHKIADGDSSPLLTGKPVTSLSLSSGTTQGRPKFLPFTDELLETTLQIFQTSYAFRNRVSSHSVQHKVTYAVLPQTGYFEFIPLEVENSASSIHYLESEPVGLTEVEVGKTYEVVITTFGGLYRYRLGDIVKVTGFHNATPELRFICRRSLVLSINIDKNTEQDLQLAVEEAAKLLDAEKLEIVDFTSFVEKSSDPGRYVIFWELSSDASEDVLRGCANCLDLAFVDAGYVGSRKIRAIGPLELRILKRGTFKEILDHFLSLGGAVSQFKTPRFVNPLNVKVLQILSRNTTRSYFSTAYGL

SEQ ID NO: 71754 - protein, 418 aa, Zea mays
  Coding DNA Sequence Number=SeqID_28379
  Gene Ontology: Mol. function=transcription regulator activity; Cellular component=nucleus; Biological process=regulation of transcription
  Homolog annotation: Hit_ID=A2Y807; Match level="QueryCoverage=99%, HitCoverage=92%, E-value=1e-113, Identity=58%"; Hit description =Putative uncharacterized protein
  Pfam annotation: Domain name=HLH; Domain location=182-233; Score =60.3; E_value=6.6e-15; Accession=PF00010.17; Description=Helix-loop -helix DNA-binding domain
MDKEQQESHLDSFAPLDGAAAPEDQQHQPACGGGPEMVDYMLGRHHVNAHAPPSPTQSQAVSFDKLSFSDVLQFADFGPKLALNHPVAASVGGGEDADADDDDDGYFFRFQSLPQRHADREAAGSKTTAEDGGGTGVVVSEGTTLVQQQADHGRADKAGDQGKSGRRKRPRTVKTSEEVESQRMTHIAVERNRRRQMNEYLRILRSLMPGSYVQRGDQASIIGGAIEFIRELEQLIQCLESQKRRRLYGGSGDAPRPPVVDAAAGSGGALITSSTQPLALQPPHLFPPTPSHPFPVAGADAKITLDLEAAGGAVVDDAGGGLREEVAENKSCLADIEVRALGADAMIKILSRRRPGQLIKTIAALEDMQMSILHTNITTIEQTVLYSFNIVGEARYSAEDIAGAVHQILSFIDVNYSL

SEQ ID NO: 71755 - protein, 465 aa, Zea mays
  Coding DNA Sequence Number=SeqID_28380
  Homolog annotation: Hit_ID=Q6L5C9; Match level="QueryCoverage=100%, HitCoverage=59%, E-value=1e-130, Identity=56%"; Hit description =Putative uncharacterized protein OJ1007_H05.1
  Pfam annotation: Domain name=zf-LSD1; Domain location=247-277; Score =10.4; E_value=0.093; Accession=PF06943.3; Description=LSD1 zinc finger
MASEAKEMKYRRRGRVPGPPEHGQRSDRSGALDWAALKHDPAELLRKLDEVRDQITRSCELMGPPPPDRHRAMSRRTVSLRPSYAEPPHAAGRAPDHYRSRYADRNRTSLPPSSYDHRSQRSVPDDEAYSRQPFRQQYYHERQRESHGFGHGRRHHSSCQCAHCLQSQRAPVVAPPKDHVPMARYFAGQGSFRFDRSQPISSELDRRSVASSLYSHLSVSKRRVEYFRKKAEKFCRPTRGAAPFLVCTSCSHLLQLPQGKFAGRKKDQVQCGSCSEIIALEPKQVKVHPVITPPSFPVSKGVRSKGSSHRDTKSSGWYQHQDDDNFNFYKPQAQKKDFADNMSPSSTASYGRTDSEHGSNRSVQLKSVPASRSRFSNDPKDILCQGDTGGQVEASGQCTVSPQGPILVDKQMDPFSSQWKEKDYSGGNQIIRKECDINTKSDYEANARGESLGRKCIQKSKEGRK

SEQ ID NO: 71756 - protein, 280 aa, Zea mays
  Coding DNA Sequence Number=SeqID_28381
  Subcellular localization annotation: CTP_CleavageSite=68; ConfidenceScore=5.41e-01
MSSRSLIHRVFPPSKPPDGGYPPSFRLIVGGTQLRGSWYLSAIVRLQGFSSCSPAAPLRRWSPKMVTSSLMVGESEPGCALCPSLSLKDFHHQGWGGECAELGCTVPGSRTRVASEPLAAPASATAAGRGSSAGEIARAGHGPTSNSTAFCPSLPHEFGHGRGPPGSNIRPEVSAAAVRPLGAEVVVVAAAGASDGVPFVGLLLLRRPSPIEWGYSPVDYLNRFTKHESPRVKVTSESGDPRTASPSEARSDLAEGVVDAEGATAPFQRQDPSLQDQSVL

SEQ ID NO: 71757 - protein, 102 aa, Zea mays
  Coding DNA Sequence Number=SeqID_28382
MPSVMHGKEPDQAIRSSRGERVACYMKAARELGRSAAGRSCQGAWVEREGSRPVIVQLGNGVTTPRVVLVINVLGLYIGAFWFTKCNLNGNGNDPRSNVGGN

SEQ ID NO: 71758 - protein, 78 aa, Zea mays
  Coding DNA Sequence Number=SeqID_28383
MASEDMVGKSRGDMAVTTTINLAKEAKLAREGVKAPGHQILTICKLLIVVTLLLLLALVLSSPTWLHLPLCWSMWEFH

SEQ ID NO: 71759 - protein, 80 aa, Zea mays
  Coding DNA Sequence Number=SeqID_28384
MPRNMVNRLYPSRDLRRGLPFRLWWVQVRSLHDDSRGQGGIVRQGGSLEDMVAGVTWPSILPPGWTVEWDPTSAEEEHEE

SEQ ID NO: 71760 - protein, 1158 aa, Zea mays
  Coding DNA Sequence Number=SeqID_28385
  Gene Ontology: Mol. function=ARF GTPase activator activity; Cellular component=cytoplasm; Biological process=regulation of ARF GTPase activity
  Homolog annotation: Hit_ID=A3BDG5; Match level="QueryCoverage=10%, HitCoverage=13%, E-value=8e-29, Identity=52%"; Hit description =Putative uncharacterized protein
  Pfam annotation: Domain name=ArfGap; Domain location=692-790; Score =39.0; E_value=1.2e-08; Accession=PF01412.9; Description=Putative GTPase activating protein for Arf
  Subcellular localization annotation: CTP_CleavageSite=41; ConfidenceScore=5.46e-01
MASKQSPKCNTIVQGSDAPSVTPKCNTIVQGSDAPSVTRMCASTVWGQLCLAAVKEDRSLASVMAPSSSSDSSLALALEIQTRLLLAELDKRFQAFDNKWDSRVWTLYSSDNDDSVAGPVNALADIELADTPIPGSCLISIDSDVPLDVNLTRGGPPSIDGHSASLAPFVHDVAAQFCYQEVEAHLTALDDGDRSDIRETDVRAPAPDDRLLVSLEGICQEGNQSEETAPVADMDLPAAHANASAGAMTSTVSTGTASFGACSVRRGHIASESLASALKLLDRMSNPGLYSCSNTSATTSTLALEHQTRAILVDAQAFDRLVHNLSCFSVIGPDEAESVYQILGILLQHGPANQKRFDQINGVDAPLQVVAVYTSRDPKTPDEVEKLENIYHCLCDVLMPLENKEKFVNAEGIEFSTPSVLVTKEDEVLNALPNRCSMNCFIIVYSCFLPLFSCNWDAVPHRQPWPPPVQFVILGEGVPSCLSPWPSFIFVELPIVRYFCLLPELPWAVLAYQCGSNMFVGVVEVAVRLDLLTFHEVADDGEQLGERVAELDVPVSGVEDGLANTILIWSCFSPTLCWKISWPPPFSLESFYTGDHALFIKEIAAINSLEHLNSLLNVLQARGEQVVFPGFGRPYVFNAEMIKRVKHTSEAKDSARAALKSTWWTLGCSYEEDAELPSLLDRCLLLLIYEEDAELMDLEDLYFSRSAKIGAFICLQCYGVHRSVGTHVSKVLSVTPDQWTDDEINSMIEVGGNSYSNAIYEALLPEDYEKPHPNSSQEERATKEPSQSYKRIPVMPSDGLPQVLGETEPSQSTNEGNNYPYTSQLTILEEHYAVTKEGNIKCILEQVHVLEITSRSGGEFHQRSASAADPPTIELVLENAHQGSLEDAEQKDNCGDSMSNERQHHSFLQVRLDVLQHEYSKADYWLFHFVRLLLKFLADQGVELFRVMVWDPGGIAMYRLEGKPNFKKGGMSVVHHLNQEPWSPSRQGSWTMASKQSPKCNTIVQGSDAPSVTRMCASAVWGQLCLVAVKGPNVRIKTQIQVHVYDEEKSASCCCRCVHVSVNLLAQPANQRLRGSHTGVQAHSSVLRMIVWWSEGKGDEDSPLRLSTTEHRAKEMLRVLTPPLTRLMLDGPAPLPLLPYPTRTSGVGLAHVGLKLEG

SEQ ID NO: 71761 - protein, 106 aa, Zea mays
  Coding DNA Sequence Number=SeqID_28386
  Subcellular localization annotation: CTP_CleavageSite=67; ConfidenceScore=5.08e-01
MGSSASPDPRARTQPRPRKTDSASTPEDGLRLARPQGSDSASASEDGLRLARPQGSDSASTSEGKLRLARPQGSDSASTSEEPPPRPTSGSDPPRHKEGHHYPTPS

SEQ ID NO: 71762 - protein, 104 aa, Zea mays
  Coding DNA Sequence Number=SeqID_28387
  Subcellular localization annotation: CTP_CleavageSite=76; ConfidenceScore=5.32e-01
MPLDRVRLTAAKSSLGRHGKLRLARPQGSGSTSTPEDGLSLDPRRRTPPRPTPGLGLSLGLGRRFPPRPTPGLGLSLDLGGASASPDLGLGPTTSQGRPSLPYR

SEQ ID NO: 71763 - protein, 79 aa, Zea mays
  Coding DNA Sequence Number=SeqID_28388
  Pfam annotation: Domain name=UPF0197; Domain location=3-79; Score =23.6; E_value=0.00021; Accession=PF05251.3; Description =Uncharacterised protein family (UPF0197)
MGGRYRSLLVALDVSGMLDGRNTGVGSYCFHKLDCGLSYEATSSKRSRSLAKEITTAAVASVLLGFGSLFVLLASGVYV

SEQ ID NO: 71764 - protein, 240 aa, Zea mays
  Coding DNA Sequence Number=SeqID_28389
  Homolog annotation: Hit_ID=O48967; Match level="QueryCoverage=70%, HitCoverage=36%, E-value=2e-34, Identity=47%"; Hit description =Putative uncharacterized protein
MSGLSAFVHAPFSYKRGGMRRSGPTLGGHSQVHTSSQAIHHTVEYAAHASAGVPDSVESSAYDAVCGQRVATPPPSSTASPGAMKQWRDDVDRLLGMAHSTSTRSRPRSSRREREATTSARSPSIRGAQTDDLRAELNRRRTGEEARVSLERARERRQNVEGRNLDRDFAAEAPQTPVGARSQTGVPLTGVGCAALADHLRTALSHPVLEGKPNANYVRARIRTHVHSDYINEHHHTMLE

SEQ ID NO: 71765 - protein, 279 aa, Zea mays
  Coding DNA Sequence Number=SeqID_28390
  Homolog annotation: Hit_ID=Q6JAD6; Match level="QueryCoverage=91%, HitCoverage=70%, E-value=3e-14, Identity=49%"; Hit description =Putative uncharacterized protein
MVRTKNVLVPGGGDDEDTPRPFKQVKGKTVYLEQQEGRKKRRLDRVARAALVAAAVEQAERGGQLQISSNQIAYRVRRVASRPRSSAPSTPATTTTPATATTPPHTSPAPVTPTPSTTSAIPTTSTTSASTAPPPAPFSAPPIPLARFRERDETEVQPLATDPRLIDLQCATAARLIWPPQFQGTLEASRLLFGSYRPTPEDPMPTPNLVIDTQAEDTTFHQFETQGTTVPDDDDDFGIPPPPPPPCSHDHEAGSSSVVPAAPPAVDPIVAAILQTLTQ

SEQ ID NO: 71766 - protein, 78 aa, Zea mays
  Coding DNA Sequence Number=SeqID_28391
  Subcellular localization annotation: CTP_CleavageSite=22; ConfidenceScore=5.33e-01
MSDFNGNATLVKAVINMELTVRGKTNTTSFFVVNNQGVNVGSKTINMMGGGGINSPHPPTSVTRNLLCMGAPDSPFLF

SEQ ID NO: 71767 - protein, 91 aa, Zea mays
  Coding DNA Sequence Number=SeqID_28392
MHIALAGNEVSFYVSGNMLVCIYGDYTLGACDLHAQVVTYAHAVKGVKEDDVCLATIINEYFVQITPCHSTIYHQRICMGHTSEIDIPCIK

SEQ ID NO: 71768 - protein, 47 aa, Zea mays
  Coding DNA Sequence Number=SeqID_28393
MVDKVQTKDKGKIQLELSWLEQPRLCSVWEHRTVRWCTGQCPVRQAG

SEQ ID NO: 71769 - protein, 151 aa, Zea mays
  Coding DNA Sequence Number=SeqID_28394
  Subcellular localization annotation: CTP_CleavageSite=45; ConfidenceScore=5.25e-01
MVAFQGGRPPFKGDSPYLRPQPSWAESSPTRSKVLPLRHGGWVPRVMQAGPEQKKPNRRARRSEQRFAFAIMTASKKTPSPLLIRGSKAGPSEGFNSCLRVRGLHTHYWSEVRRPAPRKGSTAASGHSGSAPTTDQGFEGWPSKGSQPPQT

SEQ ID NO: 71770 - protein, 66 aa, Zea mays
  Coding DNA Sequence Number=SeqID_28395
MGVDWEHTYYHAGGLLNCFSLQVEDEVPADSASETDLLTDCSDGSGTDAEDTAFGTADAEVDAGSA

SEQ ID NO: 71771 - protein, 138 aa, Zea mays
  Coding DNA Sequence Number=SeqID_28396
  Gene Ontology: Mol. function=transcription regulator activity; Cellular component=nucleus; Biological process=regulation of transcription
  Homolog annotation: Hit_ID=Q6H522; Match level="QueryCoverage=98%, HitCoverage=63%, E-value=1e-28, Identity=54%"; Hit description =Putative uncharacterized protein OSJNBb0035N08.33
MTRPDRLEEAAAYIRQTTERVERLKERKRELVASARASSSSQGSRSGSGSSSAGAAEVEVQHLGSGLHAILVTTGAPPSEGAPFHRAVRAVEEAGGEVQNAHFSVVGARAIYTIHALVAEGGIERVVHRLKAALRGDA

SEQ ID NO: 71772 - protein, 156 aa, Zea mays
  Coding DNA Sequence Number=SeqID_28397
MVNYFVYKRAQLMVNDMMYDDAETTCTGGPGLGTASGNIFSLAVILTQPPVEIGGGWCNRTDRAFRFYKLPGGKYDTSKKGVPLGIHYNWPQFQQGSPKNLTEGALYGIVEDLCTFILKEVIPAEGKYHDASGTLALPEFRILTEISRLSLSRDSY

SEQ ID NO: 71773 - protein, 102 aa, Zea mays
  Coding DNA Sequence Number=SeqID_28398
MGKNDSQGIAAEVWTYIQVVERSGLEGSDESEYSSDEEDSSDSSEEDSGGDGGDGGDDGGDGDGGGDSGRGGDSGRGGDSGGKGDHGSGSKGSSKDSNKASG

SEQ ID NO: 71774 - protein, 98 aa, Zea mays
  Coding DNA Sequence Number=SeqID_28399
METGSLRRVGVRWLRDSEVPEELPMRGRARSARRRPRGFGYGGEGASDVPGPPISETRPLTLRTGKRPPCDRELARARSMAEPYYICIVRKRIISSKA

SEQ ID NO: 71775 - protein, 19 aa, Zea mays
  Coding DNA Sequence Number=SeqID_28400
MAGKKRQFLEKSGALAQDY

SEQ ID NO: 71776 - protein, 29 aa, Zea mays
  Coding DNA Sequence Number=SeqID_28401
MNKNNIELHLYLQLDRRQRTFGDEADPQQ

SEQ ID NO: 71777 - protein, 60 aa, Zea mays
  Coding DNA Sequence Number=SeqID_28402
MARERVGEEKKVEGPVQREEEIEVTEDRTPPPSESQAGNSFYFDICGSEPESPVNEGKPR

SEQ ID NO: 71778 - protein, 108 aa, Zea mays
  Coding DNA Sequence Number=SeqID_28403
MEGSWVIRTSYLLELALCCKWANGGEQWRQQGYVHGGNSSVDLAPHGHCAGVFVKVSRPAKGVPARFASVGPAAAAKAWSEGWRLCLRPNICPPRDQFDRVTWCRRRR

SEQ ID NO: 71779 - protein, 499 aa, Zea mays
  Coding DNA Sequence Number=SeqID_28404
MSSPELRESSARMLEVTGGRWPKNVPIPFAAGEDFFTSRMARDLKVFPYERNIAAVVSAVMEKDRQDAAQKRRAVVRIADPMREAKRARGSAKAAASGGSKPVPTAKTAAPGHDKVPASTKVVASSGSKPPPGGVVKGRRPLSLARRIADFGTDISVDDYLVGSGEGQLAVVPPPVVTTSPMAMVGVKGAARDPGTGGGQSRPPTRRGAGGKVQRPARPLDKAESSTRAEVERTHVQFVDTYRELGARTADFEVLGQEADLRFLEWLQEELVVLPTIVTSFMSFASLVTYEGAMNALSREGCRHYEVFDQADENFEREIFKVEDPVTAHAKDVEYLVGLDGALPEAAEVLGSGPAHATATDNDIFVAASTMAADDDSFGSVSKCFESDDSGSSVVWTEESSDEDLDYFAALDVAAAEPSPRAEGSEGLPGTSTGYRRRRAVAKRRVSELSRSGRRYRSETERGRLRVDGTGEGELRNLFEGEELRIMLFNYREMGISPK

SEQ ID NO: 71780 - protein, 554 aa, Zea mays
  Coding DNA Sequence Number=SeqID_28405
  Subcellular localization annotation: CTP_CleavageSite=58; ConfidenceScore=5.62e-01
MQAACNRAKWMPFSDSQHAQPGGPGPRVMQPARRMLRACNCTATRATTAPPRLRDQYRGSRRPSARPSSTSLARRERTLSHGVKTMRPCSVPRTARTRVTAAPPTTRPVALTPRRDRRRLWHEKQATFRLRHNDRANKGTGKGGYPEKDPSPGRNQAPSLPTDQRFEGWPSEGFDNRLRSCGPYTHYWSEAGPRRVHSRLRRRARDDHGYVRYITKARAALPRLGGCSRKPGSGRTVDSVNISARELGPRPYTRATTSSHEGTTRPAEALREALRPRRSETTPPRPRGLHPVGALARTHRNKMPPRKAGPLAKKCDESFQASANTPFEARGLLSGTIIRGTLKTPNSQLVTPISIKLLRPDGARTRAKSRKTANSAPPDLGLGLELSLGRRRTPLRPTQGSASGSAPEDDELRSARPRARTRAQPTRRRTPLRPTPGLGLRPGLSRRTPLRPTQGSDSGSAPEDDELRFARPQGSDSALASADGLRLARPRGSDSASATEDRLDLGFGGASTSPNLGRRPATSRGGAIITLPRADSGRREQDRRPIWLAPPDRQ

SEQ ID NO: 71781 - protein, 58 aa, Zea mays
  Coding DNA Sequence Number=SeqID_28406
MARERVGEEKKVEGPVQREEEIEVTEDRTPPPSESQAGNSFYFDICGSEPESHVIGVA

SEQ ID NO: 71782 - protein, 132 aa, Zea mays
  Coding DNA Sequence Number=SeqID_28407
MARAHEKTASWSWAHTPGRAGGETVSATDGAGANRPTRGENPAAGGFNGDSPPVTRFLGIGEGGGGEGAYRSGGRGGGAGAAELVRRSSGRGRRVAEAGAGHGGARGSPFIGAQGEGSSGVRWTLVRCTATE

SEQ ID NO: 71783 - protein, 89 aa, Zea mays
  Coding DNA Sequence Number=SeqID_28408
MAHSGWRISGETVARAIRGCVRRHLLTVLGATVACSWLCAGLRCVACAVCSAAGVTHVSRQQPRLSALAESVTSLRRSGNADMSSPDHH

SEQ ID NO: 71784 - protein, 225 aa, Zea mays
  Coding DNA Sequence Number=SeqID_28409
  Gene Ontology: Mol. function=prenyltransferase activity; Cellular component=integral to membrane
  Homolog annotation: Hit_ID=Q1ACB8; Match level="QueryCoverage=74%, HitCoverage=50%, E-value=1e-85, Identity=84%"; Hit description =Homogentisate phytyltransferase VTE2-1
MSSGKLKRRGSAQGWQLLGAHTREPLGGVEWRGVGGLGGFGVSATCVGVAATGRGRESFGLGWAVGSQPLFWALFISFVLGTAYSINLPYLRWKRFAVVAALCILAVRAVIVQLAFFLHIQTFVFRRPAVFSRPLLFATGFMTFFSVVIALFKDIPDIEGDRIFGIRSFSVRLGQKKIAGHSILAAILWSCARSVDLTSKAAITSFYMFIWKLFYAEYLLIPLVR

SEQ ID NO: 71785 - protein, 192 aa, Zea mays
  Coding DNA Sequence Number=SeqID_28410
MTLGKEGNLGTGKAIFAECRVLTMALGKEGNLGNGKDIFAECHYQGTRQRDWQRGPLEGSLPSTCPTDTQQRSLLCRVPTRALGTGTGSGAHWATTRTQISAHGNERTKVSCACAGSQPVAVGDWDVHLRSEEVAEGTVRGRSGAVRWWDPAPYALMEPSIYCSLAAAADGPACPAAQWPRPARQRLELDAL

SEQ ID NO: 71786 - protein, 812 aa, Zea mays
  Coding DNA Sequence Number=SeqID_28411
MEVVELVPCAHNKWGNWHEFWFYVAEGTVEDHPGLPVSEMCSHFYSAYPPFEVAEEDANEGALRCAVGLSSGRDLVEEFVAYGVWPLAHGWALGEVCPRQMPSHGGKLVRSPVFALDPRSRDPAAFMREAEDGAVRIIGRVFELNRLPYGGYPGQDDVDRRGKKPVVESGDDPAPAVAPSSKKRKLGTAMGVLGVSDGFARELMRTCAAPGGRMSLPELRESSARMLRVTGGWWPRNVPIPRAAGEDFFTSRMVREWKVFPYGRNIAAIVSAVMDKDHQGAAQKRQAVVRLHEARPKRQRGAAKAAAPDGGQPPLAAKSAVPASSRAPEAAAAAGGSKSTKAAPASSRVPEAAKAARGLPPPGKRVADFATDISVDDYLVGSDEGQLVVVPPAAATTAAAVVPKAKSGALSAGGEMPALTAVRDEAGAVSRRLKEMKEALSQAADFADRAASGALTAVVSAEVERLRTQHADAVREKSAADMLDREPGLRCLEWVQEELQALPTIVEGFMSYASLVTCEGAMNALSREGCRHYEVFDQADEDFERDIYKAARGERVDDFGALNSALPDPESNPAEAVSEAALEPPPETAKGVPDAPAAATTGGGPPPETAEGVPDAPAAAAAGGGLPPIAAPRAEDPVTVAAEATAEAPAMAGSSQVQDFGPAHATATTNFLAASTVDDGNKSDGSAFKFSDFGDSGSSVEWTKESSDEDLDYFTALDVAAVEASSHAADAEDVPGPSTGRRRRRAVAKRRVSGADGGRLRVSRAGRQELLSLPAAMSTGEGELRSLFAGEELRIMLFNYREMGIIPKVEPM

SEQ ID NO: 71787 - protein, 138 aa, Zea mays
  Coding DNA Sequence Number=SeqID_28412
MTRDDDTVSEKVKALVPLAVRGVIEEKVASGAGEELVMSSGRGVGIASTTKDSKVVFVTREAEDRRSPDITMNKIKGLSSPGRGSGKRKTRMTVELASMTRCLEETLLQEILERLESWDFFSVQGDRDDDAKWGGGDL

SEQ ID NO: 71788 - protein, 93 aa, Zea mays
  Coding DNA Sequence Number=SeqID_28413
MRSWCLGMLKGCLVCSFMRLGVLFIAPRWEGELSRSSAPDKQPPALTERWATESEKHLRTSPQQAPDPCTHQGPSRSGTLLEFEKGGQQSLRR

SEQ ID NO: 71789 - protein, 142 aa, Zea mays
  Coding DNA Sequence Number=SeqID_28414
  Gene Ontology: Mol. function=prenyltransferase activity; Cellular component=integral to membrane
  Homolog annotation: Hit_ID=Q1ACB8; Match level="QueryCoverage=45%, HitCoverage=16%, E-value=2e-27, Identity=98%"; Hit description =Homogentisate phytyltransferase VTE2-1
MDALRLRPSLLPVRPGAARPRVFGLVLKCLNFQIIFYHHVVPYNEMVKDEFAFLAKGPKALSIVSVSLLAVQSLSDISPLFLTGLLEAVVAALFMNIYIVGLNQLFDIEIDKVNKPTLPLASGEYTLATGVAIVSVFAAMIC

SEQ ID NO: 71790 - protein, 287 aa, Zea mays
  Coding DNA Sequence Number=SeqID_28415
  Homolog annotation: Hit_ID=Q67U32; Match level="QueryCoverage=50%, HitCoverage=25%, E-value=4e-12, Identity=36%"; Hit description =Putative uncharacterized protein B1047G05.12
MAGATNKPTDLKMDLRVCWTDVGGRRWRLMGISGRQLSLVEQRIWAAEGGHVGELTGGTRHSGEGRGAFSEGGEAGRIWPVALEAEEVLKRNYSVREDPYGEIRRVRPKINGNSWDISKFKQVDIIRNHPAANSREELTARNPNASRDGKKLLKDIMGASNLTYPNFISKAETADETSDVPDKPSAVTPQQHDSSFPQAGKKQKGFAATTLNQCSNEVKIPSKVKNKGFCKRVFQPADGHSSTEWLQEPQEEAAQRTEDHGDSNKVACKGSASKEQRCHGQIGDGLD

SEQ ID NO: 71791 - protein, 201 aa, Zea mays
  Coding DNA Sequence Number=SeqID_28416
  Homolog annotation: Hit_ID=Q67U32; Match level="QueryCoverage=70%, HitCoverage=27%, E-value=4e-21, Identity=45%"; Hit description =Putative uncharacterized protein B1047G05.12
  Subcellular localization annotation: CTP_CleavageSite=15; ConfidenceScore=5.44e-01
MESSAVRGDTPRRPSAFAGASPPPPPPPPPRGWLAGLVSGAGRILAAVLGPEPSSSGSGSIASSAASDGDSPSASYSPAWFPPPGPHGEGCNDATDNNDSPVFPLSNNQSNQGKKETALKDYTGSLAIISEIEPKDAIMQLLMQETYSRSECSKFIKIIQERVLDSDSGDIDAGNRRGSKDNTITCNRVVFNWITTQVASE

SEQ ID NO: 71792 - protein, 25 aa, Zea mays
  Coding DNA Sequence Number=SeqID_28417
MKLGVILSRMTKPTKLKSKKTKAEA

SEQ ID NO: 71793 - protein, 797 aa, Zea mays
  Coding DNA Sequence Number=SeqID_28418
  Homolog annotation: Hit_ID=Q22WK5; Match level="QueryCoverage=18%, HitCoverage=28%, E-value=7e-10, Identity=31%"; Hit description =Putative uncharacterized protein
MQIQESDIPFLAQVNNRYGDHTDGHASYEGSDALPLPYATILDASEKGQYIRTHEDLEWFGPPERNTLLDCEMHTVHQQTQQAGCLLDDLDAAWQRMGRDAFNAERARRPSAQWQAARLFLNKCRGCTTFRQGRPGSLCHGPQAAGLRLSGKRRRGPHTCRRWTPAHTRVLLALGPCWSSDLPEGSGLVYRGPMSFRGGPALLGCGVFPCHVASFGLPIRWGQVWSSARLGDVAWVRCLHAAGEGTPDLGWGAPVFSGGIRINVVSSGDFTVRERALVVPDCSPPPVVIQKDDYQPCGGEKQIGLRPPSCPQLQGCSSSVLGRGCAELRLHLRVGSDPLLPSVSGGERRSPSVALSAAACLASRPGWLWHCLRRCILPLAQSVAARPPHGRWWRCARVGHIHGFSRSFGCTGRLYKTSYAVGAATPLPTGAEVTTAPSGADVVASADQRVKGRTAMQAACNRTKGAHPFDFDASSMEAQAHKSCGRKQQSSRQQAHVPSWDSGRALSHDVKTTRLCSVPRMARARTTAAPRTTHPVALTLRQDRQHRWQAKQATLHLRHDDRVKKGTGKGDTPKGILLREGSGPRAPLLIRGSKAGPSEGFNSRLRALGLRAHYWSELPQSTQSEGSPWVRSIHNQGSGYAPKGSAPVSALEDGLRLARPKGSDSALAPEDDELRLARPQGSDSASAPEDDELRLARPQGSDSALAPEDDELCLTQPQGSDSASALEDDELRLARPQGSDSALASKDDELRLARPQGSDSALAPEDDELRLARPRALTQPRKTDSTSASEEPPPRLT

SEQ ID NO: 71794 - protein, 256 aa, Zea mays
  Coding DNA Sequence Number=SeqID_28419
  Subcellular localization annotation: CTP_CleavageSite=41; ConfidenceScore=5.07e-01
RVRALGSGGAEFVVFRVLARVRALGSGGAEFAVFRVLARVRALGSGGAEFAVFRVLARVRALGSGGAEFAVFRVLARVRALGSGGAEFAVFRVLARVRALGSGGAEFAVFRVLARVRALGSGGAEFAVFRVLARVRALGSGGAEFPMAPSAGPDCLSDSLCRVALQSEWRRRRCPSVRLASGALYADGGYQLRIRRLEGTPNYGPRQLDCNLADGEYVLIPEQGPVQEEDQEQASEAAIEDLPAAPAIEGKPQFYA

SEQ ID NO: 71795 - protein, 328 aa, Zea mays
  Coding DNA Sequence Number=SeqID_28420
  Homolog annotation: Hit_ID=A2YGC2; Match level="QueryCoverage=53%, HitCoverage=75%, E-value=2e-12, Identity=30%"; Hit description =Putative uncharacterized protein
MGRLEPRAEMESQLMGKVCNLCRVLETDDPYQVHCTVHCVARCQVSPVTWRDCIIACTRSRSTDTRSKDQEQQDSSPSPQQEVESERPPSPAPQPEMPPAPPQGIPTAGGDPDGDGDDNDVGGSSSHDTERSEEPEPEGWIARPITRDAARECHFHDALDTLLRRAFEQHTWSIEYRCVVYQHRRGLYPDQWEATCLVRRPDDDLRGTKAFSEHYSITERDTAKVAMQDAPRRALSQYFSLFSGVADDLDLKYYPRRSTDSAGGVIVSPVCEGNPRLSSMVNLVAVLNTELDHTLDELGKVRVEVAELRAKCATRHNLDGGSPAPVGI

SEQ ID NO: 71796 - protein, 105 aa, Zea mays
  Coding DNA Sequence Number=SeqID_28421
MASVVRARRLGGQRLGRLRVVAVGPAAWGVDVGEWGRAGRGSRGLGSWRAAAAGRVRGWLEELPGACEREREAREESEREREGRGRTAGGGGGLVEVGKGRGQGD

SEQ ID NO: 71797 - protein, 76 aa, Zea mays
  Coding DNA Sequence Number=SeqID_28422
MARCMESDQLCGKWVTRLVGKDAQPLQSVKLVRLLLLFYYLIGLQCSALTILFGKPYTSRELPPLASSCTLFPTTC

SEQ ID NO: 71798 - protein, 91 aa, Zea mays
  Coding DNA Sequence Number=SeqID_28423
MSGPPASISDALPVLDSAAKCLRRLDQILGARLEAEGSRLYRAVGDYVLTCFRSHDPAMSLAPVLNGPVAATEDAARESVQDVVETVVARF

SEQ ID NO: 71799 - protein, 156 aa, Zea mays
  Coding DNA Sequence Number=SeqID_28424
MLSSTSSATAEEVPTAPTPAIEGDAGGASNSIPLATLEETEVALHETEAAILWEREALEAEHQRLSDWRTQLEERTKAASRQFASERPELERDHKDYKRDLQKVFARELEASRREKRLAKREEALSKREALTIELRAKLKALDQTLEAQRSSKWRP

SEQ ID NO: 71800 - protein, 119 aa, Zea mays
  Coding DNA Sequence Number=SeqID_28425
MGSRSLMCRLEAPSLPAWLPAPPPRPPPLGQGQRGCKQFLYPRWHRGSKEERRRRLRHADGSFVSYPPSEALEDYRWGRGGRLPGLGRVEARQSSATTTIGSATTTTTTTIGPAAATTT

SEQ ID NO: 71801 - protein, 32 aa, Zea mays
  Coding DNA Sequence Number=SeqID_28426
MGRLEPRVERESRLVGKVCNLYRVLETGSASG

SEQ ID NO: 71802 - protein, 68 aa, Zea mays
  Coding DNA Sequence Number=SeqID_28427
MPRNMVNRFSGGYGCWSDLTVYLATGLDSRLGPYLSRRGAGGVMGQASSSSFIYQNTAYYFCETPVML

SEQ ID NO: 71803 - protein, 170 aa, Zea mays
  Coding DNA Sequence Number=SeqID_28428
  Subcellular localization annotation: CTP_CleavageSite=30; ConfidenceScore=5.87e-01
MTALVSPAPPSRLPMPLPVPSTSMRRFPFRGQRPTPRRPSSQLALALAHRLPSPPCLLQRDVARLPAFLQARASENSESFAAQPCGSPRVSLDIWKALGAEEGGASTAWAAITRLQAVAVSLGASSALSLATSPSLAPKPQCGSGSGVLDLRSQSGSGFHQRLRGGSNDR

SEQ ID NO: 71804 - protein, 62 aa, Zea mays
  Coding DNA Sequence Number=SeqID_28429
MADDAGAAGSGFMAKTPFPPHLYKCALHRVTRFRSSYEAPEAKNRSLRRKLHHVGYKDTHYS

SEQ ID NO: 71805 - protein, 123 aa, Zea mays
  Coding DNA Sequence Number=SeqID_28430
MAHLIARSTRSGGRPKFGDGDLVVPVRQGLNPCLEKLHGFPGKLSRGSGEARVLWKWLVVVAGTRVAQAGGTELARAKDRVWVCADERQCVLWRMGTTSSTRLCREWLMGFVDWSQRYGVMKF

SEQ ID NO: 71806 - protein, 57 aa, Zea mays
  Coding DNA Sequence Number=SeqID_28431
MQMEANEAESEGEEAPEELVPAPEDPLDADVWLRIVESKFPLLTEDCPDAKARFAAQ

SEQ ID NO: 71807 - protein, 257 aa, Zea mays
  Coding DNA Sequence Number=SeqID_28432
  Subcellular localization annotation: CTP_CleavageSite=79; ConfidenceScore=5.20e-01
MARARAYKTLPDLDCTLPRTLKPHRSLARRRLSVRSESAAAQSLCHRRPASGAIPNSVQPSEKTVHTSVRLPERGIGVCFAGEASPRSPELSTPPEYVDRVNHSTILRFLVHTVATLPREAHHALGLNQFAVVWPVYSPPTRTPACTRGPGDSGHPRRQVVPRRDRQSLPEPTPPFVGPPSPPWTLPLTRPETRSPIPVMVGTSAVTARRPVGVSEALYAKVVSLEEMVAGITWPSTLPPGWTVEWDPASAEEEHEE

SEQ ID NO: 71808 - protein, 150 aa, Zea mays
  Coding DNA Sequence Number=SeqID_28433
  Subcellular localization annotation: CTP_CleavageSite=48; ConfidenceScore=5.53e-01
MWRLLRSRGRVRLPRPRSSPSPRVGRGGGRRLRPALSPSPRVGRSGVHRSSGAEPESEPWGRAKRSFPWRLGPDLAAVSLTLSSGSTVGAAQAALSSCQTGQWSGEIDCGHFGSVDWRACVRIKVSGHLCIKCPCDLVGWHGDLAKVASW

SEQ ID NO: 71809 - protein, 76 aa, Zea mays
  Coding DNA Sequence Number=SeqID_28434
  Subcellular localization annotation: CTP_CleavageSite=49; ConfidenceScore=5.20e-01
MASSFSVAPLWRAQCARHPSLCTTPFLPSAPAMVRHILRSELEHLSVSRLMHPVSNETPKTCMHAQLHSGFSQLMA

SEQ ID NO: 71810 - protein, 541 aa, Zea mays
  Coding DNA Sequence Number=SeqID_28435
MMVCLGLGGRRKQTLQDNPILQARILTVEGSSSTLGVNYTFGEEPSLSRRLGRPPRSLGQLSPEDISPARGLDNSIPASVPSVDDPARLWPTKSSFRANSASVRADTATPGFGSSKSGRGVPLTKQEKPRTARPTEPRDSYASGIRIPHYLDGGEASPGCHHINTDDGVRLSPNAAPANAGRCKVHRQDASSAELGDGFHHQKLEEEVASRPVQEVEPRLASLSAPARMVTTGEGVQPGRVMKILEAEQWLKRYQLPRSCVPPTTRRKDCGCPPSGGSEGGKTRCIREREDMVAFQGDHPPFKGDSPYLRPQLSWAKSSPTHSKVLPYGAGAGSHASCEMAQGIRSQTAARGACNRPAVTSIPPLSPRPAGERADSRAGSMQPRQVGAPLRLPTHPAWRPRPTRHATGAPVATCEQLHRHSHHYHASSNAEPVPRLEATLRTTQQCQPGATVNTAKNGPAVMAVAGGQEQRSRRQPSSRHLVGERENPLSRREDSAPVFRSSNGSRTRNGRLTNHSPRRINSAAGQAAPLAGEASDASPPP

SEQ ID NO: 71811 - protein, 116 aa, Zea mays
  Coding DNA Sequence Number=SeqID_28436
MRQHAEISFAKVNENRDLENGIRVQMSQVDVIKIKEATEKRRDGKAKAAEKERSTYGYLRREHTVGSIAGITAADEFAVFLLVAILLLTGKQSREASGGEDSDAEMQELGPESKGG

SEQ ID NO: 71812 - protein, 89 aa, Zea mays
  Coding DNA Sequence Number=SeqID_28437
MWAVRVCTNLVSRLLFFVGCLSPGPRKNDLTNYWALGPFVRPFTSLVDPGDIYPPQAPDLWVDLERSAFLDYKILDFIGCTGGAPNGCS

SEQ ID NO: 71813 - protein, 124 aa, Zea mays
  Coding DNA Sequence Number=SeqID_28438
  Gene Ontology: Mol. function=nucleoside-triphosphatase activity; Cellular component=integral to membrane; Biological process =proteolysis
  Homolog annotation: Hit_ID=A2ZVA3; Match level="QueryCoverage=45%, HitCoverage=5%, E-value=1e-17, Identity=62%"; Hit description =Putative uncharacterized protein
MVPLKFLRAHRNKVKEVMAMLSLVLEDNILGVRFILDHWMGHVIDGIISAKFFVCLVLEMQTELARREKATNIKPDHDIDVYIKKLGLEVCADTLVGNEMMRGISGGQRKRVTIGTSNDQNTNP

SEQ ID NO: 71814 - protein, 70 aa, Zea mays
  Coding DNA Sequence Number=SeqID_28439
MSTEKRHLDQIILLALWLLLNHLLFSCGGCETARFIGSSNAGFLSDRHRSKIIQGPPYTGHFLTALAPFG

SEQ ID NO: 71815 - protein, 29 aa, Zea mays
  Coding DNA Sequence Number=SeqID_28440
MEKKKLATSLVFHVLSPYVVLMQKDWETC

SEQ ID NO: 71816 - protein, 365 aa, Zea mays
  Coding DNA Sequence Number=SeqID_28441
  Subcellular localization annotation: CTP_CleavageSite=40; ConfidenceScore=5.36e-01
MLRGSVGRSLGGAKSAALGSSKPAPAAKPAAPGPSKSKAVASGVGKQPLGKPAKGRRLPSPLRTDEAAAHVADFDTDICVGDYLVGSDVGQLAAVPTLVVATSPTVTVGAKGASQDPWSAFCASDAISSAAAAKDVAGSVSHQLRHASQQLKHAAEFADHVASGALTSEFAAKIECLRAQHTDAVREKSAAENKSHRLVERLTAAEAERVDLRRQLVEERRDANKAIADAQAAQAEAKLARAEASLARQRTEELEARLNSLRNHVDKTEASMRAEVEQTHARLVDAYQELGARTAAFEVPGQEVGLRFLEWLQEELEVLPTIVTSLMSFASLVTCEGVVNSFSLEGCGHFEVFDQSDEGFEREIF

SEQ ID NO: 71817 - protein, 158 aa, Zea mays
  Coding DNA Sequence Number=SeqID_28442
MQYNGSSSLISCEKQKIQIKFFILARLWCWIQGYLLSSSLLRHEDVLSVSKDTVYRNAMNIARKKEKGGAAYRRWDRSGEGQGWLGEALAVTAMYGSTTGMAGIARSTDRVHKESENGSVDYPVHALRRGCELRRPWTGLSGEADFDSSLGELHRDMA

SEQ ID NO: 71818 - protein, 304 aa, Zea mays
  Coding DNA Sequence Number=SeqID_28443
MAWSGGESSVYPLWQRLDGGVSVLSVRKRQIFVAFAPRWYQMKKYKSEDAGGRGPPYKTFCFKTIGRSFCLPCFRISLSSMFCNVCKTGETVLMNRQEAPTGVGEFLRDFGVPVVLWRLLQEVGYTEAPKYQWSRTILRGQPWYEVVVRIPERARKPSWPYWMFHAEGMTPWEGAQVAALEVLTTICYQKREEIQATSMRLFPAVALSDPLVYHHQARLMESIPIGQDSVESASARVLLAVLELQLTRGHSRQKWQQLYTGSYAAFKMMEMAKNSACTQAQERLEETKVQAEQVIGLEHQVTEL

SEQ ID NO: 71819 - protein, 86 aa, Zea mays
  Coding DNA Sequence Number=SeqID_28444
MTREQVQSSMNNNVFISRTFSEEEDPQHHFTNGIFVLRTFGREEDPQHIQDEGCETARVSSHMFIAQQLVGNNIHELTKGGSLYGV

SEQ ID NO: 71820 - protein, 336 aa, Zea mays
  Coding DNA Sequence Number=SeqID_28445
MKEIPTNGPHLSANKQMRARVRECDRGQARFGVRISPYLGHICHGDSHTRDSPRCQEEACAGFLPRFTRLRSRRAVEHGHKNTSTCSTRSERARARPRPTSRAPAPRRVMPVSPARARAYKASSGIDHTPPRTLDLTGARNHRRLPCRQRARGHPIPRHRRPACRALPSQARPSEEIVHASVKLPEQGIGLCFAGEASPRLPNFTRPPVNVYRIVVVKPEHSPPTRSPACARGPADSGHHRRRAVPRCDRQDLPKPTPPLAEPLSPPQIALLTRPETWSPIPVMVGTSAVTARRQSGSVRHCSLEDMVVGVTWPSILPPGWTVEWDPTSAEEEHEE

SEQ ID NO: 71821 - protein, 46 aa, Zea mays
  Coding DNA Sequence Number=SeqID_28446
MASAARGMAPSLCVIGWQRDEKVTEDPGVQLVETAERELVEGKLCP

SEQ ID NO: 71822 - protein, 85 aa, Zea mays
  Coding DNA Sequence Number=SeqID_28447
MADEAIRQNKEESHLVLEEARKADEAAKRERHIAEMSPPLEPYNPDADPALKDTLDEIRIVNAAIDEVVDRLLNEANERVLKEDD

SEQ ID NO: 71823 - protein, 59 aa, Zea mays
  Coding DNA Sequence Number=SeqID_28448
  Subcellular localization annotation: CTP_CleavageSite=20; ConfidenceScore=5.50e-01
MAFLFWLQASLKRSPSWLVSSSARAALGATAFFGGMVKVAVQALPVECGRLSSPKLSRR

SEQ ID NO: 71824 - protein, 198 aa, Zea mays
  Coding DNA Sequence Number=SeqID_28449
  Subcellular localization annotation: CTP_CleavageSite=35; ConfidenceScore=5.74e-01
MAVAAILVSQAIHPSTSSKVTLKDTSTNSSIRGISLSSSSSSTARTTRHLAFLPQQPIRATKQLQHKEEAADVSTVGNKSEHYTLTSIDGPPTKPTTSPGSSNYSAKGVPFNPHGALLSRVVTQRTSPYGEDRRSMTRIRSERERKRRAWASTDKRARGVSDWGGSRADQPGPALGCTGTDWRGPGAECTDANRCLQI

SEQ ID NO: 71825 - protein, 113 aa, Zea mays
  Coding DNA Sequence Number=SeqID_28450
MCQPCKWKNLHSVKRGDGGTDVGTCVDITMLGNGTRHTLYPGTKLQMWEKLPTSEYTKKDGILAAVIVDKLRIESGRKPSKVNEVLFEVGIVFEDDVVLYFQRCLLLIKGSGK

SEQ ID NO: 71826 - protein, 78 aa, Zea mays
  Coding DNA Sequence Number=SeqID_28451
MVNGGTAVTPNFGEEFVPPGWTQPPIRPRRWSVHQREHLGPHVEVLAMACSKFGRGGVDTATGSTPSIQPFTHTHANS

SEQ ID NO: 71827 - protein, 58 aa, Zea mays
  Coding DNA Sequence Number=SeqID_28452
MDEPSANLEQSQGAASVWGTGLSGGAPDSVRWCTGQCPVRQAASAEEAALGFFSGDFG

SEQ ID NO: 71828 - protein, 83 aa, Zea mays
  Coding DNA Sequence Number=SeqID_28453
MSMRPQGSRTQSGKSRIARARALHENSPDWSSTHATAILLYVCNLQFALVYAIGLSYAFILSGQIPDTHKPLNGTDKFPMLHI

SEQ ID NO: 71829 - protein, 293 aa, Zea mays
  Coding DNA Sequence Number=SeqID_28454
  Homolog annotation: Hit_ID=Q6YWB8; Match level="QueryCoverage=78%, HitCoverage=77%, E-value=9e-45, Identity=44%"; Hit description =Putative uncharacterized protein P0501E09.13-1
ARGSVVLMAGILAWAADVVGGAGGSDDEADDDARAAASAAMTPAQRLRAADLDARAASLRRAIQDLRLRVPPPHVAQRLPHLHADSLASSAALALQLNAHSSTKEQEMEVTEHNLKTQLENALKELEAAQHKASTATSGTAENALLEAKSVTDLKSKDLEEKKRELELLDNKVQTLEKEWSVVEEESLKKPTPAQREKVLERQLHSLIEQLTAKQAQAEILATDVHSKEKELERLNHLHRNLYGGANETGAPRSRLSRGLLSGPEDYYYDPKAGRKPYQAGARTEGQNRLMIL

SEQ ID NO: 71830 - protein, 275 aa, Zea mays
  Coding DNA Sequence Number=SeqID_28455
  Gene Ontology: Mol. function=oxidoreductase activity; Cellular component=cytoplasm; Biological process=bile acid catabolic process
  Homolog annotation: Hit_ID=A3A2M1; Match level="QueryCoverage=60%, HitCoverage=34%, E-value=1e-59, Identity=70%"; Hit description =Putative uncharacterized protein
  Pfam annotation: Domain name=Aldo_ket_red; Domain location=1-181; Score=10.2; E_value=5.9e-09; Accession=PF00248.12; Description =Aldoketo reductase family
MKSYSIHAATMLMYPIIISGSFSHTISLKLHLFLHDYSDNAELGLARVGVCARDGGLHRNHWTKIKSAVNQIETHPYFQRDSLVKFCQKHGICVTAHTPLGGSTTNAEWFGRVSCLDDPVIKSSAEKYGKTPAQLVLRWGLQRDTVVIPKTSKVERLQENFDVFGFDISGEDMERMKAVDRKYQTNQPAKLWASTCEGNCKDLRTLSGRMKKVGQYLLRRRTHYMSQFEKLAMELMPKLGEHFVEEMINPSMYGSRWFITVFSCSFPFHLTLRVL

SEQ ID NO: 71831 - protein, 227 aa, Zea mays
  Coding DNA Sequence Number=SeqID_28456
MTEDPLTGHMPRHGIHFSKHFCKTESLIIEKPYLDSLITSIPLRVFSLVGWYQRKNARNEVREERILHLGLLCKNLSGGVFASLGGPNYLGGSVTAGIRAKPFSADIIRNDLWVVDGERINELRAAIRYLQNQLVKRDLALDWAVNSRPLAWAKEAKARARVEELSSAMDNLQVNTLHEEVHVLYSQLHPNVPADLVGMEAGPSRVAGEALGGELNLFRTPSLYEVG

SEQ ID NO: 71832 - protein, 187 aa, Zea mays
  Coding DNA Sequence Number=SeqID_28457
  Subcellular localization annotation: CTP_CleavageSite=14; ConfidenceScore=5.43e-01
MAGDSPYVRPQTPRAESSPTRSKALPCGAGAGSRMSCKPAQKQKKPNRRARCTQPPSGYKRFPTFAQTNERKGQAAMQAACNRARWTRFSDFRHAGLEAQTHASRNQRASRCMQATAPPLVPPSHLFGRGACAATRGNPAAPAWRDGQSGRKWAGSNGGGRQAGAEVTSSARLTSHPGTAREPPPTA

SEQ ID NO: 71833 - protein, 342 aa, Zea mays
  Coding DNA Sequence Number=SeqID_28458
MGGTRHLSVSSLEERNSVGVGTFQPSFGFKDFHQPARLHPHAGGHPRWSPSPAAFEGGGAHCPAGGADLDNVGLIDGGRRHLQRVGVVGLGSRRPLLPGGGCRAVSTGGPPTMPRAARAAFVFWGGPAFAPGWRPSAEAGAPLVWEDLSGDLPGGRRPPLSAPRRRRPEKSPSPTGSLPPSTPWASGSSYLSSPLERRRGRGQDCSSAHPEACTVVARPSGTPWPLFDEPRPGVAISVRTEAELARKWEPGWPEPSQVARQRGSTSESISRGLGSGWRPWKRLGRGPRGNRPSRLLGPDSQRSPWTASSSEAGSDLAEGVVDAEGATPLQREDPSLQDQIVL

SEQ ID NO: 71834 - protein, 379 aa, Zea mays
  Coding DNA Sequence Number=SeqID_28459
  Gene Ontology: Mol. function=cellulose synthase (UDP-forming) activity; Cellular component=membrane; Biological process=cellulose biosynthetic process
  Homolog annotation: Hit_ID=Q6XP45; Match level="QueryCoverage=37%, HitCoverage=14%, E-value=7e-53, Identity=69%"; Hit description =Cellulose synthase
  Pfam annotation: Domain name=Thymidylate_kin; Domain location=80-208; Score=1.6; E_value=2.7e-05; Accession=PF02223.8; Description =Thymidylate kinase
MASTDARLAGIASSIRVIPDVPKPDPLGVQGRKILGQGKYGCRECIKWAQRQNEYRATRLVLSSLDPPSSRVAVFGFCRLFGGDDKGRNGSCAKAKGCATDLVRTSCSRALVESKLLSGTTLIVDRYSYSGVAFSAAKGLDIEWCKAPENGLIAPDLVIYLDVQPEKAAERGGYGGERYEKIEFQKKVAEHYHSLRDSTWKFALCSDISGMSELMFLKCSKAKKKQEHQKKVKCRNASKQVHALEVAGRETAPPVPREKFEKRFGQSDAFLASTLQDNGEGCRFDMLKSLDDCIHVLSCGYENKTQWGKEVGWIYGSVTEDILTGFKMHCHGWRSVYCMPKRPAFKGSAPINLTNRLHQVLRWALGSVEIFLSKHCPIC

SEQ ID NO: 71835 - protein, 34 aa, Zea mays
  Coding DNA Sequence Number=SeqID_28460
MALDRAVTAAACGDGAGALAREMWAREREAMGGA

SEQ ID NO: 71836 - protein, 317 aa, Zea mays
  Coding DNA Sequence Number=SeqID_28461
  Gene Ontology: Mol. function=protein heterodimerization activity; Cellular component=cytoplasm; Biological process=vitamin B6 biosynthetic process
  Homolog annotation: Hit_ID=A2X0H8; Match level="QueryCoverage=89%, HitCoverage=79%, E-value=5e-75, Identity=90%"; Hit description =Putative uncharacterized protein
  Pfam annotation: Domain name=SNO; Domain location=39-315; Score=89.5; E_value=1.1e-23; Accession=PF01174.10; Description=SNO glutamine amidotransferase family
MAWENKIIGDWERRRLRNMRNGELGTVYGREEGMAVVGVLALQGSYNEHMAALRRIGVKGVEVRKPEQLLGIDSLIIPGGESTTMAKLANYHNLVGGSFFFFVSASPVADASAGQPPLQALGLPPPLLRRRPPTLGRVLGSDGQHRRLLDPGTISPELRQIDRSIMFPALREFVGGGKPVWGTCAGLIFLANKAVGQKTGGQELVGGLDCTVHRNFFGSQLQSFETELSVPKLSEKEGGNDTCRGVFIRAPAILEVGPDVEILADCPVPVDRPSITISFGEGTEEEEYSKDRVIVAVRQGNILATAFHPELTSDSRW

SEQ ID NO: 71837 - protein, 51 aa, Zea mays
  Coding DNA Sequence Number=SeqID_28462
MGTPETRISDGFYPIRRRLASPLCRQPNRSLDRVNAYGSPRRDGAGNQTDG

SEQ ID NO: 71838 - protein, 177 aa, Zea mays
  Coding DNA Sequence Number=SeqID_28463
  Homolog annotation: Hit_ID=A7Q179; Match level="QueryCoverage=57%, HitCoverage=33%, E-value=2e-29, Identity=59%"; Hit description =Chromosome chr10 scaffold_43, whole genome shotgun sequence
MGVDYGRALEQNPALRDAAPESIHAVVSFLQSRGLQFKDLGRVFGMCSSVLTASVRADLRPMFAFLSADLGVPESAHRRVVIKCPRVLACSVRDQLRPALIYLRRLGFRVGRRLGWTARYSKMGRSNGLFFGRPSVSLDDDDRESAENAFAGDSLSMSKKKRCLAQRAFQSQRQEGG

SEQ ID NO: 71839 - protein, 441 aa, Zea mays
  Coding DNA Sequence Number=SeqID_28464
  Homolog annotation: Hit_ID=Q9FK80; Match level="QueryCoverage=86%, HitCoverage=54%, E-value=1e-19, Identity=25%"; Hit description =Arabidopsis thaliana genomic DNA, chromosome 5, P1 clone:MRA19
KNECTALKKDRTKKDLQIKAKEAEIQNLKKANVSSMKDVCSAGMNIDQSFHAPANEALHTGVSSRRTDKMSGKDKDAHSLRDDLYLKQGHQTDLLEALELRRRTMIDNGMSTSGVVSLEEDTHFEPRNATCKEIKAIGVQTDNTSDNEHLDCKKLLVERISGNLRAMWGMSPNSLSSRNLISKINVSCSEEILSLLQHTRLSDNCEPSSQAISSMNEAISQLYDTFIKFIKMNSGKMSIQTFLEALLNLCAFDDAAIVSRTLRVFLKVLQHLLQHGAKSSERNNVSVEPYVNVLMENNHKDCSTLLRPVDAEDSLRLHNMFLPFTFWSSLFTGMLQIGVKYSQETIRTDALSIMILIVRTTDPIEERQKFGFTSVMTRLHLLLQKENGLLVKKHSVRLLFLLLNCEHYNVRTTFCGLATWCPWFCLFDDVFAWFLGTSHPA

SEQ ID NO: 71840 - protein, 260 aa, Zea mays
  Coding DNA Sequence Number=SeqID_28465
MALPVDVAGLCPRSGDVGAPPKPGSSLSSVAEAEPPGRARRRSFDRGQGGVRALGSGEAEFRRLLGLSPSPSPGVGRSGVRRLPGLSPSPSPGVGRSGVRRLPGLSPSPSPGVGRSEFAVFRVLARVRALGSGGAEFAVFRVLARVRALGSGGAEFAVFRVLARVRALGSGGAEFPMAPLARPDCLSDSFCRVALQSEWRRWRCPSVRLLYADGGYQLRIRRLEGTPNYGPRHPGALIRREQVNVRTHMNISTSIKPPAR

SEQ ID NO: 71841 - protein, 263 aa, Zea mays
  Coding DNA Sequence Number=SeqID_28466
  Homolog annotation: Hit_ID=A7QHE7; Match level="QueryCoverage=87%, HitCoverage=86%, E-value=8e-87, Identity=62%"; Hit description =Chromosome chr2 scaffold_97, whole genome shotgun sequence
  Pfam annotation: Domain name=DUF1995; Domain location=60-258; Score= -27.8; E_value=9.2e-05; Accession=PF09353.1; Description=Domain of unknown function (DUF1995)
  Subcellular localization annotation: CTP_CleavageSite=32; ConfidenceScore=5.54e-01
MVPITATGDHTASNWIPATISNGNGTGGMFTVASRKSRNGFQFCAVTGDPGSRNVSDVNFPSDYTELLTQEIEFPTAGLQTVPGDGEGGNEMTGSMLLIREFCDRFVPAEKATRTRVFFPEANEVSFARQSAFEGCSLKLDYLTKPSLFEDFGFTTKVKMADRVKPQDETFLVAYPYFNVNAKDYPAFFYPKLAELSKTFLPKLDTVYYIHNFKGAKGGTLFRCYPEPWKVLRKASSGNYVCLHQQEEMPSLKEVALDILPSV

SEQ ID NO: 71842 - protein, 377 aa, Zea mays
  Coding DNA Sequence Number=SeqID_28467
  Gene Ontology: Mol. function=beta-amylase activity; Biological process=polysaccharide catabolic process
  Homolog annotation: Hit_ID=A2X0H4; Match level="QueryCoverage=76%, HitCoverage=47%, E-value=1e-107, Identity=69%"; Hit description =Putative uncharacterized protein
  Pfam annotation: Domain name=DUF822; Domain location=39-184; Score =134.6; E_value=2.9e-37; Accession=PF05687.4; Description=Plant protein of unknown function (DUF822)
  Subcellular localization annotation: CTP_CleavageSite=30; ConfidenceScore=5.13e-01
MKHPLHRDGESYPSPPPQRRPRGFASAPAPAAGASPRRRGVQEREREREKERTKLRERHRRAITGRMLAGLRQHGNFPLPARADMNDVLAALARAAGWTVQPDGTTFRSSNQPLLPPPPQLESFSVAILTDCSWCYLQHGAFQVASVETPALINTLSSYAIGTPLDSQASALQTDDSLSPSSLDSVVADRRIKTENHGNSSSVSSLNCMDNDQQLTRSVLFPDDYTKTPYIPVYASLPMGIINSHCQLVDPESVRAELRQLKSLNVDGVVVDCWWGIVEAWTPRKYEWSGYRDLFGIIKEFKLKVQVVLSFHGSGETGSGDVLISLPKWIMEIAKENQDIFFTDREGRRNTECLSWGIDKERVLRGRTGIEVLGHTW

SEQ ID NO: 71843 - protein, 268 aa, Zea mays
  Coding DNA Sequence Number=SeqID_28468
  Gene Ontology: Mol. function=heat shock protein binding; Cellular component=cytoplasm; Biological process=response to stress
  Homolog annotation: Hit_ID=Q6Z6Z5; Match level="QueryCoverage=99%, HitCoverage=83%, E-value=1e-114, Identity=73%"; Hit description =Putative heat shock protein 40
  Pfam annotation: Domain name=DnaJ_C; Domain location=144-266; Score =40.8; E_value=8.9e-10; Accession=PF01556.9; Description=DnaJ C terminal region
MEVLSDPEKRAIYDQYGEEGLKGMPPPGSQSRSSTTAGPSGPSNFHYNPSDPDDFFAEFMASNKTYSFDHDRRRFQPRSHWTSARNSRSEAPSGSQKENGASTSNIEKPPPVEKTLLCTLEELYNGTKRKMKITRNVAKPDGEPRLHSPTKGDKLHGQLAQDLTFVLDSKPHDVYNLEGNNLLVKQVIPLVDALAGAEINLTTLDGRNLPVRVEEVVRPGYEVVLENEGWPIRKEPGKKGKLVIKFDVTFPMRLSPSQRAAIRRIMGS

SEQ ID NO: 71844 - protein, 126 aa, Zea mays
  Coding DNA Sequence Number=SeqID_28469
MGKNNKRKREPTPPSEDFSDSEYSEEEFSSESEGSLAPVSPPASSDDSGDSQGIAAEVWTYIRAVERSGLEGSDESEYSSDEEDSPEEDGKGDDDDDDGGDGSDDGDGGSRGGDGGSSKGSNKASG

SEQ ID NO: 71845 - protein, 68 aa, Zea mays
  Coding DNA Sequence Number=SeqID_28470
  Gene Ontology: Mol. function=two-component response regulator activity; Biological process=two-component signal transduction system (phosphorelay)
  Homolog annotation: Hit_ID=Q2RAB7; Match level="QueryCoverage=85%, HitCoverage=8%, E-value=3e-17, Identity=74%"; Hit description=CCT motif family protein, expressed
MKAWGVMRERAYAFDLVLTEVAMPSLSGIQLLSRIVAADECKNIPVVNKYCENMYATLDLWPYKRSGP

SEQ ID NO: 71846 - protein, 81 aa, Zea mays
  Coding DNA Sequence Number=SeqID_28471
MRAWARWGPQGTEKGSGRDKPPWRGHSCVMGDNQWSSGVVIARSRLFGALDHQRRDLHPVKLSYLTKDRASYSIKKHEGKT

SEQ ID NO: 71847 - protein, 84 aa, Zea mays
  Coding DNA Sequence Number=SeqID_28472
MTGVELSSTLGNVATRMEHRREIAGAPATKLPLCGHVHHPGDISKCPGRARTLIGNKGVGPRHTVAPWRRVAPLIAKPQPLMFR

SEQ ID NO: 71848 - protein, 131 aa, Zea mays
  Coding DNA Sequence Number=SeqID_28473
MAERYQLPRSCVPPTMRRKDGGYPPSGGLESGKTRCIREREDMVAFQRGQRLWQEKRATLRLRHNDRVSKGTGKGGYPEKERPAPRKGSTAASGYSGSAPITDQGFEGWPPKGSQPPQTPSEGMTMGTFNT

SEQ ID NO: 71849 - protein, 87 aa, Zea mays
  Coding DNA Sequence Number=SeqID_28474
  Gene Ontology: Mol. function=carboxyl- or carbamoyltransferase activity; Cellular component=ornithine carbamoyltransferase complex; Biological process=amino acid metabolic process
  Homolog annotation: Hit_ID=Q8SA97; Match level="QueryCoverage=98%, HitCoverage=19%, E-value=4e-14, Identity=47%"; Hit description =Ornithine carbamoyltransferase
MAPPVDVAGLHPRLGDVEALPKPRSSLSSVAEVESEPLGRARRSSSSSGTEPKSEPWVGRSGVRRLPGLSPSPSPGSGGAEIAVFRG

SEQ ID NO: 71850 - protein, 104 aa, Zea mays
  Coding DNA Sequence Number=SeqID_28475
MEPGGGTAVGAVESLLTSSCFRKGAESHRRHRVCGAPSLPIWRSEPDGTPVLFPAARVSSGLGDVEAPSKPRSSLSSVAEVESEPLGRARRSSSSSGAEPKSEP

SEQ ID NO: 71851 - protein, 108 aa, Zea mays
  Coding DNA Sequence Number=SeqID_28476
  Subcellular localization annotation: CTP_CleavageSite=74; ConfidenceScore=5.11e-01
MGTAAAPGLWSTNLALTVFHLPALPLSHYCSINQVLKGRKAPALCATSLRRLWGLQSGQTQGYNLSRTPHACLLASAASALAVEAEVVVALAARLPGSDQLLELPKSA

SEQ ID NO: 71852 - protein, 173 aa, Zea mays
  Coding DNA Sequence Number=SeqID_28477
  Homolog annotation: Hit_ID=A0EVG2; Match level="QueryCoverage=32%, HitCoverage=5%, E-value=5e-08, Identity=49%"; Hit description=Milt1a putative polyprotein
MPKLKLTRKVLNEWSKVCAQAANDLLTTKGTVEHHMCHLKKPGPRTLRPLAWTSNEDHQEFEEHKEQLIKEAKAKYLANFKVWTGVMQNDYKRLGCAFDKFVVTNFPLHDVETKENTQNSSVANGHAQTHPLYEMSMNSYTRQPNPPPLAWEKLVPLSMAAQSGCNTLNLGWI

SEQ ID NO: 71853 - protein, 64 aa, Zea mays
  Coding DNA Sequence Number=SeqID_28478
MSGAPPDSPVPPSDRWLGHVSRADRAADRWLTGQSGAHWTFRDDDKKGNKMEKKKYYPNKKGGE

SEQ ID NO: 71854 - protein, 200 aa, Zea mays
  Coding DNA Sequence Number=SeqID_28479
MESENEKLRKALATLLRVVQKRSCDIVDVVKSAFQPFNSPLVDELNRALVEIDDLAKDLEDVAVQTQWKVENMSNCEVNEHPRQEEVVEELLIEDGSEDELLIDEESPINYEDLVGYDDGLLFIYIMFDMPLLHRMGSDWNQVMSQYGSFLSQIDEQPIGTQHSEFPVDGQAEGSRTPAVPKKPTQRTKLANFTTNEDTR

SEQ ID NO: 71855 - protein, 369 aa, Zea mays
  Coding DNA Sequence Number=SeqID_28480
  Gene Ontology: Mol. function=oxidoreductase activity; Cellular component=glycerol-3-phosphate dehydrogenase complex; Biological process=electron transport
  Homolog annotation: Hit_ID=Q2RAB3; Match level="QueryCoverage=97%, HitCoverage=97%, E-value=1e-148, Identity=74%"; Hit description =Pyridine nucleotide-disulphide oxidoreductase family protein, putative
  Pfam annotation: Domain name=Pyr_redox; Domain location=131-225; Score=56.6; E_value=8.7e-14; Accession=PF00070.18; Description =Pyridine nucleotide-disulphide oxidor
  Pfam annotation: Domain name=Pyr_redox; Domain location=8-103; Score =3.3; E_value=0.0024; Accession=PF00070.18; Description=Pyridine nucleotide-disulphide oxidor
  Pfam annotation: Domain name=Pyr_redox_2; Domain location=8-273; Score=7.0; E_value=8.4e-06; Accession=PF07992.5; Description =Pyridine nucleotide-disulphide oxidore
  Pfam module annotation: Pfam domain module=Pyr_redox::Pyr_redox::Pyr _redox_2; Domain location=131-225::8-103::8-273
MLRSTGDRVVVVGGGIAGALLAKTLQNHADVVLIDPKEYFEIPWANLRAKVDPAAVERTVIAHSDYLTHAKVVTASAVGLDDSVVLTSIGRAVAYDFLVVATGRTCNRPQKRSDRLEMFQRDKDRIDAAESVLIVGGGPIGVELAAEIVMKSPEKRVTIVHGAPRLLKVMGARASAKALEWLRSKNVTVLLDQTVDLASATPDTRTFTTSAGETLEADCHFVCTGRPVASGWLGGTILGEHVDEEGHLRVDDHLRVGGLRNVFAVGDITDVPEAKQGNLAQRQAMVVSRNLRLLVKGAPREEKLHRYKPSPRTSMTVTLGQRDALAELPFMTLIGHIPGAVKPRDLFITRTRRMMGIKSKPYGTMPHVM

SEQ ID NO: 71856 - protein, 73 aa, Zea mays
  Coding DNA Sequence Number=SeqID_28481
MVEMLVWRMMVDLVLVKALRVAPDWSSGASDQTTDQAKDGGKKSFEVPSAREKVKETEEPKARGEEEDLQSQG

SEQ ID NO: 71857 - protein, 192 aa, Zea mays
  Coding DNA Sequence Number=SeqID_28482
MVGPSPGSGEAEAPPRSRSSLSSMVEVEPWGRARWSSSSSGAEAESEPWGRARRSSSSSGAEAESETWGRARRSFLWRPRPDLAAVSLTLSSGTTIGAAQAALSSRQAGQWSGEAILALNASAVQSVGVAIWPRLLLGEDWASGESKARATCGGSPRARVAADPWGALGGGGMHGGEPLRRPLWGMDIPRVH

SEQ ID NO: 71858 - protein, 139 aa, Zea mays
  Coding DNA Sequence Number=SeqID_28483
MGKNNKRKREPTPPSEEFGDSEYSEEEFSSESEEYPAPVPLRESSDDSDDSQGLAAEVWTYIRAVERSGLEGSDELEYSSDEEDSDGGGEDGDDDDDDDDDGDGDGSGRGGGDGTKDGDDSGKGSNRGGSGRGSDRASG

SEQ ID NO: 71859 - protein, 140 aa, Zea mays
  Coding DNA Sequence Number=SeqID_28484
MLPGRGALAVAPPNQGTVVAAVAGVGVWSQTAHPGRKREPSLPSEDFGDSEYSEEEVSSGSERSPRGRLEGSDESEVSSDEENSSDSSEEGNGDDDEGDSSGDDSGGGGGDDDGQDGDEGGGGGSGDGSGSKASGKAPLA

SEQ ID NO: 71860 - protein, 291 aa, Zea mays
  Coding DNA Sequence Number=SeqID_28485
  Gene Ontology: Mol. function=isopentenyl-diphosphate delta-isomerase activity; Cellular component=peroxisome; Biological process =isoprenoid biosynthetic process
  Homolog annotation: Hit_ID=A2Y4N6; Match level="QueryCoverage=85%, HitCoverage=87%, E-value=1e-102, Identity=76%"; Hit description =Putative uncharacterized protein
  Pfam annotation: Domain name=NUDIX; Domain location=79-255; Score =38.2; E_value=3e-08; Accession=PF00293.19; Description=NUDIX domain
  Subcellular localization annotation: CTP_CleavageSite=67; ConfidenceScore=5.82e-01
MASSAARSLALVASASASLGVGQRSWARLAVSSSSAGSALPKLRGLRSFAASAGGAVMGKPGPGVVDADAGMDAVQRRLMFEDECILVDEQDNVIGHESNRAQYDKYPNSLGHSSSGDKDIVKSYPLQQRSATKVTFPLVWTNTCCSHPLYRESELIEENCAGVRNAAQRKLFDELGIVADELPVDQFIPLGRMLYKAPSDGKWGEHELDYLLFMVRDVKLDPNPEEVADVKYMNRHQLKELLRKADAGEDGVKLSPWFRLVVDNFLMGWWDHVEQGTLQGAADMKTIHKL

SEQ ID NO: 71861 - protein, 239 aa, Zea mays
  Coding DNA Sequence Number=SeqID_28486
  Homolog annotation: Hit_ID=Q6QP51; Match level="QueryCoverage=74%, HitCoverage=90%, E-value=5e-15, Identity=35%"; Hit description =Putative growth-regulating factor 1
WAKGRTGMQAACNRTTRMHPFDFDASSMESQAHTSCNRDRERGYSERDPSPRRKRASSPPTDQRFEGWPLGRVRQPPQSTRASSPPTDQRFEGWPLGRVRQPPQATRAPRPLLIRGSKADPPKGSTTASEHAERGMTLGTSDKWPRLGLRSRAAKSSLGRHRKLRLARSQGSAPRLDLGRRSPPRPTLGLGLNLDLGRRSPPRPTPGLGLSLDLGGVTASPDLGLGPTTLQRGPSLPYP

SEQ ID NO: 71862 - protein, 414 aa, Zea mays
  Coding DNA Sequence Number=SeqID_28487
MGNTRSPSALSLEERNFAEVGTFSAIVWLQGFSSGSPAASPRRWSPKTVTTSSMVGRSDPGCDLGPALGFKDLHHPGWGGGRAEPELYLPRGFVGHLLPQHSRERALTGLAGGSDFDNAGLVGGERRQLQRVGLAGLVGSGSAPGAPSCRKSGCRAVRTGGTPKTSRAARATFVFWGCPAFAPVRRLCAEVDAPLVREDPSGDLPVGRWLPSSALRWWRLKKSSSPTGSPPPSALRASGSLALISCPRPSSGDVGEGIVAAASALRPSPLQFGHLERSSLSLLLERASVSHLEPYRPAGPPIVGSKRRLRWPEPGRAVHWRDQRRSRVAEAMSRADVLGGQLAEASGDPQTALPFEARSDFAEGVVDAEGAAAPPPSRIVCPSESYFSRKVMSEDPTFEVVKKHERRSGRKDLF

SEQ ID NO: 71863 - protein, 350 aa, Zea mays
  Coding DNA Sequence Number=SeqID_28488
  Pfam annotation: Domain name=IQ; Domain location=22-42; Score=18.6; E_ value=0.024; Accession=PF00612.18; Description=IQ calmodulin-binding motif
  Subcellular localization annotation: CTP_CleavageSite=45; ConfidenceScore=5.26e-01
MGDLWTNIRADLAKMQATLQKTSAVVGIQAGARGFPARRRVREMRQQMLESALVTVDLGTRGRDLALSDGHQQRHRAAISKCEHGTCPAGDKLQLYGNGGREGTPLVIGKGALFSATTFRYRPPRGLYDNGGREGTPLVIGKGALFSATPFRYRPPRGRLRWLLLRPTPGRARALGSGEAEFVVFRGRGRVRALGSREAEFVVFRGRGRVRALGSGEAELPMAPEAGLGCCQPHSVEWHSSRSGTGGVVFSSGRSVERRSDCGHFDSVDRRARVRIRCQAILALNASAVRSVGVAIWPRLLLGEDWASGEPKLCADGGYQLRLGVLGGAEHGVSNELLTGNPSGRPCPIC

SEQ ID NO: 71864 - protein, 173 aa, Zea mays
  Coding DNA Sequence Number=SeqID_28489
MAQWLTRSTLAGGRRESGDRGLASPAKQTSIPRSGSFTEVCSVLSEGRTELGRAWLASLQWQGFGWPRTHRARANAGTGKGDTPKGILLHEGSGPRAPLLIRGSKAGPSEGFNSRLRALGLRATTGQRFERPAPQKGSTAASSHSGSAPTTDQGFVGWPSKGFDSRPQTQSEG

SEQ ID NO: 71865 - protein, 362 aa, Zea mays
  Coding DNA Sequence Number=SeqID_28490
  Gene Ontology: Mol. function=nucleic acid binding
  Homolog annotation: Hit_ID=Q2QUK2; Match level="QueryCoverage=32%, HitCoverage=29%, E-value=1e-12, Identity=31%"; Hit description =Putative uncharacterized protein
  Subcellular localization annotation: CTP_CleavageSite=17; ConfidenceScore=5.58e-01
MPAANQQPPRTPVRLTRQSAVMPSPGGCPPPKPRHPLPPKTTSKATPKRNAISSSTQQQVQASTTTTETTETTNPVSFPPKMTRSTQAMSSPVRNTMPGPTRHTMHSPPRFTRASAAMSSPGANPHHSPPRFTRASAAMSSPGANPHHSPPRFTRASAAMSSPSAKPHHSTPAATAIVSHQPSPTTSVNKIVPTDNSPGGHSSRQSNAIIESAKQFDVATSEGNPNEGEPVGDLVPALLAPKKNVRKKTMGHGLEKMLNRGNRLAIHEAEGKKRPESRLDVDVKNEGPSKDACTDIIKRGVRQTMYNLKRKYFDESLTKEQLLAMQPPPKMNKEDWTGLVEYWCDPKNQEKSAKNKANRGNV

SEQ ID NO: 71866 - protein, 57 aa, Zea mays
  Coding DNA Sequence Number=SeqID_28491
MKTNRGSSRSFKLHRVTGNSVVGGFCGVTAEDPSGISKNNPPSGAVGRVVRFSPKFY

SEQ ID NO: 71867 - protein, 99 aa, Zea mays
  Coding DNA Sequence Number=SeqID_28492
MAPAWLWRDAGHAGARAGVLWRAQSASNTWLFASARVFPSAERPKQRYGGGEVGYVRYFQTEAKMVPGRVKRLRPWVDTLSNTWGVTITVKRLMNTKNY

SEQ ID NO: 71868 - protein, 119 aa, Zea mays
  Coding DNA Sequence Number=SeqID_28493
MAQWLTRSTLAGGRMESGDRGLASLVKQTSIPRSGSFTEVCSVFSEGRTGLGKAWLAAQTSSWHLWLSLICEFQGKISPRSEDMRMPNLACPPARCATKVMPSHDKRQGLGLNFFQGVP

SEQ ID NO: 71869 - protein, 87 aa, Zea mays
  Coding DNA Sequence Number=SeqID_28494
MEKFLHAGEKGSLLPDATEKRESFLRHGERRAGGLLLGPHHLSRGGRAPWGLALLPALAAAAVSSEEEGREYGWWRLRKKMEGGSAK

SEQ ID NO: 71870 - protein, 732 aa, Zea mays
  Coding DNA Sequence Number=SeqID_28495
MAEALAAMAGGKELTGAKEGCLAGDATKKRKLGTAVGELGVFDSFAVELMGTCAALEGGMSSPELRESSARMLEVTGGRWPKNVPIPCAASKDFFMSRMAHDLKFFPYGRNIAVVVSAVMDKDRQDAAQKRQAFVRIADPMREAKRARGSTKAAASGSSKLVPAAKLVAPGHSKASASAKAAATGGSKPPPGGPAKGRELPSPGRRVVDFGTNISVEDYFVGSGEGQLVVVLPSVATTSPTVVVGAKGAARDPWAAFCVSGEILSATAAKDVVGSMSQRLWEASQQLSQQLKQAADFADRVASGVLTADVAAEVESHWVQHVDAVREKSAAESKNRRLVEKAKVARAESSLASQCAEELEVRFNALRSCVDKAEASTRSEVERTHSQFMDVYRELGVQTADFEVPDQEAGLRFLEWLQEKLLVLPTIVTGFMSFASLVTCEGAMNALSREGCRHYEVFDQADENFEREIFKAEDPVVKQSAGALFDRMWGPHGQEAVRERSDRAIEQMAHAEDVEDLGGLDGAPPEAAEVNPVPPSDAGEGSSAVPVPTAAGEDPASAPAPTGEDALRVVAEPAAKDPTAATGPSQVLGFGPAHATATNNAIFVAASTVAADDDSFGSVSKCFECDDSGSSIVWTEESSDEDLDYFAALDVAAAETSPRVMGAEDLPGASTRCRRRRVVAKQRVSELSRSGRRHHGEMEGGRLRVDGTGKRELLSSLAGASVGEGELRNLFK

SEQ ID NO: 71871 - protein, 28 aa, Zea mays
  Coding DNA Sequence Number=SeqID_28496
MAGGKELAGAKEGCLAGDDSKGRRRGWV

SEQ ID NO: 71872 - protein, 178 aa, Zea mays
  Coding DNA Sequence Number=SeqID_28497
  Gene Ontology: Mol. function=heat shock protein binding; Biological process=protein folding
  Homolog annotation: Hit_ID=A3B3E7; Match level="QueryCoverage=85%, HitCoverage=9%, E-value=2e-39, Identity=56%"; Hit description =Putative uncharacterized protein
  Pfam annotation: Domain name=DnaJ; Domain location=40-116; Score =68.6; E_value=2e-17; Accession=PF00226.22; Description=DnaJ domain
MENQRIPESLNGCSFLEGKLDEALELLKKHEQVTPVKERGVEPSCSSEDIKKAYRKAALRHHPDKATQLLIRNENAEDGFWRDVVKEVYADADHLFKTIGEAYNVLSDPAKREEYNFEEDLRNARRRVSSSRSMHRSPEQNYSNRGFNPRQRQSSRASQGENIRIDQLGIWDDWLTLD

SEQ ID NO: 71873 - protein, 225 aa, Zea mays
  Coding DNA Sequence Number=SeqID_28498
MDRFCPAQQHIGVCRLVTPEDQPPPLRPSSPIRACTHLRRVDGWTPPTACGPPVRTKRIAAGVRRFSYHFEVKVFGSKIIWDSRTSVATSTQAKSISMDMDSADSIADKAIGRMQEIADKIFSVARETIRPGRGLTSFEATKLRVALEDIACMLEQDSLVLQEKLDNVNNVNNPADRSYEPSALSSPPPADECLSPDWDFVEHFANFWGVEYDSDQMPSFSDNEV

SEQ ID NO: 71874 - protein, 116 aa, Zea mays
  Coding DNA Sequence Number=SeqID_28499
MLEGATEDMDLMGRLLDELDLLQRHSPDVDLDMVDMDLLKHIVVHKEVISITKYHCKLGLTGTKLNVFAWTSSPELFYVDVSGVQDIYRWQQGLYAGECRANLDVWCSMYMFLRDN

SEQ ID NO: 71875 - protein, 204 aa, Zea mays
  Coding DNA Sequence Number=SeqID_28500
MPPSTLVVVAGRQPSPIIDLLEDDFNRISTEANSDADEVLERACFVATLPRNDNDEGDKEAPNQEEEYRASAKHASSLVKSPSASSKGSSTPSCRKLIAPTRMSSGDVLRMRVPGQERCMTYSPKEVMTHNISSVSELGRYVEQICGCPRPSSFELVDECLVSGVVGEGTHYIGIGGIRELISLLREPLDVIPEALPILLGARL

SEQ ID NO: 71876 - protein, 93 aa, Zea mays
  Coding DNA Sequence Number=SeqID_28501
MENCPGLERLLETTHLELDGKLFVNTQQAPTWCANCWRFDPGGSLDRRVNCRRVSQPRWVGARRSMKGGKGDRKKGETRGLRVVLRLGRVRLQ

SEQ ID NO: 71877 - protein, 233 aa, Zea mays
  Coding DNA Sequence Number=SeqID_28502
  Subcellular localization annotation: CTP_CleavageSite=26; ConfidenceScore=5.51e-01
MSSHSLHASCPSTFRAPSTFHLPSTRGSSALSSLEERNFAEVGTFQPSFGFKDFFIRQPGCFPSPVVTQDGDHQFQGGEKQAGLRPLPLPQLQGCSSSVLGGEGNGVRRSWRWQLPCVRLSGLSGFGAASGATSHRGSRKSSVRPEVIAAAVRPLGAEVVVVAALRAAVSHLGFRRPAGPPTNPRPLFDEPEPEAEVSVWTEAELAREEDFVDRSLAGPSTGGTSAGVELPRP

SEQ ID NO: 71878 - protein, 47 aa, Zea mays
  Coding DNA Sequence Number=SeqID_28503
MGKPVPSLLMLLLSRVSALVPTITGMGDHVLGRVRRAICCQVHSGRT

SEQ ID NO: 71879 - protein, 311 aa, Zea mays
  Coding DNA Sequence Number=SeqID_28504
  Gene Ontology: Mol. function=protein kinase activity; Cellular component=cellulose and pectin-containing cell wall; Biological process=protein amino acid phosphorylation
  Homolog annotation: Hit_ID=A7PEW8; Match level="QueryCoverage=91%, HitCoverage=45%, E-value=3e-63, Identity=47%"; Hit description =Chromosome chr11 scaffold_13, whole genome shotgun sequence
  Pfam annotation: Domain name=LRR_1; Domain location=18-40; Score =15.1; E_value=0.26; Accession=PF00560.24; Description=Leucine Rich Repeat
  Pfam annotation: Domain name=LRR_1; Domain location=42-63; Score =10.6; E_value=3.4; Accession=PF00560.24; Description=Leucine Rich Repeat
  Pfam annotation: Domain name=LRR_1; Domain location=64-86; Score =12.3; E_value=1.6; Accession=PF00560.24; Description=Leucine Rich Repeat
  Pfam module annotation: Pfam domain module=LRR_1::LRR_1::LRR_1; Domain location=18-40::42-63::64-86
MAHRTVRCATGHCSRLGGLERLVLSRNNLSGPIPFALNSLTALRVLRLDGNRLSGSIPSISIAGLSSFDVSDNNLNGSIPKLLSHFPRESFAGNFQLCGDPLPPCSSPFFPQRRRTWWGSSSSSPPCSAWCPNVVAPAPVTSAVARGQPPPASGVGGVLTSSSKEDLGGDAFGSATAVAAAAAAAVGEQSRLVFVGKGAGYSFDLENLLRASAEVLGKGSVGTSYKAVLEEGTTVVVKRLKDVAVQRREFDAHMEVLGKVEHRNVLPVRAYYFSKDEKLLVYDYLPNGSLSAMHHGQCPTSFHPHACIASP

SEQ ID NO: 71880 - protein, 58 aa, Zea mays
  Coding DNA Sequence Number=SeqID_28505
MALLASRLPAALDRLTNLRTLSLRSNRVLGAIPNDVSSDSYQKGRSSKDTKVDTAPKL

SEQ ID NO: 71881 - protein, 249 aa, Zea mays
  Coding DNA Sequence Number=SeqID_28506
  Subcellular localization annotation: CTP_CleavageSite=55; ConfidenceScore=5.25e-01
MKGRKQAKGKPAAFVLPCAQVGCACSRGYKRPLGRALCVGPSSRAANLLGNDGPSCDEVGPSPRSGEVEAPPRPRSSLSSEAKAESEPWARARRTEAESEPWGRARRSSSSSRAEAESEPWGRARRSPSSEAKTGAEPWGRARRSFLWRPRPDLAAVSLTLSSGTTVGVTQAALFSCQAILALTAPAIWSVGVTIWPRLLLCEDWASGKPRLCADGGYQLTLGVLGGAEHGVSSELLMGDPSGRPCPIR

SEQ ID NO: 71882 - protein, 16 aa, Zea mays
  Coding DNA Sequence Number=SeqID_28507
MAPRFFIRRAQQLYMQ

SEQ ID NO: 71883 - protein, 49 aa, Zea mays
  Coding DNA Sequence Number=SeqID_28508
  Homolog annotation: Hit_ID=Q8W0X3; Match level="QueryCoverage=69%, HitCoverage=3%, E-value=2e-08, Identity=85%"; Hit description =Putative gag protein
MALIIKCFKSALKGRKEYPNKNKTRGKRSCFKYGGGYAKTWEEGEEEKL

SEQ ID NO: 71884 - protein, 90 aa, Zea mays
  Coding DNA Sequence Number=SeqID_28509
MALSVPPGPQGLLPLSASSLAPPAWVDDLLALTLAEGQGHSPAPARAMPSPSTSTPARSWRWKRRYSDIVQLPTHKYFEQTRLSIINTFN

SEQ ID NO: 71885 - protein, 162 aa, Zea mays
  Coding DNA Sequence Number=SeqID_28510
MEDKTTKKTAPDKSEVHPLNMIKGTMEDLTEADRKEIEDEIAREMEEKRNERLAFFRKTNNGVIKQTVGASTFGKKIQSALTDGRLTFGEANKMKLDKDPFPINMQKKWSPHNPADAKELCMGVGGQNEPLGKSGSKIIVGTVECDILNAAESLQAEMAKQN

SEQ ID NO: 71886 - protein, 96 aa, Zea mays
  Coding DNA Sequence Number=SeqID_28511
  Subcellular localization annotation: CTP_CleavageSite=59; ConfidenceScore=5.03e-01
MEMILLTCHGFLIFGPPTSHEGARNFWDSRITEASTRRRSGASPRKFRLTSTCADRGVFAGVEREGFCHRPTAVRDSRIAEAQTSGRCVAKLDAWT

SEQ ID NO: 71887 - protein, 193 aa, Zea mays
  Coding DNA Sequence Number=SeqID_28512
MWPFLNAIHSGGAVTSGSLAALHEFNARDGYRERVLRSEVGEGFKRQSHPTECRLLSLLGCRPYQSESETQRSQWRCPTSSLAFLTKSFGGNELTEVEVDADDTPTFFNENRVGAAHVPLIYTVVAKTEDIILSRELEDIASIEDKIGRSLTTKEKDRIRVGNLRLYLEELLQRREYGVVDLKVALGYARPFS

SEQ ID NO: 71888 - protein, 192 aa, Zea mays
  Coding DNA Sequence Number=SeqID_28513
  Gene Ontology: Mol. function=acid phosphatase activity; Cellular component=cellulose and pectin-containing cell wall; Biological process=translation
  Homolog annotation: Hit_ID=Q6Z3C0; Match level="QueryCoverage=64%, HitCoverage=94%, E-value=1e-53, Identity=78%"; Hit description=Acid phosphatase-like
  Pfam annotation: Domain name=Acid_phosphat_B; Domain location=1-192; Score=122.8; E_value=1e-33; Accession=PF03767.5; Description=HAD superfamily, subfamily IIIB (Acid
MRGGINGNSVLSKAGGGHWEGEAGGGGVTMEERDDPAIQTVGLDDRDVDEIMPDQSRTTRRDRVHTKLYNATSFNEYVLEGSAPVLPETQRLFKKLVSLGIKPVFLTGRTEDQRAITVTNLRRQGYSGWMTLLLKPVGLKATAIAYKSGERQKLQDAGYVIVGNIGDQWSDILGAPEGARTFKLPDPLYYIG

SEQ ID NO: 71889 - protein, 72 aa, Zea mays
  Coding DNA Sequence Number=SeqID_28514
MAADSPPAGGGINDVFPTWRKNNIRVCPVASPADGGGGGATDSRLEGGSRWRRSSRCPAVTPDSPVYTGHVR

SEQ ID NO: 71890 - protein, 397 aa, Zea mays
  Coding DNA Sequence Number=SeqID_28515
  Homolog annotation: Hit_ID=Q6QP51; Match level="QueryCoverage=41%, HitCoverage=83%, E-value=1e-14, Identity=35%"; Hit description =Putative growth-regulating factor 1
MMTADRERGYSERDPSPQRKRAPSPLLIRGSKAGPSEGINSRLRTLGLRAHYWLAPEGFDSRLRARRARDDPGYVRYITKARATLPRPRLRSKDTIPPRPSPTSGKDSRPQKIHASPEASGAIGSSASPDPRARAQPRCWTTDSASTDPRARTQPRPRKTVSASPDPRARAQPRHWTTDSASPDPQGSDTASASEDGYGEQDWCPIWLAPDNTKAAVSPYCSPSFVSRLAPTHLGWDTLRQFTRRSRDPPGSKRRQLLFSLLSCLHLRATPFSAEGVGAGASSPYSSDTSLDTDSRCGYCTSTRKFQIMHASSFSPLSDVPFVFPAFALFFLPNLLSPSMVAAASRPTLVDVGTGRVGHAPGLSPCVPSRRTWCRLPRLDYLGDEESRSEILDNQGP

SEQ ID NO: 71891 - protein, 204 aa, Zea mays
  Coding DNA Sequence Number=SeqID_28516
MGRRETEHEGGKETSKKGKPAAFVLSCAQVGGSSEVEVESVFRGRVRAPGRARRRPSSEAKAEAEAESEPWGRARRSLSSSGAEAESEPWGRARQSFLWRPRPDLAAISLTLSSGTTVEATQAALSSCQAILALNAPAIRSVGVAIWPRLLLGKDWASGEPKLCADGGYQLRLGVLGGAEHGVSSELLTGNPSGRPCPVRFGVG

SEQ ID NO: 71892 - protein, 165 aa, Zea mays
  Coding DNA Sequence Number=SeqID_28517
  Subcellular localization annotation: CTP_CleavageSite=34; ConfidenceScore=5.33e-01
MVSASSPIDGDTTQSTRMSQARPKTAPTVTTLCRSAHSSIAPTQLRFFDQNHLDHNPLPPLVTPYRDGTVDRGATDSAGAGASPPFAARLFIPRLTAWARSTARHRTHGPSGSDGVGVVDLGGPSVSGIGCPQHVTLPSDRRVGPACRRGRDFGLGAWVKCYWAE

SEQ ID NO: 71893 - protein, 280 aa, Zea mays
  Coding DNA Sequence Number=SeqID_28518
MTTAALSPLTEARRRQQRLDSPDSCPSARLQRSSDGHDITRTGCQNLSGCHDGMDPPGSKRRQLSCRQWGSVYVTRFAEGERPLHRLVTGQSGHLERLHHRLHKEQERRRQELEQQGSSSLPQQELEETLTTETVMTTSRATAPTFQRSRSRRDGLLDPSLVTPLTGVTSTMRSTPYCARHSTDTLGPSSITVLSSSTVAGHTQTAGRRLSWCAIWRIVSEVRSGVADGLDLRYYPRRSSGSTRGVVVSTVAEDNPRLSSTRGRHVYGNPDFRTQINLES

SEQ ID NO: 71894 - protein, 82 aa, Zea mays
  Coding DNA Sequence Number=SeqID_28519
MALFSIMEASSASSLHWGYLTALVGCWGRKTRCLLILPLELTSSWLTVLTVQLLMLRVLPLELLQRQALILLEQLRSIAGQL

SEQ ID NO: 71895 - protein, 73 aa, Zea mays
  Coding DNA Sequence Number=SeqID_28520
MAASLRESPSCLMSSDARAAPGAIAFFGGMAKVVVRVLGVEVGHLSSPEVGANVGHLFLNAMNQEQGNKIVKD

SEQ ID NO: 71896 - protein, 72 aa, Zea mays
  Coding DNA Sequence Number=SeqID_28521
  Homolog annotation: Hit_ID=Q7XBD3; Match level="QueryCoverage=54%, HitCoverage=7%, E-value=7e-09, Identity=69%"; Hit description=Zeon1 gag protein
MDEYIRVNIDFRQIREEVYKYFEMTRGFGGRLHPRHVRTSIILAQAKTGEIILKGINKAPNHQEHSKAPLGH

SEQ ID NO: 71897 - protein, 319 aa, Zea mays
  Coding DNA Sequence Number=SeqID_28522
  Gene Ontology: Mol. function=hydrolase activity, acting on ester bonds; Cellular component=integral to membrane; Biological process =lipid metabolic process
  Homolog annotation: Hit_ID=A2XNG1; Match level="QueryCoverage=38%, HitCoverage=28%, E-value=7e-43, Identity=69%"; Hit description =Putative uncharacterized protein
MVAQLYSGLVKVPHDVTGCMITARKRMPVTARDMHNRYIPQQDYFSEGLYTFDIGQNDLAGEFYSRTEDQVIISIPTILLEFENGLKAVISSRRLSNYLSTPEHHSSELNVSANLLNHHFKRYTKVTHNPMAIVFQNVSCSWSSSSVAELNIVLRDISLQLQKGLFIAIVGEAKTPWDVQRVDLRCDGVSLKSSTGVLKPATKQKLRFEGDSYKKALAEFLQAMPAFLGGKCSCLRCESPRDDSVIPAGEGSKKQLRLVSVDDGSPVTDLDFDLDEEEIPSPYSCENAIRAAIIGLLMVCIFVAFLAGMIDPASVPASA

SEQ ID NO: 71898 - protein, 267 aa, Zea mays
  Coding DNA Sequence Number=SeqID_28523
MRSSSSSGAEPESEPWGRAKRSSSSFGAEPESEPWGRAMRSFLWRLRLDWAAFSLTLSSGTAVGAAQVALSSCQADWALGEPKACPLLEGVLGRDLCADGIYQLRLGVLGVPLIMVPDNGEANYTSVPLVILLRGCVHGVRAARAGATPGQKPRRGASPGQKPRRGASPGHAEQGQPRRAGPAASRAGYAGGRPSRQGRAGQGRPRRGHCAQADLSDPPVSGVVRVLLPTQAVGADMRPHPSAALKRATHHATTPTTWSHDSVGYRA

SEQ ID NO: 71899 - protein, 125 aa, Zea mays
  Coding DNA Sequence Number=SeqID_28524
MDNETRPRQGVSSGSERGIECATAECGGGGAARSGPRFGLEVEAGMQRCYLCSYGQESQRFPRDAARPVEISPHPLPRLFRRPLCREDDQVSPEVAPQVSVHDSRLAAEESRDLVLRLPRAEGWI

SEQ ID NO: 71900 - protein, 180 aa, Zea mays
  Coding DNA Sequence Number=SeqID_28525
MQRPCAQGIKERLSGLPGPRTPAGLRTPATVDWPLRRSRPRFLARGASPRCAYTSQRVGWGWGKLDWPVYGGSGSGGRGHAAHGQTAVNWAPVRLERARKSVTDAWEGFIGAGRGTGRRLAVGATRGTRGARAGVLWQAQGASNTWLVASARVLPSAERPKRTNLTLSPVGDLFPAPRAT

SEQ ID NO: 71901 - protein, 155 aa, Zea mays
  Coding DNA Sequence Number=SeqID_28526
MAKAWHGGIGEAWTGFGHVFGKADAQNRNQQGWANGLVDGALENGESERELREEKGRESGRLYRERRGEKQRRAGVGARAARRVLRLGWGGHRAPGLLGCAGSWLSQAAAAVVGRGSERNKGRRESAEWEREVGRGRSTGGGHRERWVCRVRGMA

SEQ ID NO: 71902 - protein, 555 aa, Zea mays
  Coding DNA Sequence Number=SeqID_28527
  Gene Ontology: Mol. function=DNA-directed DNA polymerase activity; Cellular component=DNA polymerase III complex; Biological process =DNA replication
  Homolog annotation: Hit_ID=Q75K66; Match level="QueryCoverage=97%, HitCoverage=55%, E-value=0.0, Identity=71%"; Hit description =Putative DNA polymerase III gamma chain
  Pfam annotation: Domain name=AAA; Domain location=354-543; Score= -14.9; E_value=0.00039; Accession=PF00004.20; Description=ATPase family associated with various cellular activities (AAA)
  Subcellular localization annotation: CTP_CleavageSite=88; ConfidenceScore=5.08e-01
MPAPASGGGGGDHLRGHAHLTNCIHLRHHHAHAHAHGASGRRRSPTGSSASASAALMRDLLALQRSRSLRDPSTRRSVDDSASNNRVAADPDDADHSRAGAIKTLLDQLTENPHPKPGRRPRRRFRRSATRRVAQPAAAPRVSVNSSSQEAVCGNRYLFGGTGGADGGVELMQQQQQVSHESHNVCGIPWNWSRIHHRGKSILDMAGRSLSCGLSDPKSTSAARRSEPATSAASCGHVNGSRSHPHFPVTARLTSSSSSDSDSLPLLVDGVRNAVGGISSSFSGELGIFSKSSELDSDLASEARSGQKSRGSHRARHRSFTQKYAPRTFKDVVGQSLVVQALSNAILKKKIGLVYVFYGPHGTGKTSCARVFAKALNCHSPEHPRPCDSCASCIAHNLGKSRSLLEIGPVGNIDLDGIVDILDNVMLSPVKSQHRVFIIDDCNTLPPDTWSVISKVVERAPRRVVFILISPNLDLPHIIVSRCQKFFFPKLKECDIISTLQWISTSEGLDVDRDALKLIASRSDGSLRDAEMTLDQLSLLGQTISMSLVQELNNC

SEQ ID NO: 71903 - protein, 86 aa, Zea mays
  Coding DNA Sequence Number=SeqID_28528
MGAGGVENWRVEWSRGEGVGEGRKVEVGAASHPRAGARPDFLLSLLKAGMLDAFCISACKVPLFQGSIPQSILAMPFTVTPLKLAS

SEQ ID NO: 71904 - protein, 102 aa, Zea mays
  Coding DNA Sequence Number=SeqID_28529
MLGSWAASNAQYRTARDCRLAVYEQHDDPMSHARGLLPADRRRRLARPSPDAHMFPVSFLPRQSDGRRRLSASGAPSNRPIVAQQRSNPLLAIPLRGAVKSQ

SEQ ID NO: 71905 - protein, 153 aa, Zea mays
  Coding DNA Sequence Number=SeqID_28530
  Gene Ontology: Cellular component=cytoplasm; Biological process =protein modification process
  Homolog annotation: Hit_ID=A2Y6S2; Match level="QueryCoverage=88%, HitCoverage=92%, E-value=2e-40, Identity=63%"; Hit description =Putative uncharacterized protein
MAIFSSRTKAILFYVIKSKENSKKLKRPKAWKHTQPITPARLKQMRDEFWDTAPHYGGQKEIWDALRVAAESDLALAQTIVDSAGIIVSNPDMTLCYDERGEQGLATPHFHDSLYRPVVHARPMSKTEDSVAGAKYELPKYVLSEPANLIRDG

SEQ ID NO: 71906 - protein, 143 aa, Zea mays
  Coding DNA Sequence Number=SeqID_28531
  Gene Ontology: Mol. function=ER retention sequence binding; Cellular component=endoplasmic reticulum; Biological process=protein retention in ER
  Homolog annotation: Hit_ID=A2Y6S1; Match level="QueryCoverage=83%, HitCoverage=45%, E-value=2e-53, Identity=85%"; Hit description=ER lumen protein retaining receptor
  Pfam annotation: Domain name=ER_lumen_recept; Domain location=1-131; Score=143.9; E_value=4.5e-40; Accession=PF00810.9; Description=ER lumen protein retaining receptor
MNAFRFLGDMTHLFSVLVLLLKIYATKSCSGVSRKTQELYMLVFVARYLDLFTDYVSLYNSVMKVVFITSSAAIVWCMRRHPQVRRTYDKEQDTFRHTVLVAAAFLLALIFHERFTFREIHVYVYLCYSRELDDEFSEGQCNA

SEQ ID NO: 71907 - protein, 789 aa, Zea mays
  Coding DNA Sequence Number=SeqID_28532
  Gene Ontology: Mol. function=oxidoreductase activity; Cellular component=integral to membrane; Biological process=electron transport
  Homolog annotation: Hit_ID=A5H238; Match level="QueryCoverage=84%, HitCoverage=71%, E-value=0.0, Identity=86%"; Hit description =Respiratory burst oxidase-like protein C
  Pfam annotation: Domain name=FAD_binding_6; Domain location=650-734; Score=-15.1; E_value=0.018; Accession=PF00970.15; Description =Oxidoreductase FAD-binding domain
  Pfam annotation: Domain name=FAD_binding_8; Domain location=655-759; Score=87.7; E_value=3.8e-23; Accession=PF08022.3; Description=FAD -binding domain
  Pfam annotation: Domain name=Ferric_reduct; Domain location=463-619; Score=177.8; E_value=2.8e-50; Accession=PF01794.10; Description =Ferric reductase like transmembrane component
  Pfam annotation: Domain name=NADPH_Ox; Domain location=205-304; Score= 220.9; E_value=2.9e-63; Accession=PF08414.1; Description=Respiratory burst NADPH oxidase
  Pfam annotation: Domain name=efhand; Domain location=305-333; Score =23.3; E_value=0.00093; Accession=PF00036.23; Description=EF hand
  Pfam module annotation: Pfam domain module=FAD_binding_6::FAD_binding_ 8::Ferric_reduct::NADPH_Ox::efhand; Domain location=650-734::655 -759::463-619::205-304::305-333
MQSRSLESGAARNGASDEDPAETTATVDGEATDKGEGVMRGGGGPGVGTPGRPRWGSGATTPRSLSTGSSPRGSDRSSDDGEELVEVTLDLLEDDNIVLRSVEPAAAAAAPAPPRRHPDPTPSSSAAPSRSRSPAMRRTSSHRLLQFSQELKATASRAKQFSQDLTKRFTRTQSRANLAGEPPAAAPSGIDAALEARAQRRRRAQLDRTKSGAQRAIRGLRFISGGNKASNAWIEVQANFDRLARDGYLSRADFPKCIGMTESQEFAMELFDTLSRRRQMQVDRINKDELREIWQQITDNSFDSRLQIFFDMVDKNADGHITEAEVKEIIMLSASANKLSRLKEQAEEYAALIMEELDPEGLGYIELWQLETLLLQKDTYVNYSQALSYTSQALSQNLAGLRKRSPIRKISSTLNYYLEDNWKRVWVLAVWIGIMAGLFIWKFIQYRNRYVFDVMGYCVTTAKGAAETLKLNMALILLPVCRNTITWLRNTKAARALPFDDNINFHKTIAAAIVVGVVLHAGNHLVCDFPRLISSSEVKYAPLRKYFGENKPTYLDLVKGVEGITGIIMVVCMLIAFTLATRWFRRSLVKLPRPFDKLTGFNAFWYSHHLFIIVYISLVIHGECLYLIHDWYKRTTWMYLAVPVGLYVGERTLRFFRSGSYSVRLLKMSKPPTFRYKSGQYMFVQCPAVSPFEWHPFSITSAPGDDYLSIHVRQLGDWTRELKRCTVDDVLAEVVERVRHALHLAAVFSHGEIPPREPVKLGVEVERQSLPVPEELSLEREPRLASNVR

SEQ ID NO: 71908 - protein, 108 aa, Zea mays
  Coding DNA Sequence Number=SeqID_28533
  Subcellular localization annotation: CTP_CleavageSite=32; ConfidenceScore=5.23e-01
MATSPVGGGSAPQAVACLFLAAGHGGLSPRPRRAHRRPYTALNLLRGLNPRYGHLKALIKRIVPFHTFYAVRNELILEELTLETEAPTLAPATYSAPPGGHGQGFPQK

SEQ ID NO: 71909 - protein, 437 aa, Zea mays
  Coding DNA Sequence Number=SeqID_28534
MATAQGIVSPFYRQTSSLAPLSVTGEVPTDNLQETGGRKGGLPRDKHPTAPQLCAPLAPSTSGGPTRRKRARMSCNRRAGYDVQEAPPPLTPMLRLLDYGTRTGKGDVVERILPGEGSRPGALLLIRGLKAGPSEGACRVRDDFGYVRYITKARVTLPRRIHASPEGLLRRQAPPQLSRGLARAGFVVKQPWPYRLTNRPLRRRIKCGGCLTTYPDTRASVGQAEVTAVTSPLLFTVRYNRKTAPLTPLRLSCQPPRQRLTTGHDQPPSSSPGCNRKLHLARPQMPASGGGLRLARPPDLASTPVSGGIASSPDPDLGHKRSLRLDQPWARTDRADRGCIIPLLLACSGYKEQDQRPIWLTPAMGNDGLRRSSDGHAITCTAPKLSPDGHVGMYTGLRHSTAGHGPPGVETPTSSGHGARAVWGGCRTLLRGQPSNP

SEQ ID NO: 71910 - protein, 249 aa, Zea mays
  Coding DNA Sequence Number=SeqID_28535
MESFDQMRAHVSDKAGRGTPTPPGYGYLTHHLPQKVRASAGGAAAPSALFPPSAEPVPASDETGGRKGGPPHDRHPTAPQLCAPSALSTSGGPAQRNRARMSCNRRAGYDVQEATPPLTPMLRLLDCGTSIATRGTPAHDPTVPIKGDGHGSVSRGVGTTVGMVKSGPAVTAAADERRQQSSRLQARVPSRSDGRALSHGVKTTRSCPVPRTARTRNGRHANRPSRRINSPTEQATPLAGEAGVASPSP

SEQ ID NO: 71911 - protein, 86 aa, Zea mays
  Coding DNA Sequence Number=SeqID_28536
  Subcellular localization annotation: CTP_CleavageSite=57; ConfidenceScore=5.68e-01
MPPPHLPFSPKFFLPPSHFLSFSLPHPKPPPPLPPALAPPLPPALAPPLPVAARPPRSAAPPRPVPVAVNCLSRAMLINLKRLGSH

SEQ ID NO: 71912 - protein, 51 aa, Zea mays
  Coding DNA Sequence Number=SeqID_28537
MGRRETEREGGKKGQPEREREVEIPRPSCLSRAQVGRKERIQVYNEGVAEC

SEQ ID NO: 71913 - protein, 123 aa, Zea mays
  Coding DNA Sequence Number=SeqID_28538
  Subcellular localization annotation: CTP_CleavageSite=35; ConfidenceScore=5.67e-01
MLLPDFISMFRPQCCSSICSRQTPFLTSSCSSSPRPAAVTSSSLRVPRAYRAFYILNWDLSLFHGGSSQQMDPLACWFGANSSVCRFLLLLFLKLEEQCEARVACLSMLRFARKRASYVTQVL

SEQ ID NO: 71914 - protein, 261 aa, Zea mays
  Coding DNA Sequence Number=SeqID_28539
  Gene Ontology: Mol. function=isomerase activity; Biological process =metabolic process
  Homolog annotation: Hit_ID=A2Y6S0; Match level="QueryCoverage=84%, HitCoverage=91%, E-value=5e-83, Identity=71%"; Hit description =Putative uncharacterized protein
  Pfam annotation: Domain name=ECH; Domain location=11-183; Score=49.5; E_value=1.2e-11; Accession=PF00378.11; Description=Enoyl-CoA hydrataseisomerase family
MCTLEQRGRVFVLTLTGDGEHRLGHALISSLRSAVASAAAGAAKAGPGAALVTVGEGRFFSNGLDIGWAGTSRARLGELVDALRPLVADLLALPMPTVAAVTGHASAGGCLLALCHDYRIMRGDRGVLYMSEVDIGLPLPPYFMAVLRAKITAANALRDVVLRGKKVRAAEGKDMGIVDAVYPSALETADQAFKFAEQLAARKWDGGVYASIRMSMYPEACSKNCLVCDPIQSRFIYIQVEQFLKKDPQVWTATTDYCDIK

SEQ ID NO: 71915 - protein, 97 aa, Zea mays
  Coding DNA Sequence Number=SeqID_28540
MARLSPREDFCINQARTMISISAEENLDVITRQDDDAPRKQPLAHTQRCYNHYDTGGLSLGSSSKIILEFLDFICPTKQKLHQNSVRLRVVSSSPNS

SEQ ID NO: 71916 - protein, 323 aa, Zea mays
  Coding DNA Sequence Number=SeqID_28541
  Gene Ontology: Cellular component=integral to membrane
  Homolog annotation: Hit_ID=Q65XC4; Match level="QueryCoverage=100%, HitCoverage=100%, E-value=1e-122, Identity=72%"; Hit description =Putative uncharacterized protein OJ1187_E11.15
  Pfam annotation: Domain name=DUF502; Domain location=156-307; Score =262.3; E_value=1.1e-75; Accession=PF04367.4; Description=Protein of unknown function (DUF502)
MGDNKSPLSLSPMGGRDRDRELLIPVSGGGSAPGDGVEDGDRASSASAALSSSGREAFHKVVRSWASKKFMTGWKSFRQRNNSLRDQALTALCPRTENTALCPRTENICPEPQTWRENTQPTSSVILFPIAITFYITWWFIHFVDGFFSPIYAQLGINIFGLGFVTSVTFIFLIGVFMSSWLGASVLSLGEWIIKRMPLVRHIYNASKQISAAISPDQNKQAFKEVVIIRHPRVGEYAFGFITSSVSLQSYSGQEDLYCVYVPTNHLYIGDIFMVNSKDVIRPNLSVREGIEIVVSGGMSMPQILSTLDPQMILGDRTGPSRS

SEQ ID NO: 71917 - protein, 119 aa, Zea mays
  Coding DNA Sequence Number=SeqID_28542
MATANIDAYKYEFKVLGAFVVSLTVITLLAKLLRLCLRSLIKGATSRRRATAADDELRLRATLAVPAACRRPWSTLAAAAAAAAGRKESWCSRRRRSCRRLRQWPWRWCGRWARWCART

SEQ ID NO: 71918 - protein, 245 aa, Zea mays
  Coding DNA Sequence Number=SeqID_28543
MQQAPTWRTNCRRFDPGGVPGPTSELSPRVPAQMGRRETEHEGGKKQAKGKPAAFVLPCAQVGCACSRVLQASAWEREPYAPTRSPMRPTFSYESPGPSFYRLEAESEPWGRARRSSSSSGAEAEFEPWGRPHSIEWHSSRSDAGGAVFLLGRSVERRSDCGYFGSVDWRACFRIRCQAILSLNAPAIRSVGVAIWPRLLLCEDWASGEPKVCPLLEGALGRDVNPLGSAAFARGWARARRDRVP

SEQ ID NO: 71919 - protein, 127 aa, Zea mays
  Coding DNA Sequence Number=SeqID_28544
  Gene Ontology: Mol. function=structural constituent of ribosome; Cellular component=ribonucleoprotein complex; Biological process =translation
  Homolog annotation: Hit_ID=Q8HCN6; Match level="QueryCoverage=45%, HitCoverage=62%, E-value=2e-18, Identity=74%"; Hit description =Ribosomal protein S19
  Pfam annotation: Domain name=Ribosomal_S19; Domain location=42-109; Score=77.0; E_value=6.3e-20; Accession=PF00203.12; Description =Ribosomal protein S19
MKWLLQYAEPAIIAATGICLPPIAPINLFSGLGATDRDFSSRALWKGAFVDAFLARIKKNRENMNRKKIWSRRSSILPEFVGSTVLIYNGKSHVRCEITEGKGSGEEEHHSALITQRGIGTVVCYNI

SEQ ID NO: 71920 - protein, 399 aa, Zea mays
  Coding DNA Sequence Number=SeqID_28545
  Gene Ontology: Cellular component=chloroplast
  Homolog annotation: Hit_ID=Q2R8U1; Match level="QueryCoverage=29%, HitCoverage=32%, E-value=2e-23, Identity=53%"; Hit description =Expressed protein
MKLMITVLTQGQHPEFKYLTHMHLGSFRKRRSCPMLEGATEDMDLMGRLLDELDLLQRHSPDVDLDMVDMDLLKHIVVHKKFISITKYHCKLGLTVLLACVTMKFKILEEPKLGRAWKFLSSMSEIVDLKKLFAPSTIAVYFSGGMPPICRGSVEISKDKQVNISRCEVMWTLQGVLWANVVCKQSLTVNGEESVKVGFEMIDAIVEAKAISVSSRNEFVRQNKFSKSSKDELNGSEVKHEDAPEYEDVPLQKDPPEGSEEFSKQVDEAFLNYEVAKKRMYAFSTTTYIGFQAVMTEEMSEKFRGLPGVVFILPDSYLYPETKEYGATWMATRTTDVGDPTFFFSTSQFLRTDDSSFLLQPSSVDTHCSKEKEERGAHPWKKERLRRGLLAYGHTGSCD

SEQ ID NO: 71921 - protein, 236 aa, Zea mays
  Coding DNA Sequence Number=SeqID_28546
  Homolog annotation: Hit_ID=Q6J9V9; Match level="QueryCoverage=53%, HitCoverage=34%, E-value=1e-12, Identity=41%"; Hit description =Putative uncharacterized protein
  Subcellular localization annotation: CTP_CleavageSite=45; ConfidenceScore=5.31e-01
MVAIQGGHPPFKGDSPHLCPQPSRTESSPTRSKVLLLRHGGWVPRVMQAGPGQKEPKLSRAVRATAQRLQAFLHYRPDQRVKGRTAMQAACNHPDFDASSMEAQAHTSWTGKGDTPKGILLRKGSGPRAPLLIRGSKAGPSEGFNSRLRALGLRAHYWSEVRRPAPRKGSTAASGHSGSAPTTDQGFVGWPQKGSDSRLRARRARDDPGYVRYITNAWATLPRYPRTFPRPTGTIL

SEQ ID NO: 71922 - protein, 298 aa, Zea mays
  Coding DNA Sequence Number=SeqID_28547
  Gene Ontology: Mol. function=sequence-specific DNA binding; Cellular component=nucleus; Biological process=regulation of transcription, DNA-dependent
  Homolog annotation: Hit_ID=Q942D2; Match level="QueryCoverage=27%, HitCoverage=31%, E-value=2e-39, Identity=92%"; Hit description =Putative WRKY DNA binding protein
  Pfam annotation: Domain name=WRKY; Domain location=211-270; Score =150.9; E_value=3.5e-42; Accession=PF03106.6; Description=WRKY DNA -binding domain
  Subcellular localization annotation: CTP_CleavageSite=50; ConfidenceScore=5.37e-01
MPVVELWLLLPSAAPPVDLVASNVCAPNASHLPSPSLSHAPTRRQSQLPRSCTVHPPVTYISRGAGSLDLSPPARALFLSMENLPLLGGIRQQPNTQLATATCLAAPQPEQHACRDATTTTSLVVPAMSFPPAAVDWASLLLPRSTSGGANELESGGGIAETVAGSSASATTAGEGDNNKTGKAGRGGGRGKKKASRPRFAFQTRSEDDVLDDGYRWRKYGQKAVKNSAFPRSYYRCTHHTCEVKKQVQRLAKDTSIVVTTYEGVHNHPCEKLMEALSPILKQLQLLSQLQSCTNQLL

SEQ ID NO: 71923 - protein, 251 aa, Zea mays
  Coding DNA Sequence Number=SeqID_28548
MDLVVPCLFGPCRAERPVCSSIIGKNGIDGMYTRGQLQGLRRSGKAESTVARGHACAKPGTPGSWSGLVASSCCAATMLEHDYDSAHVFPFGRQPLVAALRLRLRTSAPERPAPPRPYGKPPTTTVPGRSLRRFGARAPERCVVSVEVGAPNVTGRTTTHCVAFGESRVVTRPMMQPMPPLRVSLETTFYQEISIFPKKNILISLGKIKDLSKSDKFSMAQQSRGNESDHSAFHQNKIGTAQIMSVQAMPD

SEQ ID NO: 71924 - protein, 109 aa, Zea mays
  Coding DNA Sequence Number=SeqID_28549
MGFCHRRSREGSKNRFGRRASEREDLFGPRNHLSERELLIAEGSTFEVVEKHERHSGRKDLFSRKISTQRGFPPFSPRGRVRLCRGKADPSLMTKLCVGARYMNNLKTS

SEQ ID NO: 71925 - protein, 202 aa, Zea mays
  Coding DNA Sequence Number=SeqID_28550
MNKNTGIRSAITNGTPVPPPQVRTTPLDGGPAVQQKTDERRAAASSGSGDDDDFCSGGPNSGNDDLRADAAARRPPPMPKLVRQGRAEGRRIGGRSVGGSGYLVGRRTSSSCRGGSRRRERLRSHSGLRARHAAAASATDDNRPSPRSLREGAGHRPRRGRPQLGTLPSPALVMKILEAEGGAEVVARFAFPRHRTGGHHLG

SEQ ID NO: 71926 - protein, 92 aa, Zea mays
  Coding DNA Sequence Number=SeqID_28551
MAERYQLPQSCVPPTTRRKDGGYPPSGGLEGGKTRCIREREDMVAFQDGHPPFKGDSPYLRPQPSFALFTPPLGDYQLVSEPGSSLEPNRSK

SEQ ID NO: 71927 - protein, 157 aa, Zea mays
  Coding DNA Sequence Number=SeqID_28552
MRFPRRAAIPSYGDRRLLRTRGRVSYRAEADSEPLGRARRRVVSRGRVRAPGVGRGGGPSSKGRVRAPWVRARRRSFAEARVRAPKVGGSGGRQPRPSPSPGSGEAEVVCRGRVRTPGSGEAESSAEAESEPLVGRDCSKLSTLNFDVPNPSQIALS

SEQ ID NO: 71928 - protein, 153 aa, Zea mays
  Coding DNA Sequence Number=SeqID_28553
  Homolog annotation: Hit_ID=A2XFR6; Match level="QueryCoverage=91%, HitCoverage=40%, E-value=1e-07, Identity=29%"; Hit description =Putative uncharacterized protein
MGGYLLYAYSEHYSITKQDNAEAALQDSALCVLSQYCLLLSGVANGLDLKYYPHRSTGSTGGVIVSPVGEGNPRLSSMVNLVAVLNTELDHALDELGKARAEIAELRAKRAERHHQEDGSPAPVGTQHPYRSPPRGHHAYGTPDCRTKIDLEP

SEQ ID NO: 71929 - protein, 92 aa, Zea mays
  Coding DNA Sequence Number=SeqID_28554
MVEIKCQGSTAAGSASPAHNGEVAGDRAGADSRAFEVAGDGLDWRGGPRELTGGTPAARTGSEARERWRGCSRRVEGTFVRNPGCGEGNRAC

SEQ ID NO: 71930 - protein, 490 aa, Zea mays
  Coding DNA Sequence Number=SeqID_28555
MDKNQNLAYAPYIMALIKSKTRFEGSCEIVHTPFRPFKNEIGFLTRPLTPFPDDEEDPGYEGGAAPNVEGQQMPPPPPPPQPQHYWEPAPGYFDPYFHNMQQGLETHIDTRFEGLMTHVDHRLDDMQSRFDSNWDALNSEFSEFRDQIHTNITDPSMSRLNNMQQSFQDNMGALSSQFDNLSTTDNMHDISQRQQQLQQDFGQFSSLFDTFSTHYYNMHPPPRRQARFGVRKSPYLGHICHWNSHTRDNPRCQEEAYAGFLPRFARLRSRQAVEHGQKNTSTCSTCPERTRARPAPDPARPAPRQATPVFLARAHAYKANQGFSRTPPRALDLTGARDRRCCPYTRRASGRLSTCHRRPASRAIPNSVQPSRETLRASVKLPERAIELCLTGHAGSRSPNFTRPPANVDRAPRPEHSPPTSSPACARGPVDSGHHRRRVVPRCDRNDLPKPTPPFAGPPSPPEVAQEPAPEPAIEDLPAPALEGKPRFYA

SEQ ID NO: 71931 - protein, 254 aa, Zea mays
  Coding DNA Sequence Number=SeqID_28556
MQYNGSSSLISCEKQMIRIEFLSLQVTALVTTITGMGDHVSGRVRGKVYGQILDGRLWCWLLGYLLSNSLLRHEDAGELVGGECFGLSKAIQVNPRAWGASRSANESTRARNQRITHRGARSTFVGGRVKSSDLDPARQSSIPRYGSFTEARRVSLEGWTGLGMALLAGLWWRERARAGNTGVAWRGTGHAGSGTGRALARLGCVEHVEVFFYPCSTACRDRKRVNLGKNPAQASSWHLGLSLVCEFQWQICPR

SEQ ID NO: 71932 - protein, 164 aa, Zea mays
  Coding DNA Sequence Number=SeqID_28557
MDRGGVGSKRGFVGLGAGGFPGRGGAAAAAGAWPGTVLTSSFEVEILPPVSPSEAGPDPAEGGYNAEGAAAPSVDDLFVGSRITYPSESYLSRKVMSEDSVIDIVEKARKIVLAEKFSSIKTCSVSRIAYPSDPAIEAVEKRERCSGRKTFSEENFDAEEVPPF

SEQ ID NO: 71933 - protein, 137 aa, Zea mays
  Coding DNA Sequence Number=SeqID_28558
MEIIGPKVWLSDTTETEYGLSKNASEDPRLEQLMKLPMIQCTEISQGSVPLAAGDPRARIRTNRRDSCLARRGYSQGENEEVEVEEARATPPPPEEPQAGNCFYFDICGAEPDSPITQGKPRCICHLLAILKSFSLA

SEQ ID NO: 71934 - protein, 144 aa, Zea mays
  Coding DNA Sequence Number=SeqID_28559
MQVTCNCTTGTHPFDFDASSMEVQAHTSCNRRAGYYVRKTAPPLAPMPRLLDYGISAVTRGNPAHGPIVPTKHIGHGSVSRGRRRDGRYGQKWAERTEKGDIPKGILLREGSGPRALLLMRGSKAGPSEGFDSRPRALGLQAHY

SEQ ID NO: 71935 - protein, 271 aa, Zea mays
  Coding DNA Sequence Number=SeqID_28560
MEYLFDEPCSHQLVDLLAYGSALFFVETEQRLPHGSGSSSDIQRVLGDIPRYAGHVRGTPCKHLSVCAEKVDEHCFLFGVELGADPDLLAGVVAGVKGDGLNRLRWFEVASVALRIRHLLGEALQVSDEGLRFGEGLSVLHALHVAFVRVSVRGSDGDDPVGARHLEIEVGVVWDGHELGVAWPSQHHMVGSSEPDHLEREGFLSEVRGSPEADRQIELSKGLDTLPENDPVKGRRTGPDHGQIDLQQPEGLGVDDVEATARLAFPSICLI

SEQ ID NO: 71936 - protein, 230 aa, Zea mays
  Coding DNA Sequence Number=SeqID_28561
  Gene Ontology: Mol. function=kinase activity
  Homolog annotation: Hit_ID=Q6QP54; Match level="QueryCoverage=37%, HitCoverage=29%, E-value=8e-10, Identity=44%"; Hit description =Putative kinase
  Subcellular localization annotation: CTP_CleavageSite=35; ConfidenceScore=5.36e-01
MEFDNSSHRVLGTVMSAFRPRGVPGSTSKLSLRVPAQMGRREMEHKGERELRLRVVLRQSGCVCSRGLQAFARERESLFVSPSSHATTLSYEGPGPSFYRCKERVQPELARGRVMMIPPVAWSVRAQGQARRRLLRLRPGSGEDAIPPEVEVEAGPWGRAMRRPPSEVEVEAEPWGWARRSPPSEAEAGAEPWGRARRRPSSEAEAGAEPPGSGESVVGRSDCGHFGPTD

SEQ ID NO: 71937 - protein, 94 aa, Zea mays
  Coding DNA Sequence Number=SeqID_28562
MRKWARPSPLLLMLLSCRSNIPLDRPTRWQGGRPSHTINYILHGTCKNGATSKAEYTNTQLDLTCYKESSSLISCEKQTIRIEFLNLARGKESS

SEQ ID NO: 71938 - protein, 179 aa, Zea mays
  Coding DNA Sequence Number=SeqID_28563
  Subcellular localization annotation: CTP_CleavageSite=36; ConfidenceScore=5.20e-01
MASKDNIDLPVNAWESPATALALLLQLTLLGGFSSRWRTRTGGACFVFQMRFLGRSSDGVLGLFVNGDVDIRLLEQLFRGGRCLLDDSRDEGRVIGPTVEILDHDCLCDVGDAVPHCLETPKERAKGLIALALDGLEVPWLCRFVGKGLKVRDKPTAEVIPVVDAVSWEMSEPLQRILP

SEQ ID NO: 71939 - protein, 289 aa, Zea mays
  Coding DNA Sequence Number=SeqID_28564
  Gene Ontology: Mol. function=nucleoside-triphosphatase activity
  Homolog annotation: Hit_ID=Q2R029; Match level="QueryCoverage=27%, HitCoverage=11%, E-value=6e-32, Identity=85%"; Hit description=AAA -type ATPase family protein, putative, expressed
MRLSQDTLNTKQPAKIPDGNDLGGLCEEDHGFFCSAESLRPDFSAGEEVERLAMTELIEVISEENKSGPLIVLLKDVEKSFIGVTESLSSLWSKFNRFHLIGSSSWIVMLKPLKPNQTLVAFARTEIDGYCEGELIKVPLVRPSIILSEIDGYDLMDFLIDDYIGGPFITDESLYEVPNSCTNLKREVGTTMVVVAAQTKAIAEDEARYDWRRRRLAAESTSDEHGQLQMLIVRGNRRRGRHRPPAKRLGEKQHDNSTISGDVTGRTPDFRRRTWMAVDAGQERARRSC

SEQ ID NO: 71940 - protein, 211 aa, Zea mays
  Coding DNA Sequence Number=SeqID_28565
MRPLGKEKMNSEQNFPSYSQKFLNIEDEILLGGRARTRLHCAPPGLQPPRRLVDRIQAVFRRRFTTLRYGASSGGRFFLPPFLLCPFTSRKPSAPLMALDGAVGRFLSRWRPVLSPVPPYKIWLSPYSSPSLQPSPLRLLPPLAVKLAVGARRRALVVRRSIAGAVPRPSPVEPSHAHAVPQLRRSPRSPLSTAPCLVVVCSSKVEDNPKF

SEQ ID NO: 71941 - protein, 174 aa, Zea mays
  Coding DNA Sequence Number=SeqID_28566
  Gene Ontology: Mol. function=kinase activity; Cellular component =ornithine carbamoyltransferase complex; Biological process=amino acid metabolic process
  Homolog annotation: Hit_ID=Q6QP54; Match level="QueryCoverage=94%, HitCoverage=37%, E-value=8e-13, Identity=37%"; Hit description =Putative kinase
MALPVDVAGLCPRLGDVEAPPKPGSSLSSMAEAKSEPLGRARRRSPAEAESEPLGRARRRSSAEAESEPLGRARRRSFAEAESEPLGSGEAEVRPSPSPWGRAKRRSSAEAESEPLGSGEAKVIVFRGLSPSPSPGSGERSSSFPGLTPSPSPWVGQSGIAVFRGLPKFAVFGA

SEQ ID NO: 71942 - protein, 326 aa, Zea mays
  Coding DNA Sequence Number=SeqID_28567
  Homolog annotation: Hit_ID=A2XFR6; Match level="QueryCoverage=49%, HitCoverage=48%, E-value=2e-20, Identity=37%"; Hit description =Putative uncharacterized protein
MKKTLMEISMNIDSNDAPMVRTLQTTRVNTNYVPPPRQVPVYHVVVEEIPMDLPRLRVDIGVILDDNSEELLPTPTPLAESLAFAAGSSASAPPAPAVQAPAPEGDDPDDSGDDDEDDNDEEDDEENVNKEADGVQQDYFMGSGPITEHYTSMFETGHFPNLLQDVLHTLGTYVRPLYETRRLCEPPRACYYITRIHVRVMDAGDRGFRTLSAHESLTPLSTYAASVSDTARRTLWPLSHTYQQQLHDTKYRHLSLCLSGGSQTSIISGGAGEDRLNTLAGVVAGLYTDLESATLDLSRVHLELEDAHARIATLEAQLQGRDPPKA

SEQ ID NO: 71943 - protein, 257 aa, Zea mays
  Coding DNA Sequence Number=SeqID_28568
MVDLEEFFSTGLRLPIHRFVVEVLQRFRIFAKNYYLHWQKKVADGKILQFGLCTFTPRTGKTSTEVVEHLSCVKNNGGTGGTFGSMFIWRMAKGSEASLEYFVLALLCSLPQIQGEEGDGDEVALCHASKLISGQDLIEEFLACRVRPLGHGWGVGELNGFPYARYPEEASKDVDDIVEGNKNAWDRKESSKKRKTSRAPLHLMDPRRETKALRATAAGGSGPRAMAAKAATAAKVMPPPAAPAILIATVSSLAKAA

SEQ ID NO: 71944 - protein, 149 aa, Zea mays
  Coding DNA Sequence Number=SeqID_28569
MLKGHIEVLKNANYISDTSIVRLGGEDTTLPPKKNEVFEATGFVYPDYPRPAQGGAKKRKGVSKLLADALKQKRVKVTTKRRKVNFEGEAVIESMLALKITSIEEVVAKLSLTNEPKVGSFEVTKGIEEKNEEEVIELSIGDKFPLASM

SEQ ID NO: 71945 - protein, 47 aa, Zea mays
  Coding DNA Sequence Number=SeqID_28570
MAGSVREKPEAEHHLRVEKAHDSLRSYSTKLDYLGLKLRLCGRDSNT

SEQ ID NO: 71946 - protein, 250 aa, Zea mays
  Coding DNA Sequence Number=SeqID_28571
MGELQQRLNPPHGRVRGRHVSRESDILQDINSESGPPMGECRTPVYSVQASKFGPRPPPGACAIDRWVRTDGSVFHAKLTANELGAAAESGYTAALLATQPLDSPNFLSPLTERENRVVTVPPFALCRRRQARNCYPLGLGGEFAWGISGTPLLEVDLGMGESLFGVSSIHRSGCVVDGAHQLSYAGKKSSNEFYFTSSTCRVERSKVWGPWAPDCGLRPWHHRIRWSTAASGGSLEVKGRWPKIRSGTA

SEQ ID NO: 71947 - protein, 48 aa, Zea mays
  Coding DNA Sequence Number=SeqID_28572
MPGIPREVIEHHLKIHPDAKQAHRVVVVTSFPLKAILHNSNAMGNIAK

SEQ ID NO: 71948 - protein, 380 aa, Zea mays
  Coding DNA Sequence Number=SeqID_28573
  Gene Ontology: Mol. function=transferase activity, transferring nitrogenous groups; Cellular component=endoplasmic reticulum membrane; Biological process=biosynthetic process
  Homolog annotation: Hit_ID=Q2R3K3; Match level="QueryCoverage=98%, HitCoverage=84%, E-value=1e-166, Identity=76%"; Hit description =Serine palmitoyltransferase 2, putative, expressed
  Pfam annotation: Domain name=Aminotran_1_2; Domain location=29-352; Score=48.6; E_value=2.2e-11; Accession=PF00155.12; Description =Aminotransferase class I and II
MLAISTTFDVVERTSKDNNKTLQRTSNNTRCLNLGSYNYLGFAAADEYCTTRVIESLKKYSASTCSVRVDGGTTKLHNELEELPARFVGKPAAILFGMCYVTNSAIIPCLIGKGGLIISDSLNHNLIVNRVRGSGATVRVFQHNSPAHLEEVLREQIAGGQPWTHRPWKNIIVIVEGIYSMEGELCKLPEIIVVSKKYKAYTYLDEAHSIGAVGQSSRGVCELLGVDRADEIIQHLKHSCPPHLYATSMSPPGVQHVISAIKVILGEDGSNRGAQKLARIRENSNFFRSELKKMGFEVLGDNDSPVMPIMLYNPAKIPAFSRECLRQKQSACSPYPSLFAPTGFVLPICHGYQQSWRPCGHQIFHAEPPKIAGAGHDKLE

SEQ ID NO: 71949 - protein, 74 aa, Zea mays
  Coding DNA Sequence Number=SeqID_28574
MSDWKGENEQIECKQFLMKPRHISTSPCNSFTFLLEVAAVAGWWAMTESTPQRSLAKPPSALVATMPCKKRSSG

SEQ ID NO: 71950 - protein, 67 aa, Zea mays
  Coding DNA Sequence Number=SeqID_28575
MTYTLHSYAYIEVISAVLLAYFHISYGSSNVHVDVTKTRHTNICSLLQELFLKSLLFSFILWKTSLL

SEQ ID NO: 71951 - protein, 104 aa, Zea mays
  Coding DNA Sequence Number=SeqID_28576
MDRLQRRNTHDLREGRPSNPPSASRPLQELEPSSPVFFRSEIPANAELALTPVGRIMVSPQISHKTLSFLLLSALAAVVLPTTKDEVMSLTKVDFQKEVSQDHV

SEQ ID NO: 71952 - protein, 156 aa, Zea mays
  Coding DNA Sequence Number=SeqID_28577
  Homolog annotation: Hit_ID=O48967; Match level="QueryCoverage=98%, HitCoverage=48%, E-value=3e-11, Identity=29%"; Hit description =Putative uncharacterized protein
MVQIVEHRDLSLEDFLMEEGAASSMPRGSYRPASGAAAMHAAQQHTPAQTSRALSRAAHGGALSAARELLRNPTSSMASPRAMRQWREDVDCLRGRMSADKTLRGRNLDQDFIARDAQIQAGSLEDMVAAVTWPSILPPGWTVEWDPTSAEEEHDE

SEQ ID NO: 71953 - protein, 52 aa, Zea mays
  Coding DNA Sequence Number=SeqID_28578
MGKPVPSLVMLLLCRVTTLVPTITGMGDHVSGRVRSKVCGQVHSGFRNHYAK

SEQ ID NO: 71954 - protein, 121 aa, Zea mays
  Coding DNA Sequence Number=SeqID_28579
MAVRRGILASALPINCSGCTRLCPLKPGVTPDTYDREFFQEDGLEGRFGIDLTEAIEMEVDIEMVVDEEDDEVQNENDLEILEGNDINDELAPSDGVGYEMVDSDDESYDPANPDTYEDYF

SEQ ID NO: 71955 - protein, 376 aa, Zea mays
  Coding DNA Sequence Number=SeqID_28580
  Gene Ontology: Mol. function=binding; Biological process=ubiquitin -dependent protein catabolic process
  Homolog annotation: Hit_ID=Q10P70; Match level="QueryCoverage=41%, HitCoverage=24%, E-value=2e-46, Identity=62%"; Hit description =Armadillo/beta-catenin-like repeat family protein, expressed
  Pfam annotation: Domain name=Arm; Domain location=148-188; Score =17.8; E_value=0.04; Accession=PF00514.14; Description=Armadillobeta -catenin-like repeat
  Pfam annotation: Domain name=Arm; Domain location=189-229; Score =13.8; E_value=0.19; Accession=PF00514.14; Description=Armadillobeta -catenin-like repeat
  Pfam module annotation: Pfam domain module=Arm::Arm; Domain location =148-188::189-229
  Subcellular localization annotation: CTP_CleavageSite=58; ConfidenceScore=5.53e-01
MSTSTMPGVRMPCLALSRARSDAASLFHSPFHAQQTTSLAVSVSPYPWLTSNPMDSVRCSTAAGGGAPAVRMRTLALLDIALEDIAWLIRVSSLQDNDGDGNLRGLPNIAQNEPVLGMVWDNIARLHTGGLAARDDAAATLASLAVGNSYFAKYIVEEDDVAVLVKLIKEGTDDGQEAAAMALGLLCRDEDSLHMLLHSGACSVFAAALKEPLMRVQAAVADAIASLARHIHKCQDLFAQSNDVRHLVTHLASTPSIPPPCPHLAAHRLSSRPLRFLRRYLCVRPLGRPEIRRDPRELPCCSPCAVASPSPTSRLYACLSCATVFCPSHAATHTSASAGLAAFAERFAAVGCSCLAERSRRAVGGGGVTAGSGGWL

SEQ ID NO: 71956 - protein, 113 aa, Zea mays
  Coding DNA Sequence Number=SeqID_28581
  Gene Ontology: Mol. function=binding
  Homolog annotation: Hit_ID=Q10P70; Match level="QueryCoverage=49%, HitCoverage=8%, E-value=1e-15, Identity=76%"; Hit description =Armadillo/beta-catenin-like repeat family protein, expressed
MGEWSKAMLAKPIQLADQVAQQAGWQCLRADCTELRSRAMKLADLLRQEAWVESYERPAARHGRHGAGAPQGRGHGRALLPEPLTPPPLLHAQPSVRAPAHPHPAQPALEDIA

SEQ ID NO: 71957 - protein, 141 aa, Zea mays
  Coding DNA Sequence Number=SeqID_28582
  Subcellular localization annotation: CTP_CleavageSite=41; ConfidenceScore=5.54e-01
MAGPLLGQQLGRLKFPMLGAPSCAAPLLHPSPSALSLPWPSSSSARPPSFFPLCSNTNLLFSSTKQQPRSPPHRVLRSTCAVPTRAVAMVFETAHVVSLICAVRPSTRLTSPDLRSPNIDAVHPVMSIGRIAIAVGEQEVV

SEQ ID NO: 71958 - protein, 203 aa, Zea mays
  Coding DNA Sequence Number=SeqID_28583
MAASTMRKGDQRWTSCAGARLQGGRAHGEEEELQLAYTLGAEERKGAMGGSVSCCKRHGRGLLPWRLSAGAEGREELVCAKEGSRERQGWVLGCSSLVGAMGGREGSSLRVGEEGVGEKRLMAAGKTIGVGMQNDQGQGRGIRIYRETLGLGFQMGPIGLVWAGPNAQTGCAKLFFRIKMLPRNSFLQRTERIRVSANGRLSD

SEQ ID NO: 71959 - protein, 158 aa, Zea mays
  Coding DNA Sequence Number=SeqID_28584
  Subcellular localization annotation: CTP_CleavageSite=71; ConfidenceScore=5.38e-01
MVQIGSMSFRPYYGGTVPHLAELPGRPHSSWSTGPKRAFPRKSLWAPQESSLSMSLCRNNYGMRTWTSSTNADGKRRSEMHGTTKHSGATTNGCAYVYLSPVRSTLVSPVISRVTLEALGHQLHGVLYALSGGVFSGGHRTSDHRLSHPFPKGTEPGA

SEQ ID NO: 71960 - protein, 281 aa, Zea mays
  Coding DNA Sequence Number=SeqID_28585
  Gene Ontology: Mol. function=structural constituent of ribosome; Cellular component=respiratory chain complex I; Biological process =photorespiration
  Homolog annotation: Hit_ID=A3AF09; Match level="QueryCoverage=26%, HitCoverage=39%, E-value=3e-30, Identity=84%"; Hit description =Putative uncharacterized protein
  Pfam annotation: Domain name=GRIM-19; Domain location=16-125; Score= -36.8; E_value=0.0044; Accession=PF06212.3; Description=GRIM-19 protein
  Pfam annotation: Domain name=Ribosomal_S4e; Domain location=188-254; Score=68.5; E_value=2.3e-17; Accession=PF00900.11; Description =Ribosomal family S4e
  Pfam module annotation: Pfam domain module=GRIM-19::Ribosomal_S4e; Domain location=16-125::188-254
  Subcellular localization annotation: CTP_CleavageSite=59; ConfidenceScore=5.10e-01
MTESLVRNKSGMASIKEMPVVQDGPPPGGFAPVRFARRIPTSGPSATAIFLTTFGAFAYGMYQVGQGNKVRRRPFSGDKCPPPTRLWVIDASSQIVFTWGRVGSFLGRFKSIPSIVELDSLKVSGDVWFSSGIVLKGKVTITAKPGVKLEIPDGAVIGNKVKYPIYDQTVYLNDYHKKMLKDQYEGLKTIEQITMDSATVETNMFKLCKVRSIQFCQKGIPYLNTYDGRTIRYPDPLIKANDTIKIDLETNKIMDFIKFDIGNVVMVTGGRNTGRVGVIKN

SEQ ID NO: 71961 - protein, 62 aa, Zea mays
  Coding DNA Sequence Number=SeqID_28586
MAGALYNVSYSLHVIRSLRRRGGRVQRLQDQTMEEDAMRFIIDSSPTSIANVDATVGNVRDA

SEQ ID NO: 71962 - protein, 102 aa, Zea mays
  Coding DNA Sequence Number=SeqID_28587
  Gene Ontology: Mol. function=nucleic acid binding; Cellular component= intracellular; Biological process=regulation of transcription
  Homolog annotation: Hit_ID=A2YKK6; Match level="QueryCoverage=88%, HitCoverage=96%, E-value=5e-23, Identity=59%"; Hit description =Putative uncharacterized protein
  Pfam annotation: Domain name=zf-C2H2; Domain location=25-47; Score =22.9; E_value=0.0012; Accession=PF00096.17; Description=Zinc finger, C2H2 type
MEGGFNKSGSPEAEGSRRTPAGAYYECSFCKRGFTNAQALGGHMNIHRKDRGGGSRSGTAPPQQDDAGGSRTYGAGDVHLGLSLGRKEDVDLELRLGSYPYK

SEQ ID NO: 71963 - protein, 404 aa, Zea mays
  Coding DNA Sequence Number=SeqID_28588
MQLYNTARVCLGLGGRRKHTLQDNPILQARILTAEGSSSTLGIDDTFGKGQPSLGRQRGPRISTLEDDVITTPGPSPLGSSPGIRPEQAAWPVTPGPRPVTFQGRQSGPSRWLGRSPRGLGQLPSEDVSPTRGLGWSIPASVPLTDDPARLRPTRFPFRANSASVHVDAATPGLGSSKSGRGVPLTKLEKPRTTRPTEPRNSYASGIRIPHSSLIHGATHAWYEQPHSTGERPAEQQKIDEWLVVARPSRGDDDDFCPGGPNSSSDDLRADAAARRPPPVPKLERQGQAEGRRVGGRSAGGAGELGGGGTSSSCRGGRRHRERLRSRSAQRAGHGAAVSATDDSRPSPRSLREGAGHCPRRGRPQLGTLPSPALVMKILEAEGGAGAAARLAFPHHQTGGHHLG

SEQ ID NO: 71964 - protein, 205 aa, Zea mays
  Coding DNA Sequence Number=SeqID_28589
MSGQFTTPLRVMIEEVNCKGRSILHKLRGSNKALSGRQLQEAEAPEASEEDMGISPGKSIAYFVAKIRATLQECVKSPSKSRRRSQKSKPGKVNRSKSCTLLRVTHPTYQNMWVIILQLLLLRLVSHRLLGHSFHLRRHYNLPIHEVSGQKGAIRLITSEISGRNPKLAQSTVLCQNQNTSIERYPTSEAFYIIVIFFFSKEQSM

SEQ ID NO: 71965 - protein, 124 aa, Zea mays
  Coding DNA Sequence Number=SeqID_28590
MGNTQMVMAVSVVHPNHDGEVFPPYSAARHPKHPSEAPGAPHRCGRAVPASPDSPAAVLGWDAEKRSRSTYIAPRRRVVPWMPIRKNGGGGCNVHAELGATPGTPTSDFVGDSLKHASSEQNPR

SEQ ID NO: 71966 - protein, 183 aa, Zea mays
  Coding DNA Sequence Number=SeqID_28591
  Subcellular localization annotation: CTP_CleavageSite=47; ConfidenceScore=5.31e-01
GNDSGRKALVFVLPWIPRQSPGCDVGVVSTAFWLRFPSNLAVVGMVSQAPVAGAGAGASLAASLCKKSNRVARVLAYALLEWILIALLLANGVFSYLISPVRRLLRPRAAVRALLPPWRRQPLRDPPAAPPRRRAPAPLAVRRARCRAVALRLWPDAHAAACFYSPHGSDYGLTCSNGRTLCC

SEQ ID NO: 71967 - protein, 131 aa, Zea mays
  Coding DNA Sequence Number=SeqID_28592
  Gene Ontology: Mol. function=3-beta-hydroxy-delta5-steroid dehydrogenase activity; Cellular component=endoplasmic reticulum; Biological process=steroid biosynthetic process
  Homolog annotation: Hit_ID=A2XHT4; Match level="QueryCoverage=96%, HitCoverage=53%, E-value=6e-45, Identity=69%"; Hit description =Putative uncharacterized protein
MARHLVAALLRSGEWRVRVTDLAPTLALGHGETEGILSDALRDGRAVYASVDVCNLDQLTKAFEGVDVVFHTAAADPSKNNLQLHYKRLTWRICKVKRLIHTSTSAVVFDGVHGLFDADESLPYPDKVILP

SEQ ID NO: 71968 - protein, 177 aa, Zea mays
  Coding DNA Sequence Number=SeqID_28593
  Gene Ontology: Mol. function=3-beta-hydroxy-delta5-steroid dehydrogenase activity; Cellular component=endoplasmic reticulum; Biological process=steroid biosynthetic process
  Homolog annotation: Hit_ID=Q7Y0G5; Match level="QueryCoverage=76%, HitCoverage=27%, E-value=2e-34, Identity=51%"; Hit description =Putative 3-beta hydroxysteroid dehydrogenase/isomerase
MQELIVTIGEGKNYDDFVYVENVVHGHLCADKTLSTIEGARTSGGKAYFITNMEPMNMWDFLYLVQEELGYKRIFKIRVPIIVIKPASYLIELAYRAVFSHFGTCQPQILTPARIRYVTLNRTFSCNKAVEELGYKPIVTLQVLNLNSFSIIFIVFSIGVAYFYLKCPYTYNFLLMA

SEQ ID NO: 71969 - protein, 122 aa, Zea mays
  Coding DNA Sequence Number=SeqID_28594
MATLCMERVGLVLRLSLLIGGVQAIKHVVDGCHLYLHCLYLLEGTTQAPIRDVPMPLVVTAPSLPHAPSSFSPSATLAYPVVDAPCCHRPWPPLQRAVPPCHLRGTASTTTIIPKGEARIQN

SEQ ID NO: 71970 - protein, 117 aa, Zea mays
  Coding DNA Sequence Number=SeqID_28595
MGRGEARSAGDWLATTGAIRAGARCGLSGRHRHSCGADRSEFVEGERSRHGGGKEEERAHLSSVEGARRDGAPGDGRRHGCRCSTARTTVAVEVWARVREREMGCWGSKWNQREGGG

SEQ ID NO: 71971 - protein, 91 aa, Zea mays
  Coding DNA Sequence Number=SeqID_28596
MPGKANCCCPARMQHSALFLAFAARTAARTCRWFASLEREHEREPSGGRVRPGTMAAAAEVAGGSPGVRRPAGSPVWRLFIPAGTEPEFRL

SEQ ID NO: 71972 - protein, 127 aa, Zea mays
  Coding DNA Sequence Number=SeqID_28597
MQAACNRAKWAHFSDSQHARHGGPGPRVMQPGSGKGDTPKRILPREGTRLRASLLIRGSKAGPSEGFDGRLRSRGPYTHYWSEVRRSAPRKGSTTASGYSGSAPTTDLGFEGWPPKGSQPPQTQSEG

SEQ ID NO: 71973 - protein, 86 aa, Zea mays
  Coding DNA Sequence Number=SeqID_28598
MRLYTLRDDVVLYPQRYEDRGPTHCIPVHVFAQSDICRYLIHVENEGSSSTSTFTIIITLPSCSHDLIRNSMSNDVCIFFLVVGTG

SEQ ID NO: 71974 - protein, 422 aa, Zea mays
  Coding DNA Sequence Number=SeqID_28599
  Subcellular localization annotation: CTP_CleavageSite=22; ConfidenceScore=5.05e-01
MQAACNRTKGAHPFDFNASSMVAQAHTSCNRCAGCYVQETAPPLAPLPCLLDCGTSTATRGNPAHDPTVPTRHIGHGSVSRGRRRDGRYGQKWADSNGSGRRAEAADRRRLWQANQATLHLRHNDSVKKGTGKGDTPKGMLLREGNGPRAPLLIRGSKPGPSEGFNSRLRALGLRARYWSEVRRPAPRKGSTAASGHSGSAPTTDQGSLETPCSAPSKGNMALFPLLLAERRRRGGSDSGSAPEDDELHLARPRARTRAWPRKTTNSASPDPGLGLGLGPGRRRTPPRLTLGLGLGLGLSRRSPSRPTQGLGLDLDLGRKTQPRPQRSLRLAQPRARTDHATGGAIITLPLASSGYREQDRRPIWLAPVKQIMMAPHMLHDDGGSQPPYGSKETSARTRQPRQLSFRQAPTLLRWPRHHMNK

SEQ ID NO: 71975 - protein, 262 aa, Zea mays
  Coding DNA Sequence Number=SeqID_28600
  Gene Ontology: Mol. function=translation initiation factor activity; Cellular component=eukaryotic translation initiation factor 2B complex; Biological process=biosynthetic process
  Homolog annotation: Hit_ID=A2YCJ5; Match level="QueryCoverage=89%, HitCoverage=99%, E-value=8e-63, Identity=80%"; Hit description =Putative uncharacterized protein
  Pfam annotation: Domain name=Hexapep; Domain location=137-154; Score =12.1; E_value=2.1; Accession=PF00132.15; Description=Bacterial transferase hexapeptide (th
  Pfam annotation: Domain name=Hexapep; Domain location=160-177; Score =14.2; E_value=0.49; Accession=PF00132.15; Description=Bacterial transferase hexapeptide (th
  Pfam annotation: Domain name=Hexapep; Domain location=183-200; Score =4.3; E_value=44; Accession=PF00132.15; Description=Bacterial transferase hexapeptide (th
  Pfam module annotation: Pfam domain module=Hexapep::Hexapep::Hexapep; Domain location=137-154::160-177::183-200
MDFQVVVLAGGTSEKLSPLVSKVDVPKALLPVANRPVLSYALDLLEASDLKDLIVVVEGQEAAQLVDAWVSSAYLDRLRVEVVVVSEDLGSAGALRAISKRLMANDILVIGEVSHLSGYSFSAQNNIIHPSSVLGSKTTIGPHCILAEGSQLGDKCSVKRSVIGRHCRIGSNVKIVNSVVMNHVVIEDGCHIQGSVVCNNVQLQERAVLKDCQVGAGYIVTAGSEHKAESLARKRLVRAKGLVAYLSYQLLEQVACCLRTMG

SEQ ID NO: 71976 - protein, 144 aa, Zea mays
  Coding DNA Sequence Number=SeqID_28601
MENYGCKVDLLSHAGLVQVAVELIEGMSTPPDLVFWGWAGWAQTVRPASTSSGEAVWASSGGKVSARKKGARRERARQWEKGRGLGWEGELHASWFGSARSDGVGLARGSGRRGGGEVARPLAAATARPGGVHARDALGWGATA

SEQ ID NO: 71977 - protein, 103 aa, Zea mays
  Coding DNA Sequence Number=SeqID_28602
  Subcellular localization annotation: CTP_CleavageSite=41; ConfidenceScore=5.28e-01
MELSLPAEPSPFLPLPSSLSSRALLPGRDLATGARPHRLARTRARRPDRLRPPRPPWTASPDFTIHNKLVDLVVKNQDLFRSVEESQVFNKQGKWTSPSAYSV

SEQ ID NO: 71978 - protein, 123 aa, Zea mays
  Coding DNA Sequence Number=SeqID_28603
MKSRPAPAPVFISDPSKNMVQSSGWIGAVGSWYLTDEVDRSLDGQCMPFFPSLNHDRGADHLSGSGDVDQEGFSDRRGHQDGRIREERLQVPEGFLGLRGPSEALDLFLRGGTEAGLFRRGTR

SEQ ID NO: 71979 - protein, 221 aa, Zea mays
  Coding DNA Sequence Number=SeqID_28604
MAAAEVCMQQQLRNRWIDVCEGQQDRILRALIPSPGVLLDLPRHEGRKGNTRTQLQRIRACQCGRFGGALGRGRTGGCEWIGTKAEEDDVPSKIQEFDDDNKSLYYNLKIFGAASNKETSKKVFLTLERYLGFYHMKRRLNIDLTDLLIGFIYPLYSRWDHGCLQLWAKLNVDLKAFFECCTKDRCDKVTQFCEADFGDSIASTSTIDVKVNEDVTVRKID

SEQ ID NO: 71980 - protein, 251 aa, Zea mays
  Coding DNA Sequence Number=SeqID_28605
  Homolog annotation: Hit_ID=A2XJG6; Match level="QueryCoverage=51%, HitCoverage=55%, E-value=7e-68, Identity=96%"; Hit description =Putative uncharacterized protein
  Pfam annotation: Domain name=DUF260; Domain location=2-107; Score =101.0; E_value=3.6e-27; Accession=PF03195.5; Description=Protein of unknown function DUF260
MSCNGCRVLRKGCSDACVLRPSIDWIHGAQPQANATVFVAKFFGRAGLVASLAAVPLHHRPALFRSLLYEACGRTINPVSGAIGLMWTGNWDLCQAAADAVLRGESLRALSAVPAAFTDRDMDGLYGSVGGLVAAAAAAASPENSSSSAPSTTKRRNANGGSSNNAVPAAAASHHRPPPPAAAAAGLLLQSSCHQLDLCLTPALSPPGAGPRGCAAGASDEYSATTTCEDQTGDHGHGEPRPPPPLLNLFN

SEQ ID NO: 71981 - protein, 358 aa, Zea mays
  Coding DNA Sequence Number=SeqID_28606
  Homolog annotation: Hit_ID=A2XNW1; Match level="QueryCoverage=53%, HitCoverage=50%, E-value=1e-18, Identity=36%"; Hit description =Putative uncharacterized protein
MAADDHVFRATNEASVALLRGLRAGTVDHRFKAFIHNVDVYTAAPEELVAGLEPVPGTDVTEDGYNRQWYIYCPKRYKNGEGRASGHRLRAVETARTCWHSETGPKPMEGLPGATFCSLSYGRKENENEGTSGRHRHRFHRMGWQMTEYDDTQGGGGDHVLCKVHRSSSSLAKKKYNTKRTATGDHPEAPPTKVIHDMQVQQMQDPAGAIFTGAYPTMDDPLMVGGAEASEAEHGGELGKSNVDYLLNINNVDGEQQQPPCAEPAEQSSDVQVQVDPAATLTPCYVHGHEQGGNPLMAGGEEEQRRRVESPEPELDFDHLLNNIDWKGLLEILGDDEEQGLPLQQQPCVEPAEQSSDV

SEQ ID NO: 71982 - protein, 82 aa, Zea mays
  Coding DNA Sequence Number=SeqID_28607
MTEEGPTQEAAPATKRKIGSDAGQLPLVPTPVVAPSPTMAIGAKGASRDPWSALCVNGTILSAAAAKDVAGSVSQQLRRASQ

SEQ ID NO: 71983 - protein, 41 aa, Zea mays
  Coding DNA Sequence Number=SeqID_28608
MSCAFDDYYIKALEVWHVLFNDETMQIVAYIEVCMILMVVM

SEQ ID NO: 71984 - protein, 216 aa, Zea mays
  Coding DNA Sequence Number=SeqID_28609
RSPEAPPTKVIHDMQVQQMQDPAGAIFTGAYPTMDDPLMVGGEEASEAEHGGELGKSNIDYLLNINNVDGEQQQQPAEQSSDVHVQVQVDPAATLTPCYVHGHEQGGDPLMAGGEEEQRRRVESPEPELDFDDLLNNIDWKGLLEILGDDEEQGLPLQQQPCVEPAEQSSDVQVQVDPAATLMLGDHEEQGLPQQQQPCTEPAAEQSQSSRTVPPV

SEQ ID NO: 71985 - protein, 186 aa, Zea mays
  Coding DNA Sequence Number=SeqID_28610
  Homolog annotation: Hit_ID=A2XNW1; Match level="QueryCoverage=79%, HitCoverage=40%, E-value=3e-13, Identity=38%"; Hit description =Putative uncharacterized protein
MRGVSGRRRGAASRLGSTGHTGGHQRQWRMRRVHTAAPEELVAGLEPVPGTDVTEDGYNRQWYIYCPKRYKNGEGRASGHRLRAVETAGTCWHSETGPKPVEGLPGATFCSLSYGRKEKEDEGTSGRHRHRFHRMGWQMTEYDDTQGGGGDHVLCKVHHQASSLAKKKYNTKRTATGDHPRGAANQ

SEQ ID NO: 71986 - protein, 97 aa, Zea mays
  Coding DNA Sequence Number=SeqID_28611
  Subcellular localization annotation: CTP_CleavageSite=78; ConfidenceScore=5.02e-01
MDSGQGGVTPGVRWSIRPAADPPINVDQTLFATLFGKVFPIFFVILLALRRVWRGCSSASRCRIPMLKPWRRRAGTIVTATGRHEDDDVRAVDRAMY

SEQ ID NO: 71987 - protein, 298 aa, Zea mays
  Coding DNA Sequence Number=SeqID_28612
MKDFTMTAVLPPYMRIWLLRSSSKIASGPSAHHTWGAMTVATGAAPGTVVFFHGITKVDACRRWSIEFPGAQASPAARARARAPSVLDKWAPPVGANSSVPSLPLSLAAPWAKSVGAVSLARALASLSVPPTPLSAVPNLLPMIPRRGRAHVRAFSGHFLAPAPLLSLAPCSPTSPHLLAPSAKPPHPLSRSARATRAPPLPTDVCRPFYGRCGTPRRVCCPELRHHRPVASLRHCRCPVTPALPHERPVPTRRRDTHGRVHRTALNAPELVPKPLEPHRGQPPPPSGDNAPVSALSR

SEQ ID NO: 71988 - protein, 132 aa, Zea mays
  Coding DNA Sequence Number=SeqID_28613
MARRSWAQGRIGHGKSSLGKGDAAVGRCAEEGTSTMGASAWSRGALRREEEGCGFLRLSSRETERREGASMEEEKGLLAMEERAQGKVELLLEFLGAVDREQGGQGEEPELAGGWRPWLLAAKGRAGAPACS

SEQ ID NO: 71989 - protein, 112 aa, Zea mays
  Coding DNA Sequence Number=SeqID_28614
MHDAARRALSQYCSLFSGVADGLDLKYYPRRSIGSAGGVIVSPVGEGNPRLNNMVNLAAVLNTELDHALDELGKMSENRRRGARRAQPEQQAPQEDAAQQQQLPPPPPMTVK

SEQ ID NO: 71990 - protein, 121 aa, Zea mays
  Coding DNA Sequence Number=SeqID_28615
MLVDYTMVLDGSSVSVEGPTQQGVESVVEVTPASGVTSDGSSDPSLQLWLLRELCVVARTATGVIVVSVRGTSLAEVQGKAASRTPPPAEARGKSPAAPAPAPSVGAPAPRAGDDAVSPGD

SEQ ID NO: 71991 - protein, 830 aa, Zea mays
  Coding DNA Sequence Number=SeqID_28616
  Gene Ontology: Mol. function=transferase activity; Cellular component= chloroplast; Biological process=metabolic process
  Homolog annotation: Hit_ID=Q53NI2; Match level="QueryCoverage=100%, HitCoverage=93%, E-value=0.0, Identity=72%"; Hit description =Probable NAD kinase 2, chloroplast precursor
  Pfam annotation: Domain name=NAD_kinase; Domain location=557-804; Score=83.7; E_value=5.9e-22; Accession=PF01513.12; Description=ATP -NAD kinase
NFQTRDPSQLLWIGPVPGDIAEIEAYCRIFRAAEQLHTAVMSALCDPETGECPVRYDVESEDLPILEDKVTAVLGCMLALLNRGRNEVLSGRSGVASAFHGSVDSTSDMIPPLTLFRGDMKRCCESMQLALASYLVPSEPRGLNIWRKLQRLKNACYDAGFSRPDGYPCPTLFANWFPVYLSIVSDDSGTDEPEVAFWRGGQVSEEGLAWLLEKGFKTIVDLREEDVKDDLYLSAVQEAVSSGKIEVVNMLVEIGTAPSAEQVKQFAALVSDGAKKPIYLHSKEGVSRTSAMVSRWKQYVTRSERLAVQNHYINGNGKVLTSDKTKQHTGSPSSSMNRTEIGMVTESDRTMNNGESCEIDIETARHNLEVTNALSDDQSTQQGEMLGTGTEPLSNFKLESNPLKAQFPTCDIFSRKEMSKFFRSKKVYPKSVLNSRRQSSSLLVSRRKQNFSTERNGTIDYEAAEFTILESSNGTSFDNDYILSVSSGITDGKPSNNGAFSLIEKKEREVSVTTFDTRASASSSNGKVQVGSQKTAEKNGTPYLERNNSNNVDGSMCASATGVVRLQSRRKAEMFLVASFLHHQEKMNVLVEPDVHDTFARIPGYGFVQTFYTQDTSDLHERVDFVTCLGGDGLILHASNLFRTSVPPVVSFNLGSLGFLTSHNFKDFRQDSRDLIHGNNTLGVYITLRMRLRCEIFRSGKAMPDKVFDVLNEVVVDRGSNPYLSKIECYEHNHLITKVQGDGVIVATPTGSTAYSTAAGGSMIPDEARSNAWVSFDGKRRQQLSRGDSVRISMSQHPLPTVNKSDQTGDWFRSLIRCLNWNERLDQKAL

SEQ ID NO: 71992 - protein, 88 aa, Zea mays
  Coding DNA Sequence Number=SeqID_28617
MSAALSMDPMELPAASVALPELRHHRPVVSLCHRRCPMTPALPLVTALNAPELVPKPLEPRRGQPPRLQRPLAAEPSGATVPVSVPSR

SEQ ID NO: 71993 - protein, 110 aa, Zea mays
  Coding DNA Sequence Number=SeqID_28618
MARLWSRAQSEREGEGVRLRAQVSEGRWLKRGAGAGMCSENARTWACPLRGIVGERLGTTDRWGRWDREGSESAGKRNGADRPSPWSCERERERGRAGVGADSRGPPVRH

SEQ ID NO: 71994 - protein, 119 aa, Zea mays
  Coding DNA Sequence Number=SeqID_28619
MPSWLSERFWHPVHVMSWPSEECLSPVEARRSFLWLLRLDLKEFTITLSSGTAAEAGQAALFSRQVGQLSGEVKALTSALSTEERSLEDMVAGVTWPSILPLGWTVEWDPTSTEEKHEE

SEQ ID NO: 71995 - protein, 125 aa, Zea mays
  Coding DNA Sequence Number=SeqID_28620
  Homolog annotation: Hit_ID=Q8SA97; Match level="QueryCoverage=50%, HitCoverage=8%, E-value=4e-07, Identity=49%"; Hit description =Ornithine carbamoyltransferase
MVEAESEPWGRARRSPSSEVKAESEPWGRARRSPSFEVEVESEPWGRARRSPSSGVEVELELWGRARRSFLWRPRLDLAAVSLTLSSGTTAGAGQAALFSCQVGQWSGEVTAVTSALLTEERASR

SEQ ID NO: 71996 - protein, 146 aa, Zea mays
  Coding DNA Sequence Number=SeqID_28621
MNQAHPWKNKKTVERGREIFVVVALQAYQHLGLGDGFECFTGVRRGWPWIQGKGGVTPGVRWSIRPAADPPINVDQTLFATLFGKVFPIFFVILLALRRVWRGCSSASRCRIPMLKPWRRRAGTIVTATGRHEDDDVRAVDRAMYG

SEQ ID NO: 71997 - protein, 76 aa, Zea mays
  Coding DNA Sequence Number=SeqID_28622
  Subcellular localization annotation: CTP_CleavageSite=19; ConfidenceScore=5.42e-01
MQYRCSCSPGTSPGFLAASAARVPRARQTVQVGCCAERNPVFCVEKASHSTLVNVRSDAQIGIAIVLTNTDWVCLW

SEQ ID NO: 71998 - protein, 101 aa, Zea mays
  Coding DNA Sequence Number=SeqID_28623
MDPGRLGLPCALRSREREPTKAGASLGKKWRAPLEELGQLGTMEGVPRCCTAGGGRRAWGRRRLLVAAGKMIGVGVQNCQVQGESTPIYRKWLRLDTEILS

SEQ ID NO: 71999 - protein, 112 aa, Zea mays
  Coding DNA Sequence Number=SeqID_28624
MSPWLGRSTRRRRVHPPAHVDRPIPATTVVEPYLAVTARTSRSQPRPSPDLPRRRIHVSYSLHSIDCNLADGEYILVPEQGVAQEVAPDPAPKPVLEDLPAPALEGKPRFYA

SEQ ID NO: 72000 - protein, 86 aa, Zea mays
  Coding DNA Sequence Number=SeqID_28625
MTQIIMGQSVFSSLSRCHPSSQGVSLCRSSPDEGAFDEGAPAAEAKQADIEEGDGDEEEIDYNTVMPSKPSHLDLESLQSLRLICS

SEQ ID NO: 72001 - protein, 47 aa, Zea mays
  Coding DNA Sequence Number=SeqID_28626
MGKPVPSLLILLLSRGIFGLESVPQWEKPKEYEGRHSTEAVSRKASA

SEQ ID NO: 72002 - protein, 65 aa, Zea mays
  Coding DNA Sequence Number=SeqID_28627
MEAARQQQEECSCGGAEAADQFERLHDAVLLDVLNRIDDVKALGRCALVKTQLVTRKHSSKDPSS

SEQ ID NO: 72003 - protein, 166 aa, Zea mays
  Coding DNA Sequence Number=SeqID_28628
  Homolog annotation: Hit_ID=Q6YZI9; Match level="QueryCoverage=85%, HitCoverage=73%, E-value=2e-62, Identity=84%"; Hit description =Putative uncharacterized protein P0562A06.5
  Pfam annotation: Domain name=Hin1; Domain location=13-139; Score =32.2; E_value=1.9e-06; Accession=PF07320.4; Description=Harpin -induced protein 1 (Hin1)
  Subcellular localization annotation: CTP_CleavageSite=19; ConfidenceScore=5.24e-01
MAHLPQLRLLPSWNTTVLSAFNFRPPAALDIGLTLTVHATNPNVVPVRYGPSTVSILYGGAHLGTARLNAGEQPATSCRLLHLPARLDGVELAQRARALLFDVARRHMELDAAVEIAGEAAVLLWSRPFSVRIDSHITVDPVFLEVVDQENRLEMQLYLASIFFTN

SEQ ID NO: 72004 - protein, 392 aa, Zea mays
  Coding DNA Sequence Number=SeqID_28629
  Gene Ontology: Mol. function=binding; Cellular component=chloroplast; Biological process=aromatic amino acid family biosynthetic process
  Homolog annotation: Hit_ID=Q7XHS8; Match level="QueryCoverage=26%, HitCoverage=14%, E-value=7e-38, Identity=66%"; Hit description =Putative pentatricopeptide (PPR) repeat-containing protein
  Pfam annotation: Domain name=PPR; Domain location=196-230; Score=8.3; E_value=0.81; Accession=PF01535.11; Description=PPR repeat
  Pfam annotation: Domain name=PPR; Domain location=244-278; Score =34.6; E_value=3.5e-07; Accession=PF01535.11; Description=PPR repeat
  Pfam module annotation: Pfam domain module=PPR::PPR; Domain location =196-230::244-278
MVQDWRGIVSSSSYPVKVCDVHLLRFFSPSPDQTLDHPNIKPDKPLQVNSFFQHIKGMLSNNSVVVAEKLGLTNSQPASTSSDAQVVFDKMQQSDTSVDVAQDTFSTFFSKTGSDKQVTRAIFIDLEPLVHSKRTIKHILATIASINNAQVLIFTTMYELEVERMACQFANTRSDGLEERNGVKLPSYRGYEVGVPLFTTLVRALARDGHVEEALALVDEAGNVDMAWKFFHELKSQGWKPDDVWYTSMLWVLCKAGKLSEAEELFGQMETERVVPCAYAYNTMLMALATGGYAAMQSERQWNLDFTEHNEQGDRYLELAHRVAGVGLVGIGFGTGLELIGSGIVVGAGMVTSHLSPINNGEGNVSGFLWDPGGHAKNSLGTSCISRSGECQ

SEQ ID NO: 72005 - protein, 82 aa, Zea mays
  Coding DNA Sequence Number=SeqID_28630
MAFLDPCERFQPKVALNLVRNPLGWRVLAFAGRTCAGVSPLGDLAAKEFVFFVSKLPSGLALPIPSFFVQLERELGLHLVPI

SEQ ID NO: 72006 - protein, 423 aa, Zea mays
  Coding DNA Sequence Number=SeqID_28631
MATARGRGLPHQTQMGTQGRDLVLRQDLFAKAGGPDSLGAGSKERKPVPWGGPEPVWPLSLVSYPKARTLHHSVTGTLVFEATSPMGPATWGPELENGHLSPGVVRSPCSRSAWFRTVGLHAPPLCDGCPSSGPSRGYLLGAIANSFFGMLVCSLDKLNLHPGARYQGGISYTTHNRDKWFTDKVLILLDKYYSKSTLQKAKVLHPLSSGVLAPSLLSRNGLLCTSRVALEASSGQPRQRRRPPLHQRLTSCGGHLCTGGLPAAVATSARAKRSSPLSSYGDEDKTIKNTAATSTAYDVLYDPSGSVGAVRPVAQGTPQMRWTCARRDRRPCSGRTTTPRLAVGGSVGGDTKTIKAKEMEPQHGSLPTPKNWGARGTESWISPLSTFTRLVIILSPKCWWKKREGASPPRTSRGGRQRWSPEG

SEQ ID NO: 72007 - protein, 211 aa, Zea mays
  Coding DNA Sequence Number=SeqID_28632
MELLVLGPFEVLRSELHQEGAPVEPLLRGNPMESAQERRVIVWPRRPLDDFSPVFHNPESPTHHGVAESTCNCKPTKSSRAPTPPNRVASEIEQGLEEPGERPSEEEDQQQAGGGGEVVGVGGRGIYDDNPVEAGGATARLPDPIPAQVNPPPVSIPLNLKPQPVTPPSNNGVVTVAVCSDLVGLDAGGARFGSISLWLGFVSELQWVELH

SEQ ID NO: 72008 - protein, 337 aa, Zea mays
  Coding DNA Sequence Number=SeqID_28633
  Gene Ontology: Biological process=transport
  Homolog annotation: Hit_ID=A2XP89; Match level="QueryCoverage=14%, HitCoverage=5%, E-value=1e-17, Identity=91%"; Hit description =Putative uncharacterized protein
MGQVAEGGIDSSVLEYGHVKYQYSPESRSCSTSFDRVIIVDTPAADADDFATTACLLLVDSATPWWVGDSGLWKTGEKSSRGRRGQTITLHTDRFRSGLEAFTLWSSLQAPQPSPARSKPKDPHSLAMPPSSAASGRRRQSDLTTPRWSRRRPKLHPGRALACQDDLDELLHSAGGRHWQPSSFSGGVDPPLISPCTPSLTSTTTLLLKIQPAHTDTISDGNILIERFHGVPAEERLHWRSFLVKLGSENLKGSKNEELHVASHKSYKNGFVWHDLSEDDLVLPATDDEYVLKGFELVDQSPSVDLGDICPPQAPDLRADFEIISPKIPGPACSLCL

SEQ ID NO: 72009 - protein, 141 aa, Zea mays
  Coding DNA Sequence Number=SeqID_28634
  Gene Ontology: Mol. function=metal ion transmembrane transporter activity; Cellular component=integral to membrane; Biological process=metal ion transport
  Homolog annotation: Hit_ID=Q8SBD0; Match level="QueryCoverage=52%, HitCoverage=19%, E-value=4e-27, Identity=79%"; Hit description=Iron regulated metal transporter
  Subcellular localization annotation: CTP_CleavageSite=53; ConfidenceScore=5.33e-01
MPALDLQNIRRWHTPQIRIPPPKSHIRMEGPRVRSPYATSSSSSPPHCAATSSSDARMEGPRPCAPKSQNVCTIRPLVTAMCFHQLSEGMGLGGCILQAKYVARMKAGLVFFFSTTTAFGIALELALTKMYRENSPTTLIV

SEQ ID NO: 72010 - protein, 129 aa, Zea mays
  Coding DNA Sequence Number=SeqID_28635
  Gene Ontology: Mol. function=nucleotide binding; Cellular component =intracellular; Biological process=small GTPase mediated signal transduction
  Homolog annotation: Hit_ID=A9NYD9; Match level="QueryCoverage=69%, HitCoverage=48%, E-value=6e-34, Identity=74%"; Hit description =Putative uncharacterized protein
  Pfam annotation: Domain name=Arf; Domain location=1-126; Score=34.9; E_value=4.2e-12; Accession=PF00025.12; Description=ADP-ribosylation factor family
MQVGLINYLNVVYLRYCLNVWDVGGQKTIRSYWRNYFEQTDELVWFADSSDIRRLDDCRTELHNLLKEERLAGASLLIFANKKDMQGALKPTGIAKSSWLPRFYLVRCGSKRICQIECSFIGYAQLWMF

SEQ ID NO: 72011 - protein, 787 aa, Zea mays
  Coding DNA Sequence Number=SeqID_28636
  Homolog annotation: Hit_ID=A3ALA6; Match level="QueryCoverage=96%, HitCoverage=96%, E-value=1e-105, Identity=39%"; Hit description =Putative uncharacterized protein
  Subcellular localization annotation: CTP_CleavageSite=72; ConfidenceScore=5.69e-01
MSIAAVRSSSPGPSPRPCCGLRRSADSSPFRPAVSPLDSPQRSSSVCKNSGRASPRTWGAEKENDPRDAAPAASARTHKVRSSGGGGGGAKSFMAPTISASSKAVAPAFTPRKKVFGERNNDAVPSSPVDLAHSSKPRAAHPLLPEEALGVPRRLRLSLDGASALPSAAGPVVSRGAPSFGGDEAAVMVENPAVSESHHDVALADAEVVAAPYDPKTNYLSPRPRYLRYQPNRRLEIYRHGGGSVRGLEDMFASQSSSEEVDTATTTEEEVSGEGQPDDSSEEETSAMAPPPEARAQSTAPALDRLLLPQPALDSPLARVLTPEPKESPRAGGVLIPERERAVSPARARPKKKRSPVRFLLAPLALVLLMAAAFVCVPPPPGYPVMLNTSMSKVSVLLSVQELHPVELAARLKQWSSSSLDFVTSYWEAIASYQERPVLGPHLAANVTAAAAEVDADYAVGFYYSAAQTSPTSLELGTHDVVSENDTEMIAGPDVEDPVTCDDPDAEPIDDIEMEQEDLSEVPSAMEEVNVDAVVEEFDDEMAEEVSGGSSGEETAAFIQNSDIPSQSTPEPEQAKGIDEVSLQQDVQTEDSEDHADGKEDQPAQHGQKLGSDMWSSYLDKVSDPAAIGAALAAIIVAAVVAFLYMRQKQTRVASNEPAEQVEQVEQVERVEQVEQVDQVETLSDSGSSQGHVVAKGSLFHSPGVEASGPSQYSSSLSSGLGRRRNTKGEGLEPVVSRRDSTAQSTSSYGSFTTYQKIPAKKGNKEDEAMTPVRRSSRLRNVKTPES

SEQ ID NO: 72012 - protein, 311 aa, Zea mays
  Coding DNA Sequence Number=SeqID_28637
  Gene Ontology: Mol. function=catalytic activity; Cellular component =integral to membrane
  Homolog annotation: Hit_ID=Q75HB0; Match level="QueryCoverage=91%, HitCoverage=79%, E-value=1e-131, Identity=81%"; Hit description =Expressed protein
  Pfam annotation: Domain name=Peptidase_C12; Domain location=88-309; Score=-42.6; E_value=0.0026; Accession=PF01088.12; Description =Ubiquitin carboxyl-terminal hydrolase, family 1
MEIRFGRQLYLIPRTLPFMQLNAMSSFSAGHGRRPKKKPYHREPGLDKAMDLQKKPALLLRLRDLILAQKTGSLLVRDLEKEVGFVQKWDFLSLIGRHPNIFHVSGGSASRKPISVTLTEKARKISCEDADARELMEPILVRNLRKLLMMSMDCQIPMEKIELIQFELGLPKNFKSNLIPRYPDFFSIHDVKGLDRLCMEHWDSSLAVTIREKKSFEGFQICSRGIPKDGNVLGPFAFKLKYPAGFRPNWKYLEEVVRWQKMAFPSPYLNVRRVESATPQARKRAIAVLHEILSLTMERRLTSDKLDIFSQ

SEQ ID NO: 72013 - protein, 133 aa, Zea mays
  Coding DNA Sequence Number=SeqID_28638
MRKLGASAGGGSPGAEHGATDEARRHGRNRACKLLPPPAITMEIERNNNGEGDCARKKGSEGVTRGKPKYLTGKTSNLKAMFASLQMKQSVHDFITWCQVLSFKGCPKPLSQTGAVFSLVALGKRSSILQAHN

SEQ ID NO: 72014 - protein, 93 aa, Zea mays
  Coding DNA Sequence Number=SeqID_28639
  Subcellular localization annotation: CTP_CleavageSite=25; ConfidenceScore=5.32e-01
TRQSQIGNTPAAAGFLAAAPMGFVTLSEPRRKGLEKIRGNGSSFSRTRPGQTAIGVGSLDLGGDGGWTGVCGCSGRFHSHPPLTPTRLAVAEE

SEQ ID NO: 72015 - protein, 67 aa, Zea mays
  Coding DNA Sequence Number=SeqID_28640
MDRLAGLSAEARTVRDTGSDDQGVVIRKVAMVFVSTRLKILFKEGGYGTFDPLFLNLIASMQALQPD

SEQ ID NO: 72016 - protein, 403 aa, Zea mays
  Coding DNA Sequence Number=SeqID_28641
  Gene Ontology: Mol. function=metal ion binding
  Homolog annotation: Hit_ID=A2XKG0; Match level="QueryCoverage=60%, HitCoverage=72%, E-value=1e-53, Identity=53%"; Hit description =Putative uncharacterized protein
  Pfam annotation: Domain name=zf-C3HC4; Domain location=356-390; Score= 17.2; E_value=0.001; Accession=PF00097.16; Description=Zinc finger, C3HC4 type (RING finger)
AALGKESIFAECHLGHSAKSPPERVPMSDSLPSAGDITLDKEPKPTPTTHVLGACRGQDIEASPGRATARSADMAVEAHSLLLAGGHKQLTSAGWPWTTGDEARCATARPSHQQAFQLQQASCVGVGVGLPAAAPVSSAAAAPPAPMIAQQYAAGGRLFVGDAAESGVTFGGGGAVQQEAPRKRKRAEQGQTPPPVLGTGAADVAAQFQQQLVDVDRLVLQHTAKMWAGLTEQRRRHARQVVATVEAAAAPRLRAKEEEIRRMRRVNWALEERVKSMYVEAHMWRDLAQSNDAAVTALRGELQQALDAQQTRRRADDADSCCCGENDVFITGAGAAENEEEAGTGTSSSGHVRGACAVCGDNAADVLLLPCRHLCACAPCAAAARACPACGCAKNGSVCVNFS

SEQ ID NO: 72017 - protein, 488 aa, Zea mays
  Coding DNA Sequence Number=SeqID_28642
  Gene Ontology: Mol. function=hydrolase activity, hydrolyzing O -glycosyl compounds; Cellular component=extracellular region; Biological process=carbohydrate metabolic process
  Homolog annotation: Hit_ID=A2XKG6; Match level="QueryCoverage=87%, HitCoverage=92%, E-value=0.0, Identity=76%"; Hit description =Putative uncharacterized protein
  Pfam annotation: Domain name=Glyco_hydro_17; Domain location=53-373; Score=365.3; E_value=1e-106; Accession=PF00332.9; Description =Glycosyl hydrolases family 17
  Pfam annotation: Domain name=X8; Domain location=396-478; Score =133.9; E_value=4.7e-37; Accession=PF07983.4; Description=X8 domain
  Pfam module annotation: Pfam domain module=Glyco_hydro_17::X8; Domain location=53-373::396-478
MGKLNCADHMAVALRIASTLWRCLLPLPRLRVELYPPAVKFFWNWNGGAQPYIGVNYGEVADNLPSADETARLLRSTSISKVRLYGVDAGLIRALAGSGISVVVGVANGDIPSLAADPAAASRWLAANVLPFVPATTISAVAVGNEVLESGDATLGAALLPAMQNLRAAAAAAGGGAAGIRFSTVNTMGVMAQSDPPSTGAFHPDVAPQLQQILGFLSRTGAPFMINPYPWFAYQSDPRPDTLAFCLFQPNAGRVDGGSKIRYTNMFDAQLDAVKSALVRAGYGDVDVVVAETGWPTRGDAGEPGATAENARAYVSNLVAHLRSGAGTPLMPGKAVETYLFALYDEDLKPGPTSERSFGLYHTDLSMAYDAGLASSAAAGGRGGGGGGAAQPRGGGWCVARAGASDAELQADLDYACSQVGVDCSAIQPGGACFEPNTVRAHAAYAVNQLYQAAGRHPWNCDFRASATLTSDDPNLAALLEHDNGDMT

SEQ ID NO: 72018 - protein, 57 aa, Zea mays
  Coding DNA Sequence Number=SeqID_28643
MQVLLNIIGDLHKTVVIVGGGVGGAGAAMAEPGPGTGAGGGCLGEGAVAHGKATVVS

SEQ ID NO: 72019 - protein, 129 aa, Zea mays
  Coding DNA Sequence Number=SeqID_28644
MEFAPPFSSAYPELKAFAGNGFYTRILLAEGSFGCSRSGPKVRKLSKMCKRPKTTFVINSVNITNLAIAKIGPELLGPLPPAQDWHEDSFCISQAPGVKRAGRKSKWYYNDGNNEVNLQSTPEESGQMS

SEQ ID NO: 72020 - protein, 120 aa, Zea mays
  Coding DNA Sequence Number=SeqID_28645
  Gene Ontology: Mol. function=ARF guanyl-nucleotide exchange factor activity; Cellular component=intracellular; Biological process =regulation of ARF protein signal transduction
  Homolog annotation: Hit_ID=Q8S566; Match level="QueryCoverage=26%, HitCoverage=2%, E-value=8e-10, Identity=93%"; Hit description =Guanine nucleotide-exchange protein GEP1
MSGDHVKREIVTGDKPEASGRKNEKQTPSKESSDKNVFEELANLLSKSAFPINCPLSSMHILALEGYYRTRRILPMNYSGAYCENITQEVARLVKANAVTDGLENSDIAALHYSSASRCF

SEQ ID NO: 72021 - protein, 193 aa, Zea mays
  Coding DNA Sequence Number=SeqID_28646
MAGMAHRSYSGPPETFSPPLSPLCPWIHGLFPAIEFAVAPSSSLLNSSDPGATLARASLNSGDLTAAERNSAARSRLFPPWSVSPPFDSDRTVRTPVAFVFPLVRSPSSDSDRMARTPGYRFVHARLHTWPACQRPIPLALGPRGQCALFPLSLMPLVRLSALVRPGVRLWLLDLSRSSVIGWSEPQPEWIWS

SEQ ID NO: 72022 - protein, 481 aa, Zea mays
  Coding DNA Sequence Number=SeqID_28647
  Gene Ontology: Mol. function=glycerophosphodiester phosphodiesterase activity; Cellular component=integral to membrane; Biological process=glycerol metabolic process
  Homolog annotation: Hit_ID=Q2V8D7; Match level="QueryCoverage=83%, HitCoverage=100%, E-value=1e-106, Identity=54%"; Hit description =Glycerophosphoryl diester phosphodisterase
  Pfam annotation: Domain name=GDPD; Domain location=74-420; Score =131.9; E_value=1.8e-36; Accession=PF03009.8; Description =Glycerophosphoryl diester phosphodiesterase family
MAQLKAARATDVPPAMPDPDPDVVAADLGACVRHGRVDGLAAGSGRAEATATATTTAAAADQGRRRPPLVVVGHRGKGMNALASPDPRLRGDIRENTLRAFNAAAASHPAVAYVEFDVQVTRDGCPVIFHDNFIYTQQDGQVSAKRVTELNLDEFLSYGPQRDQGKHRCHKDMRILMKMIAIELKQAGKPLLRKLKDGRILKWDVQSEDALCTLREVFEGVHRRVGFNVELKFDDDLFYTEERLTCILKSVLKACGVARPKSPEQIPCVVFEHANDRPIIFSSFQPDAAQLIRKLQDKYPVLFLTNGGTQVYADPRRNSLEEAVKLCVAGGLQGIVSEVRAILRQPSAVAKIKEANKLSLMTYGQLNLQRRPPADRKYFIGTEGALCLRLVSRSRSNVAEVVYVQHLMGVDGVIVDLVQEIAEAVSAFTVVTAVQASGSQDGGGIVVGERMETAAVAVAGTPSFSPREVSFLLRLIPELVQ

SEQ ID NO: 72023 - protein, 336 aa, Zea mays
  Coding DNA Sequence Number=SeqID_28648
MNKNIFKMRDDKKKQLHKRKRFSSSPPSRSFSTHQCLTAKGEHMVYDDDDIRNSDNDLKTPLRDVREKYDKLNETNMELNARLFSLKEDYTQVNINLDNLSIAYEILFIETHNIDVATSYDDLNMNNEQVNNKTGGSHWVIDSCCTQRMIGDPSSICDLLVNYMNNTGEEWVFTSEPSIVLRSFPLTFLGVATIMALGIATLTEHPVVRSLSCFRCLIPRYELSEISFSSLMITSNVMMLVLTLACLMLRELLPQYSGLVAGDGSILYSFIDKEDIQEERARGCVPCCGHLPHERSSRDSHRSCSRSDTSAGAVHSFLPSDPSPHLGRRRGQRSPS

SEQ ID NO: 72024 - protein, 18 aa, Zea mays
  Coding DNA Sequence Number=SeqID_28649
MAVAITTKDDHVASLTDV

SEQ ID NO: 72025 - protein, 135 aa, Zea mays
  Coding DNA Sequence Number=SeqID_28650
MTTNLSHAHHRGRPMCDSAHSDGPREDKCDKGRVCNKAGRFPTFGAHRSCYAKQPAMAPKRANSKAAPSIDDAAKAALLANKKGKALADTTPQEAFEDNAVNSKRQRQTIPPPAALYAPAVPKAHHKHYHQASLH

SEQ ID NO: 72026 - protein, 151 aa, Zea mays
  Coding DNA Sequence Number=SeqID_28651
MSGREEPEPYVHANVAVGGAFEPCVRSVVAVGGAFEPCRSTAVGAVGTLLTSPCFPWSVRAQGRARRRILLRPRPGSGEDAIPPEVEAGPSGRTRRRPPSEVEVEAEPWGRARRSPPSEVKAGAEPWGRARQRLLLRPSPEVGHGGASCGA

SEQ ID NO: 72027 - protein, 103 aa, Zea mays
  Coding DNA Sequence Number=SeqID_28652
MGIGCLRGGNWNKDYGVVPRLPSSRDLRRGLPFRLWWVQVRSLHDGSRASAFGNHTHQPNSCISRGRGVDSSHRVSLEDMVAGVTWPSILATGLDSRVGPCLG

SEQ ID NO: 72028 - protein, 116 aa, Zea mays
  Coding DNA Sequence Number=SeqID_28653
  Subcellular localization annotation: CTP_CleavageSite=32; ConfidenceScore=5.60e-01
MNKNTGIQSAITNGTPVPSPRVRTTPQDWGTRGAIVGRRMAHRRPIRQQRQSPPPRAAKQLRQRLRGRCYDRRTLTRRGQEPAIQAGRRRPRATGGVGNLNGREAISGCRRLEGRR

SEQ ID NO: 72029 - protein, 119 aa, Zea mays
  Coding DNA Sequence Number=SeqID_28654
  Subcellular localization annotation: CTP_CleavageSite=17; ConfidenceScore=5.38e-01
MDRPEHTPPTSLPACSRGSGDSGHPRRRAVPRRDRQTLPEPTLPFAGPPSPPVSRATLFFPAATVSVEGGTADCNLADGEYILVPEQGAAQEVAPDPAPEPALEDLPATALEGKPRFYA

SEQ ID NO: 72030 - protein, 404 aa, Zea mays
  Coding DNA Sequence Number=SeqID_28655
MEAQAHASRNWRARCCMQATALPLAPPPRLFGCGTNTATRGGPAHDPAAPAWRDGQYGRKRSGRRFAFAVITVPKKGPGKGDTPKRILPCEGTGLRAPPTDQRFEGWPSEGFNSRLRSRGPYTHYWSEVRRPAPRRAPRSPQATRAPRPLLIRGSKAGPRRVHSRLRRRARDDQGYVRYITKARAALPRARTQAQPQKTTNSASPDPRARTPPWPLPNNLRLARPRGSGSASAMEDRLDLGFGGASTSPDLGHRPATSTGSAIITLPRADSGRREQDRLRCSSDSHDITPAGCQDLSGCHIGMAFLEKVGRAGMRTGQALSWGRSLPSPAWTLVTPYCKRTRPGRGTNTKAVGFPPLSRPSPATSLPPFALAHALDPSGLGHAAHSLVGLGTPRSRDADNYVRG

SEQ ID NO: 72031 - protein, 137 aa, Zea mays
  Coding DNA Sequence Number=SeqID_28656
MTHFLSGLNNPLLKIGETKHLFLLPLKLLMDGFEVPDFLVQLLLLNGCNAAPGPDDFLGGMTKVKACRRWPSIGRSLGKITFISLTFTISQKITLFHTMHAFFSNPKLHVTVYYSGKRVSRVFEDLRKMKAPNSWSS

SEQ ID NO: 72032 - protein, 108 aa, Zea mays
  Coding DNA Sequence Number=SeqID_28657
MGGRPQGYWGRAATLGCVPNGPNLIHDPLGQNRVTQHHGQKRQEMSRCISSVDVFITAELSPLPKPYDPQADPVMKEALDVMSVANSIIDEVVDRLLNEAVEKILKED

SEQ ID NO: 72033 - protein, 332 aa, Zea mays
  Coding DNA Sequence Number=SeqID_28658
MGTHIQETALGARRRPAPDFCQDSHACDLGELLNKGRRTLPRVRRALNAPEHAQRPTPHAPRYAKPCPCVLLVPAPIKPTEASTVLPRVLSTSPEPEITGVCPANGSLEDMVAGVTWPSILPPGWTVEWDPASAEEEHEECWDRLPHLFVYLSAEDTMEAIALHGLTTFCGFHPLELSTHPIGLFPAEKEDDPMWKDRVEHAKDIWAIYPGQTAHLTVRCMNALYRLQVMRGEAMSHLMALLEATKITSDNREELVVDLENTIEVLEDQLINTQQQLAEANQHLDMHYQEIQDMEANEDVHIEGGEEPASSLDTASSGRPPSPESSVASFAH

SEQ ID NO: 72034 - protein, 55 aa, Zea mays
  Coding DNA Sequence Number=SeqID_28659
  Subcellular localization annotation: CTP_CleavageSite=15; ConfidenceScore=5.17e-01
MASCSPSNSRTDRMREASNPSTSGARTSNQTVRRVESNDERQFEVFRGRKWKFAK

SEQ ID NO: 72035 - protein, 450 aa, Zea mays
  Coding DNA Sequence Number=SeqID_28660
  Homolog annotation: Hit_ID=Q6QP54; Match level="QueryCoverage=8%, HitCoverage=13%, E-value=2e-08, Identity=79%"; Hit description =Putative kinase
MVPPVDVVGPCPRLGDVEAPPRSRSSLSSEAEVKSEPLGRARRRPSAEARAESEPWGRAKRSSSSSGAEPESEPRGRAERSSSSSGAEPESESEPWGRAKRSSSSSGAEPESEPWGRAKRSSSSSGAEPESEPWGRAKRSSSSSGAEPESEPWGRAKRSSSSSGAEHESEPWGRAKRSSLSSGVEPESEPWCRAKRSFLWRLRSGLAACQPHSFEWHNSRSGAGGAVLLSDRSVERRSDYGHFGSFDWRACVRIKLCADGGYQLRIRSLEGDQPFSVAFCSGGCARAHPPGVAPEASEEWFDSSEVLMPRAMAGLVVPSCELAVARVHGRVPSSRAGMLTLSTVWPEPGLREQPPSLCTGREDGQGQTRLFYIRPCVAFPQGGGGKAPCCPRRATNMVSPVSCWRVIRVDARAPIVRGRLEARRRAQKYLRVICRTRSPFDGVRGLDASL

SEQ ID NO: 72036 - protein, 61 aa, Zea mays
  Coding DNA Sequence Number=SeqID_28661
  Homolog annotation: Hit_ID=A2WTQ7; Match level="QueryCoverage=68%, HitCoverage=17%, E-value=2e-13, Identity=83%"; Hit description =Putative uncharacterized protein
MQEEPPNYEIGWKHTKKLPLEKPRGWAIFDFMEKLEVLLARERNLEKCPAPPGRRCPAPVG

SEQ ID NO: 72037 - protein, 89 aa, Zea mays
  Coding DNA Sequence Number=SeqID_28662
MRGADNGRPNFLPEKCQIAGLVCPEVCQRGEKVSLFDEGLIHGVDLTNHIAQSQLVPSGVKETPIVDQNKRPASSDMLDIVECKRLKQE

SEQ ID NO: 72038 - protein, 525 aa, Zea mays
  Coding DNA Sequence Number=SeqID_28663
  Gene Ontology: Mol. function=nucleic acid binding
  Homolog annotation: Hit_ID=A3AFF0; Match level="QueryCoverage=74%, HitCoverage=74%, E-value=1e-117, Identity=57%"; Hit description =Putative uncharacterized protein
  Pfam annotation: Domain name=TPX2; Domain location=403-460; Score =54.9; E_value=2.7e-13; Accession=PF06886.2; Description=Targeting protein for Xklp2 (TPX2)
  Subcellular localization annotation: CTP_CleavageSite=79; ConfidenceScore=5.58e-01
MSTAAAAKTPIKALGSAAAGAMTPTKSQAPAAAKTPCTSRARSSHASENSNPNIPGTPPPPQSTPSKPSLKSPAGAGARSATAKKKPSTPAPAAPPLERERERRFLVAKKGARRRRNVGTMGGGGGGRGGEIDFDKCREAAREALRASQGEFFRKEVAASTATGEDQLGQEEEGKPLADEDVKGGAFEERQEEETDAELEGSSKVRAMRTKAMAKAMSSVPNPGSGRVKHMVQAFESLLNISGATSDAERAGEGSWALPGLQLWKEDDKGDLGFPPVSVFSSADFQNAGSNRLCSSLDGNTVRSSWDSRTSTGECSRRNSSESLRSSWNKKLKVTSQHPFKLRTEQRGKFKEQQFVQKVQEMLAEEEKKRIHIAQGLPWTTDEPECLIKPAVKERTEPIDLVLHSDVRALERAEFDQHVLDRNKFAEQQRLEWERQQELDEEERIRQLRRTELIPKAQPMPYFDRPFIPKRSTKPPTVPMEPKFYLRPEKLSCFAWIALPPSSVNRWLCASDAIPPRFEICRSRN

SEQ ID NO: 72039 - protein, 334 aa, Zea mays
  Coding DNA Sequence Number=SeqID_28664
  Gene Ontology: Mol. function=hydrolase activity, acting on carbon -nitrogen (but not peptide) bonds, in cyclic amides; Biological process=pyrimidine base biosynthetic process
  Homolog annotation: Hit_ID=A5C5N9; Match level="QueryCoverage=14%, HitCoverage=50%, E-value=3e-10, Identity=62%"; Hit description =Putative uncharacterized protein
MGDSDRRTRFKRGPWACGAGSFTTGFLTIRFTAAAWVSSPYASPTAALHGTGEGGPCADVAPGLSPDGSALPHRPPGASGRGAAPTRRRGRGTRASRRGGRGPWPQRRRADPWPRRRRARSPLQISPSARVQIEESASEGDRLRCAPTLGRHHRPRPMRPGSRSFARAPFIDLSAFSHLEAHTHVGSDAHGHAHQETPYALCPKKHASLDDDREDPASPAWHLHLRDDVVLQAEVPHSERHFGRDIIMPNLKSSVTTTASAVEYRDEVLKALPPAKAKEAGVDGIIVQGREAGGHVIGQVAFSVFAGVGERTREGNDLYKEIIESVVTKLGDKQ

SEQ ID NO: 72040 - protein, 256 aa, Zea mays
  Coding DNA Sequence Number=SeqID_28665
  Homolog annotation: Hit_ID=A2Y3P0; Match level="QueryCoverage=21%, HitCoverage=15%, E-value=8e-12, Identity=66%"; Hit description =Putative uncharacterized protein
  Subcellular localization annotation: CTP_CleavageSite=13; ConfidenceScore=5.60e-01
MDSAVPVAHPTTPAATPSRPSLPAFPGGQDPSAPRGHAGTRHCGSPRPPAARPRPGSQAAARPPPRAPAQQAAASPPPPARTAPSRPVFRLQPAAPLRRCPERSSYACAAATGDRPQAATATATGDRPQPAASPSPRPDPLPSLPLPPASSARDPSPAKEALRKPHEAHLMTPAHATSSFTYQRFTGGVYYAAACVALFGKLRHSRRLDAVQSGCTALSIFKQGDLMVVANASDSRVVLGIASDNDAVTPSSSSST

SEQ ID NO: 72041 - protein, 777 aa, Zea mays
  Coding DNA Sequence Number=SeqID_28666
  Gene Ontology: Mol. function=kinase activity; Biological process =metabolic process
  Homolog annotation: Hit_ID=Q10Q34; Match level="QueryCoverage=96%, HitCoverage=96%, E-value=0.0, Identity=52%"; Hit description =Expressed protein
  Pfam annotation: Domain name=CaM_binding; Domain location=633-745; Score=92.0; E_value=1.9e-24; Accession=PF07839.2; Description=Plant calmodulin-binding domain
MSKDLEKCSPSGTTPTTSVSPVESKKHEKTVPNYLRATRGSCHDFCKYGHKNPSEEEAGISGGRRKKIPAHLINLTLHRSAILDRSKDIKNRSVSLTKSSISLGEAERFAPKKASASRKGVLSSEHMVPRTATPSQHKSLNSDRRKMHSIVAQKAPTNLRCSNGVPKIDKKETTPAKGAIFPAKLKFPEKTLLEKSRNVDRVTMANQSLHKRPASSLTKLNMVKQGPVASQASSKHLLSKHKNTLEEPVAANITRMRAKAGQSPRRTSNPSNINGKEGSDMPRSPLSLQPKLTASMELQMDDSQITGNYNDSALAELSPAITEYRDFSQPALEETSKTISEDDGVGRTEKSKILGGEAFLESTIALQLQQSLDGKEFSVILAESDLEQKLSEHNIVHSQASKDYNSQTDYAALCQLPEQVTTVETADVFDFMSTQSNSKTEDDQVKVNASVESLIPEGKEEMRVHEDFEISPELLVLDKKHDKEPESCLDLASGNIAENDKDGKVFDSRMNNSASHCQSISETSSDGGLLEEPKSMLIEPSVFAGDELASISNENTSEHGGLKSRMFIPHQSPEELSDNEFYEEYGFELSESDESGTEDEETTIKKNRNESLKSGGQRSRRTSALELDDASLTPYKLKFKRGKIVELPLDSMGPRRLKFRRKSANEASNRESQPARRIYRRNNTSTAVPTDVESPGVKLRHQDAQEKKDAQGLFNNVIEETASKLVESRKSKVKALVGAFETVISLQDGKPTSSTAQAGNSQDLIPDDGGNAPEETG

SEQ ID NO: 72042 - protein, 117 aa, Zea mays
  Coding DNA Sequence Number=SeqID_28667
MAMGFAGRENEKDSTGMAEHKMRAGNESFAGGENEKDGNENDRTRNGSLPLTALISSRLRIPAGNPWAKTGIRARSDFITGQHLCPYLNSTGQISDGYLNSRVLVLRCRVTFALELQ

SEQ ID NO: 72043 - protein, 176 aa, Zea mays
  Coding DNA Sequence Number=SeqID_28668
  Gene Ontology: Mol. function=transferase activity; Biological process= metabolic process
  Homolog annotation: Hit_ID=A2YM31; Match level="QueryCoverage=71%, HitCoverage=87%, E-value=7e-55, Identity=80%"; Hit description =Putative uncharacterized protein
  Pfam annotation: Domain name=DUF1715; Domain location=44-156; Score =155.5; E_value=1.4e-43; Accession=PF08215.3; Description=Eukaryotic domain of unknown function (DUF17
MSCAFDDYYIKDYGVILAPEVTQRRTDNNDHSPSSGLNALSGCTCKTIPADETHYQEGYRNGYNDGLASGKEEGRQVGLKMGFQVGEELGFFQGCLDVWTSAILIDQNAFTARVRKNIEQLAALVGSYPLSDPENEQIQDVMEKIRLKFRVITASLGVKLEYEGHPKSSKQDAEDL

SEQ ID NO: 72044 - protein, 304 aa, Zea mays
  Coding DNA Sequence Number=SeqID_28669
  Homolog annotation: Hit_ID=Q10Q33; Match level="QueryCoverage=100%, HitCoverage=100%, E-value=1e-90, Identity=56%"; Hit description =Expressed protein
  Pfam annotation: Domain name=Remorin_C; Domain location=202-302; Score=28.3; E_value=1.3e-05; Accession=PF03763.4; Description =Remorin, C-terminal region
MDGDSKKLRVWFSGVGKGGGGGRQSSAAPPQESAPIGRAEMNSSGEFDAAFAATIAAAAFAIAAREEKLAAQKKSVPIEEVPRALSLVKRAGSTKKPAGGNKISRWFSGKEPLEHDDDGPVSRPLKPAPGKPEGMPADHKVAPKILETSLSVRKGSGSSGKTTDRKGSKKFEQEHVQKAPSIIRPSTSYHSRRNGEDAAGVAAIGGTRSKADEWEKAKLAKVREEYEKMMETIAEWETEKKTVLDRKRAKALEEYNQEMTRISKIAGGARSMAEERKYNDENKIKEKAHKIRSTRKPPRTCACF

SEQ ID NO: 72045 - protein, 231 aa, Zea mays
  Coding DNA Sequence Number=SeqID_28670
MTWPIPPGLCLPPTLGLRGRTVDEVGRGIRPIAMDTASGPPPAGSTSTTNPLWSCYWAATPGPRRALGKTAGPPHGRRCITSEATEQRFLPGRVYRRRARSAPPEPGQHSPATITRDAALEVAVGSETTLVTVMENAQQAISAFPELGEPAPTTVASFISNHTCPIAPPLLQELHQAPPNLKTKKKQEARPTRKSMRLAAIAWPRGNIQERACQVLLKRLGLLPKEGQPSD

SEQ ID NO: 72046 - protein, 847 aa, Zea mays
  Coding DNA Sequence Number=SeqID_28671
  Gene Ontology: Mol. function=nucleotidyltransferase activity
  Homolog annotation: Hit_ID=Q10Q39; Match level="QueryCoverage=99%, HitCoverage=84%, E-value=0.0, Identity=57%"; Hit description =Nucleotidyltransferase domain containing protein, expressed
MTRRLDPERWAVAEDRTAELIACIQPNVYSEGRRLAVYHYVQRLIMNCLSCQVGYLAFAYGAKRLGKLLECPKEALIPELNQFFTNTWIRHGSGSRPDVPIPSLVDVRPMKVVSSVVSSSQRSLAAFKKKVENPKLHVNQDNLRPNQDNLTGVGDIHYRNLPRTVNPSVSHVQHQKSYTPQGNAKVSEQLERNNSDGLMQSARDKRVPNGLFVNDRNGQNRSRFARTRSSPELTDSSTEGFRGRRTNAVGMEKSFGVDYSRRNILIPEVSSNHSTKSSQDESVSSMNGSSHPSALAASDSNSVSSSFRDDNGFVMNEELPSVSESSDMHHDEQVLANLMESMKLHGFNGQIQLPMQIPSHLSVAHPPLLAPTTYSQKHLAGVPPANLIGTPWLPNMQFLHGFVPPMAHYIHNPNFAPNIEDGTETEKPNTSDVNHDAGKTWQEYGVGFSRHFDPEARDPHFYGIDGKEHSSLPNGVPGAPLERQMKFTVENNVVGDETYTGMFQIHTGREPAVDYSKRSGYGNVPSSHASSSKGKTLDSSSWDEMTVNTTIPPRENWGKRPAFVAPATTTHGNTGWQMGNITEHLAAEVNDGPRNGTVVPIITEASEIVTGSDSFSSKSRTSQVPNELDPSQVGMPNPVFTPFLIGSPQHRQADSSGLTFVPTGPPVPFVVLPFVPGNNDGSGPQFERSEGIDQLPANTVGQFFGSLNDVHQQDSSAISTVSSSTMTEPSGEHKPDILHSDFVSHWHNLQYGRLCQNPRPMGPVLYPVPVPPMYLQGHVPWDGPGRPAAPNVNWTQMVGGQRVFPVMPVQPATERTGVFQHYGEDAPRYRGGTGTYLPNPHCNLIRG

SEQ ID NO: 72047 - protein, 504 aa, Zea mays
  Coding DNA Sequence Number=SeqID_28672
  Gene Ontology: Mol. function=structural constituent of ribosome; Cellular component=intracellular; Biological process=translation
  Homolog annotation: Hit_ID=A3BFW3; Match level="QueryCoverage=37%, HitCoverage=11%, E-value=6e-54, Identity=56%"; Hit description =Putative uncharacterized protein
  Pfam annotation: Domain name=Ribosomal_S12; Domain location=386-465; Score=-10.0; E_value=0.0059; Accession=PF00164.16; Description =Ribosomal protein S12
MAVGGLQGAKKRKREHAEGKAKPRKQVKGGGDGAKRKSHSAAGGYTAHGGAGEVVARKKTPVTPKEKRLAAKTLYEFDDLESIIDRTLKRDFDTEEALWLLKIGLVCIPDSPKIKPSMSMVAKILQGPFGGPGCQNQEHEKHFEHFTPNMSKTRNESAFPQDEIDSHREHIYNELTSDSIASKKPKIRKRENNNSVSSSAPNIPNTQDFITTFCEVVEDFCGKTEIPEDGNCGDWLSIPLGDVKVLVNEITSVRSKRILHEVPMDTVTRLLDVIDRQIRYSQVSMNKVEALYRLFKKIGNTFIDDGLINKALSNGKPTVVEFYANWELDSENPVADVESIVAKGIRDGAINATIDQANGWMVYCVLALTRRHVVWELGASSRATAGTRGGLTKHTKSHLGNEWKKPFAGSSHAKGIILEKMYAKYGNDLCFCYVVLLVLGLRFKVVKVSGVSLLALFKEKKPRSVWKKHSPLFTNYVDFLTKCPSIQIHRKYSTGGSTEKTFER

SEQ ID NO: 72048 - protein, 573 aa, Zea mays
  Coding DNA Sequence Number=SeqID_28673
MERDRQDAAQKRQAVVRIADPMREAKKARGSTKAAASGSSKPVPAAKSAAPRHSHPRASAKAAASGGSKPPPGGLVKGRRPPSLARHIADFGTDISVDDYFVGSGEGQLAVVPPPVATTSPTAVVGAKGAARDPIRVASGALTVDVAAEVERLRAQHADAVREKSAAESKNHRLSEKVAAMEAEKTDLRRQLAEERREVNKAIADAQAAQAEAKVVRAEGSLACQRAEELEARFNALRSFMDKAEALTRAEVERTHAQCMDAYRKLGARTADFEVPGQEAGLRFLEWLQEELLVLPTIVTGFMHYEVFDQADENFEREIFKVEDPVLKQSVGALFDRMWGPHGREAMRERSDRAIEQMAHAEDIEDLGGLDGALPEAAEVDPVPPSNAGEGPSTTPAPTAAGEDPASAPAPTGEDALKVLGFGPAHATATDNAIFVAASTMAADDDSFGSVSNCFESDDSGSSITWTEESSYEDLDYFVVLDVAAAEPSPRAEGSEELPGASTGYRQRRAVAKQRVSGLSRSGRRHRSEMESGRLRVDGTGEGELRNIFEGEELRIMLFNYREMGIIPKVEPI

SEQ ID NO: 72049 - protein, 960 aa, Zea mays
  Coding DNA Sequence Number=SeqID_28674
  Gene Ontology: Mol. function=calcium ion binding; Cellular component =membrane
  Homolog annotation: Hit_ID=Q6ET90; Match level="QueryCoverage=100%, HitCoverage=100%, E-value=0.0, Identity=67%"; Hit description =Mechanosensitive ion channel domain-containing protein-like
  Pfam annotation: Domain name=MS_channel; Domain location=726-926; Score=13.9; E_value=9.1e-07; Accession=PF00924.9; Description =Mechanosensitive ion channel
MDRGRSESGLRSHGSGKVSSRPGSGSLAFPEEQPILADRDGGDRREVVVKIDGSGNGHAPFSFHGADAGADGGGGKAENATSSTNSTATTPQAESRSMSSETNYPMPPANVCRREGSYEFWNNDGGSAEAFSFQNRPPQGPHSSSPSISPPLPPEGGGMDPPARLNGSFHRKQVASDGEMSLDLDLEMDELGRTAAQLRSHPSFSSSLERDDRVSLQEPQKRHSASSCSFDSDTGDGRKRRGDDGEVVRCTSSSSAAGAGPLLRVNTRSRLMDPPPQSQRAPAPAASSVVDEERKSSGLRTPTKSGRLFSRLMSGNKSGPIAGKSGPMDDEEDDPFVDEDIPDDFKRGKLDALTVLQWLGLFLIIAALACSLSIKILSTKKVLGLHLWKWELLVFVLICGRLVSGWVIRIAVFGVERNFLLRKRVLYFVYGVRSAVQNALWLGLVLASWHFLFDENVQQETNSPVLPYVTKVLFCFLVATLIRLVKTLLLKVLASSFHVSTYFDRIQEALFNQYVIQTLSGPPLVEENHVLEEVHELQRAGATIPKELRDAVPTKHVSEQRNIQLSGVMPEGQGSKQLSKEKRDGISIDALNKLNQRNVSAWNMKRLMRIVQFGTLTTMDEQIQQARGKGDESATQIRSEYEAKIAAKKIFSNVAKPGSKYIYLSDLMRFMRQEEAVKAMDLFEGAQEHSRVSKRSLKNWVVNAFRERKALALTLNDTKTAVNKLNQMANVIVGIIVFALWLLILGIATANFFVFLTSQILLAVFVFGNTLKTLFEAIVFLFVMHPFDVGDRCEIEGVQLVVEEMNLMTTVFLRSDNLKIYYPNSVLATKPIMNFYRSPDMGEAIDFSIHVATPAEKLALMKERILRYIDNKKEHWYPGAMVVLRDVDDTNKLKVSIWLRHTLNFQDMGTRFVRRELVLQEMIKVLKDLEVEYRMLPLDVNVRSAPPIQSTRMPTTWSYS

SEQ ID NO: 72050 - protein, 105 aa, Zea mays
  Coding DNA Sequence Number=SeqID_28675
MNVCELTLAVSHTPQVKTRTPVIYNVVTFDPVPLYIICVRLGPSIPGVYVNPGFWTPKIRVLHAYTKVGPQHMFHTRFNNSVHPYVTSHRHVSRLPAIKAGCRYV

SEQ ID NO: 72051 - protein, 235 aa, Zea mays
  Coding DNA Sequence Number=SeqID_28676
  Subcellular localization annotation: CTP_CleavageSite=70; ConfidenceScore=5.39e-01
MPALPTFPLTRLPFNARRCGCLVLSLVVFVVVSTAAALTYISFPSAGRTSSPVVRMEADYCMGMEGLELRARRSSGAQTTACPPSPPARPCALTPRTGPAAVTTEDVGARRLRCCLRLRSPRLPIFPLCRADIIPGGPDGDRLLQGYGGPRSLGPDGQVGLRPPSALRRRLLPRLQGHVPSPQGRGLPLRQRRMLGVRGRTVHHIGVDAYAMLLRSSRDNYLLLQIKFPIIYYKT

SEQ ID NO: 72052 - protein, 118 aa, Zea mays
  Coding DNA Sequence Number=SeqID_28677
EQPLPVPEAGEFRRPRCLGAPDTVWCTPDSPVNYSAPALDFPEGGEFEFESSGAPDTVRWCTGQCPVYTGQSDHGRERRRYPKREEDVWDHAVSVRGYGDLRMKGQINGAQGILVKIN

SEQ ID NO: 72053 - protein, 64 aa, Zea mays
  Coding DNA Sequence Number=SeqID_28678
  Homolog annotation: Hit_ID=A9NV46; Match level="QueryCoverage=67%, HitCoverage=32%, E-value=2e-10, Identity=60%"; Hit description =Putative uncharacterized protein
  Pfam annotation: Domain name=DUF1754; Domain location=2-64; Score =0.2; E_value=1.7e-05; Accession=PF08555.1; Description=Eukaryotic family of unknown function (DUF17
MACHVRDLATQSVACGLWLWAKQKIDMQKIAKVANKSHKDRMQDFNQYLAKLSDHYDIPKVGPG

SEQ ID NO: 72054 - protein, 173 aa, Zea mays
  Coding DNA Sequence Number=SeqID_28679
  Homolog annotation: Hit_ID=Q6J9V9; Match level="QueryCoverage=37%, HitCoverage=33%, E-value=2e-07, Identity=44%"; Hit description =Putative uncharacterized protein
  Subcellular localization annotation: CTP_CleavageSite=37; ConfidenceScore=5.51e-01
MQAACNRAKWAHFSDFQHAQHGGPGPRVMQPARRMLRASNCTATCATTAPPRLRNRYRDSRRSERRFAFAIMTASKKGPGKGDTPKRILPREGTRLRASLLIRGSKAGPSEGFNSRLRARGLHTHYWSEVRRPAPRKGSTAASGYTGSAPTTDQGFEGWPPKGSQPPQTQSEG

SEQ ID NO: 72055 - protein, 229 aa, Zea mays
  Coding DNA Sequence Number=SeqID_28680
  Subcellular localization annotation: CTP_CleavageSite=46; ConfidenceScore=5.47e-01
MADPRHEAKRARGSAKAAKPAAPGSSKPSVGAKTATAGMTMSPPVEAAKGRELPSSGKRVTDFGTNISVEDYFVGSGEGQMVVVPPSVATALPSAEVKVRGTAQDPWAAFCASGEILTTAAAKDVAGTMSQRLSQQLSQAADFADRVASSVLTADVAAEVERLWAQHVDAVWEKSAAESKSRRLAEKVAALEAEKTDLRRQLAEERREANQAVAEAQAAQAEAKVARAE

SEQ ID NO: 72056 - protein, 300 aa, Zea mays
  Coding DNA Sequence Number=SeqID_28681
  Subcellular localization annotation: CTP_CleavageSite=31; ConfidenceScore=5.31e-01
MAASGWSSSPRRAHASPEGLLRQRAPPQLSRSSARAGFIVKQPWPDCLTNRPLHRRIQCRGRLTPYSDTRASVGQAEAKTDNKSRSTTEFGLGRNRKLRLARPQAPASGGDFRLARPQALASGGGLRLARPPDSVSTSISGGIASSPDSSLGLKRSLRLARPWARTDRANRGYIITLFLACSGYKEQDRRPIWLTPATGLRRSSDGHAITCTGPNLSPDSHVGMYAGLRHSSAGHGPPGSKTPTVGAPGRGLLRVNEHLPVEFQMGSLQQHLQPGTVLRFGSLEFMSLDCNTPGVTVTKT

SEQ ID NO: 72057 - protein, 156 aa, Zea mays
  Coding DNA Sequence Number=SeqID_28682
MVRSIWVAILAIDVGEMLRVRLIWCPLLGNPSRCPFRPVQALAGARLGMDAVEDVSEHEEEEEVTEERTPPPSDSQAGNCFYFDICGSEPDSPVNKGKPRRADRGPFNWSHASSWHTLESLFLSRVRKQQTSVASVPRWFLMKISKSEVREERILH

SEQ ID NO: 72058 - protein, 54 aa, Zea mays
  Coding DNA Sequence Number=SeqID_28683
MQAACIRAKWARPFDSNKPSMEVQAHASCNRDRERGIPRKGPFSMKETGSEPPY

SEQ ID NO: 72059 - protein, 84 aa, Zea mays
  Coding DNA Sequence Number=SeqID_28684
MPICFAGCPSPGPRKNDLTIYWALGPFVRSFTLLVDLGDIYPPQLVARAAPTTSDADPLTEVTTVTAPMSLTTPPELYCRRDLN

SEQ ID NO: 72060 - protein, 101 aa, Zea mays
  Coding DNA Sequence Number=SeqID_28685
MGRCMSARMGISSGALLWAWLMVEESLQSTPNTFATSHGGIEGLWSMGIARRRRVVRGIPPCAVVRAPVRIIQDHYVNWNMERPPGKTVLPQGFNGTPLAD

SEQ ID NO: 72061 - protein, 232 aa, Zea mays
  Coding DNA Sequence Number=SeqID_28686
MNENGDLQDRIGVQMGQVKMIEIKEAAEKGRNGKAKAAEKERSINNGLMGILIWDSNPMANPPRTEFPQRKNPDGHEVEKFGLKDDEHVVTCERQLAVGVDWRNHHGRRTRDQCHLATGPVAAAAAAAPGAASAAAATAAAAAVTVLAAAAPAAAVTVTAATAFVVVVVVVVVLVLAAAVQLLLIREYSDSSEPSSPERSMARMYVQTSAASPWESSDSSDNSARGWELALL

SEQ ID NO: 72062 - protein, 70 aa, Zea mays
  Coding DNA Sequence Number=SeqID_28687
MDKLATQIHCDVLSFQDAWHMIVKRLMLVRITPASHSPSGYGGLNGIGMYGVSFLQISPNFIIWLASPQM

SEQ ID NO: 72063 - protein, 207 aa, Zea mays
  Coding DNA Sequence Number=SeqID_28688
MARVACILRGKRLDGGVSVLSVGVNPLVSERSPSLQILRSISKRIFKYLSKKYSFILTLPLSGSSHFIRPDMPRTRKTTRKSTGPIGIPHHQLASRHEGSRSGNNNPIRDLEAKVEQLHTELRHRNSVWAQDGQRINELAADVRRLQDELSKRDLAVDWAVNSRSIAWDHEAKAHGHVTELSAALITCKYNAILDMRKCMYCMPDYT

SEQ ID NO: 72064 - protein, 90 aa, Zea mays
  Coding DNA Sequence Number=SeqID_28689
MALPVDVAGLRPRLGVVEAPPKPRSSLSSMAEAESEPLGPYCLSVSLCQVALQSEWHRRRCPSVRPLYADGGYQLRIRRLEGTPNYGPRQ

SEQ ID NO: 72065 - protein, 321 aa, Zea mays
  Coding DNA Sequence Number=SeqID_28690
MAGERTGRARMLLFHHAGKTSLIPPPAGGLSAAIVVVARRWKEYHVVTAVEGHELKTPETEHRPGPERLLETAHLELDGKLFVNTQQAPTWRANCRRFETGGSLSRRVNVAACPSPDGSSAWASTKGGSEGWASWRLLRSRGRLCLPWPRPSPSPWVGRGGGRSEEARAESEPWGRAKRSSSSSGAEPESEPWVGRSGVHRLPGLSPSPSPGVGWSGVRRLPGLSPSPSPGSGGAEFAVFRDLARVRALGSGGAELPMVPLAGPDCLSVSLCQVALQSEWRRRRCPSVRPLYADGGYQLRIRRLEGTPNYGPRLFFAVSLP

SEQ ID NO: 72066 - protein, 149 aa, Zea mays
  Coding DNA Sequence Number=SeqID_28691
MRKSSTSCARASRERRAGKEAELGQRQGWARCRGKHREMLGWRARIRGAPLGASMGAESEQGGSVTLREREKTEHGGELGGDPRVPEIGSQRASRGARRGATQEGQLPAAETAMASAGELATGHRNPSHRCREGEDGWGRKEQGAPGRR

SEQ ID NO: 72067 - protein, 45 aa, Zea mays
  Coding DNA Sequence Number=SeqID_28692
MTSTGTRSRASDYLVELVRIIYIILVILMLIHVHRASHEVIGVDC

SEQ ID NO: 72068 - protein, 58 aa, Zea mays
  Coding DNA Sequence Number=SeqID_28693
MAELTEALAQLGGDWSGLAMVAEALAAMAGGKELAGAKEGCLAGEGIKVNTLDLWLKV

SEQ ID NO: 72069 - protein, 169 aa, Zea mays
  Coding DNA Sequence Number=SeqID_28694
MKLSKPSDLAELHRKAKITLAGLRSPAPARRPSTLDLPYILDHLTGAISPPEVLNSAGYPMPPLYTVRLYEEHRVPRCRVWLTLEAHPLQPGWRSLDSETIGLRTDDTIEAAAMKTLTTFYGCHPLEMVMHPLGLFPAEKKDDTMWCNRVSHVKDMWAMYPDLVGRVTV

SEQ ID NO: 72070 - protein, 175 aa, Zea mays
  Coding DNA Sequence Number=SeqID_28695
METGATRRGYRVPMGKGLVAALPREGRRHLPIRAQRRTGAGDAVAMDLYPGSSRSPGIRIARIHSTPASVDHGFRLVVGEYIAGASIGLGRGVREGGDPGSVDWRIQHRRAQCVLETGSELLARGERKIGHGVLGATEAQQTIERPMSGRNPKERQGEKGQARSTGGRSALGVPS

SEQ ID NO: 72071 - protein, 252 aa, Zea mays
  Coding DNA Sequence Number=SeqID_28696
  Pfam annotation: Domain name=SlyX; Domain location=160-228; Score= -6.1; E_value=0.034; Accession=PF04102.3; Description=SlyX
MTSHGSSDEGYAQSHTDGLAREGFPRILWEVLQGASYTTPPQYAVQLFEKHRVPRCRVRMTLEPHPLQPGWRSLDSKSFGYWAEDTMEAIALHGLTTFCGFHPLELSTHPIGLFPVEKEDNPMWKDRVEHAKDIWAIYPGEELVVDLSTDMVEKDLQVEQLSNEIQELEELVGTRENTIEVLEDQLINTQQQLVEANQHLDMHHLEIQDMEANEDVDIEGGEELPPAWTLLALGDHLPPSRVLPHLLTRSQG

SEQ ID NO: 72072 - protein, 139 aa, Zea mays
  Coding DNA Sequence Number=SeqID_28697
MTLPAGFLDAAGRAEGGPAEAAALRRGGPAGRRPILPVDARLQNDSVDASDAHETLSEDDTAAAPWRSSVDAAAAPLVGDGANDNVGSSLLLALSAAAAGALSSRWGRRLQLVPAQPPGGAGHAGSRRRRHGASEVAYT

SEQ ID NO: 72073 - protein, 342 aa, Zea mays
  Coding DNA Sequence Number=SeqID_28698
  Gene Ontology: Mol. function=DNA-3-methyladenine glycosylase I activity; Cellular component=cytoplasm; Biological process=base -excision repair
  Homolog annotation: Hit_ID=A2Z1B4; Match level="QueryCoverage=72%, HitCoverage=55%, E-value=8e-75, Identity=58%"; Hit description =Putative uncharacterized protein
  Pfam annotation: Domain name=Adenine_glyco; Domain location=66-259; Score=231.0; E_value=2.7e-66; Accession=PF03352.4; Description =Methyladenine glycosylase
MADFDTHEYFIGSFVVPIGYGGRGTYFCDLNDPVYRNVNGYGYPMGTRYPCGYGYGFMCPLGTLPTAIPTCYAAFHDQEWGAPVHDDKKLFEMLTLSGALAEMAWPAILSKRDTFRCPNPKTNSEAIALHREVFMNFDPLLVAELNEKKFLAPSSPASSLLSQHRLRVVIENARELLKVIDEFGSFDRYCWSFMSGNKPTVGRYRHTREVPLRTAKADAISQDLMRRGFLGVGPTVVYAFMQAVGMANDHLVTCYRFEECCAVESFAASDEGYAGDNGKKPPPAVASDQEAGALINVFARVGKSPIPTLIVFMAISLVGVVVADCRRDEVHRLKSTIDALVA

SEQ ID NO: 72074 - protein, 255 aa, Zea mays
  Coding DNA Sequence Number=SeqID_28699
  Gene Ontology: Mol. function=protein binding; Cellular component =protein complex; Biological process=ubiquitin-dependent protein catabolic process
  Homolog annotation: Hit_ID=Q69Q88; Match level="QueryCoverage=77%, HitCoverage=92%, E-value=6e-73, Identity=74%"; Hit description=26S proteasome regulatory subunit-like protein
MVAPDVKAETMKLMDQRGALEAEMDAIIARLTAAGGPGITGGLVDAEGFPRSDIDIPNVLAQRRRLAELRNDHKDITNKIGKNLEVLHSAKLSRNEQSTSRRSDTTDPSHFGSSQSEPMEEDHVTGLPFAMIDEIADGSPASVDGLQLGDEIVKFGNVEAGDQLQERLMSEALSNEDSQVSLVIIRQGSAVFQLVISPFDANVSAPGIKAIIGGWQVPFQNAMKSPSFFSRMRWSIMLALVESGDGSSDAISAAK

SEQ ID NO: 72075 - protein, 110 aa, Zea mays
  Coding DNA Sequence Number=SeqID_28700
  Gene Ontology: Mol. function=protein binding
  Homolog annotation: Hit_ID=A2ZLH9; Match level="QueryCoverage=61%, HitCoverage=9%, E-value=4e-17, Identity=63%"; Hit description =Putative uncharacterized protein
MTTLIAATKLREIVMDKCLGITYVRLTKVFVGCPGLQRLNLKWRHEIFDIGVDMLAKKCPQLRSLDISCLKTPSLDSQPKAGDATQPAAAAKKQGVATSQPLSVVRIYVV

SEQ ID NO: 72076 - protein, 143 aa, Zea mays
  Coding DNA Sequence Number=SeqID_28701
  Homolog annotation: Hit_ID=O48967; Match level="QueryCoverage=98%, HitCoverage=25%, E-value=7e-33, Identity=57%"; Hit description =Putative uncharacterized protein
  Subcellular localization annotation: CTP_CleavageSite=72; ConfidenceScore=5.00e-01
MTSRVAPGALSAARELLRHPPSSTASPGAMKKWRDDVDRLLGMAHSASTRPRPRSSWRQHEASASVRSPSVRAAPIEDLRAELNRRRAGEDAPVYMERSNDLRAELNCRRAGEDARVSLERARERRQNVEGHNLDYDFAAVAP

SEQ ID NO: 72077 - protein, 208 aa, Zea mays
  Coding DNA Sequence Number=SeqID_28702
MAAAAVYGQNAAATWDWPTVREDLAVRGPDPAQGGSGAHPRGPGTPVEVLDLTRRSGLYVQGSDTSRWGSGPTVDTLEYIVFSGRVATRESTTWWGQALFTTRLEGRSRLCCWFTGLSDIGRIQRGPRTDLSWEELEVLVKGITGEAFIPESLIPPQGIPLLCDDPGMRSAVLDWLPTLDESGVAIRQTGGRDPHRGIHIPGVPAGGS

SEQ ID NO: 72078 - protein, 296 aa, Zea mays
  Coding DNA Sequence Number=SeqID_28703
MDPPLDSDPPEASEDSWRGRGGRLPGPGRAEARQSSSTTTIRPAATATATTIGLAATTPGATAASIAATGAAAAGAANVPLPGSLEGSGPQLSCQRVLTHPLLVRASSPSAYKVVPPSPPAAVTETVPPGPQAPAMDPAAAAPTPSGAAAAEGVPTALTAATASATVVPLSTPSAAAEEALAASVTTIEPDRGGASISNPLPTPEETEVIFGRRLRSGTEPEAASIPLSRVLSRAHQALQETGAAILWEWEALETEHQCLSDWLTQLEECTKAASHQFAFERSELEWDRKDYQKDL

SEQ ID NO: 72079 - protein, 232 aa, Zea mays
  Coding DNA Sequence Number=SeqID_28704
MELQSKLNAYNKMLEEQRDQQAAAVEDLRKVQQGLDDRASSLALAEENLKEKDASLDKRAVDLAWREKDLAFKEEMLERRDKLLADYELEAEEKERTLEEKEQTLGERVRQFEAAQADEASSTLVPLRVSPNPVSEQPTSISDALPVLDSAADRLRRLNQILEARLEAEGSILCRLVIEYILTCFRSHDPAISLVSMIAGLVVDTEDAAREGVLDVVDAVAERFQRDPADDE

SEQ ID NO: 72080 - protein, 38 aa, Zea mays
  Coding DNA Sequence Number=SeqID_28705
MAAAAVYGQNAAATWDWPAVREIKDKFNPSHLWPFQRP

SEQ ID NO: 72081 - protein, 240 aa, Zea mays
  Coding DNA Sequence Number=SeqID_28706
  Homolog annotation: Hit_ID=Q6J9V9; Match level="QueryCoverage=37%, HitCoverage=31%, E-value=1e-39, Identity=89%"; Hit description =Putative uncharacterized protein
MSLRYGRIYTLGALKAERPHLSLNVAILAKGRYPRTKVGIAVDRNNTKVDSEPKGSDQVFITAKTESTDTPPSSLLPRRGPGNGIFRKRILPSEGNGPRALLLIKGSKVAPSGVRQPPQSTRAPSPLLIRGSKAGPSEGFDSRPRARRVRDDPGYVRYMAEARATLPRELRLARPQASASASASASGEGLCLARPGPQTDYAAGGLKALLCQPRWHIATPHCTAGHLLVSIKGDDQVKVA

SEQ ID NO: 72082 - protein, 195 aa, Zea mays
  Coding DNA Sequence Number=SeqID_28707
MAVGEVLESCVRGVVAVGGAFEPCRSTAVGAAGTLLTSPCFRRGLRTTVVMDARGEPSLLVTEASLDGTPVLFPPQGRARRRLLLRPRPGSGEDAIPPEVEVEARPWGRARRRPLSEAEVEAEPWGRARAENTFRGRGPRSSEAELPVAPEPGLSCCQPHPGEWHSSRRGASGAPLLSGQSVGGRSDCGHFDLAD

SEQ ID NO: 72083 - protein, 194 aa, Zea mays
  Coding DNA Sequence Number=SeqID_28708
MGSAHVAFVLLLEERNLIEVGTLQPSLGFKDFHQAARLHSLTNASGGGNHSPALRRRRPPAMRGKANCCCLARVQHSVLRPSDCGRLHWGVVQHVVRHEGGTRVLRRSRSRSCGEDGSEDLPVRFGAAGARWCGVGGQVAAVVGAEVVAAREGFSADEIVGATCGRTSGSSALAACPRPLCHTRILGSKTRART

SEQ ID NO: 72084 - protein, 43 aa, Zea mays
  Coding DNA Sequence Number=SeqID_28709
MAGSLGHVQTAHKQVEDRRRAFSHHFYRRVPVNWFGIKIEGLD

SEQ ID NO: 72085 - protein, 73 aa, Zea mays
  Coding DNA Sequence Number=SeqID_28710
MMVNLRLPWAVGNSPMISSPHRCSGQLTVDNGEVSASVFKPFGFIAIGCMVMTLKGEAFELFLKAANGGKILH

SEQ ID NO: 72086 - protein, 72 aa, Zea mays
  Coding DNA Sequence Number=SeqID_28711
MEGFDVEDFDDAVEEEGIGPLDDDGTSGWVGEGSARCGMIAAGSAEGDNHPIFGGLGFQVIPHGVCTTFAVK

SEQ ID NO: 72087 - protein, 59 aa, Zea mays
  Coding DNA Sequence Number=SeqID_28712
MQVACNRTAGAHPFGFVASSMEAQAHTSCNRRAGYYGPGKGIFRKGSFSAKEAGPEPSY

SEQ ID NO: 72088 - protein, 176 aa, Zea mays
  Coding DNA Sequence Number=SeqID_28713
MGRSKPGYDLGPALSFKEVHHPCWGGGWAEPELYLPRGFVGQPLLQHSRERALTGPTSGADFDNAGLVDGGHRQLQHVGLAGLAPGAPSRREGGCRAARMGGPPKTSCAARAAFVFWGGPAFAPVRCLRAEDHRHHPRFGPPALCTCPRPSSVSVGEGKVAAAFALRPSLLQFGPP

SEQ ID NO: 72089 - protein, 83 aa, Zea mays
  Coding DNA Sequence Number=SeqID_28714
  Subcellular localization annotation: CTP_CleavageSite=37; ConfidenceScore=5.66e-01
MQAACNRAKWVRPSDFQRTQHGGPRPRVMQPARRSLRASNCTATRTTTTPPRLRNQYRDSRQLCGLGKGDTPKRILLREGNSL

SEQ ID NO: 72090 - protein, 59 aa, Zea mays
  Coding DNA Sequence Number=SeqID_28715
MQVSCNRTAGAHPFGFVASSMEAQAHTSCNWRAGYYGLGKGIFRNGSFSVKEAGPEPSY

SEQ ID NO: 72091 - protein, 91 aa, Zea mays
  Coding DNA Sequence Number=SeqID_28716
MDHGHRGRRPEQFRAHGYQKNREQRAANREALRAPWKSWRWPAAVAQETGRRTRTGGHAREVSMAAKAREELGAQSSTAQWPWPSTGARSE

SEQ ID NO: 72092 - protein, 50 aa, Zea mays
  Coding DNA Sequence Number=SeqID_28717
MATTPSEMAAPRPQLQPHISGAEGRGFECSLCIIFYIIIVAVAQKGSGAE

SEQ ID NO: 72093 - protein, 417 aa, Zea mays
  Coding DNA Sequence Number=SeqID_28718
  Gene Ontology: Mol. function=RNA binding; Cellular component=voltage -gated potassium channel complex; Biological process=potassium ion transport
  Homolog annotation: Hit_ID=A3AR01; Match level="QueryCoverage=98%, HitCoverage=38%, E-value=1e-119, Identity=55%"; Hit description =Putative uncharacterized protein
  Pfam annotation: Domain name=PUF; Domain location=325-359; Score =33.3; E_value=9e-07; Accession=PF00806.10; Description=Pumilio -family RNA binding repeat
  Pfam annotation: Domain name=PUF; Domain location=361-395; Score =31.3; E_value=3.5e-06; Accession=PF00806.10; Description=Pumilio -family RNA binding repeat
  Pfam module annotation: Pfam domain module=PUF::PUF; Domain location =325-359::361-395
DWDEWQFGPSTVHSGGAMANYAFDMNLLWTDMNPDNAEYHRNIQNHFMSNIENMNAYGNRDLDASSMFDSDISDALSGLRLSNNSVMDQRNNREELADEILERQRDFSKTVDETRSSLVGNVFHAPRSDVHPSRIYGDGILRRQTSACALDGSNVSRINRHHIKGVDRPSLADQLAIMQSGNFPRGTNLSRNVSVTNMSNPMSNRYNSNTDLDLARSRMTFFKEILAQQYLQEDNLSYNDSRIYHDEPCFPCSRMQRSGSHFYSNSRCILSHGDRQSRLLSLNRKAMGRNIGSHAYHDNTLSNYLDVLSLDNADRNGADSVELIDLVGHVKEISMDQYGSRFIQQKLEIASLDDREKIFPEILSNAIALTTDVFGNYVIQKFFEFATERQLIQLADQLKGHILELSLQMYGCRVVQK

SEQ ID NO: 72094 - protein, 132 aa, Zea mays
  Coding DNA Sequence Number=SeqID_28719
MAPFGDGGVGCGDGGEALRGWDPLRSGSAPPTMEGAAAAAAAAERRVFGGGGDGASFFSGIDGLMFGARMDEVSRCRGAAGAQVRVLLILSSSMVLVSLVRKVGFCHCHFSVDGPLRIRDASHWSRLLLGVV

SEQ ID NO: 72095 - protein, 150 aa, Zea mays
  Coding DNA Sequence Number=SeqID_28720
MKPWIAKWVTKLLGFDVRSTRTVVDGEDEGHARFVSVDQERAKGTTHGRGPRRPTAGPGRVLLSFGSICKPLLGHLPPIVRDTTKQSRDGPKKATSKATTSLDDATKASLTDKKCKAALTIDAPQDAPENNNEAVNSKHPRTENPPSLGG

SEQ ID NO: 72096 - protein, 63 aa, Zea mays
  Coding DNA Sequence Number=SeqID_28721
MDEGNIEEADILGEDLVDYGASPEHAEKCFWFAHFPQKAGACVEHHLWHWARPDGPAIGVDGL

SEQ ID NO: 72097 - protein, 296 aa, Zea mays
  Coding DNA Sequence Number=SeqID_28722
MDWHFGVIDGERSTDKGGWRSRVFWSVSRAPISGRERDRSASRHGLREDNSSSAGRHRRPAATPTALCLTGDTTPPPAVTISHPHSGSSSGGWPLTGLVAVPTPRERGRSRERGCLRHNGRVQRSPARAETTPIGLASALHCDARCLPAGSLGSVNHSPSPPAVPCLSISQTVTSLDPPTPCRSAPPPGVDVAALGSLVVSAASAGLCMGGRMRLQASSVWPWWRHGSPWLLQIGCVRFAIWILMSRLGLKDEGDDNDRFLRYVNLFKGPLNDTTIMAISALSGLEDTSTLESVHE

SEQ ID NO: 72098 - protein, 43 aa, Zea mays
  Coding DNA Sequence Number=SeqID_28723
MWSSRIIARNTPPPRQGLAFVARSIEQRTVDNQRRSGAAIAGF

SEQ ID NO: 72099 - protein, 89 aa, Zea mays
  Coding DNA Sequence Number=SeqID_28724
  Subcellular localization annotation: CTP_CleavageSite=72; ConfidenceScore=5.75e-01
MAALARPAPPLPARGAAPAPARRCVPPARPPARPRRLGPGAAPAPARPRPPPARASGPRRGSRDSRCPFAASASRVRDRLATASRDNFV

SEQ ID NO: 72100 - protein, 274 aa, Zea mays
  Coding DNA Sequence Number=SeqID_28725
MWRLGDVRYPGESSGSRGGEKSERVVLPSLATSIHLSEGASRRGSSAEPSKLGSKRPCSSGSGGGPLSVVGGKEVAREETKIQGSGATVGVRRRRTAIAKKLRRSTAPTKEGAQKRKRISSPPSSSSSTSSGAPHPKRKSHNISMRCVLTKTYPLTMDSENAKLRRALAHLIRVVEERCADIVDVVHGAFQPVSGPVLNEMNRALVQIEDLANDLDQLALEKDWEMEHMTPSPIAESSQTEDELLIDYDSELNNDDIVGYDDGRDYSTDDTYPY

SEQ ID NO: 72101 - protein, 236 aa, Zea mays
  Coding DNA Sequence Number=SeqID_28726
  Subcellular localization annotation: CTP_CleavageSite=27; ConfidenceScore=5.35e-01
AAPNPIPVPPPFLPSRSPRRKGAPGATAMAPAQARQFRPRRGGQAPDAALGGTAAGADSASQAQRRLQHGHVDPARYDPAHGATAWPRRRVAPRRARPQHARGWPRRRRGVHLWPGATASFGHELAPACAHVPGQRRWQLGSTASSTELASSPTSTELLSSPAMKAVVPAPPSPPLGARPPPGRGLHHLLILAPLAHAIFSQFPLQQPMLFLSLLPLRPSGSLLGGHKPSDAPRSA

SEQ ID NO: 72102 - protein, 200 aa, Zea mays
  Coding DNA Sequence Number=SeqID_28727
  Homolog annotation: Hit_ID=Q9ATN9; Match level="QueryCoverage=64%, HitCoverage=100%, E-value=1e-40, Identity=68%"; Hit description =Putative uncharacterized protein
MEIVAAVRRLLRRARDTEILRLKQLLDEKAEKNNSTASGFHCLTPEAILENSTSMSPKRKTPLSHGKEKRVQLSENAPHSSPAKESQELVCSRRRTCIRGNGTNEIRSAHMLRLLLQSLVRMKVSVNDESEIFSVSVSHEASGYSFTLTWLEKSDEWSYKLSSLGTLGRIAADWMRQDIRFSTKMCRMFVERISSIITKG

SEQ ID NO: 72103 - protein, 141 aa, Zea mays
  Coding DNA Sequence Number=SeqID_28728
  Gene Ontology: Mol. function=DNA binding; Cellular component=nucleus
  Homolog annotation: Hit_ID=Q10PA6; Match level="QueryCoverage=41%, HitCoverage=10%, E-value=1e-09, Identity=50%"; Hit description=Myb family transcription factor, putative, expressed
MGLIDSLLQSMPPVVGVSLVADATKELEHDTINSGILCISINHMKEVDSHAPVKQKLQLFPINEATLKPFEKVDLLDSPIARLPDIETTTLGATYVASLDAGVWTKEQVFADLNGLHRLSHQHRQLEKLNFRSAALLENFA

SEQ ID NO: 72104 - protein, 142 aa, Zea mays
  Coding DNA Sequence Number=SeqID_28729
MHEDELRPSQSMQSLNDSPADQESEAPIRRRWWGEGAIGDGEELLGNAQMRSPELLRWPKRGGGGDDSVRLGPDGERCGPGGVCGGTQGDGAVGEEKRRRRCSVLGVAGEASRWMWPQAGMPCGPAMVRGYARVFLLRGGMA

SEQ ID NO: 72105 - protein, 59 aa, Zea mays
  Coding DNA Sequence Number=SeqID_28730
MAASHGCGELPEGRGCASGAVPGRGPRRESGTGGRGIGEQAGPQAGWAAAGPQRERDTL

SEQ ID NO: 72106 - protein, 98 aa, Zea mays
  Coding DNA Sequence Number=SeqID_28731
MTKEASFRGHNIARNLQDSSKAPSGHQLQGAEAAGALEEDMGISPGKSIAYSMVKTRATQQERVKSPFRSKKRLPKQKPGRISRSRSCILIRVTLPTY

SEQ ID NO: 72107 - protein, 165 aa, Zea mays
  Coding DNA Sequence Number=SeqID_28732
  Homolog annotation: Hit_ID=Q8H684; Match level="QueryCoverage=49%, HitCoverage=32%, E-value=6e-20, Identity=56%"; Hit description=OSEYA1
MTKQPVKGYKWDMDETLILLKSLLVGSYARDFEGLKDREKSTQTRKRWENLILELCDEYFFYEEEHHVRPQGEGDRHGDCFSLPTSDIAKVFQDKLELQPMFVAQVRILPQPVVIFVSRLYVPDVPRITNRKHTSLVDLGLLGISFDYMYAELEEEQNVATIATN

SEQ ID NO: 72108 - protein, 248 aa, Zea mays
  Coding DNA Sequence Number=SeqID_28733
  Homolog annotation: Hit_ID=O48967; Match level="QueryCoverage=19%, HitCoverage=10%, E-value=6e-16, Identity=81%"; Hit description =Putative uncharacterized protein
  Subcellular localization annotation: CTP_CleavageSite=69; ConfidenceScore=5.03e-01
MSTLLTGGDQAILQEACLSIPVADSTPVLRHTLCSSSLIRPQGSFRGTPMLRRPRISERKEIALATSISCSKSAGAWEGTGWRLQLVNLKTVAAGGDCSRRAGEGQGGVAADDVAAGAVAQDDKKKKKKNHSSERPPSAAPIVAAAIGGRNEHNKRPRPQRGNSGSCPVHPNCRHSATECREIIELAKRVSERCEQTSKDGSPPRRRPGEERVNSGKVAVGEPDLWYQSPEEVLKDVFTGDSDPGDDN

SEQ ID NO: 72109 - protein, 92 aa, Zea mays
  Coding DNA Sequence Number=SeqID_28734
MADLQPTSPVIVDPDTDVSADSERAALAAREAALARIAAAEQDAALAQRERDAADTRIRVALARVAHERTTVALSPLVNDVILDGTGADSTA

SEQ ID NO: 72110 - protein, 471 aa, Zea mays
  Coding DNA Sequence Number=SeqID_28735
  Homolog annotation: Hit_ID=A2YGC2; Match level="QueryCoverage=30%, HitCoverage=65%, E-value=9e-09, Identity=30%"; Hit description =Putative uncharacterized protein
  Subcellular localization annotation: CTP_CleavageSite=50; ConfidenceScore=5.20e-01
MAARRGARPGLAPPGALPSPHPGGARPPAWLGLARQRQPRPRPPFPPRILASAGRPWRGDLWPRRGALPDAAPCPARRHSRSPGPRQARRTRGSRPWRLGPARLGVPRPCAARPRPGVASALATVVPLRSAARALLGPGVIATPAQEKAKSSKETSRSSKTMTSSRRGHLERLHHRLHEEQERRRQEQQGFSFSLQQEIEYVRSCSPVLPLEAPPAPPLGAPASGVAAGGDPDDGGGDDSSSHDTDFSTDQEPEGWVARPITRDAARGCHFHDALDTLLRRALNRRTWSIEYRCVVYQHSRRVYPDRWEATCLVRRPENSLQGAEACSEHYSISERDSAEAAMQDAARHALSHYCLVLGGVADSLNLKYYPRRPSGSTRGVIVSPVGEDNPRLSSTVNLAVVLNTELDHALDELSRARAEIALRRAERAERRHLDDGSPAPVGTQHPYRSPRRGHQSYGNPDCKTKINLEP

SEQ ID NO: 72111 - protein, 363 aa, Zea mays
  Coding DNA Sequence Number=SeqID_28736
MQAACNRARWTRFSDSQHAGMEAQAHASRNRRAGCCMQATAPPLAPPLRLFGCGTNAATRGDPAHDPAAPTWRDGQCSRKWADSNDDGRAPMIRSSNGSRTRNGRPANHSPRRINSAAGQAAFLAGEAGDASPSPFEGWPPEGFNSRLRSRGPYTHYWLAPEGFTVASDAERGMTRGDRVRQITRRYFWACLWAPSRPLTNGARTSTRITRLQLTGDTMFGAHRGLRGCSRKPGSGRTVDSVNIPARELGPRPYTRAMASSHEGTTRPADALRKALRPRRSETTPPRPRGLHPAGALARTHRNKMQPRKVGPLAKKCDESLQASANTPFEARGILSGTIIRGTLKTPNSQLVTPISIKLQRPD

SEQ ID NO: 72112 - protein, 209 aa, Zea mays
  Coding DNA Sequence Number=SeqID_28737
MAPAVGAEAEAAREVPVTDGITATIRASGLRFFVLVLAPRASVAGGGEPLVSLLLLRRPSPMEWGYSPVDYLNRFTKHESPRVKVTSEARGSDISTNRGGSWLENENLVGQSLAGLPVIGTDAGVDQPRPRIGLAPLEDGWLRPQGDVCASESCFSRKVMSEKVMSEKARKTFWQKRSFFEENFDAEGVSPLLAPEGGSGFAEARPTLH

SEQ ID NO: 72113 - protein, 71 aa, Zea mays
  Coding DNA Sequence Number=SeqID_28738
MAPEAGLGCCQPHPGGWHSSRSRAGSAVFLSACADGGYQPSLGVLGVPLIMVPDNNLKSSYENDKMKYWLY

SEQ ID NO: 72114 - protein, 24 aa, Zea mays
  Coding DNA Sequence Number=SeqID_28739
MAHDAEVTHLGTMTYGTEISDELQ

SEQ ID NO: 72115 - protein, 142 aa, Zea mays
  Coding DNA Sequence Number=SeqID_28740
  Homolog annotation: Hit_ID=Q10LM7; Match level="QueryCoverage=75%, HitCoverage=89%, E-value=9e-28, Identity=63%"; Hit description =Dormancy/auxin associated protein, expressed
  Pfam annotation: Domain name=Auxin_repressed; Domain location=7-136; Score=59.6; E_value=1.1e-14; Accession=PF05564.3; Description =Dormancyauxin associated protein
MGLLDKLWDDTVAGPRPDTGLGRLRKQPVRPAAVKISDPAGDAAAFVPPSPASGSEETPVKVTRSIMIKRPAGYPSSPRSAASTPPASPLGTTPPISPFAGADPLLGVMAHGTEVTRFGVMTYDAELSDELATKYVLAADVS

SEQ ID NO: 72116 - protein, 201 aa, Zea mays
  Coding DNA Sequence Number=SeqID_28741
MNKNTGIQSAITNGTPVPPLQVRTIPLYGGGPAEQQKTDERLAAARSDYNDNDPRSGWPNCSSAGLRVGAAAILPSPTPTLEGRGQVQRAGGPRHGWWCRPPAEGAAGSQADEPDTLEVTTPAVDQPRVVEVRAACRASERPLPRTPRERVTHEPAREVERRLSPAPTPARMMNILEAEGGTKIAARLASPHPGTGGHRLG

SEQ ID NO: 72117 - protein, 157 aa, Zea mays
  Coding DNA Sequence Number=SeqID_28742
MRIRLKTMKMKIKRMSHLKRRIMIKGEMTMTKTRKMSKTFRVKDRHTQESTKRFKEITPSTLFLVISIRRMEDALRDLDWVLAMQEELNNFTRNEDYDSKIRDVYDGRVEDAKPIKTPMGTNGHLDLDMGAKQINGPTATGKVGNRRNSYPISDHLL

SEQ ID NO: 72118 - protein, 437 aa, Zea mays
  Coding DNA Sequence Number=SeqID_28743
  Subcellular localization annotation: CTP_CleavageSite=40; ConfidenceScore=5.35e-01
MQAARNRAEWTRFSDSRHAQHGGPGPRVTRSGRRFAFAVKTAPKKAPSLPTDQRFEGFDSRLRSRGPYTHYWSEVRRPAPRRVPRPPQATRAPRPLLIRGSKAGPRRVHSRLRRRARDDHGYVRYITKARAALPRYFWACLWAPSRPLTNGARTSTRITRLQLTGDTMFGAHRGLGGCSRKPGSGRTVDSVNIPARELGPRPYTRATASSHEGTTRPAEALRKALRPRRSETTPPRPRGLHPAGALVRTHRNKMQPRKAGPLAKKCDESLQASANTPFEARGLLSGTIIMGTLKTPNSQLGSDSGSALEDDELRSTRPRARTRAQPRKTTNSALPDPRARTPPWPLPNDLRLARPRGSGSASAMEDRLNLGFRGASMSPNLGRRPATSTGSAIITLPRVDSGHREQDRLRRSSDGHNITPAGCQNLSGCHIGMYLGR

SEQ ID NO: 72119 - protein, 474 aa, Zea mays
  Coding DNA Sequence Number=SeqID_28744
  Homolog annotation: Hit_ID=Q2QYU3; Match level="QueryCoverage=18%, HitCoverage=57%, E-value=4e-09, Identity=41%"; Hit description=LOB domain protein 12, putative, expressed
  Pfam annotation: Domain name=DUF260; Domain location=12-110; Score =97.3; E_value=4.6e-26; Accession=PF03195.5; Description=Protein of unknown function DUF260
MEKNQGTGRRAQCEVCKKLRRSCPLNCIFAPNFSAEEFAAVNRVYGSGNVANMIRCVTPSEQRRVAAATLVAEARARERDPVFGCVSYIRILQEFNYNARKQVDEAREEIAREFGAAAAAEPVDLAAAGPAVRLEARAQVDAALKDARELDARMLDVRKGNDVILWRELQQQQAAVKGKGKGKRAMKGKEVDVKRRRHEPSLSEQTMQVVPQAAKPRNPGPPGFPDDHSRQQVAVAVAEAERTAPPDAPEGHGHGRQLHHQMSEPEAQQQASAADASAGQHTGTGHPHHAGDAAAPDIPAGPGHDSSTSVIRAMQEVQHAGATGEQDQHHVAQHAQNEHCVALGHGDPYGISQDILQLQLLLMGQCGAAPATEQDVTAMMQQMAAAASGWQQQDHPAPQPQYAEMRDNTLGHGHGHPDGLSSEEILQPQELSMEQCDAAVEGTAPAEQDVMAMMQQMAAAASGWQQQDHLAPQP

SEQ ID NO: 72120 - protein, 448 aa, Zea mays
  Coding DNA Sequence Number=SeqID_28745
MMVQDMASRLSILANTTRASGRRPDFAHIDSSEFQVNVFHRAYEVDADEEARLDGYDVHIGCGARFCPERPPAHSTPFHRWRRCGIPRNQLPDLVLISPRSPSPALPPRSTTPPAMHCIAPRLLLLPLPTASRHALSPTQMPPLPPLLPSRACKFHLASARSPSHAAASVFGDDEDEVAHACRAAAARPCAFSLATTRSRPPPPARTASSLGLGVPNPPPRPPNACPRPLPTLIYLSLPLPLPFLLLPVAALLLLPQEYSPSIVARACDFVLHADLFVVFAVVFCWIGFVWIASEIGSMLLRVRIDLCYAAMPGVRSPSQLHLWHLALASKSICMCAGIQLLPEKHYADEACGAMASSNGPEGVPVVTSADDPPTRADIPFLCNSVDETCEATGDDSAPLNAQICTGFSKLISLEVKKGLQKCATFPPSSGQPQQEDCSCSHVGDGLT

SEQ ID NO: 72121 - protein, 135 aa, Zea mays
  Coding DNA Sequence Number=SeqID_28746
  Subcellular localization annotation: CTP_CleavageSite=64; ConfidenceScore=5.04e-01
MHQHGDGFGVGARRVQGNFTTQSHSKDDGTHTTQGKAPAMCAASANRWSSIGHPWRSTECRTKECAMKSELGERQGTSGPSERRENDAVGKNRAAGQTGAEHRQEPSREIGRPRSCMPAMGNQLEIFLTLDFSEK

SEQ ID NO: 72122 - protein, 161 aa, Zea mays
  Coding DNA Sequence Number=SeqID_28747
MDTYHVNHCISLDYKRMDDGVPQEGPSTISTNLAIVELALRVKRATAGKLRWSHRLGPDNWSERIRGAYQRCPVTGVGSCWSETMTIARRSHLRLRSHRTTWAGMTAKGFTCPTQVPKYKMVNKVQIKDKVANPSLALCFFVNFKCKGERLQVVEIPRERD

SEQ ID NO: 72123 - protein, 160 aa, Zea mays
  Coding DNA Sequence Number=SeqID_28748
  Subcellular localization annotation: CTP_CleavageSite=22; ConfidenceScore=5.69e-01
MSSSSLMRRVFSSSKPPDGGPVASPRWRSPKMVTSSLMVGRSKPGCDLGPTLSFKDVHHPRWGGGRAEPALYLPRSVSESSAWLPVAPLPEGGCRAVCTGGPPTMPRAARAAFVFWGGPAFAPGWRPRAEAGAPTRLGGFEWGSAGGLVAPAISAEAEAA

SEQ ID NO: 72124 - protein, 37 aa, Zea mays
  Coding DNA Sequence Number=SeqID_28749
MKVKVRVKQQNGSKGRPKNAAKTINYHLQRLGHIKFL

SEQ ID NO: 72125 - protein, 407 aa, Zea mays
  Coding DNA Sequence Number=SeqID_28750
  Gene Ontology: Mol. function=acetylglucosaminyltransferase activity; Cellular component=membrane; Biological process=isopeptide cross -linking via N6-(L-isoglutamyl)-L-lysine
  Homolog annotation: Hit_ID=Q10NA4; Match level="QueryCoverage=85%, HitCoverage=85%, E-value=1e-177, Identity=85%"; Hit description =Glycosyltransferase family 14 protein, putative, expressed
  Pfam annotation: Domain name=Branch; Domain location=61-286; Score =271.0; E_value=2.5e-78; Accession=PF02485.12; Description=Core-2I -Branching enzyme
MRKLPPAHRLRWMRALLLALPLVSLPILYAALGAARSSASAARPPPPPPQQQQQRRPPPRLAYLITGAGPGDGPRIRRLMRALYHPWNYYLVGVAGEDERTDLEAFVRAQEAPRRYGNVRVSAAGEWGSVSRRGPTELASTLHAAAVLLREFDGWSWFINLSASDYPLMPQDDILHIFSYMPRDLNFIEHTSNIGWKEYQRARPIIVDPALQVPNKTEVVTTKEKRSMPSAFKIFVGSSWVMLSRSFLEFCLLGWDNLPRTLLMYFTNFLSSSEGYFHTVICNSEYYQNTTVNSDLRFMAWDNPPRTHPANLTTEHFDAMADSGAPFAHSFANDNSVLDMIDAKLLGRAPDRFTPGGWCLGSSVGGKDPCTFLGRSFILRPTKGSAKLEKLLLKLLEPDNFRPKQCK

SEQ ID NO: 72126 - protein, 177 aa, Zea mays
  Coding DNA Sequence Number=SeqID_28751
MSRPWERYRRVSIKHDAGYVSPLTSGTIQPRSHGPQHRVPIYSLERGFSRFLTLFLPPSPSRLYLSHRKVELHNFNPNSIAQATIFTMVYERLWDRGLTAPGVVAAFQRWRVLPLLDALRRLWDHRLTTPGVVAAFQRWRVLLLVKRRLHLDEMTPEASVESSRMASVRAPRGGVNR

SEQ ID NO: 72127 - protein, 67 aa, Zea mays
  Coding DNA Sequence Number=SeqID_28752
MAAAPAPGNACLRCRARPGGPSAYHRVTRHQRALAPAHWGAARGRCGLAARPRHPSRRGCRAPSRRA

SEQ ID NO: 72128 - protein, 184 aa, Zea mays
  Coding DNA Sequence Number=SeqID_28753
  Homolog annotation: Hit_ID=Q6J9V9; Match level="QueryCoverage=36%, HitCoverage=23%, E-value=6e-08, Identity=53%"; Hit description =Putative uncharacterized protein
MAERYQLPRSCVPPTTRRKDGGYPPSGGLEGGKTRCIGEREDMVAFQEGHPPFKGDSPYLRPQPSWAESSPTRSKVLPYGAGAGSHTSCKPAQSRRSQTAVRGACNRPAGPGKGDTPKRILPREGTRLRASLLIRGSKAGPSEGFNNRLRARGLTHPLLVRGSKAGPSEGFNGHLRLLGLHAHY

SEQ ID NO: 72129 - protein, 301 aa, Zea mays
  Coding DNA Sequence Number=SeqID_28754
  Subcellular localization annotation: CTP_CleavageSite=46; ConfidenceScore=5.04e-01
MAPPVDVAGPRPRLGDAKAPPRSRPSPSFVAEVESEPLGRARRRPLAEARAEFESWGWAKRSSSSSEAEPKSEPWVRRSGVRRLLGLSPSSSPGSGGAEFAAFRGLARVRALGRAERSSPSSGVEPESEPWVGRSGVRCLPGPSPSPSPRSGGAEFAVFRGLARVRALGRAKRSFLWCLRPGLTAYQPHSVKWHRSRSGAGGAVFLSDRSVERQSDSGLLLGEDRASGEPEICSPLEGGLGRGGDPPGSAALLYVDGGYQLRIRSLEGRRELMLDALFLKEAFNLRVLELRPVVASNFLDP

SEQ ID NO: 72130 - protein, 163 aa, Zea mays
  Coding DNA Sequence Number=SeqID_28755
MSGAPEDSNFKLFTFGNFWRCLRYNSPDCPVYTGHVRCSKEERPPELASLGNSFQLLRYNSPDMSGVHRTVRCNYGAMATTRQRSPATAINARQSAQESGTRVVAHRTLYSTCPVRPDIQAGPVSELQRSNPNGFGDVAVAPDMSGVHRTVRCAIEQTAPPNG

SEQ ID NO: 72131 - protein, 743 aa, Zea mays
  Coding DNA Sequence Number=SeqID_28756
  Gene Ontology: Mol. function=catalytic activity; Cellular component =soluble fraction; Biological process=cellular metabolic process
  Homolog annotation: Hit_ID=Q10N92; Match level="QueryCoverage=91%, HitCoverage=99%, E-value=0.0, Identity=90%"; Hit description =Rhamnose biosynthetic enzyme 1, putative, expressed
  Pfam annotation: Domain name=3Beta_HSD; Domain location=10-280; Score= -21.8; E_value=1.8e-08; Accession=PF01073.10; Description=3-beta hydroxysteroid dehydrogenaseisomerase family
  Pfam annotation: Domain name=Epimerase; Domain location=9-251; Score =218.8; E_value=1.3e-62; Accession=PF01370.12; Description=NAD dependent epimerasedehydratase family
  Pfam annotation: Domain name=NAD_binding_4; Domain location=11-235; Score=18.4; E_value=5.2e-10; Accession=PF07993.3; Description=Male sterility protein
  Pfam annotation: Domain name=Polysacc_synt_2; Domain location=9-294; Score=-92.2; E_value=1.1e-07; Accession=PF02719.6; Description =Polysaccharide biosynthesis protein
  Pfam annotation: Domain name=RmlD_sub_bind; Domain location=6-321; Score=-144.8; E_value=0.0003; Accession=PF04321.8; Description=RmlD substrate binding domain
  Pfam module annotation: Pfam domain module=3Beta_HSD::Epimerase::NAD _binding_4::Polysacc_synt_2::RmlD_sub_bind; Domain location=10-280::9- 251::11-235::9-294::6-321
MATYEPKNILITGAAGFIASHVANRLVRNYPQYKIVVLDKIDYCSNLKNLNPSRSSPNFKFVKGDIASADLVNYLLITESIDTIMHFAAQTHVDNSFGNSFEFTKNNIYGTHVLLEACKVTGQIRRFIHVSTDEVYGETDEDAVVGNHEASQLLPTNPYSATKAGAEMLVMAYGRSYGLPVITTRGNNVYGPNQFPEKLIPKFILLAMQGLPLPIHGDGSNVRSYLYCEDVAEAFEVVLHKGEVGHVYNIGTVKERRVIDVAKDICKLFGLDTEKVIRFVENRPFNDQRYFLDDQKLKRLGWAERTPWEEGLKKTMEWYTTNPDYWGDVTGALLPHPRMLMTPGVERHNWAEEIKSLASSPAEASTIAPATSTKSISDAPQKPSYRFLIYGRTGWIGGLLGKICEKQGIPYEYGKGRLEERSQLLEDIRNVKPTHVFNAAGVTGRPNVDWCETHKQDTIRTNVVGTLNLADVCRKQGLLMINYATGCIFEYDAKHPEGSGIGFKEEDTPNFIGSFLFQNKSNVYLKLIYVLFTMVQVEELLKEYDNVCTLRVRMPISSDLSNPRNFITKIARYDKVVNIPNSMTILDELLPISIEMAKRDCRGIWNFTNPGAVSHNEILEMYKKYINPDFKWTNFTLEEQAKVIVAPRSNNEMDTSKLKAEFPQLLSIKDSLIKYVFEPNRKFLIRRRLCIFQPAPPAMKTFCFVKGWMLDHVPFGAHTSEEDVALLESGRQQQSLAEETQQQ

SEQ ID NO: 72132 - protein, 284 aa, Zea mays
  Coding DNA Sequence Number=SeqID_28757
  Gene Ontology: Mol. function=nucleic acid binding; Cellular component= spliceosome; Biological process=mRNA processing
  Homolog annotation: Hit_ID=Q10N90; Match level="QueryCoverage=100%, HitCoverage=100%, E-value=4e-65, Identity=51%"; Hit description=RNA and export factor-binding protein, putative, expressed
  Pfam annotation: Domain name=RRM_1; Domain location=97-197; Score =24.4; E_value=0.00041; Accession=PF00076.13; Description=RNA recognition motif. (a.k.a. RRM, RBD,
  Subcellular localization annotation: CTP_CleavageSite=51; ConfidenceScore=5.29e-01
MAETLDMTLDDIIKNNKKSNPSSRGARRSRGVSAPGGGTGGVGPTRRPFKRAGNRQAPYQPPKAPDAAWQHDMYPAVAAGGGGGGGRVSALETGAKLYISNLDFGVSNEDIKELFSELGDLKRFSINYDRSGRSKVQMPSYSLLLVSYIHLTSRSLTFVVPRTSQGTAEVVFARRSDAVAAVKKYDNVQLDGKPMKIEIVGTNTPAAAAAHPVPNGGHARNAARSAPKDAAPAGMSQHRTHQRGGRRAAGSGGGRRGKERSKPKSTEELDADLEKYHADAMQTN

SEQ ID NO: 72133 - protein, 652 aa, Zea mays
  Coding DNA Sequence Number=SeqID_28758
  Gene Ontology: Mol. function=nucleotide binding; Cellular component =cytoplasm; Biological process=response to stress
  Homolog annotation: Hit_ID=P09189; Match level="QueryCoverage=100%, HitCoverage=100%, E-value=0.0, Identity=81%"; Hit description=Heat shock cognate 70 kDa protein
  Pfam annotation: Domain name=HSP70; Domain location=10-619; Score =1416.3; E_value=0; Accession=PF00012.11; Description=Hsp70 protein
  Pfam annotation: Domain name=Hydantoinase_A; Domain location=135-391; Score=-114.0; E_value=0.069; Accession=PF01968.9; Description =Hydantoinaseoxoprolinase
  Pfam annotation: Domain name=MreB_Mbl; Domain location=8-389; Score= -237.7; E_value=0.00012; Accession=PF06723.4; Description=MreBMbl protein
  Pfam module annotation: Pfam domain module=HSP70::Hydantoinase _A::MreB_Mbl; Domain location=10-619::135-391::8-389
MAGNKGEGPAIGIDLGTTYSCVGVWQHDRVEIIANDQGNRTTPSYVAFTDTERLIGDAAKNQVAMNPTNTVFDAKRLIGRRFSDPSVQADMKMWPFKVVPGPADKPMIVVTYKGEEKKFSAEEISSMVLTKMKEIAEAYLSTTIKNAVITVPAYFNDSQRQATKDAGVIAGLNVTRIINEPTAAAIAYGLDKKATSTGEKNVLIFDLGGGTFDVSILTIEEGIFEVKATAGDTHLGGEDFDNRLVNHFVMEFKRKHKKDISGNPRALRRLRTACERAKRTLSSTAQTTIEIDSLYEGIDFYATITRARFEELNMDLFRKCMEPVEKCLRDAKMDKSQIHDVVLVGGSTRIPKVQQLLQDFFNGKELCKSINPDEAVAYGAAVQAAILSGEGNQKVQDLLLLDVTPLSLGLETAGGVMTVLIPRNTTIPTKKEQVFSTYSDNQPGVLIQVYEGERTRTKDNNLLGKFELTGIPPAPRGVPQINVTFDIDANGILNVSAEDKTTGKKNKITITNDKGRLSKEEIERMVQEAEKYKTEDEEVKRKVEARNALENYAYNMRNTVRDEKIASKLPADDKKKIEDTIEDAIKWLDGNQLAEAEEFEDKMKELESICNPIISQMYQGGAGAAGMDEDVPGGGAGNGGGSGAGPKIEEVD

SEQ ID NO: 72134 - protein, 91 aa, Zea mays
  Coding DNA Sequence Number=SeqID_28759
MALEAGARGELRPARAVAFYIELEYVEEDARDEGVEHQVPPPRRVGCRGTVVAAIRHWLGLIGGHRCRGSNIDRCGGELVEEGAWDEGVEQ

SEQ ID NO: 72135 - protein, 749 aa, Zea mays
  Coding DNA Sequence Number=SeqID_28760
  Homolog annotation: Hit_ID=Q10NA2; Match level="QueryCoverage=69%, HitCoverage=97%, E-value=0.0, Identity=79%"; Hit description=SLT1 protein, putative, expressed
  Subcellular localization annotation: CTP_CleavageSite=68; ConfidenceScore=5.59e-01
MQKQIKQGCASASPSPPLAAPPHAVSKPGTGQAAARGRLPFRSASPKRQTDELLQPSPSSNGPPPQPRVQGLQAPSGGGRGSPCWLRPHRRLALNSPRLRYRLPPSHLPHPLCSSIDRASPPPADSTTFDFFSFDLIVTYRSRRREGFLDRCSAGWWRRFVDLRAPGFLDLRSDSEERSAPCGGGGGGSAEDLGREATEGEQQADEERAARRTTAAAAAMGESLLTALSMDTTTAHHPHQGPFTFLSMDTASHDHFDLFLPPQGPFRRCLHAAAVAPPDINLPLTADPSPPPPASHDANVDVLDAGLGGPQHYDSDSPAAAGPVLAPAAAAATVIAVSHTKGSGSSVARKCVKRNDSIWGAWFFFTHYFKPVMSTDKGGKAKAATTGGNGNSASATLDAFLVQHDMENMYMWIFKERSENALGKMQLRSFMNGHSRLGDPQFPFSADKGFVRSHRMQRKHYRGLSNPQCIHGIEIVRAPNLAGVPESDLKRWMELTGRDANFSIPAEASDFESWRNLPSTEFELERLAAVVPTKSSSHGHHKRLLNGSGLNLSTQPSNHSSGDAMEIATICNKRRKDSSPSATEEDCSNSNSDKAQDMDVSHTFEPSWMNDFTGVMRHASGPVTAAKTIYEDSKGYLIIVSLPFSDFQKVKVSWKNTLTNGIVKVSCISVGRMPLLKRHDRTFKLADPSPEHCPPGEFVREIPLPTRIPEDATLEAYRDETGTGLEIIVPKYRVGPEEHEHLERIRYML

SEQ ID NO: 72136 - protein, 164 aa, Zea mays
  Coding DNA Sequence Number=SeqID_28761
  Subcellular localization annotation: CTP_CleavageSite=37; ConfidenceScore=5.13e-01
MTIDALTKTTRIRPVQRHGQARHGASQQHGRNPNLPRAGATSAPACSRRHKCALATCGTARTHPDVDESGHGEDAAPGSRLLARAGEPRSGATEDGCGLGGAGEAMAWHSLARVLPGGTGMTTARSVVAALAGCQALHARCYGEHRPDDDGAVQRGMSLLPVGP

SEQ ID NO: 72137 - protein, 158 aa, Zea mays
  Coding DNA Sequence Number=SeqID_28762
MKTLTTFYGYHPLDMVMHPLGLFPAEKRDDPIWCNRVSHVKDVWAMYPDLVGRITVQCMSALYRLQVERLSQRITTLEQQVEIRDNTIDVLENQLHDVQQEFEEANDHLDMHHLEMEANETESEGEEAPEELGPAPGTNAVASEMTPSLPLLRVDGSF

SEQ ID NO: 72138 - protein, 85 aa, Zea mays
  Coding DNA Sequence Number=SeqID_28763
MAGSAHAPWPRAPAARLAARLAAPLAARLAPGRARLAARLAAGAYEIDDGSGYDYDAGCQHCNHCSGEDEAVEGDFQEFQDYDEF

SEQ ID NO: 72139 - protein, 242 aa, Zea mays
  Coding DNA Sequence Number=SeqID_28764
MEWLMGARARCTARMLGAVADGRARGRMSGAGACARARADDGGAAMDSSWDPATESMGMSSGAGDDGGRRWRVPGIARPRAGARGGCRDRDRAEPWLRTPTLSLKSSRDLAYKTNHSQVFWCQRLNCNYTKSTVRNTVDYSGQEKLFGKQTTRGPSGPLRRTVRDTTLTLTRNYKSWISPTKSQTVQLQRADRPAIIHGQSAGEDLVQPEGDKLSKRNYIAGADRPGPRADRPRGVTEADSR

SEQ ID NO: 72140 - protein, 227 aa, Zea mays
  Coding DNA Sequence Number=SeqID_28765
  Gene Ontology: Mol. function=nucleic acid binding
  Homolog annotation: Hit_ID=Q8H642; Match level="QueryCoverage=76%, HitCoverage=81%, E-value=2e-54, Identity=50%"; Hit description =Putative RNA-binding protein
  Subcellular localization annotation: CTP_CleavageSite=75; ConfidenceScore=5.04e-01
MADAYWRYAAAAPRQQQQQQQPPPSAGGGVAHPGMGGGAPQMAPAGGQQQPMKRPRPTEFSDVPGAPDTAGYYPRDEERAGYRAARDTESLNASYERFLRTGSANAYVELQQIQSFGGGHAGEPIRPAVGGNAAYPVDDRSMMAARDIFRPFVGFREVRLVNKEPKHPGGDPIVLCFVDFAEPTQSAIALDALQGYKFDEHDRNSPNLRLQFARFAGPKGNSGPGGR

SEQ ID NO: 72141 - protein, 264 aa, Zea mays
  Coding DNA Sequence Number=SeqID_28766
  Gene Ontology: Mol. function=carboxyl- or carbamoyltransferase activity; Cellular component=ornithine carbamoyltransferase complex; Biological process=amino acid metabolic process
  Homolog annotation: Hit_ID=Q8SA97; Match level="QueryCoverage=53%, HitCoverage=23%, E-value=1e-15, Identity=40%"; Hit description =Ornithine carbamoyltransferase
MAPPIDVVGPCPGLGDVEAPPRSRSSPSSEAEVESEPPGRARRRPSAEVRAESEPWVGRSGVRRLPGLSPSPSHGVGRSGPHSVEWHSSRSGAGGAVLLSDRSVERRSDCGHFGSVDQRACVRIKLCADGGYQLRIRSLEALLEVWIPASPIYRSVNHRRSLTELVASQGLGIMSSGKKMSVVVIMFMAALLLLLLATVESSSSSSAASSAMASSSSDQLGGLVALEAAGRKLLQIDLCGGRFCTIVDDCCITNPRCIANACTA

SEQ ID NO: 72142 - protein, 135 aa, Zea mays
  Coding DNA Sequence Number=SeqID_28767
  Homolog annotation: Hit_ID=A2Y8T6; Match level="QueryCoverage=25%, HitCoverage=5%, E-value=3e-08, Identity=74%"; Hit description =Putative uncharacterized protein
MTAPMPGRGAAAAGPRTVLITRDHVVLRHAEDHATPKTMALRAIHGTVALRVGGHLKATAARVEGLYAYTVLGEGGNHCDGAVDEEEELRAEWLPATALEMAASHSAGTLKSTSINGVKLYSLTGDRYVAPWVVA

SEQ ID NO: 72143 - protein, 510 aa, Zea mays
  Coding DNA Sequence Number=SeqID_28768
  Homolog annotation: Hit_ID=Q658I5; Match level="QueryCoverage=99%, HitCoverage=97%, E-value=0.0, Identity=66%"; Hit description=LMBR1 integral membrane family protein-like
  Pfam annotation: Domain name=FeoB_N; Domain location=253-376; Score= -34.4; E_value=0.053; Accession=PF02421.9; Description=Ferrous iron transport protein B
  Pfam annotation: Domain name=LMBR1; Domain location=11-499; Score =466.0; E_value=5e-137; Accession=PF04791.7; Description=LMBR1-like membrane protein
  Pfam module annotation: Pfam domain module=FeoB_N::LMBR1; Domain location=253-376::11-499
MGDFNVALVIVAAVVSVLVLLVSVYLLVNYQHPDDVNQAYFPKLVVVLGLTVAVLSILMLPADVANRQACRKAVYNGACSLTLPMRTLWLVVYIVDAVLVFLVIPFAMFYYEGDQDKSVGKRLRTALIWVVASADLLVKVDFTVRHLSSSVQTFPNSFSGFSSGQPCISPLTRQCAASTAPANSQTTWTMRATFPEYVVALTTIVGSVLFTIFGGVGIACLPLGLIFSFVRRPKAVITRSQYIKEATELGKKARELKKAAEALHQEERSGNKGRKWRKNVKAVEKELLLLEDDMKALEEMYPQGEQVLSLTHVMAQAEATWAFTVLGYIGKLIFGVVGLIVSIAWVAHIVIYLLIDPPLSSFLNEVFIKLDGVWGLLGTAAFAFFCFYLLIAVIAGEMMLGLKLVFITIHPMKYDINAFLKCYVLLSGKAVIVIECSYWHVLNLTCVIQFCATAFAYYAQATAAQEIFGHTLQSLRGIKYLYKYNVFQYGFVALAILTLFYYAIFVFERF

SEQ ID NO: 72144 - protein, 599 aa, Zea mays
  Coding DNA Sequence Number=SeqID_28769
  Gene Ontology: Mol. function=protein binding; Cellular component =nucleus; Biological process=regulation of transcription
  Homolog annotation: Hit_ID=A2Y8T0; Match level="QueryCoverage=91%, HitCoverage=94%, E-value=1e-134, Identity=66%"; Hit description =Putative uncharacterized protein
  Pfam annotation: Domain name=GRAS; Domain location=210-535; Score =175.1; E_value=1.8e-49; Accession=PF03514.5; Description=GRAS family transcription factor
MEVVLGSAARRCLASTAVAAARALLQRMSTAQRFDILPYGFSKRASNRGDGSGAAPRVAAPDARSGGGGGTCSFRAHPAPPVTQAVSWGAKPEPGGNGAAWERSRAVKRAHEEDAGEEYGGPVVRAKRTRMGGDGDKVWFHRSIAGTVQAAGSGDGHEAEEEKAFLVPSAAAFPHGMSAAAAGPSLAVAKKEEFSKSPSNSPASSGGTDGGSSAVPWPEQLHAQNGAAARVEAMELVVALTACADSVAACNHDAANYYLARLGEMASPAGPTPMHRVAAYFAEALTLRVVRMWPQVFDVSPPRELTDGAVAADDDATALRVLNAVTPIPRFLHFTLNERVLRAFDGHDRVHVIDFDIKQGLQWPGLLQSLATRVAPPAHVRITGVGESRQELQETGARLGRVAAALGLAFEFHAVVDSPRGRPPVDAPREARRVRRRELRPRGAPLAPRRDRRRGGRLPRAHAQHGRRHPPPGRARGRPQLRAVGGAVRARAAVLRRGVRRRGGGWAGGRQPREGQGGGDEGGFQNAGIGDREALQGRMIARMFAPGNYSVQVQGDGEGLTLRWMDQAMYTVSAWTPVSDGGSTVSASVSTTASHSQHS

SEQ ID NO: 72145 - protein, 46 aa, Zea mays
  Coding DNA Sequence Number=SeqID_28770
MAMMGSTSEKMYLCQVKKQQTFVASVQRWYPKKRTKTKAAGGQALR

SEQ ID NO: 72146 - protein, 113 aa, Zea mays
  Coding DNA Sequence Number=SeqID_28771
MSGRVRGLGKLHGLLVELAEALARLEDGWSGLATVAEALAAMAGGIELAGAKGKRPAGAAVALTKAVMASANVGGTGGGFGVASLPREVADVCSQFVYSFTIRDPYIVPVTEF

SEQ ID NO: 72147 - protein, 226 aa, Zea mays
  Coding DNA Sequence Number=SeqID_28772
MDPLDVQGRKASAAPSFVLDATKMQELLDAAAARKQTGDAAPSVAKRTGMGKAATAGSTRLRHAMEADFQGAGTAEGRQRPGTALGLKRKVAAVGVLGPRKNDLTNYWALGLFVRPFTSLVDPGDIYPPQAPDLWVDLEVINPKIQGPENDFLLSSLALITRPTKVWFCACALEVGILDCKTPDFIGCTGGAPNGCSPRPLSRFWKIIYSKVFFQRLSPFALLHLG

SEQ ID NO: 72148 - protein, 154 aa, Zea mays
  Coding DNA Sequence Number=SeqID_28773
MRKKHGFMPKIHTCSGPDSHNEQTSAFKVPLQTELRFRPRGYEQPPHRRACGATSSGRLASDLCSSSDGPRTDATAGRLSFASPFKGREPDIKAKEPEELEEEVANRLVREVELRLTSLSATARMMKILEAEGGAQAAARLASPHHRTGGHRLG

SEQ ID NO: 72149 - protein, 342 aa, Zea mays
  Coding DNA Sequence Number=SeqID_28774
  Gene Ontology: Mol. function=cysteine-type peptidase activity; Biological process=proteolysis
  Homolog annotation: Hit_ID=Q8S456; Match level="QueryCoverage=95%, HitCoverage=49%, E-value=1e-120, Identity=76%"; Hit description =Putative uncharacterized protein 163K15.6
MRSVHRPPSNAKRLTIESSQEVFSVDISRRTRSSSSAQHADNPHNQQQIDPHPLPVTRVRRKALACPKLNIRCIPYDVIVSTWIMSDRHRDTVARLRFQSIFDLRTNALESMSLIRWLMDKLDPDDMTIRSGAGKELKITKETVLLILGLPSAGSGRDFTDWYGQVDAASKLRRDLNICKEEFDVVKLQDKLVIENDDELSIRCFFLILFNRLLFPSASWGITNNEVLMTTNMDRMAEIDWCQLVYTDLCDAASRWHNMNRTNITATVYGCSLIILIYYLDHLHHPASPENKYGTPRIKYFDNETIRDLARGDRRGPRQTGEPFGHAEMLKFQYMLTVITGI

SEQ ID NO: 72150 - protein, 165 aa, Zea mays
  Coding DNA Sequence Number=SeqID_28775
  Gene Ontology: Mol. function=cysteine-type peptidase activity; Biological process=proteolysis
  Homolog annotation: Hit_ID=Q8S456; Match level="QueryCoverage=86%, HitCoverage=22%, E-value=4e-51, Identity=56%"; Hit description =Putative uncharacterized protein 163K15.6
MAVRRGILANGDKPPTPSSPPIYDPVSTPPVRSPDNQHHDQPTQVPTDDNKISEREGQNPVVQDPPTYGAPKFDRTSLTEGFIDCIRDDDQLYNPDTIINTLILNVNVGIMVPMLRRSHWTLYAINFQLRRIYILDSNPYGPSLGGTTWKHIHNDQVMINGTKLP

SEQ ID NO: 72151 - protein, 51 aa, Zea mays
  Coding DNA Sequence Number=SeqID_28776
MASKRTRGDSDARRQITGGPERNALRIPYASSHRGSNPSLKLLPTNAFLAF

SEQ ID NO: 72152 - protein, 333 aa, Zea mays
  Coding DNA Sequence Number=SeqID_28777
MTASKKQGPGKGDTPKRILPREGTRLRASLLIRGLKAGPSEGFDSRLRSRGPYTHYWSEVRRPAPRKGSTTASGYSGSAPTTDQGFEGWPPKESHQREASSPLTPSPGDRVRQITRSSPETPCSAPIEGNMALSPLLLAERRRRGRLGGCSRKPSSGQTVDSVNIPARELGTRPYTRATASSHEGTTRPAEALREALRPRRSETTPSRPWGLQPAGALARTHRNKTQPRKAGPLAKKCDESLQASANTPFEARGLLSGTIIRGTLKAPNSQLGSDSGKVPEDGELRSARPRARTRAKSRKTANSAPPNPGLGLGQSPGRRRTPLRPTQGSDSG

SEQ ID NO: 72153 - protein, 209 aa, Zea mays
  Coding DNA Sequence Number=SeqID_28778
MSTSELIMISGKGGRKLTDILRWPGALEDGSTQGMSEQYTIPAKVKTKAITTKDTNTVPSQLGRSKAPSDHQPQEAEGDEASEEDSTHKQEGCSACSVERIRGTQLGPAKLQYGAARGKVGWTLRIALEFDELLGPEPASFSRRPIPLVVLPWPTKGWPCEIIGPKPLVRPSCLLVDPGDICPPKAPKLGVDFEIISPKILGPAREFVA

SEQ ID NO: 72154 - protein, 29 aa, Zea mays
  Coding DNA Sequence Number=SeqID_28779
MASRSSRSQIYQLINDRFYVFLGQMKYFI

SEQ ID NO: 72155 - protein, 162 aa, Zea mays
  Coding DNA Sequence Number=SeqID_28780
MTVDGDSQSSDELVYRPNRSTTDVLLWPKPNSRPTNGFPSLNFTNGYPVCSGHALTGDDQTTKVSHGDVVNVPRYVAQGREAAVTDELIQSGRGKTWYGGREDIEQAILSDSPVIVIMPTFPNRQTPQTVVVTLHRHAHLETSGQENTMGEEEETSPSVMSS

SEQ ID NO: 72156 - protein, 88 aa, Zea mays
  Coding DNA Sequence Number=SeqID_28781
  Subcellular localization annotation: CTP_CleavageSite=68; ConfidenceScore=5.28e-01
MAMMGSTSEKMYLCQVPNFGFEMIKLRPGGQTSPRRRPVANANRAVAIVLRGPPRSPVVLHRKAAQARLASVPACVSSIITTLTISVK

SEQ ID NO: 72157 - protein, 275 aa, Zea mays
  Coding DNA Sequence Number=SeqID_28782
  Gene Ontology: Mol. function=metalloendopeptidase activity; Cellular component=mitochondrial inner membrane; Biological process =proteolysis
  Homolog annotation: Hit_ID=Q10Q21; Match level="QueryCoverage=84%, HitCoverage=38%, E-value=1e-102, Identity=81%"; Hit description =Mitochondrial processing peptidase beta subunit, mitochondrial, putative, expressed
  Pfam annotation: Domain name=Peptidase_M16_C; Domain location=16-190; Score=48.1; E_value=3.1e-11; Accession=PF05193.12; Description =Peptidase M16 inactive domain
MSHNCGGTCWLAPCKSFTKSPACFHSCLEKKVYETPVTPAVSVRIIDDDMPLAQFAVAFNGASWVDPDSVALMVMQSMLGSWNKSAGGGKHMGVYRPDPHFPYSVTDHIFAMLPCFTVYNSELVQKAAINDIAESVMSFNMNYKDTGLFGVYAVAKADCLDDLAFAIMHEMSKLSYRVTEEDVIRARNQLKSSIQLHLDGSTAVVDDIGRQLLTYGRRIPTPELFARIDDVDASTVKRVANRFIFDQDVAIAAMGPIQGLPDYNWFRRRTYMLRY

SEQ ID NO: 72158 - protein, 150 aa, Zea mays
  Coding DNA Sequence Number=SeqID_28783
  Gene Ontology: Mol. function=oxidoreductase activity; Cellular component=extracellular region
  Homolog annotation: Hit_ID=Q75J71; Match level="QueryCoverage=39%, HitCoverage=10%, E-value=1e-15, Identity=69%"; Hit description =Putative L-ascorbate oxidase
MAVLVEVNAADAGDEVGDVGGRGFGDERGGRLRGHQRGQPPPHPGPVRPAAAGFGDEVLARQIDAGKGVGRPAGVLINDKGGKDLEAVPAFTFEAGKTYRLRVCNTGIKASLNFRIQRRSHLPSSRVGDSEEGVLGGRHRVDLGDAEEDG

SEQ ID NO: 72159 - protein, 53 aa, Zea mays
  Coding DNA Sequence Number=SeqID_28784
MVGTSAVTARRQPGSVEHCTVQDLVDGATWPTTLPPGWTVEWDVASAGEEHEE

SEQ ID NO: 72160 - protein, 52 aa, Zea mays
  Coding DNA Sequence Number=SeqID_28785
MAEALAATASGIELAGAKERMCSREFGTTLIFGSLGFEVRKTENTDDLWEEV

SEQ ID NO: 72161 - protein, 307 aa, Zea mays
  Coding DNA Sequence Number=SeqID_28786
MTTGSWLCVERELVVCIFLIKDPKWISEAAAKCTSLPEGAKKQVVWQRLNNIEECPQYQEPPRHKISVWKHLAASHDQATLEANTEEDKKMCSRPMQKKVFQARERMKTRQPRLSMKEASEGTPFNFDAQEMVRFAHASSSSMAELVDVKLTGIPEHAWEPDDDDPDDQDPQQRRMGAEENLGQGAWIFPQSLLWAGAEESLGEGAWFLPLPDAAGTLESLCHGSPHQDPYDETLTFDGSLGSLGPSSPHHNSLDGLLEMANLNSPHHLSLILKDTMKGTLGLNRLSSPPQAQPKATLERLVSWLAP

SEQ ID NO: 72162 - protein, 52 aa, Zea mays
  Coding DNA Sequence Number=SeqID_28787
MAEALAATAGGIELAGAKERMCSREFGTTLIFGSPGFEVRKTENTDDLWEEV

SEQ ID NO: 72163 - protein, 82 aa, Zea mays
  Coding DNA Sequence Number=SeqID_28788
MVVMGSTSEKMYLCQDRTDVGLMIEDLLTGHMPRHAMGVGPSGAANGGPDGELDLFGAPPSMNLADERSPDAGSGAAKDEDN

SEQ ID NO: 72164 - protein, 235 aa, Zea mays
  Coding DNA Sequence Number=SeqID_28789
MMQGDANVKVQVSARTTGMETIGSYGENRTNCSSSSDFLNRLGIRLAALLSNPCTKVNKKTSSPLSSLAIPRRSRRVAGVGVEFNMQDLGKRATKQLWQPCTLLEKLRASIKRLLMHMQSYFLVTPGFGRQTKCGPLTEISLGSVPLAADYSRARIRTGRRDSCLECSGYPWGENEEEVVVEEEGATPPPPPEDPPVGNCFYFDICGAEPDSPTTQGKPRCICHLLAILKSFSLA

SEQ ID NO: 72165 - protein, 26 aa, Zea mays
  Coding DNA Sequence Number=SeqID_28790
MALITKSFRQILKQRKGSDYKSRFKK

SEQ ID NO: 72166 - protein, 152 aa, Zea mays
  Coding DNA Sequence Number=SeqID_28791
  Subcellular localization annotation: CTP_CleavageSite=88; ConfidenceScore=5.22e-01
MAGSSGYNTGQFGPVADRPDMSWTVRYLMSDRLDMSRTVSAPCSARAPHFHFLPRCRRPLAHRLQCATALPAPVPVLPDAACFQAVMRTMQPAGHAPTAHLLAAAVLLGFLQQQQIGGDFSPLGPRIPDGDGYGEKISPRAGTGTGNEEFYF

SEQ ID NO: 72167 - protein, 140 aa, Zea mays
  Coding DNA Sequence Number=SeqID_28792
MTEQGESSEAKTTSEVAGGCNCSGDGRCRRSCIGRGEGCQPAVLHGARAARGRGATAGMDMFRAAHQRDGTARALAGTDRAPSVGTRERDNGSMEMVSTGRIRWVWMPDGVGRRDSAMASRWRDYWLDLQRHARPLAGGW

SEQ ID NO: 72168 - protein, 144 aa, Zea mays
  Coding DNA Sequence Number=SeqID_28793
MACAGGWFVVSSGLAGSQNSDDGFSNAITPPELADPTGAHRAPCGWPSTSSNDPRDGIFELESVLQQEKPRIIRRLIQRRRCEQYSRTVHADLASAFASHLYFHLLPSCTSFITFVQKLLYPNGNNASKDEGLYRLTFSVLPCS

SEQ ID NO: 72169 - protein, 81 aa, Zea mays
  Coding DNA Sequence Number=SeqID_28794
  Subcellular localization annotation: CTP_CleavageSite=62; ConfidenceScore=5.10e-01
MKVMVVAKAWDETVGTDPGAKHGNRPPGKALRGGTDSPWHRAGRSTTWRRSDSSFAHFRTVRAWGRTVRDSTEDLLLREEP

SEQ ID NO: 72170 - protein, 64 aa, Zea mays
  Coding DNA Sequence Number=SeqID_28795
MDNGQLAESERVADEDPEKQSVGGDEDDGFGYDYGNGCPRCNHCSGEDEVVEEDFQEFQEYDEF

SEQ ID NO: 72171 - protein, 44 aa, Zea mays
  Coding DNA Sequence Number=SeqID_28796
MVCSDWDGGFLTLVSPSVSAGESDMPQAARWCCACLGLGTPSLT

SEQ ID NO: 72172 - protein, 95 aa, Zea mays
  Coding DNA Sequence Number=SeqID_28797
MGYRTFQFGLPFRLSEILKLRNQGNKNIADFVRLFIIKQFLWRFEPLPIPFHGLHLLPEQAYSDASQSAEVVKDRDQLTKHELPSPPKKYSFLQA

SEQ ID NO: 72173 - protein, 277 aa, Zea mays
  Coding DNA Sequence Number=SeqID_28798
MTCGTQPPRRGGENLGACWRRLNPQRLRTQVERVALKRGATPLEGHHVFALPSCIVSFHLLSPWAGDARNPSVLSSEERNFVEVGTFQPSFGFKDFHHAARLHPSAGGHPRRIRPEVIAAASRPPGAEVVVVAAAGASDDKPFVGLLLLRRPPRTKTRLVDYLNRFTERELPRAKETSESGGPPTPSPFEARSDPAEGVVDAEGAAAPFGCRRPSLQDQYPDSFVGNRIVCAGESCFSRKAMSEKVMSEENFDAEGVAPLLAPEGGSGFSEARLTLP

SEQ ID NO: 72174 - protein, 440 aa, Zea mays
  Coding DNA Sequence Number=SeqID_28799
MRHASQQLKHAADFADHVASGALTSEFAAKIERLRAQHTDAVREKSAAENKSRRLTERLDAAEAEKGDLRCQLAEERRDANKAIADAQAAQAEAKLARAEASIARQRAEELEARLGGLHNRVDKIEASTRAEVERTHAHFVDAYRELGARTAAFEVPDQEVGLCFLEWLQEELGVLPTIVMGLMSFASLVTCEGAVNALSREGCGHFEVFDQSDEGFEREIFQVKDPVLKRSAGALFDRMWGPHGRETVRERSDRAIDQMAHDKDVEDLGDLDSTLPEASGVELALPYDAGKGPSATPALTALTGAGEDPMPAPALTGEDASKAMGEPAAEDPAAAARPLQVPAFGPAQATAANNTNFVAASTIVPADDSLFGSVSECFESDGESGSSFPWTEESSDEGLDYFAALDVAAAETSPHVEGARDLPSASTREMGIIPKVEPM

SEQ ID NO: 72175 - protein, 135 aa, Zea mays
  Coding DNA Sequence Number=SeqID_28800
  Pfam annotation: Domain name=GRP; Domain location=34-126; Score= -24.5; E_value=0.025; Accession=PF07172.2; Description=Glycine rich protein family
MGKNNKRKREPTPPSEEFGDSEYSEEEFPSESEGSPAPIPQGLAAEVWTYIRAVERSGLEGSDESEFSSDEEDSDGGEDEDDDDDDGDDDDGGDGDGDGGNGGGGRGGKGSTRGGRSTGSTRGGGGKGSSGKASG

SEQ ID NO: 72176 - protein, 50 aa, Zea mays
  Coding DNA Sequence Number=SeqID_28801
MAHRTVRCATGKTLPWTSLAPPGRGCTGQSGAHRTVRCTPDSPVPLSQKP

SEQ ID NO: 72177 - protein, 179 aa, Zea mays
  Coding DNA Sequence Number=SeqID_28802
  Subcellular localization annotation: CTP_CleavageSite=51; ConfidenceScore=5.39e-01
MGGSEPGSFAEKDPFRGEAPRAPSCQRRRVSRRGVNATGRVVGEAPVARVRSSSRNGSRVHRLHAVRGGSLSVSGWDVSMADDVTAAPALSATAITAGPLSVALTDAPATGAPVARRVGLGSQAGVSEVGEARPSGTVAYRLHGCPPLLPVGLGGNGGSPGRALERVGEDSARGVWGRP

SEQ ID NO: 72178 - protein, 184 aa, Zea mays
  Coding DNA Sequence Number=SeqID_28803
  Homolog annotation: Hit_ID=A2X9S2; Match level="QueryCoverage=61%, HitCoverage=97%, E-value=2e-28, Identity=57%"; Hit description =Putative uncharacterized protein
  Subcellular localization annotation: CTP_CleavageSite=79; ConfidenceScore=5.63e-01
MAVSSPRRALIAAVSLCFLLGAASSVRTATFSPSQQQNLAEDKSRLGSTPPSCRNRCSACNPCMPVQVTTVPGLGRGARATDVDDDTVAVAAGFSRYSNYKPLGWKCRCDGRLEVSPPRPPVRMGLGGALWRQLNGRVALVGLSSGGDDDDAAAAHPIRAHGPERMSAWVLPEPTLHTFLCHYG

SEQ ID NO: 72179 - protein, 308 aa, Zea mays
  Coding DNA Sequence Number=SeqID_28804
  Gene Ontology: Mol. function=kinase activity
  Homolog annotation: Hit_ID=Q6QP54; Match level="QueryCoverage=27%, HitCoverage=30%, E-value=2e-25, Identity=74%"; Hit description =Putative kinase
MPESGEREMGIPRPSCSSRAQVGRKERIQVYNGGVAECYVSSGGELAPLSTRQCVIRRDLGTQLVWCRGCQRSDGAWRRDNCRSGWVLADVPPASVRELIAAVVTGLAGRHHCLSGGASQMGHRSCSLRPESARGRVMMALPVDVAGLCPRSGDVEAPPKPRSSLSFMAEAESEPFGRARRRVRRLLGLSPSPSPGSGEAEFVVFRGLSPSPSPGSGEAEFVVFRGLSPSPSPGSGEAEFVVFRGLSPSPSPGSGEAEFVVFRGLSPSPSPGSGGAEFAVFRGLSPSPSPGSGGTSYGAFDRAWLPLR

SEQ ID NO: 72180 - protein, 348 aa, Zea mays
  Coding DNA Sequence Number=SeqID_28805
  Subcellular localization annotation: CTP_CleavageSite=72; ConfidenceScore=5.41e-01
MSSRSLMHRVFPPSKPPDGGCPPSLCLVVGGTQLRGSWYLSAIVRLQGFSSRSPAAPLHRRLPKTVTSGLMMGESEPGCGLCPSLSLKDFHHQGWGGEYAELRSAPAWAARAWLSDASGFRAARGAGVCHGSWKRFFRRCDSQGWPRTDLQLYGLLPVLASRVLGMGGGLLAAASALRTSLLLFGPPGQKSSSSPLLGRATTSRSSVFCCSAGLSPVEWGYLSVDYLNRFTKHESPHVKVTSEPGCPSAGPMPELISQGPRSGWRPREMVGRGPRGNRPSRLLGPDSRRSPWQRSPGRGDDVVLRSGEPRTASPSEARSGLAGGVVDAEGVVAPFQRQDPSLQGQSVL

SEQ ID NO: 72181 - protein, 60 aa, Zea mays
  Coding DNA Sequence Number=SeqID_28806
MPMDEQRANLQQSQGAVSVWGTGLSGGAPDSVRWCTGQCPVRQAASAKEAALGNWLTAFG

SEQ ID NO: 72182 - protein, 168 aa, Zea mays
  Coding DNA Sequence Number=SeqID_28807
MTGAPSGMSAMVVKFSLPCLTCTFCLLPWFWVGILSLPLLVSGAILGIMSGVTTSETPVVIGLTVLLLLWLIVPLNWKLAVGPNYVETVTELSAEPPPELVPLILVGVCMIFGILAQVIEGPYISIKAVLCPGEQRWLGTEELLISGCCGVTLMITTTIVLRWWLTLS

SEQ ID NO: 72183 - protein, 200 aa, Zea mays
  Coding DNA Sequence Number=SeqID_28808
MARVACTLRGKRLDGGVSVLSVGVNPLASRHEGSSSGSNDPIGDLEAKVEQLQTELRHRNRVWAQDGQRIAELAADVRRLQDELSEWDLAVDWAVKSRSIAWDREAKARARVTELSAALDNLQVYSNTLHEDVHVLYARLHPDVPFDAAMGAGPSGTTNEGHDEELDLFQPPPSMNLADERSPVAGNAAAKDNEDYNRIV

SEQ ID NO: 72184 - protein, 105 aa, Zea mays
  Coding DNA Sequence Number=SeqID_28809
MVGANVGDLFSNVVCQEQGNSIVNYYGPSSSEASSPHGYNAHQTKVFVLRNFGRRREDFCIISPKVFFVLRTFGGEEDPQQYIWCSRGDAGNMQDFEEFQDFDDF

SEQ ID NO: 72185 - protein, 412 aa, Zea mays
  Coding DNA Sequence Number=SeqID_28810
  Gene Ontology: Mol. function=oxidoreductase activity, acting on the aldehyde or oxo group of donors, disulfide as acceptor; Cellular component=mitochondrial oxoglutarate dehydrogenase complex; Biological process=metabolic process
  Homolog annotation: Hit_ID=P0AFG5; Match level="QueryCoverage=100%, HitCoverage=52%, E-value=1e-131, Identity=99%"; Hit description=2 -oxoglutarate dehydrogenase E1 component
  Pfam annotation: Domain name=E1_dh; Domain location=1-271; Score= -110.5; E_value=0.0012; Accession=PF00676.11; Description =Dehydrogenase E1 component
  Pfam annotation: Domain name=Transket_pyr; Domain location=266-412; Score=80.5; E_value=5.3e-21; Accession=PF02779.15; Description =Transketolase, pyrimidine binding domain
  Pfam module annotation: Pfam domain module=E1_dh::Transket_pyr; Domain location=1-271::266-412
MIRHAGNSGTREVVLGMAHRGRLNVLVNVLGKKPQDLFDEFAGKHKEHLGTGDVKYHMGFSSDFQTDGGLVHLALAFNPSHLEIVSPVVIGSVRARLDRLDEPSSNKVLPITIHGDAAVTGQGVVQETLNMSKARGYEVGGTVRIVINNQVGFTTSNPLDARSTPYCTDIGKSGDAGRCPEMVNLYRDALDAGDCVVAEWRPMNMHSFTWSPYLNHEWDEEYPNKVEMKRLQELAKRISTVPEAVEMQSRVAKIYGDRQAMAAGEKLFDWGGAENLAYATLVDEGIPVRLSGEDSGRGTFFHRHAVIHNQSNGSTYTPLQHIHNGQGAFRVWDSVLSEEAVLAFEYGYATAEPRTLTIWEAQFGDFANGAQVVIDQFISSGEQKWGRMCGLVMLLPPRLVGQGPEHSSARLE

SEQ ID NO: 72186 - protein, 334 aa, Zea mays
  Coding DNA Sequence Number=SeqID_28811
  Subcellular localization annotation: CTP_CleavageSite=64; ConfidenceScore=5.48e-01
MGRGNGHTCSTVADTSGSRPFAHRASQPDFTGGSRSTSPDFGLPPPRVDRANRPDSSPPISIPACARGPANSDHPRRRPAHRCDPRDLPYVLDRFTGAISPPMNSPTPASGGDSRFSSDFLSRDGFPSILWEVLNSAGYPTPPLYTVQLYEEHRVPRCRVWLTLEAHPLQPGWRSLDSETIGLRTDDTVEAAAMKTLTTFCGYHPLEMVMHPLGLFPAEKKDDPMWCNRVSHVKDVWAMYPDLVGRVTVQCMSALLKGKCALGPFLSILVIECQHKCLNVNLCPWMNKVQIKSKAKTQLCLAHRTVRWCTEQCPVRQAGSGEVAALGNSPATYG

SEQ ID NO: 72187 - protein, 125 aa, Zea mays
  Coding DNA Sequence Number=SeqID_28812
MRKWARPSPLLLVLLSCRSNIPLDRPTRWQGGRPSHTINHFLNGTCKNYATSKAEYTNTQLDLTVTALVPTIASMGDPVSGRMRDKVRVRLQSEFTTLKVYDLLELNKVDFTYVRPLGGILGKLG

SEQ ID NO: 72188 - protein, 144 aa, Zea mays
  Coding DNA Sequence Number=SeqID_28813
  Pfam annotation: Domain name=SlyX; Domain location=28-88; Score=-9.3; E_value=0.074; Accession=PF04102.3; Description=SlyX
MKVMLAESVQDSKNGSGFTGEKDLQVERLSQRITTLEQQVEIRDNTIDVLENQLHDVQRELEEANDHLDMHHLEMEANEAGSEGEEAPGELGPAPGANGTTSAMPPSHLGSVAGITSRFPRHLPPAPTVQELMAQQNEILRQLL

SEQ ID NO: 72189 - protein, 411 aa, Zea mays
  Coding DNA Sequence Number=SeqID_28814
MEETHLHVFDAFCPRQSMLTRAPACPAPRPSQASAMARARAYKTLPDLDCTLPRTLKPHRSLARRRLPVRSESAAAQSLCHRRPASGAIPNSVQPSEKTVHTSVRLPERGIGVCFAGEASPRSPELSTPPEYVDRVNHSTILRFLVHTVAPLPREAHHALGLNQFAVVWPVYSPPTRTPACTRGPGNSGHLRRQAVPRRDRQSLPEPTPPFAGPPSPPGAGYATPPQYAVQQFEKHRVPRCRVRMTLEPHPLQPGWRSLDSESFGYRAEDTIEAIALHGLTTFCGFHPLELATHPIGLFPAEREDDPMWKDRVEHAKDIWAIYPGQTAHLTVRCMNALYRLQVEQLSTDIQELEELVGTRENTIEVLEDQLINTQQQLAEANEHLDMHHQEIQDQEANEDVDIEGGDEPAS

SEQ ID NO: 72190 - protein, 170 aa, Zea mays
  Coding DNA Sequence Number=SeqID_28815
MAPKRASSKAAPSVDESAKAALLAEKKGKALVDTIHQETCEDDALSKRQRNEQPTPEGSLRTYSFGGQPQLPPGFAPPKGADATEDGEVIGVSAEEQLQLRALRIKNCNLQKQKEILEAKRQRVSRRPSADPSSRTPQHSKVSTTLTSEVPWRRTCKCHHGPPTSGRTYP

SEQ ID NO: 72191 - protein, 219 aa, Zea mays
  Coding DNA Sequence Number=SeqID_28816
  Subcellular localization annotation: CTP_CleavageSite=51; ConfidenceScore=5.43e-01
MSSCSLMHRVFPPSKPPDGGYPPSFRLIVGGTQLRGSWYLSAIVRLQGFSSASPAVPPRRRSPETVTTSSWVGRSKTGCDLGPTLSFKDVHHPRWGGGRAEPALYLPRGFVGHPLPRRSRERALTGPAGGPDFDNAGLVDGGRRHLQRVGLVGLAPGGPFCRRAAAAPRAREDRSRCRALLGRRSCSGGGPAFAPAWHLHAEAGAPLVREDLSGDLLEG

SEQ ID NO: 72192 - protein, 231 aa, Zea mays
  Coding DNA Sequence Number=SeqID_28817
  Gene Ontology: Mol. function=binding
  Homolog annotation: Hit_ID=A2XLW9; Match level="QueryCoverage=28%, HitCoverage=3%, E-value=8e-26, Identity=90%"; Hit description =Putative uncharacterized protein
MNWSQTLGDYGKNFALPALKRLVEGHVFSFVIGRAFVTDVEKLRIHSKGRLLRVADVIGFFSDITELGICPGSNLLYAVEVLVTEGWYCFPSHNLAPSPCNAGSCFSAASIVAKYIKFITGQVLGLLLANDNGASGKYIRKHQLIVTGDMSGPWFVLGSDPWFVLGSDPWLVLHRSRAVELEHHRRRRWGGALLLELCRRWLPGLVALRIGEEAGRRWRCAARLDAASPVC

SEQ ID NO: 72193 - protein, 182 aa, Zea mays
  Coding DNA Sequence Number=SeqID_28818
MAHRTVSGAPGPYAIKPATLVNSLGALFYNSLDCPVPKVHNKPIKRPKKGSNKESKRQPEGTLVWRTGLSDCPVSHQTVRCASGATATSRATVNCNAFNARLRVQRTEHAQLAHRTVYRTCPVHHQTAQRPHKSELQWSNPNGWLTWLAHRTVSDHAKKEMVIGEKPGTSHGKAPSGSPPTR

SEQ ID NO: 72194 - protein, 32 aa, Zea mays
  Coding DNA Sequence Number=SeqID_28819
LAIRFRASRDRRSSVGDHVIKLSEFYEAEDPD

SEQ ID NO: 72195 - protein, 85 aa, Zea mays
  Coding DNA Sequence Number=SeqID_28820
MATARGIDPFLKAALPTRIPSVTGKVSTDELQGSHPLPRGLGPTCHGSGPETEEAKPLHTKQGPGKGIFHKGSFSAKEAGPEPSY

SEQ ID NO: 72196 - protein, 485 aa, Zea mays
  Coding DNA Sequence Number=SeqID_28821
  Homolog annotation: Hit_ID=Q8H6I5; Match level="QueryCoverage=12%, HitCoverage=5%, E-value=7e-07, Identity=56%"; Hit description =Putative RIRE2 orf3
MKPKGCTTVVRLHASCMAVRPFARCPRGRGWEPWSSSVETLPVTLGMRVGRAAFKKGSIPRAERDLVVVGALQPSLGFKDFHHPGWGGGRGELGPTSAWAGDPLLSPAFRGRASSSSAEEAFSSHAGKGKLLLPGQGAAIGPPPGRWSSRARAHPRPGFPAPGGRTTRCTPRGRYSCSGTVPFSFLWQERECLPVHFGAAAAHWCSVGGQVVAVVGAEAVVAIGEAVSAEEVASADETVSATCAPGLRLFGFNGWFSSPMRGRERGSFSSSVCPEAITAAVLPPETKVVVAADEAVAGEPPGVCYPAGPLAEEVQQRRLELGQVVRERDQSQSHTAEAESRAEVLGGQPAEAMERLAGVSARAGTLVENLVVRAQARCWRPPSRWRSFRPSRRPRLGQDLPRVETSPRVLLLPLPMSEPAGTVCLKVPRPSVSYFSQKVMSESKRHESRSGRKDFSEENFDAEGVPPLLAPEGGSGFAEARLILH

SEQ ID NO: 72197 - protein, 139 aa, Zea mays
  Coding DNA Sequence Number=SeqID_28822
  Gene Ontology: Mol. function=structural constituent of ribosome; Cellular component=ribonucleoprotein complex; Biological process =translation
  Homolog annotation: Hit_ID=Q10L93; Match level="QueryCoverage=67%, HitCoverage=41%, E-value=1e-43, Identity=91%"; Hit description=50S ribosomal protein L6, putative, expressed
  Pfam annotation: Domain name=Ribosomal_L6; Domain location=34-109; Score=95.6; E_value=1.6e-25; Accession=PF00347.14; Description =Ribosomal protein L6
MSSKYPGTNIQCRTLTDNIIVGVSKGFDKKLQLVGVGYRAAVEGNDLVMNLGFSHPVRMAIPEGLAVKVEENTRITVSGYDKSAIGQFAATIKKWRPPEPYKGKALITGGNEIWCWSSAGAKGLGLLTAQIELLNGLVV

SEQ ID NO: 72198 - protein, 218 aa, Zea mays
  Coding DNA Sequence Number=SeqID_28823
MARAEEVEDFGRLNSALPEAEADPVMAEAKVYPASLPETGEGSHTAPVSTVSGGGSPAATVPMVQDFGPAHATGTANFVAASTVVAGNESDGSTSKFSEFDDSGSSVLWTEESSDEGLDYFAALDVAEAETSPRVTDAEILPGPSVGRRRRRVVAKRRVSGFDGGRLRVGRADRQELLSSPVGASMGEGELRRLFEGEELRIMLFNYREMGIIPKVEP

SEQ ID NO: 72199 - protein, 194 aa, Zea mays
  Coding DNA Sequence Number=SeqID_28824
  Homolog annotation: Hit_ID=A9XLD3; Match level="QueryCoverage=61%, HitCoverage=14%, E-value=3e-07, Identity=32%"; Hit description =Putative uncharacterized protein
MASGALTAGVDAEVERLRAHHADAVREKSAAESKNRRLAEKVAALESERTDLRRQLVEERKEANQAITKAQTAQAEAKLARAEESLASQRAEEWEARFNALQARVERAEASTRMEVERTRKQLVDLYRELGAQTADFEVPDREAGLRFLEWLQEELQALPTIVAGFISYASLVTCEGAMNALSREGCSHYEVFD

SEQ ID NO: 72200 - protein, 86 aa, Zea mays
  Coding DNA Sequence Number=SeqID_28825
MEKYLVFNLLDYNHGSSLIIVIPPLPNGMKMHNMECTRMTACKSTGGKIRISNEEFPPPPAIELVVEEGPLHITVKDNPKDVEFDD

SEQ ID NO: 72201 - protein, 669 aa, Zea mays
  Coding DNA Sequence Number=SeqID_28826
  Gene Ontology: Mol. function=phosphatidylinositol binding; Cellular component=clathrin coat; Biological process=clathrin cage assembly
  Homolog annotation: Hit_ID=Q5QLQ8; Match level="QueryCoverage=18%, HitCoverage=42%, E-value=4e-47, Identity=78%"; Hit description =Cytochrome B561-like
MASLPRRRAALLDLLPHEHNLNRSATYARTTCTTPRGEDGWKSHGHQHDEAIAVEEGKNPCSELETHIDIGDKVLTEFITELGRDSTTVLEFDAKLKEKGADFPDYFVRTLLTIIHAILQPTASNPSSATIAEGPAGAESAKFPGLARPDDPDHARNLRLELERDADAAPPAPMRDDRDRRWDGRAETGTTAAAAVSMIKTGGTTIRIETNSMNAIGGSCFIQLFLLMLDCETLYINVFILIPLQRIARRVAAQLISGMHCKIYRDTVLGELNRHEPVPVFLKDTSSNGTFINWKRPRKIHPRSSLIMATLYHYHHLLMTELPKRLLLTYKPEESEDIPELASVEEENAPVEEPVLVPHVTEVVSPPKTEVADTGDLLGLNDPNPAVSAIEESNALALAIVPTASHSHKSFFHAFELDKLELKAVKDGSASYAALEKKAELYEKLSRGKVPDEEDKEKYYVDFFQKGFDRVYEPQIPECSHRATDGAEPVNDHEDSMPNAKPLGLGQAGTTIDRDEHKRFVREVHEEVTEARQKASKRSSLVGGWKRQASCFSPQQARTFVLERHRRSVKVDRRGDDKKYLGKVLARGVECDLALLSVENEEFWRGTEALHFGRLPCLQDDDDTDIIGCCTLKVDNVTCKDSIRYFNIVEIEELVYKAIKGFCAGISLI

SEQ ID NO: 72202 - protein, 106 aa, Zea mays
  Coding DNA Sequence Number=SeqID_28827
MGSLRGRMVVSPTWLYYHTEQKPQQDPPLLTSNFEGHGKIFGYLKGKPKIFTSCERNNRLLNSHNQEKEWRREHTFKLVIAGLQVSSKLLDLGGQLDGCLLLSGQV

SEQ ID NO: 72203 - protein, 25 aa, Zea mays
  Coding DNA Sequence Number=SeqID_28828
MGTNEHLDLDTGGSKRTLRKFTLGP

SEQ ID NO: 72204 - protein, 371 aa, Zea mays
  Coding DNA Sequence Number=SeqID_28829
  Homolog annotation: Hit_ID=Q6J9V9; Match level="QueryCoverage=26%, HitCoverage=35%, E-value=5e-09, Identity=46%"; Hit description =Putative uncharacterized protein
  Subcellular localization annotation: CTP_CleavageSite=48; ConfidenceScore=5.63e-01
MQAACNRAKWARPFDSNKPSMKVQAHASCNRTSQARRSNAVKIGPAVMAVTGGQEQRSRRQPSLCPIQGQRGSPLPRREDGAPVIRSSNGSRTRNDRLANYSPRRINSAAGQAAPQAGEASNRFAFAIMTASKKGPGKGDTPKRTLLREGNRLRASLLIRGSKAGPSEGFNGRLRSIGFHTHYWSEAGPRRVHSRLRHRARDDHGYIRYITKARAMLPRQGKPTPENLRLARGPPSSNGHTIGSLEAQSSPRSNLGHIATPTDQIAGAFNPKGSDMGSAPEDDELRLARPQGSDMSSTPEDDELRFARPQGSDSALGLNRRSPLRPTPGLGLSPSLSRRSPPRPTQGARIRPRSQKTDSTSTSEEPPHRPT

SEQ ID NO: 72205 - protein, 158 aa, Zea mays
  Coding DNA Sequence Number=SeqID_28830
MEHTCAAFFLLLFEERELMGVGALQSSLGFKDFRHAAWLHSLTNASRIFIIRAEVEECTEWGPPPHGPARVLLSVLHPSGGRATRGWPLSPALEWGLPLVRLPTAAVASADETVGASCAPDLRLFGFNAPEAEVVVALLAQWSPVGKAAEGAADAYIA

SEQ ID NO: 72206 - protein, 825 aa, Zea mays
  Coding DNA Sequence Number=SeqID_28831
  Gene Ontology: Mol. function=microtubule motor activity; Cellular component=microtubule associated complex; Biological process =microtubule-based movement
  Homolog annotation: Hit_ID=A3B3T2; Match level="QueryCoverage=96%, HitCoverage=94%, E-value=0.0, Identity=66%"; Hit description =Putative uncharacterized protein
  Pfam annotation: Domain name=Kinesin; Domain location=183-501; Score =532.2; E_value=5.9e-157; Accession=PF00225.14; Description=Kinesin motor domain
MEPDPVAAGASSSPPPSPAPATSPPWQTRDDDEPGAVDCADPGGDLNPAPPPSLQQGTVENAAVGSEVEQEEPKKEAMAGVGETLRSFMEEFGDQGEDSIILSPRLKDISTPDRPAALGFLGEKYNNLMERYKKYKKQVVKCSEECEPRYNGLKKKYTDECAERRRLYNELIELRGNIRVFCRCRPLSSDEVNRGCLSVVEIDPSQESELQFVPSEKERKPFKFDHVFGPEDDQEAVFSETVHVVRSVMDGFNVCIFAYGQTGTGKTFTMEGVPENRGVNYRALEELFRTSEKRSASVAYTFSVSILEVYNEKIRDLLDESNDQSKRLDIKQNADGTQEVHGLVEAPVYNIDDVWEKLKFGAQNRSVGSTNSNELSSRSHSLVRVTVRSEHLVTYQRSRSHMWLVDLAGSERIAKTGVEGDRLKESQFINKSLSALGDVISALASKNSHIPYRNSKLTHLLQSSLGGDCKTLMFVQISPSSMDSGETLSSLNFASRVRTVEHGPARKQVDPAESLKFKQMTEKLRHEEKENAQLNQSLQLMQLKYASRENVFRTLNEKVKDAEQACRNYQQRIRELESELGNEKRVSRDSARSSRPPLVPTRQKQPHGRNAPPSGPSRWRLKAPTIHNKENIPVMMNKSNPGDDPNKAVGRARRVSLTPVIRQIPIQPKRRSSIAILPSVREHLSVLNEKRAASRLSQVNMPRRSVATFGLNLGPGTPLAGHGGPVDATPDGAKFRRFDLGSSSSKFTSPPPNVTPQRKMGMAPAGGPPNAAKLCFSIQKRVTPAHVRAKPGMGIFDPALRENMVVGRTGNALRVLNGKRRQSVV

SEQ ID NO: 72207 - protein, 87 aa, Zea mays
  Coding DNA Sequence Number=SeqID_28832
MAPSATCWCDHCGAVRHLRAEGEFASCAVCGRVLLDLQDDAVAAPPPPQLLRRQRRRARDGGAAGRGVGARPERGDISDAESTVTST

SEQ ID NO: 72208 - protein, 133 aa, Zea mays
  Coding DNA Sequence Number=SeqID_28833
MSDEVKASSTEKTRELLLARESVIAAAGQTPFSQKGATNSKSSVWLSVCVDAHFQSFIDFGRKYTIAPSVLVPPYPLTRALGDIDSAWSRLGASSLLYEPSGVETDYGCVGEAWSDAPLGSNEHWDQLEAGSL

SEQ ID NO: 72209 - protein, 243 aa, Zea mays
  Coding DNA Sequence Number=SeqID_28834
  Subcellular localization annotation: CTP_CleavageSite=48; ConfidenceScore=5.53e-01
MDIASGPSPPAQEVASMSLSLMKTLAKPSRYSPRLRHNGSTSHWSKATASRYRGRKAFKLLDWNEALPITHAFAFLLRCMPCVRHLKRLISKQVGGDRGHVSFSSQHKPLEGGVQLVKTIMKSSGRGMMLQAHLLMMGGYNIFKESCTHYKRGRATRIAAAFLAVDVAVIARSGEDHANCSSPPSVCVDALFLLLVQQRTPSSDVFDGEWIWRIARCHPGDRGIRAVSEFLKPSVRIPATEGF

SEQ ID NO: 72210 - protein, 154 aa, Zea mays
  Coding DNA Sequence Number=SeqID_28835
MAGIHGPSDASREEQGREPELTNLQGAQNRQGQQPPGILKKPTEGDSNPSKQTRSSGVVSMAPSATCWCGHCGAVRRLRAEGEFASCAVCGRVLLDLQDDAVAAPPPRQLRRRQRRARDGAAARDIGARPERGDISDAESTVTSTGEDRWIDEK

SEQ ID NO: 72211 - protein, 886 aa, Zea mays
  Coding DNA Sequence Number=SeqID_28836
  Gene Ontology: Mol. function=aspartic-type endopeptidase activity; Biological process=DNA integration
  Homolog annotation: Hit_ID=Q8S474; Match level="QueryCoverage=13%, HitCoverage=11%, E-value=4e-09, Identity=40%"; Hit description =Putative pol protein
  Pfam annotation: Domain name=LSM; Domain location=135-188; Score=8.2; E_value=0.015; Accession=PF01423.13; Description=LSM domain
  Pfam annotation: Domain name=zf-CCHC; Domain location=552-569; Score =11.5; E_value=0.028; Accession=PF00098.14; Description=Zinc knuckle
  Pfam annotation: Domain name=zf-CCHC; Domain location=571-588; Score =20.3; E_value=0.0013; Accession=PF00098.14; Description=Zinc knuckle
  Pfam module annotation: Pfam domain module=LSM::zf-CCHC::zf-CCHC; Domain location=135-188::552-569::571-588
  Subcellular localization annotation: CTP_CleavageSite=65; ConfidenceScore=5.54e-01
MPLPWCSPSPCSVLAAPVVFSAPLLPASSQLGAAPLCSVSPAQPPDIFPTTCTTPSMAAPITSPAASVAPGLLGAAPMPVLCPSPPATWTSPPVVKGPVSPAFAMPPLAGSMASPPTYMSFALPATPVAPGFCGPLLASPISIGITVCIRLHNDHLVQGTFVAFDRAMSHVLRDCIELHPNAGPPLTPTSARASTRATHDLDASTRASCGTACATHARFTDPTHVYHRCEQATPSAPVAPAPSTSVARFVNLALVYHRRERAPPLAPDDPPTRTEPPVYHLVAIHRDPKHIHLMVTHRVAGVLRPIDWPVLAADTAATPPTLTGLTVPTCAALRSSIALWPTTWPRPPGCASFSRSSTAPYSRPPSSTDNVSAIFLTLPFPPDPSPPLDLSSTPDASSPTYTSPTPVIIPIPAANHLSSSPASAGPSRCGGRSKAQRWCEDGAAGVGVVPTGAAGVGVVPTGVGAVQAGATGVGAVPAGAGVGADLAGVVAIPHPSRLSYKEALVSSQPSVSHFVGGSAGGGWETVQSRCGRRLARRPPRPVPRPVLVDLRGRCFNCFSAEHRVARCSNHVRCFFCRRPGHHVSECPRRQTSLVAPHTNLVAPVRKLVWRPISREAPAVAGAGPAMADGSALGGVKGSHSANKKIKFWIQQRSKGPTEGTSGLAHRTVRCTTGQCPVHHRTVSGAPPDSVRCTTGQCPVHHRTVSGAPPDNVRCTRGLQLELATFGNFSGRRAIIHRTVRCAPDSVRCSKGERPQELASFGKLQRLVRYNSPDMSGVHRTVRWNSEATAIRRQRLPAAHLMRALRAQKAGAPILAHRTRNSACPVCTGHPGGPTSQKLQRSESNGSDDVAGAPDMSGVHRTVRYKYPNHLTIHGIQVFHFSTTYKS

SEQ ID NO: 72212 - protein, 205 aa, Zea mays
  Coding DNA Sequence Number=SeqID_28837
MVRKYGEDYDWRGAPTIDAEVVHSIGGKAHGRYSMFTGVIDSTELRSRGGSSSQAGCGSRSRSRRSVSSMEDAMREQQEKFREELRQQQMAFLKEQSEYMAAYYAQAQQAMNSWFPQQAQQQPFVFPQFQPSMPQWGLHAPPPPPPPQGSGVMGHNTPPTVIPAPGGAYAGEGDTPGENPNPLHDFVNEFFASRGSGHNSNGPDM

SEQ ID NO: 72213 - protein, 97 aa, Zea mays
  Coding DNA Sequence Number=SeqID_28838
MRNRARPSPLLLLLLSCWTSIPLNLPTRWQGVTALVPTIASMGDPVLGQVRRKVRAKLHSGCGEILDGRLGSWLLIFLVDSSLLGKEHVLSVTEVAI

SEQ ID NO: 72214 - protein, 194 aa, Zea mays
  Coding DNA Sequence Number=SeqID_28839
MSYPACTRGPAYSNHHRRRFTHRRDRQDLPYTLGHFTGAISPPLYEEHRVPRCRVWLTLEAHPLQPGWCSLDSKTVGFRTDDTTEEGAMKTLTTFCGYHPLEMVMHPLGLFPDEKRDDPMWCNRVSHVKDVWAMYPDLVGMITVQCMSALHHLQALQSDAMAHLANLSQTTKFTLDSREDFMVDLSSELVEKDL

SEQ ID NO: 72215 - protein, 132 aa, Zea mays
  Coding DNA Sequence Number=SeqID_28840
  Subcellular localization annotation: CTP_CleavageSite=59; ConfidenceScore=5.12e-01
MAAPRRGSLGPGGAAPWSPAARLPGPLRAAPRPRQTGHFAEYVDVYSPLLYTPNPQVVRVATTAQVKNRAHSFGIQCSTDPGCRRAVTALVSTIASMGDFVSGLMRRKVCGQIWHLWQNRPNYSSSSAQVMP

SEQ ID NO: 72216 - protein, 133 aa, Zea mays
  Coding DNA Sequence Number=SeqID_28841
MAKLSNDCDGRDTLAFMRKNSGRLTRPRVRRALATPEHAPALGPACASPRHVNPAPMAINPIPAITANDPPLDVTARTSWTSPSPPLDLSRRREYVLILEQGIAQEVVPEPAPEPAIEDLPAPAFEGKPRFYA

SEQ ID NO: 72217 - protein, 70 aa, Zea mays
  Coding DNA Sequence Number=SeqID_28842
PSRRQWGSVYAARSAKVDLSLGEECGGYEIDGSGYDYGADVEVKVVLRWRILSLGDNLFFFYDFFLVFYT

SEQ ID NO: 72218 - protein, 148 aa, Zea mays
  Coding DNA Sequence Number=SeqID_28843
MNPYLESNFLVKLMEEMEEEEEELDLVRHMLNRRRRASNERRHGGSVPGRVRIHRDHMSDDARIRADYFGPQPVYTDAQFRRSGSILYCDTPVSPRVSLKKPHQEPLLPVNQKDGIGTRALGTTKLGICLGFGQGDRPDFLAPYLCNQ

SEQ ID NO: 72219 - protein, 239 aa, Zea mays
  Coding DNA Sequence Number=SeqID_28844
  Subcellular localization annotation: CTP_CleavageSite=31; ConfidenceScore=5.51e-01
MSGAPRKHGLQNSPASGSRGSRSAKIHRTVRCAPDCPVYQRSNGSFRRQRLPAEHLMRAQRAQKSESPMPVHRTSNSTCPVCTGHPGGPTSQKLQRSESNGSDDVAGAPDCPVCTRTVRFDVFTPPLCDYHRPRARTRAKPRKTVNSAPPDPGLGLGLGPGRRRTPLRPTHGSESDYPQKTTNSASPDPWARNQPCALPDNLRLGKARARAQCRYVSQNHLNSENRPFAHLLAQGAHNT

SEQ ID NO: 72220 - protein, 254 aa, Zea mays
  Coding DNA Sequence Number=SeqID_28845
MKKTLEDLQAEHRAGVQHIAAWAGDASTTLVPLGVSPIPVSELPTSISGALPVLDFAADRLQRLDQILGARLEVEGDRLCRVVIEYVLTCFQSHDPTISLEPVIAGLVADTEDAAREAVQDVVQLLDTSIPKKELVTRPPGGSLDWDLDLYTASARSVSSTPIGPIVWYQPSFDSWNGTGRIEFGKPSLMFGPTRSQLQILGHPLQSGGGAGLGIGVPNCKPGLLNSDVIIPARVGTVWVDQQAGLMRADLTGL

SEQ ID NO: 72221 - protein, 278 aa, Zea mays
  Coding DNA Sequence Number=SeqID_28846
  Homolog annotation: Hit_ID=A3A8J3; Match level="QueryCoverage=80%, HitCoverage=25%, E-value=6e-80, Identity=65%"; Hit description=60S ribosomal protein L6
MDKFLVPAPPHCGEEPAPPPRCSAPPQNNPRLPFAFRCPLKSEPLLGRRRHRWRRIIAELDGRIDSRFQHRDSRLLLDSFTEVYCDCFYQVDRIISASTINFHPVREGVSAIEFDRKGIYIASVTLSGCLTVHDFETLYCSKYGPPCSMPDESSNYVLHISNRIPLNAVRWNPGNQDEIACTSNQSDNVFLFDIGYVSSTPTEVLHKGKSKFPSLYSESCKSLTDITFTSDDKSRIFASGLDGAVYMWDRRSSKTHCLELVASPEAQFNTVKLTVDNR

SEQ ID NO: 72222 - protein, 34 aa, Zea mays
  Coding DNA Sequence Number=SeqID_28847
MTRKASWPYMKGAEAPEAQTEGATALRALKIESL

SEQ ID NO: 72223 - protein, 560 aa, Zea mays
  Coding DNA Sequence Number=SeqID_28848
  Gene Ontology: Mol. function=hydrolase activity, hydrolyzing O -glycosyl compounds; Biological process=carbohydrate metabolic process
  Homolog annotation: Hit_ID=A2X6R5; Match level="QueryCoverage=91%, HitCoverage=94%, E-value=1e-167, Identity=55%"; Hit description =Putative uncharacterized protein
  Pfam annotation: Domain name=Cellulase; Domain location=56-343; Score= 18.6; E_value=1.6e-07; Accession=PF00150.9; Description=Cellulase (glycosyl hydrolase family 5
MGCSCPPLADAACLALLLLALSLACRHHHGCAAATLSTASRWVLDESGSRVKLACVNWPSHLEPVLAEGLGKRPVGAIAADVAAMGFNCVRFTWPTFLVTDASYSDLTVAQSFQRLNLTESLAGIRAVVSSLGEHNLMVILDNHLSKPGWCCSNTDGSGFFGDTYFDPDVWVDGLTKMATMFAGVPNVVGMSLRNELRGPRQNVNDWYKYMQRGAEAVHAANPRVLVILSGLSFDNDLAFLNSRPVNLSFTGKVAFEVHWYSFSNGPEWSSGNANQACARITAGITRRAFYLLDRGWPVILSEFGVDNRGVNTNDNRYYGCAAAAAADLDLDWALWALQGSYYLREGVLGLDEVYGVLDWAWCRPRNDTALRRVQALQRPLRGPGLAEAAPYTVLFHPVSGMCVVRRSPTPSLTQPFQLSLGPCNETEAWEYSAQQQRLALRDAALLCLRAEGAGRPASLAVSCGDAMARWGFVSDSKLHVAVNATSSAGSVGDGLLCLDVGADGRSVVTNPCRCLSADNSCDPQGQWFKLVSSTRSVVTKQTMLAQLPLKLKDWKIRSF

SEQ ID NO: 72224 - protein, 113 aa, Zea mays
  Coding DNA Sequence Number=SeqID_28849
MPRSKLVVAVISRCPAAALERPAGTTAGLYSQPRTKSATQGFRHRRILLECPMAGMNGLGTRSTRQRFISAHIGGSFAADSDGFPPDFRALGTPAMRAERSATACGFCFATER

SEQ ID NO: 72225 - protein, 118 aa, Zea mays
  Coding DNA Sequence Number=SeqID_28850
MAGMNGLGTRSTRQRFISAHIGGSFAADSDGFPPDFRANYQVGVTNPTPLKNNLVLEISKQKGYTEVRREMVRVRLADGKKNLVREDSVQGGVIVDITPQLITLNQRSKSNKYHKNKH

SEQ ID NO: 72226 - protein, 21 aa, Zea mays
  Coding DNA Sequence Number=SeqID_28851
MTKVGACRRYKVGIILVLKGI

SEQ ID NO: 72227 - protein, 75 aa, Zea mays
  Coding DNA Sequence Number=SeqID_28852
MIPKIGDPIVGTCEQGRDTVSWVGKKHHDPTLRASKRKHDFKKNNVPRNVDVARIKIKLNYFVGECEDTCPMSNT

SEQ ID NO: 72228 - protein, 345 aa, Zea mays
  Coding DNA Sequence Number=SeqID_28853
  Gene Ontology: Mol. function=transferase activity, transferring glycosyl groups; Cellular component=cytoplasm; Biological process =carbohydrate metabolic process
  Homolog annotation: Hit_ID=A2XUQ7; Match level="QueryCoverage=92%, HitCoverage=44%, E-value=1e-145, Identity=77%"; Hit description =Putative uncharacterized protein
  Pfam annotation: Domain name=Raffinose_syn; Domain location=1-326; Score=-134.6; E_value=5.9e-16; Accession=PF05691.3; Description =Raffinose synthase or seed imbibition protein Sip1
MDGGLQIELLRSFVYGLCVFFWLSNRGLLCALKSAVARASEDFMPREPTLQTLHIASVAFNSLLLGEIFIPDWDMFHSKHESAEFHGAARALSGGGVYVSDKPGVHDFSVLKKLVLPDGSILRARYAGRPTRDCLFTDPVMDGKSLMKIWNLNNFTGVIGVFNCQGAGQWVWPVKQTAYVPTNINITGQLSPSDVESLEEIAGDDWNGETAVYAFGSCSLSRLQKHQSLEVSLSTMTCEIYSISPIKIFSEVVQFAPLGLIDMFNSGGALDNISSVADSSATTVHIRCRGPGRFGAYSDTRPELCRVDEHEVEFTLAEDGLLTFYLPPSSSQDNLRHVEIVYKAS

SEQ ID NO: 72229 - protein, 357 aa, Zea mays
  Coding DNA Sequence Number=SeqID_28854
  Pfam annotation: Domain name=zf-CCHC; Domain location=193-210; Score =24.5; E_value=0.0003; Accession=PF00098.14; Description=Zinc knuckle
  Pfam annotation: Domain name=zf-CCHC; Domain location=308-325; Score =24.2; E_value=0.00033; Accession=PF00098.14; Description=Zinc knuckle
  Pfam module annotation: Pfam domain module=zf-CCHC::zf-CCHC; Domain location=193-210::308-325
MSELGMSTASDITKCKEYIVLATPPAKDQMEQFKKVHAQFLQATTQVIAGLQQVDLAEFIAHEQTTDTHMTSTTTSPSIVDLEKLLHAQALVIQNISTNESETTKQKNRILFSGIKSQWSSQEQLVADALSDDELPGFPKRKHHKDAHLQKEANECYIDGWTITCTQFQPRRRISSKKQKGKHGKSQEITSRKACYQCGREDHYFRNCPEKSSLPNTSEIKLSQSPDMGYEPKCTENSINIVKNNKRNRKMFGYMGSPPQPQAKAPKHIDTQTEESSQAQPFEIQTPNQPSPPVGQAKLTRKELKARGACFYCKNEEHIIRECPKKRLDRLKKKTVKQDPNNNPEDQPATSTMMKIA

SEQ ID NO: 72230 - protein, 362 aa, Zea mays
  Coding DNA Sequence Number=SeqID_28855
  Homolog annotation: Hit_ID=A2XUP8; Match level="QueryCoverage=77%, HitCoverage=28%, E-value=9e-50, Identity=43%"; Hit description =Putative uncharacterized protein
  Pfam annotation: Domain name=SURF2; Domain location=14-206; Score= -63.3; E_value=0.0033; Accession=PF05477.2; Description=Surfeit locus protein 2 (SURF2)
MAKSEGPSAAAGLRPRQRGAFLLGEPTWEDTGSGRWRCAETGHELPEREKEAYARSRACRLALIDHAVAHKKPPLNAFKPHPEHNSCEFVRHLPLCEPEGSIGCPLVLVQAQGLNWLCISASAIPVELGWNYATSTTNCIKPLHHPCVTEKQEDQMTSGEMADGQSVKSNEEVAKKSKPSKKYKKKTNVSSPLPGEPKPEMDGSDDRNFWVPPVEGRWDDDDGKKRWELSPGKHTLAKNEGGSDAAAGGGDNDGGDENVTAEKDDAESRELASMYLRFNLLLDSMNNACCHINKQGFQLLCGRTKQISSWLQLKQQIRAPVSAASFQSSTKGPKSQQVESLECQQQVITRAGPEILGAQSKT

SEQ ID NO: 72231 - protein, 553 aa, Zea mays
  Coding DNA Sequence Number=SeqID_28856
  Gene Ontology: Mol. function=DNA binding; Cellular component=nucleus; Biological process=regulation of transcription from RNA polymerase II promoter
  Homolog annotation: Hit_ID=A2XUP8; Match level="QueryCoverage=98%, HitCoverage=60%, E-value=1e-136, Identity=50%"; Hit description =Putative uncharacterized protein
  Pfam annotation: Domain name=Myb_DNA-binding; Domain location=242 -287; Score=33.8; E_value=6.4e-07; Accession=PF00249.22; Description =Myb-like DNA-binding domain
  Pfam annotation: Domain name=SWIRM; Domain location=7-95; Score=49.5; E_value=1.1e-11; Accession=PF04433.8; Description=SWIRM domain
  Pfam module annotation: Pfam domain module=Myb_DNA-binding::SWIRM; Domain location=242-287::7-95
MSPPAAGAAANSGDGTPPSPRELYTIPASSGGAGFGTATRNPRIYREYRDFIIAKYREDPARRLTFTEVRRALVGDVTLLRKLFAFLDSSGLINFSASSSSVPASRQQEVGVVVEAPVGLQVTPRPPASYFAEEKRVAAGGEKENEFRLPPLTSYSDVFGEWAPGKAPICGFCGEECNGADVETLQIIIAMGDEKHIFSFGPDDKDGFKVCSKCSKSNNDNIKEEANKCPGDKKENMENHASSAWTDTETLLLLEGVLKHGDDWDLIAQHVRTKNKSECIAMLIQLPFGEHMLGTINGKFVSRLHINQTDDGKTNQHIMESSSHSTEMADGMQIDGSEDSADKSVEEYPTKRRRLFFSMDATTSLMEQLAILTTAASPDVAAAAADAAIKAFGNENPQARKAFRLNEQEYKTKAFASNHVQQIDHKVSNKDTAMHGQSGSDKQEKKFIASAYQLRAAVATAVGVAAARAKMLADQEEREMELLMASVIETQLRKMQYKIKHFEELDSLMDQEYTAIQQMKGSLMNEWIKVLEHAFRAGVSLPRDELLTKLLLN

SEQ ID NO: 72232 - protein, 34 aa, Zea mays
  Coding DNA Sequence Number=SeqID_28857
MAAEYNKLRERSYSAEADLFVCFDQVVPVGQWTD

SEQ ID NO: 72233 - protein, 236 aa, Zea mays
  Coding DNA Sequence Number=SeqID_28858
MTSQDVLLPEQGCCICTLIVRVLVVVGLVFGFGIYTRGFHKLTSSMHLQDAYCPGAGSSFRGYNHFVPLPLLQDLGPGCGPIRALSRSRVSMELDELSPPPGGFGTNEPLLPMAAFAVPSLSSRILLASPHSPPTLLRLRRAGGRSLELSSRRGGSARLRVVRRAVTEEDSGAARGDEEVEEDPEEPVAGRDLVTLAACLVGLLTGVSIVLFNLSIDVYSFGIVMWEFLTGEEPYS

SEQ ID NO: 72234 - protein, 201 aa, Zea mays
  Coding DNA Sequence Number=SeqID_28859
MNRAIAPEHVTLLSPLFTPVGLLAAESKFQHLAPTVRATTKPPAMAPKRANPKDDEAAKAALLAARKGKALALTQSTHQEPTEDNTCSGAIALFIWPLTGTVRGNAFTNEARSTQRPRRARYNGPDRTWASELDEAARWEDLVAGLRLASYRAKGVPARFVFVGPAAPARTSSGGWRLCLRPNICPPRDQFDKVTWCRRRR

SEQ ID NO: 72235 - protein, 526 aa, Zea mays
  Coding DNA Sequence Number=SeqID_28860
MDKDRQGAAQKRQAAVRLHEARPKRQRGAAKAAASGGGKPPKAGASAPSKAPEATAGAGGSKTTKVVPPASGVAEASKAARALPLSGKRFADFGTDITVDDYLGGSDEGQLAMVAPGAEIATAAIVPKARGEALDAGGEVSALAVVRDEAGASTRRLKGVTEALSQATEALSQVADFASRTASGALTAAVSAEVERLRTQHADAVREKSASDSKCRKLTDRVAALEREKADLRRQLAAERREANEAVAKGQAAQAEAKLARAEGNLAKELAEHLQERLTALESRAKEAEAAMHAEAERTRTQLMDTYRELGARTGDFEVPDREPGLRCLQEELLELPAVAGGLMSYASLVTCEGAMNALSREGCRHFEAFDQADEDFERDIYKVEDPVVKESAGALYDRMWGLYGREVVRERAETARAQAERGERVDDFGALNSALPDPEPTLAEAVTGVALEPTPETAATATAAPTSAVAGEDLPPKVAEGAPDAPAAAVPSAEDPAAVAAETTAEAAAEPTAEAPAASGPSQVA

SEQ ID NO: 72236 - protein, 247 aa, Zea mays
  Coding DNA Sequence Number=SeqID_28861
MPSSSSSAATTPPAAASSEETLSSLMVEELRAGDSVDFGVSRMTSARVEDMQRLGYFGGGVARAPGTEEVPEPEGELVVFEAFFAAVAEEDADEGALRCAAGQSSGRDLVEEFVAYGVWPLAHGWALGEVCPRQMPFHGGRVVRSPAFALNLRNRDPAAFVRDAEDGAVRLVGRYVPRTEGQRSFDIRGSNDRLNRVFELNQLSYDGYPGQDEANRRGKKPAVETGGGRPFLKKEKIRYCDGRTWGV

SEQ ID NO: 72237 - protein, 26 aa, Zea mays
  Coding DNA Sequence Number=SeqID_28862
MVFLKHSSLFANSLPNNDLIGPVLSI

SEQ ID NO: 72238 - protein, 70 aa, Zea mays
  Coding DNA Sequence Number=SeqID_28863
ELLGRPVRLNWRESGDDKVEVAKADSEVEAVNIEGACVDDASTDGGDTSGEDTTLRGVGQVVDWDSHSEL

SEQ ID NO: 72239 - protein, 88 aa, Zea mays
  Coding DNA Sequence Number=SeqID_28864
  Subcellular localization annotation: CTP_CleavageSite=33; ConfidenceScore=5.01e-01
MAMGTRYPKPVGMGNPLGTRNPHGFGQNFIPVMGMGFLAGVFFLRGYGFGQVEEGCGLATAEEIAAAAHHVLCIIDAEAAAQRQPGLI

SEQ ID NO: 72240 - protein, 133 aa, Zea mays
  Coding DNA Sequence Number=SeqID_28865
MEPKFTARKSRITGRGALGDEVVAGEDEPGDGEEALLEEDRNGVRARDGKFVGREGGAGVVRSGRGRGWIAGCRRLGKPGGGKDADASPVPGGWASSEGARTQTDLSEDGGGGRRLGKDADARVRPPRELRER

SEQ ID NO: 72241 - protein, 663 aa, Zea mays
  Coding DNA Sequence Number=SeqID_28866
  Gene Ontology: Mol. function=transcription regulator activity; Cellular component=nucleus; Biological process=regulation of transcription
  Homolog annotation: Hit_ID=A2X8H8; Match level="QueryCoverage=29%, HitCoverage=63%, E-value=8e-17, Identity=31%"; Hit description =Putative uncharacterized protein
  Pfam annotation: Domain name=HLH; Domain location=281-333; Score =15.0; E_value=0.004; Accession=PF00010.17; Description=Helix-loop -helix DNA-binding domain
MPGSSCPTLSSTHSRGESRKSPIEERREARSTFLLLAIVLLPRPPARFSAEEERQWQQLAQTRAHTQVRADTSRSQLAPRLRPTAASQRFLFRREVKTKRAFGGNLLEHCGGEPDLARRVQLLKWPATATHLRALAEALPLPPRSLTAQAAKHKALSSSGYSKVQTTAASTVARPPASHAAGGSEEGSLLASVPYHKSTSRQIADRHDAGSFVPRRTHLIYDTFNAASAASAGTGSFSGNAPSAEVAPRPPPRGVSQANSVQQGRRKRRRRQRSTKNAESQRMTHIAVERNRRRQVNEYLAPLRSLMPGLLRPPDIQNSDSGTLALSSSSSCNPYTAQRTPGRDPASAGSSGAGVTADAAARSEGAAPHEARPPAFARFFRYPQYAWRHAAAREDGVVAVEDEASGDCAVADVEVGLVVDAHASLRVMAPRRPGQLLRLVAGVQALGLAVVHLNVATAPDAMALYTLSLRLASVPLPFASERVAPSYAPVPAPPLSSISRVNTPEPAREVGDVAADSDSAASAALSDDYRFSSKPMASSVVDVHLRLVSRDCELAASSVVSVYIRPLSLFQRHSRYNSPDCPVYTGQCPVRHRRAASGTRQLRETPTASPLKFTGLSGVHRTVRCNSGATATSAPTALCRAFNARSARADVRRAHSGTPDKEQ

SEQ ID NO: 72242 - protein, 133 aa, Zea mays
  Coding DNA Sequence Number=SeqID_28867
  Gene Ontology: Cellular component=cytoplasm; Biological process =protein transport
  Homolog annotation: Hit_ID=Q336S7; Match level="QueryCoverage=27%, HitCoverage=11%, E-value=4e-10, Identity=75%"; Hit description =Autophagy-related protein 3
  Pfam annotation: Domain name=Autophagy_N; Domain location=46-133; Score=-61.7; E_value=0.092; Accession=PF03986.4; Description =Autophagocytosis associated protein, N-terminal domain
MELWLRLRSRLGMVILQLLVSWMMSGCRSKPPTTSDPSTPSPAPDHARAAFAPYELPVTGPYTVSVFLEKGFLSIPGFILAGDNLIAKCPSWFWCILYSYRPALVIFIPKYVFYANLNVLLCSITRSRVRSAL

SEQ ID NO: 72243 - protein, 130 aa, Zea mays
  Coding DNA Sequence Number=SeqID_28868
MEKAVHSCHGLYHLWILGPEPLDLEVGIARRWKPITYKPTNLTGLDGNCYGPVYSNRWARLSLTASPPHAHHTVTSTPPPHRLHVTAAATLTTPTALPPPHTHRATARRMVLLGLAHATLEPHQGYMLTY

SEQ ID NO: 72244 - protein, 194 aa, Zea mays
  Coding DNA Sequence Number=SeqID_28869
  Gene Ontology: Mol. function=nucleic acid binding; Cellular component= intracellular; Biological process=regulation of transcription, DNA -dependent
  Homolog annotation: Hit_ID=Q69L90; Match level="QueryCoverage=32%, HitCoverage=23%, E-value=2e-14, Identity=57%"; Hit description=C2H2 -type zinc finger protein-like protein
  Pfam annotation: Domain name=zf-C2H2; Domain location=70-92; Score =20.3; E_value=0.0074; Accession=PF00096.17; Description=Zinc finger, C2H2 type
MAPTSSTELAHVKHITLHQFLKQQQLLQHRLKPAVMWGWPATAAAIGRHVPDDVADDDDGLGGAWPPRSYTCAFCRREFKSAQALGGHMNVHRRDRAKMRGGHHGSAAAQAPQLGGAASQATDETPHAAPAAKYAVLYPILNSNAAAGVLIPSGDVLLSGPVALQAAAHDLCHVSDDDDEEDSDVDLELRLWWP

SEQ ID NO: 72245 - protein, 288 aa, Zea mays
  Coding DNA Sequence Number=SeqID_28870
MPGKADRRHSARAQHYVLRPDDGCAAYREGGAHVLGGFGEGEDLPARFEASAAGEGFSTDEIANSASSPGSPSPGLNGWLSSSVGESPSAVAPAPKPLLKLLRRPGRGLLSLLPDRAAASHPSALDRSAGSLILWGCSYPRRRNRSSVCNGTLNASVHCGCRSLNINVCASESCFSRKVMSEVSVSRRRRSPSARSALPLTRTLTRPWGSVTDAVEKARRIASAEELSNVKTCSVRRITYPNVSYLSQKVMSEVSVSRRRRSPSARSALAAYVYSVVFRIHFRSSQKA

SEQ ID NO: 72246 - protein, 101 aa, Zea mays
  Coding DNA Sequence Number=SeqID_28871
MDNIDHIAHLQHALKSSVSTPNDEEVEAEALDGATARASRTSLPHRARRNYSSTCARCATSVQVRSVVTAEARPGVHVEAGLKIPHEHELMRTLFVNTCSI

SEQ ID NO: 72247 - protein, 475 aa, Zea mays
  Coding DNA Sequence Number=SeqID_28872
ARTRAESNGHVFDALWARQSTPDARPACPASRQSQAGAMARARAYKAPRDFDRTLPHALDLTGAQNHRRLPVHGVSAAARSPCHRRPANRTLPNPVQPSEKTMHTSVKLPERGIGVCFAGEASPRSPDSTRPPVSVDRSLRHPVKLTMLLDCTRSSWFGRSSRRQREHPPAHVVRTIPATPAVESYTVVTARTSRSQPRPSSDLSRRRPRPRSLPPPTPATPSPSAHLPAHSALAHTDTPSHSSVAFHSPSLATASAGGLAPPVSRSVVLAAYGFVAVTSGHRPPPHPVPSPIPSPHRKGWHRPVLAAAASSLHGTARRAVSSSPLCGIYFGVVHLTGVRRAPPLPSPRAPIKGPPRAPPCPAPASATYLPARPSSIMKASPSSSPPLRHTTANLGHHSLAPIPARTSSAATLAAELRHLPEVSPLPTPSSQIEPALKFASPSSCLGACPLPKNRVTGGESPPSPLAVGFSPAGG

SEQ ID NO: 72248 - protein, 181 aa, Zea mays
  Coding DNA Sequence Number=SeqID_28873
  Subcellular localization annotation: CTP_CleavageSite=2; ConfidenceScore=5.06e-01
MSSSSLMRRVFPPSKPPDGGYPPSFRLIVGGTQLHGSWYLLAIVRLQGFPSCSPAAPLHRRSPKTVTTSSWVGRSKPGCDLGPTLSFKDVHHPRWGGGRAEPALYLPRGFMGHPLPRRSGERAPTGPAGGPDFDNAGLVDGGASSPPARRACRLGSRRPLLLEGRLPRRVHGRTTQDAARR

SEQ ID NO: 72249 - protein, 268 aa, Zea mays
  Coding DNA Sequence Number=SeqID_28874
MQPRKAGPLAKKCDESLQASANTPFEARGLLSGTIIRGTLKTPNSQLAKPQKTTNSVSCDPRAQTPPWPLPNDLRLARPRRSGSASAMEDRLDLGFGGASTSPDLGHRPATSTGSAIITLPRADSGRREQDRLRCSSDSHDITPSGCQDLSGCHIGMAFLEKVGRAGTRTGQALSWGRSLPSPAWTLVTPYCKCTRPGRGTNTKAAGFPPLSRPSPATSLPPFALAHALDPSGLGHAAHSLVGLGTPRSRDADKWQSLKLILKLFLAM

SEQ ID NO: 72250 - protein, 58 aa, Zea mays
  Coding DNA Sequence Number=SeqID_28875
MGIRGKGCCSPTLGREGGMEKKTGKDGLAFVEAFLAQKVYLREIELWPFFRGYGFRID

SEQ ID NO: 72251 - protein, 115 aa, Zea mays
  Coding DNA Sequence Number=SeqID_28876
MTCIKYFFMAHNFGLLSLQRTFVPSYVKKPKGIEIKYQHWRPPPVISRPQQLTTCRRRRQQQQSAPSSGPWTSTKRMKLSLGRLGTRRFDVELLSWQKLKEMLLTRLVSVYPRSR

SEQ ID NO: 72252 - protein, 192 aa, Zea mays
  Coding DNA Sequence Number=SeqID_28877
  Subcellular localization annotation: CTP_CleavageSite=76; ConfidenceScore=5.54e-01
MPCFSPTRGVLSPPSSLCPFAFKVSALRYHSLPWPCKFISSMPRLSGCSTWYAAYLDGMRRRSAEGFALAPSTLVNLQLESSCLLSSPAGWFYWSCFSSAGGAWPCGSGALPPVLGFKDVHQPRGGGEQAEPWLHLPHGLVTRLFLQHSEEKDDHQPCEGGKLQLCGPGQTASTACRRAPSSMAWMVLSSPP

SEQ ID NO: 72253 - protein, 189 aa, Zea mays
  Coding DNA Sequence Number=SeqID_28878
MPVQSIAKQYARAARCTVSIITYALPRKLPLHANTTQIADVRILPNHLDVLFDFEQNVEPKHLLFSRLIPIQRSSATPSIKRLERPPGLELIHSCVDPLFQTFLPRPTKGWPCEITGLRPSASTLVKSLPLSFDRSAYALEISTSFLEVEDSLGAPKVGNLFDRRQIGRPVDGSLAGLHFASCFNASVD

SEQ ID NO: 72254 - protein, 101 aa, Zea mays
  Coding DNA Sequence Number=SeqID_28879
MSIICCPRRGMMQLHILRVMPPRRARGSPQAPSGDSMSPAAMLAAMQDMQQELAILRHAIPVAPAGVAQGAGGGGVPGAMFPRVILQMAGLRCLFLSVVFL

SEQ ID NO: 72255 - protein, 107 aa, Zea mays
  Coding DNA Sequence Number=SeqID_28880
MAASSTSTAPKPKKIKVLTHRPRPHPIEKTYEVLDIEKMKKVEHVEAIPLAPEAIPAATVEASIGPAEEHLKLLNPPPITELPKPTSVATTTITPKKGGWPAFWMLF

SEQ ID NO: 72256 - protein, 84 aa, Zea mays
  Coding DNA Sequence Number=SeqID_28881
  Subcellular localization annotation: CTP_CleavageSite=34; ConfidenceScore=5.18e-01
MATTRSASSFLPLLSGCPMGTVALGPTYQSHCARSMVGGQERGAAGQQGPCVGVRGCFGWGARAASGEKKMGHAVEGEVGQKRK

SEQ ID NO: 72257 - protein, 126 aa, Zea mays
  Coding DNA Sequence Number=SeqID_28882
MAPARKRADVERHRGRGSFHHRPARPHRCGHRSAAGHDELGAGAGALGRGGGGGGRGLQSEAGGGVAAATGRPRGEAKAADAEMKGERNRMTRRVSRALCTVHLRSSALRGAAHASCPCWQLTLGA

SEQ ID NO: 72258 - protein, 133 aa, Zea mays
  Coding DNA Sequence Number=SeqID_28883
MCIGVYRNEPKNQSNITKRGPVERLPQIAEEGKTGRFQDLCLFASSPMRQIYTSDMNDEPMHMNPVPKRKAIETKEIGIPRRGTDDSDGVDEKKGALASQGEKEDNTAEGASYKGLGESSGMGAAVEGHDTVS

SEQ ID NO: 72259 - protein, 630 aa, Zea mays
  Coding DNA Sequence Number=SeqID_28884
  Gene Ontology: Mol. function=sequence-specific DNA binding; Cellular component=nucleus; Biological process=regulation of transcription, DNA-dependent
  Homolog annotation: Hit_ID=Q6Z441; Match level="QueryCoverage=79%, HitCoverage=63%, E-value=1e-109, Identity=52%"; Hit description =Putative pathogenesis related homeodomain protein PRHA
  Pfam annotation: Domain name=Homeobox; Domain location=310-368; Score= 14.0; E_value=0.00046; Accession=PF00046.20; Description=Homeobox domain
MADGQRRGSGRGRRRRARSPANGRRPDLGSGGADLDEGGERAATGSGRRRRRRARSDGIQQTGGGRIRAAAGGIRADEAAGGRAATAAEKTATAAKGTTTAAGRRDEKKMILQIYGIALSKVRILETINAHLGTSFTVKCHFEDIFKETTELIDSEDALDEDWLSEYSGDEDYDPDENEASGDCMDSGEKIMSDDSNGSGSPLYSPNDDIPDFISADLNVVEGFCHTNLDLGIDAVEDDFAQILTYQRPRRDVDYRRLNEEMFGKITGNEEQSEDEDWGHERRKKRTHSGVAGDNSVGFLNVISDEKSQKKGRKLFRIPPAAVEVLRRAFAENELPPRDVKENLSRELGISFEKIDKWFKNTRCAALRDRKAEGNSHNTAPSKSSKNKGKAGISGKVREVLARDQILVAKRKTPCCQSPKGSGRSQTGRNGHVTGPCNNLRTNEEKTGISGKFDSGDNSCLVPFSEVINVPTRLPHNFEMRKMESTRSPARLHNKGGFLSATVQIKESTLLPTGKPCWQSEMSHPTTNEVSTSAQATTWIDAGACAEEQEPTPWVDIGVSDYQPFLDVIDDMCGLEWRLQRLKENMLSSSIDGQTAASESDKRNQTVVLVPTAELKEKLPHDGLFGHYCP

SEQ ID NO: 72260 - protein, 768 aa, Zea mays
  Coding DNA Sequence Number=SeqID_28885
  Homolog annotation: Hit_ID=A3BQI5; Match level="QueryCoverage=34%, HitCoverage=28%, E-value=1e-15, Identity=28%"; Hit description =Putative uncharacterized protein
  Subcellular localization annotation: CTP_CleavageSite=49; ConfidenceScore=5.73e-01
MENMWYKTKSFPPSSDAPSHLSPSPAFSPNSASTPTFSQALEPSHSGVSSQLRSAKEVVVRGHVEDLRQAVSGRRQEGLTPYSLFPLSSSWASSKERLGPPVPSSVLNHRMSVWQRIGPQLPPSKFSHSPAAEASLVESNISSHSGKKKRRRAKCHKEVSWQSTAPVGAASTLEPSPGVGTQSRVKTCVLEFSTAMAREEAALRRALFVSIVGSRPEISGAEVRDEVARAFGIDVNSISIHQSLPEDFLLLLPDESSADRVFSGGKLFRGPLFNLQFRRWSRLAHAEAARLPALVEVEVHGIPAHAWDRSTAEYLLRDSCIITDIHPSTSLKNDLSSFRLCAWCSNTDLFPRSMKLLIVEPGTDVHEKRCLSYDIEHEDGGGRHSDDSNSPRPDDGRLQRPIFQRLGPRGQSTSGGHGAEEDLAAGIEEVRRLHCPLPLLLVAAGVEEVPPPVRRLAVNSVAGVEEVASSMGRAVHSPSWLAAGTGTEAHIGRMLAADIGTETHSGGMLVVSIGAEAHTGSMVVVPAREVLAVHMELTAADMGTGPGTDCAKVGPVGCAVDAPVVQQPQMDGHGGPCGQEADQDRFAPQQFQCRDRVGPPADLNSIFGWDVGGGQELSRWNMEVSAPVLDLVPAGVSSQLEEATPVMKLVANITRDIDCLLPQPPIQKRRTKQLPPDFVPRHSSRLSKKREGLNSTVRQVQAELMLKLNVTNSQVAVTDEMLEEFGQLFDKPLSNSHIKALAALFGWPVPDNVQECLDVPLLRELSIE

SEQ ID NO: 72261 - protein, 228 aa, Zea mays
  Coding DNA Sequence Number=SeqID_28886
  Gene Ontology: Mol. function=protein kinase activity; Cellular component=extracellular region; Biological process=sexual reproduction
  Homolog annotation: Hit_ID=Q7XCL0; Match level="QueryCoverage=46%, HitCoverage=38%, E-value=2e-25, Identity=60%"; Hit description =Expansin-like A2 precursor
  Pfam annotation: Domain name=DPBB_1; Domain location=104-171; Score =12.0; E_value=0.00032; Accession=PF03330.9; Description=Rare lipoprotein A (RlpA)-like double
MKLRYIPVLYATFWKYAYMRVCKNIPSELPDPTSSFFNRLTSSLEPVDFTGEDLLVIAADQPFRFPSTFTFVVRAFSVLDGIRKGLDPRFHITEIAKPLHIFTYPIVSTIGYVRCRDNELCSAAGAKVVVTDQARMSNRTALVLSAAAYAAIASAGKAARLRDRRVVDVEYKRVPYEYAKDRNLSIRVEEKIRPPSNLSIRILYQGGQTDIVAVDVATGARKGAACSS

SEQ ID NO: 72262 - protein, 297 aa, Zea mays
  Coding DNA Sequence Number=SeqID_28887
MVGTSAVTARRQPGSVEHCTIQEMVDGVTWPTTLPPGWTVEWDVAPMNSPTPASGGDTRFSSDFLSRDGFPSILWEVLNSAGYPTPPLYTVQLYEEHRVPRCRVWLTLEAHPLQPGWRSLDSETVGLRTDDIVEAAAMKTLTTFCGYHPLEMVMHPLGLFPAEKKDDPMWCNRVSHVKDVWAMYPYLVGRVTVQCMSALYRLQALQSDAMALLANTAQTAKLTLDSREDFVVDLSTELVEKDLQVERLSQRITTLEQQVEIRDNTIDVLENQLHDVQRELEEENDPLGHAPPGDGGQ

SEQ ID NO: 72263 - protein, 134 aa, Zea mays
  Coding DNA Sequence Number=SeqID_28888
  Subcellular localization annotation: CTP_CleavageSite=48; ConfidenceScore=5.24e-01
MAATNEESVSGAVGAQVMSTMSGRVLGKLRGSCQKKQAGKRCPNSMVRARAPVQVGVGEEGCPGAGVGDSGELDLLQGGADRGGRGGWHTRDRWRGHRGSRLMGGKGAICEGVAVARRMAANAQGIDGGEEGRD

SEQ ID NO: 72264 - protein, 102 aa, Zea mays
  Coding DNA Sequence Number=SeqID_28889
MRLHTLRAFPQFNVMKGDQDEQALRCAARLSSGRDLVEEFIACGVWPLGHGWVLGEIIPRRMPTLEDKLVQSAAFAMDLRGRDVAAFVREVDVGGLRRSSKT

SEQ ID NO: 72265 - protein, 188 aa, Zea mays
  Coding DNA Sequence Number=SeqID_28890
MENFGSHSAEASSSILEPLRHPKVAIAVPDAWAMPVNRPSPARTWDHFAESAGPPALCFFYPRDAAAHLLNELRDPAEYAGRAWGPPHPGHLSIWSLSTPAFYCLVPRESHHEQRKLSEPPPPLCFRACTKALRPRKGPGCSASCEDCVGRSIGIGGRDGCSEFLVEPHRRRKISSRRGPTETRRLRR

SEQ ID NO: 72266 - protein, 622 aa, Zea mays
  Coding DNA Sequence Number=SeqID_28891
  Homolog annotation: Hit_ID=Q6JAD6; Match level="QueryCoverage=90%, HitCoverage=79%, E-value=0.0, Identity=77%"; Hit description =Putative uncharacterized protein
  Subcellular localization annotation: CTP_CleavageSite=62; ConfidenceScore=5.68e-01
RHLSVSGDSLSPAGDLPSPATTGDPTASSCPSPSLLVTLIARVPSPVLPGSSPLVHQLRMPRTKNVSAPGGGDDEDPRRPFRQVKGKTVYLEQQEGRKKRRTNRAARAAAAAAAAAAQAELGDQSQTPSDQIAYRVRRLASRPRSSTHPTASTLPPTLPAPVTPVAPSTSTAIPTTPASTAPPPRAPASAPPVPPPRFRERDETEVRPLATDPRLFDLQRAIAARVRRFRYIPVESWLPPQRDPAAGDLFSTRIQESFFRAQMSAQIALRVHRLLDLPAFLLAAGADSEAHLTYLPGLQTLLTTSGRYVEEWVRVLYASVWIDPDHHWMRFRFEREDVTITASQIRQLFGFPESTTRLHSLCYGTSDPPRRPHGGVAPGTAHVAALFRPPFTDGSRRSPADFTTAAKYLYELIRRTLLPRMGYREATTHIQLWLLGALVSHSEFDVVDFLICEIEDTVLDGIRARRQLPYAHYLCHIFAQLIQPPRFQGTLEASRLVFGSYRPAPEIPVPASAPVFDSQAEDAALRQFDTQGTAADDDDDDDDDFGVPPPPPPPMPPRSHDHEAGSSSAAPATPQAMDPALALILQTLTQQQAHLAAEQARLSERMLSMFQNMQDRQDALQQ

SEQ ID NO: 72267 - protein, 73 aa, Zea mays
  Coding DNA Sequence Number=SeqID_28892
MSKDSFASSLRHRIKDQPVVNAHLAEEANVYIQVDVDNVRVIDVARKYVMPREFIQIKKFRDALAKHRAQYAD

SEQ ID NO: 72268 - protein, 194 aa, Zea mays
  Coding DNA Sequence Number=SeqID_28893
  Gene Ontology: Mol. function=GTP binding; Cellular component =intracellular; Biological process=small GTPase mediated signal transduction
  Homolog annotation: Hit_ID=A2XN99; Match level="QueryCoverage=36%, HitCoverage=19%, E-value=1e-32, Identity=97%"; Hit description =Putative uncharacterized protein
  Pfam annotation: Domain name=Arf; Domain location=74-173; Score=22.3; E_value=3.7e-11; Accession=PF00025.12; Description=ADP-ribosylation factor family
MAAVARDGLAMPPAVVPAAEEEMRWWKLDSGVSAVSFGFVATAILVSMFLAMAILEHFLCPLAHTLGHAPPRGIHRRLRFFLGRGGERAAAPSSDLEAARKLQGHTPLEDELRDAVLLVFANKQDLPNAMNAAEITDKLGLHSLRQRHWYIQSTCATTGEGLYEGLDWLSSNIASKGIIYFYGLSPLGIFLSIV

SEQ ID NO: 72269 - protein, 92 aa, Zea mays
  Coding DNA Sequence Number=SeqID_28894
MALSARREDAQGLIGQACRNADRTARKRVRELREPQLLGRRAAAIARCGVRDDRTGSGWAQRGLGHGLAGRSREGLDAARTGAWRGGSSTVA

SEQ ID NO: 72270 - protein, 92 aa, Zea mays
  Coding DNA Sequence Number=SeqID_28895
  Subcellular localization annotation: CTP_CleavageSite=51; ConfidenceScore=5.49e-01
MNFGKRHITTNDASRSPPTAQSGSAVMKLPRRGVAAAPRFPPSNESHEETPCEHGERPNPSSSSRYSAPGFSPIYRQWPQGAGLIYVQGGHD

SEQ ID NO: 72271 - protein, 163 aa, Zea mays
  Coding DNA Sequence Number=SeqID_28896
MASSSTLTLMNTVDEQGSEVTFIGFYDYQCLSSLQAYPLHQKQTRRKLGADKAGERGEQQWVRRCEVRVEAKEVGKRVACPGGRGGRVWTTTDAEVVCGATASGTEIHGAYLGIEILSKFRKGPLTGTAFDPLPLPTGVPESMCFCGDPCKVDKSEDHDTYRQ

SEQ ID NO: 72272 - protein, 113 aa, Zea mays
  Coding DNA Sequence Number=SeqID_28897
MTYHVWLWQQLEMSMGPETRLPVGNFSIKVRGMVHGDIGTSPLYTFSSFTMYSFLRQHVNFSGNRLAGVVLRTQGFLAMESRSAADGVSALQISVRPRSRFPVAIATFCSGIR

SEQ ID NO: 72273 - protein, 138 aa, Zea mays
  Coding DNA Sequence Number=SeqID_28898
  Subcellular localization annotation: CTP_CleavageSite=47; ConfidenceScore=5.02e-01
MAGARISRDTLWHPGHVRALIGSRTGLTSPSCLPTLATATVVEIESRAKQRVGEIAPRGCRRWNPYLAHAASLVCFLSASLRHWEDARAPGKEKVAVGCGKLLTGVRGLPPSRLNVWAGPSPLHTETSKPLWNLRISK

SEQ ID NO: 72274 - protein, 379 aa, Zea mays
  Coding DNA Sequence Number=SeqID_28899
  Gene Ontology: Mol. function=calmodulin binding; Cellular component =integral to membrane; Biological process=cell death
  Homolog annotation: Hit_ID=Q94CH3; Match level="QueryCoverage=89%, HitCoverage=60%, E-value=1e-179, Identity=91%"; Hit description =Seven transmembrane protein Mlo2
  Pfam annotation: Domain name=Mlo; Domain location=2-302; Score=318.1; E_value=1.6e-92; Accession=PF03094.6; Description=Mlo family
  Subcellular localization annotation: CTP_CleavageSite=53; ConfidenceScore=5.63e-01
MADGTYLKIQPTFFPAANFFTMSLGRAKVSFFRQFFRSVRKTDYFTLRHGFISAHLSPGTRFNFRKYIKRSLEDDFKTVVGISPPLWASALAVMLFNVHGWHNLFWFSAIPLVVILAVGTKLQAIIAMMAIEIAERHTVIQGMPVVKLSDDHFWFGKPRLVLHLIHFASFQNAFEITYFFWIWYEFGLRSCFHDNFEFIIARVCLGAIVQFMCSYITLPLYALVSQMGSEMKRTIFDEQTAKALKKWHKAVVKKKHHKDSSHNSSETPSTDTTGPAGEAGEWQRLHEVPVRHLHRYKTIAHVGGVRSPLSDPDYSDTDDTEPLSLQTRHLIPPAKQRSLDTERAEVRVNVVETAAAPSDVLQDSFSFPRLLPPRHVPDK

SEQ ID NO: 72275 - protein, 97 aa, Zea mays
  Coding DNA Sequence Number=SeqID_28900
MALRVGEGSASLDDFDNFLEAFPPHLRHALGVNVALVAYDHVPTINDMEFVGMVDGGRDLTFDALCSNSGSDPSFPTSGENEPLATGRTESRLEGGE

SEQ ID NO: 72276 - protein, 544 aa, Zea mays
  Coding DNA Sequence Number=SeqID_28901
  Homolog annotation: Hit_ID=A2XM68; Match level="QueryCoverage=95%, HitCoverage=96%, E-value=0.0, Identity=68%"; Hit description =Putative uncharacterized protein
  Pfam annotation: Domain name=DUF1336; Domain location=288-528; Score =502.9; E_value=3.7e-148; Accession=PF07059.3; Description=Protein of unknown function (DUF1336)
  Subcellular localization annotation: CTP_CleavageSite=43; ConfidenceScore=5.12e-01
MGSCVSVSSTRHRRRRSRKLSVAARKFRRKLSTAIAADAPIVRGAGSAATCLARHGVVHVEAPDSNVTLRLTKLQWQHSQMDAGSVVCEEAWYDSVSILESPDSDDDLDNDFASVSGDPLPDVTGGSDAPQCKEAACFLDTMQLLRSIANAEAYDQSEQPADKSDDDDSNVAATATNNSGSCNNDEGCCSSTLKELQAAMSPRPFPASVPSNKVQPMPVVGVSPVPPPHQQQQQQKKKTAVVRLSFRRRSYEGDEMTEMSGSANYLYRPRAGFTVPCSTGEKLPQGCWSVLEPSTFRVRGESFFKDKRKYPAPGCSPYTPIGVDMFAYTRKIHHIAQHLSLPSLKTHETFPTLLIVNIQLPTYPATVFGDNDGDGISLVLYFKLSDSFDKEISPQLQDSIKRLMNEETEKVKGFPVDSIVPYTERLKILAGLANPEDLQLSTAERKLVQTYNMKPVLSRPQHKFYKGSNYFEIDLDVHRFSFISRKGLETFQERLKHGVLDLGLTIQAQKAEELPEHVLCCMRLNKIDFANNGQIPTLITAADE

SEQ ID NO: 72277 - protein, 73 aa, Zea mays
  Coding DNA Sequence Number=SeqID_28902
MVPNLEQPPPWSMGEGVKPKNGIHGQWGWGNGWQPGTWHQRELEKNSSTMVLCQFRLVRLHQSRGGLEGCVSI

SEQ ID NO: 72278 - protein, 281 aa, Zea mays
  Coding DNA Sequence Number=SeqID_28903
  Gene Ontology: Mol. function=transporter activity; Cellular component= membrane; Biological process=transport
  Homolog annotation: Hit_ID=A2ZPS4; Match level="QueryCoverage=84%, HitCoverage=57%, E-value=1e-27, Identity=68%"; Hit description =Putative uncharacterized protein
  Pfam annotation: Domain name=TPT; Domain location=151-268; Score =14.1; E_value=8.5e-05; Accession=PF03151.7; Description=Triose -phosphate Transporter family
  Subcellular localization annotation: CTP_CleavageSite=36; ConfidenceScore=5.04e-01
MQYAKLLPLTLIHMLGNVFTNMSLGKVVVSFTHTIKAMEPFFSVLLSILFLGEDFAPTPIKLFKVDHLFRPRAILAPNPHCSRRPPPIYTRTKRLMLQRLDLPLLFLRLKCPGHPKEEISRRNKESSKRVKEFNQSNIVYLILILGENRIGFWSAMTSNLMNQSRNVYSKKILADKEDSLDDINLFSIITVMAFLLSAPLMLCVEGIKFSPSYLQNAGVNVKELFVRAALAGTSFYFYQQEWPMCVTYGAVAGYLFGMAVSLVLSPNSCPQEKGLCKNCLA

SEQ ID NO: 72279 - protein, 91 aa, Zea mays
  Coding DNA Sequence Number=SeqID_28904
MSEGHKDCELLASGAIEHAKAEDDVVRPQGPLLLCAQAPYMMLAVAAEGDDVTEPPEKPIYGVNGLLVDEKRRRGTDLRALVGEKRRRESD

SEQ ID NO: 72280 - protein, 112 aa, Zea mays
  Coding DNA Sequence Number=SeqID_28905
  Homolog annotation: Hit_ID=A2YQI6; Match level="QueryCoverage=100%, HitCoverage=15%, E-value=2e-07, Identity=33%"; Hit description =Putative uncharacterized protein
MQLDASRILIANSRERLVARDEDRGKKKVRILVIAVGVGGYSGALPLTQQDDAGVVSRGAVTVAVPQCGAMAMPAPLVPSLECEEFRIHDLTRIIDNFLEEKKIENNSFASV

SEQ ID NO: 72281 - protein, 127 aa, Zea mays
  Coding DNA Sequence Number=SeqID_28906
  Homolog annotation: Hit_ID=Q8RXB5; Match level="QueryCoverage=49%, HitCoverage=14%, E-value=3e-24, Identity=88%"; Hit description =Origin recognition complex subunit 5
  Subcellular localization annotation: CTP_CleavageSite=48; ConfidenceScore=5.16e-01
MDLLRLLAPAPALLLLLHGGAATGKTRALPSSLFATVALTPLFRVTRRADELVAALVHWSHYSVAFLASRNPATLDAALFDSTGGSDSHRRKRKSSQVLTNMKDTMAEEMLLKGPGTFPLERLLAIF

SEQ ID NO: 72282 - protein, 204 aa, Zea mays
  Coding DNA Sequence Number=SeqID_28907
  Homolog annotation: Hit_ID=Q10CJ6; Match level="QueryCoverage=48%, HitCoverage=15%, E-value=5e-31, Identity=70%"; Hit description =Expressed protein
NDESDSFESLTLKLEETKIDEYWSRPLEPEITTDEQLISTAHLLTKPRRGQQRRRRQKRDFQKDILPGLSSLSRPEIIEDVQLLEGLVQASGGSWESSLTRRGRYGGRTRGRKPRKTVVTVIVEEEVEVSPPPKPVGTGDLEADGRVMSVHTLSAYWPHPNFHAFGLKHGLRSYNKFRKLAGKTFLRQHCIKLFQVMRSGINSL

SEQ ID NO: 72283 - protein, 305 aa, Zea mays
  Coding DNA Sequence Number=SeqID_28908
  Gene Ontology: Mol. function=sequence-specific DNA binding; Cellular component=nucleus; Biological process=regulation of transcription, DNA-dependent
  Homolog annotation: Hit_ID=Q9AUW4; Match level="QueryCoverage=95%, HitCoverage=70%, E-value=1e-120, Identity=77%"; Hit description =Putative uncharacterized protein OSJNBa0040E01.11
MAEALVGLRIAAPAVSLYIKQGSSAISIVDEEDSEPEWVEYKIKETNMFTVDKYQQIGFFPEQKAFALRYQTAGMLETVLRIGVLGEDDTGEESPKNLKIPSRKPSIVCENCLYSLEGNGRIRAFHIMDPKGVLDTLLVFHEKRQGSKVPQPLTNYSVGTKSASSDRINALLGRWEGHSVTKRSGVYGATLVEADTAIVLKMDSNGQLIQDTLSTKFGTGTTTVNWTGSANDNLLQFDGGYEITLLPGGMYMGYPSDISKSVAQLDSFHLEFCWMESPGKRQRLVRTYDSAGLAVSSTYFSETKV

SEQ ID NO: 72284 - protein, 131 aa, Zea mays
  Coding DNA Sequence Number=SeqID_28909
  Gene Ontology: Mol. function=catalytic activity
  Homolog annotation: Hit_ID=A2Y3P0; Match level="QueryCoverage=63%, HitCoverage=24%, E-value=5e-20, Identity=63%"; Hit description =Putative uncharacterized protein
MAMEWDDGMMLLHLSSFEHLRDSKVSFWLGYRVIPLYQREVLMLVLLIGDEKKLGNCQFDLWKQSYVAACAAVFGKLLRSRRLDVVQSGCIVLSIFKQGDLMVVANTGDSRVVLGTASDDGAITPSSSSSI

SEQ ID NO: 72285 - protein, 224 aa, Zea mays
  Coding DNA Sequence Number=SeqID_28910
MDDRRGRGDALGQRPFASAAQRQERVFDGGGGGGGGGHGPAFGDEFDQGSSLMALLSAGARAVSSQPPPPTWGVEEVTAAPAINLVPQSFSMCFSAIDNNIYLKDHNSMICFLSMKANYAPPPPSYQYQQPTSFAPSPLGGRMDPYAPYLHVDQPPQWPPPRATVVGSSLPHSNFTVLFPSNPYEHDMQLRATALFGVNLSCNLSCNLSLDCISPVCMPDGQWK

SEQ ID NO: 72286 - protein, 807 aa, Zea mays
  Coding DNA Sequence Number=SeqID_28911
MPVVELVPCARNKWGSWNEFWFYVSEATVEGHQGLPVSLMCSHYYSAYPPFEVAEEDTDEEALRYAAGQSSGRDLVEEFAAYGVWPLAHGWALGEVCPRQMPFHGGREVRSPAFALSLRNRDPAAFVRDAEDLAVRLVGRYVPKTEGQRSFDIRGSNDRLNRVFELNQLPYDGYPGQDEADRRGKKPAVEAGGDPALAAATSSKKRKLGTAMGGLGVSDSFARELMRTCAAPGERMSSPELRESSARMLRVTGGCWPKNIPIPWDEEDCFTSRMARRWKVFPYGRNIGHVVWAVMDKDRQAAARKRQATVRVHEARPKRQRGASKAEASGGGKPPLPAKAGASAPGKAPEATVGAGGPKLSKVVPSASGVAEAAKAARSLPPPGKRVADFGTEIDVEDYLGGLDEGPLALVVPGAAVATAVPAPEAGVEILGAGGEVTALALVRDEADAATRRLKEAMEALSQVADFTSRTASGALTATLSAEVERLRTQHADAVREKSASDSKCRKLAEKVAALEKEKADLRRQLMEERREANEAIAKEQSAQAEARLARAEGNVAKELAGELQRRLAAFESRAEGAEAAARAEAERTRTQLMTSYRELGVRTSDFEVPEREAGLRCLEWVQEELQELPTVLAGLMSFTSLVTCEAAMNALSREGCRHFEALDQVDEDFGRDIFEVEDPVVKESGGALFDRMWGSYGREVVRARAEAARAQAERGERVDDFGALNSAPPEPETTPAEAATGVAPVTAEDAPGVLVPAAAGEGLLPRVAEGASDAPAAAVPGVEDPAETTAEAAAEAPAAAGPSQVA

SEQ ID NO: 72287 - protein, 185 aa, Zea mays
  Coding DNA Sequence Number=SeqID_28912
  Homolog annotation: Hit_ID=Q7XBD4; Match level="QueryCoverage=51%, HitCoverage=9%, E-value=2e-13, Identity=41%"; Hit description =Cinful1 polyprotein
MLRLEKKLDEVSENFECEKAKCEIAEPERNRVPRNVEELHQSKEGFFVPMQFCNKLKSRFAKVGALSTDQNFTRGDPEGVIRWIEGEVEAFDEVLDGRGAGDTNFLGSSTNLETPKQPLTVKEHEVPRVTNPHTVKFATSSRTRERENQDEIDSEFDRVHLTPRVLQMIEGDAIAGVRGEVNALV

SEQ ID NO: 72288 - protein, 168 aa, Zea mays
  Coding DNA Sequence Number=SeqID_28913
MGRGKRGRGLARRADGKRKHAPSPPSEDFGDSEYSKEASSEYDRSPAPTSPVASSEDSDDSMGLSTATRAYWRSIERAELGGSNDSEEVSSEAVDSSDSSKEWSSSEGDGGEDDDSSGDNDGDGGAGGDGEGDGDNDGDDDGNDSGGDDKGDCDDSGKCDGNDKGDGD

SEQ ID NO: 72289 - protein, 386 aa, Zea mays
  Coding DNA Sequence Number=SeqID_28914
MKSRMALGLPSPENSQPESGSSSSSEPEGPYEANAQQVLRESAGVICPLGVGTLRGNDTRHRLRREVNARHVPCWGADVVDSLDSRRGAASCLATVAPPPPPAARKATGQTRMLLFRHGGKMSPSPPPPGGLTAVVVAVALRGKEYYVVAAVEGHELETPKTEQHPGLKRLLETTHLELNEKLFVNTQQAPTWRANCRRFDPGGSIGDALAVGVTSVREGERASLFVSLSSRATTFSHEGPGPSFYRCKERVQGNDVSPVARSVRAQGRARRRLLLRPRSGEEAIPPEVEVEAEPWGRARRRPPSEVEGEAEPWGRARRRPPPKAEAQGWARRSFLLRLRLDLAVAILALNAPAIRSVGEGELAKVASQRSLSELGFGRVEGAPVA

SEQ ID NO: 72290 - protein, 174 aa, Zea mays
  Coding DNA Sequence Number=SeqID_28915
MWRTRLSGGAPDSVRCPGWPNGELATLGNRRGVVAINHRTVWSCTGLSSESSAPAPKSSVTNSSLSGKAEGAAAKIHWTVQMCTGLSDNMNQPTNLKRLTRTHKNTQYNPRFGNHHKGVLLLVEEPTKGRVFSNPNPPQADHKGQGNLFSNMLKERVIQTSWGRPQIWRLPSNL

SEQ ID NO: 72291 - protein, 206 aa, Zea mays
  Coding DNA Sequence Number=SeqID_28916
  Gene Ontology: Mol. function=kinase activity; Cellular component =ornithine carbamoyltransferase complex; Biological process=amino acid metabolic process
  Homolog annotation: Hit_ID=Q6QP54; Match level="QueryCoverage=30%, HitCoverage=29%, E-value=1e-16, Identity=59%"; Hit description =Putative kinase
MAPPVDVAGLRPRLGDVEAPPKPRSSLSSVAEVESEPLGRARQRPSAEPESEPWVGRSGVRRLPGLSPSPSPGSGKAELPMVPSTGPDCLSASLCRVAPQSGAAQAALSFCQAGQWSGEVTAVTSALSGWGARVRIKVSGHLCIKCSCGLVGRCGDLVRVASWRRQGLGRAGNTFAAGGGPRLYADGGYQLRIKSLEGTPNYGPRQ

SEQ ID NO: 72292 - protein, 53 aa, Zea mays
  Coding DNA Sequence Number=SeqID_28917
MKLNYLLHRSRSTPWADPETKKAIEIINIAESIIDEVVNKLLNEVVEKVLKEE

SEQ ID NO: 72293 - protein, 124 aa, Zea mays
  Coding DNA Sequence Number=SeqID_28918
  Subcellular localization annotation: CTP_CleavageSite=48; ConfidenceScore=5.50e-01
MTTAALSPLRKQRDVSKDSTAPTTVLPRGSNAPLTATTSHEQGAKTSLAATTACTLERTNKDLGKAKVLRRSSKGVHNRKEIKSESATTPSRVPGPVCTEMDAQDASELRLRRTGYGWKDNEII

SEQ ID NO: 72294 - protein, 626 aa, Zea mays
  Coding DNA Sequence Number=SeqID_28919
  Pfam annotation: Domain name=zf-CCHC; Domain location=237-254; Score =19.9; E_value=0.0015; Accession=PF00098.14; Description=Zinc knuckle
  Pfam annotation: Domain name=zf-CCHC; Domain location=525-542; Score =16.6; E_value=0.0047; Accession=PF00098.14; Description=Zinc knuckle
  Pfam module annotation: Pfam domain module=zf-CCHC::zf-CCHC; Domain location=237-254::525-542
MGICGPASARPARLEKDEGVITGEKSTIEGNGDEQQMENSATCPAPTAVPPARVRLIAAKSSLGRHRKLRLARPQGSDSTSTPEDGLRLARPQGSDSTSTSEESPPCPTLAQTDHVAGGEGPGPSYEKVAARENGLTDRLTLSLVNACNPLLQAHPPWAQDNTSRGSPYCSPLCSVSRRPIWAGTRIDNLLVGPGTPWGRNADRKVMGMIRKINLMGVPMQVEDLLFNIDRKKQRKRGCFACEEKGHFRDSCPNMAEPTEGRSKGKVLTSVKFWDYSSSKDEPPRMRSHRSSSHSSRSSHKCLMARDKMSISSSSDDSSSDDEGEGKPSVDEFAEAVIFFQDVCTKQNAQLKTLKNKLISSENDYKCFLEKIETFANLNSTDDGLIKKNEKLKAKVAISQEAIENLLGKTEILSIHNDELTTKLENIGSTLEVSLVEMLEINKKDASTSCFDLIDDSNPCNQVLVKNVVIETCSDDIAMENEQLKQEVARLGKALHDKKGKAKQIQPPQDNTTTVVNKPVEGETVICRLCHKEGHKSYQCKVKIGQKQRQKLKQKPTSKISNTYINKVDKKVATPYLIKKKKNGKVIAIKANKQANKGNGSKRIWVPKEIISTMKSTKKVWIPRGK

SEQ ID NO: 72295 - protein, 51 aa, Zea mays
  Coding DNA Sequence Number=SeqID_28920
PDPGNRFEFAPALFGFRILPGVSLKARVPYKQNFSIQMLCGVAEKNVRSLG

SEQ ID NO: 72296 - protein, 304 aa, Zea mays
  Coding DNA Sequence Number=SeqID_28921
  Gene Ontology: Mol. function=nucleic acid binding; Biological process= DNA integration
  Homolog annotation: Hit_ID=O48967; Match level="QueryCoverage=20%, HitCoverage=13%, E-value=4e-12, Identity=53%"; Hit description =Putative uncharacterized protein
MAWEAHLHAVRQEPGETLWAFISRFTKAGGSGATAQGGGKKKKKNHCHDRPQSGAPVAVATAGGQDERDKRPWQQGSDSGSSPVHPNSRHSASECREILKLAKRISERRDQASRDGLPPQRRPGKEKVDEGDVAAGEGDLGYQAPEQVLKDILIVDSDSGVPKAAPNQRWWSTTISFGESDCPENMAGAALDPRIPTGTLSLILWSGPSTEVNRPFNAIIGRLALYRFMAIAHYGYLVLKDVVPYWEAARPDDEGRDPSTSCTKTPTKVPKVQPSGADDIPVKTIRLSADSSQTTRIAGDLEEK

SEQ ID NO: 72297 - protein, 121 aa, Zea mays
  Coding DNA Sequence Number=SeqID_28922
MAEERQPPWGRTPPTATRRRQDRQHRRAGNKKRELPGGETAGGVALTQIPPANTGKLHRCSRQYHAFSRPSQKAKEINFQNRCSDSRHPAHGPTKTLNTKLMGQSDAGAGVAVGVTIGGRQ

SEQ ID NO: 72298 - protein, 243 aa, Zea mays
  Coding DNA Sequence Number=SeqID_28923
MDTCLLGWSEARVAAQPGSVPWVCTLHHSATGPSRGYLLGAIANSFLGMLVCSLDKSSLRPKGPGMNYLHTSRAAWVASSERFASGGDHLCTDGLLATAAASARAERSSLLSSYGGEDKTIQERDHHPHGVRCLVRPPGQCRSSSPWIRQTCARRDCRPCGGRTDAPRLAATGGAGGGTKAIQAKEPDTLQLTALAAGQPRVAEVRLLRKAGEHPSPPNAGGRSGSPAHAEGRTPTRLAFHPQ

SEQ ID NO: 72299 - protein, 149 aa, Zea mays
  Coding DNA Sequence Number=SeqID_28924
MVLLGRALCKGEVREVYRGALLGEGKIELGNSTKFGAKTSIGAASGALDNVRCLGRAPHKLAALGVFPESVRYNSSDYPSYALRMGIRKKPEYVWKEYRENGIEKCSMAVYLGESRNYPNHPPFQNTATGYRFPDTCQNASQKALHQLC

SEQ ID NO: 72300 - protein, 82 aa, Zea mays
  Coding DNA Sequence Number=SeqID_28925
MAAIPSWSEWVEEMEGKRAAVTCMGGCCTHYPRVVIPFQPRLYRPDLHYRGCCSGKSSATDLGTTDYSLSTQNNRAFNTFGK

SEQ ID NO: 72301 - protein, 173 aa, Zea mays
  Coding DNA Sequence Number=SeqID_28926
  Homolog annotation: Hit_ID=O48967; Match level="QueryCoverage=40%, HitCoverage=14%, E-value=4e-12, Identity=58%"; Hit description =Putative uncharacterized protein
MVQIVEHRGLSPEDFLMEEGAASFVPRGSYRPAPGAAAMHTAQQHTPAQTSRAPSGVAHGGALSAARELLLKGKCALGPFLSILVIECQHKWTYVNLCQVMDKVQIKRNQVGKDGFVQPKDSSVWVHLTVPVVHRTVSGRETPSCGDSSQTGKSKAKKITVVFKLIIGSLEKS

SEQ ID NO: 72302 - protein, 221 aa, Zea mays
  Coding DNA Sequence Number=SeqID_28927
MSVVHAALMGNYRTSNVCHMAASGLRLSGEQECMRIGLDHTRPGLDMCQLWTPAWALIKARILVVVFFVKNVVMKGITPGNASNLFGAICELGSTIGVVEEIDLNSLESKDMVRFKVHVKSIDMIPEVIEVGVKPYLYDIFYKVENIDAEGWNDDSVSLEKRASVDVHRSGKTVMEKSGKKQKNEDFVTEENDMIIEYHSGLTSKMIGSLITSGKSDKLSD

SEQ ID NO: 72303 - protein, 92 aa, Zea mays
  Coding DNA Sequence Number=SeqID_28928
  Gene Ontology: Mol. function=copper chaperone activity; Cellular component=mitochondrial intermembrane space; Biological process =copper ion transport
  Homolog annotation: Hit_ID=Q6K670; Match level="QueryCoverage=79%, HitCoverage=100%, E-value=5e-17, Identity=58%"; Hit description =Putative copper chaperone COX17-1
  Pfam annotation: Domain name=COX17; Domain location=30-92; Score =115.9; E_value=1.2e-31; Accession=PF05051.4; Description=Cytochrome C oxidase copper chaperone (COX17)
MRSPLRQTLSQSTVFRQPDMGNTTSVQAEASDSAQKPATTAPAPGSKPKKICCACPDTKKLRDDCIVQNGEDACGKLIEAHLKCLRAEGFSV

SEQ ID NO: 72304 - protein, 107 aa, Zea mays
  Coding DNA Sequence Number=SeqID_28929
MAIPKRSADRGRAAVAAVPRDKQKPTPVGGHARARRRGRDGLRASMPPAHGKEKESDCWMDMDMDMDGTLLLQSLLDHSRRPGKQADRPAGDLTSLEPVRADDTSRI

SEQ ID NO: 72305 - protein, 129 aa, Zea mays
  Coding DNA Sequence Number=SeqID_28930
  Subcellular localization annotation: CTP_CleavageSite=18; ConfidenceScore=5.01e-01
MMRNHACVCIALAPHPTRIAALESRKKSFSRSSIISVRPQAGRLGGKGADLVIRGNVVLNTLSARSTSTLLRDQICINSPSSRQVLRPSRTVLRDRLRFSLYTFERYTSIRSIVLDQFVYTRYDLYATN

SEQ ID NO: 72306 - protein, 1348 aa, Zea mays
  Coding DNA Sequence Number=SeqID_28931
  Gene Ontology: Mol. function=nucleic acid binding; Cellular component= nucleus; Biological process=intracellular signaling cascade
  Homolog annotation: Hit_ID=A2WLD4; Match level="QueryCoverage=99%, HitCoverage=83%, E-value=0.0, Identity=58%"; Hit description =Putative uncharacterized protein
MESSGGDKPTATDATESVVGLDGEETLSERESVGARHGPALSNGGGKEAPSSSSSAGNKRKHGILGSNQMELNEPGMPSSSSGDSTWSLDSLDDRHQISLLRSKNEHSEHSVTSAGVTVIRQPRGVLRLRKRDQNVSTESWTGGHNIPQANGVPRSSQLLRRNKKGKSTVFEQNRIGGDEPVSCLRTENGTCDQDTGSKFCSETEFSAEKLSHLSGEAPKAVHVDKGGCDHVKDDDDNICAGSPRKGMKSSDTSSKRCIPQHSNHFKSSNKKIKDVPSPARLLRKRDGKVPFRKRRPRRHFYEVSPSDVDPFCIVKERIRVFWPLDETWYFGLVKEYNPDTRLHHVRYDDKDEEWINLQNERIKLLFLPAEARNRSKCTNSRSVFDLKHEQGDREDMDGSEGNTESSESGPIGSWLARSNQAKSAALCNISKQDHSHSNIVPISFDQKQCRGSDAKESNDYIPCDSFGNGSAKVLKDRTTPEDRRFRFVYSRKRFCRKTNGFLSISEQHSNCQIRARFAMVLAACPGMESSSATGASVTYVIPALSLPLKPVYKLLCEACCVSFSNTFFLHCGTMVALWPVVHLDILFDNALGLKHFLLDTCLISAVSLLCLLAGSFKQCSRQRTTKEARIPCTSIRFQISGGHGRSEVVFMLFNFVGVEKSKWEHLQGKLQYHCSKSELSKDSTKCTGRRALSSMDLFSKISYVTVTIHESIFIPQGVVRRLPRRALSPGWRIGGGIGAVPPDPELRCLRECVAGSIAVPPRFLSKGAKGKGIEGFDVQDFLPESNYSDREPIICCLDEHCRFTQSVLDMTTAPSLLPWHHKKMLTESNLTNGSQQSMSCTLDEDQQQLVTEHASDTVFHAPPQVCSLNLGSSPDSPLDMASASCANPSSSASRESNIAERNVSTECNGSSIGDANIIHRKCEDQNGPCAGPDKSFSSNLSVICSSQKSAESRLSINIDKANDKPLDNDEKEKQPISNLVQELNEHPIGCVTPTAPRTTSHRNRFTSISRAFGDGSKLLPEDHVLTGFAGGSKKPRSQVSYSVSPKSEELGIKNKGHFRKIQSHVSAKINDAKKLPDSSRSGHSSPESLTCVANVLVTVGDRGWREYDTQITMDSDGQSERRICVKLAEGTKYAHKVCQVLQPGATNRYTHAMMWKGGAEWCLEFPDRSQWLIFKQMHDECYSHNIRAASVRNIPIPGVHLVEIHDDNDVVSFVQSEAYLVHIGTDVEIALDQSRVLYDMDSDDEEWISSWRKSLVRDNTTTLQFAEDLFERVMDKLEKFAYSHNCNGLSIDQMKELETDDVPLHTIEVIHAYWQDKRQKRGMPLIRHFQSAMWKIYEQQLHEWESK

SEQ ID NO: 72307 - protein, 44 aa, Zea mays
  Coding DNA Sequence Number=SeqID_28932
MDEQSANQEQSQGAVSVWGTGQCPVRQAASAEQAALGNSSTAYG

SEQ ID NO: 72308 - protein, 127 aa, Zea mays
  Coding DNA Sequence Number=SeqID_28933
  Subcellular localization annotation: CTP_CleavageSite=73; ConfidenceScore=5.96e-01
MWTPSHLTQKPKSPNPARLSSSPFSLPTSSRPPPARAFRAATARPAAATPRTPRRHRRVPRCCHPARPAPPARASTPRASSCVAPRAVPPACTYHSGEEVTQERLDELIRGYAALVNVVPSMKAFHW

SEQ ID NO: 72309 - protein, 499 aa, Zea mays
  Coding DNA Sequence Number=SeqID_28934
MAERYQLPRSCVPPTTRRKDCGHPPSGGLEGEKTRCIREREDMVAFQGGHPPFKGDSPYLRPKPSWAESSPTRSKVLPLRRGGWVPHVMQADPEQKKPNRRAQCMQPPSGYKRLSTFAQTGGRKGGQPCWRHATVPSGRTSPTSNTPSMEAQAHASCNRCAGCFVQAAAPPLAPLPHLLDCGTNTATRGDPAHDPAAPAWRDGGASGRRSERHFAFTIMTASKKAGPSEGFNSRLRARGLHTHYWSEVRRPAPRKGSTAASGYSGSAPTTDQGGNDLVTESHQREASSPRTPSTGDRVRHITRSSPETPCSAPIEGNMALSPLLLAERRRRGVCKKVESVPDRPLALCRGSGAALANPAPAKPLTASTYQPENLEPDRAPGLRPARMRKRPDQPSITRGIKTSEESNHSSEASGATPGGRQNRSDCRHFAAPLIGLTERQRRLRRSDYGAPGQSEADRQSGPAVGAIGSSASPDPGLGLRLSPGRRRTPLRPTQGSDSG

SEQ ID NO: 72310 - protein, 119 aa, Zea mays
  Coding DNA Sequence Number=SeqID_28935
  Gene Ontology: Cellular component=nucleus; Biological process =ribosome biogenesis and assembly
  Homolog annotation: Hit_ID=A3AYT6; Match level="QueryCoverage=96%, HitCoverage=37%, E-value=2e-36, Identity=61%"; Hit description =Putative uncharacterized protein
  Pfam annotation: Domain name=RRS1; Domain location=4-119; Score= -16.4; E_value=6.1e-08; Accession=PF04939.3; Description=Ribosome biogenesis regulatory protein (RRS1)
MAEEPAVVVASSSYEVDLGNLMAYDPSHHVATASRMWWCWLGRKKLREELRQECLRKGTELAQAVADVLFALPPNEDRDGPIIHLPPPTFRLPREKHLPKPKPPTKWELFAKAKGDPIA

SEQ ID NO: 72311 - protein, 525 aa, Zea mays
  Coding DNA Sequence Number=SeqID_28936
MRGPEGRMSSPELRESSARMLEVTEGRWPKNVPIPRAAGEDFFTSRMARDLRVFPYGWNIAAVVSAVMNKDRQEATQKRREVIRLPEARPKRARGTAKATAPGDSQPTLAAKPAALGSGEGQLVVVLPAVATTVSAAVPGVKGSALSAGGEISTVAAVKDEAGTVSRRLRQASQQLSQATDFVDRVASGALIADVSAEVERLRAQHADAVREKSAADSKCRKLAEKVAALEGKRTDLRRQLVEERREANQAIAKAQAEAKLARVEGSLASQRAEEREVRFNALQARMERAEASTRSEVDRTRKQLVDSYRELGARTADFEVPEREVGLRFLEWLQEELLALPTIMEGFMSFASLVTCEGVLNALSREGCSHYEVFDRSDEDFGREIYKVEDPVVKDSAGPLFDRMWGPYGREVVRERSDRARDQMARAEDVEDFGPLNSAQPEAEANPVVAEAEVDLAPPPETGEGSHAAPAAAVSGGGSSPATAPMVENPPKAATELAAEDPPKAATEPAAEDPMAAAGSSQVA

SEQ ID NO: 72312 - protein, 216 aa, Zea mays
  Coding DNA Sequence Number=SeqID_28937
  Gene Ontology: Mol. function=nucleic acid binding
  Homolog annotation: Hit_ID=Q60EK4; Match level="QueryCoverage=57%, HitCoverage=27%, E-value=2e-12, Identity=34%"; Hit description =Putative uncharacterized protein OSJNBa0032D15.11
MAQRRSQKNKNTTRNEVTLEILFSDCSNYDSWSTSVLNAFRTLDPRLEQIIDKSIIPSDYDASEEDQRCIRLNHLAIDILGNSLSEEDYHAFITNYDEHIPDAHDIWTRIKNKFDESKYDSSFCASTSFGLCDTNPCKEEEENDQWRPNDESTSPRGLSSHFDSHICCVANENDSGSTNEDEEEERSFMQLYARLNQEDKAVVGGLRLPKVLKNMI

SEQ ID NO: 72313 - protein, 132 aa, Zea mays
  Coding DNA Sequence Number=SeqID_28938
MGKSKKRGSSSHHSGDKRKREPTPPSEDFGDSEYSEEEFSSESEGSPVHASPPASSDDSDDYQGIAAEVWTYIRAVKRAGLEGSDEWEVSSDEENSSDSSDEGDGEGDDGGGGDGGEGDGKDGNKGSNKASG

SEQ ID NO: 72314 - protein, 160 aa, Zea mays
  Coding DNA Sequence Number=SeqID_28939
MTLEPHPLQPGWRSLDSESFGFRAEDTIESTTLHVLMTFCGFQPWELSTHPIGLFHAVKEDDPMWKDRVEHAKDVWALYPGQTAHLTSTKITLDNREDLVVDLSTELVEKDLQVEQMATQIQELEDQIGARENTIEVLEDQLLTTQQQLEEANQHLDMHH

SEQ ID NO: 72315 - protein, 61 aa, Zea mays
  Coding DNA Sequence Number=SeqID_28940
MERPRLSVNVAILAKGRYLRTRIREGEAQKIRRLTQRRSCEAGKLRHVRRKGNRLEDEKAI

SEQ ID NO: 72316 - protein, 299 aa, Zea mays
  Coding DNA Sequence Number=SeqID_28941
MSARLNFNAQDPPTNRYPSPDHRIKIPQPALLSHITLNSLFPTLHTAAPEQAMRRPLSAAPTWPQGFKHKSDRRITIQGRRSIKREGTLTEAAAYRHPSATKSGTMAEHRSDKQFHAAPPPIPPGEAMPIVDRLKSAKYRLFRASPDRSDGAPNRIHTGPELGILAAWVIGPSGGTPDHLYDRSLRSREIFYSSSDHEQYSNRCATGPPPVAPSNGTRVTQRLADVAHGLVVHQASATQLRKAPIIILSAGLHGLVRARTRAKPRKTANSAPPDPGLGLGLSPGRQRTPLRPTQGSDSG

SEQ ID NO: 72317 - protein, 183 aa, Zea mays
  Coding DNA Sequence Number=SeqID_28942
MRRKDGGYPPSGGLEDGKTRHIREEEDMVAFRKGQLHRHLRHHRASSVAEPMPRLEATQRTTQRRQPGATVNAAESGPAVMTVAGGREQRSRRQPGSRPIQGQQESLSSRREDDAPVIRSSNGSRTRNGRPANHSPRRINSAAGQAALLAGEAGDASPSPDRERGIPRKGSFPVKEPGSEPPY

SEQ ID NO: 72318 - protein, 201 aa, Zea mays
  Coding DNA Sequence Number=SeqID_28943
MSSIPPPAGGLSAAIVVVARRWKECHVVGAVEGHELKTPKTEYRPGPERLLETTHLELDGKLFVSTQQAPTWRANCRRFETRGFLSRRLYADGGYQLRIRRLEGTPNYGPRHNCLTLTPHKASPLQPNEIIAEYVDVYSALLYTPNPQVIHVATTAQEKMKSWWRTSRSSKSTMSSRCGLAANPQSAACEVHVYLRFVFAL

SEQ ID NO: 72319 - protein, 233 aa, Zea mays
  Coding DNA Sequence Number=SeqID_28944
MATSGQEAGRSGRNSSSWFATIADPSFCTGHYIEVKYTMIKYTTNPTLGWGLQMGPNGERGVVWAHSIDHVDEERWSSLGGAESLNLAKTCPFASKPSSVLRPRLCLRYGLKYPLPPHLLRHLLLFLAAGELARVKQIVRLRRRQATPDALLNNWMVLSPAFAIELWGRDVTAFVREVEAEVVKFISKYLAKTELMRSWEIRGSNVRLNHDFELNDLPYGPYPKEGCTDTGDE

SEQ ID NO: 72320 - protein, 156 aa, Zea mays
  Coding DNA Sequence Number=SeqID_28945
MMVLVSVVTTSFVILLLFSLPSCLHLRATPFSAEGVGAVAYSPYLSDTSPNTDLRSGYCTSTRTFHIMRASLFSPLSDIPFVFSARTLFFLPNLLPPPTVTAASRPTLVDAGTGRVGHAPGLSPCVPSRRTWWRLPRLSYLGDEESRSKILDNQGP

SEQ ID NO: 72321 - protein, 787 aa, Zea mays
  Coding DNA Sequence Number=SeqID_28946
  Homolog annotation: Hit_ID=A2Y9N4; Match level="QueryCoverage=31%, HitCoverage=11%, E-value=3e-16, Identity=28%"; Hit description =Putative uncharacterized protein
  Pfam annotation: Domain name=zf-CCHC; Domain location=201-218; Score =5.7; E_value=0.21; Accession=PF00098.14; Description=Zinc knuckle
  Pfam annotation: Domain name=zf-CCHC; Domain location=220-237; Score =4.5; E_value=0.32; Accession=PF00098.14; Description=Zinc knuckle
  Pfam module annotation: Pfam domain module=zf-CCHC::zf-CCHC; Domain location=201-218::220-237
MALGHDAMARTSTMALLLRRSSVPSQAFIASFAGDDHRQGGVRSALEGLWMDSGIPRIILCIGSDAMCFPTPTIPSLPGASPSPPHSPTSVPTPGPAATPSSPLAPEATPVPLAVGRSKALRWRDDGSPASSSVASPGLHRRRPSYKEALLLPRPAPFLGREDDFGVGWVTVEGRQARRRRLRHLKPPPLSPRVVPSDLRGKCFNCFSPSHCAAVCRRQVRCFCCRLPRHRAYVCPRRRSAAPLPRRGLVWRPVSLSSGMAGSNDSLAGRVVDGGEDGGGGLKRRTRRGQRRRRPGNLRDSADQDAIVAVPSQRPADQCHDRALGRPRRIIKHSRMILQAEDNLRRALIITVIDQSNSGCAADVSDALAVRFNLDAQTLDLRRAAPNSFIAFLPNEEVACRVFNGGIPFVSPTVRLHIKRWSRHAMAVGGRELPVPVDIELRGIPAHLWGLETTTQLLDEYCLIRDVHPDSAEGGDLSVFKLSAWCDEPELVPAELDLLAEEPQLGASDFGSFPHTLVFPITVRVCRSDAILDRRPSPPPPPPFSGDDREQNHGKRRRDQHSISSVPGRRPVHARLGPCVRADSAPGGTCETIALPVPLGAVSTASASPPRARLGPCGGAGSAPGCTVGTFSAPGPLSAVVAVGAEEAASGSTIPTPAPSVSPPTALVTSVIVPGAANALTTGSPSEDPGPASLIGAISSGLLDSERPILHDNSFNVAAFEEAGGFQRLGQGPESLCADASGRASVPFSHVPHVPDVPADNAAQVRNPWDIIKYFLRTRRRTAHLIY

SEQ ID NO: 72322 - protein, 118 aa, Zea mays
  Coding DNA Sequence Number=SeqID_28947
MADPRPELLAEAEDFAHPVPGLRRRVLLLRGPAAEGSLDFPRAPTSIAPAANPKVTGELGPFSLFDGVWCDYPNGGGDAQRPRDGRGKARGAETPHAGKLAPMGHAAEKGIWAGQVEK

SEQ ID NO: 72323 - protein, 162 aa, Zea mays
  Coding DNA Sequence Number=SeqID_28948
MQSGSSHGGRRRHAREDRGDDPGDPAVWIYSGADVPQPAEHHGMVVVTTPTEIDAGWKKHIAVVEGPPASQCETSAAVDSGAETPHAGKLAPMGHAAEKGIWAGQSSICNTQILGLTNPTPLNKNLVLEICKERVYTHIVSTHMHTQKSQHDAYFISNTWVN

SEQ ID NO: 72324 - protein, 188 aa, Zea mays
  Coding DNA Sequence Number=SeqID_28949
MAMMGSTSEKMYLCQIWRALSIPSINRLDLMGVPRHQLASRHEGSSSSTNDPIGYLEARVEQLRSELRHRNQAREQDSHHIAELSAEMPSWTRAHDGAGTSHSGEDTPNPPPVPPTLAKAIVALVNATADNTRFLREMAGNQFQQQGGRAPPQGPRDTTYLEFSETRPLLFVKAEEPLEADEWVRAMQ

SEQ ID NO: 72325 - protein, 120 aa, Zea mays
  Coding DNA Sequence Number=SeqID_28950
MACRRIAHSAELGFFLLLNLSVLPVAAKLAPVVDPETDSGGAISAYRAAICYYRHGEGGTRQGGPTCHQHIEGKQQRKRGRRWTAVGESGPARENGPSAGFLYSFPFSFPISDFKYPIQI

SEQ ID NO: 72326 - protein, 134 aa, Zea mays
  Coding DNA Sequence Number=SeqID_28951
  Homolog annotation: Hit_ID=Q6QP51; Match level="QueryCoverage=50%, HitCoverage=30%, E-value=3e-12, Identity=53%"; Hit description =Putative growth-regulating factor 1
  Subcellular localization annotation: CTP_CleavageSite=69; ConfidenceScore=5.43e-01
MQAACNRAKWAHLSDFQRAQHGGPGPRVMQPAHRMLRASNCTATRATATPPQLRNQYRDSRQPYARPSSASLARRNQAPSLPTDQRFEGWPLGGVQQPPQSAWAPHPLLVIGSKAGPSEGFNDRLRLLGLRAHY

SEQ ID NO: 72327 - protein, 311 aa, Zea mays
  Coding DNA Sequence Number=SeqID_28952
  Gene Ontology: Mol. function=hydrolase activity
  Homolog annotation: Hit_ID=A8IRJ2; Match level="QueryCoverage=44%, HitCoverage=33%, E-value=4e-09, Identity=31%"; Hit description =Protein ser/thr phosphatase
  Subcellular localization annotation: CTP_CleavageSite=24; ConfidenceScore=5.85e-01
MAATPSPSVPACPTFPSSSSLPPRSKTPTTFLPSPSRLVAIGDLHGDLPKSLSALRLVGLVPPSCTPDSPSASSSWTAGPTLTVQLGDILDRGGDELRLLYLLRLSLSAETRGGAFLPILGNHEVKNVSSDFRFATPQGFHDRAVNRGGRGGGLDPSRRLCACAGFAAGAAEAGAVYILLLIVSRDFNLHQAFKFECAKICCLSKGPKALRPRKRNGCISCKTALYAYTEENQYVDTKPGKYITKPRTNNSLIVISWKCDQVLSNNLFGLGYAIQAVLRKATSSEKLDKETKGEKNQSERRVERASVCVTT

SEQ ID NO: 72328 - protein, 536 aa, Zea mays
  Coding DNA Sequence Number=SeqID_28953
  Gene Ontology: Mol. function=DNA binding; Cellular component=nucleus; Biological process=ribosome biogenesis and assembly
  Homolog annotation: Hit_ID=Q10LH5; Match level="QueryCoverage=77%, HitCoverage=75%, E-value=0.0, Identity=83%"; Hit description =Nucleolar protein NOP5, putative, expressed
  Pfam annotation: Domain name=NOP5NT; Domain location=8-73; Score =112.3; E_value=1.5e-30; Accession=PF08156.4; Description=NOP5NT (NUC127) domain
  Pfam annotation: Domain name=NOSIC; Domain location=171-223; Score =131.8; E_value=1.9e-36; Accession=PF08060.4; Description=NOSIC (NUC001) domain
  Pfam annotation: Domain name=Nop; Domain location=264-392; Score =134.9; E_value=2.3e-37; Accession=PF01798.9; Description=Putative snoRNA binding domain
  Pfam module annotation: Pfam domain module=NOP5NT::NOSIC::Nop; Domain location=8-73::171-223::264-392
MLQSQLTLLVLLETPAGFALFKVLDEGKLDKVEDLWKEFTTSDSARKVVELKAFNKFENTSDALSAATLIIDSKPSKGLHKFLQKHCQGETLAVADSKLGNAIKEKLKIDCLHNSVVMELMRGLRNQLTELITGFGAQDLGPMSLGLSHSLSRYKLKFSPEKACLISVDTMIIQAIGLLDDLDKDLNTFAMRVREWYGWHFPELTKIVSDNIQYAKVVKMMGNRANAVNLDFSEILSDEELETQLKEAAVISMGTEVSELDLLNIRELCDQVLALSEYRAQLYDYLRSRMNTIAPNLQHWWLSPLRTKGCVSLYALFKALKTKHSTPNYGLIYHASLIGKASQKHKGKISRSLAAKTTLAIRYDALGDGEDNSIGTESLLKLETRLQVLEGRELGKSAGSTKGKPKIEVYEKDRKNGARALTTPAKRGGDAENPNVTDGDPFADKVQVDLHVLRALMLHEVGGEVDRADIVAVDEAGTLEGAVELVELVDKLSKPGDLCHDVGYDAVLGLRAGVRDDGLPLGGLGDEVGAQEHFIA

SEQ ID NO: 72329 - protein, 69 aa, Zea mays
  Coding DNA Sequence Number=SeqID_28954
MDHRPPRHGSFIWPEAIRCRHQVCCGIRSVPPWMRSKGCKRKIPLRSVLLQKKPCIIRLSIRSTPLGVY

SEQ ID NO: 72330 - protein, 307 aa, Zea mays
  Coding DNA Sequence Number=SeqID_28955
  Subcellular localization annotation: CTP_CleavageSite=60; ConfidenceScore=5.06e-01
DALLGHLGSGQWGVALSGQKGNHGLWVTMRLMVLGIDSGNDTPHGSLSSPSYPLVSRSVRFAVPWPQEIESVRSCSPVLPLEAPPAPPLSAPVPRVATGGVPDDGGGDNSSSHDTDFSADQESEGWVARPITRDAARGCHFHDALDTLLRRALDRRTWSIEYRCVVFQHSRGVYPDRWEATCLVRRLENSLRVLGGVADGLNLKYYPRRPSGSTGGVIVSPVGDDNPRLSSTVNLAAVLNTEMDHALDELSRAHAEIALLRAERAERRHLDDGSPAPFGTQHPYRSPRRGHQSYGNSDYKTKINLEP

SEQ ID NO: 72331 - protein, 63 aa, Zea mays
  Coding DNA Sequence Number=SeqID_28956
  Subcellular localization annotation: CTP_CleavageSite=49; ConfidenceScore=5.41e-01
MSAIARWIPSPSCSSLTPTAAPSRGHRAIELRSTGCTTGPFWGNAARCLSDRLKAKVTIRVLV

SEQ ID NO: 72332 - protein, 129 aa, Zea mays
  Coding DNA Sequence Number=SeqID_28957
MVAERSSLTLTAPIWPSVAATASELVSSTRDERRLLRGGGARRGHGVVRILRAGASASESGVETDVKEMRGGRRARPGGDERLSRRAGADGTRVGEDGRGGEEDGREAGRRTTVGFARRGSQEDGAVSR

SEQ ID NO: 72333 - protein, 58 aa, Zea mays
  Coding DNA Sequence Number=SeqID_28958
MLSSNHPLWFTEVTKRADEMIDMRVELSRSTMENMKRAFAKAGRHQSYDNIARRLKRY

SEQ ID NO: 72334 - protein, 269 aa, Zea mays
  Coding DNA Sequence Number=SeqID_28959
  Gene Ontology: Mol. function=transferase activity; Cellular component= cytosol; Biological process=mitotic spindle elongation
  Homolog annotation: Hit_ID=A2YK54; Match level="QueryCoverage=40%, HitCoverage=36%, E-value=3e-58, Identity=96%"; Hit description =Putative uncharacterized protein
  Pfam annotation: Domain name=Mak16; Domain location=114-266; Score =147.2; E_value=4.6e-41; Accession=PF04874.5; Description=Mak16 protein
MQTYCIGLHALTSRRPTYPFQGTHQKRPGFHHVRPYLIGRLASCISQQQLANEATARPRAAFPNPTIPRSSPPRLPAPFFFAVDDADSPPRSLSQASRGDQRRLGDSCAPTSPVTARITTGIFCRNPYNATGICNRSSCPLANSRYATIRDHEGIFYLYMKTAERAHLPNKLWERVKLPKNYEKAMEVINKHLEFWPKLLVHKIKQRLTKMTQYRIRMRKLQLKIEFQFRIFMSAKEAMVIKKALKRLLSATQNVKRCNVSRNNEKCPF

SEQ ID NO: 72335 - protein, 106 aa, Zea mays
  Coding DNA Sequence Number=SeqID_28960
MKERKQSKGKSSNEHDKSLSLVTRDLCGIGEDLITLSVSRIECLALPQPPNLTVGGAVCSMAHRTVRCTPDMSGATATSPNGRWIDRWSSDFWARLDVRWRTGHAL

SEQ ID NO: 72336 - protein, 72 aa, Zea mays
  Coding DNA Sequence Number=SeqID_28961
MFGLQVAMRLMVFGIDSGNGCQHCNHCSGEDEAVEGDLQEFQDYDEFYAWVSDNPQSAACEGRVYLRFFSAL

SEQ ID NO: 72337 - protein, 190 aa, Zea mays
  Coding DNA Sequence Number=SeqID_28962
MGSAHVAFVLLSLEERNFAEVGTFQPSLDFKDFHQAARLHPLAASLRSFFAFYFSGISVDFSLLTAGDCAGSLLAAGLGDKRVALVVEVEAVAKMAEVVLPKQQKLQDGYPHTLECTVSDGDMAHPGSMALVLTAEIGNKFSLVDPQTFLRSPWRLCPLELEAVDSSVAAPKPGRNTVASVADFPCCHSE

SEQ ID NO: 72338 - protein, 104 aa, Zea mays
  Coding DNA Sequence Number=SeqID_28963
MGLYVAARAYWRSIECGGIGGSDDSEEVEDSSDSEEGSGGEGDGSNSGGGDSSDGSDNRGDDGGEGSSDDGGEGGGSGGDDDGKGGVSDGNGDDGKAGGIMLPA

SEQ ID NO: 72339 - protein, 172 aa, Zea mays
  Coding DNA Sequence Number=SeqID_28964
  Subcellular localization annotation: CTP_CleavageSite=18; ConfidenceScore=5.02e-01
MKLWKETSRSSKITTSSRCGLAATPSRLPVKAAVIYVSFPHFDLFGCLPRDSIKSRIMSLFNVLFNKPDDSAKANKDLEIDKRGVELGSHIETLESSLSLVATRTVARNRSEVARPVQGCAHAGRGEARCLGWGWARDSVGGARLLGVRGDDLGLPVQVGGLGGARVSGGST

SEQ ID NO: 72340 - protein, 75 aa, Zea mays
  Coding DNA Sequence Number=SeqID_28965
  Subcellular localization annotation: CTP_CleavageSite=36; ConfidenceScore=5.53e-01
MAPPPTILLAPHAPLRSFESQEARTASSLRGFVGTSSSLAGAKAPSPSWSLRSRPLTLAGAKFLNHYPRKILFID

SEQ ID NO: 72341 - protein, 164 aa, Zea mays
  Coding DNA Sequence Number=SeqID_28966
MASSRRVHRVFERTFDLLSCCLYWRLTCSEYQSLDHSKYQSTLEKFHETNDHIKTRPFEMYMREYENFVQLAVEMINIMFSRFQLIVNKTRANKAQLTYDDHERALKLLYALDRRVGSFPKNGKPEARQCDHHSGRRKGKCKYTTNEHKSKGRFDKEALKKKYL

SEQ ID NO: 72342 - protein, 80 aa, Zea mays
  Coding DNA Sequence Number=SeqID_28967
MAGVSWPRWPELGRLGERWSSRFMANAPVIERDCNLADVEYVLILEQGVEQEDVEEPAPELAVEELPATPAPEGKPRFYA

SEQ ID NO: 72343 - protein, 111 aa, Zea mays
  Coding DNA Sequence Number=SeqID_28968
MEGHSVPTHINRPHRFPVAARAHRLGIQCSTDPGCRRAVTTLVPTIASMGDPVSGQVRRKVRARLHSGLAFKSWGCGKILGGRLLSWLLNFLLGNFLLGDENVLSVSKVAI

SEQ ID NO: 72344 - protein, 489 aa, Zea mays
  Coding DNA Sequence Number=SeqID_28969
  Gene Ontology: Mol. function=nucleic acid binding; Cellular component= nucleus; Biological process=mRNA polyadenylation
  Homolog annotation: Hit_ID=Q53PI0; Match level="QueryCoverage=73%, HitCoverage=97%, E-value=1e-61, Identity=61%"; Hit description=RNA recognition motif. (A.k.a. RRM, RBD, or RNP domain), putative
  Pfam annotation: Domain name=RRM_1; Domain location=134-203; Score =100.5; E_value=5.3e-27; Accession=PF00076.13; Description=RNA recognition motif. (a.k.a. RRM, RBD,
MDTALHFIPAADTALALFISSKKPLLISPATPRLLLSFADTAAPALDELYRRSGDQPEIEQQADEEDDEVEVVENATAKQPAWRPSPSVPPLLPCLVPASGGCRPAPLLTTAAAEHGRRSRGRSEPLRLRCGNVGNIPYDATEEQLVQICEEVGPVVSFRLVIDKETGKPKGYGFCEYKDEETALSARRNLQGYEINGRQLRVDFAESGRNTDRNREKMQMAKSQQPLGSLAQSSSHLNEPYPQPEPDAMVPVVSRPSSLPTNVLPNPVILQEQTAAIHSFPQHQHASQPQVKMFPHGQPSGITAQSPMLHQPLGGSSSVPIQSLVTSVGLTSQVQPPFVPEHPGPPVMPTSVQQLPLTHPHLALVAAAPETLPNEIRVADQASHLTEFTHPSKLRKLEDGTSVPGMVNSSHAIYTAPLQAVGPSGPSGSYSAGAGSLQQPGNEGQITPDVESALLQQVLQLTPEQLSSLPPEQQQQVIELQKMLSAGK

SEQ ID NO: 72345 - protein, 461 aa, Zea mays
  Coding DNA Sequence Number=SeqID_28970
  Gene Ontology: Mol. function=zinc ion binding; Cellular component =nucleus
  Homolog annotation: Hit_ID=A2XBP2; Match level="QueryCoverage=25%, HitCoverage=6%, E-value=9e-38, Identity=70%"; Hit description =Putative uncharacterized protein
  Pfam annotation: Domain name=GYF; Domain location=9-62; Score=35.0; E_ value=2.8e-07; Accession=PF02213.7; Description=GYF domain
MSNDTEPEKVWHYKDPSGNVQGPFTLLQLSKWRSYFPRDLRVWLTFESEERSLLLTEVLSKQQKDFTQAASHTSSKATLVGTGHTRNNPSVDQTNAFSPAGHSVVSFSGITVQYNKLGSRLQTTRSRAASSFRAISSHRAGSARRGCGRRPRRRNPCVVEISMVVGSTCAAPATAAAAGTPWAGPCAGPPPPPPRSSSPQPRHESPCSTDCWHGRSCCSVVSNTVSAMSVDGSKSEQQAYMLYEEHRVPRCRVWLTLEAHPLQPGWRSLDSETVGFRTDDTTEAAAMKTLTTFYGYHPLEMVMHPLGLFPAEKRDDPMWCNRVSHVKDVWAMYPDLVGRITVQCMSALYHLQALQSYAMAHLANLAQTTKLTLDSREDFVVDLSSELVEKDLQVERLSQRITTLEQQELEEANDHLYMHHLDMHHLEMEANEAESEGEEAPEELGPAPGTNATDSEMPPSL

SEQ ID NO: 72346 - protein, 165 aa, Zea mays
  Coding DNA Sequence Number=SeqID_28971
MVKVPSGACQGCVGSYPGQTAYLTVRCMNALYRLQAVRAEAMSQLMGLVESTKITLDNREDLVVDLSTELVEKDLQVEQMATQIQELEDQVVARENTIEVLEEQLEEANQHLDMHHQEIQGMEAEGANEDVDIDGGEEPEPASSLDTAGSGRPPSPESSVALFAH

SEQ ID NO: 72347 - protein, 152 aa, Zea mays
  Coding DNA Sequence Number=SeqID_28972
MAEGARDTGAPRRGSSASWDPTSGKEERIAAVRRGGDTTREGLRWCSTRRPEMRRLGKSLGVGQEDRSGGTAAWRGSRRAQGLHELRGRGDGSSARILARRGHGRSDRRRELEERAIGRWSREMKKGVVLINRKGRSRGRPWESGNREERAA

SEQ ID NO: 72348 - protein, 84 aa, Zea mays
  Coding DNA Sequence Number=SeqID_28973
MAGLGESWAPRTGFKLSAHRGAWGAEQGAGRSRPGRWAGVEPGQTAAMATGRGEEGPARAFKGSRGGGVQKKSQGRAAEIRTRA

SEQ ID NO: 72349 - protein, 235 aa, Zea mays
  Coding DNA Sequence Number=SeqID_28974
MGGGPAEQQKTDERRAVARSNSGDDDDFCSGGPNSGNDDLRADAAARRPPSMPKLVRQGRAEGRRVGGLPLRRGGWVPHVMQAGSKQKKPNRRARCVQPPSGYKRLSTFAQTSGRKGGQPCRRHATAPSGRTSPTPNTPGMEAQAHASCNRRAGCFVHATAPPLAPPPRLLDCGTDTATRGDPEHDPAAPAWRDGQCGQKWAGSNGGGRRAGAAVTSPAKPTSHPGAAREPSLTA

SEQ ID NO: 72350 - protein, 269 aa, Zea mays
  Coding DNA Sequence Number=SeqID_28975
MVGRSEPGCDLGPTLSFKDLHHPGWGGGRAEPELYLPRGFVGHLLPQHSRQRALTSLAGGSDFDNTGLVGGERRQLQRVGLAGSAGSGSAPGALSRRESGCRAACTGGPPKTSRAARAAFVFWGCPAFAPVRRLCAEVGASLVREDPSGDLPVGRWLPSSALMWWRLKKSSSLTGSPPPSALRASGSLALIACPRPSSGDVGEGIVAAASALRPLPLLFGRSEQRSLSLLLFGRQRAIRRPSVAPQALQSWGVVRTCGGGTGVPFVMAP

SEQ ID NO: 72351 - protein, 259 aa, Zea mays
  Coding DNA Sequence Number=SeqID_28976
  Homolog annotation: Hit_ID=Q6QP51; Match level="QueryCoverage=24%, HitCoverage=29%, E-value=1e-13, Identity=61%"; Hit description =Putative growth-regulating factor 1
  Subcellular localization annotation: CTP_CleavageSite=45; ConfidenceScore=5.53e-01
MVAFQGGHPPFKGNSPHLRPQPSRTESSPTLSKVFPLRHGGWVPRVMQTGPGQKEPKPPCAVRAIAQRLRVFLHFRPGQRVKGRAAMQAACNHTKGVHPFDDAFGMRAQAHTSCNRRAGYYVQETASPLAPLPRLLDCGTGVATRGNPAHDPTVPSKHIGHGTGGTFGRRSRRRFTSAIMTASKKGPRKGILRKGSFSAKEVASSPPTDQRFEGWPLGRVQQPPQNTRAPRPLLVRGLKAGPSEGFNGRLRPLGLRAHY

SEQ ID NO: 72352 - protein, 71 aa, Zea mays
  Coding DNA Sequence Number=SeqID_28977
MAPPGSGEAELPMVPSVRPDCLSASLCQVAPQSEQRRRRCPSVRPLYADGGYQLRIRSLEGTPNYGPRQIA

SEQ ID NO: 72353 - protein, 185 aa, Zea mays
  Coding DNA Sequence Number=SeqID_28978
  Subcellular localization annotation: CTP_CleavageSite=50; ConfidenceScore=5.03e-01
LERVLLASPPGVGEVGKGAGSSPVGSGSGQRHRRGAIHGGAARRRGYSTPASNQSQQRAKQGAIGAGEVRYLKAGSGDSSAATETRRGPGSTVAAARRTTGERGQREIGRGRGNWGAFRVADVGAELTGAKGAAELQRRRGTELGTAGVMAAGVTPSGAEGTSGRTEGASGRAEGASGCAEGASG

SEQ ID NO: 72354 - protein, 261 aa, Zea mays
  Coding DNA Sequence Number=SeqID_28979
  Subcellular localization annotation: CTP_CleavageSite=49; ConfidenceScore=5.31e-01
MAVAREPVGMAVVVAGTKPGRRQVGVQGRQTVATSQAVSNIQSPVPACCCVAATPIFRDGAPRCRHPQAARRNATHGGRPVRWHQLGQHDRELVQPPRRVESASRVESATRVESSIPRASSTELDREFSAAFAFVTASATSGTSALEEAQLHLYDLYTITTERPCTALPPSTLKLERFDLAGCTPFLDAPSRGYVAYVPFGSLMIMRPVQLQELALSLLTSARSFLWVFWPELVATKLPHATLSCAAHEVFEVFPLSFPAA

SEQ ID NO: 72355 - protein, 236 aa, Zea mays
  Coding DNA Sequence Number=SeqID_28980
  Subcellular localization annotation: CTP_CleavageSite=75; ConfidenceScore=5.48e-01
MESTSSRSSSRSYLCRPPLGFFLDAAAPGSFKCTRRSLFPSAGGHGSRLAGLNPCPSSWSRPPSSLLGAPSSPVRAQLEACPRRPAFPKSGHRLTGRASEIPAEQLTSAPSSDPLRARSGPLLQLTLSLFAARSVSSSRIAGLLSIKFAQPRPRQTAKLPRRGLWHRLPPILPLSSRPHLVLFVSLLVISLRFKSVLLAPHALTPHPSGSGEFVFYVDSSNPSSSAQPHFVSSLQT

SEQ ID NO: 72356 - protein, 104 aa, Zea mays
  Coding DNA Sequence Number=SeqID_28981
  Homolog annotation: Hit_ID=Q6QP51; Match level="QueryCoverage=78%, HitCoverage=30%, E-value=1e-12, Identity=54%"; Hit description =Putative growth-regulating factor 1
  Subcellular localization annotation: CTP_CleavageSite=79; ConfidenceScore=5.00e-01
MATRNNAHRNMVRVDAKQRWSYRFMAPARSIFTLPGVEGKRSSSNTHILNAVVLLLSCEGRNAPVGYRKQRRSPRSDCCASHSGKADNSKFSLGRNRKLRLARP

SEQ ID NO: 72357 - protein, 260 aa, Zea mays
  Coding DNA Sequence Number=SeqID_28982
  Gene Ontology: Mol. function=receptor activity; Cellular component =integral to membrane; Biological process=ion transport
  Homolog annotation: Hit_ID=A2ZZC6; Match level="QueryCoverage=38%, HitCoverage=25%, E-value=4e-27, Identity=64%"; Hit description =Putative uncharacterized protein
MAHRTVWYATGHCSVRQPRHQAVGFRPLELLTTGPPDSPVVHQTGPVHCPGWVTWNQIFLFVDVACCCVVFFPAVWSMRSPRKSSTIDGKATRTLAKLTLFRQFYVVVIGYLYFTRITMCALRTITSYKYRWESIVVKEMFTMAFYMFTFYMFWLSIDTGTRLGLVGSEKDAGLVSSDLRVVNSGQCTFSVFVWNPGGHTKNSLGTSCILRSGECQQREIEPTCLNREAARKVTVSPEAKQRASKWADWVVYLEPGGLAV

SEQ ID NO: 72358 - protein, 318 aa, Zea mays
  Coding DNA Sequence Number=SeqID_28983
  Homolog annotation: Hit_ID=Q6J9V9; Match level="QueryCoverage=41%, HitCoverage=46%, E-value=9e-57, Identity=83%"; Hit description =Putative uncharacterized protein
  Subcellular localization annotation: CTP_CleavageSite=37; ConfidenceScore=5.22e-01
MAHARATDTPRVARPIALTLWQDTRHPWQASGRRSASVMMTTSKRDRERRYFKRVLLSKGNGPRALLLIRGSKVAPCGVRQPPQSTRAPSPLLIRGSKAGPSEGFDSCPRACRVRDDPGYVRYMAEARATLLRYPRTFPRPAGMICNGIPPEGGTEPSDPIKWVRVQRITCRLVSTVQSQGLVYQGTRSRLTRAQPRARNSSPVRIHGSPEDPLRQWAHPWLARGKARDNATIHPVPTIVPTTGVRLTTLSTKSKKRQQDTNFKATSTTRPYHRPRRYRARLQLGGAGRTTTGVRTWGHVAGHASTGLKHFSAVHISA

SEQ ID NO: 72359 - protein, 74 aa, Zea mays
  Coding DNA Sequence Number=SeqID_28984
  Subcellular localization annotation: CTP_CleavageSite=51; ConfidenceScore=5.09e-01
MSRWLRCLCPRLLRSWSSLIPPFSTMGRGRPLLPRLELADMSTAKSLFLRCESSVWESLRLQGAALTEANECLA

SEQ ID NO: 72360 - protein, 232 aa, Zea mays
  Coding DNA Sequence Number=SeqID_28985
MEHPHWDQQQMEHPHWDQQRIGYTHWDQHQNQGGRGKGRDGKSKPAEKERGVNNGLMGILCRNSKPHGKSAKNRVLTEGKTPIDTRWRSTVSEMMDMWLPAKGNWLLGSIGGITTADELEVFLLGAISILPAIRVGGEWQRGFGSGKARTRARKAKAAKSAALMGYSRAGYRFKKVSSQHPAYHVVIRQLFPKNRCATSSLGHRPQSGSHGLLSLGVASKTPISCSVARHYL

SEQ ID NO: 72361 - protein, 232 aa, Zea mays
  Coding DNA Sequence Number=SeqID_28986
  Homolog annotation: Hit_ID=A2X6T6; Match level="QueryCoverage=24%, HitCoverage=5%, E-value=6e-12, Identity=56%"; Hit description =Putative uncharacterized protein
  Pfam annotation: Domain name=B3; Domain location=131-229; Score=7.7; E_value=0.011; Accession=PF02362.12; Description=B3 DNA binding domain
MPSPSPSAAVSELGTRHAAVPEPNASSWEMEKEPLDMVESSVRVIETHVDIIHSLVTDGVVDTSEPESVYTLKTTLFQIGDVCDMLEKCALSIKKYADSKRAKIIQDEALQYAEDDEAADGLEELPSPDLLTQADILEKYFGIEMASAECLNRAGKHGADRSALSNAVRQRRHGCDVIMLKDPKKRLWPVIYHHCPLFVGFSEGWKHLVAANDLRAGDVYELVKGPDDVAVI

SEQ ID NO: 72362 - protein, 141 aa, Zea mays
  Coding DNA Sequence Number=SeqID_28987
  Pfam annotation: Domain name=zf-CCHC; Domain location=1-18; Score =19.1; E_value=0.0019; Accession=PF00098.14; Description=Zinc knuckle
MVCRLCNKEGHKSYQCKAKTGDKQKLKQKPISKISNTYINKVDKMAATPYLIKKKKNGKVITIKANKGKGAKCIWVSKEIISTEKHQEGLDPKREVRSSKDFREFGDLAKLGSISWDVSYWIKSIAKWVSEYFGLKFPTHD

SEQ ID NO: 72363 - protein, 44 aa, Zea mays
  Coding DNA Sequence Number=SeqID_28988
MATSGLMVGESEPGCGLCPSLSLKDFHHQGWGGECAELRIRFPK

SEQ ID NO: 72364 - protein, 60 aa, Zea mays
  Coding DNA Sequence Number=SeqID_28989
MVSHSCYGGYKCGHYTTVVRVSEALYAKAVMVAGVTWPSILPPGWTVEWDPASAEEEHEE

SEQ ID NO: 72365 - protein, 23 aa, Zea mays
  Coding DNA Sequence Number=SeqID_28990
MVTMQPECSSHRGQLWSSLLLYP

SEQ ID NO: 72366 - protein, 296 aa, Zea mays
  Coding DNA Sequence Number=SeqID_28991
  Homolog annotation: Hit_ID=Q6J9V9; Match level="QueryCoverage=31%, HitCoverage=35%, E-value=1e-12, Identity=48%"; Hit description =Putative uncharacterized protein
MTASKKAPSLTTDQRFEGWPLGGVQQPPQSAWAPHPLLAGPQRVHSRLRHGARDDPGYVRYITKARATLPRYPRTFLRPVGTIFVTESHQREVSSPQTPSEGDRVRQIIRRYFWAHLRASSRPLTNRARASTRITRQQLTGDTMFSALRGQHGAFPPSSMRKGDAGAAACAAPTAVPLDRVRLTATKSGLRRHRKLRFARPQGSDSGSAPEDDELRFARPEGSDSGSAPEDDELRFARPQGLDSSSAPEDDELRFARPQGSDSGSAPEDDELHFARPQGSDSGSAPEDDELRFARP

SEQ ID NO: 72367 - protein, 95 aa, Zea mays
  Coding DNA Sequence Number=SeqID_28992
  Subcellular localization annotation: CTP_CleavageSite=69; ConfidenceScore=5.57e-01
MAKLNFNFNRGPGQVQPGSREVQPGSRASSTGVQRGSTGVQGKFSRGIFPGPHWSKPVEPVLGEVQPVSGSPDRSELLTGNPTVSETPPGISAQF

SEQ ID NO: 72368 - protein, 44 aa, Zea mays
  Coding DNA Sequence Number=SeqID_28993
MAGLFHRSLRALMRIVMGEGISLEYGAVGSRILRPRLNGTPTNR

SEQ ID NO: 72369 - protein, 133 aa, Zea mays
  Coding DNA Sequence Number=SeqID_28994
  Homolog annotation: Hit_ID=Q75HA0; Match level="QueryCoverage=71%, HitCoverage=26%, E-value=6e-07, Identity=32%"; Hit description =Putative uncharacterized protein OSJNBa0056E06.12
MQELMAQQNEILRQLAQRQPPPQHYGGEDPLDADVWLRVVESKFPLFNGVRSDVAKAFNDLCQYAGYHADTDEKKRDRFRRGLSTKLRDRLNTVRANNYNELVNMAISQEDCITARQAEKKRKTPMAGPSAQP

SEQ ID NO: 72370 - protein, 241 aa, Zea mays
  Coding DNA Sequence Number=SeqID_28995
MTSHGSSDEGNALSHTNGLAREGFPRILWEVLQGAGYTTPPQYAVQQFEKHRVPRCRVRMTLEPHPYSQKEDNPMWKDRVEHAKDIWAIYPGQTTHLTMRCMNALYHLQVMRGEAMSHLMALLEATKITLDNREELVVDLSTEMVEKDLQVEQLSNEIQELEELVGTRENTIEVLEDQLINTQQQLAEANEHLDMHHLEIQDMEANEDVDIEGGEEPASSLDTAGSGRPPSPESSVASFAH

SEQ ID NO: 72371 - protein, 187 aa, Zea mays
  Coding DNA Sequence Number=SeqID_28996
MASDHCCRSSSAHLRRRDDATILDIVVIEHARHARCSRSGPHPSGGCAGACRTQWRMGHIGLLPEVKLAVTKFLLVVDEQRQRERLVLVVFVRGFQEVESTRRCSPVPPLVAPPAPPLGTSAAGIAAGGDPNNRDGNDSSSSHMTDLLEEQELEGWVAQPITHDTARGCHFVTPDSGGKTECIAYVS

SEQ ID NO: 72372 - protein, 189 aa, Zea mays
  Coding DNA Sequence Number=SeqID_28997
  Subcellular localization annotation: CTP_CleavageSite=97; ConfidenceScore=5.06e-01
MTKRANASAHGAGRDRYGVGHTARNCGTAGPQSRPECPRAPSVCLPKAPWPRFKATSVMQPRVDGSDFHGPRRQSGRSIEARPRFRCENTARIAAPRCARFPATRAKLNSGGNKNSAAARSGRTTIGREEATVAGPGGADGDLVEGIGRQGEIHGCALDLYTATRGFRAESSEVPAEFCARAVTMQGRG

SEQ ID NO: 72373 - protein, 67 aa, Zea mays
  Coding DNA Sequence Number=SeqID_28998
  Subcellular localization annotation: CTP_CleavageSite=19; ConfidenceScore=5.33e-01
MRAKSPKKDVICKSKHAPSSAKRKTGRSSKDVPKGMQSMTKLQKVVPKGARQLIPPKYKVEKFKSHS

SEQ ID NO: 72374 - protein, 51 aa, Zea mays
  Coding DNA Sequence Number=SeqID_28999
MGKPVPSLLMLLLSRVTALVPTITGMGDHVSGRMRGKVCGQVHLEFSNRYA

SEQ ID NO: 72375 - protein, 91 aa, Zea mays
  Coding DNA Sequence Number=SeqID_29000
  Subcellular localization annotation: CTP_CleavageSite=56; ConfidenceScore=5.05e-01
MSSSTRWILGPESDPSDSLCASVIKEGSASPRQSPTLPRGLKRGNPSASRLGILLRVENFQSKKGPLAFSWLCQKQGLEERTRVHVNGEAD

SEQ ID NO: 72376 - protein, 83 aa, Zea mays
  Coding DNA Sequence Number=SeqID_29001
  Subcellular localization annotation: CTP_CleavageSite=27; ConfidenceScore=5.00e-01
MPGILLGTFGIRRSSKTGFNSISGSIMCEQVNSTPVLFTLTWHSLFASRLYCHLLPIEGTSFVTFVRKPLDPKGNNASEDEGF

SEQ ID NO: 72377 - protein, 207 aa, Zea mays
  Coding DNA Sequence Number=SeqID_29002
  Subcellular localization annotation: CTP_CleavageSite=52; ConfidenceScore=5.31e-01
MALPVDVAGLCPRSGDVGAPSKPRSSLSSVAEAEPPGRARRRSFGRGQGGVRALGSGEAEFRRLPGLSPSPSPGVGRSGPESEPWGRAERSFAVFRVLARVRALGSGGAEFAVFRVLARVRALGSGGAEFAVFRVLARVRALGSGGAEFAVFRVLARVRALGSGGAEFAVFRVFTPSPSPGVGAERIFAVFRLYADGGYQLRIRRLE

SEQ ID NO: 72378 - protein, 88 aa, Zea mays
  Coding DNA Sequence Number=SeqID_29003
MANRPPNDLLLNSTMDGSAAERMSVEKFRHHHEFIELAVPPDNVAPARAWDMLTDWPRMSAPPQQKRDQCCAKEMARWAKWSGGRPMR

SEQ ID NO: 72379 - protein, 65 aa, Zea mays
  Coding DNA Sequence Number=SeqID_29004
MVYPGWLRINAYVGVLTEDPLTGHMPRHGIHFSKHFCKTESLNIEKPYLDSHITSIPLRVFSLVG

SEQ ID NO: 72380 - protein, 251 aa, Zea mays
  Coding DNA Sequence Number=SeqID_29005
MTLELLRLIFRRHAVDGSVDALLGVGFGNKWAAGVVAVEAEAKKPVNGLPKQQRLSHCQLGCTHPSSEAASPEFGEVSWRSIEPSWPKTLDHGLNDNFIGHYGRLCSQSQEPSDIRLKVFLMVLRALEQGLSCDWLRLKALETAFENKSPTLAPTSGELIRPPSASPDLRYATEESFSARACCTAATGHKPRNSLSPRGSKPEEKGHKSNTLGGGVGPRDQGHGNHPSTSAKEEGEDGSAGRSSKEDRRSY

SEQ ID NO: 72381 - protein, 49 aa, Zea mays
  Coding DNA Sequence Number=SeqID_29006
MPKPIKTPMGTNGHLDLDTGGGESSTFKNWYLKTLLNTKRRNLLRGSFV

SEQ ID NO: 72382 - protein, 259 aa, Zea mays
  Coding DNA Sequence Number=SeqID_29007
  Gene Ontology: Mol. function=nucleic acid binding
  Homolog annotation: Hit_ID=Q60EK4; Match level="QueryCoverage=58%, HitCoverage=31%, E-value=2e-13, Identity=33%"; Hit description =Putative uncharacterized protein OSJNBa0032D15.11
MARGRSQKNKKTPPKENNEVTLELLLFDCSNYVSWSTRVINAFRTIDSQLEQILDKSIIPSSYDKKNASKEDQRCIRLNYLAYDILSNSLSKEDFRAIIMRYDEPIHDAHDIWTRIKNKFEESKHISSFDASTSFSPCETNPLKEEENECWSPNDESTSPKASKSSFELEFVGVKDDSCQELKEENERLRMSLTQQKGKCTAQPSQDNSDHMVKKLETGTTDACSKSLEENVKDLRIVKRKEQKKKINTSVKSLNHAST

SEQ ID NO: 72383 - protein, 77 aa, Zea mays
  Coding DNA Sequence Number=SeqID_29008
MTQLINYGNYDLSSVVSRWSIVTSSLIWLCVGESVELKHPVLQSRADQLVQPYLLLEVVVDQLVAGAASSATGGCGV

SEQ ID NO: 72384 - protein, 201 aa, Zea mays
  Coding DNA Sequence Number=SeqID_29009
VDPRAIDLAMRIAERMFLKMKEDEAKNIIEEEENDRWRPNDESTSSQGSSFKSTSHMCFIANGSDSESESEDEEEQESDSEDEDDLQQFFAQLSKKHRMSLLKLMKRAEEQKEMLHKQEDILIEKIKDLEKLTKEHEKLKCSHDDLVQSLLRQVTSPCGVRMALFSLHADALCPKLFPLHARAEYFLFPVWSFTRVENRFL

SEQ ID NO: 72385 - protein, 444 aa, Zea mays
  Coding DNA Sequence Number=SeqID_29010
  Gene Ontology: Mol. function=catalytic activity; Cellular component =integral to membrane; Biological process=metabolic process
  Homolog annotation: Hit_ID=A3AIK1; Match level="QueryCoverage=93%, HitCoverage=91%, E-value=0.0, Identity=74%"; Hit description =Putative uncharacterized protein
  Pfam annotation: Domain name=ACP_syn_III; Domain location=153-226; Score=-11.3; E_value=0.012; Accession=PF08545.1; Description=3 -Oxoacyl-[acyl-carrier-protein (ACP)
  Pfam annotation: Domain name=ACP_syn_III_C; Domain location=313-401; Score=43.6; E_value=4.6e-10; Accession=PF08541.1; Description=3 -Oxoacyl-[acyl-carrier-protein (ACP)
  Pfam annotation: Domain name=Chal_sti_synt_C; Domain location=267 -403; Score=-2.0; E_value=0.0027; Accession=PF02797.6; Description =Chalcone and stilbene synthases, C-te
  Pfam annotation: Domain name=Chal_sti_synt_N; Domain location=19-222; Score=-67.1; E_value=0.003; Accession=PF00195.10; Description =Chalcone and stilbene synthases, N-te
  Pfam annotation: Domain name=FAE1_CUT1_RppA; Domain location=26-305; Score=493.9; E_value=2e-145; Accession=PF08392.3; Description =FAE1Type III polyketide synthase-lik
  Pfam annotation: Domain name=ketoacyl-synt; Domain location=32-224; Score=-87.9; E_value=0.013; Accession=PF00109.17; Description=Beta -ketoacyl synthase, N-terminal domain
  Pfam module annotation: Pfam domain module=ACP_syn_III::ACP_syn_III _C::Chal_sti_synt_C::Chal_sti_synt_N::FAE1_CUT1_RppA::ketoacyl-synt; Domain location=153-226::313-401::267-403::19-222::26-305::32-224
  Subcellular localization annotation: CTP_CleavageSite=38; ConfidenceScore=5.09e-01
MELLPLLTWLLPCARPGLPGLDGPPRGAGQSRPATTASCSTETAGNVIQRNARLGLTDYRFLLRVIVRSGIGEETYAPRNILEGREDSPTLEDAVDEMDAFFDEAIAELFARTGLAPRDVDVLVFNVSMLSPAPSLSSRIVRRYGLREDVAAYNLTGMGCSAGLIALDLARNALRTRPRALALVVSSESIAPNWYSGTDKTMMLANCLFRSGGSAVLVTNDPARRGQAKMELSCLVRANIGASDDAHACALQREDGEGRVGISLSKALPKAAVRAFAVNLRRLAPRVLPVGELARSTYRAASRKGDAAAAPKINFKAGVDHFCLHPGGTAVIEAVKKSLDLEDEDVEPARMTLHRWGNTSASSLWYVLSYMEAKGRLKVGDRVLMVTFGSGFKCNSCVWEVTGDMADKGAWADCIDAYPPEKLANPYLDKFGWINDVDGDTLML

SEQ ID NO: 72386 - protein, 584 aa, Zea mays
  Coding DNA Sequence Number=SeqID_29011
  Gene Ontology: Mol. function=nucleic acid binding
  Homolog annotation: Hit_ID=Q10KI0; Match level="QueryCoverage=99%, HitCoverage=78%, E-value=1e-163, Identity=56%"; Hit description=SAP domain containing protein, expressed
  Pfam annotation: Domain name=SAP; Domain location=12-46; Score=41.5; E_value=3e-09; Accession=PF02037.18; Description=SAP domain
MSSYPVLNNRPIDQWRVTDLKDELRKRKLPVKGLKEELVRRLFDSIQSEIEADEADEADEDVGVNVDDQLPDANASEENTVTVTEVHQETVVHVTQQVEVPTTKAGQESTISPTRRAPSVDVEEASADEEVPESVAEGNMSFEEVQVHTEITNEPVHEKTTDVDTNDTVVVNDAIDVNSDLAPAEVKFGATEASKIEEHDFPPAPVDALNSDAAGPMDTDVVTAATSDVGSMDTDVVTRAPVSDDEEKLELKVDLGNKVSMYDEDNNSSDTMNEDCKPIVSKPNNQVPEVSPDLGSQIKCESISTDNLSSNKKNTIKDNLNANNFDLELEVQPKMVQPSSGITSLGGDLQPLDDDKELVKNQTSLEDIDSTANVDSYKKDSPEGGSPEKLNLDRSSGDESMEEDVVEIKQDEANMKSDDLGQKNELNSEDVKEVILPDSVVEASKEVTAEEKSAASTEKRKLEDEDIANTEPIKRQRRWTADVAKVPERQALSQTGPETPKDIFQPAFKRSFGRSDSTASVDSPKERIVPPAEKPATTSLRIDRFVRPFTLKAVQELLGKTGSVQDFWMDHIKTHCYVTVCFLS

SEQ ID NO: 72387 - protein, 162 aa, Zea mays
  Coding DNA Sequence Number=SeqID_29012
MELGFRLKADVILLLFVRTDGNRAGWLDKRYYLKNCKTNRPGLWGRTSPGWRTRMCYLVTKGKQIRPLRLAPMDRTYRDAPAPGGGTPSVVARRLPSGQRIPVTLKGPSQLGESCGALLGLVLTVRLGPDPGSPSVFDEGALRLRLWPFLHEPVGLLDPWGI

SEQ ID NO: 72388 - protein, 246 aa, Zea mays
  Coding DNA Sequence Number=SeqID_29013
MTTSELSSQACSLGPPLRKLGGPIAWGPVPKNGNSFHGVVQIPAEAVSRELLTILSDMLVSSLDTSSLHPRRGARYQGGVNITHIRNKRYKLPDASRVALEVRGYCPCGILQDGVTAVMAASMRAPLQRGPRPRPLTGGDNEAIKAKELEARRQVLLMVSPVEATTSIAGSLTSGSDHLSTDDSGHLCTSGLPAMAAASARAERSSPPPSYGGEDKTIQERDLHLRSVRRLIRPPGRRRSSAAGCA

SEQ ID NO: 72389 - protein, 222 aa, Zea mays
  Coding DNA Sequence Number=SeqID_29014
GGQAAHPLRNKCGGRAAQSPYVMLRPLAYVTGNKLCGGIGPSAERGAEVHRIEPGHASTPDPCLGHGTSSPGTLLWVVRSSLGGVRTLPNGSGLFYFGGPGCAHRGPAPSKPDGVVSENATLTAHEIPLGLFFARLGIATQASCLHTAVGDLAPVLRLDRWSGEDEAAHLPRGASRIFIMQPGCSLPPVVIYKDDHQPRGGEKRAGLRPPPALSFKDVHHPR

SEQ ID NO: 72390 - protein, 227 aa, Zea mays
  Coding DNA Sequence Number=SeqID_29015
  Subcellular localization annotation: CTP_CleavageSite=65; ConfidenceScore=5.33e-01
MPLHSPHALRPSTFRAPGWVHPCCLRLAAVGGARPRGGWCSSDIARLQGFSSGSPAVVPRRRSPRVMTVGLVVGRSKSGCGLCPALNFKDVHHPRCGGGRVEPGFHLPHGPASRLFLQHSGERALTGLAEGANFDNAGPVGRKRRQLQRAWLAGLAGSSAASDAASCRLVRAWPSVHRTGDCCAVRTEGSSKTPYAARAAFVSLDCLVLTLARRLRVEASAGPSART

SEQ ID NO: 72391 - protein, 311 aa, Zea mays
  Coding DNA Sequence Number=SeqID_29016
  Homolog annotation: Hit_ID=Q6QP51; Match level="QueryCoverage=14%, HitCoverage=20%, E-value=5e-11, Identity=77%"; Hit description =Putative growth-regulating factor 1
MKSTRPCSVPRTTRARATAAPRIARAVALTPRQGKRHLWQAKRASFHLRHDDRVKKGTEKGDISKRILLSEGNGPPSPPTDQGLAPQKGSTAALEHSGSEPITDQGFEGWPLGRVRQPPQSMQKARGLLSHLATAKLLTASTNQPENSEPDHAPGLRPGRMREQQGLGHFFDDHVIAYTGLKHLSDNHVGISQACWPCRNDNELASASASGWKCQTEDRNSQSVSRFSQNMHAAVVTVSILLGSNSVFGQDSQNGDLFLPSDPLELLYMVSLSCFRRHQNRTKGGHLKIPVCTDGKTRTARLVRQYDKPKT

SEQ ID NO: 72392 - protein, 194 aa, Zea mays
  Coding DNA Sequence Number=SeqID_29017
MAPGEAVELGGCHSNSLAADNAPGAALDGVWDVCAVAAHPLRNKCGGRTAQSPYVMLRLLAYVTGNKLCGIIGPSAERGAEAHRIEPGHASTPDPCLGHGTSSPGTLLWVVRSSLGGVRTLPNGSGLFYFGGPGCAYRGPAPSGPDGVVSENATLTAHEIPLGLFSARLGIATQASCLHTAVGGTPNPGYRQTS

SEQ ID NO: 72393 - protein, 206 aa, Zea mays
  Coding DNA Sequence Number=SeqID_29018
MEALLADDQRPFEDLIMRDEKEVMRQWNEQRDKEEAELLHKLSERRKEATEKYLSHFTMDRHQKIIRQGEIDMESLLSPLQGPAPQPLGTRQLLDVTGPFEHHLRQSGYTADRPMYFTGPSDQMQARTQNTQVAPYMVGPPGYNPEQFGPITDRPVHHAGPSGYVADHPPSYVGPSEYGMNRLTYYAGPSDSIRVHARGLPKSRHI

SEQ ID NO: 72394 - protein, 338 aa, Zea mays
  Coding DNA Sequence Number=SeqID_29019
  Homolog annotation: Hit_ID=Q5GAU8; Match level="QueryCoverage=9%, HitCoverage=23%, E-value=1e-09, Identity=90%"; Hit description =Putative uncharacterized protein
MTDAEKEVATERRMDSPPRCDCGDRAVIDEDYDKQFCCPNIDYPYGWRKCRFREWLYGPLSHWPEPEVKEKRYMGWAAEEVKFDPVLCKCGIEAKYGLVPSELGVGYFCGHMVDYDEETRKCSWESYDDKGEVMRTIESKRIMGQKMRCGSRLVDSYINDRIRDMRREAKSAFYDSPKRAEYRRLKAADEKRAQDAREWEAAQAEKQMLDNLADRLKGKIGSGVNYLADEAHARIKWQRLSELIALAEAGLRAQEEEDEFMSQAAAEVEAAYYKKKSDEAEAEDELFSQAADEAEANYYKRTGDKCDAGQCSKWNEVVVEDCATDDSEDELLIDCDSD

SEQ ID NO: 72395 - protein, 216 aa, Zea mays
  Coding DNA Sequence Number=SeqID_29020
  Subcellular localization annotation: CTP_CleavageSite=42; ConfidenceScore=5.02e-01
MGMQEEAPNPSPVVYRDRTNRSRRPSIFPYPTNGFLLALLFVASGTSLPTLGGFDRGGAAQPRWKHLSSYASPQSINHLQSLGATGKGGCCVDGRMKGDIVLKQRLCFSAIKEIIYKGLSRLATVCPQFAGRASSLRARGKGLLRGCAYNFTYNTSTFLAEMTGVHLSEKAVNKRLNWLADEDNRLDNAWLYNSKDVVDRTGRKAKQFWAVMGSCY

SEQ ID NO: 72396 - protein, 557 aa, Zea mays
  Coding DNA Sequence Number=SeqID_29021
  Homolog annotation: Hit_ID=Q10GG7; Match level="QueryCoverage=82%, HitCoverage=87%, E-value=1e-168, Identity=65%"; Hit description =H1flk, putative, expressed
MAKGESRAAGRATSADGGFAKALLLHVAALSTAGAFAAAAAALARRRLWGGDRRKKQLPAPAMAEMPRLQLAESGRLEYLEKFSHYVARQLGFQDVSECPQLCRLANNYLSSSKTCMEDIYGFFAGAKDDAAECLLYVKLIEELDRCILGYFAFHWDHATYLITSALTADTGSKRKLRNMVLEATRKQRFERVTRDLKVTRVFSTLVEEMKAIGIIAAGGEASQCTDVMAPVAHSERSPVLLLMGGGMGAGKSTVLKELKQEAFWTNAEANAVVVEADAFKEADVIYRAISSMGHHNDMLQTAELVHQSSTDAASSLLVTALNEGRDQTIAMARAVHRQRYRMGVGYKVADDGTVTENYWEPASDDATEQPPRRPYRIEVVGVVCDAYLAVARGIRRAIITRRAVRVRSQLQSHKRFAAAFQRYSRLVDGARLYSTNSMGSAKLIAWKDGIGNSLLVEPREFDCLEKVSGLNEHATSVHDLYPDGTTTCGSRSIWEDMIVSTARADTQRELREAIRSVESGGGQPDTPPTTPQRELLGFIRSLEAANAEPAAVDNGL

SEQ ID NO: 72397 - protein, 53 aa, Zea mays; identical to SEQ ID NO: 68711
  Coding DNA Sequence Number=SeqID_29022

SEQ ID NO: 72398 - protein, 98 aa, Zea mays
  Coding DNA Sequence Number=SeqID_29023
  Homolog annotation: Hit_ID=Q6QP51; Match level="QueryCoverage=50%, HitCoverage=22%, E-value=1e-15, Identity=79%"; Hit description =Putative growth-regulating factor 1
MPFSPECRRKKRFASPRGGRPQLGTGKGDISKRILLSEGNGPPSPPTDQGFKGWPLGRVRQPPQSTQAPSPLPIRGSKVGPSKGFDSCPRALGLRALY

SEQ ID NO: 72399 - protein, 230 aa, Zea mays
  Coding DNA Sequence Number=SeqID_29024
MNWKRNLKNWKETSWNLSFWSLLLLFLCIQCMSQATSNQLALLHRKLQLKMMSLLHCKLKWHCDPVNVSTEEVKSLLILKRLRRASTSFTMAPPAPSSRLAVALAPSPHLSQPSPARSSMVPRDPCLCPHPPPIPAFRSSSHPSISQPRPIPVSRSLAPSMAPRDPRLRPRPPPIPASHSRTYHSSASVLASPLHDHRHDDENHWGLPRLAAQVGNPPVGRLPDLRQIVA

SEQ ID NO: 72400 - protein, 368 aa, Zea mays
  Coding DNA Sequence Number=SeqID_29025
MKMLYFDELTKGHEELNALMLIWSKGTKDDTHQKLKEENERLNMSLTQLKGKCIAQPSQDNRDHMVKKLETGTTEACINSLEENVKDLRIAKRKEQKKKINTSSKSLNHASMKDEAGSHSTVQPGGKVDDQVIPVTISSREPYSGSSSLISCEKQTIRIEFFILARLGCWIWGYLLSSSLLRHEDVLSVSKITVYRNAMNINRGKEKGGAAYRRRGRSDEGWGRLGETLAVTSRYGSTSEMAGIARSTRAGGCPRRRRVYRPNHGELVQSEGMVSFTGSRSDCVHKESKDGGVVYPVHVLRRGRELRRAWTGFSGEVNSDSLLGEPHEGVHSLLRGLDGVGNGSTGRSMVTEGLGGRGLAAHGQTATS

SEQ ID NO: 72401 - protein, 291 aa, Zea mays
  Coding DNA Sequence Number=SeqID_29026
  Gene Ontology: Mol. function=translation initiation factor activity; Cellular component=eukaryotic translation initiation factor 3 complex; Biological process=phagocytosis, engulfment
  Homolog annotation: Hit_ID=A0MLU6; Match level="QueryCoverage=28%, HitCoverage=18%, E-value=9e-34, Identity=86%"; Hit description =Eukaryotic initiation factor 3e
MCPQTPSLSPEYSHKAGLQAVITSMPLQVRPVIQWRPRGARYNGPDHTWALGLNEAAPREDFAAGLRPSAEWSEGCPLPALSPSDHPLRRRPRAKGGVFAFAPTVMKGLFDFSCGILVVSMLESEFEERWANGEIPGWGNKGVEKGFICSRFEEWWYCSTACVSAFLAEVFKIMYLNAIQTNAHHLIRYLATAVVVNKRKRNMLKELIKVIQQEHHSYKDPVTEFLECLYVNYDFDGAQQKLIECEQGSLNELGSWCIRLQHRLVEGVLDKESLYLKTGGYKKLEWLSEGF

SEQ ID NO: 72402 - protein, 323 aa, Zea mays
  Coding DNA Sequence Number=SeqID_29027
  Gene Ontology: Mol. function=protein dimerization activity
  Homolog annotation: Hit_ID=Q75G98; Match level="QueryCoverage=82%, HitCoverage=26%, E-value=1e-68, Identity=50%"; Hit description =Putative uncharacterized protein OSJNBa0042F15.17
  Pfam annotation: Domain name=zf-C2HC_plant; Domain location=96-152; Score=82.6; E_value=1.3e-21; Accession=PF07567.3; Description =Protein of unknown function, DUF1544
MYEGISSGFLSIDCDLDADSSGYTDKVTGIVYISDGSYVDADSVTTSEFKASICSVYVTKSTTSSLLQQDGNSGEPSSVNSASVTQKTSNAIKSDDPTWEHCFVPDMSKKHAIQCKYCDKVIHGGITRVKYHLANIGGFNVTKCKKVPAPVNQELEALLTKKTSEKEQRKKEKQRERDEIDLDKSDGSNEEDNEHENDIVVLKSTRVSNNSSSSRPSTNGGSGTIDNFYKPQYVEESAHKNKIQTKLSTQKREDRRDRACEYICQFFYEAGIAHNTVTLPSFGHMLEAIGAFGRGLRGPSAYEMSGPFLKRTKQKVLDRFKNH

SEQ ID NO: 72403 - protein, 198 aa, Zea mays
  Coding DNA Sequence Number=SeqID_29028
  Gene Ontology: Mol. function=magnesium ion binding; Cellular component=cytoplasm; Biological process=Mo-molybdopterin cofactor biosynthetic process
  Homolog annotation: Hit_ID=P12281; Match level="QueryCoverage=70%, HitCoverage=33%, E-value=1e-66, Identity=92%"; Hit description =Molybdopterin biosynthesis protein moeA
  Pfam annotation: Domain name=MoCF_biosynth; Domain location=2-115; Score=91.5; E_value=2.7e-24; Accession=PF00994.15; Description =Probable molybdopterin binding domain
MDGYAVRLADIASGQPLPVAGIIRDDPHALRAAFIEADSQADVVISSGGVSVGEADYTKTILEELGEIAFWKLAIKPGKPFAFGKLSNSWFCGLPGNPVSATLTFYQLVQPLLAKLSGNTASGLPARQRVRTASRLKKTPGRLDFQRGVLQRNADGELESDDPPDIRVHIYLAPLASATALSCWNAIAAMWKWANGWK

SEQ ID NO: 72404 - protein, 44 aa, Zea mays
  Coding DNA Sequence Number=SeqID_29029
MATSGLMVGESEPGCGLFPSLSLKDFHHQGWGGECAELRIRFPK

SEQ ID NO: 72405 - protein, 177 aa, Zea mays
  Coding DNA Sequence Number=SeqID_29030
  Gene Ontology: Mol. function=carboxyl- or carbamoyltransferase activity; Cellular component=ornithine carbamoyltransferase complex; Biological process=amino acid metabolic process
  Homolog annotation: Hit_ID=Q8SA97; Match level="QueryCoverage=63%, HitCoverage=21%, E-value=4e-13, Identity=49%"; Hit description =Ornithine carbamoyltransferase
MALPVDEAGPRPRSGDVGAPPKLGSNLSSVVEAEPEPLGRARRRSFGRGQGGVRALGSGEAEFVVFRPESEPLGSGGAEFAVFRVLARVRALGSGGAEFAVFRVLARVRALGSGGAEFAVFRVLARVRALGSGGAEFAVAPLARPDCLSDLLCRVALQSEWRRRRCPSVRLASGAVE

SEQ ID NO: 72406 - protein, 138 aa, Zea mays
  Coding DNA Sequence Number=SeqID_29031
METYASMISMSRKTKVVVSVASMRVGVLTAFAAQIAKKDLVLDIGDSGEPTILVLDEAKEVAANDAVAHLKVHSTLASTLREPKVLKHFLLEAPLKSPMEHFLLEVPLKSPTEYSLVGREEGYSGSLASEAHIELPGS

SEQ ID NO: 72407 - protein, 231 aa, Zea mays
  Coding DNA Sequence Number=SeqID_29032
  Homolog annotation: Hit_ID=Q9C604; Match level="QueryCoverage=16%, HitCoverage=5%, E-value=2e-09, Identity=81%"; Hit description =Putative uncharacterized protein F14G11.8
MAAEMVKAAMSGKLKEMDWEKKIKICELVEQDPGPAAQSEGVHKASLCPRSCASSSLHPARARLPSLHLAREHAPTNPAPARARLPSLHPARDSTTDGGIRGRAPTNPAINLAAGYPAPHQTAPPALALGLDGRDGGIRGRAATNPITKLAAGDDNHDAPSLPQSTAIKRMDRVRSFGTEGRKKDGVQIPASDKVYEYILFWGTDIKCYFHCRQLSVVQRLTALCWCLVSA

SEQ ID NO: 72408 - protein, 130 aa, Zea mays
  Coding DNA Sequence Number=SeqID_29033
MWAQRPECVMACTIGMAEWEWGILSYGTGVPQVRSCSTSRVTECDDFDICHDLHGLIIGEHVSHILEEIPSYIVSHQTRTTILFCLNKKGGRLDILLNRSKCLKKREIERQMATTKLFVEDSSSRISPSR

SEQ ID NO: 72409 - protein, 164 aa, Zea mays
  Coding DNA Sequence Number=SeqID_29034
MGEPALCARRARIKCAAESRWRGDSRCSGVAPDSPVHTGQSALREQNPPKNVNVKNEHAPSSAGKKEKTGRSSKVVPKGMQSTMKLQKAVPKGAQHKFSAQKSFPRECRAYSEKSTLIPPKYKAKREKSTRYRRNRRRRISKDVPKGMQNLQRKVSADTPKNKR

SEQ ID NO: 72410 - protein, 147 aa, Zea mays
  Coding DNA Sequence Number=SeqID_29035
MTSVVLKPPTEARRRQQDPCSANSCTATGFKALLRRPRYYLYRTRDVFPTAMLLSVQGSWHFPASHVSSQLHPIVQLVSTQVLKCESMPMDEQSANHKQSQGAVSVWGTGLSGGAPDSVRWCTGQCLVRQAASAEVAALRNSPTAYG

SEQ ID NO: 72411 - protein, 83 aa, Zea mays
  Coding DNA Sequence Number=SeqID_29036
  Subcellular localization annotation: CTP_CleavageSite=53; ConfidenceScore=5.34e-01
MALNNLRSEGKTNNSRGHSRVQPQAQQGALPRPTPGLDLSLGLRRRSPPRPTSASASGGVAASPDLGLGSTTLLGIHHYPTPS

SEQ ID NO: 72412 - protein, 35 aa, Zea mays
  Coding DNA Sequence Number=SeqID_29037
MANRCTRGMQPPHGGSGAALAPGYGQIVDHVDKVA

SEQ ID NO: 72413 - protein, 1296 aa, Zea mays
  Coding DNA Sequence Number=SeqID_29038
  Gene Ontology: Mol. function=microtubule motor activity; Cellular component=outer kinetochore of condensed chromosome; Biological process=mitotic spindle organization and biogenesis
  Homolog annotation: Hit_ID=A2Z9Y2; Match level="QueryCoverage=91%, HitCoverage=78%, E-value=0.0, Identity=51%"; Hit description =Putative uncharacterized protein
  Pfam annotation: Domain name=DASH_Spc19; Domain location=782-935; Score=-47.9; E_value=0.084; Accession=PF08287.2; Description=Spc19
  Pfam annotation: Domain name=Filament; Domain location=674-956; Score= -194.8; E_value=0.081; Accession=PF00038.12; Description=Intermediate filament protein
  Pfam annotation: Domain name=M; Domain location=1139-1159; Score=1.4; E_value=85; Accession=PF02370.7; Description=M protein repeat
  Pfam annotation: Domain name=M; Domain location=1187-1207; Score=2.3; E_value=64; Accession=PF02370.7; Description=M protein repeat
  Pfam annotation: Domain name=M; Domain location=305-325; Score=3.4; E_ value=47; Accession=PF02370.7; Description=M protein repeat
  Pfam annotation: Domain name=M; Domain location=421-441; Score=7.9; E_ value=12; Accession=PF02370.7; Description=M protein repeat
  Pfam annotation: Domain name=M; Domain location=470-490; Score=0.1; E_ value=1.3e+02; Accession=PF02370.7; Description=M protein repeat
  Pfam annotation: Domain name=M; Domain location=662-682; Score=2.3; E_ value=65; Accession=PF02370.7; Description=M protein repeat
  Pfam annotation: Domain name=M; Domain location=697-717; Score=2.0; E_ value=71; Accession=PF02370.7; Description=M protein repeat
  Pfam annotation: Domain name=M; Domain location=734-754; Score=2.3; E_ value=66; Accession=PF02370.7; Description=M protein repeat
  Pfam annotation: Domain name=M; Domain location=923-943; Score=2.8; E_ value=56; Accession=PF02370.7; Description=M protein repeat
  Pfam annotation: Domain name=Myosin_tail_1; Domain location=224-1163; Score=-529.6; E_value=0.097; Accession=PF01576.10; Description=Myosin tail
  Pfam module annotation: Pfam domain module=DASH_Spc19::Filament::M::M: :M::M::M::M::M::M::M::Myosin_tail_1; Domain location=782-935::674 -956::1139-1159::1187-1207::305-325::421-441::470-490::662-682::697 -717::734-754::923-943::224-1163
GSTKSGILGEIFLNLSNFLNIVDPTAISLPLKRCNAGTVLQLKVQCLGTKSKLSGVRSLRDMAPRLDDRSPTPTNDEMDNKSDCSDGMFNRSVRSSSENHLVGTYQDESGNRETSFSAPGSHRSSNSGDSTADRTNFSPRDNSSGGLYVGRQDSASSYASYVSAGRGDDGLRSNNSSFSSRASGPNLLQGNTPKIFSNGLSQLSMGASDSSKDLLEAAEETIEELRDEAKMWERHSRKLKADLEMLKKECSEKSKQHAELAGELSAAQAERDSYRHEIEELKSSLQDVNTRQTITGTPKRSDWIDLQKELEGEVKFLRESNADLTIQLNRTQESNIELLSILQELEETIEEQRVEISKISKVKQTADPENGLLVKEDKEWAKKLSMKDDEITVLREKLDRALNIGNAGGAGSNAIYLELEKENEILRAKIQELEKDCSELTDENLELIYKLKENGLTKGQVPRISNNNELQFEKLTSRIRQLEEELRNKEMLRDDSFSESSTSNADELQRKCADLELKLLNFRSQTCELEEKFQKSQEELEQRNLELSELRRKLNGLHSTELEVFESGATWKYQSRTADLEDTEPETDTLKARFELQLQENDDLRSSKVEMENFISEIQAEKSQLEERLSVSLKESSITSKCLDEVRKDILVLSSSIDSHVSANKVLERNIIELESCKAELELHVSELEQENIELSERISGLEAQLTYLTNEKESSELQIHDSRSLIINLKDKVERQQSEMETQRLEFKQKQQESQRRLSETQDDSEVLRRSNSKLQSTVESLIEECSSLQNLTADLKRQKLEMHGHLTQKEQELDESKKRNFEFSKTVEFLEAKLSSLHKDVSSKEQSLLSELESIFQEHMEQEERINRAHFMLNKIEKEKTLEVENLKREVVSLTAQVSSTHEERESATLDAIREVSVLRADKAKLEANLQDVSTQLRHYESQLEDLRKESKNKIKGLVDSLNASKQSEEMLTSDAEHMKKLMEAARSNEDTLRKTSNELELKLKSSDYEKQQMLEEISGLKLQVQKIMNLQDEVFKLQSSLDEAKFGKGKLEEILRSVTEECEELKAQKAMLTDKVSDMQETLRNGEEEKRNRIAMQAKLVRLESDLSASEASHVHEAELKNELSRIKRSNSEYQRKIQSLEQENEDLTRRVQTMEKGFEQMSHVKENLGKQELGGDNQAAIQSKIELLETKLAEALEENKMYRAQQKSPMPEGQPSAGAGDGKEGNTDRILQLEGELRDMKERLLNMSLQYAEVEAQRERWACHVRASKANASDAEPGPANWCWKMCIPRRH

SEQ ID NO: 72414 - protein, 131 aa, Zea mays
  Coding DNA Sequence Number=SeqID_29039
MGKSKKSGSSSHHSGDKRKREPTPPSEDFGDSEYLEEEFSSESEGSPAYTSPPASSEDSDDSQGIAVEVWSYIQAVERSGLEGSDESEVSSDEEDSSDSSEEGSAVTTTARARVTAAARPVAKRHWPKILV

SEQ ID NO: 72415 - protein, 330 aa, Zea mays
  Coding DNA Sequence Number=SeqID_29040
  Homolog annotation: Hit_ID=Q5GAU8; Match level="QueryCoverage=30%, HitCoverage=78%, E-value=7e-43, Identity=77%"; Hit description =Putative uncharacterized protein
MYREALWQKRGRPRELYPDVSSKDAPVPPELLVPNCDCGRLAWGHLRCFFFQWIDGPDKFDPRYLLFANWLCRRTSHEHFKRWVPPLPNPPPMTDAEKEETRKCSWESYDDKGEVMRIIESKRLMGQKMRCGSQLVDSYINDRIRDMRRDAKSAFYDSPKRAEYRRLKAADEKRAQDAREWEAARAEKQMLDNLDDRLKGKIGCGVNYLADEAHARYVQDKMATVELMEEEEDDTSRLTETGLRAQEEEDEFMSQAAEEVEAAYYKQKSDEAEAEDELFSQAADKAEANYYKRTVDKCDAGQCSKWNEVVVEDCATDDSEDELLIDCDSN

SEQ ID NO: 72416 - protein, 341 aa, Zea mays
  Coding DNA Sequence Number=SeqID_29041
  Gene Ontology: Mol. function=protein tyrosine/serine/threonine phosphatase activity; Biological process=protein amino acid dephosphorylation
  Homolog annotation: Hit_ID=A2XBK5; Match level="QueryCoverage=97%, HitCoverage=57%, E-value=5e-47, Identity=57%"; Hit description =Putative uncharacterized protein
MVRGGSRRSHTVKTAHGASTSGAESSAVEMGTEKSEVYSTNMTQAMGAVVSPKHASCMFNLPRPSLQTPVQQQISQFHASTLCLPSNFCDCVMLLLAYMFWILGYSLNEGHRLLQSKRACFPKLEAIKLATADILTGLSKNTITLKWEADGSSSVEISGLDIGWGQGWAATAAQDAKTIRVSLLLQCPFRRRTSSQSCPRPQGHKTQVDAYPTAVPPPALMIQLQPSRRTLKLHCWCLQDPTKSAVFQRIPLTYDEEKGAWFLEKELPGILKAQKDCKPVWLYLTPLGYLFPEGRTVSRDGTSDEEKELRERLTGPDPDLTDQERLMIREYLEQYADAAER

SEQ ID NO: 72417 - protein, 108 aa, Zea mays
  Coding DNA Sequence Number=SeqID_29042
MGKFTGIPVEDLSPWGTRMGKKCRPASVRRDPPRGNFFVTGQVWPRRRIPHCHPYSLRTGFGAAKPSPGARMTPGRVAIAGPKRCHREYGESRSVVRGGRSGLAAVVG

SEQ ID NO: 72418 - protein, 53 aa, Zea mays
  Coding DNA Sequence Number=SeqID_29043
MRSRGSEESSWYLESQVPDHYVNWNMENHPGKQCYHKGELLLYSKDVTFDPMP

SEQ ID NO: 72419 - protein, 54 aa, Zea mays
  Coding DNA Sequence Number=SeqID_29044
MGVGEGPPSWACSSTGIGTPVTICGCLAGRVHMLEGVVERQNTSSVIAGGGSAG

SEQ ID NO: 72420 - protein, 114 aa, Zea mays
  Coding DNA Sequence Number=SeqID_29045
MDMRIPGCNPPQPKCAVASMHVTRVKPTHNTTPYPDYIQIVSIKKWEAPEIEIKRVSEQTNAPLSAILAIFQMDLFQESLFDSSLASAKTFMGKLTDSHLIQEQPNDNNPLLAI

SEQ ID NO: 72421 - protein, 327 aa, Zea mays
  Coding DNA Sequence Number=SeqID_29046
  Subcellular localization annotation: CTP_CleavageSite=37; ConfidenceScore=5.31e-01
ERNSMGVGTSQPSFGFKDFHHAARLLPSTGGLGRGVRRVEVGPGYRAGGRTSSSCRGGRRRRERLRSHSRLKTGHAAALAGLTFNSTAFCPSLPHEFCRGRGPPGSSIRPEVSAAAVRPPGAEVVVVAAAGAGDGAPFVGLPLLRRPSPSEWGRSYLRRGNRSSVRNGTSNAKPTPKSISRGLGSGWRPWTPVGRGPRGNRPSRLPGPDSRRSPWTASPSEAGSDFAEDVVDAEGATAPFSAKTRACRIRSSCSVCLLRPPRPEKHTLAVLAKLRLFSSCFEHLDSVGNRDKVMSEVSVSRRRRSPSARSALAAYVYSVVSRIRFPK

SEQ ID NO: 72422 - protein, 217 aa, Zea mays
  Coding DNA Sequence Number=SeqID_29047
MVTTSSWVGRSKPGCDLGPTLSFKDVHHPRWGGDRADPALYLPCGSVGHPLPRRSRERALTGPAGGPDLDNVGLIDGGRRHLQRVRVVGLAPVGPSCQRAAAAPGRCPTRLGGFEWGSAGGLVAPAISAEAEAAREVPVTDGVTATIRASGLRAGGGEPLVGLLLLRKPSPMEWGYSPVDYLNRFTKHESPRVKVTSEPRPRTGLAPLEDGWPRPQG

SEQ ID NO: 72423 - protein, 41 aa, Zea mays
  Coding DNA Sequence Number=SeqID_29048
MGVGEGPPSWACSSTDIGTPDPMVAIEYRFRWIRSNLIRWI

SEQ ID NO: 72424 - protein, 378 aa, Zea mays
  Coding DNA Sequence Number=SeqID_29049
  Gene Ontology: Mol. function=deoxyribodipyrimidine photo-lyase activity; Biological process=DNA repair
  Homolog annotation: Hit_ID=A9ZLX8; Match level="QueryCoverage=95%, HitCoverage=81%, E-value=1e-131, Identity=60%"; Hit description=CPD photolyase
  Pfam annotation: Domain name=DNA_photolyase; Domain location=26-203; Score=84.9; E_value=2.5e-22; Accession=PF00875.9; Description=DNA photolyase
  Pfam annotation: Domain name=FAD_binding_7; Domain location=236-377; Score=-18.1; E_value=1.9e-10; Accession=PF03441.5; Description=FAD binding domain of DNA photolyase
  Pfam module annotation: Pfam domain module=DNA_photolyase::FAD _binding_7; Domain location=26-203::236-377
MPPAIPSLVHPSRVRILHPGGSHIHGPVVYWMLRDQRLADNWALLHAAELAAASTPAAPLAIAFTLFPRPFLLGAHLRQLGFLLRGLRRLAADAHARGLPFFLLEGGPAELPSLVRRLGASALVADFSPLRPVREALDAVVQELLRDAANMAVHQVDAHNVVPVWTASGKLEYSAKTFRSKVNKVINEYLVEYPEVPQWAPWCMEQPKSVDWDALINSIFSEAENVPEINWCEPGESSAMEVLLGSKDGFLTKRIKNYDTGRNDPTKPHALSCLSPYLHFGHISAQRCALEAKKRRHLSPKPQYDFNWAGAWEWARKTLTDHTGDKREHIYTMYWAKKILEWTSQPEEALSIAIYLNDKYKFESTLGPAFAAYPSSIY

SEQ ID NO: 72425 - protein, 144 aa, Zea mays
  Coding DNA Sequence Number=SeqID_29050
MKEFRVLEASVATIVSDEPSSHASPRGRKERKDFSGHQAWNWMLILRLQSSAVARRAPNSRMTLEVVMVSELVVTPETESFVIRIEVSDDVPLAAPVGMTEGASASEGVAKDNLAPEGGAEDDPSPKGAEPGSSLSHPFPKGRA

SEQ ID NO: 72426 - protein, 139 aa, Zea mays
  Coding DNA Sequence Number=SeqID_29051
  Pfam annotation: Domain name=RVP_2; Domain location=24-119; Score= -26.5; E_value=0.00012; Accession=PF08284.2; Description=Retroviral aspartyl protease
MGGGREFGRDTRRSEVKKKHWPREFVANGVAVTPVSHGDFRGGHGDMVKELSHAAHGREAAVDGEHIHIRRGNDDFLVDLIVIESMGKDVILGKNWLHRTKAVIQHTERTMCLQTPSGERIVVEDNRPRALIGASDKEE

SEQ ID NO: 72427 - protein, 78 aa, Zea mays
  Coding DNA Sequence Number=SeqID_29052
  Subcellular localization annotation: CTP_CleavageSite=63; ConfidenceScore=5.49e-01
MADSAVGTTPAQGHQRAQTSTDRPNGGVNSLQRAIMRILGRMHSLWRNRPNYSSLSAQVTPARAATHLNQNNPSVPQI

SEQ ID NO: 72428 - protein, 676 aa, Zea mays
  Coding DNA Sequence Number=SeqID_29053
  Gene Ontology: Mol. function=helicase activity; Cellular component =nucleus; Biological process=viral genome replication
  Homolog annotation: Hit_ID=Q1EPC6; Match level="QueryCoverage=99%, HitCoverage=44%, E-value=0.0, Identity=65%"; Hit description=DNA helicase homolog, putative
  Pfam annotation: Domain name=DUF889; Domain location=341-577; Score =442.2; E_value=6.9e-130; Accession=PF05970.5; Description=Eukaryotic protein of unknown function (DUF889)
MHMVAFHERQMVERVVNRPGVDRSMLTTYFEANRLHEEARGILYHDFPEWYTWQSGKGKVWQRRKRDTGGQVGRIVSAHPAEGERYYLCVLLNHMTGATSYVDLRTVDGVILSTFREAAERRGLLESDNTLDECLTERVIFQMPSSLRRLFATILVYCEPSDVAVLWQKHKDSMFEDYQHKSQNKTHVEQMVLIDIRNMLQSMGKDIKTFPLPPIIDAYDDAIGTAREVYEEESIEPTAGDVALKDSLNEEQRAAYDKIMSAVDTDQGGLFFVDGPGGTGKTYLYRVFTKQSGTAELLRKASLIIWDEASMTKRQAVEALDNSMRDIMGRLALPFGGKTIVFSGDFRHVLPVVRKGSRAQIVASSLRMSYLWESMSHLKLVSNMRAKNDPWFAEFLLRVGDGTEDTSSDGDIRLPDDVCVPYNGSDSDLDNLIDFAFPNLNENMSDSTYITSRAILSTQNDWVDMINVKMIDRFQGEHMVYHSFDSAMDDPHNYYPPEFLNTLTPNGLPPHVLKLKIGCPVILLQNIDPANGLCNGTRLVVRGFQRNSIDAEIVLGQHVGKRIFLPRIPLCPSDEEMFPFQFKRKQFPVRLSFAMTVNKAQGQTIPNVGVYLPEPVFSHGQLYVALSRATARSNIKILVIPAVDGRKKSRKGVKKNPTVDCGTYTKNIVYKEVLTN

SEQ ID NO: 72429 - protein, 320 aa, Zea mays
  Coding DNA Sequence Number=SeqID_29054
  Gene Ontology: Mol. function=cysteine-type peptidase activity; Biological process=proteolysis
  Homolog annotation: Hit_ID=Q109R5; Match level="QueryCoverage=80%, HitCoverage=24%, E-value=5e-31, Identity=32%"; Hit description=Ulp1 protease family, C-terminal catalytic domain containing protein
  Pfam annotation: Domain name=Peptidase_C48; Domain location=80-291; Score=37.2; E_value=5.9e-08; Accession=PF02902.10; Description=Ulp1 protease family, C-terminal catalytic domain
MESLFVGLSHNKPKKSVATAIVREVLSHDWLLLDYICTQGDLALIDFIKEIPCEPRVEVVLIDDAFVERKWMECLFQPNAYLGDEVIDCYINLIKAQKHLKCRSGGRVHIENAFQFNFLKRDGDVEIKTEGLYPIEDMTQICSAKRRVLLYLDHDMVFIPINIRETHWYLVVIHARNMEIQVLDSLGSSQDRKDLTDSIKGLQRQIDMISQRKELKDHRWPDLQVASWPLKEIDMGYAKQTYSSSCGLFLLNYIEYWTGDELSDSFTQEKKWAAIFTILSDLNKRRGGLVISKWKKEVGPLESSIWKVEIYRKSHQDFSI

SEQ ID NO: 72430 - protein, 103 aa, Zea mays
  Coding DNA Sequence Number=SeqID_29055
MGGARGVGAELGSMAWFLVRRPEGGKGAVGDPDAGNLPPAIGAEVSSSDALNIAPVNAPSIDSASMPPALGFPLFISNLQLKSCGAPVPDQVSSLMQWNPLLL

SEQ ID NO: 72431 - protein, 67 aa, Zea mays
  Coding DNA Sequence Number=SeqID_29056
MRVADIAGAAARQLHGAGTAVEVGARAGRRDGWRKKAGLGRRAARWQTGLGEERHSDNRVGQRGEVE

SEQ ID NO: 72432 - protein, 140 aa, Zea mays
  Coding DNA Sequence Number=SeqID_29057
MENPHLIPAGCNPFNASAIVFLLPPRSRTTARHTGIRIAPDEPHGRASEGRRDNTEGGLGHGCSDLATKLDEEGKVSARFGGGQAQACPSTCARPRYFGEVPRFPCRCSPTSAEELHDDAQVRARRQQGLPPRARIVVFP

SEQ ID NO: 72433 - protein, 94 aa, Zea mays
  Coding DNA Sequence Number=SeqID_29058
MTPPREQGARAQEEDREGARLLAMDSREREEGMDAMGAARQRDSLRHEQERIGLCVWERRKKRVAARGRYEVELDKDLFEDDALEIPLESMGSD

SEQ ID NO: 72434 - protein, 47 aa, Zea mays
  Coding DNA Sequence Number=SeqID_29059
MARVACTLRGKRLDGGVSVLSVGVNPVVPKEEPQQLSWSREDVCLPP

SEQ ID NO: 72435 - protein, 133 aa, Zea mays
  Coding DNA Sequence Number=SeqID_29060
MGRGKRGGKGWPHRVDNKSKHPQSPPSEDFGDSKYSEEVSSEHTGDPSSVSGSMGRMTRRRPPWRRWKTPPTPWSGGEDDGGSGDDGGKGGSDGNDEGGDDESDGEGNGDGDGKGDGGDGVRRPTQDESVSSL

SEQ ID NO: 72436 - protein, 111 aa, Zea mays
  Coding DNA Sequence Number=SeqID_29061
  Subcellular localization annotation: CTP_CleavageSite=42; ConfidenceScore=5.25e-01
MALHKLCDDGRPPALLRKQGDVSKDSTAPTAVPPPGSVAPPTATTSRQQGAKTSPAATWASELSPPSDPYDPEADSSLKEALETIRTANEVIDEAVNKLLNEAAEKVLNED

SEQ ID NO: 72437 - protein, 226 aa, Zea mays
  Coding DNA Sequence Number=SeqID_29062
MGPTVLSPCITTAQWSLGVGSHLVSARLRELDAYAWGQAVRTVVPARFVGELNGTHGIHAAGPPHPNPVTGVSAIAHRRLITAVGQPSTVGAIALSTAVDNEQSEVPECVVGDLLEQQPSEGNQLERLHRRLHKEQERRRQEQEQEQQDSSPSPQREVESARPPSPAPQPEMPPAPPQGISAAGGDPDGDGYDDDAGGSLSPDTEHSEEPEPEGWIARPITRDAAR

SEQ ID NO: 72438 - protein, 123 aa, Zea mays
  Coding DNA Sequence Number=SeqID_29063
MASKELGGFDGHGRVQIGVTETKTGRRNAPYPRHGSGLGQSCPRSGDLRGHQGKRDSAVEETGQGLGELEAELEDVAARQGTSKGSRRAERRALERAQQGEKQGDATLGEREVEQGPWQSAAS

SEQ ID NO: 72439 - protein, 65 aa, Zea mays
  Coding DNA Sequence Number=SeqID_29064
MAVARLSRLPQRHSNERWQIGYRECGFEHRSDNNRRCNTPDVYIPLDNEYGFKHVISVDKTDAKF

SEQ ID NO: 72440 - protein, 69 aa, Zea mays
  Coding DNA Sequence Number=SeqID_29065
MADEDPSAMSQGAPAEELARAGEAGRKRREREESRARREQRDGLEGALPWKVELGIREMGDEHAREDEE

SEQ ID NO: 72441 - protein, 71 aa, Zea mays
  Coding DNA Sequence Number=SeqID_29066
  Gene Ontology: Mol. function=ammonium transmembrane transporter activity; Cellular component=membrane; Biological process=ammonium transport
  Homolog annotation: Hit_ID=Q947N1; Match level="QueryCoverage=73%, HitCoverage=9%, E-value=3e-11, Identity=65%"; Hit description =Ammonium transporter 1-1
MGLLFYVLKKLVLLRISTDDEMSSIDLTRHDGFANVYHDEDPNNKGRVGGFMLKSVQNRIEMPATATDPAT

SEQ ID NO: 72442 - protein, 186 aa, Zea mays
  Coding DNA Sequence Number=SeqID_29067
MEVGCEGWGGWEWSNEVVVGVVWKEAPESTTQSVVVRGGGSGEGTGGDRSTWEDKRSRHVTARLRVDLDAVPKNRVPDWVEGHEHAPDELAVVEEDTHSHESSGRGKAHGDRCRPTQGGADWTTGRATAGAADCSASGVQGTGQQGRGETGTAGRRRLSSSGDANRRRRPGLGEMVVDGWLRRGAG

SEQ ID NO: 72443 - protein, 430 aa, Zea mays
  Coding DNA Sequence Number=SeqID_29068
  Gene Ontology: Mol. function=ammonium transmembrane transporter activity; Cellular component=membrane; Biological process=ammonium transport
  Homolog annotation: Hit_ID=Q947M9; Match level="QueryCoverage=13%, HitCoverage=16%, E-value=1e-09, Identity=44%"; Hit description =Ammonium transporter 1-3
MRGQPEKRTVMRFLDLGQAANPAEIWLRTGWAGEGPKEMRNASRALTEITIFIGQRLKAEAGCHASVTGNGTGWPPTDAEVSESGTKPKENVANKRGLWFGSYGFNPGTFTTILKSYGPIRTVYGYNGPLEHGVDVCNGLLGGFVAIAKGCSMEKSEKGKVEELAVLDKNIKIDLHINSKAFTAGQAAALPPVHAIPERRVQVQNVHFCVLHGWTAVVPLPVVECGLPTASPSPPAPVFDAGSSASAPMDVDLAAPPPPPPTAAAVARRSPSPPVPVVVGGGEEARPLRGQWRALSAALILDVEQWDGGRSARPEVGPGAAALANAMAWHPRRGHPWRLGACGWQQAHPRQEARTVAKLATDWSRCARSGVRRGPEARRRRELGARPGYHRAQADQPARRNASARRARLRVPDAASTGRRRAPGARPGSH

SEQ ID NO: 72444 - protein, 468 aa, Zea mays
  Coding DNA Sequence Number=SeqID_29069
  Gene Ontology: Mol. function=transporter activity; Cellular component= integral to membrane; Biological process=transport
  Homolog annotation: Hit_ID=A2Z412; Match level="QueryCoverage=55%, HitCoverage=67%, E-value=1e-79, Identity=57%"; Hit description =Putative uncharacterized protein
  Pfam annotation: Domain name=MFS_1; Domain location=73-385; Score= -6.0; E_value=0.03; Accession=PF07690.7; Description=Major Facilitator Superfamily
MARLNNVQLPSGRLVSDKNIELDEVSGSSESTTLLAGAEESDNLNEDQGSDFGGIKSVGKLLAPKLIRATLLLWMAFFGNAFAYYGIVLLTSELSNGNRICAKEDVESVHSTNASLYKNVFISSFAEIPGSFLSAMIVDRFGRKRSMASMLFTSCVFLLPLVFSRTDILTRISLFGARLCISASFTIVYIYAPEIYPTAVRTTGIGIASSVGRIGGILCPLVAVALVHSCQQTTAILLFELVIFLSGLAVSFFPFETKGSAAAFLQGFFPFPGAVGPLPPSLGRRPPPFPGAPPAAGAVGRALRALLYGRRAPFAGALLLFCIGAVSAAVATAAAWLSLPGSASTLHVRPAVLPPTDPPRARAIGPSPAARFHYTVVGGGFTSGFHRPSTTVPPPALQSAASSASTSAVLQQQPPSPIRTPARRRRLSGRLRTDQQPSIAPLRRSGRLRAAGCLPCAPAQPAVDDHLP

SEQ ID NO: 72445 - protein, 71 aa, Zea mays
  Coding DNA Sequence Number=SeqID_29070
MATNPPRRPLQTSTPCSSGPSGAASRQRCECSDAVSESGGDYGAEHNRPLTVAVDGPDGAVGLENGGEERN

SEQ ID NO: 72446 - protein, 284 aa, Zea mays
  Coding DNA Sequence Number=SeqID_29071
  Subcellular localization annotation: CTP_CleavageSite=41; ConfidenceScore=5.34e-01
MTSTVLSSLQSQRNVSRTQTSRPPRRPGHTTDHSATELGFNSAEPAAPLQGSGPGAAPSATLLQNSDMSPPSTFEHSYTPCTAGSPLCAYKRSARYAVSARHRRLLARARHRRLPSPRATAACSPACSPERAAAACRLRAPPPPARPPTRPPARRNAPPCSPDLPSARSGASTTACSLHQPACSLNRRPLAARPPASSTAARSQCARLLSACPPARPAPARSTGACSSAGVPVCSAASPPPGAQPPHIPSSPFRPARYSPGPAPPVTVVTSGNYFRLFILYFLY

SEQ ID NO: 72447 - protein, 77 aa, Zea mays
  Coding DNA Sequence Number=SeqID_29072
MAGSKDHTKISTTNIIKPAVEALPADDQRPFEDLVMRDEEVMRQWNEQRDKEEAELLHKLSERRKCTLSCHHHSRNH

SEQ ID NO: 72448 - protein, 421 aa, Zea mays; identical to SEQ ID NO: 71311
  Coding DNA Sequence Number=SeqID_29073
  Homolog annotation: Hit_ID=A7PQU5; Match level="QueryCoverage=13%, HitCoverage=8%, E-value=2e-07, Identity=53%"; Hit description =Chromosome chr6 scaffold_25, whole genome shotgun sequence

SEQ ID NO: 72449 - protein, 649 aa, Zea mays
  Coding DNA Sequence Number=SeqID_29074
  Gene Ontology: Mol. function=amine oxidase activity; Cellular component=peroxisome; Biological process=amine metabolic process
  Homolog annotation: Hit_ID=A7PCT5; Match level="QueryCoverage=39%, HitCoverage=31%, E-value=2e-30, Identity=37%"; Hit description =Chromosome chr17 scaffold_12, whole genome shotgun sequence
  Pfam annotation: Domain name=Cu_amine_oxidN3; Domain location=321 -436; Score=-14.6; E_value=0.096; Accession=PF02728.7; Description =Copper amine oxidase, N3 domain
  Pfam annotation: Domain name=Thiolase_N; Domain location=353-545; Score=-164.2; E_value=0.025; Accession=PF00108.14; Description =Thiolase, N-terminal domain
  Pfam module annotation: Pfam domain module=Cu_amine_oxidN3::Thiolase _N; Domain location=321-436::353-545
  Subcellular localization annotation: CTP_CleavageSite=5; ConfidenceScore=5.61e-01
MSSLRVVTRGANPPSLGTVSLKTKAPKMAGMPIMSLANQDASTPATVTATHASVLSFTASTRYQMQGPTEHVCPYELEHQGSLIRPSEGKLWCTEIMEDSGNGNLDGAGKSSNEDLVLPGLLGGMTLPMFDEMSPNSGEEEIALFSEGFDYPVFVDMPLEKVVWDEEPGYDDLLNQLAQGADHLVDATMQPTIHPIAVDKQLQLGVIDEDEVVLIEGKYIVDWKILQARETSEEEVEDYLAESKEGAMDEVLQVELIDDEVQWDEESPNQSVHKGLLPHTVRKMVYLKGFSQGGGISTMTQVQRCHPLAPLSTAKISVAIAIVRAAGCEFAVKYYPSFNEAIQRIDVNDIALVMVDHSCSGYCSEADAHYCRTGNSPLCCRTDSDSLMENGYARPVEGISVAALYAGFADTVLLKTKHRQCTSGLQDVADVAVAIKAGPYDIGIVAGLQSKTVNKVSLVEQMNSKVELFSQAHGCFFPNGLTYENIAHCFGTTRLQPDQADVESHPGKSKDGLVIYSVAYVGDSCEHRFITHRPSFVGMVILYGDPNELHYRQNAFDAGEEGLEIKVHSREKGCECLDNLLVSKTRHEYLNLIRNDALLLMPAELQVLPSVRVLLLWMIRPWNPAHYTAQIEMYKSSSYVKTEGIEERE

SEQ ID NO: 72450 - protein, 188 aa, Zea mays
  Coding DNA Sequence Number=SeqID_29075
  Homolog annotation: Hit_ID=Q6J9V9; Match level="QueryCoverage=55%, HitCoverage=29%, E-value=1e-10, Identity=46%"; Hit description =Putative uncharacterized protein
MQAACNHTKGAHPFDSDASSMEAQAHTSWTEKGDTPKGILLCKGGRPRALLLIRGSKAGPSEGFDSRLRALGLRALLLIRGSKAGPSEGFDNRLRALGLRAHHWLAPEGFDSHLRARRARDDSRYVRYMAEARATLPRLGAALANPAPAKPLTASTYQPENLEPDYAPGLRPVRMREQPDRPKHHETR

SEQ ID NO: 72451 - protein, 87 aa, Zea mays
  Coding DNA Sequence Number=SeqID_29076
MGLVQQPCESDGEGGWKNKLEQGERHTEGRAQREGELAIGAAGGGHGKHQEGGALASGVGADAQEPSVANRGGSLVLQHLRGEGARK

SEQ ID NO: 72452 - protein, 91 aa, Zea mays
  Coding DNA Sequence Number=SeqID_29077
MALTVASAPFQPRLPHAPGVIAALVSRGHLFMIDYLEFVEMAGGDEDLIYDALCMGSDSDLGWLGSALGTSSSGDRLGESAQEGGGARSPV

SEQ ID NO: 72453 - protein, 462 aa, Zea mays
  Coding DNA Sequence Number=SeqID_29078
  Subcellular localization annotation: CTP_CleavageSite=13; ConfidenceScore=5.08e-01
MPSSSSSADATLPAAASSKETLSSVMVEELRAGDSVDFGVSRMTSARVEDMQRLGYFGGGVARAPGTEEVPEPEGELVVFEAFFVAGLRLPAHRVFELNQLSYDGYPGQDEADRRGKKPAVETGGDPALAAAPSSKKRKLVMDKDRQGAAQKRQATVRVHEARPKRQRGAAKAAASGGGKPPLPAKAGASAPSKAPEATVGTEGPKLTKVVPSASGVAEAAKAARALPLPGKRVADFGTEINVDDYLGGSDEGQLALAAPGAAIVTAALAPKARGETLGVGGEVSALALVRDEAGVATRRLKGVTEALSQATEALSQVADFTSRTASGALTAALSAEVERLRTQHADAVREKSASDSKCRKLADKVAALEKEKADLRRQLAGERREANEAIAKEQAAQAEARLARAEGNIAKELAGELQGRLTALESRAEGAEAAMRAEADRTRTQLMTAYRELGARTGDFE

SEQ ID NO: 72454 - protein, 772 aa, Zea mays
  Coding DNA Sequence Number=SeqID_29079
  Homolog annotation: Hit_ID=Q6J9V9; Match level="QueryCoverage=8%, HitCoverage=33%, E-value=3e-08, Identity=46%"; Hit description =Putative uncharacterized protein
MSFVLFDYFESGILKTTEYTLGPRRRGSSSTLGVNYTFGEESGPSRQLGRPPRSLSQLSPEDISPARGLGNSTPASVPPVDGPARLRPTKCSFRANSASVHADTAASGFGSSKSGRGFPLTKQEKPRAARSTDARNSYASGIRIPHSSPSHEATHTWLSATMNKTPALKVPLQMELQFHLRRYEQPPTIGGPAEQQKADGWLAAARFSSSDDDFCSERPNSSSDDLRADAAAIRPSPTSPLEGRGQAEGRRVGGRSVGGTGYLVGGETSSGCRGGRWHRKQRRSRSDWRAGHAAAASATNGERPSPRSLREGAGHCPRGDRPQLGALPSPALMMNILEAEGGAEAVAQLASPHLGAGGHRLGAEEAKPPCAVRVTAQRLQAFLHFRPDQRVKGQTAMQAACDRTKWAPPFDSNASSMGAQAHTSCNRRAGCYVQETTPPLAPLPCLLDCGTGTATRGNPAYDPTVPTRHVDHGSVSRGRRCDGRYGQKWAGSNGGGRQAEAAVKSSAKLTTGGTFGGRSRRRFASAIMTASKKGTGKGDSPKGILLCEGNGPRAPLLIGGSKAGPSEGFNSRLRALGLRAHYWSEVRRPAPRKGSTAASGHSGSAPTTDQGFVGWPSKGFYSRLRRRARDDPRYVRYITKARATLPRGSGAALANPAPAKPLTASTYQPENLGPDPKSGLGRHRKLRLARPQGSDSASAPEDDELRLARPQGSDSASALEDDELRLARPRARTRPRPRKTDSTSTSEEPPPHPTQGSDRPRHRRGHHYPTPS

SEQ ID NO: 72455 - protein, 209 aa, Zea mays
  Coding DNA Sequence Number=SeqID_29080
MHSKKTTLTESGIARRRSRALSFVPTFGKIRPGLGRRCKREDLCLEGGCQHRAWARSGRVEPLDFGQGDFIFVGEAIPLADPLQIHDIVGSKHGEGPPDAVMQRLAESATRMVTQGLQTKSLGCENQGQSDARRKKERTLTRDTHPRSGRIKGWERVLASGFPNVTATRLWRSSTGRGSEDIRKPSKSAPGVISQSGSRRSVKGSTLRR

SEQ ID NO: 72456 - protein, 137 aa, Zea mays
  Coding DNA Sequence Number=SeqID_29081
  Subcellular localization annotation: CTP_CleavageSite=35; ConfidenceScore=5.24e-01
MAAATSAGAQTGGVARRAQSRRCLSSDKRRFLCARCLEEGSSVGRAAGGVEYLPWGSRPPWNRTGAEEDGACYWGMASCTKKERPTWGGWRPGEAAQGNPRQGGEKQPTRRVRQRGSTTKGVAPIPTDGEGRARSKA

SEQ ID NO: 72457 - protein, 137 aa, Zea mays
  Coding DNA Sequence Number=SeqID_29082
MGGAEAPSEWVPASTRRRGGAGDVGFGHEGEGAGDLLLWGGVPELGQRRPRGKKGGKQGSDQGAEGEIKGVSSTHHWSKKVALSIGRLQLLASRCGMQLLAGVVGGRALAARQSRPWHARENKTTAGEIFKDKRLIA

SEQ ID NO: 72458 - protein, 77 aa, Zea mays
  Coding DNA Sequence Number=SeqID_29083
MEAKSPPQPNQGGTCKNYATSIRTLILIQILSHRQRIPMDPRPQTIIILLSKWIQPIPDLARVLEKSLDFYRDPDLA

SEQ ID NO: 72459 - protein, 123 aa, Zea mays
  Coding DNA Sequence Number=SeqID_29084
MEAKSHHQPNQGGTCKNYATSKAEYTNTQLDLPGYNGSSSLISYEKQTIRIEFYPCKVVFAGGGTRLASIHWRSVQVGQIQTCDFKNSQLQVQTSKQIDPRLSGKITKKSDPRLFVNLSKSTT

SEQ ID NO: 72460 - protein, 130 aa, Zea mays
  Coding DNA Sequence Number=SeqID_29085
MELAAITLTVAHPCTARGLVTGALSQRPGATTILPGSQPRHGRPLGKEIGSRHCIISGKFTLRAFAISSTSSCKRQRLTGCWGARSFLAGKCAVEACSHAPARPRSEVAAVAATDVVAVGFTLAATIWGE

SEQ ID NO: 72461 - protein, 149 aa, Zea mays
  Coding DNA Sequence Number=SeqID_29086
MALLDPPEHLPPEVALNLVRNLLGRGAPAFVGRICVSASAHGDLTIRESMLFVSNLPSARPRGGSALPPVLSFKDVHQPCGGGERAGLRLRLPREPVTRLFLQHSEERTNTSLVKVGGELRLRGIGQTASAVCRRASNSLAWMFLSSPP

SEQ ID NO: 72462 - protein, 56 aa, Zea mays
  Coding DNA Sequence Number=SeqID_29087
  Subcellular localization annotation: CTP_CleavageSite=35; ConfidenceScore=5.35e-01
MCRLSIKGPFGTTPAPDSKRGSGGAVPNGRIRRISSSRGSGSGAKETEAGALPNGS

SEQ ID NO: 72463 - protein, 556 aa, Zea mays
  Coding DNA Sequence Number=SeqID_29088
  Gene Ontology: Mol. function=metal ion binding; Cellular component =integral to membrane; Biological process=ubiquitin cycle
  Homolog annotation: Hit_ID=A3B9Z6; Match level="QueryCoverage=71%, HitCoverage=46%, E-value=1e-136, Identity=64%"; Hit description =Putative uncharacterized protein
  Pfam annotation: Domain name=PHD; Domain location=173-215; Score= -6.9; E_value=0.085; Accession=PF00628.20; Description=PHD-finger
  Pfam annotation: Domain name=zf-C3HC4; Domain location=171-212; Score= 40.7; E_value=5.3e-09; Accession=PF00097.16; Description=Zinc finger, C3HC4 type (RING finger)
  Pfam module annotation: Pfam domain module=PHD::zf-C3HC4; Domain location=173-215::171-212
MAEAAASSSSSGSCAPRRLHGAGIVRDALTYNGLAALPPPLPPAQVQVTAYGSGGGGGGGGGGGGGKIIPAVLFIIVILAVVFFISGLLHLLVRVLMKKQRRRGGTASAAARGSGGEGGGADAALQRQLQQLFHLHDSGLDQAFIDALPVFAYREIVVGGGGDGDKEPFDCAVCLCEFDAEDRLRLLPLCGHAFHLNCIDTWLLSNSTCPLCRGVLFVPGLMGEDSPMFDFEEGLEEGRLSEDCDDGFGLPGLKASGLAQTPVAEKKVFPVRLGKFKNVGTHGAVEGGHANANANANANPRVLTRDEGESSSSRLDGRRCFSMGTYQYVLGTSELRVALQPGCIRNGTGGAMRGMPPGLSSINADIMEGKKICARNKGESFSVSKIWQWSNLKGKLPAGSDECSDAGSLPWMKKGGSSASPDLRAQTQPRPRKTVSASPDPRARTPPRPRKTVSASPDPRARTQPRPRKTVSASLDPRARTQPRPRRSHRLARPRAWTDPAAGGYIITLPLASSGYEEQDQRPIWLAPGPPGVETPTVGAPGRGLLRVDEELPVKL

SEQ ID NO: 72464 - protein, 70 aa, Zea mays
  Coding DNA Sequence Number=SeqID_29089
MKQAIGNKGLQIVHCDGGERPRAARRNDGCPVGHHQVKGVAAERKRDRERGYSERDPSLRRKRAPSPPTD

SEQ ID NO: 72465 - protein, 153 aa, Zea mays
  Coding DNA Sequence Number=SeqID_29090
  Gene Ontology: Mol. function=transferase activity, transferring hexosyl groups; Biological process=carbohydrate biosynthetic process
  Homolog annotation: Hit_ID=A2X7E5; Match level="QueryCoverage=89%, HitCoverage=34%, E-value=3e-60, Identity=71%"; Hit description =Putative uncharacterized protein
MVVLVSDGVSEYSRKLLQADGWIVNRITLLANPNQFRPKRFWGVYTKLKIFNMTSYKKDTIVVKSIEDLFKCGKFCGNLKHSERMNSGDQGFLNSYYSDFANSRVYEPDSPLTPEPATQRLSTLYNADVGLYMLANKRLMQACTVLKAGFVQH

SEQ ID NO: 72466 - protein, 116 aa, Zea mays
  Coding DNA Sequence Number=SeqID_29091
  Gene Ontology: Mol. function=nucleic acid binding; Cellular component= ribonucleoprotein complex; Biological process=mRNA metabolic process
  Homolog annotation: Hit_ID=O22247; Match level="QueryCoverage=84%, HitCoverage=90%, E-value=1e-48, Identity=94%"; Hit description=Small nuclear ribonucleoprotein-like protein
  Pfam annotation: Domain name=LSM; Domain location=34-113; Score=65.1; E_value=2.4e-16; Accession=PF01423.13; Description=LSM domain
MWDLAILTHRRIIWVQQAGKKEEEEFSTGPLSVLMMSVKNNTQVLINCRNNKKLLGRVRAFDRHCNMVLENVREMWTEIPKTGKGKKKALPVNKDRFISKMFLRGDSVIIVLRNPK

SEQ ID NO: 72467 - protein, 115 aa, Zea mays
  Coding DNA Sequence Number=SeqID_29092
MAGAHDDLVTYSTKMDLILEKLAAINSRLDSHDARLAKLEQAWVSPSASTAGCLGVGNLGASEGGLGAGEGGQVEDDGVDGLQPDTPREEVEAAFYVEVVVPLLQLASVLVEVQA

SEQ ID NO: 72468 - protein, 239 aa, Zea mays
  Coding DNA Sequence Number=SeqID_29093
MATWASTDQRQRSRAHGVNNKGGEFSCALKLTSDGEVAAELQGAVCAARGDHGEQVECVRTEQTRLPAGGSRHEHKESARRKARTHGPSWGQGETQLALHTTASRAARWRRKEIRARAGRAERAWGGDGEELQGARNPGKKKNVAAAMESGRCLVRLKEAAQWFWLPRLQLPSAPPEEAPDGGEQVAEGRGHGCQGGAEARSGGGKIELGKKTSEMGAQRARDEAHAGEEEDAGCRGSS

SEQ ID NO: 72469 - protein, 113 aa, Zea mays
  Coding DNA Sequence Number=SeqID_29094
  Homolog annotation: Hit_ID=Q8S474; Match level="QueryCoverage=26%, HitCoverage=3%, E-value=3e-08, Identity=90%"; Hit description =Putative pol protein
MRMRLKLMKEKIKKMSHLKMTAMIKEEMQPHRVEEALQYSDWVVAMQEELNNFTRNEDAKPIKTPMGTNGHLDLDTEEALRYNSPDCPVHHQTVSGAPGESDSELVGFGNPLR

SEQ ID NO: 72470 - protein, 272 aa, Zea mays
  Coding DNA Sequence Number=SeqID_29095
  Homolog annotation: Hit_ID=Q6J9V9; Match level="QueryCoverage=33%, HitCoverage=40%, E-value=2e-10, Identity=42%"; Hit description =Putative uncharacterized protein
MQAACNRTKGAHPFDFNASSMVAQAHTSWTGKGDTPKGILLREGNGPRAPLLIRGSKAGPSEGFNSHLRALGLCARYWSEVRRPAPRKGSTAASGHSGSPPTTDQGIPSEGGIEPSDPVKRGPGPTNHQQLTGDTMFGALRGQHGAFPPSSLRKGDAGAAARVALTAVPLDRVRLTAAKSGLGGHRKLRLARPRARTRAWPPEDDELRLARPQGSDSASASADGLRLARPKGSDSTSTSEDRLNLDLGGASASPNLGLGPTTPQEEPSLPYP

SEQ ID NO: 72471 - protein, 148 aa, Zea mays
  Coding DNA Sequence Number=SeqID_29096
  Subcellular localization annotation: CTP_CleavageSite=5; ConfidenceScore=5.01e-01
MSSPRPGHRRQGLLRESGPSRRLGRSPLGPRPTIFQGRQPDPRPRLVNSGVGPANGQPGQGPANQVRTTPLHGGRPAEQQKTDERLAATRSDYDDNDPHSGWPSCSSAGLRVGAAANLALAHTDARGGEDKYEKTGRPEARMVAVTPS

SEQ ID NO: 72472 - protein, 128 aa, Zea mays
  Coding DNA Sequence Number=SeqID_29097
MALAGRNWFAGVRRELFLVVDLENGEEGEVTEEKTPPPLESQAETWLYFDICESEPDSPVNEGKPRRADRGPFNWSHASSWHTLESLFLSRVRKRQTFVASAPRWYQTRKKKTEVREDSVLQLGSFVY

SEQ ID NO: 72473 - protein, 136 aa, Zea mays
  Coding DNA Sequence Number=SeqID_29098
MRVEWECYETDISAVLAGYERPRELQRLVILDQRYFGTGDNEIDGSDYDYGIASPLQPNRILAEYVDVYSPLLYTPNPPQVVSIATTAQAKMKLWKETSRSSKTTTSSRCGLAANPQSAACEGRVIYVSFPHFDLL

SEQ ID NO: 72474 - protein, 589 aa, Zea mays
  Coding DNA Sequence Number=SeqID_29099
  Pfam annotation: Domain name=zf-CCHC; Domain location=299-316; Score =18.5; E_value=0.0024; Accession=PF00098.14; Description=Zinc knuckle
  Pfam annotation: Domain name=zf-CCHC; Domain location=54-71; Score =22.5; E_value=0.00059; Accession=PF00098.14; Description=Zinc knuckle
  Pfam module annotation: Pfam domain module=zf-CCHC::zf-CCHC; Domain location=299-316::54-71
MKGRAKRRLPLQVPQVKKRKRNKVMMKKIINHAHHPPRMKKQSDASKRKKQRKGGCFACGEKGHFRDSCPTMAAPKKGRNKGKALTSVKTWDDSSSEDEPPRTRSHWSSSRSSRSSHKCLIARGLLEKFKTFANLNCEMSTKLEQLESSATSTATDDSLIKKNEKLKAKLASSQEAIENLLEKIKIFSIHNNELTTKLENIGSTPGASLVKIPEIIKKDASTSCVDLIDDSNSCNQVLVENIVVETCSDEVAKENEQLRQEVARLGKALYDKKGKTKQIRPPQDNTTAGVNKPMEGETVICRLCHKEGHKSFQCKAMTGDKQRQKLKQTPSSKVSNTYIKKVDKKAATPYLIKKKKNGKVITIKANKQANKGKGAKRIWVSKEIISTMKSTKKFTGCKINLDYVIEESNTPQKKTLKRFKKSPSVLPADCLCMEHRTVRWHTGLSGAHTPDCPVHQGTTVQQLIPGGTRREDHRTVRCGKPAAPTVTCSDRATARRTGYATFSESFRSPNSIPSLRRHPLPTWDIMVKVFVIIESANYKTLTADELFSKLKSTKIDHQTRSKIENPSAPIVALVLRLQKPKPKAKQTHP

SEQ ID NO: 72475 - protein, 1038 aa, Zea mays
  Coding DNA Sequence Number=SeqID_29100
  Gene Ontology: Mol. function=metal ion binding; Cellular component =extracellular region; Biological process=chitin metabolic process
  Homolog annotation: Hit_ID=Q67VC7; Match level="QueryCoverage=100%, HitCoverage=86%, E-value=1e-152, Identity=32%"; Hit description =Putative pollen-specific LIM domain protein
MKSLDNTTEVKSPWGRRMFNNKSLKRSVDTEKSSETSVVDVRPGETSTVAPVPQQQTENVEKPSATSADDAKSADDTKSADDVKPSVASPDAKSTDDVKSSENNAAVVRKPWQRNIGTGKQPLTTVVGPKTTETSGTVKRLWQRSAATASKSGTAVVTPLQSSVVVSKPFQSNVAVKKTWQRSVTPENQLESNMSSNKPLPSKVVVESLLQSNTVEKVFQSTVPTEEPQKGIMATENQSQTIKVTKKSNETSMELSVTSETTKPPPLAATVLQSDVSTEQPSQTDMPTMAPSQIPEPTEKPSESDFNAEKLSESVVKAEKSSTTDTAAEKPLPSMITEKVESVAGTLKPSQSDTALQEILERNMATEEILQTAMAVEDAPPTNLITEKSLMKDASEEPVQTNEPSEQPLKTEEIEKPQQSEKIATDTRGSEVSTEEMLELESNATKLNKDQSELEGLSSGRNPPNFQSNPNAGQRSESKGIVAEKAADHIMEAEDDVDAEHSSESQSVAPAEVRKEQPSEHQKDVDMEQLLEPQNQDHPWNPLDPVSDTAAKDSSEPKSDIATEKPAESQNNAEQSVEQQSEPQSDKSTERPEVHQSNTSNDELSRLQNDAGTDKLSVQSSDPESNASVSKPSESQTDVATMEALEPQIDAPPDKATDQPVKPQDDASAKNPMGTESDAVCDKPSESSSDTETLLVCHQNSSITTDEPVQGGISYDTPHQRSAPIETTPGSETVVDDCIHHEDTSSKPSEENKAIEEPEEVSAKLPDDHVTSEKSSEEDKENAEASVDSAPLGNPLEVNEESSNPSGDTVTPEKPLEEDKTSAEPSESDASFGKILEADEVSANPSEDIATPEKPLEEGVGSVEPSEDNSVLDKPLEEEEVDAKPVKDVVTPEKPLEEGSTTAEPLEDNAAHEEAKEEDEVIAKPLSSVALEKSLEGSEASVEPSEDNAALEKPSEDDEANAKSSEDSVYVEKPQQEEDDNGVKALEEGVSPEKSAAGKPLEEDPVHEKPADAVAEPSSQDDTATEKPSATTDTAETA

SEQ ID NO: 72476 - protein, 83 aa, Zea mays
  Coding DNA Sequence Number=SeqID_29101
MGIGGTPEEVNSPMSHKILIMMHMHLIHNGIRSSSSYSSNYPPGHDINFNPYAWQGPPTENNHRSCMGMDKLPVGDLFSNVMS

SEQ ID NO: 72477 - protein, 164 aa, Zea mays
  Coding DNA Sequence Number=SeqID_29102
MALHKLCDDGGSQLSYGSKATSARTRPLLQLSLRQAPLLLRQPRHHASKGLLREGWPRGDEDETGALLGTLASLTRVDARNPPTASAPDLGAGRTRRPRISTSLTPISGHLASPPFALAHALDPSGLGHAAHSLVGLGTPQSRNVDRIDGPKNWMNEWFYVKMI

SEQ ID NO: 72478 - protein, 506 aa, Zea mays
  Coding DNA Sequence Number=SeqID_29103
MEVVELVPCARNKWGNWWDYWFYVSEAEVEDHPGLPAAIMCSHYYVAYPSFEVAEDDENERALRIAARTSSGRDLVEEFIGYGVWPLAHGWALGEVCPREMPSLGGRKVRSPRFALDLRGRDPAAVVREAKDGAVRIVGRYVPKTEAQQSWDIRGSNDRLNRVFELNCLPYGGYPGEDVVDRRGKKPAAVTEDDPALEAAPSTKKRKLGTAVGELGVTDSFAMELMGTCAAPGGRMSSPELRESSARMLEVTGGRWPKDVPIPRAAGEEFFTSRMARDLRVFPYGRNIAVVVSAVINKDRQEAAQKRRAVIRLPEARPKRAWGTVKATVPGGSQPAAPRSSKVPESVKAVGAGGTKSASDGAAKDRGDGQLVVVPPAVATTASAAVLGVKGSAFSAGGEISAVTAVKDEAGTVSRRLREVSQQLSQAADFADRVASGALTADVSAEVERLRVQHADAVREKSAADNKCRKLAERVAALEGERTDLRRQLVEERREANQAIAKAQAA

SEQ ID NO: 72479 - protein, 211 aa, Zea mays
  Coding DNA Sequence Number=SeqID_29104
MERVEASTRSEVERTRKQLVDSYRELGARTADFEVPDREAGLRFLEWLQEELLALPTIMEGFMSFASLITYEGAMNALSRRGLRGGPLRPDVGPYGREVVRERSDRARDQMARAEDMEDFGPLNSAQPDAEANPVVAEAEVDPAPPPETGEGSLAALASTVSGGGSSPATVPMVEDPSKAVTELAAEDPPKAATELAVEDPIAVAGSSQVA

SEQ ID NO: 72480 - protein, 89 aa, Zea mays
  Coding DNA Sequence Number=SeqID_29105
MALAGRNWFAGVRRELFLVVDLENGEEGEVTEEKTPPPLESQAETWLYFDICESEPDSPVMFYPGWLKINAYVGVLTEDPLTGHMPRHG

SEQ ID NO: 72481 - protein, 178 aa, Zea mays
  Coding DNA Sequence Number=SeqID_29106
  Gene Ontology: Cellular component=microtubule
  Homolog annotation: Hit_ID=Q67V82; Match level="QueryCoverage=60%, HitCoverage=62%, E-value=2e-36, Identity=72%"; Hit description =Putative uncharacterized protein OSJNBa0080E19.35
MGNCQAAEAATVVMVQHPGGRVERLYWATSAAEVMRANPGHYVALVTHRADADDEKRSQQQQHRRATRVKLLKPRDTLVLGQAYRLITVAEVTKALQAKKEEKTRRAQQQLQHVVVVQRKHAGGRTGSGDDDDDCLDQKTMVFDILRSNQQDSQEGEKPLIHSLMGTNRQTDREEKSG

SEQ ID NO: 72482 - protein, 119 aa, Zea mays
  Coding DNA Sequence Number=SeqID_29107
MAIGPRLLLGEDWASSEPKLYANGGYQLRLGVLGVPLIMVPDRPQQIRQAVDEGTTLGGLESEDDAKPSHSSLCDATTPEGFGPETSKWETWCFGCGKTPEGATSLLLPGRGHSSSPRF

SEQ ID NO: 72483 - protein, 153 aa, Zea mays
  Coding DNA Sequence Number=SeqID_29108
  Homolog annotation: Hit_ID=A3AA52; Match level="QueryCoverage=51%, HitCoverage=13%, E-value=9e-30, Identity=75%"; Hit description =Putative uncharacterized protein
MAPYPHPYFATSPTARNLVTDGEPPSNSGGRLNALLLLLLYLRVPRPDAVAEHDHGHDRAGVRRGVQLHRQPHIGSGDTYWIVSTTKLQNLTQYSVNPTLVPTVLDVGTMVTFPVFCQCPAAADNATTLVTYVMQPGDTYVSIAAAFSIAYPQ

SEQ ID NO: 72484 - protein, 263 aa, Zea mays
  Coding DNA Sequence Number=SeqID_29109
  Gene Ontology: Mol. function=transcription regulator activity; Cellular component=nucleus; Biological process=transcription
  Homolog annotation: Hit_ID=A2Y4N7; Match level="QueryCoverage=100%, HitCoverage=48%, E-value=1e-50, Identity=50%"; Hit description =Putative uncharacterized protein
  Pfam annotation: Domain name=TFIIS; Domain location=179-263; Score =53.7; E_value=6.5e-13; Accession=PF08711.2; Description =Transcription factor S-II (TFIIS)
MADGLDRWRGFFRGAGAGICDVIENAILVAAADAPRDFLHRRDRIAERLFTALRRDAAPPSFGSAAASTTPATPVEEDKGSVRRVAEKECKVDSSSNGTHGGGGHGHGHADEDDDSDSDDERLRRAAASNYGHNYDDDDEDGDQQEEDEQQHAADDTEEGEEDHDAEELEALTNEIDEESQIVGEVLRIKELLLHKEDHVLADCLVSSFIYKSDATLFDSLRRLQLMQLSVSTLKATEIGRAVNRLRKHNSREIRHLVCTLIE

SEQ ID NO: 72485 - protein, 244 aa, Zea mays
  Coding DNA Sequence Number=SeqID_29110
MVTTSPWMGRSKPGSDLGPALSFKDVHHPCWGGERGEPGLYLPRGLAGHLFFQLLVVETILQLCGEDVLQPCRGRRTVAAQLGCNIPPSSSFSWRGRERGPAVKGTPRPLFDEPKPGVAVSAWTEAELARKEHLVGRSLAGSSVSGTDAGVDLPRPRAGLMSSGDSWPRPRGDQPSRLLEPDSWRRPWRRWPRRDDEVVLQSGDPRTASPSEARSDLAEGVVDAEGAAAPFSRQDPSLQDRIIL

SEQ ID NO: 72486 - protein, 172 aa, Zea mays
  Coding DNA Sequence Number=SeqID_29111
MAPPVDVVGPRPRLGDVEAPPRSRSSLSSVAEVESEPPGLSPSPSPGVRRIGVRRLPGLSPSPSPGSGGAEFAAPPSSGAEPESEPWVGRSGVRRLPGLSPSPSPGSGGADSRSGAGGAVLLSGRSVERRSDCGHFGSIDWRTCVRIKLYADGGYQLRIRSLEGTPNYGPRQ

SEQ ID NO: 72487 - protein, 252 aa, Zea mays
  Coding DNA Sequence Number=SeqID_29112
MGDVEPSWAIKRNPGWSVDEQRASRVQEQQNAMRATQRRAGRNQQGNFNGERLRTARRCHGAAGNNNATMVEETSPVIDCGHGKGARHAGSSAREKPLGCARRSLEERAARKQALLKQRALWGSSTRELRERDGDGLGTGKMDERACLRETNWGREDAAGRGQNGSRGLSARRTAERNERPNTMGGGDPDAQGLESESEEKLRVAGEASWAISSRSVELAEGLSAPTPKTTWEQETKRVASQRKELLHGRHG

SEQ ID NO: 72488 - protein, 119 aa, Zea mays
  Coding DNA Sequence Number=SeqID_29113
MGGGDPDAQGLESESEEKLRVAGEESWAISSRSVELAEGRARELGGRAPWGAAAGIPARREWRRAMGGSRPWELSKKKARKIVDTFESRFLAIYTGSIHYSTTHPIPRISKTEIRGLTI

SEQ ID NO: 72489 - protein, 314 aa, Zea mays
  Coding DNA Sequence Number=SeqID_29114
  Gene Ontology: Mol. function=isopentenyl-diphosphate delta-isomerase activity; Cellular component=peroxisome; Biological process =isoprenoid biosynthetic process
  Homolog annotation: Hit_ID=A2Y4N6; Match level="QueryCoverage=90%, HitCoverage=91%, E-value=1e-109, Identity=73%"; Hit description =Putative uncharacterized protein
  Pfam annotation: Domain name=NUDIX; Domain location=115-285; Score =70.3; E_value=6.4e-18; Accession=PF00293.19; Description=NUDIX domain
  Subcellular localization annotation: CTP_CleavageSite=67; ConfidenceScore=5.73e-01
MAASASRPLALLACTSASLGAGRRAWARLAVSSYSARSALPRLRGRRSFATSARGAVMGNPGPGAVDADVGMDAVQRRLMFEDECILVDEQDNVIGHESKYNCHLMEKIEAGNVLHRAFSVFLFNSKYELLLQQRSATKVTFPLVWTNTCCSHPLYRESELIEENCAGVRNAAQRKLFDELGIVADELPVDQFILLGRMLYMAPSDGKWGEHECTYLITFLPSHPGFPVFILFVFAVLYMFQGGLPPVHEVADVKYVNRDQLKELLRKADAGEDGVKMSPWFRLVVDNFLMGWWDHVEQGTLQGAADMKTIHKL

SEQ ID NO: 72490 - protein, 159 aa, Zea mays
  Coding DNA Sequence Number=SeqID_29115
  Homolog annotation: Hit_ID=P76513; Match level="QueryCoverage=100%, HitCoverage=58%, E-value=8e-69, Identity=84%"; Hit description =Uncharacterized protein yfdQ
TAQRTALLSVNGERNSQKSLAEWIEDWADYLVGFDANGDAIQATKAAAAIRKITIEANQTADFEDNDFSGKRSLMESVEAKTKDLMPVAFEFKCVPFEGLKERPFKLRLSIITGDRPVLVLRIIQLEAVQEDMSNEYCDLLVEKFKDSKVETFIGTFTA

SEQ ID NO: 72491 - protein, 44 aa, Zea mays
  Coding DNA Sequence Number=SeqID_29116
MALPASPIAQQQARLWYCARDGDPSMAASKICSSSAPNEFNVLQ

SEQ ID NO: 72492 - protein, 517 aa, Zea mays
  Coding DNA Sequence Number=SeqID_29117
  Pfam annotation: Domain name=HR1; Domain location=221-291; Score=5.3; E_value=0.066; Accession=PF02185.7; Description=Hr1 repeat
  Subcellular localization annotation: CTP_CleavageSite=49; ConfidenceScore=5.08e-01
MDKDRQGAAQKRQAVVRLHEARPKRQRGATKAAAPGRGKAPLAAKSAVPASSRAPEAAAAAGGSKTAKAAPASGRVPEAVKSARGLPPPGKRVADFATDISVDDYLVGSDEGQLVVVPPAAATTAAAVMPKAKGGALSASGEMPALAAVRGRGGRCVPPAGGDEGGTKRLTSPAVRRRGPLRPLCLPKSRLRTQHADAVREKSAADSKCRKLADKVAVLEGEKTDLRRQLVEERREANEALAKAQATQAEANLARVEGGLARERVEQLEERLRALQSRVERAEATTRTEAERTRKQLMESYHELGARTAEFEVPDREPGLRCLEWVQEELQALPTIVEGFMSYASLVTCEGAMSALSRKGCRHYEVFDQADEDFERDIYKVEDSVVKESAGALYDRMWGPHGREVVRERAETARGQAARGERVDDFGALNSTLPDPESNPAEAALEPLSETAEGAPEAPAAAAAGEGLPPEAAEGVPDAPAAAAAGKGPLPTAAPKVDPATVAAEATVEAPAVARSS

SEQ ID NO: 72493 - protein, 578 aa, Zea mays
  Coding DNA Sequence Number=SeqID_29118
  Homolog annotation: Hit_ID=Q6ZK43; Match level="QueryCoverage=86%, HitCoverage=90%, E-value=1e-137, Identity=55%"; Hit description =Putative uncharacterized protein OJ1163_G08.36
  Subcellular localization annotation: CTP_CleavageSite=35; ConfidenceScore=5.06e-01
QSTVDPSLTPQLFIHSDPLREPSSSFRPRPAWPPTADDLAGPPAPPHPPRPPPPPPPSRAPAETPTPTNHAAAISSPLLQPHPAPGAAADAPLSRWLRRLEAFLSAAGLAASTPLGVAAAASALAVVGLALPAAAVALSPCRGGAAACGDFEVEVFEVCVLLSQAAAAAVALACVSRKVAVHGLRRFLFVDPDLGMRIRFQKEYVARIQVKARVRRFGGVWDRKIYVQHFIGFVATATILVHFDFLLTSVCLLATPCQMPAPPQDFFRTLTWWIVPCLAVKVTREVSRFAHILQQGSSSAWTWRACAVLFASVASWTYLTTIILSSCMLFNLVCSLQVIHFDDYGKLLEQDADPLVYLKEHLQLRHNLSKISHRFRVFLLLLFLSVTAGQFAILFKTTAYSGPINFTNGGDIAVSSVVQVVGLVLCLHAAAKISHRAQNIAALASRWHALATCSTDSTYVTTPNSSGNLAPFPAHLFLRDYSGSDLESLDSASVQGSSHGTAQLASYMSSYHKRESLVLYLLANPGGITIFGWIVDRAFLNTILMLELTLVLFVLSKTVVIPAKTLPVEENFSRYIYY

SEQ ID NO: 72494 - protein, 265 aa, Zea mays
  Coding DNA Sequence Number=SeqID_29119
  Gene Ontology: Mol. function=protein binding; Cellular component =cytoskeleton; Biological process=multicellular organismal development
  Homolog annotation: Hit_ID=A7P460; Match level="QueryCoverage=83%, HitCoverage=48%, E-value=4e-90, Identity=70%"; Hit description =Chromosome chr1 scaffold_5, whole genome shotgun sequence
  Pfam annotation: Domain name=Actin; Domain location=4-258; Score= -90.6; E_value=1e-09; Accession=PF00022.10; Description=Actin
  Subcellular localization annotation: CTP_CleavageSite=36; ConfidenceScore=5.03e-01
MPPAACCRAGFSSAALFFLKQNRPAATFLGSRGHPAAPSGDGEERGELLPPEDSLDISRKVKEMYCYTCSDIVKEFKKHDRKPDKYIKHWSAVKPKTGVPYTIDIGYERFLGPEVRIRCASLIIYQQMQIFFNPEIYSADFSTPLPELIDNCVQSAPIDTRRALYKNIVLSGGSTMFKDFHKRLQTDIKKIVDDRVAATNARHRVEVRPIEVNVVAHPIQSYAVWFGGSLAASNPDFFEFCHTKEDYEEHGASICRTSPVFKGMY

SEQ ID NO: 72495 - protein, 113 aa, Zea mays
  Coding DNA Sequence Number=SeqID_29120
MPLLLGWGGARCFPVRRRGRPWLHRVRGGECVGSTGPNGGALYVPALRTHGFREVVADGYRGLTGATLAVLATRAWGNSGRCRLFNERSTSLRIHYASWPSHPIVPNHWISAI

SEQ ID NO: 72496 - protein, 58 aa, Zea mays
  Coding DNA Sequence Number=SeqID_29121
MPAIPRTSRKGHGALLREGTGAMDARTLLAPHWSGLGGEHAVDKPEVAEHWPWATVAD

SEQ ID NO: 72497 - protein, 147 aa, Zea mays
  Coding DNA Sequence Number=SeqID_29122
MAPPVTCPSELQGPDPSVTESRRGRNVGRGHEGSIPVHSVAIPHPRIGAVPRRSIFTGEQLTPGPIGIVDDERRRRLPPVPLSSLSITAVRDKHTELYWCGSGSDLVWPRDARCARLGEEPGACPLLKLRRGGPVVSAIAGRRNNLA

SEQ ID NO: 72498 - protein, 417 aa, Zea mays
  Coding DNA Sequence Number=SeqID_29123
  Gene Ontology: Mol. function=cysteine-type peptidase activity; Biological process=proteolysis
  Homolog annotation: Hit_ID=Q5NKP7; Match level="QueryCoverage=62%, HitCoverage=29%, E-value=1e-23, Identity=30%"; Hit description =Putative uncharacterized protein 9C20.3c
MFAYRLPHRWVAATRKPLFLSDTETKGDGSRVEIETNLECLVKMFGCTDEDQTVGGRVAATGHCVGDQDQNVTGQQGAHAVRRSPRVENKRKQLDKNELKERKKRLRLKVPPIQDAESDDEKDTEFVPGGDGSGDDNVGIVGGDENKGITKTRAIRCSPGKFIKLVNSLSDELKSQVVAKGFGGLLRFKPHLLSRKLLSWLMRKLNPETMKLEIGGGKEIQITEHSVWCVLQLPNVGSDPPPMSDADARSLRDELGEQICGKSYRRISGINISVITDRLQKRTLNGELGLRAFFMAAFQCLLFSNTDTRIRIDDVKYTQDIQNMGNKNWCKAVVDRLSIAARLYRKDFAEKGINAPISGCGIFVAMLYVDNLQHGLDTSPFSIPRCAFLDSKMIDAIANMDLRGDVPPGTTEFGHLR

SEQ ID NO: 72499 - protein, 68 aa, Zea mays
  Coding DNA Sequence Number=SeqID_29124
MAGTHLGTQDYDHMWKNLRSKNCNLADGEYILVPEQGAAQEVAPDPAPEPAPEDLPATALEGKPRFYA

SEQ ID NO: 72500 - protein, 49 aa, Zea mays
  Coding DNA Sequence Number=SeqID_29125
MTCPPSRAGGSLNAIGGSKLDAVSICASLANVFAGFNHWIRPQKDLDVA

SEQ ID NO: 72501 - protein, 173 aa, Zea mays
  Coding DNA Sequence Number=SeqID_29126
  Subcellular localization annotation: CTP_CleavageSite=69; ConfidenceScore=5.73e-01
MPSHSPHALRPSAFRAPGWGAPALPSSRCGRCATSWRLAPFSHRSTSRIFIRQPGCIPSQWSPKTVTTSSMVGRSKPGCGLCLALSFKDLHHPCWSGGRAEPELYLPYGPAGHLLLQHSGERALTGLAEGANFDNAGPIGRKRRQLQHAWFAGSAGSSTASGATSHRWAECGY

SEQ ID NO: 72502 - protein, 66 aa, Zea mays
  Coding DNA Sequence Number=SeqID_29127
MPRLLDYGTGAATQDNPVHGPTVPTKHIGHSPDGSARDGTQRGENSKGEPTAFVLSCAQGGWMRLQ

SEQ ID NO: 72503 - protein, 101 aa, Zea mays
  Coding DNA Sequence Number=SeqID_29128
MLDALKSKGCAPLIRLHAACMALALRVGPSPRVVGGGPWSVLENTQFVTAEREIQGAASVWGTGLSGGAPDSVRWCTGQCPVRQAASAEEAALGFFSGDFG

SEQ ID NO: 72504 - protein, 307 aa, Zea mays
  Coding DNA Sequence Number=SeqID_29129
  Homolog annotation: Hit_ID=Q6J9V9; Match level="QueryCoverage=42%, HitCoverage=36%, E-value=2e-21, Identity=50%"; Hit description =Putative uncharacterized protein
MEHRPGLERLLETTHLELDGRGRVRALGQVRRRPSSEAEAVSEPWGRARRSPSSSVEVEPEPWGRARRRPSFEAEAMFEPWGRARRRLSFEAEAVSEPWGRTRRSPSSSVEVEPEPWGRARRSFLWRSRLDLAAVSLTLSSGIAVGATQAALFSCQGRRHLWQAKRATLHLRHDDRVKKVTGKGDTPKGILLCEGSGPRALLLIRGSKAGPSEGFDSHPRALGLLTHYWSEVRRLAPQKGSTAASGHSGSAPTTDQGFEGWPPEGFDSRLRTRRARDDSGYVQYMAEARAMLPRYPRTFPRPAGAIL

SEQ ID NO: 72505 - protein, 131 aa, Zea mays
  Coding DNA Sequence Number=SeqID_29130
MGKNNKRKREPTPPSEDFGDSEYSEEEFSSESEGSPAPVSPPASSDDSDDSQGIVAEVWTYIRAVERSGLEGSDESECSSDEEDSPEEDDKGDDDDDSDDGDGGGSRGGDGGSSRGSGGGGSSKGSNKASG

SEQ ID NO: 72506 - protein, 84 aa, Zea mays
  Coding DNA Sequence Number=SeqID_29131
  Subcellular localization annotation: CTP_CleavageSite=40; ConfidenceScore=5.35e-01
MDPPCVAPSACDVLQQQQRHPPLRRTRQIGSNAVDLRSVCASLLKSAPSVDVAPRAMPMRRNASRWTAHATHRSGQVAVVSFTI

SEQ ID NO: 72507 - protein, 58 aa, Zea mays
  Coding DNA Sequence Number=SeqID_29132
MPAIPRTSRKGRGALLREGTSAMDARTLLAPHWSGLGGEHAVDKPEVAEHWPWATVAD

SEQ ID NO: 72508 - protein, 256 aa, Zea mays
  Coding DNA Sequence Number=SeqID_29133
  Gene Ontology: Mol. function=structural molecule activity; Cellular component=cytoskeleton; Biological process=multicellular organismal development
  Homolog annotation: Hit_ID=A5CLG6; Match level="QueryCoverage=88%, HitCoverage=50%, E-value=3e-79, Identity=62%"; Hit description=Actin- related protein 3
  Pfam annotation: Domain name=Actin; Domain location=3-255; Score= -50.7; E_value=7.5e-12; Accession=PF00022.10; Description=Actin
MDATARPAIVIDNGTGYSKLGFSGNSEPSFTLPTVVAANESFLDQTELLSSANWIAQYNAGIMADLDFFIGDEALSRLRSSGLYTLRRPIRHGQVHDWDTMERFWQQCIFNYLRCNPEEHYFLLTDSPVSTPESRECTGEIMFETFNVPGLYISVQSVLSLSAGYAYLKSISDDDSDTVSDMTGVVVDIGDGAPQIVPVVNGYVIGSSIKSFPFSGSDVTQFVSQLLQMQKFLILFINRAVSIVGMCAHTLIRGWE

SEQ ID NO: 72509 - protein, 167 aa, Zea mays
  Coding DNA Sequence Number=SeqID_29134
MKLLKYLLNIEEPEERFGALQLLSLPEMGVKLRMKMLYTRGDGFYGCEKDERPGDHPKANLAEGDDRGRIHEAVRNFKDDTFNSGVSDLDNPKKMVLSEYKVPTSEDIAYMHQYIDWDDCIALSGEPFIQALTMLAPKGCVVAPLNFVVQILHLFLSSLFSFKKLFR

SEQ ID NO: 72510 - protein, 486 aa, Zea mays
  Coding DNA Sequence Number=SeqID_29135
  Gene Ontology: Mol. function=iron-sulfur cluster binding; Biological process=electron transport
  Homolog annotation: Hit_ID=Q7EZS0; Match level="QueryCoverage=66%, HitCoverage=93%, E-value=2e-89, Identity=52%"; Hit description =Putative uncharacterized protein P0582D05.115
  Subcellular localization annotation: CTP_CleavageSite=37; ConfidenceScore=5.43e-01
MTTAVLSPLRKQGDVSKDPTAPTTVLLQGSSAPPTVTTSHEQGTNTSPTAISAWPSYEKVAAREDELTDRLSLPPSRTLVTPYCKRIRPGRRITRAVRNLASQRQGKPAPARDAPQAEPDRPAAETLANWLLDMKPAAAAVAKVVAGDSPPSAASPAPAPAVANSNGTPQKPPPIPAAAFDMPKPNLRGLNKPKCILCGNIARSRCPFQCCKSCCYKAQNPCHIHASRLAALQKLPQHFLKFLQTKKSVTKKDVAGINKWRFMKLKEHMQGDTDAENEAYERYTQNVGLLEEAFCPMEEDADVDPEAEATSSSEEERMDLLVSAAKARLKSDNEAANSFRERVATILDQKLKDLRGSQSASEGDEPSGPSLDDRLTPTPMKFSTAQKMGRATELNELLGKLTGARSEDDLKPCRDLAEQLFGKEDGSSVGNSNRVDTETEPGDQESAAAVARRYSVPTLCSRMEVGEDFASEMNDEFCSLTQVAQL

SEQ ID NO: 72511 - protein, 66 aa, Zea mays
  Coding DNA Sequence Number=SeqID_29136
MVNLASIPRGSVQKEANHTRETLGASRVTDTIPNATTETRRWSSSGHAHEAKLNRSTNQSRRKQIN

SEQ ID NO: 72512 - protein, 203 aa, Zea mays
  Coding DNA Sequence Number=SeqID_29137
MSPGRWVPTVGALTIGATGQSGGALDSSNYMQSLSTSAEDGAEWLVKKLKGKMQKPLVDLLSTTSLWARSPHVEVDRIKTKVLVSASVTIVKAAAAKVYFTTRIKWSCNGMPMMSSGAASPSTSLLHTKMDKWLLSVAGINLQSLATWEICVHCTSCVLCFVVRMCNTQKDSECVPIAYDICLEYSTSEAELELAQTIYQILN

SEQ ID NO: 72513 - protein, 92 aa, Zea mays
  Coding DNA Sequence Number=SeqID_29138
  Homolog annotation: Hit_ID=Q2RAS4; Match level="QueryCoverage=67%, HitCoverage=32%, E-value=1e-11, Identity=58%"; Hit description =Uncharacterised protein family containing protein, expressed
  Subcellular localization annotation: CTP_CleavageSite=33; ConfidenceScore=5.32e-01
MASTIPFVGAASMVGPASLIIGPYSVSYLLPTPASASFSRVISGELYTPSHAALAGLDAFEASASPPDHQTRCSLSTGLVFTFPMTCHSYFL

SEQ ID NO: 72514 - protein, 120 aa, Zea mays
  Coding DNA Sequence Number=SeqID_29139
  Homolog annotation: Hit_ID=Q7XBE0; Match level="QueryCoverage=36%, HitCoverage=7%, E-value=2e-07, Identity=45%"; Hit description =Putative gypsy-type retrotransposon
MAVWALECDPLLKKLVFWLPRLEKFPMMNGKSTLRKRKRDVFGKYLVWIRVLVLRFLPLRRFPCLNLLALTPMGVALVDGLASQLRSRGMARQISVLEEKHSQGQAELVQRCSDFEEKYS

SEQ ID NO: 72515 - protein, 258 aa, Zea mays
  Coding DNA Sequence Number=SeqID_29140
MGQVETRITKLVRLCCKSCSLNMDTVRVSFGQKYSPVAFLMLSENRPPPPSFDDLRKQWLLARLAVGVQRQTNPCRHRPVSWHHASHERPAHGAERASSKRWIQGRIVLQRLPFHGAPELSSLALASLQYIVTLGTFSVLDIEVTVRLGRVGSPPEVAIELVLGFEDVRTIVEGVASYVICEEQPCVGLVCALNASVSCGLRLSLALGLSFLPETGFGETEIAVLERRDLGRDDRTRVIPRTHPIRGQAGARQSYGDP

SEQ ID NO: 72516 - protein, 212 aa, Zea mays
  Coding DNA Sequence Number=SeqID_29141
  Gene Ontology: Mol. function=signal transducer activity
  Homolog annotation: Hit_ID=Q6K493; Match level="QueryCoverage=100%, HitCoverage=24%, E-value=5e-37, Identity=82%"; Hit description =Putative uncharacterized protein OJ1595_D08.27-1
MPGVESTAHGSQFTYFLTAPMQAFCQLAGITSDIDTDTYANAENILFSALEEYEGILCTSVGLNNVWGQILPDPFLRRLILSLTPNPSHFYHLWVSGLEKNKKKAKRNGHKHVKNHCQLQIVYVLGKYDAKKKEAIQQQQTLFPSKLRFIFCRAVLFYFHSDEHEYLPTCLPSLPESVSPHAEAIRTPILSLAENLVVSDRFDFRDSTRNKK

SEQ ID NO: 72517 - protein, 20 aa, Zea mays
  Coding DNA Sequence Number=SeqID_29142
MGGPFVPVSDSADAQAQAQV

SEQ ID NO: 72518 - protein, 113 aa, Zea mays
  Coding DNA Sequence Number=SeqID_29143
MNRGSPDRSLAWRDDNDYDYAVNLKDLDTADGDTELSRADAVARGPSLRCCLPRPRSRAESHATPGPPDRSFVRLRQKQPCEKDPSPRPEGPDINLLLAAAAARYGAEPPMMP

SEQ ID NO: 72519 - protein, 242 aa, Zea mays
  Coding DNA Sequence Number=SeqID_29144
MNLDRPRVIQPRSAPDPNPLIPLPILSFSLALDSPATPSRLHPDADRTPLPVHHPSVMAGRTAPAPLPSFSLTPYSLAALHPRSRHGRYHDQQFGGAGAARYAMGRSPSPPDTDHLHPEPVRETALENGYTKIMLPTCASGIACPMLSATIKLPVPLVPIISKGVLEEEVMVSFVATNGEPTTTATSKLVWWNLVEQMTMTPTSCTSAATLPTRTRAPPSRALYKSGSIIVLGKTDFLRPDM

SEQ ID NO: 72520 - protein, 115 aa, Zea mays
  Coding DNA Sequence Number=SeqID_29145
MAPKRATLKTATSIDDAAKTALLAEKNGKAPIMDNIPQESFDDEAVNSKRQRHDNLPTPEGTARTCSSKGCHPPYSLVHGLAELTALRFSAYVDYNSLDGLREAPNSPVYQLRND

SEQ ID NO: 72521 - protein, 231 aa, Zea mays
  Coding DNA Sequence Number=SeqID_29146
  Gene Ontology: Mol. function=protein binding; Cellular component =nucleus; Biological process=transcription from RNA polymerase I promoter
  Homolog annotation: Hit_ID=Q10EQ6; Match level="QueryCoverage=77%, HitCoverage=60%, E-value=2e-68, Identity=64%"; Hit description=SWIB complex BAF60b domain-containing protein, putative, expressed
  Pfam annotation: Domain name=SWIB; Domain location=59-134; Score =149.3; E_value=1.1e-41; Accession=PF02201.9; Description=SWIBMDM2 domain
MGNPYPHGYGFCPPESLFTILPVLIVTLELYSYMVYQLCYALAQPFYWGNDGKKRGGGFTKLCSLSPALQEFVGASELARTEVVKKLWAYIRENNLQDQNNRRKILPDERLKKIFNVNSIDMFQMNKALTKHIWPLNSEVLAPKYLFDYDLPGPVSPDRSTPKEKPQKRDRSEGKKQKGGSSGAGSGFLVPLQLSDDLVKFIGTGESMLSRSDVVKKMWDYIKGNNLQPHV

SEQ ID NO: 72522 - protein, 60 aa, Zea mays
  Coding DNA Sequence Number=SeqID_29147
  Gene Ontology: Cellular component=nucleus
  Homolog annotation: Hit_ID=Q10EQ6; Match level="QueryCoverage=71%, HitCoverage=12%, E-value=2e-13, Identity=83%"; Hit description=SWIB complex BAF60b domain-containing protein, putative, expressed
  Pfam annotation: Domain name=SWIB; Domain location=10-57; Score=19.8; E_value=0.00028; Accession=PF02201.9; Description=SWIBMDM2 domain
MANMNYLEFIVIETDPVEIVDPSDRRKIICDEKLKDLFGVETFTGFTVSKLLAPHFTKTK

SEQ ID NO: 72523 - protein, 269 aa, Zea mays
  Coding DNA Sequence Number=SeqID_29148
  Subcellular localization annotation: CTP_CleavageSite=72; ConfidenceScore=5.37e-01
MPKPGTHREKSCRAGPLARKQGTGALRQSVGSVARCLTGLLPRRTASRDKQRRSGTATGRQRSAGLQSAGATEQAGWAGEQRSAGRQSGNAVCRAAEQSTAPPPEMRSRRAARCRAMVNTRRGGGIDLPPNRHTRRIFRQPQPQPVEMDPPPPPPPAGVDPLVAAQMRMMQQMADTMTDMRAQMQQERQEMRQEREDIRRELRQEREEIRQERRAQQQQLQQQMQQQQQQVPLPPPPPPVPPRDKHREFMSHKPLHSLAHLIHWTRMMG

SEQ ID NO: 72524 - protein, 350 aa, Zea mays
  Coding DNA Sequence Number=SeqID_29149
  Gene Ontology: Mol. function=protein serine/threonine kinase activity; Cellular component=cytoplasm; Biological process=protein amino acid phosphorylation
  Homolog annotation: Hit_ID=Q7Y0B9; Match level="QueryCoverage=90%, HitCoverage=84%, E-value=2e-79, Identity=80%"; Hit description =Serine/threonine-protein kinase SAPK8
  Pfam annotation: Domain name=Pkinase; Domain location=12-269; Score =80.8; E_value=4.6e-21; Accession=PF00069.16; Description=Protein kinase domain
  Pfam annotation: Domain name=Pkinase_Tyr; Domain location=12-270; Score=-139.0; E_value=0.00067; Accession=PF07714.8; Description =Protein tyrosine kinase
  Pfam module annotation: Pfam domain module=Pkinase::Pkinase_Tyr; Domain location=12-269::12-270
MDMPIMHDSDRYELVRDIGSGNFRRCPPHARPPHQRTRRRQVILTPTHLAIVMEYASGGELFERICKNVRFSEDEARYFFQQLISGVSYCHSMNNPRVVDIGDDHEVPMFDDGQRGAAALDHVQAAAAPELASSKLAVAKFLLVVGERRQRERLVLVVFVRGFQPKSTVGTPAYIAPEVLLKKEYDGKIADVWSCGVTLYVMVVGAYPFEDPEEPKNFRKTIQRILNVQYAIPDNVNISPECRHLISRIFVGDPATRITIPEIRNHSWFLKNLPADLMDDDSMSNQYEEPDQPMQTMDQIMQILTEATIPPACSRSINVLADGLDMDDDMDDLDSDSDLDVDSSGEIVYA

SEQ ID NO: 72525 - protein, 115 aa, Zea mays
  Coding DNA Sequence Number=SeqID_29150
MELSLFYSHSFSFGLVILYQYANVSGREEPEPYVHANVAVGEVLEPCVRGVVAVGGSFEPCRSTAVGAVGTLLTSPCFRKGLRATVVMDVRGEPSLLVTGVSLDGTPVLFPRSLS

SEQ ID NO: 72526 - protein, 309 aa, Zea mays
  Coding DNA Sequence Number=SeqID_29151
  Subcellular localization annotation: CTP_CleavageSite=58; ConfidenceScore=5.28e-01
MPVRQLLSHIASTIGQVLLLGLSHNPLTFHPRAPSSLRIPHSLGRSLRARPQISHRRRCSAIKGIRGQQVIGLELELREDRADEVPEARVGDEEVEEDALGAPGVLHHRVDCGDRAPQVLLVERNRDVDEPWVADIGGGAIVRGGAAVGGISERRGTAEGDPPGAPAICPGKRTLPSNYDDRMASAGGKDWSDGDSTTTTMATDKKPDRCTTHSIALRRLGHRFLAPGLPSCGSRCCFDHLTKTLCRCAMASSGGATRLGLETRENTRTARRHPHLLDLNWIASRSPRGWRIDAWSWGEASMNPCEVRR

SEQ ID NO: 72527 - protein, 480 aa, Zea mays
  Coding DNA Sequence Number=SeqID_29152
  Gene Ontology: Mol. function=glycerol-3-phosphate dehydrogenase activity; Cellular component=glycerol-3-phosphate dehydrogenase complex; Biological process=glycerol-3-phosphate metabolic process
  Homolog annotation: Hit_ID=Q5VQP1; Match level="QueryCoverage=28%, HitCoverage=32%, E-value=4e-52, Identity=74%"; Hit description =Dehydrogenase-like protein
MLYKYCEERGVAHKRISKLIVATGAAEVPKLNMLLRNAKENGVDDLQLMEGSKAMEMEPELRCLKALLSPSTGIIDSHSLMLSLLADAENLGTTISYNTSVTSGHVGSNGLELHVCESKELQNYHVGSHVNAQLVFASEACDKLSRFGPDVEWISDGGKDHVSCFLNKICSNLEVFSKSQGWVFGTWLFWDPTKAFWSWTTSFRFTSPDLAWIHACFSPTPRVDPPTSRRARRDPIEVQEVGVPARCPCVLPCFQPKPGRATAGRHRAPAQRLGEVVEAAAAAAARETRREEAVAEPAERDAVGGAPVRLLIRRHGGGGAVAVAPVLPTRRGHPVVVVRRQRPLPGTYRRGARGVAFRRAPPFRNAADCGAAADNGTAANVCDPWLVHIAITLDEEYLRGSVTAVHPVVQHARCPESVFFHFLVSDPGLGDLVRAVFPQLQFKAYYLLASNPLNRGASTSMGDLRAGAEGAPEGVRDPQG

SEQ ID NO: 72528 - protein, 88 aa, Zea mays
  Coding DNA Sequence Number=SeqID_29153
  Homolog annotation: Hit_ID=Q6J9V9; Match level="QueryCoverage=50%, HitCoverage=24%, E-value=1e-07, Identity=52%"; Hit description =Putative uncharacterized protein
MTAPRATRPIALTPRQGRRHLWQAKRATFHICHDDRVKKGTRKGDISKGILLHEGSGPRALLLIRGSKAGPSEGFDSRPRALGLQAHY

SEQ ID NO: 72529 - protein, 83 aa, Zea mays
  Coding DNA Sequence Number=SeqID_29154
MGRPRHRPSSGDAWDEGEVGEGIERRVASSPSPQHFSLFVSKSEVILLSKSLKLTLVMTISYLCFKGGWSLSLFEILKGKCLK

SEQ ID NO: 72530 - protein, 42 aa, Zea mays
  Coding DNA Sequence Number=SeqID_29155
MAGGNALAGAKERGLAGEEIWSQEIRSVSIPKPEANPRFCRV

SEQ ID NO: 72531 - protein, 42 aa, Zea mays
  Coding DNA Sequence Number=SeqID_29156
MAGGNALAGAKERGLAGEDIWSQEIRFVSLPKPKANPRFCRV

SEQ ID NO: 72532 - protein, 278 aa, Zea mays
  Coding DNA Sequence Number=SeqID_29157
  Homolog annotation: Hit_ID=Q8H6I5; Match level="QueryCoverage=14%, HitCoverage=4%, E-value=3e-07, Identity=70%"; Hit description =Putative RIRE2 orf3
MRGKANCCCLARVQHSVLYSGDHGRPHQRVAQHVVRHEGGTRVLRRSRSRSCGEDRSEDLPVRFGAAAACWCGVGGQVAAGEGFSTDGTVSATCAPGLRLFGFNVWFSSLTRGHEQGPSSGSVRPGAIATVVSPSETEVVAALSPSARSALPLKASLAQLKNPRLLCDEPEAAVSAWIEAESAREEASSAQERVASLAEEVQRWQLELGQVVRWRDQSRSQATEAMSRADVLRGQLAEATEQPVEVEILPPASPSEAGPDPSEGGDDAEGAAAPSVDV

SEQ ID NO: 72533 - protein, 135 aa, Zea mays
  Coding DNA Sequence Number=SeqID_29158
MAENPPKGGDGAGRGGSPEGGDGAGSGGSHGGGWVFAGGLVQDFGPTHATATANFVAASTVVAGNESDESVFKFSDFDDSGSSIEWTEESSDEDLDYFAALDVAAAEASPHVTDAEVCLVRVLGVGGEGRWRSVE

SEQ ID NO: 72534 - protein, 507 aa, Zea mays
  Coding DNA Sequence Number=SeqID_29159
  Subcellular localization annotation: CTP_CleavageSite=65; ConfidenceScore=5.04e-01
MRGPQGKDVFARAPGVFGADAGGYRGSMAQGRSYPPHGRQRLFSSRMARDLRVFPYGRNIAAVVSAVMNKDHQEAAQKRWAVIRLPEARPKRARGTAKATAPGGSQSTLAAKPAAPGSSKVPESVKAIGTGGTKSAPDGAAKAQELPSPGKHVADFGTNISVDDYLVGSGEGQLVVVPPAVATTVSAVVPGVKGSALSAGGEILAVAAVKDEAGTVSRQLREASQQLSQAADFVDCVASGALTADVSAEVERLRAQHADAVREKSAADSKCHKLAEKVSALEGERTDLRRQLVEERREANQAIAKAQAAQAEAKLARVEGSLASQCAEEWEVRFNALQARMEGAEASTHSKVERTRKQLVDSYRELGARTADFEVPDREAGLRFLEWLQEELLALPTIVEGFMSFASLVTCEGAMNALSREGCSHYEVFDRSDEDFGREIYKVEDPVVKDSAGALFDRMWGPYGREVVRERSDRARDQMARAEDVEDFGPLNSAQPEAEANPFCGRG

SEQ ID NO: 72535 - protein, 168 aa, Zea mays
  Coding DNA Sequence Number=SeqID_29160
VARRVIKRKQASEKDLKTSREVANAPGLAFVNRVLPEQTGHGEGRFTVFFDWIGANAKLELASEGFGMQRGKLTGVELTAVKKHGDTTEALGYVAQDRKAVAHRRGNPPGRKVDKKATGKNPILCKLQSPKVEPMSLKSRLNPKKKVKWGTFALKSKSQVLDCKFSYK

SEQ ID NO: 72536 - protein, 122 aa, Zea mays
  Coding DNA Sequence Number=SeqID_29161
MEKASSKMSKESHRVQPFARHACSAAVTLLLLENVREKADTRVRLWRSRQRKVFIIQRKGKNVGEYNSRSRIFRRCRTWLHGKRKLSGEFENAKTEQKGNKLSYPRAIEEEYARGHTDQDVQ

SEQ ID NO: 72537 - protein, 237 aa, Zea mays
  Coding DNA Sequence Number=SeqID_29162
  Subcellular localization annotation: CTP_CleavageSite=30; ConfidenceScore=5.16e-01
MNRSCRLRRRRRGSSSTLDVDSTFGKVRPRVSTPKDDVSATPGLPPPGSPSGIRPEQTARPAAPKPQPAVPRGHQPGSWLWQLDSGAGPASGRPGQAPADERQGGPTLPSLCAYLSLVTLPCGVHSPGRSSCSGAILLWPFNYLLVAAEDPAARPGPPRPNAMADSALVSVNTRAVRALGCGLEHWSVGWRHAGNGAVALVTGAVAASAYSSGCCCGSWRVVEDGAVAAGSQRNGSD

SEQ ID NO: 72538 - protein, 356 aa, Zea mays
  Coding DNA Sequence Number=SeqID_29163
MAQCSALTILFGKPYTSRELPPLDRRHLWQEKQATLRFRHNDRVKKGTGKGDTPKGILLREGNGPRAPLLIRGLKAGPSEGFNSHLRALGLRAHYWSEVRRLAPRKGSTTASGHSGSAPTTDQGFVGWPPKGSTAASDAERGMTLGSSTSPDPRARPPASALEDNELRLARPQGSDSASAPKDDELRLARPRARTQPRLRKTTNSASLDPGLGLSLGSGRQRTPPRPTPGLGLSLGLRRRSPPRPTQGSDSTSSSEDRLDLDLGGASASPDPGLGPTTSQGGHHYPTPSKLRLRGTRPASHLARPGKQIMMAPRVLHDDGGSQPLTEARRRQQGLDSPDSCPSARLQRSSDGHDTT

SEQ ID NO: 72539 - protein, 444 aa, Zea mays
  Coding DNA Sequence Number=SeqID_29164
  Gene Ontology: Mol. function=ARF guanyl-nucleotide exchange factor activity; Cellular component=intracellular; Biological process =regulation of ARF protein signal transduction
  Homolog annotation: Hit_ID=A2WMD7; Match level="QueryCoverage=30%, HitCoverage=82%, E-value=1e-44, Identity=67%"; Hit description =Putative uncharacterized protein
  Pfam annotation: Domain name=4HBT; Domain location=65-141; Score =47.9; E_value=3.6e-11; Accession=PF03061.13; Description =Thioesterase superfamily
MGAVESSAWMSAAARRWLENAGATAEDAPGRGFNALPLSGVRVSLAERGRALCSLRVPPHLTDAEGNWHAGAIAAAVDNVCAAAIMSVEGIIKVSIHYDISYFTTAKLHDEVEMDGRVVEQKVRMTAVAVEVRKKESGELVAIGRQWMTASRPKIKRMTQCSKDTITLAFFVHRMGKYFVSHLSSIVVAKLILSFGLLQQLASSYIYFFEVEHVTREEKFMQAYDLIEVYFKLIVACARLSIIDSQNFFRASQLFRPETVSTKTRLLSLELLQGLLKGVSNVFIKKFHFIDSVKAYLSYALLRAFVSSSPVVFQFCCSGLESLKVGVGLMIFQQLGGINVLGFYTSYIFPLQMNITYTASDGGNITLSDGKKFAKRRGNDGIPYQQLEMGGQAPNSSGLDNTATTTDDWEDNWDDDLDDEAAANGLPLRSQTNSKDGWNMDWDD

SEQ ID NO: 72540 - protein, 103 aa, Zea mays
  Coding DNA Sequence Number=SeqID_29165
MDGGRTIRDSAREVCWRPVSVSLRGPFEPGGRTVRINQVEFGQGQCVFESLHYRPSRVFSQTVLGGTPCKRNQLVTLGGFRLLDGSGVVSIELSMKIAEEPRC

SEQ ID NO: 72541 - protein, 236 aa, Zea mays
  Coding DNA Sequence Number=SeqID_29166
MRTKTNVRELVRLATTRFTTSFLTLAKQTDLHRDPGTAGTQSARHLARRSTGEHAAHRDSRIRGRIGERATHREECRGRAEQGGWIRAHRDGRRKGRIRGRAGQDGRIRGASRAEAEGRPDPPDPRWRLDPRRSRGRGSRIRDRAEAGALGSATEQRQGAVGSATEQRQGRIRDCGDPRDGAEAGAAGSVTEQRQGKPDPRLRRLDEEDEEPRRRLGGEGPRRRLGGKQPRRRLKN

SEQ ID NO: 72542 - protein, 201 aa, Zea mays
  Coding DNA Sequence Number=SeqID_29167
  Gene Ontology: Mol. function=nucleotidyltransferase activity; Cellular component=cellular_component; Biological process =biosynthetic process
  Homolog annotation: Hit_ID=Q2QYF8; Match level="QueryCoverage=94%, HitCoverage=91%, E-value=3e-76, Identity=57%"; Hit description =Cytidylyltransferase family protein, expressed
  Pfam annotation: Domain name=CTP_transf_2; Domain location=61-191; Score=95.5; E_value=1.7e-25; Accession=PF01467.17; Description =Cytidylyltransferase
MDAGNGCSARAQVACVIGSIVLGASVLALHLAGGPAAIPHLPLPPLFGTLRRRRRRPVRVYMDGCFDMMHYGHCNALRQARALGDELVVGVISDDEIKANKGPPVTPLHERMIMVRAVKWVDDIIPDAPYAITEEFMNKLFNEYNIDYIIHGDDPCLLPDGTDAYALAKKAGRYKQIKRTEGVSTTDIVGTNFALLFHFTF

SEQ ID NO: 72543 - protein, 55 aa, Zea mays
  Coding DNA Sequence Number=SeqID_29168
MAPPRQVTVSPVGLAGGGQKGFLRPISPGRSRLDGERGVTRGENSYDSKLGPFQF

SEQ ID NO: 72544 - protein, 154 aa, Zea mays
  Coding DNA Sequence Number=SeqID_29169
MSYVDGRFEHMQSHFDGQFSDLYDRFSVVDSQLDGVHSQFTDLCSHIQTSVHDPIMSRMNNMQQSFQDNMGALSSQFESLSTSDSIHSLDERHHQLQNDFSQFTSIFDSFSSHYYSGTPGKRHRLVTLGGFRLLDGSGVVFIELSVKIVEEPRC

SEQ ID NO: 72545 - protein, 114 aa, Zea mays
  Coding DNA Sequence Number=SeqID_29170
MSGPLNGIQIPPRQGPGTGDTLAGFGGMQKKLAGRFLPKRRRVDDSDYNPATDSEAQSSARGSVSLDAKDAPHSHLEHPINNTGWTYPRMRFSMAEYSSKRTIDQFSLPNDTNI

SEQ ID NO: 72546 - protein, 254 aa, Zea mays
  Coding DNA Sequence Number=SeqID_29171
MALLDPCECFQLEVALNLACNPIGWGVLAFAGRTCAAAGGAWPPASTRGVLLYPSGGHHRLPLRDVRGGDAPSRFFLQHLEGRVITSLVKVCRIRGVPCATGHTAPTPPGGSYKTSYAVEVAAAFLDEVAAFAGGLLGVGVVVVAGPRYGTRLSGYTGSGPPQETSYRALLLSQRGPKLQAWLFNSDVIMSDEKGTVWVDQQARLMRADLTGLAYTDAPVARKRALLGLVLAVGLGPDPGFPSAFDEGVLVLVL

SEQ ID NO: 72547 - protein, 96 aa, Zea mays
  Coding DNA Sequence Number=SeqID_29172
MAHSGGYGMARGRKAPICAGERVNGEEMGRAVAGCGSYSANDRIGADESRSQLPFNLESFDPVHRGDLEATFASASLMKAGPSSVLSPALDHIRGV

SEQ ID NO: 72548 - protein, 127 aa, Zea mays
  Coding DNA Sequence Number=SeqID_29173
  Subcellular localization annotation: CTP_CleavageSite=36; ConfidenceScore=5.18e-01
MEGVVGILQAYGAGGKSQFLVGVPHLPKIHTSPRPRLMTGRFMVCHPTASSQCCSLPVALIGFEFGDFMLEIDIVGHGAARRRVDSQGKKDECPSGQGVTLHKIVTAIGGGVSVAKAQRLWKAVVGP

SEQ ID NO: 72549 - protein, 102 aa, Zea mays
  Coding DNA Sequence Number=SeqID_29174
MGVVVHTKNEFLPPEPFLCFSQRTCPIHYFRSKTHVWGGFVQFLCRTSPDVAEVPDLSASRDNSDLAEDDPCDPTTTSKPEAPMQSLNQLPVVTDLADARSA

SEQ ID NO: 72550 - protein, 269 aa, Zea mays
  Coding DNA Sequence Number=SeqID_29175
METRALLFCLGIREKTKREKDLNMLDSDCRRTPTCDASWEGCSRAVNVVFSPNRVIPHPLIERSGNHPTGAHHSEPYISIKWILCPSEQWWLSAEELLIGGRCWGTLMVITTTIVLRWWLTLSQLSQNLILLSHQLLHGFAHGKRLRLLSSLDVNILVGPFGLHVLDFLMVHIQVLVGFLKLLLSVQELILENLDGVLPGSYLLLKLLDLGGHLLHLEVLFHQLSGQVYHKVLPVIQGGLCRLHQAYQLGHCLSSHGLQTIQGIHASHC

SEQ ID NO: 72551 - protein, 136 aa, Zea mays
  Coding DNA Sequence Number=SeqID_29176
  Homolog annotation: Hit_ID=Q6UUN3; Match level="QueryCoverage=55%, HitCoverage=7%, E-value=5e-07, Identity=40%"; Hit description =Putative gag-pol polyprotein
MQELMAQQNEILRQLAQCQPPPQHYGGGDHHQRPPAAATYQEFLSTQPPLFTRAEDPLDADVWLRVMCTRWVIARSFDERVWNNSIGGEDDVHGPTTAFPRRCALATDTPPPMAVTILWGVTPWPLGHSSCKQSKN

SEQ ID NO: 72552 - protein, 75 aa, Zea mays
  Coding DNA Sequence Number=SeqID_29177
MQPVNHVVEWGEFKAAFRGHHIPAGYHVDTDEKKRDRFRRGLSTKLRDRLNTVRANSYNELVNMAISQEDYITAR

SEQ ID NO: 72553 - protein, 113 aa, Zea mays
  Coding DNA Sequence Number=SeqID_29178
MAQWLTRSTLAGGRRESGDRGLASPAKQTSIPRSGSFTEVCSVLSEGRTGLGRAWLAGLRWQGLGWPWTRRARANAARPSRKRANLGKNPARVFSWHLGLSLIRESPWQICPR

SEQ ID NO: 72554 - protein, 56 aa, Zea mays
  Coding DNA Sequence Number=SeqID_29179
MAAIKPRRLAAGAGHAQVRQQFYRGEGGRERKGHRGRERGGRVFMAVINGVHEERD

SEQ ID NO: 72555 - protein, 99 aa, Zea mays
  Coding DNA Sequence Number=SeqID_29180
MAASGAAPLRGGEVTGIEAGAGYGGSGVAGVGQRGRGCHDELDGGDRAMNHGQRGENDGEEVSGGPEKLRGFQIQIQTRFLIQINLNLCNTSKNILSST

SEQ ID NO: 72556 - protein, 97 aa, Zea mays
  Coding DNA Sequence Number=SeqID_29181
SETTDQAKDGGKKSFEVPSAREKVKEAEEPKAKGEEEGLQSQGLNSGELAALGNSPATYGYNSPDCPVCTGLSGEPTVGRANGRPRDLRGTRGRANG

SEQ ID NO: 72557 - protein, 60 aa, Zea mays
  Coding DNA Sequence Number=SeqID_29182
MGFCIGSIRGSSWCCGRSETTDQAKDGGKKSFEVPSAREKVKEAEEPKAKGEEEGLQSQG

SEQ ID NO: 72558 - protein, 114 aa, Zea mays
  Coding DNA Sequence Number=SeqID_29183
MSAGSKIHGERDGSTHTHGGAIAGARQTEATMLPARIKALIRNEEGDSNTMELLTAAGGQWRELATEESRPAAALELRRAIPTSPAPNRTRKGHGRFPDAQATPIEHFPGTKTR

SEQ ID NO: 72559 - protein, 114 aa, Zea mays
  Coding DNA Sequence Number=SeqID_29184
MSAGSKIHGECDGAAHTHGGAIAGARQTEATMLPARIKAPILNEEGDSNTMELLTVAGGQWRELATKESRPAAALELRRAILTSPAPNRTRKGHGRFPDAQATPIEHFPGTKTR

SEQ ID NO: 72560 - protein, 439 aa, Zea mays
  Coding DNA Sequence Number=SeqID_29185
  Gene Ontology: Mol. function=binding
  Homolog annotation: Hit_ID=Q5QNE5; Match level="QueryCoverage=43%, HitCoverage=28%, E-value=1e-45, Identity=53%"; Hit description =Tetratricopeptide repeat protein-like
  Subcellular localization annotation: CTP_CleavageSite=69; ConfidenceScore=5.45e-01
MMVLASVATTSFTILLLFSLPSSLHLCTTSFSIEGAGAGTSSPYSSNTSPDTDSRSGYCMSTRTFHIMRAPSFSPSSDVPFVFPTFVLFFLPILLPPPIVAAASRPTLVDTGLGRHSHSLVLLGLTPGADVQVFVVSFVGNEHVHEGRLRRPRKALIDLVALLVDDTVAVAAVWPPSSPSRLGHIEDALKHLSLAIPQPDLLELHKLQTVEKHFGRCLDARKARDWKSVLRESNAAIAAGADSCALLLAARAEALFRLNLLDEADVAISSASKLNYTSSCSPDTKFCGFIANAYLFYVHAQVDMALERKEIKGESVRRKKSLKADGDTEIGGQKGAAQDYSEGEGQIKQETTRGGCCSIGIAYAHAQIYPSPTDVFKPLIKEGNVYNVSYIQIKKANRMYKPVDNDIMIGFTKWILCCCVLIKVTLALLICFALDANCF

SEQ ID NO: 72561 - protein, 300 aa, Zea mays
  Coding DNA Sequence Number=SeqID_29186
  Subcellular localization annotation: CTP_CleavageSite=16; ConfidenceScore=5.33e-01
MTCRPAPSRRSQIAARGARNRPAVTSDPPLLPRPTGERGGQPCRRRATAPSGCASPTPDTPAWRPRPTRRATGAPDAACKQLHRHLHHHRASSIAEPIPRLEATQHATQQRQPDEAVNAAKSGPAVMTVAGAREQRSRRQPSSCPIRGQQENPLSRREDNAPVIRSSNGSRTRNGRPANNSPRRINSTAGQAALLAGEAGDASPSPDRERGIPRKGSFPMKEPGSEPPLLIRGSKAGPPRGSTVASDRVGPTPTTGQRLAPEGFTVASDAERGMTRGLGLWLSPGRRRTPLRPTQGSDSG

SEQ ID NO: 72562 - protein, 168 aa, Zea mays
  Coding DNA Sequence Number=SeqID_29187
MEDRLDLGFGGASTSPDLGHRPATSTGSAIITLPRADSSRREQDRLRCSSDSHDITPAGCQDLSGCHIGIAFLEKVGRAGTRTGQALSWGRSLPSPAWTLVTPYCKRTRPGRGANTKAAGFPPLSRPSPATSLPPFALAHALDPSGLGHAAHSLVGLGTPGLETPTLV

SEQ ID NO: 72563 - protein, 86 aa, Zea mays
  Coding DNA Sequence Number=SeqID_29188
  Subcellular localization annotation: CTP_CleavageSite=73; ConfidenceScore=5.27e-01
IGCARYFTPASPPPIELPTLTPSRPPPLSAASADQSHFFTVGGREMVLRRATTECPKKVAGLKDLVNLLTQLREFAGGRLSHPVLE

SEQ ID NO: 72564 - protein, 281 aa, Zea mays
  Coding DNA Sequence Number=SeqID_29189
MDFERGCRPVPRTGPLSSSTISTEAPLDEQIDDAIRFGRGTERPPTPPSASKSVARSGAQLHLLCRRRGLVMRVRIRAVRGGPRSALRHHRDRGGPWPFRAPSLRVRPPRAAARLAPRRGAGPRGGDRGAMPHHFHDFIRAVDDLQSLLVDADALKGSLSASHSALLSSAAPLLASLESFLAARSLTGNLSSALASSRRCVQLLAACVVESGRRDRGANGRDDAMLGRQDPRGCGCDRDACGRDTGCGRGVGCGLDALDVAEHAPAGEVDAYVRIIIVVEI

SEQ ID NO: 72565 - protein, 210 aa, Zea mays
  Coding DNA Sequence Number=SeqID_29190
  Gene Ontology: Mol. function=isomerase activity; Cellular component =endoplasmic reticulum; Biological process=cell redox homeostasis
  Homolog annotation: Hit_ID=Q5EUD0; Match level="QueryCoverage=48%, HitCoverage=19%, E-value=3e-45, Identity=93%"; Hit description =Protein disulfide isomerase
MVDDDSGPVRGTGLQPRSKSMEEKGRLGRRREAMLRFVPERGMLMGNFADADRHRHPDGTFEEKEILRFVELNKFPLITVFTKLNSGKVYSSPIKLQVFTFAEAYDFEDLESMVEEIARAFKTKIMFIYVDTAEENLAKPFLTLYGLESEKAYWSTAYYITCITLSLVEQWATEKKSMESCKLIFTQAKQYAKEYDAQAECFYEKIIWMG

SEQ ID NO: 72566 - protein, 57 aa, Zea mays
  Coding DNA Sequence Number=SeqID_29191
MGPSGFTEAKSDTLLFIYWRRNDIVYLLYSDDIVLVASCTVAEPEPGEPGHVPRLCR

SEQ ID NO: 72567 - protein, 411 aa, Zea mays
  Coding DNA Sequence Number=SeqID_29192
  Gene Ontology: Mol. function=nucleic acid binding; Biological process= proteolysis
  Homolog annotation: Hit_ID=Q69SP9; Match level="QueryCoverage=15%, HitCoverage=14%, E-value=4e-15, Identity=67%"; Hit description =Putative uncharacterized protein OSJNBa0016O19.34
MKKSSGSGSVSLARSIPELYEERGASNLREFGFQELRAATSDFSRLLKVGEVASGAFTRASSAFLAGPPAARSSRLSHSGISHLPADEVKPLVKYDNDEDAHSPGGRGRGRGGRGRGRGRGRGGRGNGFNEYADAGWEDDHAPAYMGNGYARGRGRSFRGRGRRGDDDNQPEYQHVGGFKGMRVMRVKNLNLYAFGLYMQPTSIREKLGPKYASFPTDKLMENPDFYRNGFNEYDDAGWEDDHSPAYMGNGYARGRGRSFRGRGRRGGDNNQPEYQQVGGYYECSCSSFRFSPFVMELKPASHRSGNLFLVVNIYMVYPVVLCTSNFVHIEPVRMTSSLKVIEMLQSSNGIQHIPCAAISALISRAGNANWNRKGLLLIQSNWAPMVSQTVTYSTYSFFRDDSLQFFQSNR

SEQ ID NO: 72568 - protein, 508 aa, Zea mays
  Coding DNA Sequence Number=SeqID_29193
  Homolog annotation: Hit_ID=Q5N951; Match level="QueryCoverage=95%, HitCoverage=71%, E-value=0.0, Identity=59%"; Hit description =Putative uncharacterized protein P0677H08.27-1
  Pfam annotation: Domain name=DUF639; Domain location=87-503; Score =106.8; E_value=6.6e-29; Accession=PF04842.3; Description=Plant protein of unknown function (DUF639)
MLQLQPPGFLPIPRRRVTARGRRARPVIAFNSQWKIPDVDTDAVRERVRSWMSLARGAIADAGRAAREGGRHKEEPEGGKKKQRKEVTVEEQAFVAVPEVTVEPRVPQGWLSLDAVVSIEQFARLNGLTGRQVQRIFESLAPEHLHNDARSLVEYSCFRYLAKDNSDFHPNLKGRLVGEDAFARIAPAVAGVADVSTAHYLFRALVGAEKGLSFDLWTTYLAELLNKKRPVLKWEENTAWPGNLTLTDKALYFEAIGLSGTKKPMRLDLTNQNSRAEKTKVGPFGSKLFDSAVSVSSGSMSDEWTLEFVDFSGEMRQDVWLAFISEIISVYRFIREYGPGGDDPAIHNVYGAYKGKKRATLAVNFWGGPLTTKARSANHRSTQWHRSSEDPSSGRTHVYDIDGSVYLRKWMTSPSWTSSHSANFWRNSSVKYGIILSKSLVVADKNLVEKAMVDCKEKSKVVERTQATIVAATIEGIPSNIDLFKVSYFSMSYFFLSHPEKSNIDPLY

SEQ ID NO: 72569 - protein, 209 aa, Zea mays
  Coding DNA Sequence Number=SeqID_29194
  Subcellular localization annotation: CTP_CleavageSite=29; ConfidenceScore=5.25e-01
MNPTNGSHLQRSERARRPTPRTHQQRSARADSSMAQATRGVRLAQGPMWAERVRSDWATRKGIRPRGPRAELLSLGIFLKPARYNSPDCPVYTGQCPVLQEDAASELGSLGNLRRLLRYNSPDMSGAFNARQKRAEVRHAHTGAPDIEQCMSGVHRTSRRAQKSELQRSNRNGFGDVAGAPNMSGVHRTVRCTIRQTASTNGHVWWLGL

SEQ ID NO: 72570 - protein, 380 aa, Zea mays
  Coding DNA Sequence Number=SeqID_29195
MGGTCRLFASSLEEHNSVGVGTLQPSFGFKDFHQPARLYPPPVVTQDGDRQFLGGEKQAELRSWSHPQLQGSCRARRLGSRRPLLPEGGCRAVCTGGPPKMPHAARAAFVFWGGPAFAPGWRPHAEVGAPLAREDLSGDLPGGRWPLPSVPRRRWLEKSPSPTGSPPPSALWASGSSYLSSPLERRCGRGQDCSSAHPEACAAAARPSGAGVVVVVVRAGGGEPLVSLLLLRRPSPMEWGCSYLRRGNRSSVCNGTLNANSPVDYLNRFTKHESPRVKVTSEHEQRRSWLENENLVGRSLAGLSVSGTDVGVDQPRPRIGLAPLEDGWLRPQGDVCASESCFSRKVMSEKVMSEDPLFKVVKKHERYSGKRDLFSRKIST

SEQ ID NO: 72571 - protein, 108 aa, Zea mays
  Coding DNA Sequence Number=SeqID_29196
  Homolog annotation: Hit_ID=Q850V8; Match level="QueryCoverage=95%, HitCoverage=37%, E-value=5e-07, Identity=35%"; Hit description =Putative uncharacterized protein OSJNBa0037J17.18
MAVKQFLATAEIDIDEESITWMTGFKRYSATFAAANSLDYGTISAGIDLYTKDNFEEFVQFYEPARLGIPRRNGETAGLRHHPVVINKIGRVTILPKSGDKSKIRDKF

SEQ ID NO: 72572 - protein, 93 aa, Zea mays
  Coding DNA Sequence Number=SeqID_29197
  Homolog annotation: Hit_ID=Q7XC40; Match level="QueryCoverage=78%, HitCoverage=24%, E-value=3e-20, Identity=71%"; Hit description =Expressed protein
MENPFSVKVLQVFTGFGVGCGVGIGVGRPIYLGMIPGLQQVMSATRGATDAFSGVTRHVNSALRTAGLKNIEAGIGCGVGIGHGFGIVSSSIL

SEQ ID NO: 72573 - protein, 598 aa, Zea mays
  Coding DNA Sequence Number=SeqID_29198
  Gene Ontology: Mol. function=protein serine/threonine kinase activity; Cellular component=cytoplasm; Biological process=protein amino acid phosphorylation
  Homolog annotation: Hit_ID=Q336S1; Match level="QueryCoverage=98%, HitCoverage=62%, E-value=1e-129, Identity=44%"; Hit description =Protein kinase domain containing protein, expressed
  Pfam annotation: Domain name=Pkinase; Domain location=463-595; Score=- 89.7; E_value=0.0031; Accession=PF00069.16; Description=Protein kinase domain
  Pfam annotation: Domain name=Pkinase_Tyr; Domain location=463-596; Score=-164.1; E_value=0.023; Accession=PF07714.8; Description =Protein tyrosine kinase
  Pfam module annotation: Pfam domain module=Pkinase::Pkinase_Tyr; Domain location=463-595::463-596
MELAWHLLTVLIRLGRPAAASELTAAATVAAPSISTRVVKQMCCLPRSPLWISDDGVVTPSETAILAFLRFMGWDIPGPKVSLWPSEVRRWSGKVSIRYERKRQGSDARCFSAKRRRLLASAADLVEQTEHQSWQLVAQTCTTAATGEVHLEVMQKLQDRLPSLGTFLGDLQHKLDQPLRGDDDLAIGNMSLALVPTGFSDCPCSVNLPPLDAEKLRNINMEVDGRSNKISESETVSLLNNRVEDSDDLQKECALPMASHDVLVGECKNGADEYLNPVCKSPGSPIDHNMKTATSIEAFDMILNQADALQYNCLNDGHHQNAPSCVQKKNPLRASAYAEVCTDKTAQILFQPSVVNKVGSIAPQMMINVQSETLPQETTRQDGMNMKHLNIVPENRDIRYLNHGEQSLNKAEVNVSKNGRDKLTVKQKEKCKKNEQPKEDKDNTAKTQKGHVAPKPLPAFKGFVIEEEEGSGGYGTVYRAQRTKDGKTFAIKCPHPNAHSHHVNNELKILERFGGDLDCFVLEHVEHDRPEILKKDITLLELQWYGHCLFRALASLHKQGVVHRDVKPGNFLFCRKLKKGYLIDFNLANVSARTFLPT

SEQ ID NO: 72574 - protein, 117 aa, Zea mays
  Coding DNA Sequence Number=SeqID_29199
  Homolog annotation: Hit_ID=O48968; Match level="QueryCoverage=64%, HitCoverage=33%, E-value=6e-24, Identity=72%"; Hit description =Putative uncharacterized protein
IAKWAAELSGYHISFEPRTAIKSQVLADFIVDWTGPITQPDPFTEKHVDRAKNEEADALAKAAARGESLPSDVFFHIIGTPAVQSPEGLQITNDSEGHRIVNLIMTEDWRAPITLFL

SEQ ID NO: 72575 - protein, 163 aa, Zea mays
  Coding DNA Sequence Number=SeqID_29200
  Subcellular localization annotation: CTP_CleavageSite=55; ConfidenceScore=5.38e-01
MAEGTPGDLARYCPPPASRRRTITSVPSPPSPCRRPPSSDPHRRYASCPSLTLPHALYVTMTPFAALFIFAFLLLCFPSSHSTGVVFPYISRHTPQLQAYLSPPGLDHGGHLGGLDRIDVDNGAWKQGWEVVKYMAHNDIACIARNFIIKMNLFVRQITTRVN

SEQ ID NO: 72576 - protein, 177 aa, Zea mays
  Coding DNA Sequence Number=SeqID_29201
MYHVRVDALTSSTQKFKFFKKGEASRIRDDEHSAPCGTGALFDNGLDRLRPLAYVTGHKPRGIGGSPPERGAQGFGVPPWRSGPNDTSRGVSSFLTTWVPTMAPGPASGEDTSLQMGPKSDWRLACCSCASVDAIIVGPPMVTATAMPVPAADWPVTSALNVVAGPCAGCLESLHWF

SEQ ID NO: 72577 - protein, 517 aa, Zea mays
  Coding DNA Sequence Number=SeqID_29202
  Gene Ontology: Mol. function=triacylglycerol lipase activity; Cellular component=chloroplast stroma; Biological process=lipid metabolic process
  Homolog annotation: Hit_ID=Q949E1; Match level="QueryCoverage=94%, HitCoverage=89%, E-value=1e-139, Identity=54%"; Hit description =Lipase-like protein
  Pfam annotation: Domain name=Lipase_3; Domain location=252-409; Score= 169.2; E_value=1.1e-47; Accession=PF01764.16; Description=Lipase (class 3)
  Subcellular localization annotation: CTP_CleavageSite=32; ConfidenceScore=5.53e-01
MTAPPCHRQPSPLNPNSRATQSPISNGKPNAVSTTRRHLANLDRLLVKPPPLPLPLPPQPRKLPADEVPGDGEATPDDRSGHGGLLNALNLSTFLPFTRKAAVDEMSPSSLAYMQRLLTLSPRLSPKGSIAGEWRRYHGEGRWEGLLDPLDQNLRRELLRYGDFVQAAYTAFHSMPSAAEAASSGQQRTLVLPDRSYHPTRSLFASSSLSIPPWAQRRSAPSWLTQRTSFVGYVAVCENEREVRRMGRRDIAIVLRGTATCPEWAENLRAGLVPLTADDDASAPKVAKGFLSLYRTPGDHAPSLSTAIVEEVKRLVQVYRGEELSITVVGHSLGASLALLAADELSPCLAAQTDGTADHQPPPIAVVSFGGPKTGNRAFAERLQRERGVNVLRVVNAGDVVTRVPAPIAREGYVHAGGAELRLHNSDSPCLRPDAGPACCHDLEAYLHLLDGFAGSGRPFRPDASRSVARLLTYQRPNVKRAYVEHARMLGFEPASPNASANGATADGQYGYLASPT

SEQ ID NO: 72578 - protein, 180 aa, Zea mays
  Coding DNA Sequence Number=SeqID_29203
MGRETGLPQLLAPLLLTGGKGADLVIRGNVVLNSVQVARPIVEQAPLGPAMLSWPGPRGAKHAQAQPMMVHVNMWIARDASDGQKQRVSLASAASIDYHLSYCHVLDDLPPLLPRTIVDVAELDLVIEAPRREFVISTSTSHPIQAAEVATVVESRRREVGLQLRRVSGNVGEDNACGVR

SEQ ID NO: 72579 - protein, 654 aa, Zea mays
  Coding DNA Sequence Number=SeqID_29204
  Gene Ontology: Mol. function=protein serine/threonine kinase activity; Cellular component=cytoplasm; Biological process=protein amino acid phosphorylation
  Homolog annotation: Hit_ID=Q7XC48; Match level="QueryCoverage=100%, HitCoverage=100%, E-value=0.0, Identity=65%"; Hit description =Protein kinase PVPK-1, putative, expressed
  Pfam annotation: Domain name=Pkinase; Domain location=231-576; Score =218.7; E_value=1.4e-62; Accession=PF00069.16; Description=Protein kinase domain
  Pfam annotation: Domain name=Pkinase_Tyr; Domain location=231-570; Score=-13.3; E_value=1.4e-11; Accession=PF07714.8; Description =Protein tyrosine kinase
  Pfam module annotation: Pfam domain module=Pkinase::Pkinase_Tyr; Domain location=231-576::231-570
MQPSRSQHAKHQTRTHTHFRTQVLEAPLDPGSDTEYQDFQFRFIPEAFELQMGGVPVGGGGARNGDGKVTEKVLEFEFDKVRISIASRDDEADGYAPPRSSFSGASHPPEPVDETDTVFVAVDGREKPVPKPVISWDASRPPSGAASPDSSIDSSGATATVTSIAPSCTVTSRSAKTSVSSSAASDGSGWSNGTSSGCGGSAGKPHKGGDPRWKAILAARAREGPLAMGSFRLLRRLGCGDIGTVYLSELSGGGPGNGDVARPCWFAMKVMDKASLESRRKLSRAQTEREILQLLDHPFLPTLYAHFETDRFACLVMEFCPGGDLHVLRQRQPGKHFPEHAARFYAAEVLLALEYLHMLGVVYRDLKPENVLVREDGHIMLSDFDLSLRCAVSPTLVRPSLGSDPRNGQACAQPTACIQPTCFMPKLFGQRSQKSSSSSAAKKPKGGAEPSPRLQQAGTGLPEVVVEPTGARSMSFVGTHEYLAPEIIKGEGHGSAVDWWTFGIFLHELMYGRTPFKGQTNRGTLFNVVGQQLKFPDCPGTSSASRDLIRGLLAKEPQSRLGVKRGAAEMKQHPFFEGVNWALIRCSTPPGVPRAVEPATVAVALPAQAKPKPAPAPAPAERVEINSGGGGSKRISGASSGAECGGKFLDFEFF

SEQ ID NO: 72580 - protein, 49 aa, Zea mays
  Coding DNA Sequence Number=SeqID_29205
MGGGLLAAASALRSVLPLFGPLEQKSSSSPLLEQGCLCEREFLLTEGDE

SEQ ID NO: 72581 - protein, 70 aa, Zea mays
  Coding DNA Sequence Number=SeqID_29206
MPKHYRPAVIVSSPLSKAFSDVPCSYRVLGFVTNSLYPDYRCLLPASRHVDGVLFWISSWVADANHMCCN

SEQ ID NO: 72582 - protein, 246 aa, Zea mays
  Coding DNA Sequence Number=SeqID_29207
  Gene Ontology: Cellular component=monolayer-surrounded lipid storage body
  Homolog annotation: Hit_ID=P21641; Match level="QueryCoverage=55%, HitCoverage=73%, E-value=1e-33, Identity=61%"; Hit description =Oleosin Zm-II
  Pfam annotation: Domain name=Oleosin; Domain location=105-222; Score =198.3; E_value=1.8e-56; Accession=PF01277.8; Description=Oleosin
MTLSHRPAHHPPEAQPPTVHFVWQPSQESSVLAMSCASDDYYIKDYDVILTPEGLANETAAMADRDRSGIYGGAHATYGQQQQQGGGGRPMGEQVKGMLHDKGPTASQALTVATLFPLGGLLLVLSGLALTASVVGLAVATPVFLIFSPVLVPAALLIGTAVMGFLTSGALGLGGLSSLTCLANTARQAFQRTPDYVEEAHRRMAEAAAHAGHKTAQAGQAIQGRAQEAGAGGGAGAGAGGGGRAS

SEQ ID NO: 72583 - protein, 293 aa, Zea mays
  Coding DNA Sequence Number=SeqID_29208
  Subcellular localization annotation: CTP_CleavageSite=23; ConfidenceScore=5.50e-01
MTLGWAAKRSAPWAHQRGSTPSRCTTGCATPLHKSCSRTLTQHQQRPSSQRTRIHGRVIVGCGAQNNPRAADIGDDHEVPLFEDGQRGAAALDRVQAAAAAELAEHSDACGHVVLLSEVELAVAKLLLVIDERRQRERLLPVVFVRGFQVRCQRFNKPINRYEIGFKRKEQNKPKRTLVWRTGLSGVPPDSVRCTREDRPQTLHLRVSPGALRYNSSDCPGATGLSGCHRTVRCTNRSNGYSRNGRLHNALTELQFAAEVRAGARRAPDSEQYLSGVAPDCPVHQDVRAPTVG

SEQ ID NO: 72584 - protein, 69 aa, Zea mays
  Coding DNA Sequence Number=SeqID_29209
  Homolog annotation: Hit_ID=Q10GR2; Match level="QueryCoverage=97%, HitCoverage=5%, E-value=8e-08, Identity=54%"; Hit description=HEAT repeat family protein
MRLWEDLTVASRSFPSLVALAVAYFELAWRANAPGCEALIAQTLSYLMALLLTFVSSTRSVLCHLFVLY

SEQ ID NO: 72585 - protein, 202 aa, Zea mays
  Coding DNA Sequence Number=SeqID_29210
  Gene Ontology: Mol. function=hydrolase activity, acting on carbon -nitrogen (but not peptide) bonds, in linear amides; Cellular component=endoplasmic reticulum membrane; Biological process =ceramide metabolic process
  Homolog annotation: Hit_ID=Q84LH5; Match level="QueryCoverage=84%, HitCoverage=66%, E-value=2e-82, Identity=80%"; Hit description =Putative Acyl-CoA independent ceramide synthase
  Pfam annotation: Domain name=aPHC; Domain location=1-200; Score =112.4; E_value=1.3e-30; Accession=PF05875.3; Description=Alkaline phytoceramidase (aPHC)
MTRARLLRSLLELPGPVSYPASDFGRSDACLQQSDETPMVWEILLYMYVLYSPDWHYRSTMPTFLFLYGAAFAVVHFFARFQFVFKLHYIGLCFLCIPRMYKYYIQTKDVAAKRLAKLWVLTLTLGTLCWLVDRIFCKKLSHWYVNPQGHAWWHVLMGLNSYYANTFLMFCRAQQRGWEARITYLLGFLPYVKVQKPEKKRE

SEQ ID NO: 72586 - protein, 160 aa, Zea mays
  Coding DNA Sequence Number=SeqID_29211
MQGILQIEVLPARLVALAPGALPGREEHRMEASERRRSIFRSSLIRARHAGGGGGTQARDLSDGAQARDLSDGAQARDLSDGVSGFPSASRPRLRSSAHRPVTLRACPSLSPPASGGSSTAPDPCAARSVRAAGARYFSEGTHDLAQVILISNSGDISCC

SEQ ID NO: 72587 - protein, 554 aa, Zea mays
  Coding DNA Sequence Number=SeqID_29212
  Gene Ontology: Mol. function=protein binding, bridging; Cellular component=cytoplasm; Biological process=cell division
  Homolog annotation: Hit_ID=Q851S6; Match level="QueryCoverage=100%, HitCoverage=93%, E-value=0.0, Identity=70%"; Hit description =Lethal(2)denticleless-like protein
  Pfam annotation: Domain name=WD40; Domain location=107-145; Score =35.0; E_value=2.8e-07; Accession=PF00400.23; Description=WD domain, G-beta repeat
  Pfam annotation: Domain name=WD40; Domain location=149-188; Score =46.6; E_value=8.9e-11; Accession=PF00400.23; Description=WD domain, G-beta repeat
  Pfam annotation: Domain name=WD40; Domain location=235-273; Score =7.9; E_value=3.3; Accession=PF00400.23; Description=WD domain, G -beta repeat
  Pfam annotation: Domain name=WD40; Domain location=304-342; Score =13.7; E_value=0.64; Accession=PF00400.23; Description=WD domain, G -beta repeat
  Pfam annotation: Domain name=WD40; Domain location=350-388; Score =14.2; E_value=0.48; Accession=PF00400.23; Description=WD domain, G -beta repeat
  Pfam annotation: Domain name=WD40; Domain location=37-90; Score=6.1; E_value=5.6; Accession=PF00400.23; Description=WD domain, G-beta repeat
  Pfam annotation: Domain name=WD40; Domain location=393-432; Score =34.9; E_value=2.9e-07; Accession=PF00400.23; Description=WD domain, G-beta repeat
  Pfam module annotation: Pfam domain module=WD40::WD40::WD40::WD40::WD4 0::WD40::WD40; Domain location=107-145::149-188::235-273::304 -342::350-388::37-90::393-432
MATRRRLSPTFFGGLRARELGGASVSSRATAGLPYLADLSSDPGGRGGGVIAVEHSGDPAIPFAISFGKTAQTCNLLAVADEDGYVGLYDTRRRLPSASSSLEKSAETRVCDWVAHNNAVFDVCWIKEGSQILTASGDQTVKIWSVGNRKCIGVLSGHTGSVKSLSCHSSNPELIVSGSRDGSFALWDLRCDPKSPNSHGETCLTDNTKSLNKVVLHVRSSAVVREAHSPILRSRTRSRAKAASTSITSVLYLKDGVSIATSGAADNVVKIWDTRNLKVPFSNKNSQAGAQPLLKSGQSLNKHTGLLSLKEGVKHGISCLSQDSYGAYIAASCMDNRIYLYSVLHVNKGPIKVYTGSKIESFFVKSAISPDGTHILGGSSDGSVYLWQVDQPESAPIVLKGHEGEATSVDWCASEVGKIATSSDDSTVRVWSTMKMDCTNVSSPTVIRKRITAPSTEYRRSITHEPATTSRDGVVCTSGDGELQSGCHSPLQPRALHFGTPESSKKRALALFEEEALDSRKSPEAQTNSPSSVLSPPPSLKRRTIRDYFASAAS

SEQ ID NO: 72588 - protein, 119 aa, Zea mays
  Coding DNA Sequence Number=SeqID_29213
  Subcellular localization annotation: CTP_CleavageSite=38; ConfidenceScore=5.03e-01
MGTNGHLDLDTGGKSVDQKVPIKRPSIGFNKRAKGQPKAPLVWRTGLSGVPPDMSGAPEDSNFKLVTFGKFQRRLRYNSPDCPVYTGHVWCSKEERPQELASLGNSFQLLRYYSPDCPV

SEQ ID NO: 72589 - protein, 104 aa, Zea mays
  Coding DNA Sequence Number=SeqID_29214
MARTAAQSMNVWFNSALFVQARATGCLILIQFAGERSGRLLACSAAEKTTEEDENALEGEGASADYNRRTMEGAQLLLEQRAAKAQQGGRRGERRQWVRDGDAR

SEQ ID NO: 72590 - protein, 218 aa, Zea mays
  Coding DNA Sequence Number=SeqID_29215
  Gene Ontology: Mol. function=protein disulfide oxidoreductase activity; Biological process=cell redox homeostasis
  Homolog annotation: Hit_ID=A2YPK2; Match level="QueryCoverage=36%, HitCoverage=34%, E-value=6e-22, Identity=69%"; Hit description =Putative uncharacterized protein
MGRGGGSSWGEGDVEGPRLDRHVGPTDGGLMSRVRTLRVAQEKPASGSNAPTWQRWLAGISATADLREDRSYLADHSAASIISTEQLASSSYSFSPFSSPPVNRHSLDSPSPAAARPAAAAASACEMDDCDGGGKRPFQLARSLMYHHHPGHRPAAASRWRRQHQQHQLADEPRAPRPQAVVLYTTSLCGVRRTFMDCAAVRAILRGCRHPATAQPHK

SEQ ID NO: 72591 - protein, 200 aa, Zea mays
  Coding DNA Sequence Number=SeqID_29216
  Gene Ontology: Cellular component=cis-Golgi network; Biological process=ER to Golgi vesicle-mediated transport
  Homolog annotation: Hit_ID=Q5QNC8; Match level="QueryCoverage=39%, HitCoverage=43%, E-value=7e-39, Identity=97%"; Hit description =Putative trafficking protein particle complex 1
  Pfam annotation: Domain name=Sybindin; Domain location=1-116; Score =52.0; E_value=5.4e-13; Accession=PF04099.3; Description=Sybindin -like family
MRALLLLMLRLSLPPPPLCVSRRAEKGNLGVPLLPGQGCSFYSFKTNTYKLNFTESPSGIKLILITHPRTGDQRDSLKHIYNLYVEYVVKNPLYAPGTPINPFSLSVHLSLSVPRSLRVCLWSTGIATRPADSVGGHTVIFEHFDLSNEQTLDRYKCITYLGGMSILQDIMIDVASQHQVLDLFTSSSPRSPKLTKTCEI

SEQ ID NO: 72592 - protein, 558 aa, Zea mays
  Coding DNA Sequence Number=SeqID_29217
ALSNGRHAVGRLVRHDLFGHLYLCTIMLVLVSVVTTSFVILLPFSLPPCLYLRATPFSTNGVGACASFPYSSDTSLDTDSRSGYCTSTKTFHIMRTPSVSPSSDVPFVFPAFALFFLPNQLPPPTVATASRPTLVDAGTERVGHASGLSPCVPLRRTWWRLPRLGYLADKESRSEILDNQGLYRGSSRHMLWSWWSCGILPISPPDAQVLVVSFSGNEQLGPTSYWLLGCLIGRPIIKHQVFRPLGLGRHPIQPPSATRTPSPQGQESPSRPPVRHDAIPCSRPPAPATNVVPSPVLPAAASRHEPTNSRPPLWWTNSRPPRSPAHRCASTWRVDDRTRTRAVELEQLLEGKAVDTTAPTAPPHCLAVGPPPHCLAAAGHTITAEQPASAMDVDVRVDIENGSNENEVQAPIIDDGNARCDDQVAGEPSDGANVAATPLVGKKKKFMGVENRAVKQRTTTPVSKLKASKSVGSNKDRAIVLVPSFAKAVQSANASASQSANASASQSANASASTPSGSQCANASATAQGSIGDNEEENDVKIGKNSLHGFGVTSQGMS

SEQ ID NO: 72593 - protein, 340 aa, Zea mays
  Coding DNA Sequence Number=SeqID_29218
MTPAPGGRTAAAQASGWVLLQSCPRPRRCSRGEDKYKEPEARSVDGGGDPIGDRDFSSRLHLGTDDRGRQPSGRSPLRSSRTSGAPTSARRRHTGGATGSQADELDTLGLTTPAVDQPCIVEVRPSHRASERPLPRTPQERVTHEPAREVELRLSPASTPARMMNILEAEGGTKIGPGKGDTPKRILPREGTRLRASLLIRGSKAGPPEGFDSRLRSRGPYTHYWLAPEGFTAASDAERGMTMAHRRHHVRHPSRATWRFPPLLLAERRRRGVCKKAESVPDRPLALSRGSGAALANPALAEPLTASTYQPENLGPDRTPGLRPVRMREQPDQPKHYARH

SEQ ID NO: 72594 - protein, 854 aa, Zea mays
  Coding DNA Sequence Number=SeqID_29219
  Gene Ontology: Mol. function=ligase activity, forming aminoacyl-tRNA and related compounds; Cellular component=mitochondrion; Biological process=tRNA aminoacylation for protein translation
  Homolog annotation: Hit_ID=A7Q980; Match level="QueryCoverage=96%, HitCoverage=97%, E-value=1e-167, Identity=67%"; Hit description =Chromosome chr19 scaffold_66, whole genome shotgun sequence
  Pfam annotation: Domain name=HGTP_anticodon; Domain location=759-849; Score=89.5; E_value=1e-23; Accession=PF03129.11; Description =Anticodon binding domain
  Pfam annotation: Domain name=TGS; Domain location=66-126; Score=71.7; E_value=2.4e-18; Accession=PF02824.12; Description=TGS domain
  Pfam annotation: Domain name=tRNA-synt_2b; Domain location=375-614; Score=130.1; E_value=6.6e-36; Accession=PF00587.16; Description=tRNA synthetase class II core domain (G, H, P, S and T)
  Pfam annotation: Domain name=tRNA_SAD; Domain location=272-321; Score= 75.6; E_value=1.6e-19; Accession=PF07973.5; Description=Threonyl and Alanyl tRNA synthetase s
  Pfam module annotation: Pfam domain module=HGTP_anticodon::TGS::tRNA -synt_2b::tRNA_SAD; Domain location=759-849::66-126::375-614::272-321
MGEGSAAGKDAKGKGKGKTKAAAADSALVVRDDSYLEAVTQKRIRFFEEIQARQAVERLNIGGEVIKVTLPDGAIKEGKKWITTPMDIAKEISSGFAASCLIAQVDETLWDMGRPLEGDCKLQMFKFDTNEGRDTFWHSSAHILGESIERAYGCKLCIGPCTTRGEGFYYDAYYNDQTLNEEHFGIIENQAKKAVAEKQPFERIEVSRAEALEMFAENEFKATFLATVLFVSFLYHFAAYVKYIYDFHPFLQKSELYVQVEIINELPEDKTITVYRCGPLVDLCRGPHIPNTSFVKAFACLKASSSYWRGKVDRESLQRVYGISFPDSRRLTEYKHFLEEAKKRDHRILGKAQELFFFHELSPGSCFFLPHGARIYNKLMDFMRQQYRDRGYQEVLSPNIYNMQLWETSGHAANYKENMFVFEIEKQEFGLKPMNCPGHCLMFANRVRSYRVSERKGLKLSWLGGLSSTSWVRLPVGANFRLCYPQLADLAMLLPSLSMPIIALGGFHTVEQGGGQPPACDRCLCQELPLRMADFGVLHRNELSGALTGLTRVRRFQQDDAHIFCREDQIKDEVKAVLEFINYVYEIFGFKYELELSTRPEKYLGEVETWNKAEQQLTEALNEFGKPWKDFEGLFGSVLTGAAWPRLRSQHCFPMTLSCIERTYIDAFTQINEGDGAFYGPKIDIGVFDALKRKFQCATLQLDFQLPIRFKLAYSAEDEAKIERPVMIHRAILGSVERMLAILLEHYNGKWPLWLSPRQAIVCSVSSGSVEYAKQVLATLHEAGFHVDIDASDRTIQKKVREAQLAQFNYILVVGAQEAETGNICVRVRDNADLVTTSVDGFITRLREEIAAFK

SEQ ID NO: 72595 - protein, 75 aa, Zea mays
  Coding DNA Sequence Number=SeqID_29220
MDKPRSVKYSGCRTVFTAVETDKPAEREEEIEVTEEETPPPLESQAGNHFYFDIYGSEPDSPVNEGKPRCICHLP

SEQ ID NO: 72596 - protein, 99 aa, Zea mays
  Coding DNA Sequence Number=SeqID_29221
  Subcellular localization annotation: CTP_CleavageSite=18; ConfidenceScore=5.23e-01
MPSATSPGSATVDSGCLRAFAATEGSPEFALSPLAPPPSHFTVDRPPPVPLSRPSPHQKVPRALPNLPGHPGCPKDPQSTRAPRLRRVLRRGNGRRRLC

SEQ ID NO: 72597 - protein, 480 aa, Zea mays
  Coding DNA Sequence Number=SeqID_29222
MAGKSESGCDLGPALSFKDVHHPGWGGGRAEPELYLPRGFVGQPLPQHSRERALSGPAGGSDFDNAGLVDGGRRQLQRVGLAGSARGAPSRRKGGCRAAHTGGPPKTSRAARAAFVFWGCPAFAPVQHLCMEIGAPLIREDPSGDLPVGRWLLSSVRRWRLEKSSSPARSPPPSALGASGSLYLSSPLERRRGRGQGCSGVCPEAIVAAVRPPGAGVVVAAAGAGDGEPSVGLLLLRRPPPIVWGCSYLRRWNRSSVCNGNLNADSPVGYLNRFTKRESPCAKVTSESLVGSSTGGTDAAVELSGPRAWPMSSGDSWLRPRGGRPSRLLEPDSWRRPWRRWPGRGADVVLRSGDSPTASPSEARSDPTDGVDDAEGAAAPFNYQCSSLQDRGSVTDAVKKARKIVSTEEFSSVKTCSVRGITYPSVSYISQKVMSESKHHVAHLEVSGPNPSGVVASQGLLALVLGEPYSKSVGKTASAP

SEQ ID NO: 72598 - protein, 178 aa, Zea mays
  Coding DNA Sequence Number=SeqID_29223
  Gene Ontology: Mol. function=transcription factor binding; Cellular component=intracellular; Biological process=regulation of transcription, DNA-dependent
  Homolog annotation: Hit_ID=O23594; Match level="QueryCoverage=33%, HitCoverage=26%, E-value=6e-23, Identity=93%"; Hit description=GTP -binding RAB1C like protein
  Pfam annotation: Domain name=LRR_1; Domain location=23-45; Score =11.8; E_value=2; Accession=PF00560.24; Description=Leucine Rich Repeat
  Pfam annotation: Domain name=LRR_1; Domain location=47-69; Score=7.4; E_value=13; Accession=PF00560.24; Description=Leucine Rich Repeat
  Pfam annotation: Domain name=Ras; Domain location=91-165; Score= -42.5; E_value=3.6e-06; Accession=PF00071.13; Description=Ras family
  Pfam module annotation: Pfam domain module=LRR_1::LRR_1::Ras; Domain location=23-45::47-69::91-165
  Subcellular localization annotation: CTP_CleavageSite=68; ConfidenceScore=5.40e-01
MGLHLHRNAFSSALPTALVGLTALQVLDLSFNAFNGVVPGALANLTCLVALDLSNNSLSGCVRVSMMCCAVTTTLNNLPPLVSILNDYLSKLLLIGDSGVGNSCLLLRFADDSYLDSYISTIGVDFKIRTVEQDGKTIKLQIVNYKVKGKIYPFSFEGPLRDIEGTLIATEGALMAIE

SEQ ID NO: 72599 - protein, 32 aa, Zea mays
  Coding DNA Sequence Number=SeqID_29224
MGENDEADRWARAARERERREREGVYAHDEVF

SEQ ID NO: 72600 - protein, 99 aa, Zea mays
  Coding DNA Sequence Number=SeqID_29225
MFGLQVAMRLMVLGIDSGNAPALVDPLALDLREDEDIRQFEDQGVATDTSSDDNEDLGIPPPPPMPPCSHDHEVGGSSAAPPGAPPAINPALAAIIQSL

SEQ ID NO: 72601 - protein, 273 aa, Zea mays
  Coding DNA Sequence Number=SeqID_29226
MEPGGGTAVGAVESLLTSSCFRKGAESRRHHRSEPWGRAERSSSSSGAEPKSEPWVGRSGVRRLLGLSPSPSPGSGGAEFAVFRGLAQPESESEPWVGQSGVRRLPGLSPSPSPGSGGAEFAVFRGLARVRALGRAERSFLWCLWSGLTACQPHSVKWHRRRSGAGDAVSLSGRSVERRSDDGHFGSVGWGARVRIKVSGHLCIKRSCDLVGRCGDLVRVASWRRQGLGRAGNTFAARGGPRARRRSSGLYADGSYQLRIRSLEGTPNYGPRQ

SEQ ID NO: 72602 - protein, 124 aa, Zea mays
  Coding DNA Sequence Number=SeqID_29227
  Subcellular localization annotation: CTP_CleavageSite=40; ConfidenceScore=5.33e-01
MQDAAWHALSHYCSLLGGVVNGLNLRYYPRRPSGSTGGVVVSPVGEDNPRLSSTFNLAAVLNTELDHALDELSRARAEIAQLWAKRAEHRHLEDENDLVEESEELAGEAPEQQLVGGAVEASVP

SEQ ID NO: 72603 - protein, 124 aa, Zea mays
  Coding DNA Sequence Number=SeqID_29228
MEMWSGRAVARAPRSELAQGTNAACRRQEADWFSMGGERRAAADRGAGKATRHGGLNPCCWRYKKKGAPRQRGSYRGWRSLYRGGQPWATTSSLLELGAGPARGEQGREKLACTLDSRGSGLRA

SEQ ID NO: 72604 - protein, 126 aa, Zea mays
  Coding DNA Sequence Number=SeqID_29229
MAPWLELRCAGEERRLAVAVGKKGSRPGRPCSCARAAAGASSTRGQREALEGRDAMGKEREGAPCVLGEWRLLSLLGSEGSNEPAMVQRGRRGCRPPWLVARGMEARVAGLRKGEETPWEALHWCA

SEQ ID NO: 72605 - protein, 114 aa, Zea mays
  Coding DNA Sequence Number=SeqID_29230
PGFVPFPRYCGGEVEEEKRQWSSVAVSDDDDRERCRYRHQHRRLRSDDDDRQPIQPAPKFYEVLIASLCFAIFAHGFRHTISSCRLKELNQRKIKDRSTSPDSMPINDLKRLST

SEQ ID NO: 72606 - protein, 122 aa, Zea mays
  Coding DNA Sequence Number=SeqID_29231
  Homolog annotation: Hit_ID=A3AHT1; Match level="QueryCoverage=36%, HitCoverage=3%, E-value=7e-12, Identity=77%"; Hit description =Putative uncharacterized protein
MGSIVLYIQVQKHLLLGHCKELRGSPLVRFIEAFGTAFSRTTFCVPISEQIRTFIQMRTNLKVVDNSGAKQNQQIPIKGNLAKIRRETKCIPDLIFQIEDYEKYLIQLSKLTKCSKRLPDAS

SEQ ID NO: 72607 - protein, 143 aa, Zea mays
  Coding DNA Sequence Number=SeqID_29232
MDNAVDTVILVTGGANTAGDGGASMPNRLGRKMILDCPRLNSHAANPAHVSPSTAISPPAPHADPAPPARFTSRPRLLFLDVAVAAPGFVPFPRYCGGEEEEKRQWSSMAVSVDRERRRYMHRHRRLRSDDRQPIQPAPPSNT

SEQ ID NO: 72608 - protein, 43 aa, Zea mays
  Coding DNA Sequence Number=SeqID_29233
MERQPGAYTGEEKAPADRRPFSLWMQGRTSLATRIGLSDILYS

SEQ ID NO: 72609 - protein, 159 aa, Zea mays
  Coding DNA Sequence Number=SeqID_29234
MSLIPPPAGGLSAAIVVVARRWKEYHVIAAVEGHKLKTPETEHRPGPERLLETAHLELDGKLFVNTQQAPTWRANYRRFETGGSLSRRVGRRGGSSEAEVESVFHGRARALSRARRMSSQRQGGVRALGSGEAEFVVFPGLSPSPSPGSGGAEFVVFWG

SEQ ID NO: 72610 - protein, 29 aa, Zea mays
  Coding DNA Sequence Number=SeqID_29235
MKTENKTSALQLSAGDGEVFLALEESYIF

SEQ ID NO: 72611 - protein, 488 aa, Zea mays
  Coding DNA Sequence Number=SeqID_29236
  Gene Ontology: Mol. function=nucleoside-triphosphatase activity; Cellular component=integral to membrane; Biological process=transport
  Homolog annotation: Hit_ID=Q9FTG6; Match level="QueryCoverage=38%, HitCoverage=40%, E-value=7e-36, Identity=63%"; Hit description=ABC transporter-like
  Pfam annotation: Domain name=ABC2_membrane; Domain location=198-399; Score=7.8; E_value=0.0013; Accession=PF01061.15; Description=ABC-2 type transporter
  Subcellular localization annotation: CTP_CleavageSite=46; ConfidenceScore=5.31e-01
MPPPSRHPFSAESVGGGASSPYSSDTSHDTDSRSGYCTSTRTFHIMCAPSFSPSSDVPFVFPAFALFFLPNLLPLPTVAAASRPTLVDVAARPPPFSLLSLSTPSGSTNSARAQGSNLRGGRAGSDSGIRHRQSGLHLHQFTSSVPVAMTRAACTGAAPLPKSTSAITSERQALCAECFSSIVTDCLLVPVAVATAVTTITAATPANRQDVAAPTVLRTPQLFAARMAQSVLVGAFLGSIVLGTTDLQSRLGFFAFNLTYLLTSTTEALPVFLHERRILERETSRGAYRVSSYVTSNAAVFLPFLLAAAVLYAAPVYWLVGLAREPAAFAYCALVVWRVRGPVVNEYSGARGARECLASAGGAGGLCVLDGAGLLRQQGMRERMRWSSLGVMLGFVVGYRARQCDDGGEQQAQTPGLKLLVEDAKREHGVRYVYVWHAMAGYRGGVKLAAEGMEHYESALGLGLATAAPAGTKLTFTVAHKKLQRVKD

SEQ ID NO: 72612 - protein, 164 aa, Zea mays
  Coding DNA Sequence Number=SeqID_29237
  Subcellular localization annotation: CTP_CleavageSite=45; ConfidenceScore=5.02e-01
MNKNTGIRSATTNGTPVPPPQVRTTPLREGRPVEQRKADERRAVTCSSSGDDDDFCPPTPKLVRQGRVEVRGVEGDSPYVRPQTPWAESSPTRSKALPCGAGAGSRMSCKPAQKQKKPNRRVRCTQPPSGYKRFPTFAQTNGRKGRAAMQAACNCARWTRYSDF

SEQ ID NO: 72613 - protein, 222 aa, Zea mays
  Coding DNA Sequence Number=SeqID_29238
MALELELELAGGAGGVAKEAVEVGVVEAMGVARVVLLLLLEWLCLVYTSSCLPATQGGPNLSAPTHASLPFSLSLFGGVTLSALRPVVRSRVCVVGPARQSVSPPSTARTHAEIVAPTSPPSSKPAPPTPSTSPRTPPLPPCLAHFASAHSLELRVPVLQARRSFPIARPPAPEFVAGRARPPSATVLLHHQAQPRHRSCPTRGGDASNMEDFEEFQDYVEF

SEQ ID NO: 72614 - protein, 105 aa, Zea mays
  Coding DNA Sequence Number=SeqID_29239
  Subcellular localization annotation: CTP_CleavageSite=74; ConfidenceScore=5.34e-01
MAARLLLAYRAGGGAWCRGVAVAPGRDGAGSRSRRSAGARRGRAGRLSARRAVLGGSALVGPGRGAGATRDPARDSAVGAAAAFLRAACVIFGVGRRSGALTCGI

SEQ ID NO: 72615 - protein, 686 aa, Zea mays
  Coding DNA Sequence Number=SeqID_29240
  Gene Ontology: Mol. function=nucleoside-triphosphatase activity; Cellular component=integral to membrane; Biological process=protein catabolic process
  Homolog annotation: Hit_ID=A5AIR5; Match level="QueryCoverage=99%, HitCoverage=99%, E-value=0.0, Identity=67%"; Hit description =Putative uncharacterized protein
  Pfam annotation: Domain name=AAA; Domain location=258-445; Score =334.2; E_value=2.3e-97; Accession=PF00004.20; Description=ATPase family associated with various cellular activities (AAA)
  Pfam annotation: Domain name=AAA_2; Domain location=255-386; Score= -33.4; E_value=0.0039; Accession=PF07724.5; Description=ATPase family associated with various
  Pfam annotation: Domain name=AAA_5; Domain location=258-392; Score= -2.4; E_value=0.0044; Accession=PF07728.5; Description=ATPase family associated with various
  Pfam annotation: Domain name=ABC_tran; Domain location=259-382; Score= -61.4; E_value=0.082; Accession=PF00005.18; Description=ABC transporter
  Pfam annotation: Domain name=FtsH_ext; Domain location=84-232; Score =106.7; E_value=7.3e-29; Accession=PF06480.6; Description=FtsH Extracellular
  Pfam annotation: Domain name=Peptidase_M41; Domain location=452-662; Score=360.3; E_value=3.3e-105; Accession=PF01434.9; Description =Peptidase family M41
  Pfam module annotation: Pfam domain module=AAA::AAA_2::AAA_5::ABC _tran::FtsH_ext::Peptidase_M41; Domain location=258-445::255-386::258- 392::259-382::84-232::452-662
  Subcellular localization annotation: CTP_CleavageSite=64; ConfidenceScore=5.53e-01
MSLTTTTSRLPICRARDVSKQAPPAAKAAPPPSPSDTNGFSRRRLLRSAALGFGLGLARRDPARARAETTPPSPALAPEEVTSNRMSYSRFLDYLNANAVRKVDFFENGTVAVVELDDPALASRVHRVRVQLPAGGLPAELVRKLRDRGVDFAAHPVEPNLGLMFLDLLLNFGFPLLFLASLIWRSVTMNNPGAGGGGPNLPFGLGRSKAKFQMEPNTGITFDDVAGVDEAKQDFQEIVQFLKSPEKFTAVGARIPKGVLLVGPPGTGKTLLAKAIAGEAGVPFFSLSGSEFIEMFVGVGASRVRDLFNKAKANAPCLVFIDEIDAVGRQRGTGIGGGNDEREQTLNQLLTEMDGFSGDSGVVVIAATNRPDILDAALLRPGRFDRQVSVGLPDVRGREEILRVHSSNKRLDPDVSLSVVAMRTPGFSGADLANLMNEAAILAGRRGKDRIGVKEIDDSIDRIVAGLEGTSMTDGKSKLLVAYHEIGHAVCATLTPGHDAVQKVTLIPRGQSRGLTWFLPGEDPTLVSKQQIFARIVGGLGGRAAEEVIFGEPEVTTGAAGDLQQVTQVARQMVTTFGMSEIGPWALMEPAAQSGDVVLRMLARNSISEKLAADIDRAAKHIIDQAYEVAKEHVRRNRAAIDQLVDVLMEKETLTGDEFRALLSEHVDIGREQRETAARKKLVVTA

SEQ ID NO: 72616 - protein, 352 aa, Zea mays
  Coding DNA Sequence Number=SeqID_29241
  Gene Ontology: Mol. function=binding; Cellular component=mitochondrion
  Homolog annotation: Hit_ID=A7R3D3; Match level="QueryCoverage=22%, HitCoverage=16%, E-value=4e-20, Identity=64%"; Hit description =Chromosome undetermined scaffold_504, whole genome shotgun sequence
  Subcellular localization annotation: CTP_CleavageSite=43; ConfidenceScore=5.29e-01
MKAFEKFQYVDVLVPIVSFPLKYRCTSLLSMPSWATPIATTARLGAASHSNKARTNCTVLTLTMLATGTGIAPFCLFLWNMFFEKHDHYKILQPIRVLEVGAVSFMWRGEEKKIAATKGMLLGMGYIGARFDEIYTNMLKLGKVGQDSSWKLLDAVRETGLIFFRAPMEDKLQLELSEVMVRSGMNPTVSDQAILLDLIAKSRCVAAAKKYFLDLPETSKTYFRYHALLNSYSKVLMIEKAESLVEKMEELKFPFIFYMKRKVVVAETRRSLKPPPGWNQTAKMISTASTEITGLTNNSYFDGAHEDCFLLIPYCVRTRKFPAKQTARKLFRGGHDEDDSADVDTNDADVPR

SEQ ID NO: 72617 - protein, 78 aa, Zea mays
  Coding DNA Sequence Number=SeqID_29242
MENAEVHILHLHTAFRDLVHRWECSGLPNGERFQYCIINNMKNFAHTAIERDHQAGDGTAPAGVNKQFVASGQAMNME

SEQ ID NO: 72618 - protein, 527 aa, Zea mays
  Coding DNA Sequence Number=SeqID_29243
  Gene Ontology: Mol. function=L-isoleucine transmembrane transporter activity; Cellular component=integral to membrane; Biological process=amino acid transport
  Homolog annotation: Hit_ID=Q67WJ7; Match level="QueryCoverage=64%, HitCoverage=85%, E-value=1e-147, Identity=76%"; Hit description =Putative amino acid transport protein
  Pfam annotation: Domain name=Aa_trans; Domain location=2-356; Score =144.4; E_value=3.2e-40; Accession=PF01490.9; Description =Transmembrane amino acid transporter protein
  Pfam annotation: Domain name=Spore_permease; Domain location=1-302; Score=-166.3; E_value=0.036; Accession=PF03845.4; Description=Spore germination protein
  Pfam module annotation: Pfam domain module=Aa_trans::Spore_permease; Domain location=2-356::1-302
VGILSIPYALSQGGWLSLLIFLTIAIICFYTGILLQRCIDSSSLVKTYPDIGELAFGRKGKIIVAIFLYLELYLVAIDFLILEGDNLEKLFPNANFHAAGLKVGSKQGFVLMFSLLVLPTTWLQSLNMLAYVALGGVMASVILIASVLWVGTFDGVGFHKKGVPVDWSGMPTAMSLYAFCFSGHAVFPMIYTGMRNRKTFPTVLLICFIICTLSYGLTGVIGYLMFGKSLSSQVTLNLPANHFASNIAIYTTLINPFTKFALLITPIAEAIEDKLHVDKNKTVSILIRTALVVSTTIVALAVPFFAYVVALTGSFLSSTVTILLPCVCYLKISSRTSRNLRLELAEGGWTGGNVIGAATELVSAEGEWGQAIGASFFAHAPLFSLCFAGQFCQSSSRYPRAPVLYLYAVGLPCQLRPPRARRGPARAHSRTSPESSATTPAHAPQLLFEPRLRPHSLPRLISRSPAPTPATSPPREGAAPPAAVHPSQFGLPRPISIARPRSRDTASHTRALRLGLSVSARVPWRWA

SEQ ID NO: 72619 - protein, 131 aa, Zea mays
  Coding DNA Sequence Number=SeqID_29244
MPPTPPQGIPAAGGDPNGDGDDDDASGSSSHGTELLEEPEPERWIARPITRDAAHGVADGLDLKYYPHRSTGSAGGVIVSPVGEGNPRLNSMVNLAAVFNTELDHALDELGKMFENRRRGARRAQPEQQAP

SEQ ID NO: 72620 - protein, 52 aa, Zea mays
  Coding DNA Sequence Number=SeqID_29245
MNGGVAAPTGWRRPELPQMVNETFSTPYKPLENWLLPILSPTTMTFLLVPLE

SEQ ID NO: 72621 - protein, 212 aa, Zea mays
  Coding DNA Sequence Number=SeqID_29246
MFLEGKGVQITLCPRPLSRVIIAPLRPSLPSDKVCSRENPHPSRARLGSSTNSRWDVYTTRAQVGPWVQTLPRPKSPEPGLGYLLPANLVGGHSFNCDTHDYEYWSEPDHELGRTSASPEPNFSLDISNRKALDVIVYCRADVLLKGFLPYRVNHYNIGNLLVWGLGHVTELQKSGVSTGHKSTTSARPILGHTVYKARLRLLTVRGQLRYF

SEQ ID NO: 72622 - protein, 581 aa, Zea mays
  Coding DNA Sequence Number=SeqID_29247
  Homolog annotation: Hit_ID=Q6QP51; Match level="QueryCoverage=20%, HitCoverage=66%, E-value=5e-17, Identity=42%"; Hit description =Putative growth-regulating factor 1
  Subcellular localization annotation: CTP_CleavageSite=34; ConfidenceScore=5.12e-01
MELFQGAPSPHLLAGPSLLRVLFLLPLLRGNPPRSSAHRGLQNRWQGRLVMLYLLETDEKSQLREPRAIRRKEKEGADTHQGHTPAVRTHQGLGKGVGIRLPQRDGYPPVEVIDGKGIRGHPQTLQVGLRRHLPKRQPPLHQGNHPPAMNGGNHSRSGEPSFPQLPQGLQKGLEILLSIVWGPVAPVIDGGGHHSLRKRREPPIVVSEIEPPALPPFVRGRKDGGDILRRPRLPQLEDTATSPHCRADPRLPHRQGKKLRGEEMSPQVPVRVNPQISFTNRREDGGLRDGVRTKVVQLHPVDVQNRPHKTACRHSEPPLVKGDEAHDIPRRRGRGGSARGGHPLRLRVTGERAKDRERGYPERDPSPRRKRAPSPLLIRGSKAGPSEGFNSRLRALGLRSHYWSEVRRPAPRKGSTAASGHSGFEPITDQGFVGWPSKGFDSRLRRRARDDPGYVRYITKARATLPSHFAAPLTGLTRGQRRLHRSDCCATRQTSEDDELRLARPQGSDSGSASEDDELRLARPQGSDSGSAPEDDELRLARSQGSDSGSALEDDELRLARPQGSNSGSAPEDDERRLARP

SEQ ID NO: 72623 - protein, 258 aa, Zea mays
  Coding DNA Sequence Number=SeqID_29248
  Gene Ontology: Cellular component=monolayer-surrounded lipid storage body
  Homolog annotation: Hit_ID=P21641; Match level="QueryCoverage=62%, HitCoverage=89%, E-value=4e-22, Identity=44%"; Hit description =Oleosin Zm-II
  Pfam annotation: Domain name=Oleosin; Domain location=39-156; Score =189.7; E_value=7.1e-54; Accession=PF01277.8; Description=Oleosin
MADRDRSGIYGGGAYGQQQGGGRPMGEQVKGMIHDKGPTASQALTVATLFPLGGLLLVLSGLALAASTVGLALATPVFLLFSPVLVPAALLIGTAVAGFLTSGALGLGGLSSLTCLANTARQAFQRTPDYVEEARRRMAEAAAHAGHKTAQAGHGIQSKAQEAGAGTGAGGGRTSSVVVECSSLYVGNRLLVVFPECVINILVFVVCGAALGWGLGSAVYRFAIAIVACASAVCSLTVMEISIGEDTTAELFLKFPML

SEQ ID NO: 72624 - protein, 210 aa, Zea mays
  Coding DNA Sequence Number=SeqID_29249
  Homolog annotation: Hit_ID=Q8H6I2; Match level="QueryCoverage=100%, HitCoverage=100%, E-value=1e-102, Identity=81%"; Hit description =Putative MURBZC
  Pfam annotation: Domain name=Zea_mays_MuDR; Domain location=10-210; Score=-34.3; E_value=0.0034; Accession=PF05928.2; Description=Zea mays MURB-like protein (MuDR)
MDSAAEHCAQKLSLAAVAARDTLKASAAASIVAGDYCATFSLGNDVVSTLDVLESAVAAENSALRSYKQATAAVDCAKETVAKYSEVNQKLAQALRYAMSQMSDTAKKLQETASLCYTDEDVVDGFKLTQVARSMDEIAEMLEVTAIDCQVSMMDPTSMLEAGYASEDTAVWEDVFRDREIMNQPLEVETLAEHCAKWGLNYNEIWDRSV

SEQ ID NO: 72625 - protein, 193 aa, Zea mays
  Coding DNA Sequence Number=SeqID_29250
  Subcellular localization annotation: CTP_CleavageSite=37; ConfidenceScore=5.24e-01
MDHGRRNPATQGRASSGEGQGPVRGDKDSSSRNTTARASRVGARKTTARAQREWNTGPSRGDLFTGERGRFQCHPFNCHDGGAKSLKPAVDSVMFAKFSIRKGPSTSSGRAERRHHPVVKSRTVAIPSWRAAPLSSPHREIRRRHPFAEGRIVAVPMLSVTPSLAERRHRPGLCRPAAFHLADVLQPLTLCRA

SEQ ID NO: 72626 - protein, 270 aa, Zea mays
  Coding DNA Sequence Number=SeqID_29251
MAAMSSDTPLATVGDAVGVPSSIPPPTPEEPEVILGRRLGAEPEVAPTPLPRVLSHAHQALWETEAAILREWEALATEHQRLGDWRAQLEERTKAASHQFASERSELEEEREDLKEDLQKVFNQEREVTQKEKRLAKKVDHLDQREEVITALQEKQKAYNVMLEKQQDKQTAAAASLQKLQRELDDRASNIALAEENLKAKDASLEERATDLAWQEKDLAFREEMWDRRDKLLAKHELEAKEKEKRLEEKERTLEEWACRFQATQAAQVA

SEQ ID NO: 72627 - protein, 171 aa, Zea mays
  Coding DNA Sequence Number=SeqID_29252
MITQDLERLSQDPTEENQDPRIFTKNEVSTQLQLKLGDIVESNTKYNINFDVSSDHDSEFNDISAKSLEFAKNLSGGELKDDEIIQHLKTEYNVGRVTNSKQYATCPNMELIIPRSSYVSKSRWRHHLINHIKSRLVPNKICGKRPANLKACRRNCTATSDVEQFCLRIAV

SEQ ID NO: 72628 - protein, 40 aa, Zea mays
  Coding DNA Sequence Number=SeqID_29253
MEVQDPARRSGPDMQGSGTFQRWWYVRSFCFGLILSPPLA

SEQ ID NO: 72629 - protein, 319 aa, Zea mays
  Coding DNA Sequence Number=SeqID_29254
  Subcellular localization annotation: CTP_CleavageSite=65; ConfidenceScore=5.05e-01
MSGAHRTVRCPLLAVGSATCPAQIARPTVGSPDSPEGEPSWGPAFRMGWRPTSSFTIRGRRAFTSLAEEVNFGYAGPAGCRDRQLPLVWLLGLDGFGAASGAASCRLGGVHHIHGVSRATGHTAPTSLGGCTRCRTPWGWRSRSWMVLSSLPWEDGSKDLFARAEAVAVAGKPPVRRWPLSSVLRWSLLLVRLHTAGVVASAGETVSATCHRASHSLDLMASLSPPVGGQGQGLLRNGARIEVVATVGESSVQRWPLPSVLKWSPSLASRSKLATTRPYWCGGPRYGTRLSGYTGSGPPQETNVHSLVSDPRLSDPQDL

SEQ ID NO: 72630 - protein, 111 aa, Zea mays
  Coding DNA Sequence Number=SeqID_29255
MLARDDRDLDLVEVECAMLSSQSASSRHCFMAPGEAVELGGCRSSPWLLTTPPEPPSTVFGISSAQHWAIENLRRGRDSFFLHQEIRGSLSVVLNNLHHHTERENQQKPNA

SEQ ID NO: 72631 - protein, 67 aa, Zea mays
  Coding DNA Sequence Number=SeqID_29256
  Subcellular localization annotation: CTP_CleavageSite=38; ConfidenceScore=5.53e-01
MAHARAYKARSGVDCTLPRTLKPHRSSVHRRLPVRGVSAATRATAAVDRPAQPSPAPSNPQRRVSTH

SEQ ID NO: 72632 - protein, 64 aa, Zea mays
  Coding DNA Sequence Number=SeqID_29257
DALLGHLGSDQWKVMISGQKGNHGLWRHYGIGGYEIDGSGYDYGAGEDEAVEGNFQEFQDYDEF

SEQ ID NO: 72633 - protein, 743 aa, Zea mays
  Coding DNA Sequence Number=SeqID_29258
  Gene Ontology: Mol. function=nucleic acid binding; Cellular component= nucleus; Biological process=regulation of transcription
  Homolog annotation: Hit_ID=Q10EL1; Match level="QueryCoverage=97%, HitCoverage=94%, E-value=0.0, Identity=74%"; Hit description=Zinc finger C-x8-C-x5-C-x3-H type family protein, expressed
  Pfam annotation: Domain name=Ank; Domain location=122-157; Score =34.1; E_value=5e-07; Accession=PF00023.21; Description=Ankyrin repeat
  Pfam annotation: Domain name=Ank; Domain location=87-120; Score=17.9; E_value=0.038; Accession=PF00023.21; Description=Ankyrin repeat
  Pfam annotation: Domain name=zf-CCCH; Domain location=301-326; Score =26.2; E_value=0.00012; Accession=PF00642.15; Description=Zinc finger C-x8-C-x5-C-x3-H type (and similar)
  Pfam module annotation: Pfam domain module=Ank::Ank::zf-CCCH; Domain location=122-157::87-120::301-326
MPISASSAASVDSGAVAAGTPMKNATAADALAEMARHLTVDTEDTFAGLLELAADDDAEGLRLALERAPPAAADEAGLWYGRRKVLEHRTPLMVAATYGSLAALRLLVSISYVDVNRRSGTDGTTALHCAASGGSRTAVESVKLLLGAGADANTMDDAGRRPADVISVPPKMFDAKFALQDLLGFPKSEHGMLRVVTRSTNSISSPVSSPTAEDARSPSASVMMMTKFADLPRVATSEKKEYPVDPSLPDIKNSIYASDEFRMYSFKIRPCSRAYSHDWTECPFVHPGENARRRDPRKYHYSCVPCPDFRKGVCRRGDMCEYAHGVFECWLHPAQYRTRLCKDGTSCNRRVCFFAHTTDELRPLYVSTGSAVPSPRASATAAMEMAAAMGLMPGSPSSVSAVMSPFTPPMSPSGNGMPPSLGWQQPNVPTLHLPGSSLQSSRLRTSLSARDMPADDYSMMRDLDSQLMNDLCYSRLSSSTGNHSARTKSLNPSNLDDLFSAEMLSSPRYSNADQGAMFSPSHKAAILNQFQQQQQALLSPINTGVYSPKGVDNQQLPSHSSLLQASLGMPSPGRMSPRCVESGSPMSSHLAAALVQREKQQQTMRSLSSRDLGPSAARASALGSPLSSSWSKWGSPSGTPDWGINGEELGKLRRSSSFELRSGGDDPDLSWVHTLVKESPPEKQVTTAESISSVGPSPLMPPGMNNGDGSGLSTQLDGHDQAAVIGALLEQMQLDQQIGSLAT

SEQ ID NO: 72634 - protein, 187 aa, Zea mays
  Coding DNA Sequence Number=SeqID_29259
MAAWLACPWLGAALRPPCPPWWRGSPDRDLGAARPWRSELGRDAQRVPGVLRRPALAAGARPWPRRGFDAMARLRHTARKSVIPFLPSHLAERPLHRPVAGQSSQLERLHHRLREEQERRRQEQQGSSFSLQQEIESVRSCSPGLPLEAPPAPPLSAPVPGVAAGGDPDDGGGDGSSSHDTDFSADQ

SEQ ID NO: 72635 - protein, 252 aa, Zea mays
  Coding DNA Sequence Number=SeqID_29260
SPSNSTTEGTVARLLREIVAKGRVLGETLRSQRRCGSTRGCRIARPRAQAGCLIGAECTGQTRRSGSIQGHGELYGRVGWGWGKLDWPVYGGSGSGGRGHAAHGQTAMNWTPVRLERARKSVLIAFSIKVGSSHGNTWGVTFGPLRLTSLPRSPRNPSMLTHLCEHPTGQRADKYGPQVSHSWGPRISPLRQTLPYTRLVTTTWAHAACTSAQTNACSPATDGWDQSVSSFPSMGCWDLTPPGGYIARASPR

SEQ ID NO: 72636 - protein, 146 aa, Zea mays
  Coding DNA Sequence Number=SeqID_29261
  Homolog annotation: Hit_ID=Q8SA86; Match level="QueryCoverage=36%, HitCoverage=6%, E-value=8e-08, Identity=48%"; Hit description =Putative retrotransposon protein
MKATSELRKPKADEVIEENHLKEDALVAEEDAAEESTIKPSDLKVLKKHGYIEDDDVIRFAGDETTPEPKEDEIVVFKSFFWARLRLPMFKMNDEPRLSEAGRRCQCRDNEVHKIDRYASKSETAHIQPIRVKHGKGELVIVQHFG

SEQ ID NO: 72637 - protein, 219 aa, Zea mays
  Coding DNA Sequence Number=SeqID_29262
  Subcellular localization annotation: CTP_CleavageSite=9; ConfidenceScore=5.09e-01
MPPPRLPLRATARPARTPPLLPLRAQATNPRKCTHKFGSRGNGARFGYGVHDLETAQSTLPIWKARSRYCNHNNYPPNVAPIDDQDPQIWQCTIPPNNRARSGNCVHHLRRRFGKRTIYDADLESALPNDSSTNPPNRAPTIVKKVTIVILLQPSYNDGNPALTLLQQFMCFWYLSLGYIEFTFENFFAKCSKKSLFSMIPFKFPCKDIEVSIIMGLKT

SEQ ID NO: 72638 - protein, 450 aa, Zea mays
  Coding DNA Sequence Number=SeqID_29263
  Homolog annotation: Hit_ID=Q6BTJ4; Match level="QueryCoverage=42%, HitCoverage=21%, E-value=5e-07, Identity=29%"; Hit description =Similar to CA1621|CaIFF6 Candida albicans CaIFF6 unknown function
  Subcellular localization annotation: CTP_CleavageSite=74; ConfidenceScore=5.55e-01
MQAACNRAKWAHPSDFQRTQHGGPGPHVMQPTRRLLRASNCTATRTTTVPPRLRNQYRDSRQPCAGGSNGHVVSQAYVPSRDSKGTLSHGVKTGPGKGIPRKGILLREGNRPRASLLIRGLKASPSEGFNSRLRALGLRAHYWSEVRRPAPRKGSTVASGHSGSAPTTDQGFVGWPSKGLGLGLSPGRRRTPLRPTPGLGLGLSPGRRRTPLRLTPGLGLGLSPGRRRTPLARPQGSDSGSAPEDDELRFARPRGSDSGSAPEDDELRFARPQGSDSGSAPEDDKLRFARPQGSDSALASVDDLRLAQPKGSDSTSASEDRLDLDLGGASTLPNLGLGPTTSQEAPSLPYPKLTQATGNKTGVPSGSPRQTSNDGAHARFMTTVALSPLTEARGSQQGLDSPDSCPSARLQRTSNDHDTTRTGCQTLSGCHDGMALLQRVGRAEKDGTAL

SEQ ID NO: 72639 - protein, 755 aa, Zea mays
  Coding DNA Sequence Number=SeqID_29264
  Gene Ontology: Mol. function=helicase activity; Cellular component =intracellular; Biological process=viral genome replication
  Homolog annotation: Hit_ID=Q1EPC6; Match level="QueryCoverage=97%, HitCoverage=47%, E-value=0.0, Identity=69%"; Hit description=DNA helicase homolog, putative
  Pfam annotation: Domain name=DUF889; Domain location=420-656; Score =461.1; E_value=1.5e-135; Accession=PF05970.5; Description=Eukaryotic protein of unknown function (DUF889)
MRVEWGGNEIDGFGYDYGADASKADDDVDEIKQYRDARWVTPPEALWRIYGFELSQNSPPVMQLQLHLPNMHMVAFHERQMVERVINRPGADRSMLTTYFEANRLHEGARGILYRDFPEWYTWQSGKGKVWQRRKRDTGGQVGRIVSAHPAEGERYYLRVLLNHVTCATSYVDLRTVDGVTLPTFCEAAERRGLLESDNTLDECLTERALFQMPSALRRLFATILVYCEPSDVAVLWQRHLDAMSEDYQHRSQSKTHVEQMVLIDIRNMLQSMGKDIKTFPLPPIIDTYDDAIGTAREGGLFFVDGPGGTGKTYLYRVLLATLRGQGKIVVATATSGVAASIMPGGRTAHSRFKIPLTIDDGAICSFTKQSGTAELLRKASLIIWDEASMTKRQAVEALDNSMRDIMGRPKLPFGGKTIVFGGDFRQVLPVVRKGSRAQVVASSLRMSYLWESMSHLKLVSNMRAKNDPWFAEYLLRVGDGTEDTNSDGDICLPDEVCVPYSGSDSDLDNLIDFVFPNLNENMSDSTYITSRAILSTRNDWVDMINAKMIDRFQGEHMVYHSFDSAMDDPHNYYPPEFLNTLTPNGLPPHVLKLKIGCPVILLRNIDPANGLCNGTRLVIRGFQRNSIDAEIVLGQHAGKRIFLPRIPLCPSDEEMFPFQFKRKQFPVRLSFAMTVNKAQGQTIPNVGVYLPEPVFSHGQLYVALSRATARSNIKILAIPAVDVKKRSRKGVKKNPTIDCGTCTKNIVYKEVLTN

SEQ ID NO: 72640 - protein, 122 aa, Zea mays
  Coding DNA Sequence Number=SeqID_29265
MRTPACARGPGDSGHPRRRAAPRCDRQSLPEPTLPFAGPISPPVKKNRKCDLNNEPEGTPIFVRPLFGEPQILKTDCNLADGKYVLVPEQGAAQEVAPDPAPEPAPEDLPTTALEGKPRFYA

SEQ ID NO: 72641 - protein, 95 aa, Zea mays
  Coding DNA Sequence Number=SeqID_29266
MSYTKNVAYHPRHPLEKAEPETWTFDMPWHGFCREVGSVTHPIWLPEISLPRPYLPWRLTDRRGLAGTLGADENTRLRSWTGRFRPSPPSSRTSL

SEQ ID NO: 72642 - protein, 88 aa, Zea mays
  Coding DNA Sequence Number=SeqID_29267
MALGKEGNLGISKDIWRVLCRVPVQQTLGKESSFAECLLGLSAQGLAVGPTGSVFVEGLSSEHSAKLNSLSSAAGGTRQSIRYRYLAP

SEQ ID NO: 72643 - protein, 71 aa, Zea mays
  Coding DNA Sequence Number=SeqID_29268
MGGKARWPETGVREVEIPRPSCSSRAQVGRKERIQVYNGGVAECYMSSGGRASALSTCQCGSRRDLGTLLV

SEQ ID NO: 72644 - protein, 113 aa, Zea mays
  Coding DNA Sequence Number=SeqID_29269
MEQGGRCLGARLGERTSALQQGTEGGGDREGTLGPGRAPSDGAQSGGRHGRGGAELPSANAVEKGRKRGAGCLGAERHGEEKSSSLPAAVQNQRRDGVGCCRVGEDRGKDSGG

SEQ ID NO: 72645 - protein, 114 aa, Zea mays
  Coding DNA Sequence Number=SeqID_29270
MASASSPSRVTLAVERTLAIREGVFRTFGIPKPRTIFTDQAHYEKRSSTAKGLLLGDSFVAEGPLHESLESFYVVERDGSINPFLVTHGGCHSSDYIEKMTLSLDLQKIFLLTT

SEQ ID NO: 72646 - protein, 201 aa, Zea mays
  Coding DNA Sequence Number=SeqID_29271
MGKNNKRKREPTPPSEEFGDSEYSEEEFSSEFEGSPAPIPLRESSDDSDDSQGLAAEVWTYIRAVERSGLEGSDESEFSSDEEDSDGGEDEDDDDDDGDDDDGGDGDGDGGGGSGGKGSTRGGSSTGSTRGGSSKGSTKGGGETTPSDVKVDISVLEVTPSNRTRNRCFRGNAELVKINIDILEVMSSDRIQVQRFGGNAK

SEQ ID NO: 72647 - protein, 207 aa, Zea mays
  Coding DNA Sequence Number=SeqID_29272
  Homolog annotation: Hit_ID=Q7XBD4; Match level="QueryCoverage=95%, HitCoverage=21%, E-value=6e-07, Identity=26%"; Hit description =Cinful1 polyprotein
MEVVELVPCARNKWGNWWDYWFYVSEAKVKDHPGLPAAIMCSHYYVAYPQFEVAEDDENERALRIVARTSSGRDLVEEFIGYGVWPLAHGWTLGEVCPREMPSLGGRKVRSPLFALDVRGRDPAAVVREAEDGAVRIVGRYVPKTEALRSWDIRGSNDRLDRVFELNRLPYGGYPREDVVDRRGKKPAAVTEEDPAREAAQPLRKGS

SEQ ID NO: 72648 - protein, 610 aa, Zea mays
  Coding DNA Sequence Number=SeqID_29273
  Gene Ontology: Mol. function=RNA methyltransferase activity; Biological process=RNA processing
  Homolog annotation: Hit_ID=Q10T58; Match level="QueryCoverage=91%, HitCoverage=43%, E-value=4e-79, Identity=43%"; Hit description=RNA methyltransferase, TrmH family protein, expressed
MASPPEREVAALESCFRALSAADAVPAVVDCVLASSASSSPSQLFHALLRSFPPSQVIEMMCNAVSDTGCWDLLGATIVSFCIRSSVVAMGLSAADANSILYQSIMEADFPAETLSCLLPLSNSSSVLASLLVDMLERRRTIPTSQEGAADLAALVQNLTWDLAKLVLKMFTHAQEYRSCATRVLLQPVLISLTDVSSVTVSFGAVQHKLSRLLRVHFFGNYAVVNSNCSNSSYLLPAGHQAAVLGVGIVQEFDLKNVSEFWDELRRGLVDKDSLVRKQAFYVLTISLSIFTSSSGNDSCQHFSSRSPAALPAQIKANAGETKRERWANKEAKSLGVGEMDQSGENCSNGQDRWKVVRLFECTLQNDYLNHTSCGAFHAQMESWERILYWMAVLWERGFSHENPQVRCLVMQSFLDIAWERYKITATCTTTMVDSSTTKVIQVATSLINATEIPLNQLLHFIATIPREFTDYIGPLRVVVQKWFFQKEECSPGDTLLSKLIDFSATFVSQKRNEGSNVFDDEDVDAWEAEARRWARTLLLVTEEEEHLKRIFRFLEAYGYKLSEQCPSGDFIPIKFFIIVLSFIEELELRQRKLVCRSNTILRGKYGGIQ

SEQ ID NO: 72649 - protein, 144 aa, Zea mays
  Coding DNA Sequence Number=SeqID_29274
  Gene Ontology: Mol. function=serine carboxypeptidase activity; Cellular component=extracellular region; Biological process =proteolysis
  Homolog annotation: Hit_ID=Q6K4Y0; Match level="QueryCoverage=68%, HitCoverage=42%, E-value=4e-29, Identity=47%"; Hit description =Putative carboxypeptidase C
MPRQRTLTSEAAGGRLLLVVVAVLLCLSVPLGRAAPPGAEVAEFPGFTGKLPSKHYAGHFECAGPFRMEGSQVHINDGPRVAVNPYSWTKMASLLLVDSPAGVGYSYADHEDDYTTDDTSRVADLYDFLSKEMKNPVGSRSTSR

SEQ ID NO: 72650 - protein, 105 aa, Zea mays
  Coding DNA Sequence Number=SeqID_29275
MASPKLQTPRAIGGCSLGQLIIFCLSLILRAIYDTPSIVDGTCRDPSMLRANDDTRMRSSTGRSMIGITASLHEVRPRGLSRQRLQLAARPGDGRGSTSVTLIVA

SEQ ID NO: 72651 - protein, 125 aa, Zea mays
  Coding DNA Sequence Number=SeqID_29276
MFCRRSRALSKETRASSPARLRLSSARRSLVYAPLTEGERTDADASYWRRDDRGLDLVEVECAKPSSRSTSSRHCFMAPGEASRISDEGHSAPRSTGALFDNGLDKHAVCRMALASPASGVDKSH

SEQ ID NO: 72652 - protein, 167 aa, Zea mays
  Coding DNA Sequence Number=SeqID_29277
MAWMVLSSPRMRAGARASSPWARDEVAAITGKPPMQRWLPPLVRLPGAEVVASIGEPLGVEVVASAGEPLCAEVVAAADQQVGLMREDLIGLAYTYALPSYKKGEKFDPSDLLLWIELTEMLQWSGRAISAWTCQKPGPVGSLERFLGEGRLWPRRPGSTGSLWGSI

SEQ ID NO: 72653 - protein, 150 aa, Zea mays
  Coding DNA Sequence Number=SeqID_29278
MGKNKKGGSSSHHSGDKRKREPSPPSEDFGDSEYSEEEFSSESEGSPVYASPLSFDDSDNSQGIATEVWTYIRAVEHSGLEGSDESEISSDEENSSDSSEEESGGDGDDEDDSGDGGDDGGDGDDDDKGDSDSGKGDSGSSKASGKAPLA

SEQ ID NO: 72654 - protein, 119 aa, Zea mays
  Coding DNA Sequence Number=SeqID_29279
MITVDDDQVRSCGGDSGGIPVPTSDDAAAGRQMLTTMGEHHQQQLTVSRIRTAVSMLTRRTGHARFRRGPSRIVHHASSSDHHQLRPPAAGGNWLLDLYLLIGFTCDYSFDGFARLPMD

SEQ ID NO: 72655 - protein, 101 aa, Zea mays
  Coding DNA Sequence Number=SeqID_29280
MARAGISRVDDVEVAKSAGSTRSEDHEQSREDASQKPYSPSPGAGSRRRRVPKTCSPNRRCTSAVGCWLPGSFYRAESAASDLSRPRKSRVQLRFYSDRLG

SEQ ID NO: 72656 - protein, 17 aa, Zea mays
  Coding DNA Sequence Number=SeqID_29281
MAAESRVSSSRRLPTER

SEQ ID NO: 72657 - protein, 31 aa, Zea mays
  Coding DNA Sequence Number=SeqID_29282
MADDANRAAFMELQSRMIDTTAKIKQCGCCS

SEQ ID NO: 72658 - protein, 271 aa, Zea mays
  Coding DNA Sequence Number=SeqID_29283
MARLRHTARKSVIPFLPSRLAERPLRRPVAGQSSHLERLHHRLREEQERRRQEQQSSSLSLHQEIESVRSCSPVLPLEPPPAPPLGAPASGVAAGGDPDDGDGDDSSSHNTDFPANPEPEGWVARPITRDAARGCHFHDALDTLLRRAFDRHTWSVEYRCVVYQHSRGVYPDRWEATCLVRCPEDSLQGAEACSEHYSISERDSAEAAMQDAARRASAGRSHLGYLAANKLQRKITIWRATNSHAVEQRLSNLKLSIRHQPRTNASSLYSA

SEQ ID NO: 72659 - protein, 70 aa, Zea mays; identical to SEQ ID NO: 49003
  Coding DNA Sequence Number=SeqID_29284

SEQ ID NO: 72660 - protein, 108 aa, Zea mays
  Coding DNA Sequence Number=SeqID_29285
  Subcellular localization annotation: CTP_CleavageSite=33; ConfidenceScore=5.02e-01
MGNCGKHNKQGCTTSVGTAWKLQDDVSPHQRGRRMAKRGVGRRYQAGELERVRWSSDRWSVERVRKQLKAWKSSNSAQASVRRELASRLSIWDLSTGYKAKASAMRYA

SEQ ID NO: 72661 - protein, 234 aa, Zea mays
  Coding DNA Sequence Number=SeqID_29286
  Gene Ontology: Mol. function=oxidoreductase activity, acting on paired donors, with incorporation or reduction of molecular oxygen, 2-oxoglutarate as one donor, and incorporation of one atom each of oxygen into both ...
  Gene Ontology: Mol. function=donors; Biological process=protein metabolic process
  Homolog annotation: Hit_ID=Q5GAV6; Match level="QueryCoverage=41%, HitCoverage=27%, E-value=1e-18, Identity=53%"; Hit description =Putative uncharacterized protein
MSTLAWATTVGAATGGRAGAPVDEVWGPIPGRCLSTSGSAVEGQGLNRHGELLEKKLIPHSMEGGKGHGSLDQSLQIAEGVREALHLAAVLPHGEVPLRELVELGIKVKGPSVTVPEELFLESEPRLATFVRLVSDDVLELDDDGVVDPPENHGVHQVPGQRRRGDDILEGVVSESIVPKSEEDLPPPKRVVGGCPVQHDGHEGPNVVESGSLGVESGDVVDVESRGVGGLGGG

SEQ ID NO: 72662 - protein, 131 aa, Zea mays
  Coding DNA Sequence Number=SeqID_29287
MGKDKKGRGSPRRYDDKRKHEPSPPSEDFGDSEYSEEEVSSESEGSPKYAPPRRSNESEVSSDEENSSDSSEEGSGGDSNDKGDGSGDDSGGGGGGDGGKGGSGGGGDGRSGDGSKGRSGDGKASGKAPLA

SEQ ID NO: 72663 - protein, 48 aa, Zea mays
  Coding DNA Sequence Number=SeqID_29288
MEKELEKKQQMIEGLGACGGQISPGSTRRQEGLAKGFVKRPQSSGTQM

SEQ ID NO: 72664 - protein, 356 aa, Zea mays
  Coding DNA Sequence Number=SeqID_29289
  Gene Ontology: Mol. function=drug transporter activity; Cellular component=membrane; Biological process=multidrug transport
  Homolog annotation: Hit_ID=Q5QN97; Match level="QueryCoverage=99%, HitCoverage=70%, E-value=1e-161, Identity=78%"; Hit description =Putative NIC2
  Pfam annotation: Domain name=MatE; Domain location=136-299; Score =133.0; E_value=8.4e-37; Accession=PF01554.9; Description=MatE
MAILWVFLPDVLPLIGQDPQIAIEAGRYALWLIPGLFAFSVAQCLSKFLQSQSLIFPLVLSSLTTLAVFIPLCWFMVYKVGMGNAGAAFAVSICDWVEVTVLGLYIKFSPSCEKTRAPFTWEAFQGIGSFMRLAVPSALMVCLEWWSYELLVLLSGMLPNAALETSVLSICISTVILVYNLPYGIGTAASVRVSNELGAGNPDSARLVVVVALSIIIFTAVLVSVTLLSLRHFIGIAFSNEEEVVNYVTRMVPLLSISVITDNLQGVLSGISRGCGWQHLGAYVNLGAFYLVGIPVALVAGFALHLGGAGFWIGMIAGGATQVTLLTIITAMTNWRKMADKARDRVYEGSLPIQAN

SEQ ID NO: 72665 - protein, 95 aa, Zea mays
  Coding DNA Sequence Number=SeqID_29290
  Subcellular localization annotation: CTP_CleavageSite=57; ConfidenceScore=5.55e-01
MSACVKLQLVGQLRRTPTAQAQPRGRPALRPPASGHRTAQARTQPGTAVRGTGHCATAQTSWGDCSKQTLWASMLGPDRGTSNKDYDKSVAARQM

SEQ ID NO: 72666 - protein, 108 aa, Zea mays
  Coding DNA Sequence Number=SeqID_29291
MARVACTLLAQRTPGRVLSPVVFAEVLFPYLLSLPLYLRSACVSGVITVICMNVGDLRDDEFELVNSIALLSYPGHVHSHLRPLMARVGACGPANLGGLSHVCPSLTS

SEQ ID NO: 72667 - protein, 141 aa, Zea mays
  Coding DNA Sequence Number=SeqID_29292
MEWVFLKRKISGDISVEYLGSISGKNLKGDYSGNIWAVFLEEFEGDHWRNIWAREFEKISRFEFLGCYKSTPLKRNLVLEIRLRRVMGIALLQLHIFTLQPFEEMELQQNLVFEEHPVANTDFGYSKIIFSLLGFAWQPAY

SEQ ID NO: 72668 - protein, 338 aa, Zea mays
  Coding DNA Sequence Number=SeqID_29293
  Gene Ontology: Mol. function=transcription factor activity; Cellular component=nucleus; Biological process=regulation of transcription, DNA-dependent
  Homolog annotation: Hit_ID=Q8VXC3; Match level="QueryCoverage=96%, HitCoverage=94%, E-value=8e-32, Identity=36%"; Hit description =Ethylene responsive protein
  Pfam annotation: Domain name=AP2; Domain location=150-201; Score =67.0; E_value=6.4e-17; Accession=PF00847.11; Description=AP2 domain
MCGGAILAELIPARVHRPLTAATLWAAALSGTTTVGKWKADAAAATDDDDDEEFEAEFQLFDDDDECEAEFQLLDDHQPSPAASPEASGCKRKPALAPPAGTISQRPPHHSDLGAFNFPAASIVSNQASHARARFSGAPASTDPATPCSRKYRGVRYRRSGRWAAEIRDPRQGRRAWLGTYRTAEEAALAYDREARRIRGKSARLNFPLLIPHEGPGRHARTPVAIDLNLPPVSDGLGVPAPAGVGDDGTANADGDADMASTKTQSTLARVKELIAQGPHDERLAARIVPELMMHGSRDEAAALIAEFSRQMEEIAALRRDLETRERQLVQLVSLVLR

SEQ ID NO: 72669 - protein, 34 aa, Zea mays
  Coding DNA Sequence Number=SeqID_29294
MASNGIPVAIVMATTVAIVVAEITQLIIDTDDIY

SEQ ID NO: 72670 - protein, 170 aa, Zea mays
  Coding DNA Sequence Number=SeqID_29295
  Gene Ontology: Mol. function=ribonucleoside-diphosphate reductase activity; Cellular component=ribonucleoside-diphosphate reductase complex; Biological process=DNA replication
  Homolog annotation: Hit_ID=A2YYI6; Match level="QueryCoverage=86%, HitCoverage=25%, E-value=5e-52, Identity=59%"; Hit description =Putative uncharacterized protein
MTPNDVTFQNAARLDSEIIYDRDFDYDYFGFKTLERSCLLKLDGKLSSCFLICMKDDNIERIYETLKECAVISKSAGGIGVSVHNIRATESYIRGTNGTSNGIVLMLCVFNDTARYVDQGGGKRKVHFAVYLEPWHADIFEFLDLRKNPGKVLKESSDEEREQVEEMMKY

SEQ ID NO: 72671 - protein, 97 aa, Zea mays
  Coding DNA Sequence Number=SeqID_29296
MPPAPIGDGGVGSARDLSSGNGGDCLLHGEGEVQRGGHTTRGEDESAHVSIDVGRLPRVWHGRCGVLGCRLHGFMCACDLELEGGETGGRDEGSHGA

SEQ ID NO: 72672 - protein, 271 aa, Zea mays
  Coding DNA Sequence Number=SeqID_29297
  Gene Ontology: Mol. function=transcription factor activity; Cellular component=nucleus; Biological process=regulation of transcription, DNA-dependent
  Homolog annotation: Hit_ID=Q10QU2; Match level="QueryCoverage=99%, HitCoverage=96%, E-value=2e-31, Identity=34%"; Hit description=AP2 domain containing protein, expressed
  Pfam annotation: Domain name=AP2; Domain location=76-127; Score=74.2; E_value=4.2e-19; Accession=PF00847.11; Description=AP2 domain
MCGGAILAELIPSAPARRGVTPGHGSGGKGRTAANDDDDFEAAFRDFDEDSEEEPVGAITKKAFGFAGTRRRRPSSPYYGVRRRPWGKWAAEVRDPVRGVRVWLGTFATAEAAARAYDHAARDLRGATARLNFPSNSKRRSAVAKAAPRVDEDEDEDENGGGGALPDRSCQGMSAVGLCVELGGASKRARTEPQEEAQGREKKVAPALAPSDDSADTLLMDAFMFGDPFSFFDGGLCYEPAVTMDCQLLGGDAVFCDDSVGLWSFDDSVCF

SEQ ID NO: 72673 - protein, 133 aa, Zea mays
  Coding DNA Sequence Number=SeqID_29298
  Subcellular localization annotation: CTP_CleavageSite=56; ConfidenceScore=5.12e-01
MSYAARAVLVFWDGPVLVFVARTGVRTCQCALGRPALAGAVLVGKWTSFCSGHRPRPDLVPSRVESTSRVLLLPLPMPEPAGTDLLVGNRIVYPSESYLSRKVMSEKAMSERGFPLLAPEGGSGFAEARLTLP

SEQ ID NO: 72674 - protein, 38 aa, Zea mays
  Coding DNA Sequence Number=SeqID_29299
MTAQHGGDDEVRRLCGVVCDAGARRRRCEHGSETTPRV

SEQ ID NO: 72675 - protein, 179 aa, Zea mays
  Coding DNA Sequence Number=SeqID_29300
  Subcellular localization annotation: CTP_CleavageSite=68; ConfidenceScore=5.48e-01
MTSSHAGRGITKSIKTSKESNHSSEASGATPGGVRLTTAKSSLGCHRKLRLTRPQGSDSTSTSDDGLRLARPQGSDSTSTPDDGLRLARPQGSDSTSTSDDGLRLARPQGSDSTLTSDDGLRLARPQGSDLASTSDDGLRLARPQGLDSASTLEEPPPRPTLGSGRPRRRGIHHYPTPS

SEQ ID NO: 72676 - protein, 404 aa, Zea mays
  Coding DNA Sequence Number=SeqID_29301
  Homolog annotation: Hit_ID=Q6QP51; Match level="QueryCoverage=49%, HitCoverage=74%, E-value=7e-09, Identity=31%"; Hit description =Putative growth-regulating factor 1
MQAACNRAMEMHPFDFDASSMESQAHTSCGQKRRSNRLQAHVPFWSTRRALSHGTGKGDTPKGILLREGSGPRSLLLIRGSKADPSEGFDSRLRAFGLHAHYWSEVRRLAPWKGSTAASGHSGSAPTTDQGFVGWPPEGFDSRPTTCRVRDDSRYVRYITKARATLLRSKLGPFKEHDLASPEPSLGQEQYTKADSRLARGHPQEALPRPTPGLGLNLDPGRRSPPRPTPGLGLNLDLGQRSPPCPTPGLGLNLDHGQRSPPRPTPGLGLNLDLGRRSPPRPTPGLGLNLDLGRRSPPRPTPGLGLSLDLGGASASPDLGLGPTTSQGGYIITLPLASSVYGEHDRHPIWLAPVKQVMMTPCVLHDDGGPQPPTEARIRQQGPNSPDSYASTGFKRSSDGHDIT

SEQ ID NO: 72677 - protein, 159 aa, Zea mays
  Coding DNA Sequence Number=SeqID_29302
MEMHPFDFDASSMESQAHTSCNRRADYYVRETAAPLAPAPRLLDCGTGVAIRGNPARGPAVPAEHAGHGAGDTFGRRSGRRFTSAIMTASKKGTGKGDTPKGILLREGSGPQALLLIRGSKADPSEGFDSRLRAFGLRAHYWSKVRRLAPQKGSTAASG

SEQ ID NO: 72678 - protein, 248 aa, Zea mays
  Coding DNA Sequence Number=SeqID_29303
  Gene Ontology: Mol. function=kinase activity; Cellular component =ornithine carbamoyltransferase complex; Biological process=amino acid metabolic process
  Homolog annotation: Hit_ID=Q6QP54; Match level="QueryCoverage=33%, HitCoverage=27%, E-value=2e-10, Identity=54%"; Hit description =Putative kinase
MAAIVVVTRRRKEYHIVAAVEGHELETPEMEQRPRLERLLETTHLELDGKLFVNTQQAPTWRANCRRFDPGGSLDRRPKVGRGGGSSEVEAESEPWGWARRRPSSKVEVESEPWGRARRRPSSKVEVESEPWGRARRRPLSVVEVESEPWGRARRRPLSEVEVESEPWGRARRRPSSGVEVESKPWGRARQSFLWRPRLDMAAVSLTLAGGTTVGVVQAALFSYQVSQWRGDVTAVTSALSTEERASG

SEQ ID NO: 72679 - protein, 498 aa, Zea mays
  Coding DNA Sequence Number=SeqID_29304
MKGKSNNLEAGVLDDCKRQASYCRSGRRRGKPVNAVCRSGRQVAVAASGVPCAEAPEAEGEAGRSGRAVALRSQVGPSGGALSRSGRRGAVGMEHCSLGAWRLGQLSPENTSLAHGLGSPTSGLVPPVDDPARLRPPLLRLLGPGHRSSLFEPTPPLSMLTPLPPAPAHRKAAEGFFNWAREALSASRHARPGARNREETRLYAQIHRYSGPNSRNEHTPALKMPLQTELRFHSRGYEQPPYQEAHGTTNSKRLTNNRSSSSDNDLRPGRQDSCSSGFRANAAAEKPSPTKDEDQPFKPGRQRSKGAGGVGDLVGGETFSGCCHHNTDGGVHLSANTAPASVGRPQSASAGPHSRPRRGRPRTRTLPSRRTTCWGTLRHGCRREEDLDVVGPYAARPPPGRRTERCALSREQRFAFPRMAEGSLRRTGGCLSPPNAGGRKGLPAHAEATPHSVRSSASARMTKILEAEGGEDAAAQLASPHQTAHWWGNAAGLHDENP

SEQ ID NO: 72680 - protein, 122 aa, Zea mays
  Coding DNA Sequence Number=SeqID_29305
  Gene Ontology: Mol. function=dolichyl-diphosphooligosaccharide -protein glycotransferase activity; Cellular component=endoplasmic reticulum membrane; Biological process=protein amino acid N-linked glycosylation via asparagine
  Homolog annotation: Hit_ID=A7P950; Match level="QueryCoverage=37%, HitCoverage=10%, E-value=6e-15, Identity=78%"; Hit description =Chromosome chr3 scaffold_8, whole genome shotgun sequence
MATRRHIHLLAIAFVSLLALEAVEGLEEEPGGRRLLVLLDDLAVRSSHSAFFDSLQARGFDLEFRLADDPKLSLHRYGQYLYDGLVLFAPSTPPASRGAWARGGQRVVRGVRDSLARACGSG

SEQ ID NO: 72681 - protein, 160 aa, Zea mays
  Coding DNA Sequence Number=SeqID_29306
MGADVCALFGAGRGIEIGGESRTCVRVFVAFAVGVGLARALCAGGLSAGISRAFAAGCSTGVGRLPFRALAGGVGAKSAAVVGIHNKIVARACGSGDFAEVSEARGRAADVAIAGVRRTGFSLARAAFAGLGEAAASGGAWARGGRRVVRDALARACGSG

SEQ ID NO: 72682 - protein, 36 aa, Zea mays
  Coding DNA Sequence Number=SeqID_29307
MASVIASKSTVSSCPKFQFQLQHQGIKTGEFSRDAS

SEQ ID NO: 72683 - protein, 20 aa, Zea mays
  Coding DNA Sequence Number=SeqID_29308
MNVVDISCMSSFAESQVCED

SEQ ID NO: 72684 - protein, 385 aa, Zea mays
  Coding DNA Sequence Number=SeqID_29309
MLDVSKSKGCTPLGAVACRLHGGPPSHPLVWAKVEECFPRRLRMQVGRVAFKRRVTPLDGNHVFALHVSRPSTFRAPDRERSRRFRLAVVGGMQLRGSWYLSAIARLQGFSSGSSAASPRRWSPKTVTTSSMVGRSEPGCSLCPTLGFKDLHHPCWGGGRAELELYLPHGFVGHPLLQHSGERVLTGLAEGANSDNAGLVGRERRQLQRVGLAGSAGSSSAPGAPSHRTSGRRAARTGGPPNTSRAARAALVFLGCPAFAPVRCLLRGGRRSPVQEDPSGDLPVGRWLPSSTLRWWRLKKSSLPTRSPPPSALRASGSLALIACPRPSSGDMGEELVAAASALRSSLLLFGHSERRSLSLLSERASRRRRNPSAQSALPPEASLA

SEQ ID NO: 72685 - protein, 176 aa, Zea mays
  Coding DNA Sequence Number=SeqID_29310
  Homolog annotation: Hit_ID=Q6QP51; Match level="QueryCoverage=84%, HitCoverage=37%, E-value=3e-15, Identity=39%"; Hit description =Putative growth-regulating factor 1
MTASKKGTGKGDTPKGILLREGSGPRAPLLIRGSKAGPSEGFNNRLRALGLRAHYWLAPKGFDSRLRARRVRDDPGYVRYITKARAMLPRPRLRSKDTIPPRPSPTSGKDSRPRKIHASPEDPLKQRMHRRLTRGTARGRSDRSHFAAPLTDLTGIQRRLPCSDCRATRQSEVDSG

SEQ ID NO: 72686 - protein, 612 aa, Zea mays
  Coding DNA Sequence Number=SeqID_29311
  Gene Ontology: Mol. function=GTP binding; Cellular component =intracellular; Biological process=electron transport
  Homolog annotation: Hit_ID=A3BC23; Match level="QueryCoverage=95%, HitCoverage=51%, E-value=0.0, Identity=63%"; Hit description =Putative uncharacterized protein
  Pfam annotation: Domain name=MMR_HSR1; Domain location=400-491; Score= 20.2; E_value=1.5e-05; Accession=PF01926.14; Description=GTPase of unknown function
  Subcellular localization annotation: CTP_CleavageSite=47; ConfidenceScore=5.69e-01
MAAKPFLSIPAAAVARLPFRLLCSAAPPPRLLPFFPQPFLLQRRSLSASTVPAGRRSSPPAPVISEGRDDEDAAVGRPVCPGCGVFMQDEDPNLPGFFKNPSRSSQDETGGSGEVLLAADTDAFLEEEDDNDDRRVADDASDAELEGLDSDIDEFLEEFDKGDEDDGLPVKSATDTDAFASDWDSDWEEMEEDEDEKWRKELDGFTLPGVGYGNITEETIERMKKEKLSKSQRKRQAREAKRAEAEEDSALVCSRCHSLRNYGLVKNDKAENLIPDFDFDRFISSRLMKRSAGTPVIVMVVDCADFDGSFPKRAAKSLFEALEGRRNSKASETPRLVLVGTKVDLLPWQQMGVRLDKWVRGRAKALGAPKLDGVFLISVHRDLAVRNLITYIKESAGPRSNVWVIGAQNAGKSTLINAFAKKQGVKITRLTEAAVPGTTLGILRVTGVLPAKAKMYDTPGLLHPYIMAMRLNNEERKMVEIRKEMRPRSFRVKPPIGPERVDELGHWTGRSIEVSGASWDVNSMDIAVSGLGWYSLGLKGTATVSLWTFEGIGVTERDAMILHRAQFLERPGFWLPIAIANAIGEETRKKNEKRKAEQRRREEEELLLEEMV

SEQ ID NO: 72687 - protein, 438 aa, Zea mays
  Coding DNA Sequence Number=SeqID_29312
  Homolog annotation: Hit_ID=Q6JAD6; Match level="QueryCoverage=61%, HitCoverage=42%, E-value=1e-120, Identity=74%"; Hit description =Putative uncharacterized protein
MDKFKPIKTPMPTNGHLDLDEGDISSGCRVRRMCRRQWEAMMRILVAPSGRSRARQFTWSSRKGRKKRRTDRAACAAAAAAAQAELGDQPQTPSDQIAYRVRRLASRPRSSTHTSTSTPPPTLPAPVTPVVPSTTTAIPATSTAPPPPAPASAPPIPPPRFRERDETEVQPFAADPRLFDLQRATAARVRRFRYVPVESWLPAQRDPAAVDLFSTRIQESFFRAQMSAQIALRVHRLWIFQPFCLQSVLTLRRTSHICLAFRTFDYQRQIRQLFGFPESTTRLHSLCYGTSDPPRRPHGGVAPGTAHVVALFRPPFTDGSRRSPADFTTAAKYLYELIRRTLLPRMGYREATTHIQLWLLGALVSHSEFDVVDFLICEIEDTVLDGIRARRQLPYAHYLCHIFAQLIQPPRFQGTLVSSCLVFGSYRPAPNEYKLNHQ

SEQ ID NO: 72688 - protein, 146 aa, Zea mays
  Coding DNA Sequence Number=SeqID_29313
MACTAPHSFRAPAPVLSAVAPAPTVRECRAKGGGGDGGAPGPRGLPVLGSGDRLEAGRTYLIVPVDRLPCGEMGGVITATSRAVGTTAGRCQEGLPQDGRGVPQEGREQGHVLRRSPSPKGWTDRLQRWRLSCGAQPSREGRGAHL

SEQ ID NO: 72689 - protein, 926 aa, Zea mays
  Coding DNA Sequence Number=SeqID_29314
  Gene Ontology: Mol. function=protein kinase activity; Biological process=protein amino acid phosphorylation
  Homolog annotation: Hit_ID=A2X544; Match level="QueryCoverage=69%, HitCoverage=94%, E-value=0.0, Identity=78%"; Hit description =Putative uncharacterized protein
FAKERRRDTTSWAYQILNSMLLILLGGPMVRGEHLCLPCSAEHRMTVSSVGDDQSTLSEKGYDAAREAVDGYDEVSTPGLEPVSAAQHRQTTWTRCSTITSPAFSPAFAHGGGGGYGCGMGNTLGRQGCDENRGRVTGSFVDADGRWAWMPRAVGQGWSHRRGRGQGHGRNGARCMPWPLSMEWDAYTMVADLAFHGRGRPTMEGRRVSRLLRVWKVIHIAPACTHVRGRATARVGVRRGRGSRPGGGGADQSPDRTSVGSASAPKKHSASSRGRRRNFSSSTCKDFLRKFVDSELLTSSLEDWFSGHSEDCGFRKPGFDVPFELTELHNFDYALEGVTFHQLALKDCGKTFWGPDEAMPFSVACVHSTSSRFYPAEKAISSGRLDGVCATAVLLKNLKPSQGRWDHIVVLALLRPDVGMVSAQGDEEPSPAVLGEALFFALRVLLSRSLSKSSTVLRNSDSVYVLLFDSQFGGVVKVQGDLNRLDFDLNNVYDCAAEWIKKHSRISVCSVDRVWNKLGNANWGDIGTLQVLIAIFHSMIQFYGEPKYSLDELATEHSSRLQSRRSERHLVDRQANGNGLFRFQQRSHSPEIVELQEEAAVDVKPHETLRLEIGSVVLMDDAYTQKGFQISDILTGSDPPIYTSAPVEEPTKTCLLYVGSSPSHLDPAWEDMDSWYQVQRQTKVLTVMKQRCISSRYIPHMESSGRVIHPGPCNNPNSNASCGHPWCSTPMLVTSPVGETISNLIRNGLFGAEEALRCCHDCLSALAAAASAGVRHGDIQPENVICVNNGSTHPYFVLIGWGHAILEDRDRPVMNLFFSSTFALQEGKLCGASDAESLIYLLYFSCGGVCPDLDSVESALQWRETSWSRRVIQQKLGDISAVLKAFADYVDSLCGTSYPMDYEIWLKRLRRTINEDHGKEVDTSSS

SEQ ID NO: 72690 - protein, 251 aa, Zea mays
  Coding DNA Sequence Number=SeqID_29315
MWRLGDVRYPGESSGSRGGEKSERAVLPSLATSIHRGEGASRRCSSAEPGKLGSKRPCSSGSGGGPLSVVGGKEVAPRGDKARRVRCNRRCSSPSNRHREEAEKIRGADEGRSRVYGYANTHSMLVGFIQQLTMDSENAKLRRALAHLIRVVEERCADIIDVVHGAFQPVSGPVLNEMNCALVQIEDLANDLDQLALETDWEMEHMAPSPFAESSQTEDELLIDYDSELNNDDFVGYDDGRDYSTDDTYPY

SEQ ID NO: 72691 - protein, 135 aa, Zea mays
  Coding DNA Sequence Number=SeqID_29316
MDNDPAQALVWCPRAFKTSNHQAVAAITFGQRQLAEDIVLPPAGTLCVVSDAEAQAIKAWLCPKAKTSQNTAAPQSPPRLHSDDFPPLVQATLPRPGDPGTCPSETFDVAASTGDMEAELERLSTHTVVAWLGRD

SEQ ID NO: 72692 - protein, 115 aa, Zea mays
  Coding DNA Sequence Number=SeqID_29317
MSQDKKVVAETKLTEEEKLFEEKKAANPYIVGFIESMAKSNTEKITKEILEGLSEDTSVGVLGPTAHPGLPLKVRAALICVTPYVLASMLCVMGYKWTRGISVPHKPPIFRLILR

SEQ ID NO: 72693 - protein, 182 aa, Zea mays
  Coding DNA Sequence Number=SeqID_29318
  Homolog annotation: Hit_ID=Q6J9V9; Match level="QueryCoverage=34%, HitCoverage=32%, E-value=6e-07, Identity=43%"; Hit description =Putative uncharacterized protein
MEARAHTSCNRRAGCYVRATAPPLAPLPRLLDCGTSTATRGNSAYDPTVPARHIDHGPVSRGRRRDGRCGQKWADSNGCGRRAEAAGPGKGDTPKGILLREGNGPRAPLLIRGSKAGPSEGFNSRLRALGLRAHYWSEVRGPAPRKGSTAASGHSGSAPTTDQGFVGWPTKGSQPPQTQSEG

SEQ ID NO: 72694 - protein, 119 aa, Zea mays
  Coding DNA Sequence Number=SeqID_29319
MWQDAKRSFAQMNINGNLQNGTGIQMGQIKMIEIKEAPEKGRNGKTETAEKKRNINYGFMGILCRDSDPMANPPRTKLPRWKDPDGYEVEKVRIGDNRHMVTCERKLAVGIDGGNHHSG

SEQ ID NO: 72695 - protein, 148 aa, Zea mays
  Coding DNA Sequence Number=SeqID_29320
MGKNNKRKRELTPLSEDFGDSEYSEEEFSSESEGSPAPVSPPTSSDDSDDSQGIAAEVWTYIRAIERSGLEGSDELEYSSDEEDLPEEDGEGDNDDDDGGDGSDDGDGGSRGGNGGSGSGNGSGRGGDGSRRGSGGGGSSKGSNKASG

SEQ ID NO: 72696 - protein, 42 aa, Zea mays
  Coding DNA Sequence Number=SeqID_29321
MPKLPCAQLRLCSILRFLCASSYCDFDSSLKGPSPKVIGLVC

SEQ ID NO: 72697 - protein, 105 aa, Zea mays
  Coding DNA Sequence Number=SeqID_29322
MQFRVTSLHVENHDANNMTHNALFSFLLLSMFGSVGHLSTTHEICTTVEEFSVGHDLVKTSIFETYPRKLKGLGGEGSTIIESPNYETLIVDELFNKLKSTESDH

SEQ ID NO: 72698 - protein, 109 aa, Zea mays
  Coding DNA Sequence Number=SeqID_29323
MTLEISDDIVGVRRRKDVSDDKFITFYWLKVIMGAIQYRKSPKTTISDSSPTKEWSPTATMTCSDNDGARSGTRSSGIVGKLVIADDPRRRRCLAIIPPGRLLGSVECA

SEQ ID NO: 72699 - protein, 119 aa, Zea mays
  Coding DNA Sequence Number=SeqID_29324
MAGGIELAGAKERGLAGEGFELRIKVNIPDLWLKATLEAHGHDLSSTTTMRTESHVSLPSWGRSASAAENGERVSAAESHVLSRRVLPKGWRPTTPPPNETRYQRRSGRPQCEDQEGDC

SEQ ID NO: 72700 - protein, 135 aa, Zea mays
  Coding DNA Sequence Number=SeqID_29325
MKPTLCSPRQDAPSPSSSRSRSSLDLYLLSGCSFELTYHMSTLVMEIERPLIVDMAACAMDELIRLAQADKQIWVKGMPGDARDFSAETPTDLFVSYKRFPKVPNDSSTSAKFPRIPSLMLPLPIDWFLFDFSVL

SEQ ID NO: 72701 - protein, 232 aa, Zea mays
  Coding DNA Sequence Number=SeqID_29326
MNALSREACRHYEVFDQADEDFERDIYKVEDPMVKESAGALYDRIWGPHGREVVRERAENGEGSSNAARGERVDDFGALNSVLPDPEPNPAVAVSEAALFKIFGPAHATATTNFLAASIVDDGNKSNGSASKFSNFGDSGSSVEWTEESSDEDLDYFAALDVAAAEASPHAADAEVVPSPSTGRRQRRAVAKRRVSGADGGRLRVSRAGRQELLSLPAAVSAGEGELRSLFA

SEQ ID NO: 72702 - protein, 544 aa, Zea mays
  Coding DNA Sequence Number=SeqID_29327
MSTSSSSAAATPSADASSEETLSTVAAEELRAGDTVDFAYPPFEVAEEDADEGALRCAAGLSSGRDLVEEFVAYGVWPLAHGWALGEVCPCQMHSHGGKLVRSPAFALDLHSRDPAAFVREAEDGAVRIVDRYVPKTEGQRSWDIRGTNDRLDRVFELNRLPYGGYPGQDDVDRRGKKPVVETGDDPAPAAAPSSKKRKLGIAMGGLGVSDAFARELMRTCAAPGGRMSSPELRESSARMLRVTGGWWPRNVPIPRAAGEDFFTSRMVRDWKVFPYGRNIAAVVSAVMDKDRQGAAQKRQAVVRLHEARSKRPRGAAKAAAPGGSQPPLAAKSAAPASSRAPEAAKAAAAGGSKSAKAAPVSSRVPEAAKAARELPPPGKRVADFATDISVDDYLVGRRAVFLVPAARYRHSLPSGSRRVLRLTSQTARRPGALTAVVSAEAERLRTQHADAVREKSAADSKCRKLADKVAALEGEKTDLRCQLAEERKEANEALAKAQSAQAEANLARAEGSLARQRRRAVGGAAQRSAGPCGEGRGLDALGG

SEQ ID NO: 72703 - protein, 92 aa, Zea mays
  Coding DNA Sequence Number=SeqID_29328
MVQYPESDQTASAAASSPTTAPRRDSRHHRGIRVADDPIRPPENEEEIEVTEEKTPPPSESQAGSCFYFDICGSEPDSPTNEGKPRCICHLP

SEQ ID NO: 72704 - protein, 136 aa, Zea mays
  Coding DNA Sequence Number=SeqID_29329
MATCSANAATHNHHRRGLDGCIWGIVSVHWWSAWGLRALVAIREPVIARRHNNFTAGPHYLVDGPLHRSTIATSDNVTSAVLPLFRGRASPHLGWSQVVRFNWQYVLGMAGFELRRSAAVSGAGTAGVPCVWARKN

SEQ ID NO: 72705 - protein, 264 aa, Zea mays
  Coding DNA Sequence Number=SeqID_29330
  Gene Ontology: Mol. function=protein-tyrosine kinase activity; Cellular component=cell surface; Biological process=recognition or rejection of self pollen
  Homolog annotation: Hit_ID=A2YIX0; Match level="QueryCoverage=53%, HitCoverage=25%, E-value=3e-35, Identity=55%"; Hit description =Putative uncharacterized protein
  Pfam annotation: Domain name=B_lectin; Domain location=56-170; Score=- 1.8; E_value=0.0035; Accession=PF01453.15; Description=D-mannose binding lectin
MSLAIQPNRSHSRAWPPRSSAHDRPTAHDLQRGHFAGLNGAVAVAQDVDELSDGDVRLLVENRLSIEAWVGHLVERLEPRSERRRRWCRGNPSSNTWCTSYWWCTSNASALPLSTGNLVLVSDPAAVASPLWQSFDYPTDVGLPGAKVGWDKATGFSRQFVSKKSLVDPGRGVYSIAIDADGVLVVRSRRHPFVVYWTWSFGKLEELVSALTALLEMDPRTRGKPTFVDNDQEVSFTYTLLDESASENFIDDTTYNKPDFSCYQ

SEQ ID NO: 72706 - protein, 218 aa, Zea mays
  Coding DNA Sequence Number=SeqID_29331
  Subcellular localization annotation: CTP_CleavageSite=85; ConfidenceScore=5.03e-01
MSSDPEDHITAVHNRCTRTPVRGSRRHGQRPPLGGCRGRGWKNVGTQRWARGAHRRSARQMHGTPARGCRRPRQRPPLGGCRRTRAGAGRTQGQRAGLEEHIATVPDGYTGTPAWVVVDLGSARRSEDAGGRGWGPEERKDAEPDGCRKDTRRGVAGDCMHARSAASGGNREEGSSSSIEIAGVRRRMQEWGTIGNIGGPTCKEVNIDGNGVEGQLPC

SEQ ID NO: 72707 - protein, 132 aa, Zea mays
  Coding DNA Sequence Number=SeqID_29332
MRTCSTGQSRVRSSKKGAYLSLYDTASAVPIDGGGGGCRAWLERACGATCYASTCFFHDELVGVTRVKADRRRRDANQDQVGDSRSASRVGGGGARPDRGPPAVVGGSMSWNGKMEHGGDRRLRADGREIGK

SEQ ID NO: 72708 - protein, 176 aa, Zea mays
  Coding DNA Sequence Number=SeqID_29333
  Pfam annotation: Domain name=PAN_2; Domain location=56-96; Score= -16.2; E_value=0.066; Accession=PF08276.2; Description=PAN-like domain
MAQQPDCAPVLQLRERSSRVCVDWPARELGYARANLVSQPGSTETRSESVSWEPGCSWRKYSVFRLKTQSSCEEACLRGCACSAYTYSNGVCMLGVAWRVAEGSFQKMDPNLGAIIIGAEGTHIDASTLGANFFYVGTRFGESPRGGRCSEIMAPNQNQKRPRSGFTRLLTDRNHT

SEQ ID NO: 72709 - protein, 145 aa, Zea mays
  Coding DNA Sequence Number=SeqID_29334
  Subcellular localization annotation: CTP_CleavageSite=50; ConfidenceScore=5.25e-01
MPKSLTVTAYSFGLDSLEFGRRARLALCAFPPLSAVSSTLMVVVLTTTCLAATAKSDTLAPGEFLGMCEKLISSNAKFALGFFRFQHQAIVPAAGNTSASTTTSPSEYLGICVNIIDASREIAGRESREEAWGKKTRTGEHRGRR

SEQ ID NO: 72710 - protein, 60 aa, Zea mays
  Coding DNA Sequence Number=SeqID_29335
MAQGGPAAEIHQWREIHSAPWLGTGIHFSKHFCKTESLIIEKPYLDSLNQHTLESLFFSR

SEQ ID NO: 72711 - protein, 200 aa, Zea mays
  Coding DNA Sequence Number=SeqID_29336
  Gene Ontology: Mol. function=cellulose synthase (UDP-forming) activity; Cellular component=membrane; Biological process=cellulose biosynthetic process
  Homolog annotation: Hit_ID=A2Y0X2; Match level="QueryCoverage=32%, HitCoverage=6%, E-value=4e-29, Identity=89%"; Hit description =Probable cellulose synthase A catalytic subunit 1 [UDP-forming]
  Pfam annotation: Domain name=zf-C3HC4; Domain location=35-79; Score =1.7; E_value=0.059; Accession=PF00097.16; Description=Zinc finger, C3HC4 type (RING finger)
MPGFAPCSPRFDRDFDFPTDAGAAKPTKSANGQVCQICYDSIGVSATGDVFVACNECAFPVCRPCYEYEREGNQCCPQCKTRYKRQKCWFPSNFFELINEFFLLPLHLQLRRGLQGQGWCQGPMRRGRHQQLYLLAPHLWEIFSPIIHFTLTKEGTPSTSTGTKGRLFYTIYASENIIASCHWAYNGVEEDSTLEDHYFL

SEQ ID NO: 72712 - protein, 107 aa, Zea mays
  Coding DNA Sequence Number=SeqID_29337
MTIGKRERGLTDEEGGNRASHGVGRTGGRDSSTARNSQCPMACNRVSGWNRGGWEPFLCTEVKKSARAGEVRGVCCGGKESECGYSEVDGRADQWAPPVSAVSITGE

SEQ ID NO: 72713 - protein, 84 aa, Zea mays
  Coding DNA Sequence Number=SeqID_29338
MNVSRSSGCGQFRAGVGPTRQIRLVPRVVLLCASSVICGWALGIWCRRGRISDDDTGSKGLGCVQPLSLPRIRTRPEPCDNGKK

SEQ ID NO: 72714 - protein, 192 aa, Zea mays
  Coding DNA Sequence Number=SeqID_29339
MALHELYDDGGPQLSYGSRTTLRRTTDSHDITPAGCPDLSGYHIGMAFSEKVGRAGPRTGQALSWGRSLPSPAWTLVTPLLQAHLTWARDEHEGRGTSTSLTLGSDRLASPPSALAHALDPSGLGHAAHSLVGLGTPLSRNADNPAKLLTRLLVSRTKYYVVDINLAHKEITITSLGKKSGISFPNLESISN

SEQ ID NO: 72715 - protein, 136 aa, Zea mays
  Coding DNA Sequence Number=SeqID_29340
  Subcellular localization annotation: CTP_CleavageSite=26; ConfidenceScore=5.38e-01
MGGSLPPAPTRSKALPCDSGAGSRMSCKPAQGRRSQTAAHGTGEGGYPERDPSPRRNRAPRPPLLIRGSKAGPPRVQQPPQIAWARHPLLVRGSKASPPKGSMAASGYSGSAPITDQGFEGWPPKGSQSPQTPSEG

SEQ ID NO: 72716 - protein, 170 aa, Zea mays
  Coding DNA Sequence Number=SeqID_29341
MGTLPDGFFTECLRWHSAKMDPLPSVVGQTLGKDYYFAECPQGHSAKSPSPSLGAVTVAFLCRVPEKKHSAKKALPMHCVPSLLCRVRHSAKDLPSVFVALLSASGTRQSLRIRGAWMPKGAKEGELNGVEKEEAKGVEECLRKECSRHRGTIDGGMHPWGGYHKGHLGL

SEQ ID NO: 72717 - protein, 179 aa, Zea mays
  Coding DNA Sequence Number=SeqID_29342
MEYKVVGYLGTRYPKKAPRPPEGDPLTGWPTRQTARWEGPKSHLGTVRQADRPTGQMSVEQPSAAGLPSNLPAEQPSKAGLPCNLSAEQPSEVGLSTHWGRGCPPTQRDVATDQPARRATQQDDSRLSGRADLVLSRHVDMMGHHRATPGLWKRYLGDFIKHDARYVSLLTDGAERPLL

SEQ ID NO: 72718 - protein, 170 aa, Zea mays
  Coding DNA Sequence Number=SeqID_29343
  Homolog annotation: Hit_ID=A2XLZ3; Match level="QueryCoverage=75%, HitCoverage=10%, E-value=6e-19, Identity=39%"; Hit description =Putative uncharacterized protein
MPTTLLQGSPNARNGRKSGKVFEESSCLLGGKQCFRDEDPGRGHALTGKKRKDRRGSMDDNRNVSRRVLRSDAMKLRAEAEAACGAGVDVSKTDSLERKHCEANVEAEDCKSSVLMEVACNGGEANRLVNLDASDVSEESTRCSDNNMGMPGVPAIDFSQHNGLAQGSIA

SEQ ID NO: 72719 - protein, 307 aa, Zea mays
  Coding DNA Sequence Number=SeqID_29344
  Subcellular localization annotation: CTP_CleavageSite=45; ConfidenceScore=5.48e-01
MGRSKADHSPTRDRRYGNPGPNGRPAARTARRSGGNSYLILASARASSSSRGPKVAQHRGRKRGEGVQPVPRGISRARFLWAGGEIGVVDVAGVGAAAEIAGEAGSGNRTRRQNMSHSAKIHRTIRCGTRLSDEPTEQQSTSPTVDYADEGTVDRAEVRSQNAPHAARVGYPRYFGSQTSSDRLRLILSNPPKSKLRRSSHPDGYPAQRVGSSALLVGPIPAGSARPASGWARLSAPSLPSMRHGCSRAAAAAAAMPSRHLARQALLRRPPLHQRSLFPASPAEAPTRTLAACELRPDRRCYFSSSM

SEQ ID NO: 72720 - protein, 119 aa, Zea mays
  Coding DNA Sequence Number=SeqID_29345
SETTDQAKDGGKKSFEVPSAWEKVKEAEEPKAKGEEEGLQSQGQGSSVWHTGLSGGAPDSVRCARLNSGELAALGNSPATYDYNSPDCPVCTGLSGEPTVGRANGRPRDLRGTRGRTNG

SEQ ID NO: 72721 - protein, 93 aa, Zea mays
  Coding DNA Sequence Number=SeqID_29346
MAQKEEDEDQDNEPPHEEDIDQREMKMIKIRKVIKKFRIKDHHTQESTKQFKEITPSTPFLVTSTRGIEDALRDLDWVVAMQEELNNFTRNEL

SEQ ID NO: 72722 - protein, 125 aa, Zea mays
  Coding DNA Sequence Number=SeqID_29347
MCSPGLCPTLIEDTWTQAWTANHHRVHTEQITLGANSNKYEQGNFRERKGGETNQVEINTNEHGNLFTERQPIKPRMEARRASRYRVHGRRSRRPGTQNPGVKKKTCKVKDNRVKKSYGASRITT

SEQ ID NO: 72723 - protein, 147 aa, Zea mays
  Coding DNA Sequence Number=SeqID_29348
  Homolog annotation: Hit_ID=Q6J9V9; Match level="QueryCoverage=79%, HitCoverage=40%, E-value=8e-29, Identity=59%"; Hit description =Putative uncharacterized protein
MTISEGLQSGCMIKILEAERWLNDANPREVALLQQQQEEGNAGAPHLEARKKGSTAAPEHSGSAPITDQGFDSRPRARRVRDDPGYVRYMAEARATLPRYPRTFSRPAGTICNGIPPKGGTEPSDPVEGVRVQRITRRYFWSAPLGH

SEQ ID NO: 72724 - protein, 197 aa, Zea mays
  Coding DNA Sequence Number=SeqID_29349
MKFMYSAECISERLYPLTSESPDRKSQPYFEEALKNYNFIIFQFWDSLFPAKMAGLRWHNNVIINLSFSSITLFNICLLDFSSGCFFVTSGKVNRQSPAPAEKSLAPAERWTTRRLGSELLDRSYALRDDNSIKGLTSMLSVEQVLNAKLTEFNTKTTDQDKDGGKKSFEVPSAREKVKETRNPKARGEEEDLQSQG

SEQ ID NO: 72725 - protein, 381 aa, Zea mays
  Coding DNA Sequence Number=SeqID_29350
MTTSLLVGRSKSGCGLCPALSFKDVHHPGWGGGRTELGPATAWAGDPLLPPAFEGEGHPQALRRRRPPAMRGKVNCCYLARVPLYVLLPGDGRAVRRWLLSPDLQRGRTSTTRARSAASVVSCSVPGMLAQLALAPPPMLPPAAWSGHGCPSTARATVATCVGRACLRPFPRRRLHRGIVQDVVRREGGVRVLGLSCPHSGTTPPRGGWRRPVCEDLSGDLPVQARAAAIRRHGAGAQVAVVVGAEVVAARGGCLRRRDRRRHLRSDLRLFGFDGLSSPLPPETEVVVALLVQWLPGSHLEFVIPQALWCGGCSYPQEWNRSPDLRPLCDELKPEAVVSARTEAAEEVQQRRLELGQVVHERDQSRSHAAEVVSQAEVLGG

SEQ ID NO: 72726 - protein, 318 aa, Zea mays
  Coding DNA Sequence Number=SeqID_29351
MGSARSSSVLSSLEERNFVEVGTFQPSVGFKDFHQDVHHPGWGGGRAEPELYLPHGALGSLAQLALARLPVPPPTTRAVVAPRALEDRPRRRALLGRRSCSWSVLPLLRYDASAWRSVLARPGGSEWGSTGGQMASVVGAEVVAAEEVLVADGITATIRALGLRLFGFDSLSSPLEWGRGRGARCSSVRPEAIVATVWPPGADVIVAAAGAGVGEPTGVLSPRRPSNVGGCSYLRGRNWSSVCNGTLSASVCSLWLSGPEHESLGSVGLAARGFSCLVKETLGRSTMSRSRRQRCQHGQRQRWLEKKLRRPEPGRAVH

SEQ ID NO: 72727 - protein, 218 aa, Zea mays
  Coding DNA Sequence Number=SeqID_29352
MAERYQLPRSCVPPMTTRRKNCGRSPSGGSEGGRGRRHLWQAKQATLHLRHNDRVKKGTGKGDTPKGILLREGSGPRAPLLIRGSKAGPSEGFDSRLRALGPRALLLIRGSKASPSEGFDSRLRALGLRAHHWTEVRRLAPRMGSTAASSHSGSAPATDQGFVGWPLKGSTAASEHVERGMTLASTYQPENLEPDYAPWLRPVRIREQPYRPKHHETR

SEQ ID NO: 72728 - protein, 524 aa, Zea mays
  Coding DNA Sequence Number=SeqID_29353
  Gene Ontology: Cellular component=mitochondrion
  Homolog annotation: Hit_ID=Q10AX3; Match level="QueryCoverage=93%, HitCoverage=86%, E-value=0.0, Identity=65%"; Hit description =Streptomyces cyclase/dehydrase family protein, expressed
  Pfam annotation: Domain name=Polyketide_cyc; Domain location=177-308; Score=51.5; E_value=3e-12; Accession=PF03364.11; Description =Streptomyces cyclasedehydrase
MPQTNALQLASEKRDCLICPILLLSASRSSSAVLLYEVNVIPRFNFPAIFLERIIRSDLPVNLRALACRAEKIYLENQGCGSRKFFVEDLKPSYTSQLNNFHSTTVETSKFKQAPPRSGVSSVLPSPSSELISKWGVYGNICRIDKPCVVDEIHLRRFDGMLEHEGAHRCVFASITVKAPVREVWNVLTAYENLPEFVPNLAISRIVLRDNNKVRIMQEGCKGLLYMVLHARVVMDLREKHEQEISFEQVEGDFYTFKGKWRLEQLGDQHTLLKYMVETKMHRDTFLSESILEELNALIKFNVFRDSKADCSFFMNLLQVIYEDLPSNFTMKQRPKVPGLQKDIEVLKSELDNFIAEYGQYGFMPKRKHLRSHGRVDIEKAITRMGGFRKIASIMNLSLSYKNRKPRGYWDNLENLQEEISRFQKIWGLDPSYMPSRKSFERAGRYDIARALEKWGGVQEVSRLLSLELRYPRRQADPDDERQSESPSGMMKKHGVKPDEGNVSPNAQKWLLKLKDLDVNWVEY

SEQ ID NO: 72729 - protein, 92 aa, Zea mays
  Coding DNA Sequence Number=SeqID_29354
  Subcellular localization annotation: CTP_CleavageSite=57; ConfidenceScore=5.57e-01
MAMGDGRWQTQRQLASRSNLSSPLSHVAWRLLLSSAIGKLPTSSGSGGRGRTFQFSSSDENSSGQETIMLSVPDQVDLEQQLGSHVDTPDVN

SEQ ID NO: 72730 - protein, 252 aa, Zea mays
  Coding DNA Sequence Number=SeqID_29355
PSPSPGVRAEREFAVFPGFSPKSEPWDRAERDFAVFPGFSPESEPWGRAERSSPWRLWQGLIACQTHSVEWHCSRSGAGGAVLLSDWPVERWSDGVKVASERSQGLGQAGDVSAIKRGASGETELYADGGYQLRIRRLEAPEPLHRARGRSGTDSAFYIRPYVAFPQGGGGSAPCYPRWAPNMVSPVSCKRVIRVDVRAPFVGGRLGAQRHAQKYLRVTCRTRSPGDGVRGLDASLRWDSVTRSFPLVSDMS

SEQ ID NO: 72731 - protein, 173 aa, Zea mays
  Coding DNA Sequence Number=SeqID_29356
  Gene Ontology: Cellular component=mitochondrion
  Homolog annotation: Hit_ID=Q10AX3; Match level="QueryCoverage=94%, HitCoverage=22%, E-value=5e-49, Identity=60%"; Hit description =Streptomyces cyclase/dehydrase family protein, expressed
  Subcellular localization annotation: CTP_CleavageSite=43; ConfidenceScore=5.29e-01
MKALASPAASFLPGIPSPSHLARALPRSAAAALSRPPSGRSIAAAAAAATGDHWGADHQHYHGGRAGASEAGPTASARGVKCDVDVVSWRERRVLASVPVAADVDTLWQVITDYERLADFIPNLVQSVTIPCPHEGRIWLEQRGLQRALYWHIEARVVLDLQEIPDSVCAVAD

SEQ ID NO: 72732 - protein, 188 aa, Zea mays
  Coding DNA Sequence Number=SeqID_29357
MAALSSLTEVGGRQQGLNRSDSCPSIRLRRSSDGHDITPAGCQDLSGCHIGMKDQSPLRGGWPREDEDETGALLGPLAPSPAWTLVTPYCKRTRPGRGTNTKAAGFPPLSRPSPATSLPPFALDPSGLGHATLSLVGLGTPGLETPTPARAEVRHAHTGAPDTLQYMSVGYVALGRNRRFVPMHIFLM

SEQ ID NO: 72733 - protein, 154 aa, Zea mays
  Coding DNA Sequence Number=SeqID_29358
  Gene Ontology: Mol. function=transferase activity, transferring glycosyl groups; Cellular component=cytosol; Biological process =pyridine nucleotide biosynthetic process
  Homolog annotation: Hit_ID=Q851M0; Match level="QueryCoverage=88%, HitCoverage=24%, E-value=1e-66, Identity=89%"; Hit description =Putative nicotinate phosphoribosyltransferase
  Pfam annotation: Domain name=NAPRTase; Domain location=3-134; Score= -14.4; E_value=7.6e-08; Accession=PF04095.7; Description=Nicotinate phosphoribosyltransferase (NAPRTase) family
MPWCISSVGAREAVGGRYKAVGIRLDSGDLAYLSVEARKFFHAVEKEFVVVGFGKTSITASNDLNEETIDALNKQGHEVDAFGIGTYLVTCYAQAALGCVFKLVEINKQPRIKLSEDVMKVSIPCKKKCYRLYGKEGYPLVDIMTGEDEPGPKL

SEQ ID NO: 72734 - protein, 198 aa, Zea mays
  Coding DNA Sequence Number=SeqID_29359
  Gene Ontology: Mol. function=transferase activity, transferring glycosyl groups; Cellular component=cytosol; Biological process =pyridine nucleotide biosynthetic process
  Homolog annotation: Hit_ID=Q851M0; Match level="QueryCoverage=46%, HitCoverage=16%, E-value=9e-39, Identity=84%"; Hit description =Putative nicotinate phosphoribosyltransferase
MAGTQDATEDAGDVGAAAGVVVDWEEDRRDRDTRLSRALTPRAAGPRLRNSYPLSVFSDEQCCSRKIVWDTNTWDSFTCICELLHGHKQVVQSFSLLIAQRTAGRGLDEITDKTLTSSDGSNTCEDFISLVQNWLIRIQDSSSLHGTFGETSQSELAAFTSYALAFPNSFLALVDTYDVMRSGVPNFCAVALALNDMG

SEQ ID NO: 72735 - protein, 255 aa, Zea mays
  Coding DNA Sequence Number=SeqID_29360
  Gene Ontology: Mol. function=transferase activity, transferring glycosyl groups; Cellular component=cytosol; Biological process =pyridine nucleotide biosynthetic process
  Homolog annotation: Hit_ID=Q10AX9; Match level="QueryCoverage=85%, HitCoverage=37%, E-value=2e-98, Identity=84%"; Hit description =Nicotinate phosphoribosyltransferase, putative, expressed
MAAANGDACRSVGGVPRPTNPMVTPLLTDLYQFTMAYAYWKAGKHLDRAVFDLYFRKNPFGGEFTIFGGLEECIRFIANFKFTEEEIKFLRSVMPACEDDFFEYLRSIDCSDVEVYAIPEGYAVFPKVPLMRIEGPVAVVQLLETPFLSLVNYASLVTTNAARHRLVAGKSKNLLEFGLRRAQVGLTFHTILLAHPLTFGPDGGISASRYCYMGGFDATRIVMSRALTPRAAGPRLRNSYPLSVFSGEVFLCRRL

SEQ ID NO: 72736 - protein, 298 aa, Zea mays
  Coding DNA Sequence Number=SeqID_29361
  Homolog annotation: Hit_ID=Q851M5; Match level="QueryCoverage=86%, HitCoverage=82%, E-value=7e-56, Identity=52%"; Hit description =Myosin-like protein
MSSSAKAKAKASGGKRAAAAKDPAEAVVSDKRRRERGGMDDSDHEFDRCLACFSLPTPFVFAAFDSPRSVSEAVGSDMKEIVTLLKHIKDKAHKDGQKKTEQAISSYLEYITDKFWYPSAWQQRFRLWYRTPRIGLRKKVVAINQELKQVLGDKYCEHPEWNVPLTIVFMCVHRQSFLKALSKTSKECESLLKNEYTKFLATHDKFCKDKVAHIQNFKDLFSKFEDDKEKLLVQYELQRKKEKATLSELEKTFSEKIANAEESLKKMKQDDKSIHILRKSIGSFLSGDPDDQSGQDDD

SEQ ID NO: 72737 - protein, 512 aa, Zea mays
  Coding DNA Sequence Number=SeqID_29362
  Gene Ontology: Mol. function=nucleic acid binding; Biological process= RNA-dependent DNA replication
  Homolog annotation: Hit_ID=A3ABC2; Match level="QueryCoverage=24%, HitCoverage=16%, E-value=1e-15, Identity=34%"; Hit description =Putative uncharacterized protein
MGLLASHNIQANFASRSNHVKSNPLKTMVRLGGLRYIEGDVVESIRQSLYVTQQPGSQLTLIRSEKIYRAIDCRDPLRCLSCGVGHKRAGKAEYPRGVGLARWCSTDDKYKHSEKGLMLQLPVHGDRINFDYHVCLCLEGILLHAWNEGIAKRAVAMSCVLDYVESQSLQKEDTRTLNLWAWAWNPSDIPKVTWLTIVGRNITVHNMPSAGQSGLTFRVIVHLDLVEGFPGNEDQGSTRAFDWRLGVVDGESAPRDMHDPPPRCNDHHRDDDDNDRRRRRLQREVSWSMRLFRSISRAPKGCERERSGSRRDHRHNTSRRYMSGDAPGGVRHVQQPRQAAAMPADASHVGIPGRGVENVGSRPHTGLAHQLREGSLMTRGRSRMRYLPRGAETPAVATAAATTAQNIKHRHVFNLSARTQCNLCRKLGLLANDGTPNFDNAFQDFQAWFQKPLSKEAGAALEALFNIHMPDTEHIDKALMGIAGEAIEETQDEMDNLQAEARSNAAAHLVVV

SEQ ID NO: 72738 - protein, 130 aa, Zea mays
  Coding DNA Sequence Number=SeqID_29363
MADSKDLNRASPNSSTRLTNLSAAEHKRLKDDMKKIDEEVQRQKDQVLKVADKWFLSHFRVDCHQKTVLEREIDADYMSSVLQQLPTIGDARRQNNCAKHIGNKWVSPAIFWYADGLISRTTVTTIFAKW

SEQ ID NO: 72739 - protein, 518 aa, Zea mays
  Coding DNA Sequence Number=SeqID_29364
  Pfam annotation: Domain name=TSC22; Domain location=303-363; Score= -2.9; E_value=0.089; Accession=PF01166.9; Description=TSC-22dipbun family
MAQGHISLSAARIVGRYVPRTEGLRSWDIRGSNVRLNRVFELNCLPYGGYPGEDAADRCGKKPVDVTEEGPSQEAAPATKKRKLGTGVGGVGVSDSFVVDLMGTCAAPGGRMSSPELRESSVRMLEVTGGRWPKNVPVPRVAGEDFFTSRMACELKVFPYGRNIAAVVSAVMERGRQDTAQKRRAVVRIADPMREAKRARGSTKATASGGSKQALAAKSAAPVHSKASASAKAAAAGGSKPPLGGLVKERRSSSPVQRIADFGTDISDVDYLVVTEGGVAAAVTAAEAGFGSHGFMCQATDFADLVASGALTADVAVEVEHLRAQHADAVREKSAAESKNRRLAEKVATMEAEKTNLRRQLAEERREANKAIADAHAAQAEAKVARAEGSLARQRVEELEARFNALRSRVDKAETSMRAEVERTHAQFMDVYRELGVRTADFEVPSQEAGLRFLEWLQEDLLVFPTIVTGFMSFASLVTCEGAMNALSREGCNHYEVFDREDENLEREIFRVEDPVVK

SEQ ID NO: 72740 - protein, 308 aa, Zea mays
  Coding DNA Sequence Number=SeqID_29365
  Gene Ontology: Mol. function=transporter activity; Cellular component= membrane; Biological process=oligopeptide transport
  Homolog annotation: Hit_ID=Q336T8; Match level="QueryCoverage=100%, HitCoverage=51%, E-value=1e-134, Identity=77%"; Hit description =Nitrate/chlorate transporter, putative, expressed
  Pfam annotation: Domain name=PTR2; Domain location=102-308; Score= -25.7; E_value=5.9e-05; Accession=PF00854.12; Description=POT family
MASVLPDTASDGKALTDAWDYKGRPASRATTGGWACAAMILGAELFERMTTLGIAVNLVPYMTGTMHLGNASAANTVTNFIGASFMLCLLGGFVADTYLGRYLTIAIFTAVQATGVMILTISTAAPGLRPPACADAKGASPDCVPANGTQLGVLYLGLYLTALGTGGLKSSVSGFGSDQFDEAHGGERKRMLRFFNWFYFFVSIGALLAVTVLVYVQDNVGRRWGYGICAVGILCGLGVFLLGTRRYRFRKLVGSPLTQVAAVTAAAWSKRALPLPSDPDMLYDVDDAAAAGADVKGKEKLPHSKECR

SEQ ID NO: 72741 - protein, 291 aa, Zea mays
  Coding DNA Sequence Number=SeqID_29366
  Gene Ontology: Mol. function=transporter activity; Cellular component= membrane; Biological process=oligopeptide transport
  Homolog annotation: Hit_ID=A3C766; Match level="QueryCoverage=98%, HitCoverage=50%, E-value=1e-131, Identity=84%"; Hit description =Putative uncharacterized protein
  Pfam annotation: Domain name=PTR2; Domain location=1-206; Score= -72.7; E_value=0.0032; Accession=PF00854.12; Description=POT family
MTRRFLDHAAIVVVDGGGESSPAASKWALCTRTDVEEVKQVVRMLPIWATTIMFWTIHAQMTTFSVAQAEVMDRALGGGSGFLIPAGSLTVFLIGSILLTVPVYDRLLAPLARRLTGNPHGLTPLQRVFVGLLLSVAGMAVAALVERHRQVASGHGATLTVFLLMPQFVLVGAGEAFTYMGQLAFFLRECPKGMKTMSTGLFLSTCALGFFFSTLLVTIVHKVTAHAGRDGWLADNLDDGRLDYFYWLLAVISAINLVLFTFAARGYVYKEKRLADAGIELADEESIAVGH

SEQ ID NO: 72742 - protein, 110 aa, Zea mays
  Coding DNA Sequence Number=SeqID_29367
MGPGSNHEDREPRAQDSPTTPTMVDTTDVAPNLGSPEPATKAPDLPSQQALVGAKAKTPPFAPAFVHLAAPTEAKRPAVSTLRPLHYETKAYDDDAPFHGLEAHVGSGPL

SEQ ID NO: 72743 - protein, 54 aa, Zea mays
  Coding DNA Sequence Number=SeqID_29368
MVKSFIVHRSSFVGLETAIIIQNMVLVRLLARAQRETFTKIKVLDDCIMQRRFD

SEQ ID NO: 72744 - protein, 139 aa, Zea mays
  Coding DNA Sequence Number=SeqID_29369
MAPKRANSKAAPIRRRSSEGSPASREKKGKDVADNTHQGAGEDEAHSKRQRNDQHTPEGTLRTCSSEGQPQVPPPGFAPPEVKDATEDGEVLGVSAEEQLQLRALRLKNRNLQKPFIPHAAAFQGINYLDERSPLAPQL

SEQ ID NO: 72745 - protein, 399 aa, Zea mays
  Coding DNA Sequence Number=SeqID_29370
  Subcellular localization annotation: CTP_CleavageSite=18; ConfidenceScore=5.07e-01
MAERCRSPQGRAPPTTARARRRGCSPSGGSEGGRTRRMRKVRRHGYHPGGRSLFKGDSPCSHPQPSWTKSSPIRSKILPLRHRGWAPRVMRAGPGQKKPNRHARGTQLPSGYKHSSIFAPNQRVKGQTAMQAACNCTKGAHRFNFDASSMEAQAHTSCNRHAGYYVQKTAAPLAPAPCLLDYRTGATTRGNPAHGPAVPTRHVGHGSVSRGRRRDGRYGQKWADSNGGSRRAEAAVKSSAGSRPLLEQAGKGDAPKGILLREGSGPRALLLIRGSKAGPPEGFDSCLRAHGLRAHYWLEVRRLAPRKGSTAASGHSGSAPTTDQGFVGWPPDGFDSRPRARRVRDDSGGSGAALANPFSANPLTASTYQPENSEPDYAPGQRLVRMREQPDRPRHHERH

SEQ ID NO: 72746 - protein, 219 aa, Zea mays
  Coding DNA Sequence Number=SeqID_29371
MEKQPWLDRLASRPDRRSIQCEDRLTPYPDARFPVDKAEQPSPASGAIGISASPGPRARTQPRLRKMISASPDPRAQTRPRSRRQSPPRPTLGLGLDLASDDSLRLARPQGSDSTSTSDDGLRLAQPQGLDSTSTSDDGLRVARPQGSDSTSTSEDGLGLNLDLGRRSPPRPTPGLGLYLDLRRRSPPRLTPGLGLYLDLERRSLPRPTPGLGLNLDLE

SEQ ID NO: 72747 - protein, 153 aa, Zea mays
  Coding DNA Sequence Number=SeqID_29372
MQQRAQAPGHGEQRSEQTEHHTGALIKQRSTREPHCAQAVPPPPSSASRMNIRTPSIDRIDPNRDWNREGKKNRELAIFCEVLSREQISIVMEPNWRRLRSGRHGFRPEPNRSALSTATSPRAASAHRSSHPRAAIDALKTCYSGGLLGHLAL

SEQ ID NO: 72748 - protein, 117 aa, Zea mays
  Coding DNA Sequence Number=SeqID_29373
MQGRDVGEHRLQARVVGEGQSLEHLFQGIHPLCVHLLCGGDARGGSPLSGKASTSVSNAGKVVAARESARRGIWSGKKRLEESSCAEMQTFLIGVDWRQQTVVAWSGLVFTRSKSYG

SEQ ID NO: 72749 - protein, 199 aa, Zea mays
  Coding DNA Sequence Number=SeqID_29374
MDPLARSNVDPHGRSHGSMVAGSESGGHTSIRAPPVHGALEASRGYATGLAAAHGDAHGLSFTNSTFLPAAPSMAVFFHGAAHGGGLGHDTALAAAQAGAGHGAALAVAPAAALGTPMAGADHGPPMDNELPAWFQGEATTAFGVDWMFEGSSHVAETPSTTVSEQRTIEARLTWRKGGRAPHPPPVATRSLDVILKVA

SEQ ID NO: 72750 - protein, 588 aa, Zea mays
  Coding DNA Sequence Number=SeqID_29375
  Gene Ontology: Mol. function=transporter activity; Cellular component= membrane; Biological process=oligopeptide transport
  Homolog annotation: Hit_ID=Q336T8; Match level="QueryCoverage=100%, HitCoverage=100%, E-value=0.0, Identity=79%"; Hit description =Nitrate/chlorate transporter, putative, expressed
  Pfam annotation: Domain name=BT1; Domain location=94-587; Score= -220.4; E_value=0.082; Accession=PF03092.7; Description=BT1 family
  Pfam annotation: Domain name=MFS_1; Domain location=40-511; Score =12.7; E_value=0.0071; Accession=PF07690.7; Description=Major Facilitator Superfamily
  Pfam annotation: Domain name=PTR2; Domain location=102-503; Score =397.9; E_value=1.6e-116; Accession=PF00854.12; Description=POT family
  Pfam module annotation: Pfam domain module=BT1::MFS_1::PTR2; Domain location=94-587::40-511::102-503
MADVQPESGPDGKALMDAWDYKGRPASRATTGGWACAAMTLGVELFERMTTLGIAVNLVPYMTGTMHLGNAAAANTVTNFIGASFMLCLLGGFVADTYLGRYLTIAIFTAVQATGVVILTISTAAPGLRPPACGAASPNCVRANKTQLGVLYLGLYLTALGTGGLKSSVSGFGSDQFDEAHDVERNKMLRFFNWFYFFVSIGALLAVTVLVYVQDNAGRRWGYGVCAAGILCGLAVFLLGTRKYRFRKLVGSPLTQVAAVTVAAWSKRALPLPSDPDMLYDVDDVAAAGSDAKGKQKLPHSKECRLLDHAAIVGGGESPATASKWALCTRTDVEEVKQVVRMLPIWATTIMFWTIHAQMTTFSVAQAEVMNRAIGGSGYLIPAGSLTVFLIGSILLTVPAYDRLVAPVAHRLTGNPHGLTPLQRVFVGLLLSVAGMAVAALIERHRQTTSELGVTITVFLLMPQFVLVGAGEAFTYMGQLAFFLRECPKGMKTMSTGLFLSTCAFGFFFSTLLVTIVHKVTGHGGRGGWLADNIDDGRLDYFYWLLAVISAINLVLFTFAARGYVYKEKRLADAGIELADEECVAAGH

SEQ ID NO: 72751 - protein, 178 aa, Zea mays
  Coding DNA Sequence Number=SeqID_29376
MQPGCTPSPAVTQDGDLQFDGGEKQAGLRPLPLPQLQGFSSSVLGRGLPRAWLSDPSGFGATPGAAFRHGSWKSIRPEVIAAAVRPPGAEVAVVTAAGAGDGKPFVGLLLLRRPPQSYLNRFTKRELPRAKVTSESGDSPTASPSEARSDLAGGVVDAEGAAAPFNCQDPSLQDRIIL

SEQ ID NO: 72752 - protein, 47 aa, Zea mays
  Coding DNA Sequence Number=SeqID_29377
MEAGSDWLGRPTAEENKQLPIPTTTSRHATVGNNGQVTLLEMLLIFD

SEQ ID NO: 72753 - protein, 92 aa, Zea mays
  Coding DNA Sequence Number=SeqID_29378
  Subcellular localization annotation: CTP_CleavageSite=66; ConfidenceScore=5.52e-01
MATAWRVPQCQPPCSRACLLFLTSRPHRAYRASLCRRHGSMTDGATSTAQSSSSTDRDFYSVLRTRCKQKRVEIARASRRFRNLIFTTLPRP

SEQ ID NO: 72754 - protein, 92 aa, Zea mays
  Coding DNA Sequence Number=SeqID_29379
  Subcellular localization annotation: CTP_CleavageSite=66; ConfidenceScore=5.40e-01
MATAWRVTQCQPPCSRACLLFLTSRPHRAYRASLCRRHGSITDGATSTAQSSSSTDRDFYSVLRTRCKQKRVEIARASRRFRNLIFTTLPRP

SEQ ID NO: 72755 - protein, 33 aa, Zea mays
  Coding DNA Sequence Number=SeqID_29380
  Homolog annotation: Hit_ID=P49690; Match level="QueryCoverage=90%, HitCoverage=21%, E-value=2e-07, Identity=86%"; Hit description=60S ribosomal protein L23
MEREDNAGVIVNPKGDMKGFAITGPIDKECANL

SEQ ID NO: 72756 - protein, 92 aa, Zea mays
  Coding DNA Sequence Number=SeqID_29381
MDHAGVAGYGARLDAAVMTPNRDLTADNRNCGFIHACSLPDSVGKKSAQRGGNYKGEQKVAEPLLTPARHGRFLSWGLRLQTFITRLKALPL

SEQ ID NO: 72757 - protein, 257 aa, Zea mays
  Coding DNA Sequence Number=SeqID_29382
  Gene Ontology: Mol. function=protein serine/threonine kinase activity; Biological process=protein amino acid phosphorylation
  Homolog annotation: Hit_ID=A2XYJ7; Match level="QueryCoverage=36%, HitCoverage=9%, E-value=7e-23, Identity=51%"; Hit description =Putative uncharacterized protein
MEEDVGGENSPSQFINNDMRIVVDDENGQSQSIKNGRSATPIDVDDGVATDNGASPTSDVEQVAPHYASNPRPPGHAQAPTRQATTHPTRPLPQVARRGAHAPSPCSQVAAAASTHIPESQTMPPLRHRSLVASHCPRPPEEPGYELQRYVENGSLANIIKPNKFEPIPESLVALYIAQGLIKLADFGVATKLTEADINTHSMVGTPYWMAPEGMYHESHEFGGHMFNTLLEMTVALEVAVAPLSHRTVRCAPDTVR

SEQ ID NO: 72758 - protein, 73 aa, Zea mays
  Coding DNA Sequence Number=SeqID_29383
MEPDYLLKVYSGKGGSSKSGFYWNEVDHLVSGFEVQVHLGGSWVDGVSGVVGFIEQDFPCLSHWYTQTVLEPK

SEQ ID NO: 72759 - protein, 488 aa, Zea mays
  Coding DNA Sequence Number=SeqID_29384
  Homolog annotation: Hit_ID=A2X7M4; Match level="QueryCoverage=48%, HitCoverage=30%, E-value=1e-53, Identity=52%"; Hit description =Putative uncharacterized protein
  Subcellular localization annotation: CTP_CleavageSite=79; ConfidenceScore=5.16e-01
MDRPLMGGRAYRLGRTFASCRGRKSALLPVAGPRACAGIPSPGPRARGATPQGPRRRLLGRGCAPPGRTGVEPWPGRPLASQGRGACPRALSELCTRAPRHRGQPRHGKARRDRSRQGQGYSRRSTGSRRGRAAVPWLGPATPRLLAPTGRGCASPNRARAHWLSEPAPPLHCACCSVSGSKFGYLDSCDIFLSLYYEKCRVSDPPDFTKSTPPHATATDRVRRPTSPPSVRVAHRPGRDASTRGKVERRRKLLQMLGLAGDPALVRLEMGRSVSYDDGPVPVRPAPTSLPISRSRSDGGAVPASATKPPLGGRSPGSSEATPEGEEEEADPRCLIRNLDDDSEFVVKEGSELREVGTGRQLTMEEFVDLCVGRSPIVQELMRRENVASSGSSTPVQRSNSDSSNGATRHRRRRRHSSWLRGIRNVAGSVVASSRDRRSSDDKDTCSEKGGRQSSSATDDSQDSAGAVRHGPVRVKVRQYGKSYKEFI

SEQ ID NO: 72760 - protein, 200 aa, Zea mays
  Coding DNA Sequence Number=SeqID_29385
  Gene Ontology: Mol. function=L-ascorbate peroxidase activity; Cellular component=chloroplast; Biological process=response to oxidative stress
  Homolog annotation: Hit_ID=P0C0L1; Match level="QueryCoverage=49%, HitCoverage=31%, E-value=1e-38, Identity=79%"; Hit description =Probable L-ascorbate peroxidase 6, chloroplast precursor
  Pfam annotation: Domain name=peroxidase; Domain location=3-168; Score= -79.9; E_value=0.028; Accession=PF00141.14; Description=Peroxidase
MPIMSKLIIICYFCRVVGWHDAGTYDKNIIEWPKCSGANGSLRFKVELKHGANADLVNALKLIQPIKDKFSSVTYADLFQLASAIAIEEAGVPKIPMIYGRVDVIALDNARQRGGFLRFYRIANLQLRGTIKIRILDEPTIKGIPSSGYRIAVDSSSKHGEVDVSHELASTTLAMNYQGNDHDFVHTFGVASPNKVSTNL

SEQ ID NO: 72761 - protein, 137 aa, Zea mays
  Coding DNA Sequence Number=SeqID_29386
MNKTPALKVPLQTELRFHLRRYEQPHTIGGPAEQQKADGWLSVARSGSSDDNLCPGRRSSFSNGFWAGAMAGGLSSTKDKNQPFKPGDGCPGVQAELAISSAEKPSPAATTSTPRQQAPGASKRTGRSSPSPEPPRT

SEQ ID NO: 72762 - protein, 65 aa, Zea mays
  Coding DNA Sequence Number=SeqID_29387
MRLRAKSSKAAQITAQAAKDFRPGGAEHHERTPRIVGESGAVLLWRYLACAIWWLRKILKNHERS

SEQ ID NO: 72763 - protein, 30 aa, Zea mays
  Coding DNA Sequence Number=SeqID_29388
MGVRSASPRKHLFDPECGKLVGKDSARCRC

SEQ ID NO: 72764 - protein, 547 aa, Zea mays
  Coding DNA Sequence Number=SeqID_29389
  Gene Ontology: Mol. function=transferase activity; Biological process= DNA integration
  Homolog annotation: Hit_ID=A2ETW9; Match level="QueryCoverage=45%, HitCoverage=30%, E-value=6e-10, Identity=25%"; Hit description=Viral A-type inclusion protein, putative
  Pfam annotation: Domain name=zf-CCHC; Domain location=462-479; Score =20.7; E_value=0.0011; Accession=PF00098.14; Description=Zinc knuckle
  Pfam annotation: Domain name=zf-CCHC; Domain location=73-87; Score =6.4; E_value=0.17; Accession=PF00098.14; Description=Zinc knuckle
  Pfam module annotation: Pfam domain module=zf-CCHC::zf-CCHC; Domain location=462-479::73-87
MALKANQEKKGKAKMQFEKESSSDDDLDANIAFMVRKTTKMLKKLNREGIKFDSRKKKFFSNKRKPISEMDYYNYGKLGHLAHQCNKPKKNKFKGKKDDDSDDEKKEKEFFKRKEGKHKRFHKKKNGKAYIFGDWLTDIESSSGSSSSEEENDEKVAAIAGDFSSPPPSPSSTSHLCLMAKGERKVQIENDIINDSDSDDEYASPSYDELADLLKEYTQIIWKSKAKCDKLKDENEFLTAKYDIVVKASEEMKEENKTMSSTANELKTSLNDAKDKCEKLSETNRELKDRLVKVKEDYTKIKIDYDNLLIANELLSCNTHEAINPAIKIDVATSCDDLSQVDQSSLHDELIEKVEVLTVENQKLKRYLSDATTKGKVAIESNDINNELAVDNEKLRDEVKKLKIENEHLATSVQKFNKGQYLQNELLMNTIMKNNKSGIGYNSFLQKKATSQYKAKQTPKPIKCFDCGKEGHFPDNCKAKPPTPLPKHSRPFAFNAHYVLIKVANGKVKVTFLGPPSKSRPRQIWVAKFLIEKVTGPMQNRALKIEA

SEQ ID NO: 72765 - protein, 258 aa, Zea mays
  Coding DNA Sequence Number=SeqID_29390
  Subcellular localization annotation: CTP_CleavageSite=34; ConfidenceScore=5.62e-01
MTLMVGLGPPLLAVSNPVSGFTFPLRVSSRLSPRRVAVESAIPFTPVPLPCNREQKPPFQNEDEPAAGAVPSRAPPAPGHLLRVGSRASERHPRLSSPSASPTRRLLASEVKSSTPYHHREFQPIHFRGLLPSALFKPSATATPTTPPAASPASSPSPPTIHASKRRRRETEATGNTPLRGGRGPAPRRRSSTPPPLSLPAAEFDPLDPDADPPPKLLTADEVRLCKQALKALDKKVGKPATLTKEFRSLPFYFKKGT

SEQ ID NO: 72766 - protein, 132 aa, Zea mays
  Coding DNA Sequence Number=SeqID_29391
MGPCSEGIFMHKYAGWSIASKALSLCKDDVRCTACVNQNIVDQKSLDDTRYNHGIIMRIIFKLKIFLGEAGSELEPPVIGSTGFVTEGAIAWLLYEAIVTTVEVSSPEVGANVGHLFSKAINQEQGNTNVNG

SEQ ID NO: 72767 - protein, 154 aa, Zea mays
  Coding DNA Sequence Number=SeqID_29392
MPKRGGLMLSKALKMQQEKEEKELSTLQDKVAGLRKPLEEKEAEITSLKEKVDKVEKKNYEATKMHNANIMKMKKQDDSIKDLQMSLEAEKENIANKDVENQRLLENLRQLRDNSFIVASWCCDVLKKIFSSTGAISRVTSYTSGDTEGALGWI

SEQ ID NO: 72768 - protein, 910 aa, Zea mays
  Coding DNA Sequence Number=SeqID_29393
  Pfam annotation: Domain name=CHP02267_MYXXA; Domain location=428-541; Score=-63.4; E_value=0.082; Accession=PF09543.1; Description=Protein of unknown function (CHP02267
MPSSSSSAADMPLAGASSEDTLSNVAVEELHPSDTVESGVSRISSVRIKDMQQLGYFGSVVGRVPGAEEVPEPEGELVVFEAFFTAGLRLPAHRFVAEVRGPGPLVDAECRGGPGEVCLGGDFIRRSALCGAYTQFEVAEGDEDEGALRCAARMSSGHDSVEEFVGYGVCPLAHGWALGEVCPREMPSRGGQLVRSPAFALDLRGRYPAAFMREAEDSAARIVGRYVPKTEGMRSWDIRGSNDRLNWVFDLNRLPYGGYPGEDTADRHGKKPMGGTEEGPSQEAAPAAKKRKLGTIVGGMVVSDNFAVELMGTCATPGGRMSSPESRESSARMLEVTGGRWPKNLPIPWVEGEDMSTSHIARGLRIFPYGRNIAAVVSAVMNKDRQDAAQKRRAVIRLADPRREAKKARGSAKAAALGSSQPTPAAKPAAPGSSKVSAIAKTVVAGGTKPPLGEAAKVRELPSPGKRVADIGTNISVEDYFVAAAAKDVAGSMSRRLREASQQLSHQLSQMWLSKSRDFGRSMRMPFGRKSAAESKSRRLAEKVAALEAEKTDLRRQLVDERREANQAIVEVQAAQAKAKVAWAEESLASQRAEEWEARFNALRGRVDKAEASTRSEVKRTLAQLVDSYHELGAWTADFEVPDREAGLRFLEWLQEELLVLPTIVEGFMSFASLVTCEGAMNALSREGCRHYEVFDQSDENFERKIFKAEDPIVKQSAGALFDRMWGSHGREAMEHAEDVEDLGGLAGAPPEAAEVNPVLLLDGGEGPSAVPVPAVAGEDPVSAPAPTVKDALKVVVEPTVKDPTAVAGPSQGFGPVHATATDNANFVAASTVVVEDESDDSVTKFFESDDSGSSVVWTEESSDEDLDYFAALDVAAAEASPRAVGAEVLPGANAGCRRRRAMAKRIVSE

SEQ ID NO: 72769 - protein, 116 aa, Zea mays
  Coding DNA Sequence Number=SeqID_29394
  Gene Ontology: Mol. function=phosphoric monoester hydrolase activity; Cellular component=plasma membrane; Biological process=protein amino acid dephosphorylation
  Homolog annotation: Hit_ID=Q53NQ7; Match level="QueryCoverage=91%, HitCoverage=48%, E-value=2e-28, Identity=58%"; Hit description =Protein-tyrosine phosphatase
  Pfam annotation: Domain name=Y_phosphatase; Domain location=2-113; Score=-13.8; E_value=1.9e-07; Accession=PF00102.18; Description =Protein-tyrosine phosphatase
MNLYRVAVDQSRVQLESSTGNDYINASHIEIAGRNLTKFISTQGPLANTIEDFWQMVYENHCPVIVMLTKFDGLKCDEYLPLSKGQAVFGKFTIKITKFRKDGQLLFRGGEVDRMW

SEQ ID NO: 72770 - protein, 71 aa, Zea mays
  Coding DNA Sequence Number=SeqID_29395
MGGVDRVHQGDQCNRVDWGFDCTQKLANWAFGYPGQCATVLWPWASPRFGSAVRNGEEGSMGVRCETNGWD

SEQ ID NO: 72771 - protein, 326 aa, Zea mays
  Coding DNA Sequence Number=SeqID_29396
  Gene Ontology: Mol. function=oxidoreductase activity; Cellular component=integral to membrane; Biological process=electron transport
  Homolog annotation: Hit_ID=Q69MH0; Match level="QueryCoverage=97%, HitCoverage=61%, E-value=1e-117, Identity=70%"; Hit description =Putative cytochrome P450 monooxygenase CYP72A5
  Pfam annotation: Domain name=p450; Domain location=1-322; Score=12.3; E_value=5.1e-14; Accession=PF00067.13; Description=Cytochrome P450
MVECTKQTIRELREAASVPSPGGGRRREVEIGGYMARLTGDIISHTEFDTSYDTGKLIFRLLEDLQRLTASSSRHLWIPGSQYIPSKYRSEIRRLNGELEAVLTESIGRSREIADEGRTTSAYGRGLLAMLLAEMEEKKAEQFSYDLQLVVDECKTFFFAGHDTSALLLTWALMLLATHPEWQNRARAEVARVCGDDLPSYDDLSKLTVLQMIIHETLRLYPPATLLPRMVFEDIRLTGGLHLPRGLSVWIPVLAIHHDESIWGPDANEFRPERFAAGRRPLFLPFASGPRNCVGQAYALVEAKVVLAMLLSHFRIAISACLPPRA

SEQ ID NO: 72772 - protein, 122 aa, Zea mays
  Coding DNA Sequence Number=SeqID_29397
  Subcellular localization annotation: CTP_CleavageSite=75; ConfidenceScore=5.11e-01
MALSLNVEGSSALPDLGLGLNLDAGRRTPPRPTPGLGLSLDLRRRTPPRPTPGLGLSLDLGRRTPPRPTPGLGLSLDLRRQTPPRPTLGLILSLDLGGASASPDLGLGPATSQGGHHYPTPS

SEQ ID NO: 72773 - protein, 171 aa, Zea mays
  Coding DNA Sequence Number=SeqID_29398
MPQSVPTPALEAASQLPLCPTRRPRISSHDCAGHVRQTLPRPHDPRQPHPPILAPQTLPCPPPNTPTTSAPASVTVIHQRRFLPPPNPRPPRILLIPVLDAATPPYPTHVLPALGVAPNQPYPHRAHLLSFLVALAHQSRKFEFSEKSTGRDPRYRDFLLAKDFGFQFFGE

SEQ ID NO: 72774 - protein, 99 aa, Zea mays
  Coding DNA Sequence Number=SeqID_29399
  Subcellular localization annotation: CTP_CleavageSite=30; ConfidenceScore=5.04e-01
MQAACNRTKRRTLLTPTRPAWGPRPTRHVTGAPVTTCERLPRHLRHYHAFSTAEPVPRLEATLRMAQQCQPSTSVTGTGKGDTPKGILLREGNGPEPSY

SEQ ID NO: 72775 - protein, 106 aa, Zea mays
  Coding DNA Sequence Number=SeqID_29400
MEQDVGGENSHSHFINNDMRIVPADEDGPSQFINNGSSVAPINLEEGAATNIGSGDANTSENVDGKKHTRICTSKVWQDFEPLYKVVDDKRIRYGGINADSRLEGG

SEQ ID NO: 72776 - protein, 361 aa, Zea mays
  Coding DNA Sequence Number=SeqID_29401
  Gene Ontology: Mol. function=transcription regulator activity; Cellular component=nucleus; Biological process=regulation of transcription
  Homolog annotation: Hit_ID=Q6ZIP1; Match level="QueryCoverage=77%, HitCoverage=100%, E-value=2e-81, Identity=60%"; Hit description =Transcription factor (BHLH)-like protein
  Pfam annotation: Domain name=HLH; Domain location=263-310; Score =31.1; E_value=4.2e-06; Accession=PF00010.17; Description=Helix-loop -helix DNA-binding domain
MGDTCTLPTNTLLGGTRQEHSGIVAAAAAEFLRAVVSPCLEPSSHVTTKMEGSYAPSAPTMEIDMMAQFLGAADDHCFTYEYEHVDESMEAIAALFLPTLDTDSANFSSSCFNYAVPPQCWPQPDHSSSVTSLLDPAENFEFPVRDPLPPSGFDPHCAVAYLTEDSSPLHGKRSSVIEEEAANAAPAAKKRKAGASATTKGSKKSRKASKKDNIGDADDDGGYACVDTQSSSSCTSEDGNFEGNTNSSSKKTCARASRGAATEPQSLYARKRRERINERLRILQNLVPNGTKVDISTMLEEAAQYVKFLQLQIKLLSCDDTWMYAPIAYNGINIGNVDLNIYSLQKAAPLLGYRLIRIRVM

SEQ ID NO: 72777 - protein, 106 aa, Zea mays
  Coding DNA Sequence Number=SeqID_29402
MGSQSATSKASTTEEPDGSGYDVQASSTAGHNGSCNQEWAVRVWVVGYERRPVRALADGSQYLSNDRNSEWAWKNRIQKILALSSTSSIPFLLPRISLFLESTVAN

SEQ ID NO: 72778 - protein, 133 aa, Zea mays
  Coding DNA Sequence Number=SeqID_29403
MAAIWKWNTVATGHRIVDPFIYYGHTKDLSVYIDINGRYMEHSGQLAIELLIHRVVGHRVAFAPGSFAGGLLSAMERLIVREVGRVVSLCTERAWARGVVDVKDYSWAVVWALGLGLSTWAFSTRSKRNSKRA

SEQ ID NO: 72779 - protein, 637 aa, Zea mays
  Coding DNA Sequence Number=SeqID_29404
  Homolog annotation: Hit_ID=A2YN69; Match level="QueryCoverage=90%, HitCoverage=90%, E-value=0.0, Identity=64%"; Hit description =Putative uncharacterized protein
  Pfam annotation: Domain name=DUF936; Domain location=25-626; Score =146.5; E_value=7.6e-41; Accession=PF06075.3; Description=Plant protein of unknown function (DUF936)
  Subcellular localization annotation: CTP_CleavageSite=50; ConfidenceScore=5.77e-01
MAPPPTLTSSRSSPSLPSSPHRPALRPGSLQRLLRPPDPSDDDDSAPTPRSQSRSSSRERALLQVTNITPALSGADPFSGHHGFYLRLSDSARSCYVSLHADHDDLILANGLHIGQIIEVDHLVPSVPAPVLRGFRVLPGRYPCVQQESGDDDVVKEVVSERPRRPSPTPPLPERRARQASSPASVAHFHRSRSITNLSEAGSPARRRESMLRSLDSPKNLRKISVPSVDGNSSDDDDASSSYSSLSTARRNWDFSGNIKDVSPGKSGSKTIAQQNDVVNDPLESVRRKAEKAFKVLSRRNSHASIKAPRDSSGAATPMSHSASSSGIKWCENNVIWSSLSSSLVRHGKEAMKQRDMELQAVLDGLLEASASEKLIKCLSKYSELHSDKDDDPKEVISRFLKFSQELDHAIFIAQSQARLRHPKACCSNSTPSASPRAATKAALDRKQSAISWVRAAIEADLSPFSSHTTRGASESARASSAAELKPVSPLFCSKPKCSCSSRLSKKPADASTEGGSLNAAMDLAIAMRSDGNRWFLNYIDKFLDDIEGDYATCDSQVASFLQQLKKVDDWLNGVVRHERMLSIDRSGKDCVLSEEEESDACERVRRKIYGALLRHVQYAAMALEGINSVTDEEKEL

SEQ ID NO: 72780 - protein, 132 aa, Zea mays
  Coding DNA Sequence Number=SeqID_29405
  Subcellular localization annotation: CTP_CleavageSite=45; ConfidenceScore=5.27e-01
MTGAAACATVGLPSGAPRHSVDRRSKKVGLLVLFCWVALPTVGARTSTPPEEQATDACLPTTVITTSTNSASRGYRLLGVHTGLYSSRNIHTLTTLRLREDFNSSAPIFVFHSSLIVCGAPIETAGDVRLCV

SEQ ID NO: 72781 - protein, 89 aa, Zea mays
  Coding DNA Sequence Number=SeqID_29406
MDDRSIQEGRNNVDLAGKAVTVTEPTMAVTKGGPAPDLAGRVDASDGRSSKLGGVAGASTQSGRKKHDGQCHGEESTAARAPLVRAGAT

SEQ ID NO: 72782 - protein, 246 aa, Zea mays
  Coding DNA Sequence Number=SeqID_29407
  Homolog annotation: Hit_ID=A2XNG1; Match level="QueryCoverage=14%, HitCoverage=8%, E-value=9e-10, Identity=82%"; Hit description =Putative uncharacterized protein
MGWSFCAPWKSDVREGLAIGLGMGTVMLLLFCGYSLKIQELPFITVVQENYPNRLGVLFVIRLPPVVRVIAQTFLQIAISHGIRGDEDDIASKSAPPASIDGARYGFEPPVLQSSHQVIIEGFTGRRSEHSSSIPKLTSLVNPFWCYLTNITKVILAFCCSLCASDSARGSCKSLMKKSKVTNAETVILIDAKNLTAHLLEISEKIYMSMAWIRKMDYIVQDLGGADHVTDLDHNHVAELKILGLY

SEQ ID NO: 72783 - protein, 435 aa, Zea mays
  Coding DNA Sequence Number=SeqID_29408
  Gene Ontology: Mol. function=binding; Cellular component=ubiquitin ligase complex; Biological process=protein ubiquitination
  Homolog annotation: Hit_ID=Q6ZIQ0; Match level="QueryCoverage=77%, HitCoverage=93%, E-value=1e-126, Identity=73%"; Hit description=Arm repeat-containing protein-like protein
  Pfam annotation: Domain name=Arm; Domain location=133-174; Score =40.6; E_value=5.6e-09; Accession=PF00514.14; Description =Armadillobeta-catenin-like repeat
  Pfam annotation: Domain name=Arm; Domain location=176-216; Score =23.6; E_value=0.00074; Accession=PF00514.14; Description =Armadillobeta-catenin-like repeat
  Pfam annotation: Domain name=Arm; Domain location=218-258; Score =23.0; E_value=0.0011; Accession=PF00514.14; Description =Armadillobeta-catenin-like repeat
  Pfam annotation: Domain name=Arm; Domain location=259-299; Score =14.7; E_value=0.15; Accession=PF00514.14; Description=Armadillobeta -catenin-like repeat
  Pfam annotation: Domain name=Arm; Domain location=92-132; Score=36.5; E_value=9.4e-08; Accession=PF00514.14; Description=Armadillobeta -catenin-like repeat
  Pfam module annotation: Pfam domain module=Arm::Arm::Arm::Arm::Arm; Domain location=133-174::176-216::218-258::259-299::92-132
MESDASTSPRRRSTSCYSDSGDSSCSEPFSECGSDDLSFTPAAGIHRLLLSCASEASEDAISSLVAELERPSPSLDSLRRAAMELRLLAKHNPDNRVRIAAAGGVRPLVRLLAHADPLLQEHGVTALLNLSLCDENKAAIIEAGAIRPLVRALKSAASPAARENAACALLRLSQLDGASAAAIGRAGALPLLVSLLETGGARGKKDAATALYALCSGARENRQRAVEAGAVRPLLDLMADPESGMVDKAAYVLHSLLGSGDGRAAAVEEGGIPVLVEMVEVGTSRQKEIATLCLLQICEDNAVYRTMVAREGAIPPLVALSQSSSARTKLKTKANSERGRAENDGDRSLADESIVHLAGGTVVAPASGTTTTLLAAAWIDWYLRRSEISSTSIALSFVNLAHPLPECISACLGMASTQSKYQLSVRQIFCTLISS

SEQ ID NO: 72784 - protein, 642 aa, Zea mays
  Coding DNA Sequence Number=SeqID_29409
  Gene Ontology: Mol. function=translation release factor activity, codon specific; Cellular component=cytoplasm; Biological process =translational termination
  Homolog annotation: Hit_ID=A7Q7E9; Match level="QueryCoverage=65%, HitCoverage=95%, E-value=0.0, Identity=90%"; Hit description =Chromosome chr18 scaffold_59, whole genome shotgun sequence
  Pfam annotation: Domain name=eRF1_1; Domain location=211-345; Score =244.1; E_value=3.1e-70; Accession=PF03463.6; Description=eRF1 domain 1
  Pfam annotation: Domain name=eRF1_2; Domain location=349-483; Score =225.9; E_value=9.2e-65; Accession=PF03464.6; Description=eRF1 domain 2
  Pfam annotation: Domain name=eRF1_3; Domain location=486-623; Score =246.5; E_value=5.9e-71; Accession=PF03465.6; Description=eRF1 domain 3
  Pfam module annotation: Pfam domain module=eRF1_1::eRF1_2::eRF1_3; Domain location=211-345::349-483::486-623
MAAQHSRTHRGGVLTWEMQWIDFPVHIATEGKIIPALAVEKLALMKPKFLLFVWFDLFSMPGGCVPKATLKRRLGGKAPRRRKASCSSYSCWRVGEATGGSNSSTAAPPTAASWLLQQRRCGGFSSIGAAAPEAPLAAVSTGERERERERERRQWVERGRWLGLWESGVRRLGHCLAGRGGVGSGSWDWEKIERERLVNHPGSVKMSDSHETDRNIEIWKIKKLIKALESARGNGTSMISLIMPPRDQVARVAKMLGDEYGTASNIKSRVNRQSVLAAITSAQQRLKLYNKVPPNGLVLYTGTIVTEDGKEKKVTIDFEPFKPINVSLYLCDNKFHTEALNELLESDDKFGFIVMDGNGTLFGTLSGNTREVLHKFTVDLPKKHGRGGQSALRFARLRMEKRHNYVRKTAELATQFFINPATSQPNVAGLILAGSADFKTELSQSDMFDQRLQAKILNVVDVSYGGENGFNQAIELSAEILANVKFIQEKKLIGKYFEEISQDTGKYVFGVDDTLKALEMGAVETLIVWENLDINRYVIKNSTTGEIIIKHLNKEQEADQSNFRDPSTNTDLEVQEKMSLLEWFANEYKKFGCSLEFVTNKSQEGSQFCRGFGGIGGMLRYQLDIRSFDELSDDDDVYEDSD

SEQ ID NO: 72785 - protein, 421 aa, Zea mays
  Coding DNA Sequence Number=SeqID_29410
  Gene Ontology: Mol. function=binding; Cellular component=cellular _component; Biological process=cell differentiation
  Homolog annotation: Hit_ID=A2YN66; Match level="QueryCoverage=90%, HitCoverage=79%, E-value=1e-169, Identity=78%"; Hit description =Putative uncharacterized protein
  Pfam annotation: Domain name=IFRD; Domain location=20-319; Score =167.6; E_value=3.2e-47; Accession=PF05004.4; Description=Interferon -related developmental regulator (IFRD)
MGKSKKSKARGGRDDLLDSSDADSVSSSSTALSDLSISYATEHVNSQEFVLDKYIDALYEKRGSTREAALGKLVDAFESFMLHGLVEDKYATLMSQLNNSVKRGSTKEVFLASHSIGLLAITLGVGSSSHEIMEESHPQLCRALDCLAVITFVGASDLAETELSLKAMWDVIHPKSGSNVGTVRKPRPPVLAAAVSAWTFLLTTIGSWRINTNIWKEPIAFLSTLLEADDRAVRMAAGEALVLCFELNLLDVSSREDDGVNTGGTAGSKNKLFLDMQALKAKISGLATNLSAEAGGQGADKKKLTDQRDLFQRILDFVKYGDCPEESIKIAGKRDVLRVSSWSELIQLNFLKGFLGKGFLKHVQENGLLQDIFDIKVDKTETLSSTNKKIFRSEEEKGRALKLNKERRLAQVRKNAVMLDD

SEQ ID NO: 72786 - protein, 251 aa, Zea mays
  Coding DNA Sequence Number=SeqID_29411
  Homolog annotation: Hit_ID=Q10J01; Match level="QueryCoverage=29%, HitCoverage=23%, E-value=3e-09, Identity=53%"; Hit description =Expressed protein
MLLRLKIVVGVHSVVLPVPVRGGFGHGACYAAVEPCWRRSRRPALAAAGGLVTRRPRSATVVMALKEEPEGSRRGFVGSGPSWDPGLEIQVPSDPFLLWYLFLYSSVLVNLISAVAVISPSYIFRNLPGSADPKKGLAPPLRKESLNVGDHIYSWKATCFLSFQVVDAKVIHLDYNNSCIFLSLKDVKVMVETTLGKEELKEAVLMCTNRVSQAEGMKVDISTRFSYEELSGAINNFSMDHKIGHDNFGFV

SEQ ID NO: 72787 - protein, 380 aa, Zea mays
  Coding DNA Sequence Number=SeqID_29412
  Gene Ontology: Mol. function=sequence-specific DNA binding; Cellular component=nucleus; Biological process=regulation of transcription, DNA-dependent
  Homolog annotation: Hit_ID=Q6H6J2; Match level="QueryCoverage=52%, HitCoverage=37%, E-value=8e-13, Identity=36%"; Hit description =Putative homeobox protein
  Subcellular localization annotation: CTP_CleavageSite=81; ConfidenceScore=5.00e-01
MPHARQASPRPPQISPLGTIPTPNAPPALALALDGAARCDGGNRGRAPPIPTPSQPATKPRPCPRPRRHLLHGWRDLDATEAASGSASATWRSAADLGAHYAANNIVLASFASQLLDNALVPPLDDRAGRRTPSDEMDDELYGVAGCNSHVTASLRCPSQSGATAVWSSSKKSYDICTSADGPVTVPAHDTYHLVGAGLSDAGGLHYPLAACSGANASTAVVASELSLTLCSNSNSIASSNNTLNATEQCSSRASRSALTELQWARSRMALHFAAVVARSRYTAVLQNLLNDVAATCWTVSLICLASVTLFSSVMSTSFPHWSKARKQSKQLEEWNTAAFSSELTATKHKEMTPKDSKLVMLKYWQAIAKSGFVEPTPIC

SEQ ID NO: 72788 - protein, 137 aa, Zea mays
  Coding DNA Sequence Number=SeqID_29413
MDHGALLGVRGYAWIRVGNVHAMDTNSSGRGVRQFKTYLLHRLEKEVSEWLSNVDCWVLGAQVNVLIVPAKGQVDALSKELYALSTVTGVYNLFIRVLSSYLTDVSESWTENADYIMEVSEWLSNVDCWVLGAQAEW

SEQ ID NO: 72789 - protein, 102 aa, Zea mays
  Coding DNA Sequence Number=SeqID_29414
MGGVACAPSSIDGVACALMAGIDRGSWAVMAASDPRNRGAEGGEGSLHADRVAARTGAREDALGQSRAEWVVGERGQGMRQHSRDRGMAEQCTILGVDVYVR

SEQ ID NO: 72790 - protein, 110 aa, Zea mays
  Coding DNA Sequence Number=SeqID_29415
MSHSAIPSLQCYQSKGKNGSNNSSIVALYSPFAILIVPFKLGFGQPMISADKSYADRHCSLFYPYPIGPTDGFKNGSDMPIEMAMARMTKKINRIPIYFYVKDEILNNYF

SEQ ID NO: 72791 - protein, 21 aa, Zea mays
  Coding DNA Sequence Number=SeqID_29416
MRLHTLRDIVNAGKCYTNYCG

SEQ ID NO: 72792 - protein, 130 aa, Zea mays
  Coding DNA Sequence Number=SeqID_29417
MACLWRSTNHWGAMRALDLGKTTVGVTRIPHRRSVRVTDPPRTVDELATPSIAGKNLPSVFAITPARFSTSQFQVKGVRASDCAFAGDAPPWVRQRRRSVWLGEERETPWPLMGSINGVDWGLDTGQRGP

SEQ ID NO: 72793 - protein, 194 aa, Zea mays
  Coding DNA Sequence Number=SeqID_29418
MGKSNKRKREPTPPSEDFDDSEYSEEEFSSESEGSPAPVSPPVLSEVWTYIRAVERSGLEGLEESEYSSDEEDSSDLSEEGGNGDGGDDDDDGGDSDDDDDSGGGGDDGSKGGHDGKSCDPSVADPNGCAPSVAEPDGGAVCVADENEGEEEDEVHLTRKNSRQYVASGESSGVPSPALSALIGLQELSLANFD

SEQ ID NO: 72794 - protein, 114 aa, Zea mays
  Coding DNA Sequence Number=SeqID_29419
  Gene Ontology: Mol. function=small protein activating enzyme activity; Biological process=protein modification process
  Homolog annotation: Hit_ID=A2YN52; Match level="QueryCoverage=98%, HitCoverage=18%, E-value=4e-31, Identity=56%"; Hit description =Putative uncharacterized protein
VLAELPAPVLNGTMVTVEDLHQELKCSINIKHRDEFDEEKEPDRMVLVGWSGPVDKQTTSNGETKSVPSSSNTEDVDGTAEDISATSGMKPALKLLKMTNDDGLLMFDEDPRQS

SEQ ID NO: 72795 - protein, 259 aa, Zea mays
  Coding DNA Sequence Number=SeqID_29420
  Subcellular localization annotation: CTP_CleavageSite=78; ConfidenceScore=5.61e-01
MSSRSLMHHVLPPSKPPDGGFLPSFRSIIGGTQLRGSLYLSATVRLQGFSSAGPTVPLRRRSPETVTTSPWVGRSKPGCDLGPTLSFKDVHHPRWGGGRAEPELYLPRGSVCRPLLRRSRERALTGPAGGSDFDKAGLVDGERRQPQRVGLVGLAPGAPSCREARSADGGGDPVGNGDFSSRLHLGTDDRGRQPSGRSPLRSSRTSGAPTSARRRRTGAKAGPHQNTNAAGRRASEREDLFGPRNHLSERELLIVEGDE

SEQ ID NO: 72796 - protein, 162 aa, Zea mays
  Coding DNA Sequence Number=SeqID_29421
  Gene Ontology: Mol. function=kinase activity; Cellular component =ornithine carbamoyltransferase complex; Biological process=amino acid metabolic process
  Homolog annotation: Hit_ID=Q6QP54; Match level="QueryCoverage=38%, HitCoverage=22%, E-value=2e-18, Identity=76%"; Hit description =Putative kinase
MPSWQPERFWHPAGVMSWPSEECWSLAEGQLSELLSPCRRPLASVRGLRAAVVTEVMMAPPVDVAGLRPRLDDVEAPPKPRSSLSSVAEVESEPLIRARWRPSAEARAESEPWGRAKRSSSSSGLSLSPSPGSGGAEFVVFRDLARVRALGRAERSSSSSGA

SEQ ID NO: 72797 - protein, 88 aa, Zea mays
  Coding DNA Sequence Number=SeqID_29422
MVKERIISRGRRMTDILEDDADRKQQGRRRRNSGADDVEGAGFDDKIASSRVRTLSKNLIRPLSVQDLEGEGFRRPALPSADARRRSG

SEQ ID NO: 72798 - protein, 290 aa, Zea mays
  Coding DNA Sequence Number=SeqID_29423
  Gene Ontology: Mol. function=binding; Cellular component=integral to membrane; Biological process=transport
  Homolog annotation: Hit_ID=O80414; Match level="QueryCoverage=20%, HitCoverage=16%, E-value=3e-20, Identity=78%"; Hit description =Mitochondrial phosphate transporter
GLGHRRTPEPPTPRVAAIAIDDRASRDRRSNPRLLWPPPPLLKPTTPNATAVTAGSGGGTVTVTVACLRAAPPLALGITTARTLEGTTAMLACPRELPPSLKPNPCPGLSLTIGSPDQQPTSYCLLGAPRPAKGTSSARSCAATGAAARLHASAPAPAAAGAGGAVPFSIQAPNEKIEMYSPAFYAACTAGGIASCGLTHMAVTPLDLDKCNMQVSGQRPRSVSPGGINGERSEIAEIEAASTSEAARLRAALRRAPPGAVREPHQSFERLTQTCFDKSRAAILQFRTTT

SEQ ID NO: 72799 - protein, 43 aa, Zea mays
  Coding DNA Sequence Number=SeqID_29424
MAEAGARARGRVRDGGGDSTCAAAGVEPDWARARDYDGQKNVF

SEQ ID NO: 72800 - protein, 189 aa, Zea mays
  Coding DNA Sequence Number=SeqID_29425
MTLEPHPLQPGWRSLDSESFGYRAEDTIEAIALHGLTTFCGFHPLELSTHPIGLFPTEKEDDPMWKDRVEHAKDIWAIYPGQTAHFIVRCMNALYRLQVEQLSNEIEELEEPVGTRENTIEVLEDQLINTQQQLAEANEHLDMHHQEIQDMEANEEVDIEGGEEPASSLDIAGSGRPPSSESSVASFAH

SEQ ID NO: 72801 - protein, 205 aa, Zea mays
  Coding DNA Sequence Number=SeqID_29426
MVGTSAVTAWRQPGSVEHCTLQDMVDGVTWPTTLPPGWMVQWDAAPMNSPTPASGGDTRFSSDFLSRDGLTSILWIVFNSACYPTPPLYTVQLYEEHRVPCCWVWLTLEAHPLQPGWRSLDSETIGFRTDDTTEVAAMKTLMTFCGYHPLEMVMHSLGLFPTEKKDDPMWCNRVSHVKDVWVMYPDLVGRVTVQCMSALYRLQVL

SEQ ID NO: 72802 - protein, 84 aa, Zea mays
  Coding DNA Sequence Number=SeqID_29427
MAGTTGLAAGGDRDGPTAVAEAMWLAVWWQGRWPSKRPGAGRRRRAREAATHEGGGRNGHGDGRGGRLGGGGRAEGEMARGGGG

SEQ ID NO: 72803 - protein, 303 aa, Zea mays
  Coding DNA Sequence Number=SeqID_29428
  Gene Ontology: Mol. function=peptidase activity
  Homolog annotation: Hit_ID=Q6Z3T8; Match level="QueryCoverage=52%, HitCoverage=52%, E-value=1e-58, Identity=65%"; Hit description=Auxin- regulated protein-like
  Pfam annotation: Domain name=OTU; Domain location=58-167; Score=75.1; E_value=2.4e-19; Accession=PF02338.10; Description=OTU-like cysteine protease
AAVAVQTVSKKPYPESYGLASAEGPVNNNIDSTESAMSSTNLSHGKEVHTDYSVTGIPGDGRCLFRSVVHGAYIRSRKPIPNEDHQRRLADELRTKGDFDTYVSQIRKPHVWGGEPELLMASHVLQMPITVYMHDKAAGGLIAIAEYGQEHGTEAPVQVLYHGYGHYDALQIPGEGGPSEQVVSMAGDGWCYADAEEEAKVSTSGSSVRSAIVVTSDEKEMVEMDASSSDVVSALVAMASCDIRFGGKEQMVLRRAWRSEVDRHPLMSSHDLQTPDSRAYSSVYLRVALFLLANKQAVTEERR

SEQ ID NO: 72804 - protein, 313 aa, Zea mays
  Coding DNA Sequence Number=SeqID_29429
  Gene Ontology: Mol. function=unfolded protein binding; Cellular component=mitochondrion; Biological process=protein folding
  Homolog annotation: Hit_ID=A2ZL18; Match level="QueryCoverage=33%, HitCoverage=9%, E-value=1e-30, Identity=68%"; Hit description =Putative uncharacterized protein
MEIKELKAALETCFVPRQRLPKFDLHLQVAATNKGGRCGGDAGAQPPGMYGIDLGTIVGLELDVNIVAANATTKKASNGAPGVHQQQKRLLSVLVAPKVAGTSNVVSLKLMGGALIGRRYALSAAAVDSTDPPAEKHEYQAEVNRLMDLIVHSLYSNKEVFHRELVRCVVTDSVALLGLWKNMKICWGQLGMTLVKPLGCYSFVFYSGMTKAPPDDSPHPPLAEAGAATPSRSIPSGFKQLDGRVKVLQIVGVAPPGADLVAGGVAGEDPKAETGGAELAIQCRDAGQDMPECEFSDVPFFTHLGNSRELLVV

SEQ ID NO: 72805 - protein, 363 aa, Zea mays
  Coding DNA Sequence Number=SeqID_29430
MALHELYDDGGPQLSYGSRTTLRRTTDSHDITPAGCPDLSGCHIGMAFSEKVGRAGPRTGQALSWGRSLPSPAWTLVTPLLQAHLTWARDEHEGRGTSTSLTLGSGRLASPPSALAHALDPSGLGHAAHSLVGLGTPLSRNADTNYISASTITAHLYTHSSLTYWQRKVYGWHLEELQGLKKGLDSEVEQLKSEMKAIRSAVQEEKGNLPAQNTTLETPSILHFYNLSRPMLPTQFSDPASRSRRPSPKVIVICPCLLFPDSAAANPVLTLALRHRMPRALLCHLSQRLASRDGRECRMSRALLCHPPSHACLALADLVRPRLPDSHLAMSPHESGTSNCLPTSASSLVLPSPSPQPPRARAR

SEQ ID NO: 72806 - protein, 143 aa, Zea mays
  Coding DNA Sequence Number=SeqID_29431
  Homolog annotation: Hit_ID=Q2QNV2; Match level="QueryCoverage=65%, HitCoverage=63%, E-value=5e-07, Identity=41%"; Hit description=Fiber protein Fb19, putative, expressed
MTMVVGIDDSEHNFYTLKWGALQHFFPPTKLQHYCLVVVTAKPSVASIVRPANLVLVEILILESSKASTLVFKVSITSIASVQGRAHCGGYERPIFLCGGDNDTVEPSQCRQADFSDWNLWFFLKIEYVLASLKDLSECKHLF

SEQ ID NO: 72807 - protein, 964 aa, Zea mays
  Coding DNA Sequence Number=SeqID_29432
  Gene Ontology: Mol. function=transcription regulator activity; Cellular component=nucleus; Biological process=regulation of transcription
  Homolog annotation: Hit_ID=A3C044; Match level="QueryCoverage=39%, HitCoverage=94%, E-value=9e-65, Identity=47%"; Hit description =Putative uncharacterized protein
  Pfam annotation: Domain name=DUF1645; Domain location=137-352; Score=- 34.5; E_value=0.0047; Accession=PF07816.2; Description=Protein of unknown function (DUF1645)
  Pfam annotation: Domain name=HLH; Domain location=912-960; Score =40.3; E_value=7e-09; Accession=PF00010.17; Description=Helix-loop -helix DNA-binding domain
  Pfam module annotation: Pfam domain module=DUF1645::HLH; Domain location=137-352::912-960
MANVASLLPYIRGIHVLIRCQRTQGDDWRKPGRYRRSDRAAPAPLALITSPVRQPAPGAPRPYTRTSQRGAAATTRSFSRAAGCTPQADRPCRSTGRRGLGRRRGGSAGACPPRTWRHGTRDSSSARAAPAETLTAADELFEKGKIRPLKPRPKKTADDEPKIRPLKPPPGLLDGGSVTPSPRSPVVARGAGATWSPRRRSRVGSGVDFDPFAAALLEATKAPSPLGGKDDEGGVAVAPHGSPPTRPATRPASRSAGWRRWRLSDLLLFRSSSDGGRVNSSTCPSRGRAQQPPVMTIKASAAKREDMGKGWKHGDGDAAAAADSVAGMSSSDPDDAPDGGEDSPLFRRSGGPSSGGTVGDVPVSQSLIKAASNSSAAITTSLSRVLPNSTFLVPDDSLLPTGEDFNSSTAVPAPVRDEDDAAAAVSAASAAAAGNRTCDPDLRPGFAAGGSASRGRFVAGGVRVVGEEFGSGWRAGVAAAGVRRAVRAGGGSLQMGLNSCRDIKCSGWSRGGSWLCGLHVVMWNGPGAGPQERKLFLDTRHKYPYRLHCTVLPRMAAGASTSAPATRALRFFRWGGGSVCVMYGAPVPKDLNLPAALPQPTRAGARTPPQQQQQMSSAGLLRYRSAPSTLLGEVMCGDQDFPATDGGGGHGPPDHAATDNVLALFLAGHHSEARDCKPPRPAAAAHFMDEAAASQQQQLMYQSQQQQQMAAMEGLYHNVSSGGTEHGAGVGAGNNSLIRQSSSPAGFLTNGYGGMLRAGMGMAGGFRNGVSDARLKGQLSFPSRQGSVMSQISEVGSEELDGGGGGSPEAAGSNASGAPRGYVGIPGYPMGGGTSGAWSDEPSPSPTSGAKRRPRDSGPAPQNVQQQPLAPQLSLPSGGKPASAEMAAIEKFLQFQDAVPCKIRAKRGCATHPRSIAERVRRTKISERIRKLQELVPNMEKQTNTADMLDLAVDYIKDLQKQVK

SEQ ID NO: 72808 - protein, 272 aa, Zea mays
  Coding DNA Sequence Number=SeqID_29433
  Gene Ontology: Mol. function=unfolded protein binding; Cellular component=mitochondrion; Biological process=protein folding
  Homolog annotation: Hit_ID=A2ZL18; Match level="QueryCoverage=32%, HitCoverage=8%, E-value=2e-29, Identity=77%"; Hit description =Putative uncharacterized protein
MEIKELKAALETCFVPRQRLPKFDLHLQVAATIKASNGAPGVHQQQKRLLSVLVAPKVAGTSNVVSLKLMGGALIGRRYALSAAAVDSTDPPAEKHEYQAEVNRLMDLIVHSLYSNKEVFHRELVRCVVTDSVALLGLWKNMKICWGQLGMTLVKPLGCYSFVFYSGMTKAPPDDSPHPPLAEAGAATPSRSISSGFKQLDGRVKVLQIVGVAPPGADLVAGGVAGEDPKAETGGAELALQCRDAGQDMPECEFSALPFFTHLGNSRLLLVV

SEQ ID NO: 72809 - protein, 77 aa, Zea mays
  Coding DNA Sequence Number=SeqID_29434
MAHSDAEGTLRRGSTGEYAGQGEEDGAVPNFPVRRGDGDEETAVKDGGEGTAGVVCGEDDEAADRWDRSASGSGRII

SEQ ID NO: 72810 - protein, 448 aa, Zea mays
  Coding DNA Sequence Number=SeqID_29435
  Homolog annotation: Hit_ID=A2ZLH9; Match level="QueryCoverage=24%, HitCoverage=15%, E-value=2e-22, Identity=54%"; Hit description =Putative uncharacterized protein
  Subcellular localization annotation: CTP_CleavageSite=25; ConfidenceScore=5.35e-01
MGTTSHAGSPTAPSRALRLRPVAPRCTSPGGAARLPMLSSLDLSVCVGLDDASLAATLPEEPPLSVRQVRLTRASCVGWCGLEALMVVCPRLEAVDLSHCIAADDREMTALTTAAGLMELIIASASPMVGLENVVVRCPERQRLNHKCDIAFLTNRATAYLHMGKVSPGSCSHSPFPHEATNHGALLLSTTLSFNLWPHCHQQRCRPTTSTDIGKDDQLGTSSRLRPSTPCVGSPTVTLTLTFDLEDSDFVAVHLPMPFSVHGAVVVKPCNSFVGFSRTIKEAKNIILSSTSYHRCRAKKWACYNLLKEHMDIQVLYHDDGVKDSPSTNGSKEQQGRRPALDCKRARFAMKDTGSHGGVPIRRRPDVTHALASHGAARRPAEGMARRSRGSGSVTDAASKADAAAMRMVSRRGAVRLVLVSATAWAMLGLVALAFHLRPCSSRVAFLS

SEQ ID NO: 72811 - protein, 174 aa, Zea mays
  Coding DNA Sequence Number=SeqID_29436
MAGSGCRLRGGPLGVELLPQPPHDVLCGLLLLTQPLRRQLLGEGAIFRGSSAVLRPARARGARDARGGGGGAGATTVSMSATRLDGRDARMNTSCWKAAHRRGHPPRKGGGGDDDDKQEELLGLGLGLTDPGCGGAGEHRAHDEVRGGEGDLGRGEVEERLRAGEATRGGRISR

SEQ ID NO: 72812 - protein, 75 aa, Zea mays
  Coding DNA Sequence Number=SeqID_29437
  Gene Ontology: Mol. function=protein binding
  Homolog annotation: Hit_ID=Q2R1Z8; Match level="QueryCoverage=80%, HitCoverage=6%, E-value=3e-18, Identity=75%"; Hit description=ETO1 -like protein 1, putative, expressed
MAGQAVRRILQPVWEKLSKFSGHAAGGSSIESLMKMSEPAVLSHFKPADYINILAQIHKELECCPPDDKTSLYLL

SEQ ID NO: 72813 - protein, 180 aa, Zea mays
  Coding DNA Sequence Number=SeqID_29438
MASVVCLTGLRLSWLSLVAPSSRCTYHGGGQIRTSPSLVPLESTQILAIQGPQITPNSQENAGNQTPAPATGNRRGVEERAWTGEHRTQDEVRGGEGDLGRGEVEETAGWGGDEGRADFTVTCADFSATTFAGEAGARCEGGRREHARASRGRGGRSRGEVVDALLTLLKSSRAKIILAV

SEQ ID NO: 72814 - protein, 408 aa, Zea mays
  Coding DNA Sequence Number=SeqID_29439
MASGRTPLQPCPRPRRRTRGEDKYKELEARSADGGGDPVGDEDFSSRIHPGTDDRSRQPIGRSPLGSSRTSGAPTSARRRRTGGGTGSQASEPNALKLTTPVVDQPRVVEVRPSRWASERPLPRILKERLTHEPAREVELRLSPASAPTRMMNILEAEGGTKIAARLASPHLGAGEGGKAQCIREREDMVTFQGGHPPFKGNSPYLRPQPSRAESSPTRSKVLPLWRGGWVPRVMQAGPGQKKPNRRTWCMQLPSGYKHSSTFAQTSGPTRHATGAPVATCKQLHRHSHHYHASSTAEPVPRLEATLRMTQQCQPGATVNTAKNGPAVMAVAGEQEQRSRRQPSLRPIQGQRENPLSRREDGTPVFRSSNGSRTRNGRLANHSPRRINSAAGQAAPQAGEASDASPSP

SEQ ID NO: 72815 - protein, 564 aa, Zea mays
  Coding DNA Sequence Number=SeqID_29440
  Gene Ontology: Mol. function=kinase activity; Cellular component =ornithine carbamoyltransferase complex; Biological process=amino acid metabolic process
  Homolog annotation: Hit_ID=Q6QP54; Match level="QueryCoverage=17%, HitCoverage=36%, E-value=1e-25, Identity=63%"; Hit description =Putative kinase
MPYVPPRWGAGAVDSLDSRRGAASCLALVAPPPPPSAGEGTGRARMLFFHHAGKTSSIPPPAGGLSAAIVAVARRGKEYHVVAVVEGHELNTPETEYRPGLERLLETAHLKLDGKLFVNTQQAPTWRANCRRFEPGGSLDRRVNYRRVPQPRWVGARRSAKGGRSRRETGVRGGIPRPSCLSRAQVGRKERIQPESAWGRVMMAPPVDVVGQCPSLGEVEAPPRLRSSLSSKVEVESEPPGRTRRRPSADARAESEPWGRAKRSSSSFGAEPESEPWGRAKWSSSSSGAELKSEPWGRAKRSSSSSGAEPESEPWGRAERSSSSSGAEPESEPWGRAKRSSLSSGAEPESEPWGRAERSSSSSGAEPESEPWGRAKRSFPWRLGPDLAAVSLTLSSGSAVGAAQAALSPCQTSQWSGEATFALNPPAIWSVGVAIWPRLLLGEDWASGEPKLCADGGYQLRFRSLEENQFRRPRPDLHGGRLTEILEPLPEPRETSSAPAREEEHRAAGSPSTRPRWTTIRMDARHLTGAVANQQITNAAPLPSSLNQYQLEPPPVDSDGNEPE

SEQ ID NO: 72816 - protein, 417 aa, Zea mays
  Coding DNA Sequence Number=SeqID_29441
  Gene Ontology: Mol. function=nucleic acid binding; Cellular component= ribonucleoprotein complex; Biological process=regulation of transcription, DNA-dependent
  Homolog annotation: Hit_ID=A3BFI4; Match level="QueryCoverage=20%, HitCoverage=24%, E-value=1e-35, Identity=87%"; Hit description =Putative uncharacterized protein
  Pfam annotation: Domain name=RRM_1; Domain location=75-146; Score =85.2; E_value=2.2e-22; Accession=PF00076.13; Description=RNA recognition motif. (a.k.a. RRM, RBD,
  Subcellular localization annotation: CTP_CleavageSite=45; ConfidenceScore=5.16e-01
MGYPVKSLKTVHINKVVLKVPFIQQGAPKREARSRSRSQERFSVYSFHLSAKAKCALKCFLHMWEEDAVNRGNTLYVTGLSSRVTERDVKDYFSKHGRVVGCHVVLEPHTRVSRGFAFVSMDTVEEAERCIKYLNGSVMEGRNITVEKKILCKLCPAVKMLSSPIPALAHTARSVDSPKVTPWSPKDTNSWKLSWYGSSIFSSVDAKSFYNILLKPFSHRYERRERGRFHRGYGGGRDEYYGNGGGGYGYRRSPPPMYSSYRESRDYYPSYKDSRDYPPYRDGRDYSPPHRDPRDYYESRGGRGYSPPPYGGGNVEVFSPPVAAAAMAAYGSRSSGDMTHCAACCVMDARGSSGRLLRRLLVCALPFPEKGTLANADRAERRGHWAAAAELNCNSGLSGWAAVACASLCVSARFSSP

SEQ ID NO: 72817 - protein, 115 aa, Zea mays
  Coding DNA Sequence Number=SeqID_29442
MGATGQSAAGTDMAVGVTEGGLTAEPRCCHVAYYARHKPMDGTRRDASRLRAPSLWIRRAPIHSTNRRRAQSTIRGPRSYSPLLPHYSYGNCPSMQHGLRTSRLPLITHALLYQH

SEQ ID NO: 72818 - protein, 95 aa, Zea mays
  Coding DNA Sequence Number=SeqID_29443
MARLVQGDRGARRQPGRRASNGETTGQWRPAVIASLAPVTGARKALTGGARLPGRERSRGRGARADGWGRGVSGGNLALEIQTGLEKRHLRSWDT

SEQ ID NO: 72819 - protein, 334 aa, Zea mays
  Coding DNA Sequence Number=SeqID_29444
MEVRCQTRFCQNEDAFPKLLRACTVRLGIRSQPEYDGREFVEHGIEKCVVTVYIGSSPHHVEWSVTAAGHRFKDTCQVIARKALRALCQIYEEEVADTPLRFFPPFQRDRPVWMARMRALEGKQLLEDDPTVVHLTAYLLTLDAQYDFLARHHRQMIARAEDAEKRNRKLHVDLTTAQARATALESREVIAVEALKQAKDEHVQKLMEAYLVTHNQRHPVSTRGENKAWELPEGAIVLERIPVFPQAMDKQEQPESSQDPPPELCESLTMKKIPAPSREIKEAASTPPALPPSEELQEPVALEEEFDPVLPSQSPPEEVINISSLLTHPGDISD

SEQ ID NO: 72820 - protein, 142 aa, Zea mays
  Coding DNA Sequence Number=SeqID_29445
MVLAVVVLLGVVAVLVVVLLLQPRVSYVAVWAGWRCSAPTRSACPPGASLPLAYVARAQGAPLGRRRASARHGRPALRDGRGCRFRGGMGEARDANGKVAGIHSGVDQWDAPWACPAPLFSGPNGHRAPLQMHLQVPISCFF

SEQ ID NO: 72821 - protein, 72 aa, Zea mays
  Coding DNA Sequence Number=SeqID_29446
MKSHITTELEAKLGINMSLVLSTQKSRDKYVDTYLAPLDCRWIQNKVLGMSALSSLIGSLINAIEAEPIIAK

SEQ ID NO: 72822 - protein, 328 aa, Zea mays
  Coding DNA Sequence Number=SeqID_29447
MKLWKETSRSSKTTTSSRRGLAATPSRLPVKAAVIYVSFSHFDLLWLDLDTLHESPSSPSYPPALLSVRFAVPWPDSPATWRDCTTACMRSRNVDDSSSHDTDFSANHEPEGWVARPITRDAARGCHFHDALDTLLRRALNRHTWSIEYRCVVYQHSRGVYPDRWEATCLVRRPENSLQGAEACSEHYSISERDSAEAAMQDAARRALSHYCSVFGGVADGLDLKYYPRRPSGSTGGVIVSPVGEGNPRLSSTVNLAAVLNTELDHALDELSRARAEIALLRAERAERRHLNGGSPAPVGTQHPYRSPRRGHQSYGNPDCKTKITLEP

SEQ ID NO: 72823 - protein, 83 aa, Zea mays
  Coding DNA Sequence Number=SeqID_29448
MPGGFVGQRARCLVAATLVKILPSVFRSGSKEAHYRRARRGPKEAHYRRVRWFALQARAAVHFFRTRSSAHNLYDLWTRVPVS

SEQ ID NO: 72824 - protein, 166 aa, Zea mays
  Coding DNA Sequence Number=SeqID_29449
MTAIAAKSSQGPPYTDHSPTALAPFRYQDDLQGIPHTSEGGNTALLNAGKKLNLSREHPRTNSIRYKTLVRAIANDTTQHQRHNLHRDQAWRPLAFLVAMATDVAEECGWGKGVPESQLYNLEARIPPTSRFRSSAQNMAESHAPSAWLLRLLSAVLAVSVGGRRR

SEQ ID NO: 72825 - protein, 166 aa, Zea mays
  Coding DNA Sequence Number=SeqID_29450
MTAIAAKSSQGPPYTDHSPTALAPFGYQDDLQGIPHTSEGGNTALLNAGKKLSLPREHPRTNSIRYKTPVRAIANDTTQHQRHNLHRDQAWRPLAFLVAMATDVAEECGWGRGVLESHLYNLEARIPPTSRFRSSAQNMAESHAPSAWLLRLLSAVLAVSVGGRRR

SEQ ID NO: 72826 - protein, 37 aa, Zea mays
  Coding DNA Sequence Number=SeqID_29451
  Subcellular localization annotation: CTP_CleavageSite=7; ConfidenceScore=5.00e-01
MGAVPGRSSMANSTFRSGGMPGGLTRSPLPLLVGTST

SEQ ID NO: 72827 - protein, 149 aa, Zea mays
  Coding DNA Sequence Number=SeqID_29452
  Subcellular localization annotation: CTP_CleavageSite=45; ConfidenceScore=5.13e-01
MNKNPGNRNAITNGTPVPPPQVRITPLRGGRPAEQRKADERRTVTCSSSGDDDDFRSEGPNSGNADLRVDAAARRPPPVPKFVRQGWAEGRRVGGQSVAGPGYLAGRRTSSSCSGGCQYRERLRSHSRPRARHAAAASATDNTRSSPHH

SEQ ID NO: 72828 - protein, 58 aa, Zea mays
  Coding DNA Sequence Number=SeqID_29453
MGSRHSACSAEAECRGSFVLLFVSHSPVGRGCPHCNRCSGEGEAVEGDFQEFQDYDEF

SEQ ID NO: 72829 - protein, 66 aa, Zea mays
  Coding DNA Sequence Number=SeqID_29454
MGNMTCGHRVQHLQSVKLMVNTRKGGRIDLPANPFNRRVLRQQQQQQAEMNPLNSPPARTDPIVVA

SEQ ID NO: 72830 - protein, 259 aa, Zea mays
  Coding DNA Sequence Number=SeqID_29455
  Gene Ontology: Mol. function=kinase activity
  Homolog annotation: Hit_ID=Q6QP54; Match level="QueryCoverage=51%, HitCoverage=47%, E-value=3e-20, Identity=50%"; Hit description =Putative kinase
MGVREVEIPRPSCSSRAQVGRKERIQVYNGGVAECYVSSGGRASALSTCQCGSRRDLGTLLLRATVVTGLAGRHHCLSGGASQMGHRSCCLRPESARGRVMMALPVDVAGLCPRSVGRRGGSSEAEVESVFHGRGRARAPGSGEAEFVRQRPGRSPSPGVGAKRSSSSSGAEPESEPWVGRSGIRRLPGPIPESEPRVGRSGVRRLPGPSPSPSPGLGGTEFAVFRGPSLSPSPWVVWIGISPSSGVYPEFEPWVGRER

SEQ ID NO: 72831 - protein, 115 aa, Zea mays
  Coding DNA Sequence Number=SeqID_29456
MSPRTARVKPAAAVERENQRHSGQLRWWRSFFRVRRKSPWHYWGEKYSRFVVNSSPEPITTAKPLCAVDHISPTLNHAMFNFGLGGSGWPDCALAGELFATGAELWRMGALGFGD

SEQ ID NO: 72832 - protein, 53 aa, Zea mays
  Coding DNA Sequence Number=SeqID_29457
MVGTSAVTARRRPGSVEHCMLQDMVYGVTWPTTLPPGWTVEWDAAPAGEEQEK

SEQ ID NO: 72833 - protein, 172 aa, Zea mays
  Coding DNA Sequence Number=SeqID_29458
MEPGGGTAVGAVESLLTSSCFRKGAESRRRHRVCGAPSLPIWRSEPDGTPVLSPVARVSSGLGDVEAPPRPRSSLSSVVEVESEPLVQARRRPSAEARAESEPWGRAERSSSSSGAEPKSEPWVGRSGVRRLPGLSPSPSPGSGGAEFVVFRDLARVRALGRAERSSPSSGT

SEQ ID NO: 72834 - protein, 136 aa, Zea mays
  Coding DNA Sequence Number=SeqID_29459
MAIAALALCIAARPEVGRGGGSSEVEAESGPGGRARRRPSSEVEAESEPWGQARRSPSSEVEAESEPWGRARRSPSSEVEVESEPWGQARRSFLWRPRLDLAAVTLTLSSGTAVGAGQAESSLCPGTGSGCRLEGG

SEQ ID NO: 72835 - protein, 88 aa, Zea mays
  Coding DNA Sequence Number=SeqID_29460
  Subcellular localization annotation: CTP_CleavageSite=38; ConfidenceScore=5.40e-01
MAKTPRQPRGPYCWHRRGTTSVVTSSRLRPPSMTAAPSPAMVVGLSGQGADGMDAFVKYPGVKFEAVVATRLVEISGEHRWTHNVLLR

SEQ ID NO: 72836 - protein, 119 aa, Zea mays
  Coding DNA Sequence Number=SeqID_29461
MVILLVRGHLVVANYDDSRVMLVCVDEDKAASVPTTGSTISVQSTGDASPEPTVTRPQRTIRCAPDTIRYAKGTVAEMVGFAKQGKKSCIVHVRCCTGLSGAPMDRRQELPTKWSSNGS

SEQ ID NO: 72837 - protein, 440 aa, Zea mays
  Coding DNA Sequence Number=SeqID_29462
  Pfam annotation: Domain name=DUF1502; Domain location=86-115; Score =7.7; E_value=0.089; Accession=PF07397.2; Description=Repeat of unknown function (DUF1502)
MGTEHGVSGELQAGWPLRVREPFEGRITGALSSHRERGFSCCPRTGLAPLGRALGRLESRYWFRNRKGAVVAQVAVQLLACSIWRAGCVTRGPGPPCWRVGSRRSASTLGVIACRLHGCPPLPPVGLGKSGGSLVTAGRLCAPRAAVWLLLLRAGLHDMRDPAPAPQGRALERVGEDSACDVWGHTPAAPLHRRSPKMVTSSLMVGESEPGCGLSPSLSLKDFHHQGWGGDCSVPGFRTRVASEPLAAPASATAAGRSSSAGEIAKAGHGPTSNSTAFCPSLPYEFGHGRGPPGSSIRPEVSAAAVRPPGAEVVVVATAGAGDGAPFVGLLLLRRPTPIEWGSGLSVSGTDAGVDQPRPRTGLAPLEDGWPRPLGDVCASESCFSRKVMSEKVMSEPKHQVAHLEVSGPDPSGVVASQGLLALVLGEPYSRSVGKMASAP

SEQ ID NO: 72838 - protein, 899 aa, Zea mays
  Coding DNA Sequence Number=SeqID_29463
  Pfam annotation: Domain name=MAP7; Domain location=464-608; Score= -83.7; E_value=0.092; Accession=PF05672.2; Description=MAP7 (E-MAP -115) family
MEVVELVPCARNKWGNWYEFWFYVAEGTVEDHPGLPVAEMCSHYYSAYPQFEVAEEDADEGALWCAAGLSSRRDLVEVFVAYGVWPLAHGWALGEVCPRQMPSRGGMLVRSPAFALDLHSRDPAAFVHEAEDGAVRIVGRYVPKTEGQRSWDIRGSNDRLNRVFELNRLPYGSYLGQDDVDRRGKKPTAEIGDDPAPAAAPSSKKRKLGIATGGLGVSNGFARELMRTCVAPGRRMSSPELRESSARMLKVTGGWWPKNVPIPHAAGEDFFTSRMVRDWRVFPYGRNIAAVVSAVMDKDRQGAAQKRQAVVRLPEARPKRSRGTAKAAAPGGSQPTLAAKSAAPGSSRVPEAVKAASTGGTKPAPAVAAKARELPPPGKRVADFATDISVEDYLVGSGEGQLVVVPPAVATAAAAVVPRARGSAVSAGGEIPALTAVKDEAGGVSRRLKEALSQAADFTDRVASGALTAVVSTEVKRLRAQHADAVREKSATDSKCRKLAEKVAALEGERTDLRRQLAEERREANEAFAKAQSAQVEANLAWVEGSLARQRAEEWEERFNALQTRVERAEASTRTKAERTRKQLMDSYHEMGARTADFEVPEQEPGLRCLEWLQKELLALPAIVEGFMSYASLVTCEGAMNALSREGCRHYEVFDQSDEDFEREIYKVEDPVVKESAGALFDRMWGPHGREVVRERFDTARGQAARNEKVEDFGALNSAQPDSESNPVAAVSEVGPAPPPETVEGAPDAPAATATGGGSSPTAAPRAEDPMKMAAESAAEDPATAGSSQVQDFGPAHATATANFLAASTVDDGNESDESVSKFSDFGDSGSSVEWTEESSDEDLDYFAALDVAAVEASPRAVDAEVVPGPRLAGRNCCPCRPLRVWVRGSYEVFLRVRS

SEQ ID NO: 72839 - protein, 154 aa, Zea mays
  Coding DNA Sequence Number=SeqID_29464
MQAACNCTTGTHPFDFDASSMEAQAHTSCNRRAGYYVRKTAPPLAPVPRLLDCGTSAATRGNPVHGPTVPTKHISHRDRERGYSERDPSPRRKRAPSPPTDQRGSGAALANPAPAKPLTASTYQPENSEPDHAPGLRSDRMREQPDRPRHHERH

SEQ ID NO: 72840 - protein, 390 aa, Zea mays
  Coding DNA Sequence Number=SeqID_29465
MHCALPPSEPPNGERPHCFRLAAVGGAQLRGGWHLSSIAWLQGFSSGSPAASPHQWSRRRVTTGSMVGRSKSGCSLCPALNFKDLHHPCWGRGRAKPELYLLYGPAGHIFLQHSGERALTGLAEGADFFNAGPIGRKRRQLQHAWFAGSAGSGAASGATSHRWAECGYLPAVRAAVASRAPGDRPRRCMPLGRRSCSWVVPPSLRHDASTRRSVLARPGGLEWGSACGQVAAVVGAEVVAAGEGFSADETVSATRGPTSGSLALITCPCPSSGDTGEGLVAAASALSSSLLLFSRPKRRSLSLLMERVAASQLEFVVPQALRCGGCSYRREWNRSSICNGTLSVGVCSLWLSGPEHPGGDPPTVSLSEAGSDSAEVGVNAEGATAPPIDI

SEQ ID NO: 72841 - protein, 223 aa, Zea mays
  Coding DNA Sequence Number=SeqID_29466
MSGREEPEPYVHADVAVGEAEPWVRVRRRPSSEVEVESEPWGRARQRPPSEVEVESEPWGRARRRPSSKVEVESEPWGRARRRQSSEVEAGAEPRGRARRSFLWRLRLDSAAVSLTLVGGTAVGAGQAALFSCQAILALNAPAIRSVGEAIWPRLLHCEACPSWASGESKAFAACADGDYQPSLGVLGPGCMVRFRVLGLGAEHGVSSELLMGDPSGRPCLVR

SEQ ID NO: 72842 - protein, 741 aa, Zea mays
  Coding DNA Sequence Number=SeqID_29467
MPSSSSSADATPPAAASSEETLSNVMVEELRAGDSVEFGVSRMTSARIEDMQRLGYFGGGVAHAPGTEEVPEPEGELVVFEAFFVAGLRLPAHRVFELNQLPYDGYPGQDEADRRGKKPAVETGGDPALVAAASSKKRKLGTAMGRLGVSDSFARELMRTCAAPGERMSSPELRESSARMLRVTGGCWPKDIPIPCAAEEDCLTSRMVHRWRVFPYGRNIGHVVWAVMDKDRQGAARKRQATVRVHEARPKRQRGTAKAEASGGGKPPLPAKVGASAPGKAPEVTVGAGGPKLTKVVPSVSGVAEAAKAARTLPPPGKRVADFGTEINVEDYLGGSDEGPLALVMPGAAIATAAPAPKAGGEALGAGGEVSALALVRDEAGVATRRLKGATEALSRATEALSQVADFTSRTASGALTAALSAEVERLRTQHADAVREKSASDSKCRKLAEKVAALEKEKADLRRQLAGERREANEAIAKEQAAQAEARLARAEGNIAKELAGELQRRLTALESRAEGAEAAMRAEAERTRTQLMTAYRELGVRTGDFEVPEREVGLRCLEWVQEELQELPTVLAGLMSFTSLVTCEAAMNALSREGCRHFEALDQADEDFGRDIFEVEDPVVKESAGPSMTGCGVHTVAERGERVDDFGALNSALPDPETTPAEAATGVAPGPTPETAEDAPGAPAPAAAGEDLPPKVAEGAPDAPAAAVPSAEDPAEVGAEAAAEASAEAPAAAGPSQVA

SEQ ID NO: 72843 - protein, 100 aa, Zea mays
  Coding DNA Sequence Number=SeqID_29468
MGHAGAGVGRALASSVRVEHVESLLLSKALKMQQNDEDRKNEVIVKGLEDKIKKLEDSLKEKDELLCSAEGSLDEVQTHNKKLGKELVDAHAFLEETSSR

SEQ ID NO: 72844 - protein, 60 aa, Zea mays
  Coding DNA Sequence Number=SeqID_29469
  Homolog annotation: Hit_ID=Q8SA85; Match level="QueryCoverage=51%, HitCoverage=2%, E-value=5e-07, Identity=87%"; Hit description=Prpol
YPWRLPVGVDEGGGIGTRSIGMRSHQVGVRSSIQSQALADFIADWTLGAQDEESIKDNEA

SEQ ID NO: 72845 - protein, 332 aa, Zea mays
  Coding DNA Sequence Number=SeqID_29470
  Gene Ontology: Mol. function=kinase activity; Cellular component =nucleus; Biological process=cell division
  Homolog annotation: Hit_ID=Q75I54; Match level="QueryCoverage=100%, HitCoverage=100%, E-value=9e-94, Identity=54%"; Hit description =Cyclin-A3-1
  Pfam annotation: Domain name=Cyclin_N; Domain location=104-233; Score= 228.3; E_value=1.7e-65; Accession=PF00134.14; Description=Cyclin, N -terminal domain
  Pfam annotation: Domain name=DUF1610; Domain location=285-305; Score =11.4; E_value=0.093; Accession=PF07754.2; Description=Domain of unknown function (DUF1610)
  Pfam module annotation: Pfam domain module=Cyclin_N::DUF1610; Domain location=104-233::285-305
MENSAAAAAERPRLTRAAAKRSAVVTAVAVAAKRKRVALSQLPTLPNAVLGAHDDDDDKPVRKQRLLPAAKPKPKPKAAPAPAAPAAADDTDDDIQLCKPYASDIYSYLRSMESQAKRRLAVDYIAAVQIDVTPNMRGILIDWLVEVAEEYKLVSDTLYLTVSYIDRFLSAKVLNRQKLQLLGVSAMLIASKYEEISPPNVEDFCYITDNTYTKQEVVKMESDILNVLKFEVGSPTAKTFLRMFIRSAQEDNKKSKKVQTLTGYKPSELKDCVAAIHNLQLNRTCQSMVAIREKYRQHRCTNCGKIFEQFKGVSALLPPVEIPASYFNTLKE

SEQ ID NO: 72846 - protein, 95 aa, Zea mays
  Coding DNA Sequence Number=SeqID_29471
MGSEPFTDQGLVGWPLGRVQQPPQTIESGMPMVMSVHGQGSGYNPEIIPDRRSFLEKQAKRGPSGPLRRTVRDTRMTLGQNQCKNPSLHYESSEG

SEQ ID NO: 72847 - protein, 39 aa, Zea mays
  Coding DNA Sequence Number=SeqID_29472
MGLGVCGSLCRGWIAPWEECGKGVEADLQEFQDFDEFKD

SEQ ID NO: 72848 - protein, 282 aa, Zea mays
  Coding DNA Sequence Number=SeqID_29473
MSFCFVRSLLCLCVWCCCNCSLVCISTPLLTPDLIVNNCVRRERLQFVEIPHSWDIDIRKTLWCSHYFKIPLQTSVRYEGELFYVKNLADNATCFIGQELVPTDDWNHGAEPGLNGKVEPILVALKTLKEKSLTGVRLGIDPLAPSLPQFHRSLRGLLLKRRRVRASRALLNRERESVFFIPRRKRLPQFSVERELRCWESRGGSLSGRVAIFCSFVDRAREANVYVPHKSVRDATLVVRATPLSPQDFGLQPQGSMPPLAHKCVPSGGASSSFPVAAVLSS

SEQ ID NO: 72849 - protein, 28 aa, Zea mays
  Coding DNA Sequence Number=SeqID_29474
MAGGIELAGAKEKWLAGEGCVQGNLAQL

SEQ ID NO: 72850 - protein, 131 aa, Zea mays
  Coding DNA Sequence Number=SeqID_29475
MAGGIELAGAKEKWLAGEEKERTPRRINADVVSAFTYDTTNEALVHELEQERAKTVDDLFDIATKFAVGEDTVGAIFCKGKSLRNAGEPNGERRDRWEHPDRRQRNYRPKSLSWIGRPGRHQRTTTTISKS

SEQ ID NO: 72851 - protein, 180 aa, Zea mays
  Coding DNA Sequence Number=SeqID_29476
  Gene Ontology: Mol. function=kinase activity; Cellular component =ornithine carbamoyltransferase complex; Biological process=amino acid metabolic process
  Homolog annotation: Hit_ID=Q6QP54; Match level="QueryCoverage=34%, HitCoverage=21%, E-value=2e-10, Identity=61%"; Hit description =Putative kinase
MAPPVDVVGPWCPRLSDVEAPPRSRPSLSSVAEVESEPLGRARRRPSAEARAESEPWGRAKRSSSSSGAEPEPESEPWGRAKRSSSSSGAEPESEPWGRAKRSSSSSGAKPESEPWGRAKRSFLWRLRSGLADVSLTLSSGTAVGAAQAALSSCETGQWSGEVTALCADGGYQLRIRSLE

SEQ ID NO: 72852 - protein, 163 aa, Zea mays
  Coding DNA Sequence Number=SeqID_29477
MGRSKPGCDLGPALSFKDVHHPRWGGGRAEPELYLPRGFVGQPLLQHSRERALTGPARGTDFDNAGLVDGGRRQLQRVGLAGLAPGAPSHCESGCRAARTGGPPKTSRAARAAFVFWGCPAFAPVQRLRVESGDPPAASPSEARSDLAEDVVDAEGAAAPFNC

SEQ ID NO: 72853 - protein, 96 aa, Zea mays
  Coding DNA Sequence Number=SeqID_29478
MTCKWKRRGYVQGPDRKLEISDNGHRVNTKVRSRDEKGGGNKKQKHNKGRDYKFASQRRGYDQEKEGKHRKIMSMKDFKEMSIPIPRDKKIGPKDS

SEQ ID NO: 72854 - protein, 102 aa, Zea mays
  Coding DNA Sequence Number=SeqID_29479
MALTTLIFHKLFVLNYLRLISCMKPSLVLCDRAQIINLVVLQIRVLKLGITFMVMTYQDRELADSHMQHCVDKETKEFEDELENMNLDEKVVAPRPGTSRIR

SEQ ID NO: 72855 - protein, 134 aa, Zea mays
  Coding DNA Sequence Number=SeqID_29480
  Gene Ontology: Biological process=phosphatidylserine biosynthetic process
  Homolog annotation: Hit_ID=A2Y796; Match level="QueryCoverage=38%, HitCoverage=15%, E-value=1e-15, Identity=70%"; Hit description =Putative uncharacterized protein
  Pfam annotation: Domain name=PSS; Domain location=20-132; Score= -221.4; E_value=0.088; Accession=PF03034.6; Description=Phosphatidyl serine synthase
MNNKDILTHKFDEQGSCRPFSRFLPDDSFLQFFDFTTNSKVQELEFERNLCRLAVWSYSISLACRSTKFLSQFTPTQWDKDQWYPFMGPLRSIQVLFICVVFVIVEINTFFLKLTSLLPSSSKGLSRYCGSVST

SEQ ID NO: 72856 - protein, 81 aa, Zea mays
  Coding DNA Sequence Number=SeqID_29481
MEWAAAVGMAEWERTEEERMRDGGRLAERGLRWIAGSLENACGVVGCGDVARGTGVILTDIRALALGEPYSKSVGKMASAP

SEQ ID NO: 72857 - protein, 185 aa, Zea mays
  Coding DNA Sequence Number=SeqID_29482
  Subcellular localization annotation: CTP_CleavageSite=18; ConfidenceScore=5.31e-01
MKLWKETSRSSKTTTSSRCGLAATPSRLPVKAALSTFLFRTLIYCKNYMDVSDKGLPWTTSVLSSSEVPNSIYETIILESSSRVTTSLVASIFTVVLVSYHAHTLIQFEWAIFSSEIPCHPNQKVYGNIRVRDLAMKQQDPKFNQLERKHIGQIDPLSKQDLMVTAITKTMRCVKRNTCSTLDQP

SEQ ID NO: 72858 - protein, 55 aa, Zea mays
  Coding DNA Sequence Number=SeqID_29483
  Subcellular localization annotation: CTP_CleavageSite=29; ConfidenceScore=5.13e-01
MSPCSTLWQAIVVRALAPAMPRLVRSGSYAMMVPWSATRHPSTAGPSVETLSLSH

SEQ ID NO: 72859 - protein, 81 aa, Zea mays
  Coding DNA Sequence Number=SeqID_29484
MGKNDSQGIAAEVWTYIWAVERSGLEGSDESKYSSGEEDSSDSSEEGSGGDDGDDGGDGGGGGDGGRGSDGGSKGGNKASG

SEQ ID NO: 72860 - protein, 23 aa, Zea mays
  Coding DNA Sequence Number=SeqID_29485
MERVETKVWGSNAYWSLSYGDAT

SEQ ID NO: 72861 - protein, 150 aa, Zea mays
  Coding DNA Sequence Number=SeqID_29486
  Gene Ontology: Mol. function=carboxyl- or carbamoyltransferase activity; Cellular component=ornithine carbamoyltransferase complex; Biological process=amino acid metabolic process
  Homolog annotation: Hit_ID=Q8SA97; Match level="QueryCoverage=92%, HitCoverage=21%, E-value=2e-26, Identity=52%"; Hit description =Ornithine carbamoyltransferase
MAPPVDVTGLRPRLGDVEAPPKPRSNLSSVAEVESEPLPESEPWGRAKRSSSSSGAVPESEPWGRAKRSSSSSGAQPESEPWGRAKRSLSSSGAEPESEPWVGRSEVRRLPGLSPSPSPGSGGAEFAVFRDLARVRALGRAERSSPSSGT

SEQ ID NO: 72862 - protein, 719 aa, Zea mays
  Coding DNA Sequence Number=SeqID_29487
  Homolog annotation: Hit_ID=Q6JAD6; Match level="QueryCoverage=96%, HitCoverage=96%, E-value=0.0, Identity=69%"; Hit description =Putative uncharacterized protein
MPRTKNVSAPGGGDDEDPRRPFRQVKGKTVYLEQQEGRKKRRTDRAARAAAAAAAAAQAELGDQPQTPSDQIAYRVRRLASRPRSSSHTTASTPPPTLPAPVTPIAPSTTTAIPATSTTPASTAPPPAPATAPPVPPPRFRERDETEVQPLAADPILFDLQRATAARVRRFRYVPVESWLPAQRDSAVVDLFSTHIQESFFRAQMSAQIALRVHRLLDLPAFLLAAGADSEAHLTYLPGLLTLLTTSGRYVEEWVRVFYASVWIDPDHHWMRFRFEREDVTITASQIRQLFGFPESTTRLHSLCYGTSDPPRRPHGGVAPGTAHVAALFRSPFTDGSRRSSADFTTAAKYLYELIRRTLLPRMGYREATTHIQLWLLGALVSHSEFDVVDFLICEIEDTVLDGIRARRQLPYAHYLCHIFAQLIQPPRFQGTLEASRLVFGSYRPAPETPVPASAPETPVPASAPVFASQAEDAALHQFDTQATAVDDDDDDDDDFGVPPPPPMPPRSHDHEAGSSSAAPATPQAMDPALASILQSITQQQAHLAAEQARLSERMLSMFQNMQDRQDALQQQLLQDRAESRAFMALMLQQSGVSVPPVQSAPPPPLHAPVVPSILSGPPVGTSPLRPVTLAFTSPVLSSVCPQPPVPPASAVTTTAVAVSVTTSVPAAPAARPQSESVPAPASTADPGSETDSDPPPAFALLPRPRPDAPPPPPPASDV

SEQ ID NO: 72863 - protein, 120 aa, Zea mays
  Coding DNA Sequence Number=SeqID_29488
MEKMTLAVGIRVIDYGRLEGLRSSAVNCKLSSGPRWVPDPTAVTIALCNDCRGSIFRVEMAAFPLFLSRNRLDLVRSMLASRCEEHRSRANLIIYLIAWGRGVKLRPRSENERGLAWCPE

SEQ ID NO: 72864 - protein, 369 aa, Zea mays
  Coding DNA Sequence Number=SeqID_29489
MDLANLDFRSGIVFEDSLKLCLASSVCPARPSLPSSFWLVVSFGRCIFKLNSDSVGYLLQAALGGFAAGFEAVGFHIYNSKCIDHAEFRAFFNLWNRGGPNWIHEFKKFIGEENASWLTVRGKKSLSYADIVNLPLSGANAVPILSKNKFSCGVGHPVQTRISVFNRLGSSIRNSGFQGSWFSSPQRRLGPTGLRIPSTAKIKPTPMIAPRRGASSSVIHSDLNGGVCGSGLHGRSNFQNSKFNWTRPRNLQWRPIRKRGPIGPPVGLSDACRLGSPGVDPPAFLCQFCKAKGHLKLFCHLKKSSFRFPLILFPSFESRANSVGKLKFLDHSSWFRSPAEPLIGGPPSYGCFEEFAWVVLLKKSETTPL

SEQ ID NO: 72865 - protein, 200 aa, Zea mays
  Coding DNA Sequence Number=SeqID_29490
  Subcellular localization annotation: CTP_CleavageSite=31; ConfidenceScore=5.19e-01
MNSKRLTAAYFNSSDNDPRSGRPNSSSDDLRADAAVTRSSPTSPLEGRGQAIKATKLEAWSADGTDDPVSDEDFSCCCHHLSTDGGVHLSANTAPVGAARPQSAPAGPHSRPCHENENGTIPEHEYRPHGVRRVVRPPRCGWPPSPGQRTKCYTLAGQQQFAFPGMAEGSLRGAGGCLSPPNVGGRKGLPTHAEATPHSV

SEQ ID NO: 72866 - protein, 109 aa, Zea mays
  Coding DNA Sequence Number=SeqID_29491
ALSEAEIVVRGEVESEPWGRARRRFLWRPRLDLVAVSLTLAGGTTVGAAQAALFLCQTILALNAPAIRSAGEAIWPRLLLREACPSWASGESKAGLGRGEIVSLEWTEP

SEQ ID NO: 72867 - protein, 78 aa, Zea mays
  Coding DNA Sequence Number=SeqID_29492
MQAACNCTKGAHPFDFDASSMEAQAHTSCNRRAGYCVQKTAAPLAPAPRLLDYGAGTGKGDTPKGILLREEAGPEPPY

SEQ ID NO: 72868 - protein, 397 aa, Zea mays
  Coding DNA Sequence Number=SeqID_29493
  Gene Ontology: Mol. function=nucleic acid binding; Cellular component= intracellular; Biological process=regulation of transcription
  Homolog annotation: Hit_ID=Q6YSA1; Match level="QueryCoverage=94%, HitCoverage=81%, E-value=4e-82, Identity=91%"; Hit description =Putative zinc finger protein
  Pfam annotation: Domain name=zf-C2H2; Domain location=101-123; Score =19.3; E_value=0.015; Accession=PF00096.17; Description=Zinc finger, C2H2 type
  Pfam annotation: Domain name=zf-C2H2; Domain location=128-149; Score =15.6; E_value=0.19; Accession=PF00096.17; Description=Zinc finger, C2H2 type
  Pfam annotation: Domain name=zf-C2H2; Domain location=23-45; Score =29.2; E_value=1.5e-05; Accession=PF00096.17; Description=Zinc finger, C2H2 type
  Pfam module annotation: Pfam domain module=zf-C2H2::zf-C2H2::zf-C2H2; Domain location=101-123::128-149::23-45
MAADPDAEVVSLSPRTLLESDRYVCEICGQGFQRDQNLQMHRRRHKVPWKLLKREAGEAARKRVFVCPEPSCLHHHPSHALGDLVGIKKHFRRKHSGQRQWACARCSKAYAVHSDYKAHLKTCGTRGHSCDCGRVFSRVESFIEHQDSCNAGQARAGAGVAAASAGSQQQAPPAMSLSRTASSTSPSSDIAISPVAAWPAGPAPAIPSPASTAAFHWFEQVPSPRTPPPSVHHRGGHNLELQLMPPSCSGAGGDAPPRTPAAPSQSHAAAMAMQLQLSIGVCGDAGDEVLAAAREEEAREQLRQAVAEKAAADEARAQAKRQAELAERELASAKRMRRQAQVELSRAHAVRDHALRQVNATLLQITCLGCRHKFHARPQLDAVPARWPAAAATCPPS

SEQ ID NO: 72869 - protein, 114 aa, Zea mays
  Coding DNA Sequence Number=SeqID_29494
MAVVSAATGLVRTSGTRRSMQGLESPVLARREDPKRPAGLGVSLSGLEFWALAGLPAAALRRAAIEWRAKTTLAFALRRAARCSAGTKPKPPAKTCRTVEAIGNSQQGKGHHRH

SEQ ID NO: 72870 - protein, 233 aa, Zea mays
  Coding DNA Sequence Number=SeqID_29495
  Subcellular localization annotation: CTP_CleavageSite=38; ConfidenceScore=5.41e-01
MASPCGVVGPSEVVTPSRSRLSLSPGVGRGGDRLPESRSSPSPGVGRGRDRLPESRSSPSPGVGRGGDRLPELRLSPSPGVGRGGDRRPRRGRVRALGSGEAEIPMAPEAGLGCCQPHPGGWHSSRSSAGGAVFLSGQSVEGRSDCGHFGLVDWKACVRIRCQAILALNAPVIRSTGEAIWPRLLLREACPSWASGESKVRPLLEETLGRGVNLPWSSVPARGWARARRDRVP

SEQ ID NO: 72871 - protein, 163 aa, Zea mays
  Coding DNA Sequence Number=SeqID_29496
MAQGHISLSLARPPGSDSASTPEDGLRLARPQGSDSTSTLEDGLRLARPQGSDSTSTPEEGLHLARPPRLGLSLDLGGVTTSLGPTTPQGEAIITLPLASPGYGEQDRRPIWLAPVKQVMVAPRVLHDNGGSQPPMEARIRQHGSDSLDSCASTGAQALLRRP

SEQ ID NO: 72872 - protein, 58 aa, Zea mays
  Coding DNA Sequence Number=SeqID_29497
MDRNDVEEKDRDYRAKVQILLQKQEGGDELADLEEQTAQLEKELGVVFANRRSVYWDH

SEQ ID NO: 72873 - protein, 117 aa, Zea mays
  Coding DNA Sequence Number=SeqID_29498
MAAINCANEWNVCTQKNVNIKDWVLVNGMEVQQEKQKISELEAGRVLVPEILAHDEPIALESFIYVCADQEVVPGNSSFVRFVMGSDELNKADQAADGHDQASGGWRLLVVYSVLTD

SEQ ID NO: 72874 - protein, 218 aa, Zea mays
  Coding DNA Sequence Number=SeqID_29499
MTQWFITWFGQVQNLPTPRCGVPTDESCTQLLSSDPMISLNITVFLLLCSFPVCEESPQLGVSRPYNKNQYEAQENGPRAHFPFNDDLASHCTHLNSRVESLEQQVRELTREKASLQESLEIVEGEETNTCEAYRTLKMDYDKKLKKLAPAKKIRKKTRSQGCQTEQKEEAPPALPPIRIENSFDTEEMSLASLDDLLKEFGDTLEKEFGSTLDSTRV

SEQ ID NO: 72875 - protein, 305 aa, Zea mays
  Coding DNA Sequence Number=SeqID_29500
MAGGSLRETGGCHSPPDARGRKGQPTHAEAAPRLASSSILAWMTKILEAEGGERPQPGSLSPTIKLETNGRKERAAMQAACNRAKQLHRHLRHHRASSVAEPMPRLEATQRTTQQRQPGATVNAAESGPAVMTVAGGREQRSRRQPGSRPIQGQQESLLSWREDGAPVIRSSNGSRTRNDRPANHSPRRINSAAGQAALLAGEAGDASPSPDRERGIPRKGSFPMKEPGSEPPLLIRGSKAGPPRGSTVASDHVGPTPTTGQRLAPEGFTVASDAERGMTRGLGLGLSPGRRRTPLRPTQGSDSG

SEQ ID NO: 72876 - protein, 441 aa, Zea mays
  Coding DNA Sequence Number=SeqID_29501
  Gene Ontology: Mol. function=calmodulin binding; Cellular component =integral to membrane; Biological process=cell death
  Homolog annotation: Hit_ID=Q94CH2; Match level="QueryCoverage=100%, HitCoverage=100%, E-value=0.0, Identity=70%"; Hit description=Seven transmembrane protein Mlo3
  Pfam annotation: Domain name=Mlo; Domain location=2-434; Score=467.2; E_value=2.1e-137; Accession=PF03094.6; Description=Mlo family
MSEEATLEDTPTWIVASVCSVIVLISFVFERALHHLGKALERRRKTLYEALLKLKEELMLLGFVSLLLVVSQDLIQKICIDDSLMEHWMPCRGASATASAHYGVSSSSSSSAVGGGRRMLKGGGAAFGHCSSKGKVPLLSLHALEQVHIFIFVLAITQVVLSVATVLLGLLQMRIWMHWENTIQQEGSSAPKMIARVQKIRFIQDRCKGFCSSESMLSVTLFCNWRISDLPPNIVDGWHSYFWISLVPLALLLLIGTKLEHIINRLAYEVASKHAAGQGEGGIVVSPSDELFWFRSPRLVLVLIHFILFQNAFEFAYFFWTLAMFGANSCIMDSLGYSVSRIIICVVVQVLCSYSTLPLYAIVSHMGSSFKSAVFADDVADNLRGWADGARRRVRRSATGVDASCLGTPAAAGRGWEGAAGWRLIAGRPSRPTQQPRSISF

SEQ ID NO: 72877 - protein, 115 aa, Zea mays
  Coding DNA Sequence Number=SeqID_29502
MEFIPPNCGISPNPKEHKEEKDEQGHGEEGKADRKQHSQRGLSEYIQGSWWCALMRGGVQHGPMKLASIPKWEGFLTAGSTPYKSQAGRKRQAASAEAGGALLLLCFFRVREGNQ

SEQ ID NO: 72878 - protein, 107 aa, Zea mays
  Coding DNA Sequence Number=SeqID_29503
  Subcellular localization annotation: CTP_CleavageSite=93; ConfidenceScore=5.78e-01
MALALPSAPSGELVPKRVSPSRAWLPRPATRTTSQPPVAWSCQEASQSSPSPSPPTLAVVVFASSHRATRHWSPMSRVGSLPCLCHCCATFAYAQHVIGTLTTSFYP

SEQ ID NO: 72879 - protein, 104 aa, Zea mays
  Coding DNA Sequence Number=SeqID_29504
CNLADGEYVLVPEQGAAQEVAPGPAPEPAPEDLPATALEGKPRCGHCTTAVGVSEALYAKAPCLWHNFTGSLEDMVDGVTWPSILPPGWTVEWDPASAEEEHEE

SEQ ID NO: 72880 - protein, 123 aa, Zea mays
  Coding DNA Sequence Number=SeqID_29505
MARAHLGTKGYDHMWKNLRSKTFPSPIQPSETSVHNSVRLPERGIEACFAEEASPRSPELSTPPECVDRIAVVWPVHSPPTRTPACARGPGDSGHPRRQAAPRCDRQSLPEPTLPFAGPISPP

SEQ ID NO: 72881 - protein, 98 aa, Zea mays
  Coding DNA Sequence Number=SeqID_29506
MAPLRQILFTTADRRREEGSENNNSRVMRLQLQDCVNSKGVLFTIYRHRTQPVRNYNHTLAKDYNYDSDPYGLKSHSIFKSVRSFIFRYAIISKLYER

SEQ ID NO: 72882 - protein, 743 aa, Zea mays
  Coding DNA Sequence Number=SeqID_29507
  Gene Ontology: Mol. function=metalloexopeptidase activity; Cellular component=exocyst; Biological process=proteolysis
  Homolog annotation: Hit_ID=Q6ZIY1; Match level="QueryCoverage=87%, HitCoverage=86%, E-value=0.0, Identity=77%"; Hit description =Putative X-prolyl aminopeptidase
  Pfam annotation: Domain name=Creatinase_N; Domain location=81-219; Score=-30.7; E_value=0.0022; Accession=PF01321.9; Description =Creatinase
  Pfam annotation: Domain name=Peptidase_M24; Domain location=457-674; Score=28.6; E_value=2.4e-11; Accession=PF00557.15; Description =metallopeptidase family M24
  Pfam module annotation: Pfam domain module=Creatinase_N::Peptidase _M24; Domain location=81-219::457-674
  Subcellular localization annotation: CTP_CleavageSite=66; ConfidenceScore=5.65e-01
MAIEAARLSPSIAAAAFLASRPPLALRPFSLRRRFPLLRVLANSSGGDGRVVALSSSELRKRRGLSSSSGAADSASDGDEKLRSLRRLFARPDVAIDAYIVPSQDAHQSEFIAECFTRRAYLTGFTGSAGTAVVTKNKAALWTDGRYFLQAEKELSHHWTLMRSGNHGVPTTSEWLNDVLPSGCRVGIDPGVGSLGAGRAFACSGRYFRPKAFAWLRMQFLFSFDAAEELKDSIANKNHELVLVQGMNLVDEIWGDARPNPPKEPTRVHDIKYAGIDVPSKLSFIRSQLAENGCDAVVISMLDEVAWLLNMRGSDVPHSPVFYSYLIVEVSTATLFVDNSKVSKDVLEHLEQAGVKLKPYEAIISEVERLAEKGAKLWLDSSSVNAAIITAFKSSCDMKKKGKAGEEVGEKEASSNDRITGDPSVHNGVISAVYNVSPVALAKSVKNDAEIEGMKNSHLRDAAALAEFWCWLEEEICKSVPLTEVQIAEKLLEFRQKQDGFIETSFDTISGYGANGAIIHYRPTPESCSSVGSDNLFLLDSGAQYIDGTTDITRTVHFGEASPRQKECFTRVLQGHIALDQAVFPERTPGFVLDVLARSSLWKIGLDYRHGTGHGVGAALNVHEGPQSISYRYGNLTALQKGMIVSNEPGYYEDNSFGIRIENLLLVKELNLANSFGGISYLGFEKLTFVPIQELHLSIKKNRIDPVLRKIEPKTYTGRTTKKPAESPTNNLDNDSLTLTNPI

SEQ ID NO: 72883 - protein, 223 aa, Zea mays
  Coding DNA Sequence Number=SeqID_29508
  Gene Ontology: Mol. function=oxidoreductase activity; Cellular component=cellulose and pectin-containing cell wall; Biological process=electron transport
  Homolog annotation: Hit_ID=Q84TT2; Match level="QueryCoverage=38%, HitCoverage=20%, E-value=4e-28, Identity=65%"; Hit description =Putative cytochrome P450, 5'-partial
MATVGLRLLDFAVAESILQSCREVLQGSRAMLHTHSFGADRNASKGKFDPSKAAALGLRPGPKYCELQFGNSVQSDQFDEMLSSQAKRTLKLNSWLGEPFLYWMGSWPRVCLFDYESVRQVLFNKSGHFFKDDAHPTILAMLGKGLVLVEGTDWVRHRRVVNPAFGMDKLKDGLDDMAKTYPGRFKIYYVLNQILRCGPPPMNKAMAAHLDELNYTKEMQFQF

SEQ ID NO: 72884 - protein, 91 aa, Zea mays
  Coding DNA Sequence Number=SeqID_29509
  Subcellular localization annotation: CTP_CleavageSite=26; ConfidenceScore=5.03e-01
MSKNTRDTRFIPRFGHTTKVPYFLVEAPTKSRVSFNPNPPFADHKGQAHTIIFAQTSRLAEKSEQCKNRLNLFPPDKNRLSVRLNQYFPKR

SEQ ID NO: 72885 - protein, 81 aa, Zea mays
  Coding DNA Sequence Number=SeqID_29510
  Subcellular localization annotation: CTP_CleavageSite=40; ConfidenceScore=5.08e-01
MAEPPDAPATKSWLHLAAPRAMGTSTSVETSWLHVRASLRAMTDNQGQGPIVPMCKPNQLVATRPGLPCFAACSTGLQMGH

SEQ ID NO: 72886 - protein, 69 aa, Zea mays
  Coding DNA Sequence Number=SeqID_29511
  Subcellular localization annotation: CTP_CleavageSite=32; ConfidenceScore=5.08e-01
MAGMAGIARSTCAGGCSRRRRVCRPTHGDLVRSNGTMRVNMCDLCPKVIKCTTTFIFGPSHDHKVFMTF

SEQ ID NO: 72887 - protein, 63 aa, Zea mays
  Coding DNA Sequence Number=SeqID_29512
MRNMYLKKTRRRKKVNKSHNLESTPPSREIIRIKEALKDPVWVMVTHEELNNFNRNEVQIWIM

SEQ ID NO: 72888 - protein, 143 aa, Zea mays
  Coding DNA Sequence Number=SeqID_29513
MAHRIAWSTRGGGRPKSGEGESASPVRQCLGSSLEKLHGFTGKRSRGWGRGWGSTEGAGHNGRARGSDGGRWCLLSTANSGDLLAQAGLWVRKCKRLRPLGAFIGEGEVQTRGAHAATASPRSAGLTRRRARGSLLLPEFKRS

SEQ ID NO: 72889 - protein, 107 aa, Zea mays
  Coding DNA Sequence Number=SeqID_29514
  Gene Ontology: Mol. function=protein transporter activity; Cellular component=mitochondrial inner membrane; Biological process=protein transport
  Homolog annotation: Hit_ID=A7QZ83; Match level="QueryCoverage=98%, HitCoverage=62%, E-value=2e-12, Identity=37%"; Hit description =Chromosome undetermined scaffold_267, whole genome shotgun sequence
MGARELARDARATTPDDPMNSVVGGLASGAVLGRIQAAGTALDYAALKLAPEWHSLKEQLSEKKDWFTLPEWSPIQVLDEEALAKKKAREEKLFAQRALGKLDKEDP

SEQ ID NO: 72890 - protein, 521 aa, Zea mays
  Coding DNA Sequence Number=SeqID_29515
MDKDRQAAAQKRQAVVRLHEARPKRQRGAAKAAAPGGGKPPLAAKSGAPASSKAPEAAAGAGGSKSTKAVPPSSRVPEAAKAARVLPSSGKRVADFATDISVDDYLGGSDEGQLAIVAPAAATTAAVVVPKAKGGALSAGGEMSALAAVRDEAGAVSRRLKEVKEALSQVADFADRTASGALMAVVSVEVERLRTQHADAVREKSAADSKCRKLADKVAALEGEKTDLRRQLAGERRETNEALAKAQAAQAEANLARAEGNLARERAEQLQERLSALESRVERAEAAARAEAERTRKQLMDSYHELGARTGDFEVPDREPGLRCLEWVQEELQALPTIVEGFMSYASLVTCEGAMNALSREGCWHFEVFDQADEDFERDIFKVEDPIVKESAGAIYDRMWGPHGCEVVRERAETARAQAARGERVDDFGALNSALPDPEPVPAEAVSEAALEPPPETAEGAPDAPAAAAAGGDPPPETAEGAPDAPAAAAPRTEDPVTVAAEATAEATAEAPATAGSSHVA

SEQ ID NO: 72891 - protein, 151 aa, Zea mays
  Coding DNA Sequence Number=SeqID_29516
MVGTSAVTARRPVGVSEALYAKAIRGIDGLFPFKCGLASKAGLGHLSWNNSGSSATFPFSPKSGFRTIVNASPWPALCSKNTSGCSRFLPSSWTEGFQARIVQLVEGFGSPGLKLGVEQRRSLAIAFSAEYKFARGVLVVVHRRGLGAVKK

SEQ ID NO: 72892 - protein, 326 aa, Zea mays
  Coding DNA Sequence Number=SeqID_29517
  Gene Ontology: Mol. function=N-acetyltransferase activity; Biological process=metabolic process
  Homolog annotation: Hit_ID=A2XMU8; Match level="QueryCoverage=42%, HitCoverage=75%, E-value=4e-25, Identity=47%"; Hit description =Putative uncharacterized protein
  Pfam annotation: Domain name=Acetyltransf_1; Domain location=75-158; Score=37.0; E_value=6.9e-08; Accession=PF00583.15; Description =Acetyltransferase (GNAT) family
MEPAADGNDVHGKRRDGGQHAPVVSLRALGLADADAFMAWASDREMRHLKQPLCATREQAMAHIRDTVLGHPWFRAVCVSDSPVGQVSVWPYADEGGRRANLGYALAHDQWGWGIAVAAVRMVVGRVFDDLPGLERLEAVTDVVNVRSQRVLEKVGFHREGCCAGTSPDAAAAGPEMRTTFNSPFFKECEEALRIDPSYVRAHHRLASLHIRGPYFRALLASMWYQSSDGAPGRGGNVPGDALAKDEGVLQVRGGGGSEEADHGCELVEHSEKRKRRRRPSVRERLWTLDACRDMNRGGTVKLEEHNKTCRLLRILIYESSIAQAN

SEQ ID NO: 72893 - protein, 96 aa, Zea mays
  Coding DNA Sequence Number=SeqID_29518
  Homolog annotation: Hit_ID=Q75GC3; Match level="QueryCoverage=96%, HitCoverage=24%, E-value=5e-39, Identity=82%"; Hit description =Expressed protein, having alternative splicing products
MDPLSVLRDYASRNELDKIIFSGNEIHFGSDYTFPASTPTAFASKQSGRPFPLSAAVFLAQHHYLKHTDFIQAARLRHIPPVSLPDRKTFLDFPLV

SEQ ID NO: 72894 - protein, 354 aa, Zea mays
  Coding DNA Sequence Number=SeqID_29519
  Subcellular localization annotation: CTP_CleavageSite=96; ConfidenceScore=5.21e-01
MGGFGPGPPRPWPRAQPKNPLYIVQKTSCLHRLSLALAASLSRSSHENIGSSNYFANLRDCVFYFASGAAASIQPCIALHAFRLYESGKGRRHQVAASNLRGGRVGYDSGIHHRQSDLHLRQSTSSVPVTITEPPKKQQTPLFRHLQQYGFEKTEYRVYFPQVLPDKRKDYQGYAGLRESRVYVSVFGTRPRTRGYPSRPYILEYSTVGRYMRRKREPSPPSEDFGDSEYLEEEFSSESKGSPVYASPPVSSDDSDDSQGITAEVWTYIRVVERSGLEGSNESEISSDEEDSSDSSEEGSGGDSDDEGDDGDGGDDGGGGDGDGKSDGVGGKGDGGNGKGDSGSSKASGIAPQA

SEQ ID NO: 72895 - protein, 67 aa, Zea mays
  Coding DNA Sequence Number=SeqID_29520
MGIDLHLSTCVGTQLPKYLEMAQRHISLSMGTGSLEEMVARVTWLSILPPGWTVEWDPASAEEEHEE

SEQ ID NO: 72896 - protein, 136 aa, Zea mays
  Coding DNA Sequence Number=SeqID_29521
MAHQTVSGVPGRTTPNQPLSEIPGQAPLKFTGLESFPSPIQPSETSVHTPVKLPERGIEAYFAREASPRSPELSTPPECVDRIAVFGRYTRRRREHPPAHVDRAIPAIPTVKPHLAVTARASPSQPCPSPDLSRRR

SEQ ID NO: 72897 - protein, 245 aa, Zea mays
  Coding DNA Sequence Number=SeqID_29522
  Gene Ontology: Mol. function=protein binding; Cellular component =integral to membrane; Biological process=intracellular protein transport across a membrane
  Homolog annotation: Hit_ID=A2Z450; Match level="QueryCoverage=87%, HitCoverage=10%, E-value=1e-111, Identity=88%"; Hit description =Putative uncharacterized protein
MVSPPAFAAAVAVVAVLLCASAAANPAGGPHMADLSVLLPPRMTKPVEYRLIGGDGCFSWSWDHHDLISVKPEYNDSSRCSTSARLASIAPYSGRRETSVYATDIISGITIHCKVFVDKISRISIFHHAVKIDLDEIATLRIHAFDDEENVFSTLVGLQFLWHLTPRLVDNSSHHLIRIPLKETHLSDCGGFCGDMNIRFELEDKNLGSDFSVVKGIEIGQEVVKAQLFEPQFEHVIDTITLNCC

SEQ ID NO: 72898 - protein, 77 aa, Zea mays
  Coding DNA Sequence Number=SeqID_29523
MESASVALAATAPRTGAQPDGRYGLRLPVSLLGGESARPQEEKAASGEQGLWPPLAPLPLPLKRSERECMSHEAELG

SEQ ID NO: 72899 - protein, 63 aa, Zea mays
  Coding DNA Sequence Number=SeqID_29524
MGRGSKLGRKNRVKVRKTNETSDDGENDATARVGVGASVGQIWGGGTCSYALCREWGGAEVEA

SEQ ID NO: 72900 - protein, 270 aa, Zea mays
  Coding DNA Sequence Number=SeqID_29525
  Subcellular localization annotation: CTP_CleavageSite=80; ConfidenceScore=5.25e-01
MDRGAEVTLLTATTYGSEVPTSLPTSSPALPPRIILAGAQGSAPAATSAIRRPSPLLRRLPFTTASRAPLPPRPSALCLACSAFVSESAFIPFVSFGDLDNNTFKGLTNVDPRAIDLAMRIAERMFLKMKEDEAKNQIEEEENDRWRPNDESISSQGLSFKSTSHMCFVANGSDSESESEDEEEQESDSEDEDDLQQFFAQLSKKHRMSLLKLMKRAKEQKEMLHKQEDFLIRKIEDLEKLTKEHEKLKCSHDDLVQREETVGLHRHCHW

SEQ ID NO: 72901 - protein, 129 aa, Zea mays
  Coding DNA Sequence Number=SeqID_29526
MQEQQEPSEEQRRITCLGGLICVGQPVANQKHEGERSEQEEVDSTNCARKKSGRKNGDFTLAAEKGCESGGQGLVSSAAETALVTNQALIVFEVGMLLNVDLLLDGSIEKYTFHTHLKEFGIMASSIGK

SEQ ID NO: 72902 - protein, 122 aa, Zea mays
  Coding DNA Sequence Number=SeqID_29527
MNQLKNPSVLMSHHWVDMQGPREAIDGASSGANEGEEGKAKGGATGAACGPTETDREHTVQPRAARVQEPSRASVPQAEAEGPKPPHSESPAELLETRDTQSSQLKRSTITGYEIKIVHNLR

SEQ ID NO: 72903 - protein, 356 aa, Zea mays
  Coding DNA Sequence Number=SeqID_29528
  Gene Ontology: Mol. function=exonuclease activity; Cellular component= chloroplast thylakoid membrane
  Homolog annotation: Hit_ID=A7QXY7; Match level="QueryCoverage=47%, HitCoverage=72%, E-value=4e-54, Identity=63%"; Hit description =Chromosome undetermined scaffold_235, whole genome shotgun sequence
  Pfam annotation: Domain name=TPR_2; Domain location=146-179; Score =12.4; E_value=0.86; Accession=PF07719.8; Description=Tetratricopeptid e repeat
  Pfam annotation: Domain name=TPR_2; Domain location=184-217; Score =10.2; E_value=1.6; Accession=PF07719.8; Description=Tetratricopeptide repeat
  Pfam module annotation: Pfam domain module=TPR_2::TPR_2; Domain location=146-179::184-217
  Subcellular localization annotation: CTP_CleavageSite=64; ConfidenceScore=5.17e-01
MGAGVLLGDAAGLGAHLAVRRRRTRLYLRNWASKPLRPSVWLGVAACVSQNRDRRGHVTRFSASASSGSDEPGELSEDEAQREWEAELNRRLKEAEEMEELERTAEQLQSQAAAEAPEESEEEKRERVRRELQKVAKEQAERRETAKQMFELGQKAYGKGMYGRSIEFLEAALTIIRPSSLLGGEIQIWLAMAYEANRRHKDCIALYKELESSHPMINIRRQAAELRYILEAPKLKISNDEVVTIPQIGSSWDWYAGTWSDKIKEQEDKKRKMSAASNQVQPSPNIFGDLSFLRPPNEWKKSAWVERRTRRKIGSRVRSNGLWFIGHEESALRAAVEGDVKEILLHHRKSVVPRNV

SEQ ID NO: 72904 - protein, 478 aa, Zea mays
  Coding DNA Sequence Number=SeqID_29529
MSAAVSAEVERLRTQHADAVREKSASDSRCRKLTDKVAALEREKADLRCQLAGERRETNEAVAKEQAAQAEAKLARAEGNLARERAEQLQEWLTALESRVKGAEAAMRAEAERTRTQLMDTYRELGGAAGTPPLSWGGGGFMSYASLVTCEGAMNALSREGCRHFEVFDQADEDFERDVYKVEDPIVKESAGALYDRMWGPHGREVVRERAETARAQAARGERVDDFGALNSALPDPGPTPAEAVSGVALEPTPETAEDAPDAPTSAAASEDLPPKVAEGAPDAPAAAAPSAEDPTAVAVETTAEAAAEPTAEAPAASGPSQVQDFGPAHATATTEFLAASTAEGGNEYGGSASEFFYFTDSGSSVEWTEESSEEDLDYFAALDVATAEASLHAADAQDVPGPSTGRRRQRAVAKRRVSTEEGARLRVSRAGRQELLSLPAAASTGEGELRSLFAGEELRIMLFNYREMGIIPKVEPV

SEQ ID NO: 72905 - protein, 229 aa, Zea mays
  Coding DNA Sequence Number=SeqID_29530
  Gene Ontology: Mol. function=DNA binding; Cellular component=nucleus; Biological process=regulation of transcription, DNA-dependent
  Homolog annotation: Hit_ID=Q8S985; Match level="QueryCoverage=43%, HitCoverage=14%, E-value=3e-39, Identity=80%"; Hit description=Auxin response factor 15
  Pfam annotation: Domain name=B3; Domain location=80-162; Score=7.0; E_ value=0.013; Accession=PF02362.12; Description=B3 DNA binding domain
MAIRFIDGGKQLVFDHATQFFTASIRTAAEAVVNNYICARLSLRYRHLMEDVLSLLPHVKKDNQDKVESKQSKGNTLNKLLELRSCFSCLSSRREVKKPKKPKVKQRFSRMPHMFWQPRRHLLTTGWSAFVNKKKLVSRDAVLFLRGDNGELRLGVRRAAQLKNGSAFPALYNQCSNLGSLPNVAHAVATKSVFHIYYNPRSGGNAYVIGDSAKPEQKWHAYYATTEHP

SEQ ID NO: 72906 - protein, 418 aa, Zea mays
  Coding DNA Sequence Number=SeqID_29531
MTAAARPFPLLPADLGGRATRAARRPMGLAHVQGSPHGDGLRLSSTPLGWIWFGLDGVAPWSCGLRWWWRHAPVSARQCKTAAGPTAPVPRVSRREGFSFVRGGAGQWPKTAQGGGGCDRVPSGSWLQWPRVPVPSMAAGCGSGTRQCDARGKEDDGDGDSWPDVGVGDFLGESLGESLGDGNGDAHGHCFPCWGVAFPSIFFLGRSPVHLRLATLSSPTSLAEGVALKFVSAPASPSVVAFDSRRLDGDSSSLVKNRSCLAWDEGGALEGVVEHLEKLAQPRSLYHVVGHNVVLGLDAGARDGGLSLSGPGDEAHVLDSVGNVRPGEGQILEHAGEAPEETLSPSLGGGAKEVVERPEVLHRELPLKGDDRALKKIGTGRREHDIVDVEQEVYGVFDVPVDEQGHVRLASMKRRKAK

SEQ ID NO: 72907 - protein, 426 aa, Zea mays
  Coding DNA Sequence Number=SeqID_29532
  Homolog annotation: Hit_ID=A3C1K7; Match level="QueryCoverage=100%, HitCoverage=30%, E-value=1e-111, Identity=50%"; Hit description =Putative uncharacterized protein
METSRGAIDDFSTKYAGQTHEEEYTFHSLTDAIQLQIVSSLRVTPEYVLLVFHPEAQVRVANVDWIKITAEEQISLMEGSTKDFQILAGTQDGQIFGDSQFKYMDIELHLDDEILELIGPSESMDGPEFSIKAAKIGITSLYLSVKGGPKTGVSIEYSSLNMGIVEVQNTTGKLSAKSVGNSLYTQCTELLHYLDSFGRVEVDIPVAMTLNTQSERLCIGCSMPVYPSLPKGDLFSFYETCQSYSWMIADEKVVTFQSAKSWRYRLDQGLYSDGKKSPWFSNGSSKFFISHMLGRSAGKTKISISVVCDFLLPGTSGSVVSYNASKIILVVPDPPLALALPMTWLFPPFYTTMSLLPRSANSLGEPNSLDLESSVGYSLLRGNGRIIDGSKIQTGESNTVDCIQAKDHSAGRTEIAACLRVAQVGR

SEQ ID NO: 72908 - protein, 132 aa, Zea mays
  Coding DNA Sequence Number=SeqID_29533
MPNGGGGDSGKSKGGGHVGGESGWQVNRVEEAGAATASEHGMSGKVSYGEPLGIELHRIVVVTSKATNQEKGVSQMGCNKDVVKGGNHSMGEDKRPKHVVARLRVELDAVTKGRIHGPIEGHENTPDKLNVE

SEQ ID NO: 72909 - protein, 140 aa, Zea mays
  Coding DNA Sequence Number=SeqID_29534
  Subcellular localization annotation: CTP_CleavageSite=69; ConfidenceScore=5.27e-01
MHDLVAFARGVGDPTCATRGPVSFAYATRASVDERCTVVFTFARCGPVACSSSTAVASGPLHQYPLTCRLASTSSTAIHCDPGHVHPMVTRRATVVLCPVDQLVLTADAPPDASPVPSSVCTALADPVGRPHMGPDATFA

SEQ ID NO: 72910 - protein, 209 aa, Zea mays
  Coding DNA Sequence Number=SeqID_29535
  Subcellular localization annotation: CTP_CleavageSite=33; ConfidenceScore=5.15e-01
MRRVAAVKVGASRETAAGTTVGGSARPSGGELRGAGPAANCTTATRARRWRHTTWRRRAVDSLGARLDGKVRTGAELVRLGAHTGGSNTTGLKLPRGRRCLRWGRERVAGRLGAARTAAQQRGAASGQQAMPSAAEEGGVLRSDGGVAKGRQTGGAARRRGSVVPTAVPVRSGEGRRPAGQRPKDPAVVGEGGWEREKLALVPNWRMKP

SEQ ID NO: 72911 - protein, 588 aa, Zea mays
  Coding DNA Sequence Number=SeqID_29536
  Homolog annotation: Hit_ID=A2Z450; Match level="QueryCoverage=90%, HitCoverage=25%, E-value=0.0, Identity=70%"; Hit description =Putative uncharacterized protein
MAPADEDAWWLPTYGTRGGGTMVAEENELKLESSTMEFWNLSQVPDSSTSSYEVQTSRLLSPIFQGQGHLDASLTYLTGASGPTKVLKLVQEVNVCSKVKAFWDEGLENSNVIYLPWVPGVHQEVEMMAIGGCGKTLDDYKLFSSDEDVASVSDSRIVRAKKPGQAVIRVVSAFDFLNFDEVIVEVSIPSVLSILPIFPVEVPVGTRLHSAAVLKTSAGHPFSQCTHFNAFIRWSLLSEDEAFHILNTAEASSIDDIKHNSGYWGQNGNPCAWVSLSAFAAGRSTIVATFAVDSDSDIETFGGPISLEATSKISAYYPLVVLQGGNGNHFGGYWFDLSGIHSRIKNMDNNSPKELYLVPGSTMDVLIFGGPERWDQVIDFVETVDVIDPSKNHIISSTAVKKLSSGLYRVSCLSKVSYKLLFSRGNMVGKDHPVPAISKSEFTVICDFPSEITLIANENENRLDILEAARKADRGPDRLQASPIVISNGRNIRLAAASIHVNGRFFANSSSLRLKWEATGCEGLAYFEETKSVEMLDESAWERSLVLQNSTGVVSIVYIISCIVLNFGFFNYSSKNECNSYFPTSQTV

SEQ ID NO: 72912 - protein, 83 aa, Zea mays
  Coding DNA Sequence Number=SeqID_29537
MATPWPEVVGMRSWGSRPVDAAAAADWRRHAGARRLAGTWERACYGTFEAFRYKIPLLLRSDISGKLLLAALQFLGFSWGLGA

SEQ ID NO: 72913 - protein, 513 aa, Zea mays
  Coding DNA Sequence Number=SeqID_29538
  Gene Ontology: Biological process=chloroplast organization and biogenesis
  Homolog annotation: Hit_ID=Q75G59; Match level="QueryCoverage=92%, HitCoverage=91%, E-value=1e-128, Identity=51%"; Hit description =Expressed protein
  Pfam annotation: Domain name=CDT1; Domain location=89-222; Score =79.0; E_value=1.5e-20; Accession=PF08839.2; Description=DNA replication factor CDT1 like
MAQWFVWSAVVLCRECLELKMSEANTTQLDLEKGFSQVSNDNDSSSPATMHKMKVETEDGGSEIESPTPEKRESRSKGVVVSSLARNLLAERYRDRFSNQLVEDEGQTDDEDYNGSVSPSSSQSLFSESIELLDKKLLYSHLAQMKHLFPEAIQIKRILVHDEKSLCMYADMEITLLMDVVECTSPDQSPSMTICEAFYSKLLSFLDAHHKGADIPEAILPELFNSKPREKLYLEAVHNGYAAESPLQGATEERFLNASHFPQSFRKLMSQKIIADGIQKTQLLSDPADLSSVIAYGTKGSNGNPKKEDEHAPVPGKYEISATPSRHLISCCQEGTPKQGTSESPLFSGTPVMQTPKRQLPTSLDKPKATCGHISEPCSASSARRSLNTLLKFEVGSPYYDGVEHTDTTKKGMISEDSSNFNKSFEEDSPVLFIDKDKIDEVDSVDSQEKIASLHTTFDIVCDISHPTKNSLITKQELFHNILANNLEIEEIGNEDHLICVHSKLYLTFPELC

SEQ ID NO: 72914 - protein, 42 aa, Zea mays
  Coding DNA Sequence Number=SeqID_29539
MALRSQVVATGVGQRRRYWKGEGENWEGPEYRTANGRHDIAI

SEQ ID NO: 72915 - protein, 90 aa, Zea mays
  Coding DNA Sequence Number=SeqID_29540
  Subcellular localization annotation: CTP_CleavageSite=67; ConfidenceScore=5.27e-01
MLATRLWRSSVGRGTVDICKPSKSTPGVISESGSRHSVKGSTLRRWMAATTPATGPGKGILRKGSFSAKEAGPEPPTDQRFEGWPLGRVR

SEQ ID NO: 72916 - protein, 225 aa, Zea mays
  Coding DNA Sequence Number=SeqID_29541
MVTTSFWVGKSKPGCDLGPTLSFKDVHHPRWGGGHAEPALYLPRGSADHPFPRRLGVEALAGPADGADLDNVGLIDGGRRHLQRVGVVGRASGGPSCRRATAAPGRCPTRLGGFEWGSAGGLVSPAIGAEAEAAREVLVADGITATTRAPGHRAGVLVLAPRASAGARARSQQRRPTVAVVRTGGGEPLESLGSIGLVVWGSSSLVKETPRPLFDEPRPGVAISV

SEQ ID NO: 72917 - protein, 421 aa, Zea mays
  Coding DNA Sequence Number=SeqID_29542
  Gene Ontology: Mol. function=oxidoreductase activity, acting on the CH-OH group of donors, NAD or NADP as acceptor; Cellular component =chloroplast; Biological process=L-serine biosynthetic process
  Homolog annotation: Hit_ID=A7P9P5; Match level="QueryCoverage=80%, HitCoverage=72%, E-value=6e-78, Identity=66%"; Hit description =Chromosome chr3 scaffold_8, whole genome shotgun sequence
  Pfam annotation: Domain name=2-Hacid_dh; Domain location=87-369; Score=94.8; E_value=2.6e-25; Accession=PF00389.21; Description=D -isomer specific 2-hydroxyacid dehyd
  Pfam annotation: Domain name=2-Hacid_dh_C; Domain location=189-263; Score=-36.5; E_value=4.5e-07; Accession=PF02826.10; Description=D -isomer specific 2-hydroxyacid dehyd
  Pfam module annotation: Pfam domain module=2-Hacid_dh::2-Hacid_dh_C; Domain location=87-369::189-263
  Subcellular localization annotation: CTP_CleavageSite=59; ConfidenceScore=5.65e-01
MAAPSPTTTAAAAAAATTHHRVLLPSARPRAAPSSLRLPLRAQPHAHAHAQRARLAAPVAAAAPAPAASTASPESPASGAVAGKPTVLVAEKLGAAGLALLREFANVDCSYGLSPEDLRAKISLCDALIVRSGTKVGRDVFEASGGRLRVVGRAGVGIDNVDLAAATEHGCLVVNAPTANTVAAAEHGIALLTAMARNIAQADASLKAGKWQRNKYVGVSLVGKTLAILGFGKAALDVFTKEPPAADNKLVLHGNVTVTPHLGASTVEAQVLSELAPFVVLAEKLGRLAVQLVAGGGGIKSVKVTYASARAPDDLDTRLLRAMITKGLIEPISSVFVNLVNADFTAKQRGVRITEERILLDGSPETPIDYIQVQIANVESKFPSAISETGEITVEGRVKDGVPHLTKVGAFQVDSRFERQG

SEQ ID NO: 72918 - protein, 531 aa, Zea mays
  Coding DNA Sequence Number=SeqID_29543
  Gene Ontology: Mol. function=exonuclease activity; Cellular component= intracellular; Biological process=regulation of transcription, DNA -dependent
  Homolog annotation: Hit_ID=A7PLG5; Match level="QueryCoverage=48%, HitCoverage=89%, E-value=6e-65, Identity=49%"; Hit description =Chromosome chr7 scaffold_20, whole genome shotgun sequence
  Pfam annotation: Domain name=Exonuc_X-T; Domain location=142-293; Score=43.3; E_value=8.6e-10; Accession=PF00929.15; Description =Exonuclease
MAKRLAGADKEVLVEVVRFTQKSGLRGCDGGWKDFLARNDRKFGASVSDPRKRSRDVLLAFLQTFPKDFQKYFGKLVKRHNERSAVQQYVADFPDEVSPQQKLVQLTAEHPEYRKHYCFPSYQEASKVLQIDVSSLTSSSAMLSIDCEMVLCSDGTEAVVRVCVVDDKLKAKLDILVNPSKTVADYRTHITGVSKKDLEGVTSSLVDVQKSLKRMLSKGNILIGHSLHRDLCALKIDYSQVIDTAYIFKYANLPTTASPSLNSLCKAILGYSVREEGEPHNCLKDAEAAMNLVLAKLKNEFNDPIEIAASSVTESDVVKLLAHRIPVYLPCQELCKIFSGNPNIDDKIDSRIRGEFYSTCISFNDVDEVDKAFEELDGQKTKDSGGRLQKHVLLKLDNGDVVSFYVRKMVYDSWPKQIEVPRKRPEPTEDPEPKKEHAKGVQQKKRNNFVRDTEDPEPKKRPEPIEDPEPKKEHAEGVQRKKRSKKHANKEDTEDLEPKKRSDPTEDPEPKKRPEPTEGIPQKKRSKKHAK

SEQ ID NO: 72919 - protein, 124 aa, Zea mays
  Coding DNA Sequence Number=SeqID_29544
  Gene Ontology: Mol. function=nucleic acid binding; Cellular component= integral to membrane; Biological process=potassium ion transport
  Homolog annotation: Hit_ID=Q2QNI2; Match level="QueryCoverage=68%, HitCoverage=7%, E-value=5e-21, Identity=67%"; Hit description=Zinc knuckle family protein, putative, expressed
MVNSSGIIESGEHEKVLLLMESGVRIPWCMHFCSDKSTTPLDFNLKLRKLIHNKRLEDVHMLRYDRIILFQFGLHSNALYFSVSLIKFLEGAWVSILLALILLVIMFVWHHTTIQKYEYDVHNK

SEQ ID NO: 72920 - protein, 259 aa, Zea mays
  Coding DNA Sequence Number=SeqID_29545
  Gene Ontology: Mol. function=structural molecule activity; Cellular component=lipid particle; Biological process=phagocytosis, engulfment
  Homolog annotation: Hit_ID=P53496; Match level="QueryCoverage=29%, HitCoverage=20%, E-value=2e-32, Identity=93%"; Hit description=Actin- 11
  Pfam annotation: Domain name=ADK; Domain location=2-101; Score=-55.1; E_value=0.00052; Accession=PF00406.13; Description=Adenylate kinase
  Pfam annotation: Domain name=Actin; Domain location=12-221; Score= -133.0; E_value=1.8e-07; Accession=PF00022.10; Description=Actin
  Pfam module annotation: Pfam domain module=ADK::Actin; Domain location=2-101::12-221
MSEIVNQGKLVSDEIIINLLSRRLEEGEEKGELGFILDGFPRTMRQAKMTQIMFETFNTPAMYVAIQAVLSLYASGRTTGIVLDSGDGVSHTVPIYEGYALPHAILRLDLAGRDLTDCSSALDSQYPRSSPLLHSHSPKSSSQSIARRDGVSAPLSRGPDPQRLAAAHRRSPLPLCGRTPALHRLLLFLTVVVAAATAFVLLRPPITVYKAPLPHIRRLFANSTSAAEDLIPVFPTLTFPNHYSIITGLYPSSHGIINN

SEQ ID NO: 72921 - protein, 284 aa, Zea mays
  Coding DNA Sequence Number=SeqID_29546
  Gene Ontology: Mol. function=sterol carrier activity; Cellular component=endoplasmic reticulum; Biological process=steroid metabolic process
  Homolog annotation: Hit_ID=Q10NC7; Match level="QueryCoverage=67%, HitCoverage=39%, E-value=1e-88, Identity=81%"; Hit description =Oxysterol-binding protein, expressed
MVCDLNAVAQMPRCGSCSLGEKERSQHFHLLILDLKSSSLNKLLQWAGRYEVDGYVYSAAEEPRIMITGKWNKSLSCQPCDQEGDPLPGTELKEIWRVAPAPQGDKYQYTQFAHKINSFDTAPKKLLASDSRLRPDRYALEKGDMSKSGAEKSSFDTTPEFLQTFRLEEQQRAEKRTREAKGEQFTPRWFNLTDVVSPTPWGDLEIYEYNGKYTEHRAAIDGSDVTDETNVTSVKFSPMAIWTGWIGGLLGKICDKQGIPYEYGKGRLEERFELLEEIRKVVVG

SEQ ID NO: 72922 - protein, 153 aa, Zea mays
  Coding DNA Sequence Number=SeqID_29547
  Gene Ontology: Mol. function=peptidyl-prolyl cis-trans isomerase activity; Cellular component=chloroplast; Biological process=protein folding
  Homolog annotation: Hit_ID=Q7XIJ9; Match level="QueryCoverage=78%, HitCoverage=27%, E-value=4e-54, Identity=90%"; Hit description =Putative peptidyl-prolycis-trans isomerase protein
MSSQPPSTRTSPDTKVPRTGELALRRAIPANPNMKAIQESLEDISYLLRIPQRKPYGSMEGDVKKSMKIAMDNKEAILASIPEEHKEEGAKLYTSLLEEKTGLQTLLKYIKENNPDKLSIALASSLDTVAELELLLEMAMGTRNPKPDGFLPH

SEQ ID NO: 72923 - protein, 44 aa, Zea mays
  Coding DNA Sequence Number=SeqID_29548
  Homolog annotation: Hit_ID=B0JCV8; Match level="QueryCoverage=86%, HitCoverage=5%, E-value=5e-10, Identity=81%"; Hit description=Misfit TNP1-like protein
MPYKNFRVEVTTVVQGSKDDMLDIRGPEGIETLGQTIKNFILWP

SEQ ID NO: 72924 - protein, 23 aa, Zea mays
  Coding DNA Sequence Number=SeqID_29549
MPNPGLDAAGFDQERVMLGSMDV

SEQ ID NO: 72925 - protein, 255 aa, Zea mays
  Coding DNA Sequence Number=SeqID_29550
ATPDSGYRQWPPGPPQWRMQAYRWGQTFCDGLEEARYWRERRCDFFCTQKPTRRVHDMWAWAPMPELLEGPSPRALPVVSCFILQAAIVAYFRGMSVERAEPWLHPTRPQYLGVGSEPCCGSISLALMALVAPSTLPPAADRGVAIRPPHGRRSRRAQVRHIHGVPRAAGHTVRTPSGGSYKTSYAVEVAAVFLDGLVLNSVRGREREPIHAHCDGRRCQQATRAKVATVAGEPLVQRRPLGVEVVATAGEAARS

SEQ ID NO: 72926 - protein, 79 aa, Zea mays
  Coding DNA Sequence Number=SeqID_29551
  Homolog annotation: Hit_ID=Q8H6I0; Match level="QueryCoverage=41%, HitCoverage=1%, E-value=6e-07, Identity=84%"; Hit description =Putative gag-pol polyprotein
MASDTVRCTQDSPISIKVPKLAKPIKTLMGTNLHLDLDTGGKSVDQKEKHIRDLSVSRKISGVLGFKETKLSSSIHCLS

SEQ ID NO: 72927 - protein, 143 aa, Zea mays
  Coding DNA Sequence Number=SeqID_29552
  Subcellular localization annotation: CTP_CleavageSite=77; ConfidenceScore=5.48e-01
RVLVPLAAQVRSSSSLSLVFTPRHNHRARTTSTEPHPLSNLCPRGAQLVAGQSASIYCSLELRPCLHAVAVRPVVVVLSAVRGASPEQSCPSPSNALAGACVHRPRFPAGFHPRSTTIALIPCPPNHFLLVDVHPFARARTQG

SEQ ID NO: 72928 - protein, 28 aa, Zea mays
  Coding DNA Sequence Number=SeqID_29553
MVGGDEGIERRVAVRLRPNICPSRDQFD

SEQ ID NO: 72929 - protein, 102 aa, Zea mays
  Coding DNA Sequence Number=SeqID_29554
MEFGTSRISSVRVQEMQQLGYFGGGVGRVLGAEEIPEPEGQLVVYEAFFIAGLRLPMHRFVAEVLRRFDVQPLCALTSMWRSHHSRWRRTMRTKGPFGMLPA

SEQ ID NO: 72930 - protein, 639 aa, Zea mays
  Coding DNA Sequence Number=SeqID_29555
  Gene Ontology: Mol. function=nucleic acid binding; Biological process= multicellular organismal development
  Homolog annotation: Hit_ID=O65001; Match level="QueryCoverage=98%, HitCoverage=99%, E-value=0.0, Identity=64%"; Hit description=Protein terminal ear1
  Pfam annotation: Domain name=RRM_1; Domain location=221-286; Score =28.2; E_value=3.1e-05; Accession=PF00076.13; Description=RNA recognition motif. (a.k.a. RRM, RBD,
  Pfam annotation: Domain name=RRM_1; Domain location=97-165; Score =11.3; E_value=0.013; Accession=PF00076.13; Description=RNA recognition motif. (a.k.a. RRM, RBD,
  Pfam annotation: Domain name=RRM_2; Domain location=448-564; Score =21.3; E_value=0.00042; Accession=PF04059.3; Description=RNA recognition motif 2
  Pfam module annotation: Pfam domain module=RRM_1::RRM_1::RRM_2; Domain location=221-286::97-165::448-564
MEGGGGSGMGGFPEATGNLLDAAAQEFHPTVCAPYPLQPLPQQLYCPHPYPAMPVPPPPQIAMLQPVPPMAMAMAPQPGYTLPTTTPVVNGPSSRVVVLGLVPPHAQEADVAQAMAPFGAIRSVDACAVASEGVATVHFFDIRAAELALTCVREQHMRQQSRLGQLYAAAAVAPAWAPAPTPQAWDWPHPNDDGRGLVLGHAVWAHFATGADDGDNRGSLVVLSPLPGVSVADLRQVFQAFGDLKDVRESAQRPSHKFVDFFDTRDAARALAELNGQELFGRRLVVEFTRPSGPGPRRRGYAPHQHRPTAPTPPRLQATWRPSQPTSSQPPASSSSSGSVRAREGVVLLRRSSCKSSAGSDQSSKGGNAGTSHERKTKGGKIVVAAAAASSSTPTASGKQTQKGVGSSGGGSWKGRKSGWEARFLFKEPEAGGGADTQATPASEMDTRTTVMIRNIPNKYSQKLLLNMLDNHCIQSNEWIVASGEEQPFSAYDFVYLPIDFNGKCGRGGGRRGAGCGSVSFRIEGLEALKEHFKNSKFPCDSDEYLPVAFSPARDGKELTDPVPIVGRSPAASSASSPPKSRAASVDRLGQELMPAPSSSADGASSTTTSTHAPSEHDEEEEEGDIRLAGELRRLGYDD

SEQ ID NO: 72931 - protein, 56 aa, Zea mays
  Coding DNA Sequence Number=SeqID_29556
MGGGLLAAASTLRSALPLFGPPEQKSSSSPLLEQVTLDTAVWAPSVGLIFFPILRD

SEQ ID NO: 72932 - protein, 1084 aa, Zea mays
  Coding DNA Sequence Number=SeqID_29557
  Gene Ontology: Mol. function=voltage-gated chloride channel activity; Cellular component=integral to membrane; Biological process=chloride transport
  Homolog annotation: Hit_ID=Q6YVX5; Match level="QueryCoverage=66%, HitCoverage=93%, E-value=0.0, Identity=73%"; Hit description =Chloride channel
  Pfam annotation: Domain name=CBS; Domain location=591-767; Score =36.9; E_value=7.1e-08; Accession=PF00571.19; Description=CBS domain
  Pfam annotation: Domain name=Voltage_CLC; Domain location=174-558; Score=208.6; E_value=1.5e-59; Accession=PF00654.11; Description =Voltage gated chloride channel
  Pfam module annotation: Pfam domain module=CBS::Voltage_CLC; Domain location=591-767::174-558
MDGNSPRRPPRRPEREGSYGYDIESMDGSGAGGPPPWSAHHNGSSEALLRYDDGGADRGSTQQPLLRKRTVNTTSQIAIVGANVCPIESLDYEVVENDLFKQDWRSRKKKQIFQYIVLKWSLVLLIGLLTGFVGFFNNLAVENIAGFKLLLTSDLMLKGRYIRAFFVYGGCNLVLAAAAAAICAYIAPAAAGSGIPEVKAYLNGVDAYSILAPSTLFVKGGSRKYHLTCNWLRYFKNDRDRRDLITCGSAAGVAAAFRAPVGGVLFALEEAASWWRSALLWRTFFTTAVVAVVLRGLIEFCRSGKCGLFGQGGLIMFDLSSTVAVYSTPDLIAIIVLGIIGGIFGGLFNYLLDKILRVYSIINERGAPFKILLTITISIITSMCSYGLPWLAACTPCPVDAVEQCPTVGRSGNYKNFQCPPGHYNGLASLFFNTNDDAIRNLFSNGTSTEFQMSSLFIFFTAIYCLGLVTYGIAVPSGLFIPVILAGATYGRIVGTLLGSISDLDPGLFALLGAASFLGGTMRMTVSVCVILLELTNDLPMLPLVMLVLLISKTIADSFNKGVYDQIVVMKGLPYMEAHAEPYMRHLVAGDVVSGPLITFSGVEKVGNIVHALRLTGHNGFPVLDEPPITETPELVGLVTRSHLLVLLNSKNFMKGRVKTSGSFVLRRFGAFDFAKPGSGKGLKIEDLDFTDEEMDMYVDLHPITNTSPYTVVETMSLAKAAILFRELGLRHLLVVPKTPDEQAQQGHTDAKVVGEEGKLPVLEVGEEQGGLLQPSPRRSVGRVAVEVAPRLPPCRSAGARGGRAQAAEAVAALQGRSAAGRRGSRGPRLRCPVGGRARLQRQAARLHRQGHRVRAQRQQAAALRSAPRRLRSCTAQERPRLRSALRRSLLPQRRPRLRDVFGGYDIMFKVSYLEFKSNPILTDEWAPVQHDPPASEVPVMSGSPDRDPLVIVRPGRTSDRGSGEPASESRAGVACGQVDEAREISRRSSASRFRWRLFSSSPAALIRYRFASACVLALLRPGRLQRSGSKRGLEPTGGGDDDDHAPKRPRVPALARNRKFAYESFCRFDYLSEAQIARKRMSM

SEQ ID NO: 72933 - protein, 184 aa, Zea mays
  Coding DNA Sequence Number=SeqID_29558
MMPPALCFGAEFVICPYLARWCNLFALRLIGHLMDALCLVFTSLLSVIFCTSLAIFDFPLILTDISFLSCGIHCMPCTDVTVLKNILIIPGRPPQWVWARDGLRSGLEGSDESEYSSDEEDSSEEDGGGDGEDDDDDDEGGGGGDGDGGGRGGSSGGKDDDGGSSRGGSSGGGGSSKGSNKASG

SEQ ID NO: 72934 - protein, 30 aa, Zea mays
  Coding DNA Sequence Number=SeqID_29559
MGRVEAGPSHFPKRPAPQNSARSGLPILVH

SEQ ID NO: 72935 - protein, 680 aa, Zea mays
  Coding DNA Sequence Number=SeqID_29560
  Gene Ontology: Mol. function=translation initiation factor activity; Cellular component=mitochondrion; Biological process=translational initiation
  Homolog annotation: Hit_ID=A7PDB4; Match level="QueryCoverage=56%, HitCoverage=89%, E-value=1e-125, Identity=59%"; Hit description =Chromosome chr17 scaffold_12, whole genome shotgun sequence
  Pfam annotation: Domain name=DUF794; Domain location=277-680; Score =599.0; E_value=4.4e-177; Accession=PF05634.2; Description =Arabidopsis thaliana protein of unknown function (DUF794)
  Subcellular localization annotation: CTP_CleavageSite=64; ConfidenceScore=5.06e-01
GCLTPYPDTRASVGQAEVTAVTSPLSFTVRYDEKNSAARPALTAVPTTQAKLTTSHNQPPSSVSGATGSSASPDLKLRPREEATRNKTRRPIWLTPATGNDGLRRFSDGHAITCTGLKLSRDSHVGMYTRLRHFSADTLAYSYTPIAARPNDEMTHLANWARGQRPRRSPRPHRPPTDSGSWRRERCSKAEGGRSPVGTGTRRRGGSLLGRSPLPLSDPSPPSATAAIVGSLPNSIVLASGCLYLYAQPELARACLFPYARPPNAAARLRERVPPNARSRSAAGRTVASEEDEAAVPYVDVPRAGRKWERKPYVTPMKVLIRRAKEERQARRENPCRVLEHPPDNGLVVPHLVDVARRVHAAREGLLGGLTRLVEGAVPVKRCRFCSEVHVGRVGHEIRTCEGRNSGARNSLHVWRPGTVRDVVGFPYCYHLFDRVGKPRVVHKEKYDVPRLPAVLELCIQAGVDVQRYPTKRRTRPVYSIEGRIVDFEPDVDDDEAARTLHEPPACRPSLPPAVAIAAIGTSSSSSAAVVNGEGEEAEITVPELASRTLQSWLDMKSGAAKLMKKYSVHTCGYCPEVQVGPKGHKVRMCRATKHQQRDGQHAWQEATVDDLVPPNYVWHVADLAGEESPLANELKRYYGKAPAVVELCVQAGAPVPVAYRSMMRLDVVPPARDEYDLVA

SEQ ID NO: 72936 - protein, 102 aa, Zea mays
  Coding DNA Sequence Number=SeqID_29561
MSDVPSQFIDSISVGDPKHRSCVAALLEVDSLGLQGLRWGRYFHCYCFHVGEPIDAEAPQLQKQQKFVASSPKNNKGINPEYGILSKSYPTKEKTLKGMLDK

SEQ ID NO: 72937 - protein, 122 aa, Zea mays
  Coding DNA Sequence Number=SeqID_29562
  Gene Ontology: Mol. function=kinase activity; Cellular component =ornithine carbamoyltransferase complex; Biological process=amino acid metabolic process
  Homolog annotation: Hit_ID=Q6QP54; Match level="QueryCoverage=55%, HitCoverage=37%, E-value=2e-14, Identity=51%"; Hit description =Putative kinase
MALPVDVAGLCPRSGDVEVPPKPRSSLSSMAEAEPEPLGWARRRLFGRGQGGVRALGSGEAEFVVFWGLARVRALGRAERIGVAQAALSFCQTGQWSGEVTAVTSALLGGARQDKGVRPPLR

SEQ ID NO: 72938 - protein, 314 aa, Zea mays
  Coding DNA Sequence Number=SeqID_29563
MSMEDDASKISDWEVLSATSSRGGGDDDEVLTVSGGGGDVVLLDHFVLTPDPAASCPGDGEGSWSDDRGAWQGLELLDGFDPIPEASFDLAVGVRSQQLLISDVDDAREEGSIVQATVARGATRSAEGNQDDVVEVEIEQESSSVISRGALCPVLQVAADHGVEETLDSEAVTPTGGSLQSQVSESSLVQLDDGGIGAGEKRSCLEDAVSSDEIHGEQEEQEQGSNANAAIGCDEPDGEAKDDALPLAHTPAALLGLVVLGRKMYRMKHKARGLPQIKIAFDDKVMTTSTLCKILMNIDLRVLMDELAHKVGLR

SEQ ID NO: 72939 - protein, 145 aa, Zea mays
  Coding DNA Sequence Number=SeqID_29564
  Gene Ontology: Biological process=Mo-molybdopterin cofactor biosynthetic process
  Homolog annotation: Hit_ID=Q2Q066; Match level="QueryCoverage=55%, HitCoverage=75%, E-value=5e-37, Identity=100%"; Hit description=VP15
  Pfam annotation: Domain name=ThiS; Domain location=69-145; Score =78.8; E_value=1.7e-20; Accession=PF02597.11; Description=ThiS family
MAKNPKGNLPIDSHCGPQRTITDRFYPSPDVSQPLIPSHPLLLLPDAAPEEEMPAAAEEQAAPAATVKVLFFARARDLTGVADSAVEVPPGSTAGECLARVLAQFPKLEEIRGSVVLALNEEYAADSAAVADGDELAVIPPISGG

SEQ ID NO: 72940 - protein, 422 aa, Zea mays
  Coding DNA Sequence Number=SeqID_29565
  Homolog annotation: Hit_ID=Q9M1Y3; Match level="QueryCoverage=71%, HitCoverage=50%, E-value=7e-82, Identity=51%"; Hit description =Putative uncharacterized protein F24G16.180
NNPRVVGIGNDYEVPLFDDGQRSAAALDRVQVAVAPELAVHSGACGHVGLLPEVELAVAKLLLVVDERRQRERLVLVGTEWCDSLIGLQSGSLLHQMVEQGKPRSIPTKAKKSPFVEVEVDEIGQASGVVFARESPLAPKSDQGCSVSHSHGDDETHESDGCVQSQGLDEHGWVDFGHSLQLVLFSRQWSLAESLVDLADQQPMLDYGLSIALDAIWFLRTKQDLEGLNSLISKIVASGAKDFARAILRTSLLASCVAACQSKAITVGNSKEIVAERLHDRLRDCPGAEHLKIEAGAKVQKFMEWALQCIHMHHCSEDTHMYRWNYNTLQEVQLHVSAFRTFLDIAGDNLSGKIFTEAFDAVCFPLTLFSSLFEPGWSSGSSAVSIKGLLSLLVEGGADNVNQCFLEAARFGSTELVRILLK

SEQ ID NO: 72941 - protein, 260 aa, Zea mays
  Coding DNA Sequence Number=SeqID_29566
  Homolog annotation: Hit_ID=A7QB25; Match level="QueryCoverage=94%, HitCoverage=42%, E-value=1e-62, Identity=47%"; Hit description =Chromosome chr5 scaffold_72, whole genome shotgun sequence
MELCLDRSAWKEAIHVAYQNSLAVDTDLALVYASHYCKFKTMECLVDEGNVVHWFVSRGVSDIEMCLALTTAASSGHFVVASYMLAHIPQQILEALSTQILKAARGQGSRPLDGVTFLLRSNFLRDAAATYEAADIIATGGTNGELPDLVAFLKEHWSQDAFAEGVSAGEMHFVNVMRVLRRGASPICLEDLPPEMVLGITYLPLYRECLSAGGQLLPQRLRGELLEAVHRLGEPVGPESQGKDLVLALERHMPSFLVGS

SEQ ID NO: 72942 - protein, 74 aa, Zea mays
  Coding DNA Sequence Number=SeqID_29567
MGRALAGAWGRPGGSLPLRGLRVTEAVIPPQGDLVAAQMSPRRADLIPARTSLPCNNRGRAQGIKALARPSFPN

SEQ ID NO: 72943 - protein, 96 aa, Zea mays
  Coding DNA Sequence Number=SeqID_29568
MGCTSVALLLLLLEERGLVEIGALQPPLGFKDFRRAARLHFLTNGQFGGEKQAGLRPPPRPQLQGSSSSELRRRVSQARVCLYVGSGPLFPSVNWG

SEQ ID NO: 72944 - protein, 226 aa, Zea mays
  Coding DNA Sequence Number=SeqID_29569
  Homolog annotation: Hit_ID=Q6J9V9; Match level="QueryCoverage=36%, HitCoverage=29%, E-value=1e-32, Identity=86%"; Hit description =Putative uncharacterized protein
MADLRTVRPSPVRWTDSHTPTRQQVAVCLLCKAGGRPSPPNAEGRSGDRERGYFERILLSEGNGPRALLLIRGSKVAPYGVRQPPQSTRAPSPLLIRGSKAGPSEGFDSRPRACRVRDDPRYVRYMAKARATLLSLGRNRELRLARPQASASGEGLRLARPQASASASTSGEGLRLARPRALASASASGGVTTSPDLSLGLRRSLHLARPRPRTDRATEDTTLPYP

SEQ ID NO: 72945 - protein, 116 aa, Zea mays
  Coding DNA Sequence Number=SeqID_29570
MAESSDGRVKLLNTQNMKGFDKGAEGEEAPSTPSAAEVAEILKKKDQPSAAKEKAEGQKKRRIVNVMQAIERTPPLASASKMVTAASAEAEAAKLATTMSGIDKLIYQIWSRKRQL

SEQ ID NO: 72946 - protein, 55 aa, Zea mays
  Coding DNA Sequence Number=SeqID_29571
MGRLEPQAEWESRLVGKVCNLYRVLGTGCPHCSQCSGGEAGNIDDFEEFQEYDEF

SEQ ID NO: 72947 - protein, 178 aa, Zea mays
  Coding DNA Sequence Number=SeqID_29572
  Subcellular localization annotation: CTP_CleavageSite=50; ConfidenceScore=5.09e-01
FTKDSWSFPSPQIERNPTGNARSPSPEFLRPPESVDRVGLLAADELFRPRAARATPTTSDRHQPIDAFARTSLTSVDTLLELDHLHHEETSSKEVDSSDSEEWRGDEGDGDEDNGSSGDNDSKGGGDGDDEGGDYEGDGDGDGKGDNDGSGKGDGEGDDDGGKDDGGDGKAGDIMLLV

SEQ ID NO: 72948 - protein, 71 aa, Zea mays
  Coding DNA Sequence Number=SeqID_29573
MGKNKKGGGSSHRSGDKRKREPSPPSEDFGDFEYSEEEFSSESEGSPVYAYPPVLFDDSDCNTPNVTITKT

SEQ ID NO: 72949 - protein, 139 aa, Zea mays
  Coding DNA Sequence Number=SeqID_29574
  Subcellular localization annotation: CTP_CleavageSite=46; ConfidenceScore=5.04e-01
MDQVCWSKGPAQQGIKSIVEVTPASGVTIDGSSDPSISLRLLRVLRAVARTATGVVVVAVSGASLDEVQGKEASQTPPPTEARGKSPAAPAPGVGAPAPHACDDVVSPGGWTDLTPCDTGDAPPGGKAKRGSQTYVQCT

SEQ ID NO: 72950 - protein, 84 aa, Zea mays
  Coding DNA Sequence Number=SeqID_29575
MSIIFRPWRPVHSLFLLRNQGEDEREKDFEHAGFGLQKTTNFVTVTTDECPSGQGVTLHKIVTAIGGGVSVAKAQRLWKAVVGP

SEQ ID NO: 72951 - protein, 61 aa, Zea mays
  Coding DNA Sequence Number=SeqID_29576
MAMGTRYPKPVGMGNPLGTRNPHGFGFGQNFIPVMGIGFLAGVFFIRGYGFGQFTVALEQG

SEQ ID NO: 72952 - protein, 728 aa, Zea mays
  Coding DNA Sequence Number=SeqID_29577
  Gene Ontology: Cellular component=nucleus
  Homolog annotation: Hit_ID=A2ZML3; Match level="QueryCoverage=100%, HitCoverage=94%, E-value=0.0, Identity=69%"; Hit description =Putative uncharacterized protein
  Pfam annotation: Domain name=WD40; Domain location=1-48; Score=9.4; E_ value=2.2; Accession=PF00400.23; Description=WD domain, G-beta repeat
  Pfam annotation: Domain name=WD40; Domain location=161-199; Score =10.6; E_value=1.6; Accession=PF00400.23; Description=WD domain, G -beta repeat
  Pfam annotation: Domain name=WD40; Domain location=397-434; Score =10.6; E_value=1.6; Accession=PF00400.23; Description=WD domain, G -beta repeat
  Pfam annotation: Domain name=WD40; Domain location=450-487; Score =18.6; E_value=0.023; Accession=PF00400.23; Description=WD domain, G -beta repeat
  Pfam module annotation: Pfam domain module=WD40::WD40::WD40::WD40; Domain location=1-48::161-199::397-434::450-487
MLVSELEGHEGDVTAVVVVAPPAQATAAAKLASYCWTAGLDGVLIYWDFLAAEVMRKVQVGLPVHSMVVPDIYRTSKGVEVSSPFAFISVEDTSKLASEPKALCGQMRVYDLTKGRQVGGLLAETRKPEKIVASSSGEFLGITNKRKLHIWRIPTKDFKPDKIRKIKLRHTKHLTTLAFHPTERTVAGGDVTGRILIWRCFGNSKFSESSVQSKEDDGRDGVRGDDDADTCTTWHWHSSSSFPGRPVLLNDNFFYVRWFGGSYCCVATRYWKEKVSCTNNQVYLLKMPNMEVMRSIAGIKLPIASPNLGGSNRAVYGFDYTNRLVAIPTEDYCIQFYNLFENAEVSEVQMYISMVSLSIDGDLMCTVDVKLPEEGLGGLVTLKFWNHGSRAGHYFLSTVIYEPHSDDGVSSVAFRPGRNMAVSSSFGGNFKVWVQSLSSQSNDERNCSGWRCQSVGSYKKKPMTSAAFSADGSVLAVAAESTITLWDPDNNALVGVIAETLSPVTNLSFVGTSVFLMSLCQSSRPQIALWNVSNLSMQWSYSIYAEAACCSPDGSEFAVLALLSCPDGEASTQQDGVILLFDAESSNPIASWSVKKASGGSISFVKGDVPLDANADSSRDKEPMLLVYVNGSHEYAIFDPRESEEVVISKNKHKKIQAEEPAPIGYASIYGELTKLEPKKEVSDVPFVPSDRPWETIFSGSSHVLPPLTKLCSAFLSSLLEKRPVANE

SEQ ID NO: 72953 - protein, 168 aa, Zea mays
  Coding DNA Sequence Number=SeqID_29578
  Gene Ontology: Mol. function=binding
  Homolog annotation: Hit_ID=Q69NX2; Match level="QueryCoverage=90%, HitCoverage=12%, E-value=2e-41, Identity=59%"; Hit description =Putative fanconi anemia, complementation group D2
MAYAYMSKYKFVQFRLLEGLLNAFLKDYPLSLPELRYLGDCSGLASTSKFNIPKNMGEESINGASSKRQKGCKGKVSEKVNPDDKLKQPTILDAFKRAGVTVSHAANKASSQPSSSEMMSKDIEQDATDPGELGLIDLMAAPVKLDIQRYKFRTICATCLSLLNYSEC

SEQ ID NO: 72954 - protein, 243 aa, Zea mays
  Coding DNA Sequence Number=SeqID_29579
  Gene Ontology: Mol. function=binding
  Homolog annotation: Hit_ID=A2YIA3; Match level="QueryCoverage=91%, HitCoverage=18%, E-value=1e-80, Identity=61%"; Hit description =Putative uncharacterized protein
MSELESCSDDWSSHSSSAGNPDIPYVVVSKSSIMTVVCKEILGCYRKLLGIPDLLNQPNMSILKQLLQTLQPTENFDDVLSEFQPSLAPCNVDYLYCGACKILEDIMDLDKSGEPNGKNIHMGCSKAIIPFLRKRLGYSAHKLLSADFPSEDAGKGWQSKGDLIQKILQIYLWNSDSTSDLLAEIGRELPKHEENTGSLNKTIKQALKARGSVDTILQEIQKSVDAFVSLIGMCKSHEKPSTF

SEQ ID NO: 72955 - protein, 50 aa, Zea mays
  Coding DNA Sequence Number=SeqID_29580
MSRAFDDYYIEDCGVILAPEVTQRRIDNSDQFVILATVRGFRIMEPLEIT

SEQ ID NO: 72956 - protein, 144 aa, Zea mays
  Coding DNA Sequence Number=SeqID_29581
MVRERRTQTNTMSKNTRDTRFIPRFGHTTKVPYFLVEAPTKSRVSFNPNPPFADHKGQAHTIIFAQTSGSNQEEQEGFRDEAPKSQLFNLTQRFLSKYLKWERQEVCERDWEVFLRLEMEFCACSTVGKSVGGVYKGAPKAGGR

SEQ ID NO: 72957 - protein, 115 aa, Zea mays
  Coding DNA Sequence Number=SeqID_29582
  Subcellular localization annotation: CTP_CleavageSite=68; ConfidenceScore=5.03e-01
MEARAHMSCNRRTGYYVQGNRTATCANAASSRLQNQCSDSKAAPRVTQQCQLSATIMGQSAAGIGTTVNMTKGGPTVIAATDVRKQRSNHQPGPGPTSRLASSPEAAGEPPSPVP

SEQ ID NO: 72958 - protein, 82 aa, Zea mays
  Coding DNA Sequence Number=SeqID_29583
MEDFEKFQDYDEMTMSSNDSVYVLDILDADNQAHPSAHLSVNAKVWSRDGSGKGELGLWGAGHVCAGELHRRGQIGTAVWCR

SEQ ID NO: 72959 - protein, 21 aa, Zea mays
  Coding DNA Sequence Number=SeqID_29584
MVVKAIQANSGDSDDEKVGIL

SEQ ID NO: 72960 - protein, 128 aa, Zea mays
  Coding DNA Sequence Number=SeqID_29585
  Gene Ontology: Cellular component=nucleus; Biological process=cell division
  Homolog annotation: Hit_ID=Q2QN26; Match level="QueryCoverage=36%, HitCoverage=12%, E-value=6e-15, Identity=76%"; Hit description =Cyclin-A3-2
MEFLGSYLAKLNLLDYGCLRFLPSVVAALVMFVARLTIDPHTNPWGRCLPLSARRLQVVFGKNGGLEQISIRKGYVDMCTVDATTLTKISDVSPSSVLSDYSLIPLDLEELSALEVLFFVASILLLRA

SEQ ID NO: 72961 - protein, 111 aa, Zea mays
  Coding DNA Sequence Number=SeqID_29586
EVGKRAYTTAAESNEDDERREDDGKEDLQEGAAATIVIRISRKVQQRLSTIGILVVGALPWGSDRMQAHRSEGQHARTMRDAGSGSPDPWERQRAGDGRMRRLAGSVAMRG

SEQ ID NO: 72962 - protein, 116 aa, Zea mays
  Coding DNA Sequence Number=SeqID_29587
  Gene Ontology: Mol. function=protein serine/threonine kinase activity; Biological process=protein amino acid phosphorylation
  Homolog annotation: Hit_ID=Q2QTL1; Match level="QueryCoverage=72%, HitCoverage=13%, E-value=3e-14, Identity=53%"; Hit description =Protein kinase domain containing protein, expressed
MDSARSWLQKLQPRDKDRERGAKTPAPASPNGGAGNSARMAAAAGEEALSSATKQKVAAAKQYIENHYKSQMKSLQERKESLSMPFLGEPGSVGLLTFYLFANTYKIAKGLFGSRD

SEQ ID NO: 72963 - protein, 132 aa, Zea mays
  Coding DNA Sequence Number=SeqID_29588
ELNSDAPKMSCSYRVAPTYGGTSNMPSPPPPGLANAHDAPGTVSHGSDDAPTVGNTTTGGNRRPPATAGMDIGSHFTSPRASSSPPRAHLAASCAAPPLRARPPALVQISSKPAARSTFHWRFPLSNVSERN

SEQ ID NO: 72964 - protein, 92 aa, Zea mays
  Coding DNA Sequence Number=SeqID_29589
MGKNNKRKREPTPPSEDFGDSEYSEEEFSSESEGSPAPIPLCGGGDDSDDGGRGGSSGGKDGDGGSSRGGIGDGGSSKGSNKGGSGSNRASG

SEQ ID NO: 72965 - protein, 140 aa, Zea mays
  Coding DNA Sequence Number=SeqID_29590
MSSPACARGPTHSDHPRRRPAHRRDPQNLPYTLGHLTGAVSPPHACLWASEASEAEVVVVAAATATAEWRLESDRWLELPESALGTSARWSSGAVVAATNGVPHPAGLPAPAEHAFLLCAYFLTSAECNHTSELILQLAA

SEQ ID NO: 72966 - protein, 73 aa, Zea mays
  Coding DNA Sequence Number=SeqID_29591
MAGVSAREREGVALGQGRRREGAGEEDGEGFTAGEDDAAGSSEGELTLAVLTSPQVKNKYPRMMRMKDAVMSS

SEQ ID NO: 72967 - protein, 55 aa, Zea mays
  Coding DNA Sequence Number=SeqID_29592
MAGGGASFSRRTPVISGSGEAQGGDENDGFGIGYGKGEDEAMEEDFQEFQDYDEF

SEQ ID NO: 72968 - protein, 141 aa, Zea mays
  Coding DNA Sequence Number=SeqID_29593
MADGLQVPSMASITSEGINGKSNGREKRTRGIRGLQDAGGTDVGPWGALGLLGCSARGHRGVGVGSGCAPWLLGGCALASWARGEADVGARNWKKTHRLARSTRGGRRPKSGEGETASPVRQCLGSSLEKLHGFTGKRSRG

SEQ ID NO: 72969 - protein, 49 aa, Zea mays
  Coding DNA Sequence Number=SeqID_29594
MEGKPSRERKSELKRESPPLAGVGEFICGRESKAGMLVSGEESGLLTAR

SEQ ID NO: 72970 - protein, 46 aa, Zea mays
  Coding DNA Sequence Number=SeqID_29595
MAVMGSTSEKMYLWQVRKQQIFVAFVPRWCLRKKTRIEASGGRVLL

SEQ ID NO: 72971 - protein, 292 aa, Zea mays
  Coding DNA Sequence Number=SeqID_29596
  Homolog annotation: Hit_ID=A7P225; Match level="QueryCoverage=43%, HitCoverage=27%, E-value=8e-16, Identity=37%"; Hit description =Chromosome chr19 scaffold_4, whole genome shotgun sequence
MPNNGGSLANMWGRASAKPKPSSTTNSIAVESVSATLDAQICAKEEADGDSNDDEQGIKYKGESTNANNRKRRAVFDFSDDEEVDNIISIASPEVPKQHTPDPVIETAEDTKVNQKNLENKDDVPNTEKGSSMGWILTSLLNYKSSMNKEEKYLQGDRRVGDGRGDVEAELGLWCGGAAFWRRRDGELGGGGTEADEIGQGSDAAELAKRGERATGRRASAAARPTGGGAATLFCCGGTVSGNEAADERESCVGGLGDLGFFIKFDGVHMAHELNSKGDAGDFDGDFNDDEF

SEQ ID NO: 72972 - protein, 259 aa, Zea mays
  Coding DNA Sequence Number=SeqID_29597
MAAVVDAEVVAAEEVLVADGIAATIRAPGLRLFGFDSLSLPLEWGRGRGARRSSVRPEVIAATVWPPGAEVVVAAAGAGGCEPPGVSSPRRPSNVGGCSYLRGRNRSSVCNGTLSAGVYSLRLSGPEHESLGSVGLAARGFSCLVKGTLGRSAMSQSRRQRCQHGQRQSWLEKKLRRPEPGQAVHWRDRHRNRVAEAMSRADVLGGQLTEAMERPVEPSARAGFPEETLAAMAQARCRQVPSRWRSSDRVAVRGRVGFR

SEQ ID NO: 72973 - protein, 100 aa, Zea mays
  Coding DNA Sequence Number=SeqID_29598
  Homolog annotation: Hit_ID=A3AI58; Match level="QueryCoverage=66%, HitCoverage=22%, E-value=4e-07, Identity=54%"; Hit description =Putative uncharacterized protein
MQTSLVAAQLRPTLSVPDLLCHANLLSFSMEGKLLPWIECLESLGLPMRPYPPSHAIPPAAPFLSSRAQATSSCSGGDGVKELWDVLDSCKKKLPLQHLQ

SEQ ID NO: 72974 - protein, 177 aa, Zea mays
  Coding DNA Sequence Number=SeqID_29599
  Homolog annotation: Hit_ID=Q6QP51; Match level="QueryCoverage=100%, HitCoverage=86%, E-value=4e-22, Identity=43%"; Hit description =Putative growth-regulating factor 1
  Subcellular localization annotation: CTP_CleavageSite=81; ConfidenceScore=5.41e-01
MGAIKVKAQFTQGTRSRLARAQPRAKAADTGGFTSRPRVPSSDGPTFDSPEAQLGRQGRSDRSHFAAPLTDLTGKQRRLPRSDCYATRQRLGLNLDAGQWTPSRPTPGLGLSLDLGRRTPSRPTPGLGLSLDLGRRTPPRPTLGLGLNLDRGGVIASPDLGLGPTTSQGGHHYPTPS

SEQ ID NO: 72975 - protein, 102 aa, Zea mays
  Coding DNA Sequence Number=SeqID_29600
  Subcellular localization annotation: CTP_CleavageSite=66; ConfidenceScore=5.43e-01
MTLGQNQCKNLSLHYGPSGGKARTVCDLARTVRPQARTVRPQARTVRYGVYQSRLGGTPFRSSSTRSASPSGAEGASGRAEGASGRAKTFSGLGVSSVLTEG

SEQ ID NO: 72976 - protein, 505 aa, Zea mays
  Coding DNA Sequence Number=SeqID_29601
MEAHTSCNRRAGYYVREAAPPLAPVPRLLDCGTGAATRGNPAHGPTVPTKHTGHGSVSRGRRRDGRYGQKWAGSNGGGRRAEAAIKSSASSRPLLEQQENPLPRRDTFGRRSRRRFTFAMMTASKKGPGKGYSERDPSLRRKRARALLLIRGSKAGPSEGFDSRLRALGLRAHYWSEVRRLAPRKGSTAASGHSGSAPTTDQGFVGWPPKGSTAASEHAERGMTLGTFDTWSRLRLHSRGTLGHFRDQQERFCNGIPSEGGIEPSDPIKRDQGLLSGTIIRGTPKTPKSQLPRAGTVDQGRFTPRSRVSSSNGRTFDSPEAQLGVRLTTAKISLRRHRKLRLARPQGSDSTLTSDDGLCLAQPQGSDSTSTSDNGLRLARPPGLGLYLNLGRWSPPRPTPGLGLYLGLGRRSPPRPTPGLGLDLDLGRRSPPRPTPRARTLPRPRTTTSASHDPGARTLPRPRTMVSASPDPRARTQPRPRRSLRLARPRARTDHVTGGPSLPYP

SEQ ID NO: 72977 - protein, 110 aa, Zea mays
  Coding DNA Sequence Number=SeqID_29602
MGSARVTFVLLSLEEHNFAEVGTFQPSLDFKDFSSSSPAASPCRWSPKTVTTSLMVGRSKPGCGLCPALSFKDLHHPCWGGGQGERALTGLAEGADLDNAGLVGHERRQL

SEQ ID NO: 72978 - protein, 70 aa, Zea mays
  Coding DNA Sequence Number=SeqID_29603
  Subcellular localization annotation: CTP_CleavageSite=42; ConfidenceScore=5.54e-01
MATLFKGGSPPPPKRGGVPPPFRGVQRHMLRDQRVLSKSKTSSSMVLEGVATFQVAEEGVTKTPTVRRSE

SEQ ID NO: 72979 - protein, 140 aa, Zea mays
  Coding DNA Sequence Number=SeqID_29604
MVTPVGPSLEQKGWAAERTGWAVSFLWLNLSGCENPKKGSEKRSKELVARPSPEYIKTKARPVQCFARTRRGIQKLKAKRPFLERLATVAPRTTLPVALTPRRDRRRLWQEKRATLRLRHDDRVKKGTGKGGYPEKGPSS

SEQ ID NO: 72980 - protein, 132 aa, Zea mays
  Coding DNA Sequence Number=SeqID_29605
MSTEKRHLDQIELLSVRRLLLNHLIISCGGLSLDWASITENRRGLGAKNTETQNPGTWTAGCKVAHDGPRIRSGDDTSAAHDDGALHGVQAPTGRLRQRGGFCSQAGRAVTRSAGPSGDLARQASDALVVRR

SEQ ID NO: 72981 - protein, 654 aa, Zea mays
  Coding DNA Sequence Number=SeqID_29606
  Gene Ontology: Mol. function=protein binding; Cellular component =nucleus; Biological process=cell division
  Homolog annotation: Hit_ID=Q6Z7H3; Match level="QueryCoverage=87%, HitCoverage=95%, E-value=1e-176, Identity=56%"; Hit description =Cyclin-T1-2
  Pfam annotation: Domain name=Cyclin_N; Domain location=89-222; Score =9.7; E_value=1.7e-05; Accession=PF00134.14; Description=Cyclin, N -terminal domain
  Subcellular localization annotation: CTP_CleavageSite=33; ConfidenceScore=5.17e-01
MARNVYTLRPCFCSLASFSRSPVPSRALYLFLVATTWRSPLPPCPGLYFGTFTGDEHPSGGCTEPIQQGVSDILMDGVPNILEKSSHECMYSWYFTREELEKFSPSRKDGITENKESEIRHLYCSFIRDVGIRLKLPQMTLATAVMLCHRFYLHQSLAKNGWQTVATVCVFLASKVEDTPCPLDHVVRVAYETMYRRDTAAAQRIRQKHPYRPLLDAMQNLGINQKEVKQVAWNFVNDWLKTTLCLQYKPQYIAAGSLYLAAKLHNIKLPLHGAHVWWHQFDVAPKPLEAVIHQMMELAALKKLMPARPNPVKLKETLCEAKLSLSNSPDSVLNQSNLLISSSSPDIGEPSDKVQVDSCQYLISSHMGDCRVSGPDSSSLNTCANRNVSCKAHDEESLDQALIIKHDSGMMPSSNQTSLYATVGTEGSAELKQDVSHCNDFNIRVNDESLNQVLRNQHGDAIPLPDVVSLDAKVDKERSWCVEPLIANSDCCTDSVNVDSLCTDQRLADAPSGPTADAPSMLAEEESYPFSAKLENIDVARIKGLLMKRKSRREIQDRAIASDGLSEEDWIERELESGIVTNQEANCAAISDELSDEAWIERELESGIVVGPRNEQAITFDGLSEDDWIERELESGIIVEPAPATKKRKLESSC

SEQ ID NO: 72982 - protein, 58 aa, Zea mays
  Coding DNA Sequence Number=SeqID_29607
MTWTPHRLAIVHLPWLTARGKVLTVDHRLSAVRRVAQSFHRVAVTCYCCQINAEPKQL

SEQ ID NO: 72983 - protein, 28 aa, Zea mays
  Coding DNA Sequence Number=SeqID_29608
MGVLHLLLTPMGVLHLLLTPMGIGGRNG

SEQ ID NO: 72984 - protein, 180 aa, Zea mays
  Coding DNA Sequence Number=SeqID_29609
  Subcellular localization annotation: CTP_CleavageSite=54; ConfidenceScore=5.56e-01
MRLVTTWALLCGSAPLNASRDSPFASSSRITVAKNTERKSTRVRENRGAAAVVVVQSRGKTINQSLGELRATAYCGFSELVVLATLRRPTSSSPGLREEKHPPTPKFIVFKVGGKHPSATNFTTGALSWVPPLNKNSKTLMFPHLQQHGFENPEYRVYFRKSYPTKEKDSQGYAGLRESR

SEQ ID NO: 72985 - protein, 188 aa, Zea mays
  Coding DNA Sequence Number=SeqID_29610
MGTLEGRDLSLVLGQDSYVLAAQKREEQGQMQRATCSTRSELARARPTHALACPSSRQSQAGAVARARAYKAARDFDRTPPRTLDLTGARNHRRLPHARRARGHPSPCHCRPATRALPSHARPLEETVHASMKLPEQGIGVCFTGGASPRSPDFTRPPVNVDRVILCSILRFLVHTVSTSPRKAHRAI

SEQ ID NO: 72986 - protein, 98 aa, Zea mays
  Coding DNA Sequence Number=SeqID_29611
MGKHVPSLLMLLLCRVTALVPTITGMGDHISGRMRGKVCGQDHSGIRTLILIPISSRRLRIPMDPCPQTIFILLSRWIQSIPNLARVLEKSLDFYRDP

SEQ ID NO: 72987 - protein, 391 aa, Zea mays
  Coding DNA Sequence Number=SeqID_29612
  Gene Ontology: Mol. function=RNA-directed DNA polymerase activity; Cellular component=chromatin; Biological process=RNA-dependent DNA replication
  Homolog annotation: Hit_ID=Q2QRZ1; Match level="QueryCoverage=25%, HitCoverage=7%, E-value=2e-14, Identity=38%"; Hit description =Retrotransposon protein, putative, Ty3-gypsy subclass
  Pfam annotation: Domain name=Retrotrans_gag; Domain location=310-375; Score=8.6; E_value=0.0079; Accession=PF03732.8; Description =Retrotransposon gag protein
VLQGAGYTTPPQYAVQLFEKHRVSRYRVRMTLEPHPLQPGWRSLDSESFGYWAEDTIEAIALHGLTTFCGFHPLELSTHPIGLFPAEKEDDQMWKDRVEHAKDIWALYLGQTAHLMVRCMDALYRLQVRRGEAMSHLMALLEATKITLDNRVELVVDLSTEMVEKDLQVEQMSNEIQELEELVGTRENTIEVLEDQLINTQQQLVEANQHLDMHHQEIQDMEANEDVDIEGGEEPEPASSLDTSGSGRPPSPESSVASRMRFCDSWLSDSRRLSIMVVEEDLLDADVWLRVVESKFPLLNGVCSDVTKVRFATQQLRGPALTWWDHFLAMQPVDHEGNRTVLQYAEAFNDLCQYVGYHADTDEKKRDRFRRWLNTKLRDRLTPSGPTVTMS

SEQ ID NO: 72988 - protein, 131 aa, Zea mays
  Coding DNA Sequence Number=SeqID_29613
MVQRVTRSTRSGGVTNSGERERTVPVGLVLGSSSGKLHGLSRKLFEGSDGAEVGGKGLVHGGRPRAALASRGEVAGVAGELGRVRRGADGGSSGFDLGLASYEEVKLGLVENGRQNMSNQLGLLSNFSRVS

SEQ ID NO: 72989 - protein, 82 aa, Zea mays
  Coding DNA Sequence Number=SeqID_29614
MRKWARPSPLLLMLLSCRSNIPLDRPTRWQGGRPSHTINYILHGTCKNGATSKAEYTNTQLDLTGLTALAYNAPLTPAAAVQ

SEQ ID NO: 72990 - protein, 77 aa, Zea mays
  Coding DNA Sequence Number=SeqID_29615
  Subcellular localization annotation: CTP_CleavageSite=51; ConfidenceScore=5.46e-01
MGISSAKSLRRAEAVSDRSNDANSTSARGSSAVVCGSFTLCSFVLTALHVRNSESEDCDMNEGFMPKVRKNTFPLLE

SEQ ID NO: 72991 - protein, 91 aa, Zea mays
  Coding DNA Sequence Number=SeqID_29616
MGKPVPSLLMLLLSRVTALVPTITGIGDHVSGRVRGKVCCQVQSGLAFQSWGRQILDGRFWCWILGYLLSNSLLRHEDVLFVSEVAIYRMQ

SEQ ID NO: 72992 - protein, 46 aa, Zea mays
  Coding DNA Sequence Number=SeqID_29617
MTSPTSSTTSLEIFRHWHCTAAIGVSGALDAKAVSPGREWGIDGDG

SEQ ID NO: 72993 - protein, 197 aa, Zea mays
  Coding DNA Sequence Number=SeqID_29618
  Gene Ontology: Mol. function=binding; Cellular component=outer membrane; Biological process=cellulose biosynthetic process
  Homolog annotation: Hit_ID=P37650; Match level="QueryCoverage=87%, HitCoverage=15%, E-value=5e-90, Identity=98%"; Hit description =Cellulose synthase operon protein C
MVGWLGWQAGQRSQADTLMRNLAQQKSNDPEQVYAYGLYLSGHDQDRAALAHINSLPRAQWNSNIQELVNRLQSDQVLETANRLRESGKEAEAEAMLRQQPPSTRIDLTLADWAQQRRDYTAARAAYQNVLTREPANADAILGLTEVDIAASDKAAARSQLAKLPATDNASLITQRRVRWHRRSLAIPQQRSGRLLS

SEQ ID NO: 72994 - protein, 453 aa, Zea mays
  Coding DNA Sequence Number=SeqID_29619
  Gene Ontology: Mol. function=protein binding; Cellular component =nucleus; Biological process=DNA integration
  Homolog annotation: Hit_ID=A3AC05; Match level="QueryCoverage=90%, HitCoverage=30%, E-value=0.0, Identity=82%"; Hit description =Putative uncharacterized protein
  Pfam annotation: Domain name=TPR_1; Domain location=157-190; Score =21.4; E_value=0.0034; Accession=PF00515.19; Description =Tetratricopeptide repeat
  Pfam annotation: Domain name=TPR_1; Domain location=200-233; Score =14.2; E_value=0.11; Accession=PF00515.19; Description=Tetratricopepti de repeat
  Pfam annotation: Domain name=TPR_1; Domain location=240-273; Score =31.9; E_value=2.3e-06; Accession=PF00515.19; Description =Tetratricopeptide repeat
  Pfam annotation: Domain name=TPR_1; Domain location=371-404; Score =9.0; E_value=0.44; Accession=PF00515.19; Description=Tetratricopeptid e repeat
  Pfam annotation: Domain name=TPR_1; Domain location=411-444; Score =9.5; E_value=0.38; Accession=PF00515.19; Description=Tetratricopeptid e repeat
  Pfam annotation: Domain name=TPR_1; Domain location=60-93; Score =14.9; E_value=0.086; Accession=PF00515.19; Description =Tetratricopeptide repeat
  Pfam annotation: Domain name=TPR_2; Domain location=157-190; Score =18.2; E_value=0.031; Accession=PF07719.8; Description=Tetratricopepti de repeat
  Pfam annotation: Domain name=TPR_2; Domain location=200-233; Score =19.3; E_value=0.014; Accession=PF07719.8; Description=Tetratricopepti de repeat
  Pfam annotation: Domain name=TPR_2; Domain location=240-273; Score =26.0; E_value=0.00014; Accession=PF07719.8; Description =Tetratricopeptide repeat
  Pfam annotation: Domain name=TPR_2; Domain location=371-404; Score =8.7; E_value=2.5; Accession=PF07719.8; Description=Tetratricopeptide repeat
  Pfam annotation: Domain name=TPR_2; Domain location=411-444; Score =15.1; E_value=0.27; Accession=PF07719.8; Description=Tetratricopeptid e repeat
  Pfam annotation: Domain name=TPR_2; Domain location=60-93; Score =15.1; E_value=0.26; Accession=PF07719.8; Description=Tetratricopeptid e repeat
  Pfam module annotation: Pfam domain module=TPR_1::TPR_1::TPR_1::TPR _1::TPR_1::TPR_1::TPR_2::TPR_2::TPR_2::TPR_2::TPR_2::TPR_2; Domain location=157-190::200-233::240-273::371-404::411-444::60-93::157 -190::200-233::...
  Pfam module annotation: Domain location=240-273::371-404::411-444::60- 93
MARGGGGRSKKEEEKKNCGGRSAVTRRRRRRRRCEYVEALRWLRADYEVSVKHLPQRHLLPSCQSLGEVYLRLGRFSEALTYQKKHLQLAKESDDLVEQQRATTQLGRTYHEILLRSENDHSAIRNAKKYFKSSMKLARILKERSPSQKSDFLKELIDAYNNMGMLELELDNFEEAEKLLIQGLKICDDEEVDSYDDARTRLHHNLGNVYTELQNWKKARGHIEKDIEICRKIRHLQGEAKGFINLGELHYRVQKYDNAKLCYNKALEVARSLEDEDALIEQIHQNIETVTKAVEVFEQLKEDELKLKKLIRDTSNARGTSKERKLLLDQHAWLDSLIEKARMICAWQKHKEFSKGKKRVANELRDKEKLSDSLLSIGESYQKLRNFSKARKWYMKSWNIYRSIGNLEGQALAKVNIGNVLDSCGDWAGALQAYEEGYRYYLDVFPGPKVRRF

SEQ ID NO: 72995 - protein, 294 aa, Zea mays
  Coding DNA Sequence Number=SeqID_29620
  Gene Ontology: Mol. function=transcription factor activity; Cellular component=nucleus; Biological process=regulation of transcription, DNA-dependent
  Homolog annotation: Hit_ID=Q6K7E6; Match level="QueryCoverage=94%, HitCoverage=82%, E-value=6e-70, Identity=51%"; Hit description =Ethylene-responsive transcription factor 1
MRTSRPTSRTLKQTPENSDLELGEGADDDVIEIKPFAAKSTFSRDGLSTMTTAGYDAPAARLAKRKRKESIQGYPPAPLGPEEAARAYDAEARRIRGKKAKVNFPDAPAVGQKCRSSSASAKALKSCVEQKPIVKTDMNILANTNAPFYQSVNYASNNPFVPAMNSTVSFEDPIMNLHSDQGSNSLGCSDLGWENDTKTPDITSIAPIPTIAEGDESVFVNSNSNSSMVPPVLENNAVDLTDGLTDLESYMRFLMDGGASDSIDSLLNLDGSQDLGSNMDLWTFDDMPIAGDFF

SEQ ID NO: 72996 - protein, 79 aa, Zea mays
  Coding DNA Sequence Number=SeqID_29621
MAYHRVDPAPFLHQGFATAHIQHREIMACAITRAQPPLHDDWAIVLIQPLPVLELNFQGIIGVVREYLVDQWNLEICAI

SEQ ID NO: 72997 - protein, 111 aa, Zea mays
  Coding DNA Sequence Number=SeqID_29622
MAHRSYSGPPEVFSPPFSPLRPWIHGLFPAIEFAVAPSPSLPNSSDPGATLARASLYSGDLTAVERSGAVCSHNEQSEVPECVVGDLPEQQPGGDASNMDDFEEFQEYDEF

SEQ ID NO: 72998 - protein, 875 aa, Zea mays
  Coding DNA Sequence Number=SeqID_29623
  Gene Ontology: Mol. function=protein binding; Cellular component =nucleus; Biological process=DNA integration
  Homolog annotation: Hit_ID=A3AC05; Match level="QueryCoverage=100%, HitCoverage=64%, E-value=0.0, Identity=52%"; Hit description =Putative uncharacterized protein
  Pfam annotation: Domain name=LRR_1; Domain location=455-477; Score =4.9; E_value=37; Accession=PF00560.24; Description=Leucine Rich Repeat
  Pfam annotation: Domain name=LRR_1; Domain location=480-502; Score =12.8; E_value=1.3; Accession=PF00560.24; Description=Leucine Rich Repeat
  Pfam annotation: Domain name=LRR_1; Domain location=536-560; Score =0.5; E_value=2.5e+02; Accession=PF00560.24; Description=Leucine Rich Repeat
  Pfam annotation: Domain name=LRR_1; Domain location=621-644; Score =1.8; E_value=1.4e+02; Accession=PF00560.24; Description=Leucine Rich Repeat
  Pfam annotation: Domain name=LRR_1; Domain location=648-664; Score =5.2; E_value=34; Accession=PF00560.24; Description=Leucine Rich Repeat
  Pfam annotation: Domain name=LRR_1; Domain location=677-700; Score =3.3; E_value=76; Accession=PF00560.24; Description=Leucine Rich Repeat
  Pfam annotation: Domain name=LRR_1; Domain location=705-722; Score =0.3; E_value=2.7e+02; Accession=PF00560.24; Description=Leucine Rich Repeat
  Pfam annotation: Domain name=LRR_1; Domain location=811-833; Score =5.0; E_value=36; Accession=PF00560.24; Description=Leucine Rich Repeat
  Pfam module annotation: Pfam domain module=LRR_1::LRR_1::LRR_1::LRR _1::LRR_1::LRR_1::LRR_1::LRR_1; Domain location=455-477::480-502::536- 560::621-644::648-664::677-700::705-722::811-833
IAVEADLPNVQLSALENMHYSHMVRFDNIEEAKKMQEKIDNLKQTLNQCEARDTVSDYCSETDTEGGCTSDNTLDAQNDHGQAANNYEEPDDDVTLASLVQRSGSSSKIKVPKIRNSSKKFDELCDVTEDIHNSSKKVDELGDMAEGTRAVLSRSRSDHSVGRKRVRVILSDDESDENHENVQFKKTSTSPADSMSVSADHGASSSRNQDTLQVNQTRDAPYPAEESICSFKSSSPIDHAFEGIGLGASSAGKGPTSKSAASFSKLSTPGSNSLNESQNAVGSQSKDADNPQTLIRHLLASYTVTPTMDILWNKMGCFLCSTSGPSESAAIWFTWMDVLVYMKISDEKRAKGLLPIIGELKFRGKVLEDAVSIYYDDQLASEQKCVDVVIDDWVPKQLMKLYVDFCMKSLEAPNKKLLTKLYNLEVSEDEIIVSDCGLQDMSIVPFLDALRSHKTIAVLDLSHNLLVCRMICECAVLTDRLEVLNLSGNRLTDACSSYLFTILKKCKALYSLNVEQCSITSRTVQKMTDALHEESVLSHLSLGKNNPISSNTMLNLLSKLASLTRFSELSLTGIKLNKLMVDKLCLLAQSSCLSGLLLGGTSIGPVETTRLTEALSCTSQDFLRLELSNCGLTTPDFTQICTNLSRINILELNLGGNPINLEGCDAVQRMLVNPQCSIRSLSLDKCNLGLAGIVRVIQSLPENSQLEELRVSKNTNLALETTTKYDEDMQEVSTASEQKQCNDPETTNDIAPGNIDFANMQVPDSEDEADNDAHRARSGSRRSCASSSQKNSYSSCQMIEELAKALISAKQLMVLDLSCNGLSEEAVQSLYSAWASVPRGDGMARKHVNKEVVHFSVDGMRCCGLKPCCRRDLQM

SEQ ID NO: 72999 - protein, 196 aa, Zea mays
  Coding DNA Sequence Number=SeqID_29624
MRRPQQEEVAPSGVTVAETFAQDALHHSKGQDPSHSHAARLQLQPLQATTTQNGQRQWRLATATVDAAVVVITTAATAATVPAAKASRPPSSPEGQKAPTQRTARAPHPDRPASREVHHRVLHARQGRRTSATCKSDQQPQHEDKASRRQTPALATTAVGAARAGRRPASSRPTHIPQLSSHDHQIQPAENWIWWS

SEQ ID NO: 73000 - protein, 396 aa, Zea mays
  Coding DNA Sequence Number=SeqID_29625
  Homolog annotation: Hit_ID=Q5NAA7; Match level="QueryCoverage=67%, HitCoverage=51%, E-value=2e-24, Identity=33%"; Hit description =Putative uncharacterized protein B1008C01.13
  Pfam annotation: Domain name=DUF1618; Domain location=201-338; Score =3.3; E_value=1.2e-05; Accession=PF07762.5; Description=Protein of unknown function (DUF1618)
MSGTSSFTTGESSRAGEQPERDEVVEFKARTWVALSSIIVVHSANDEGRRDARAPCLRHLFSTSSPRRYADHPVVLSACSDHFLFRATPAEGPSNLICFFVGDVNARTVVRLPEVPFHMAVNTIPHPQYSIGLIADPRSRHGGHYMVAQLHPTFTTHHTTLLCYSSVTDQWTARPLASTESEEHHRWGAHGVLAHGGLLWWIDLFYGMLVCDPFAADDNLHLRFVPLPVGSIRTGRRVPGPENIGRERFIRPSQGKLRYVEIQGAPSGMRTSNYQPPSNPQVRMFTLVSQEGQHHWVHEYTATFLDIWSHRSYAEAGLPQGVVPWLALIDPNNANTLYFFRGTTLFAVDGQTRQVLFRVRCLVLESARGGHRFQNSRFIGAWELPPALEPDDCTCQ

SEQ ID NO: 73001 - protein, 246 aa, Zea mays
  Coding DNA Sequence Number=SeqID_29626
MVGVTSVRVGESERLMRAVPFPRAANLPYECPGYSFYRRKERAQVGRGGGSSEVEIESVFQGRGRVRAPGWARRRPSVEARAESEPWGRARRSSSSSGAEAESEPWGRARRSSSSSGAEAESEPWGSGEAEFVVFRGRGRVRALGSGEAEFVVFRGRGRVRALGSGEAELPMAPEAGLGCCQPHSVEWHSSRSGAGGAVLSSGRSVERRSDCGHFGSVDWRARVRIRCQAVLALNASAVRSVGVAI

SEQ ID NO: 73002 - protein, 187 aa, Zea mays
  Coding DNA Sequence Number=SeqID_29627
MSSCSLMHRVFPPSEPPDGEHPQSFRLVIGGTQLRGSWYLSAIVRLQGFSSVSPAASPRRWSPKTVTTSPWVGRSKPGCDLGPALSFKDVHHPRWGGGRAEPELYLPRGFVGQPLLQHPRERALTGPVRGADFDNAGLVDGGRRQLQRVGLAGLAPGAPSCRMGGCRAARTGGPPKMSRAARAAFVF

SEQ ID NO: 73003 - protein, 239 aa, Zea mays
  Coding DNA Sequence Number=SeqID_29628
MQAACNRTKGAHPFNFDASSMETQAHTSCNRCAGFYVQETAPPLAPLPCLLDCGTSTATRGNPAHDPTVPTRHIGHGPVSRGGRRDGRYGQKCAGSNGSGRRAKAAVKSSAKLTRHLWQAKQATLHLRHNDRAKKGTGKGDTPKGILLREGNGPRAPLLIRGSKAGPSEGFNSRLRALGLRAHYWSEVRRLAPRKGSTAASGHSGSAPTTDQGFVGWPSKGSTAASDAERGMTLGTFNT

SEQ ID NO: 73004 - protein, 289 aa, Zea mays
  Coding DNA Sequence Number=SeqID_29629
  Subcellular localization annotation: CTP_CleavageSite=75; ConfidenceScore=5.24e-01
MGVAWDGGGAGVVVADPSFTGAPETTTGSIWGSSASRPPSWSSSCDRSSPILRLDACGGMGRHHGDDTGSTRWMRCEGREDEARPRPRVWRRRDAGQGERMMGRGREMADMLDLKTWRAQRGWRSRGVLGRGEAGELGVDGALGGERRGRHPRAGEDQPESTVAAKLALAVVERSAPWVRGDRHGWNGAVGEAQIVGEGAMGEAIESGVGVVGARPCDEERRERIARQNLAHALHQLLHRIFSSRCLLVATHASASVQKQVKPLPLPLPGQAEPSVISQVRPTNCNVPD

SEQ ID NO: 73005 - protein, 209 aa, Zea mays
  Coding DNA Sequence Number=SeqID_29630
  Homolog annotation: Hit_ID=A2Z398; Match level="QueryCoverage=45%, HitCoverage=36%, E-value=4e-29, Identity=68%"; Hit description =Putative uncharacterized protein
  Pfam annotation: Domain name=DUF947; Domain location=26-173; Score= -11.6; E_value=2.8e-05; Accession=PF06102.3; Description=Domain of unknown function (DUF947)
MEEYRWLSLGRMIGVNNFTTNKLQDQLAFAKIPLTVNQGGIQRVHIIKGCVDGSLLLELFTGDGEGTMIARFRKRYNFLFDEDVPTEKERLQKMIKKSEDQDAIGEMKSCVTWILASHPPKNVESEILREHIKKEREAAKARKRSYYLKKSELRERKLMNKYNELKVKSTRFKGMLVNIDTNNGDPQVAKNVNDMNQLCSLHVYFLFPS

SEQ ID NO: 73006 - protein, 61 aa, Zea mays
  Coding DNA Sequence Number=SeqID_29631
MGSRHSACSAEAGCRGSFVLLLLVTLLRGEVVTRMMVMTMVMVAFGAIYAQEFQDFDEFED

SEQ ID NO: 73007 - protein, 102 aa, Zea mays
  Coding DNA Sequence Number=SeqID_29632
  Gene Ontology: Mol. function=binding; Cellular component=ubiquitin ligase complex; Biological process=protein ubiquitination
  Homolog annotation: Hit_ID=A2WJW0; Match level="QueryCoverage=89%, HitCoverage=24%, E-value=3e-35, Identity=85%"; Hit description =Putative uncharacterized protein
  Pfam annotation: Domain name=Arm; Domain location=10-50; Score=33.6; E_value=7e-07; Accession=PF00514.14; Description=Armadillobeta -catenin-like repeat
  Pfam annotation: Domain name=Arm; Domain location=51-91; Score=24.4; E_value=0.00043; Accession=PF00514.14; Description=Armadillobeta -catenin-like repeat
  Pfam module annotation: Pfam domain module=Arm::Arm; Domain location =10-50::51-91
MGRKTNGQERKRNKTKIVDAGALEPLLGYLRSSDPNLQEYATVALLTLSASSTTKPVIGASGAIPLLVEVLKGGNPQAKNDVVMALYNLSTIADNLQAILSA

SEQ ID NO: 73008 - protein, 200 aa, Zea mays
  Coding DNA Sequence Number=SeqID_29633
  Gene Ontology: Mol. function=nucleoside-triphosphatase activity; Cellular component=DNA replication factor C complex; Biological process=DNA replication
  Homolog annotation: Hit_ID=Q9CAM7; Match level="QueryCoverage=42%, HitCoverage=29%, E-value=3e-28, Identity=65%"; Hit description =Replication factor, putative; 74998-73295
  Subcellular localization annotation: CTP_CleavageSite=24; ConfidenceScore=5.30e-01
MAHGLPSTRGFLPHQQRRNPSRPRSVSPWKEARGPLLDPSLHGRNRYHKTTTARFSPSSGSRGASVAQPSTRAVAAPDADVYDIPWLEKYRPARVADVVGNSDAVTRLEGPPGTEKTTSILALAHELLGPNYRDAVLGLNASDDRGLDVVRNNIKMFAQKKYWLLFGLGCPCVFYNCVQLRFYKHAWSRIGYKLGLVNLT

SEQ ID NO: 73009 - protein, 193 aa, Zea mays
  Coding DNA Sequence Number=SeqID_29634
  Homolog annotation: Hit_ID=Q6AT24; Match level="QueryCoverage=26%, HitCoverage=19%, E-value=2e-14, Identity=72%"; Hit description =Putative uncharacterized protein OSJNBa0029B02.5
MVRPSERVQGQRKRRKKTRRKGKKQGGKKDSPERQRSRLKLAGHIGDAKEPTAANPLNKSIDTRLMKMLSILILTDLEELEIAKWTGARGKNSEKSGQSYGLQGERAKRSGPEQPVSGVPATATTRPGANPSELSGLWLVAKLAESWSLPYLDAFGAAKNMHVYEVSFIDSWVLSLSPMRRAFLKVMRKSNNH

SEQ ID NO: 73010 - protein, 213 aa, Zea mays
  Coding DNA Sequence Number=SeqID_29635
  Homolog annotation: Hit_ID=Q53P38; Match level="QueryCoverage=20%, HitCoverage=9%, E-value=8e-08, Identity=67%"; Hit description =Transposon protein, putative, mutator sub-class
MQPGCSPPPVAIQKDDRQPRGGEKQAGLWPPPTLSFKDVHHPRWGGGQAKSGPYPPHGLVTRFFLQHSEEKDVHQPCGGGEPRLRGVSWLQAVSCSVSGPLGWMASAPPPTLPPAALARAWLSVHRTGNSRADRNGVPDLPSGVGNYRFGGDVTQTIRLPINTIRTPQSQHHFSSGYQPCAARLTSPRGLVLAYESKTQARTRKNTIWNIADE

SEQ ID NO: 73011 - protein, 111 aa, Zea mays
  Coding DNA Sequence Number=SeqID_29636
MESGTPVLACAAARRVQQQPQTQGGQTGQARRLLGDPDVVCQWIGQDALNAGMAHRPLAWWQAAPDVWPDVSPDVCWDDISQRAEPGVWPLRRGPHHGLHRKLRYLSIKYG

SEQ ID NO: 73012 - protein, 46 aa, Zea mays
  Coding DNA Sequence Number=SeqID_29637
  Subcellular localization annotation: CTP_CleavageSite=24; ConfidenceScore=5.01e-01
MAVMGSTSKKMYLCQVRKQQTFVVSVPRWSQNKKTKNNAAGGRVPP

SEQ ID NO: 73013 - protein, 254 aa, Zea mays
  Coding DNA Sequence Number=SeqID_29638
  Homolog annotation: Hit_ID=Q6QP51; Match level="QueryCoverage=21%, HitCoverage=36%, E-value=2e-13, Identity=53%"; Hit description =Putative growth-regulating factor 1
MQAACNCTTGMHPFDFDASSMEAQAHTSCNRRAGYYVRKTAPPLAPVPRLLDCGTGAATRGNPVHGPTVPTKHIVHRSVSRGRRRDSRYDQKWAGSNGGSRLAEAAVKSSVGSRPLLELQGSPLPWREDDAPMFHPSNDSRTHNGCLANHPSRRINSAAGQATPLAGEVAASEHSGSTPTTDQGFEGWPPEGFDSRPRTCRARDDSRYVQYMAEARATLPRGSGAALANPAPAKPLTASTYQPENSEHDHAPGL

SEQ ID NO: 73014 - protein, 543 aa, Zea mays
  Coding DNA Sequence Number=SeqID_29639
  Gene Ontology: Mol. function=aspartic-type endopeptidase activity; Cellular component=anchored to membrane; Biological process =proteolysis
  Homolog annotation: Hit_ID=Q5Z8N9; Match level="QueryCoverage=89%, HitCoverage=90%, E-value=1e-130, Identity=51%"; Hit description =Aspartic proteinase nepenthesin II-like
  Pfam annotation: Domain name=Asp; Domain location=107-469; Score= -62.0; E_value=6.2e-10; Accession=PF00026.14; Description=Eukaryotic aspartyl protease
MAHARSSHRRTGLLLAMAVVVVASLIAAADASSFGFDLHHRFSPVVRRWAEARGGPLAADQWPARGTPEYYSALSRHDRARRALAGGADDGLLTFAAGNDTYQSGTLYYAEVELGTPNATFLVALDTGSDLFWVPCDCRQCATIPSANGTGQDAPSLRPYSPRRSSTSKQVACDNPLCGQRNGCSAATNGSCPYEVQYVSANTSSSGVLVQDVLHLTRERPGPGAAGEALQAPVVFGCGQVQTGAFLDGGGGAVDGLMGLGMGKVSVPSALAASGLVASDSFSMCFGDDGVGRVNFGDAGSRGQAETPFTVRSLNPTYNVSFTSIGVGSESVAAEFAAVMDSGTSFTYLSDPEYTQLATKFNSQVSERRVNFSSGSADPFPFEYCYRLSPNQTEVAMPDVSLTAKGGALFPVTQPFIPVGDTTGRAVGYCLAIMRNDMAIGIDIIGQNFMTGLKVVFDRERSVLGWEKFDCYRNARVADAPDGSPGPSSAPAAGPTKITPRQNDGSGSGYPGAAPLPRSAGSRNAAAALGLGCLYLLLAAALV

SEQ ID NO: 73015 - protein, 132 aa, Zea mays
  Coding DNA Sequence Number=SeqID_29640
  Subcellular localization annotation: CTP_CleavageSite=63; ConfidenceScore=5.47e-01
MMVLASVATVSFAILLLFSLPSCLHLRATPFSAVGVGACACSPYSSDTSPNNDSRSGYCTSTRTFHIMRAPSFLSSSDDPFIFQAFALFFLPNLLPPPTVAAASRPTLVDADAQVFVVSFSGNEQKKYYGKS

SEQ ID NO: 73016 - protein, 208 aa, Zea mays
  Coding DNA Sequence Number=SeqID_29641
MKSRKALGLPSPEKSQPESGSPTSSEPGGPYEANAHQVLRERAGVIRSLGVGVLRGNDDRLRLRREVNARRVPRWGAGVVDSLDSQRGAASCLAMIAPPPPPAAGKVTGQARMLLFRHGGKTSSILPSSGGLTAVVVVVARRRKEYHVVAAIEGHEPKTLETEQRPGLERLLETTHLELDGKLFVNTQQAPTWRANCRRFDPGGSLNR

SEQ ID NO: 73017 - protein, 342 aa, Zea mays
  Coding DNA Sequence Number=SeqID_29642
MVMRPFTFGGTNGREDEPPHKERATALRFSASSFSPKPAVKKANRHAGSEKPPNGCALPQLRCNRRSNMRTQAHMSCNRRAGYWNRCSDSRHPAHGPIVTLSTKVTGQSAVETGVTVSVAIGGLAVITPTGPTCRLTFSPKAGPWATVSTLSQGYPLLQYKVAAHPCNTSRPPGERRPTPPHGQVQGHRVARKGSTSQYSSLGPDLRGHRTPMRTSPEPPRRHAGSLGRALDLLRGGCNPPPDQRDFLSDSLDTAVGGPCVRDWAVVFGGDEEAYYRGRQHAPRVSVRLLCTCEPARQVYDMWARAPMSEAGPLSSAEMKRHTTAGDGTLLARRFTFFALGD

SEQ ID NO: 73018 - protein, 123 aa, Zea mays
  Coding DNA Sequence Number=SeqID_29643
MVCHLLGWNVLAFGGRIRADAIPHGKLAAREFLLFVSCVLALPISSSSCCCWRSATSRGVALFRKCSVSRMFISLAVVESELGYGFVLRMSWWPTSMNWLSPGYAATARPQAPSAVVLPTLWL

SEQ ID NO: 73019 - protein, 247 aa, Zea mays
  Coding DNA Sequence Number=SeqID_29644
MDYAAPAGVALEAGSGQPHQRRRPPLHRRFAADSDHLCTSSDNHLRSEWLASSGDHLRVWAIAGSGGNHLCNGSLTSGGDHLSTDDSGQLCTGGRRLPQHARRGPRSRRPTGVRTRPSKSAAATPAAYGVLYDSPVRPAVQGKPWMWRTCARRDRRPRGRRTTTPRPNGRRQRRRRHQSHPGQEPGTRQLTVPAAGRPRVAEVCLLRKAGERPSPPNAGKRSGSSAHAEGRTLARLAFHPSEDDEHP

SEQ ID NO: 73020 - protein, 316 aa, Zea mays
  Coding DNA Sequence Number=SeqID_29645
  Subcellular localization annotation: CTP_CleavageSite=22; ConfidenceScore=5.69e-01
MSSSSLMRRVFSSSKPPDGGPVASPRWRSPKMVTSSLMVGRSKPGCDLGPTLSFKDVHHPRWGGGRAEPALYLPRSVSESSAWLPVAPLPEGGCRAVCTGGPPTMPRAARAAFVFWGGPAFAPGWRPRAEAGAPLVWEDLSGDLPGGWWPPPSAPRRRRLEKSPSPTGSPPPSAPRASGSSYLSSPLERGRGRGQDCSSAHPEACTAAARPSGAGVVVVVVRAGGGEPLPGCPSAGLTPESISRGLGSGWRPWKMVGRGPRGNRLSRLLGPDSRRSPRTASPSEAGSDLAEGVVDAEGAVAPFQREDPSLQDQIIL

SEQ ID NO: 73021 - protein, 200 aa, Zea mays
  Coding DNA Sequence Number=SeqID_29646
  Gene Ontology: Mol. function=kinase activity
  Homolog annotation: Hit_ID=Q6QP54; Match level="QueryCoverage=26%, HitCoverage=19%, E-value=1e-08, Identity=59%"; Hit description =Putative kinase
MAGRGGDSSEVEVESEPWGRARRRPSSEVEAKSEPWGRARRRPSFEVEAESEPWGRARRRPSSEVEAGAEPWGRARRSFLWCLRLDSAVVSLTLAGTRVRIRCQAILALNAPAIRSVGEAIWPRLLLREACPSWASGESKVRPLLEEALGRGVNPPGSTVPVRCWARARRDRAPGVDGALTCIAPIRPLQLVLMVVTSRV

SEQ ID NO: 73022 - protein, 21 aa, Zea mays
  Coding DNA Sequence Number=SeqID_29647
MAELAFGLLAFSLCAASISTT

SEQ ID NO: 73023 - protein, 190 aa, Zea mays
  Coding DNA Sequence Number=SeqID_29648
TGSGEAKSFGRGQGGVRPLGSGEAEFVVFRGRARVRALGSGGAEFAVFRVLARVRALGSGGAEFAVFRVSARVRALGSGGAEFAVFRVLARVRAPGSGGAEFAVFQVLARVRALGSVGSLFPMAPLARPDCLSDSLCRVALQSEWRRRRCPSVRPKVTRHGLLLLGQCLQQLLDVLINAEDALLHQILLF

SEQ ID NO: 73024 - protein, 193 aa, Zea mays
  Coding DNA Sequence Number=SeqID_29649
  Pfam annotation: Domain name=VQ; Domain location=77-107; Score=44.7; E_value=3.4e-10; Accession=PF05678.5; Description=VQ motif
  Subcellular localization annotation: CTP_CleavageSite=67; ConfidenceScore=5.66e-01
MAAKGKRGVINLQGPRPPPLTILPSDTTSSSSSSPQHRRPAKRPRRVVNVSGSGSGSDDNVRAPPALAATPGPLILYEHTPKVIHVHADEFKALVQRLTGRQLTPPGRGGGGGQEAVIRPLPSQQTAGDDPLVLTLGHGQKHAALPPPLPVVDHHAPPVLLPSPGGAVGGLLLSPGSFLFSPTTMQAIQELIS

SEQ ID NO: 73025 - protein, 189 aa, Zea mays
  Coding DNA Sequence Number=SeqID_29650
MEEDNEFGDLYTDILIPTHTPQSTSTLSNPVLVETLHRPPPHPNPTPVAAAAEEVDDDWLLGGSESMPRVDPTGDWTDEDDDGGEPAPPAKRSISADDINPLMGVVGGIPGRMGSRHHRQMFQNKNSLIEVTEKTADNPRQPPLTDLRQPRLLVDVLHLASLCTLYLDFWRFPDTVALSRGCAAMFLCL

SEQ ID NO: 73026 - protein, 80 aa, Zea mays
  Coding DNA Sequence Number=SeqID_29651
MDSANRINERCLELQKNKKSTKTKLEDDKRKVHPAKRSCGCPTILSRWRVVVLYASIYKDVPILVNLSDRFHLDKGIGEC

SEQ ID NO: 73027 - protein, 63 aa, Zea mays
  Coding DNA Sequence Number=SeqID_29652
MAAQPRESATVSGKRQKSRVFVQRHNFFGFQMVDIVDILYMLCLQLRLNPLTVIMETLLEKES

SEQ ID NO: 73028 - protein, 240 aa, Zea mays
  Coding DNA Sequence Number=SeqID_29653
  Homolog annotation: Hit_ID=Q6J9V9; Match level="QueryCoverage=31%, HitCoverage=25%, E-value=2e-14, Identity=61%"; Hit description =Putative uncharacterized protein
MASPSALGRDKASLPLDLSGRWRLEVVYPFAAIRSEEHVTEDPGEQQVEVAEQELIEGKLLRKQKQKASANGRVKNHCWPLFRGKRHLWQAKRAPFHLRHDDRVKKGIGKGDIPEKDPSQQRKRAPSPPTDQGGSKAGPSEGFDSHPRARRVRDDPGYVRYMAEARAMLPRKTALFAPLRLLCQPSGLGLRGNSPPHPTSVSGGVTSAPDLSLGLGKSRRLARPRPRTDYATGDTSLPYR

SEQ ID NO: 73029 - protein, 187 aa, Zea mays
  Coding DNA Sequence Number=SeqID_29654
  Homolog annotation: Hit_ID=A2YIE8; Match level="QueryCoverage=67%, HitCoverage=76%, E-value=9e-14, Identity=38%"; Hit description =Putative uncharacterized protein
  Pfam annotation: Domain name=VQ; Domain location=93-123; Score=42.9; E_value=1.1e-09; Accession=PF05678.5; Description=VQ motif
  Subcellular localization annotation: CTP_CleavageSite=83; ConfidenceScore=5.74e-01
MMHQQHNTTISPPSWAAAAAAAARGKRGVVSLQGPRPLPLILPPGTTTTTSSSSSSTPRPAKRPRRVVNSGGGDVSRAPQQSSAAAPGPVILYEHTPKVIHARADEFKALVQSLTGRGGGQEAVPRPPASSQQTAAGDLLVLTLGHHQHVPPPPPLPSPGGAAGFLLSPGSFLFSPATMQAIQELIS

SEQ ID NO: 73030 - protein, 104 aa, Zea mays
  Coding DNA Sequence Number=SeqID_29655
MTMTTTTIWWWTWTWWCCVVASLTDDERFSRELRNAEWVGVLDELELELEPGRRLSRHVVYIVVFSWMDGGQRRRPARKLQEMNEGAGKVLSRSRKKKKITAAS

SEQ ID NO: 73031 - protein, 570 aa, Zea mays
  Coding DNA Sequence Number=SeqID_29656
  Gene Ontology: Mol. function=RNA-directed DNA polymerase activity
  Homolog annotation: Hit_ID=A2YUU6; Match level="QueryCoverage=27%, HitCoverage=17%, E-value=2e-22, Identity=38%"; Hit description =Putative uncharacterized protein
MGSLSLDFSVGLHFEDWIFRKFNCPINPLPGKFDRHAFLLVVSFGRCSSRLCEESVGLLLQSFIGGSAKLFRPLQLLDRVFRFSLSCKELGFTVYRRHSFSCSSFKAYLHLWNSGAPNWIKEWQLFSEEESNSWTMVSRGRSAKASYADIARSSVLSGVMLVPLGGQIYKRDFHTFPSKFEGVIWEFPRSCGSVAEGFHGVSWTVQCDIVQQFMLGNMPEDEEPVPPYPHNGHQLPVEFFGLGQPVPNFQFDLDIPPMVQQDQPPAPVPLVNNEEEQFSYQFSGLEDLPSDESMGLFNDIVIPQAVNFPQEDVQDQEVVVLALPALPPADPFLEGNNDQNDQGAQNLNLNADDNIIVGFMTHLNQPSQDPTYKDFLAKKHFSSWAKLCPTPSADLISVPKLWAAFFMGLVMRLDSFEWARKFLLLEALSAFMEPNMETVPFKIPPKCLLPPSQDSLVEAQSPVTSVAVNRKKRAALVNTEVRRSARLREKAKGFKPCFGRKNNCSCCAGSPSPPSLSHRTIKELGVDSCKVDPQKLSLNSLSNSRSSSVAIQRPRSSSCSINEPSSPGAD

SEQ ID NO: 73032 - protein, 143 aa, Zea mays
  Coding DNA Sequence Number=SeqID_29657
MGKNNKRKREPTPPSEDFGDSEYSEEEFSSESEGSPAPVSPPASSDDSDDSQGIAAEVWTYIQAVERSGLEGSDESEYSSDEEDSDGGDEDEDDDDDDDDDDGDGDGSGSGRGGGDGSRGGTKGDSSKGSTKGDGGGRGRASG

SEQ ID NO: 73033 - protein, 39 aa, Zea mays
  Coding DNA Sequence Number=SeqID_29658
MAPKRKTANSSAAVIPAIDPNSQLPFAEYMVAPAVLKYS

SEQ ID NO: 73034 - protein, 52 aa, Zea mays
  Coding DNA Sequence Number=SeqID_29659
MARVACTLRGKRLDSGVSVLSVKKQQTFVASVPRCCLKKKIKTEAAGGSVLR

SEQ ID NO: 73035 - protein, 133 aa, Zea mays
  Coding DNA Sequence Number=SeqID_29660
MVLPQPILHTIAGPLRSVLVLHRLRQASVVDPGGSTAHMYALYGLVWEESSSDPPRFLAGVGASPHRRRVPWAASLASFLHPVCSPTLYALDQERVGLSGFGCRASACRDGVHRRELRRVDLCVAMTGCGSAG

SEQ ID NO: 73036 - protein, 94 aa, Zea mays
  Coding DNA Sequence Number=SeqID_29661
  Subcellular localization annotation: CTP_CleavageSite=57; ConfidenceScore=5.62e-01
MGTGSFFNLHNVQPPAKTKQRAGPRLRFAKPRRERVRRRRSARGLKERWPSTMEELAAGRGSHVSGERCTVSRMEFGRRLVHGGVGHGKEQREA

SEQ ID NO: 73037 - protein, 43 aa, Zea mays
  Coding DNA Sequence Number=SeqID_29662
RGGILVNGIPIRGRHSSPRDPFARGTGFRQITRQYFLGVPLAP

SEQ ID NO: 73038 - protein, 386 aa, Zea mays
  Coding DNA Sequence Number=SeqID_29663
  Gene Ontology: Mol. function=DNA binding; Cellular component=nucleus; Biological process=regulation of transcription
  Homolog annotation: Hit_ID=Q75LF6; Match level="QueryCoverage=20%, HitCoverage=39%, E-value=5e-23, Identity=67%"; Hit description =Putative transfactor
  Pfam annotation: Domain name=Myb_DNA-binding; Domain location=94-142; Score=19.8; E_value=0.011; Accession=PF00249.22; Description=Myb-like DNA-binding domain
MTAAPDLSLHISPPSPPEPRLLLGLELDDDTAAEAAAATKKADDAAAMREYNNLQVQRRQLHQPSQTAGHGFKRGTSGSAAAGAGGRRSSRAPRMRWTTALHAHFVHAVELLGGHERATPKSVLELMNVKDLTLAHQMYRTVKQQGADRPCVAGHGHARDMVVLLTTGVGEGDAGFVDDVSNSNSNSNNSVVVNNTVPAAFNNNHTDSRTPQSPGGREQQQQPAPAVDRRRDDAAAAAAACAWVVGRQVQHQRSCSEGVTKLQGLKVGDERVDRHHGDDAIAAHRLVEDEARDDHAGSGGGFQQRRPSPNNTSGTVSSSEWLNQQHCSGVMSVRVLGLPPATPPSLEMSLGRQGWQMDQQCGGEFEFDFEPSPPSAAKELTLLRCL

SEQ ID NO: 73039 - protein, 911 aa, Zea mays
  Coding DNA Sequence Number=SeqID_29664
  Gene Ontology: Mol. function=histone acetyltransferase activity; Cellular component=nucleus; Biological process=regulation of transcription, DNA-dependent
  Homolog annotation: Hit_ID=A2WMS6; Match level="QueryCoverage=93%, HitCoverage=68%, E-value=0.0, Identity=65%"; Hit description =Putative uncharacterized protein
  Pfam annotation: Domain name=DUF906; Domain location=424-691; Score =380.8; E_value=2.2e-111; Accession=PF06010.3; Description=Domain of Unknown Function (DUF906)
  Pfam annotation: Domain name=PHD; Domain location=356-422; Score =14.4; E_value=0.00027; Accession=PF00628.20; Description=PHD-finger
  Pfam annotation: Domain name=zf-TAZ; Domain location=815-896; Score =20.6; E_value=0.00018; Accession=PF02135.7; Description=TAZ zinc finger
  Pfam module annotation: Pfam domain module=DUF906::PHD::zf-TAZ; Domain location=424-691::356-422::815-896
MTAASFALVERPESFMSTVVAPSVSGLPNCISGPGGIDSSGLQNGYSKDHFPGQMFQQYREYEKELDGAWSHPTEKPVHSNRTTQSDEIYLKGECGPDTLTEMKENYGRISDSRDPCDPEREIVERSEQTSNITVSKATSPISDESSGRRPAKRLKADAPRLVNVNQVESPQEQKPVVNENHVSGGETVQSEITELPAKPPCSSLGDINAESNNMLEQGSEDVPNMDIVKEEELSRAKGDIEMKDAKTVALDHTPKGVNLSSRRKRGASILYGLTAEELRDHMSSLINRHTCQSKVTSQEFPSIDGLPDQNTCSLCGMEKLLFEPPPRFCALCFKIINSAGCYYVEVENGTEKSSICSKCHHLSSLRAKYQKKFNYAETDAEAEWWVQCDKCKAWQHEICALFNRKCEGAKAEYTCAKCFLKEKDSGDIQALESSTVLGAQELQRTKLSDHIEQRLSERLEQDRQQRASASGKVAEEVPGVKGLTVRVVSSAERLLQVQPRFRGFFKQGKYPGEFPYKSKAILLFQKIEGVDVCLFAMYVQEYGSDCPPPNQRHVYLAYIDSVKYFRPEIKSATGEALRTFVYHEILIGYLDYCKKRGFVSCSIWACPSTKRDDYVLYCHPTVQKMPKSDKLRSWYQNLIKKAIKEGVVVERNTLSDFFLQPTNECKANISAACLPYCENDFWPGEAERLLEKKDDNASQKEETQVGRLLRVAKRDDRKGNLDDILLVHKFCKHCHHPILSGKSWVCTSCKNFHLCDKCHAEEQNTAQKDRHPATTKQKHAFERMEVQPLPETDDGDPTMESLHIHELRQIDTRETSQKHTLQDYIDGLVHASRCYDPRNCTHPLCLTLKKLFAHGARCHVRACNSGGCKKCLFMWKLLFRHSKDCNDGDCAVPRCRDVKAFIAEKMKLKI

SEQ ID NO: 73040 - protein, 245 aa, Zea mays
  Coding DNA Sequence Number=SeqID_29665
  Subcellular localization annotation: CTP_CleavageSite=54; ConfidenceScore=5.12e-01
MHKGSAKTWLYFKGVTLLLKATLPTCVLSHRGLSLLLHAPRSSPYDTGVGSHASCKMARDRRSQTAARAVCATAQRLRAILHFRPDQRVKGRTAMQATCNRTEGAHPFDFDVSSMEAQAHTSCNRRAGRYVQETTPPLAPLPRLLDCGTRIGKGDTPKGILLHEGNGPRAPLLIRGSKAGPSEEFNSRLRALGLRAHYWSEVRRPAPRKGSRAASGHSGSAPTTDQGFEGWPSKGSQPPQMQSEG

SEQ ID NO: 73041 - protein, 141 aa, Zea mays
  Coding DNA Sequence Number=SeqID_29666
MGKNNKCKREPTPPSEDFGDSEYSEEEFSSESEGSPAPIPLRESSDDSDDSQGLAAEVWTYIRAVERSGLEGSDESEGGSSGSKDGDGGSSRGGGGGGGSSSKDSNKGQWLNATESTVERLEGDVSVLEVTPSDLKTTSAF

SEQ ID NO: 73042 - protein, 551 aa, Zea mays
  Coding DNA Sequence Number=SeqID_29667
  Gene Ontology: Mol. function=transferase activity, transferring glycosyl groups; Cellular component=integral to membrane; Biological process=metabolic process
  Homolog annotation: Hit_ID=A1IWC6; Match level="QueryCoverage=83%, HitCoverage=98%, E-value=1e-132, Identity=54%"; Hit description =Putative glucosyl transferase
  Pfam annotation: Domain name=UDPGT; Domain location=5-466; Score= -34.1; E_value=6.8e-09; Accession=PF00201.9; Description=UDP -glucoronosyl and UDP-glucosyl transferase
MEKTTVVLYPGAGVGHLAPMLELAKALLRHAGDQVDVAIVVVEPPVYADGFAATVARAKASNASVACHVLPPPASDGGAEPDDPLTRLLRFLRATNAPLRDFLRALSASRRVQAIVLDMFCAGALDVAADLGLPAYFHFASGAAGLAYFLGLPAMRASVGTSFAELGGSTVLSFPGVPPLTVADLPQGVLNDSEACRVIMGAAARMPDARGILINSFESLEPRAMRALRDGLCVPGRATPPVYCVGPMVSPGGDGAGHECLRWLDAQPDRSVVFLCFGSLGTFPKRQLEEIAVGLERSGQRFLWVVRSPPGGPPADDVRALLPAGFAERTEGRGLVVASWAPQVDVLRHRAAGAFVTHCGWNSTLEGVVAGLPLLCWPLYAEQRMNKVRIVEEMKLGVEVRRDGEGLVTAQEVEAKVRWVMQDSDGARELKERAEAARARAAEALAEGGPSRAAFLEFVLDLLASEGMATTPTPRSSTPTSAFRRPKAAPAGPTGRATDVVRVKAQTPPSLRQAEVKTINDFKDRVTEAAKTTRLCLPQCEKGLCAIRPMS

SEQ ID NO: 73043 - protein, 89 aa, Zea mays
  Coding DNA Sequence Number=SeqID_29668
MQAKVRQMILDEEQKTQELEQEITLIQGEGPYNLQRAPLAAPGGLPAKHTRRRPIPPAARPHHPPAAAFQGINYLDERSLLALQLQASP

SEQ ID NO: 73044 - protein, 132 aa, Zea mays
  Coding DNA Sequence Number=SeqID_29669
  Subcellular localization annotation: CTP_CleavageSite=56; ConfidenceScore=5.75e-01
MAWRGPASRAVLAAVRRPAAAPAAARLHAPRPFAAPRRRVPSAFATSSLPSARPLAAMMGSPVTVAAVMARLTAHPGASARACCELSQEPDELTSFRKETGGAGAQLAVAVESSPSSPVFVTMVVRLLNARL

SEQ ID NO: 73045 - protein, 267 aa, Zea mays
  Coding DNA Sequence Number=SeqID_29670
  Gene Ontology: Mol. function=kinase activity
  Homolog annotation: Hit_ID=Q6QP54; Match level="QueryCoverage=36%, HitCoverage=34%, E-value=5e-09, Identity=40%"; Hit description =Putative kinase
MGRRETEREGGKKPEGDRRKRGNPRPSCLSRAQVGHKERIQDNDGASCDVVGPSPGLGEVEAPPRSRSSLSSEAEVESEPLGRARQRPSAEARAESEPWGRARRSSSSSGAEAESEPWVERGGVRRLLGPSPSPSPGSGEAEFVVFRGQARVRALGRGGVRCLPGPSPSPSPGSGEAEFPMAPEAGLGCCQPHSVEWHNSRSGTGGADLLSGRIRCQATFALNAPAIRSVGVATWPRLLLGEDWASGEPKLCADGGYQLRLGVLGYP

SEQ ID NO: 73046 - protein, 199 aa, Zea mays
  Coding DNA Sequence Number=SeqID_29671
MAMIQLDSSFGGGVAMVQPTFFCLLLWWWRPERRGDTGVSEDPWAKFCTGGEIASAVATTGMAASVAQQLKFAAAFVERIASGALASEFATERRRLEGRIERLRTQHTEAAARAEADSARVEAGLALRRAADKESELKSLHSYSKKTEASTLAGVERAHTLFVDAYHELDAKIAPFDRSGRRHFEVFDRASEDFNHGIF

SEQ ID NO: 73047 - protein, 96 aa, Zea mays
  Coding DNA Sequence Number=SeqID_29672
MGISHNLLKPADNPLYGFGSKGAFPVGKIELPLSFGATPSARSPQGMITVYRDQQTARYIERDFVPGQRNVHYLTTECEGSDSQRSAKGKKVNAQL

SEQ ID NO: 73048 - protein, 274 aa, Zea mays
  Coding DNA Sequence Number=SeqID_29673
  Gene Ontology: Mol. function=protein serine/threonine phosphatase activity; Cellular component=protein serine/threonine phosphatase complex; Biological process=protein amino acid dephosphorylation
  Homolog annotation: Hit_ID=Q6L5C4; Match level="QueryCoverage=82%, HitCoverage=45%, E-value=1e-113, Identity=90%"; Hit description =Protein phosphatase 2C
  Pfam annotation: Domain name=PP2C; Domain location=12-250; Score =232.5; E_value=9.7e-67; Accession=PF00481.12; Description=Protein phosphatase 2C
MLLGGLRGEKPVTLIGTLKSAVLDKRRRRAGPLKGGGQESGPRRLIPCHGGSRAAEYLKEHLFENLMKHPEFMTNTKLAINETYRKTDSEFLDAERNSHRDDGSTASTAVLVGDHLYVANVGDSRAVISKAGKAIALSEDHKPNRSDERKRIESAGGIVMWAGTWRVGGVLAMSRAFGNRLLKQFVIADPEIQEQEINDELEFLIIASDGLWDVVPNEDAVSLVKMEEDPEAAARKLTETAFSRGSGDNITCIVVKFEHDKPGGGGYSPPGDKS

SEQ ID NO: 73049 - protein, 70 aa, Zea mays
  Coding DNA Sequence Number=SeqID_29674
MARLLHADRLDGHEQRSDGSSMISPSPAANSDSDDATDLTATSSPSPAANRDRVTGRVWASPARYKPAVF

SEQ ID NO: 73050 - protein, 169 aa, Zea mays
  Coding DNA Sequence Number=SeqID_29675
MPGVLGVGEVRPLGAVACRLHGCPALSPAGLGKSGESLVTAGRLFKDVHHPRWGGGQAEPELYLPRGFVGRPLLRRSRERALTGPAGESDFDNAGLVDGGRRQPQRVGLVGLAPGAPSCRKAAAAPCAREDRPRCRTLLGRRSCSGAVLPLHRYGASARRSVPHSSGRI

SEQ ID NO: 73051 - protein, 335 aa, Zea mays
  Coding DNA Sequence Number=SeqID_29676
  Gene Ontology: Mol. function=carboxyl- or carbamoyltransferase activity; Cellular component=ornithine carbamoyltransferase complex; Biological process=amino acid metabolic process
  Homolog annotation: Hit_ID=Q8SA97; Match level="QueryCoverage=34%, HitCoverage=21%, E-value=2e-10, Identity=45%"; Hit description =Ornithine carbamoyltransferase
MALPVDVAGPRLRPGDVGAPPKLGSNLSFVAEAESEPLGRARRKSFGRGQGGVRALGSGEAEFVVLRGRARVRALGSGGAEFAVFRVLARVRALGSGGAEFAVFRVLARVRALGSGGAEFAVFRGRARALGSGGAEFAVFRVLARVRALGSGGAEFAVFRVLARVRALGSGGAEFAVFWVLARVRALGSGGAEFAVFRVLARVRALGSGGAEFAVFRVLARVRALGSGGVEFAVFWVLARVRALGSGGAEFPMAPLARPDCLSDSLCRVALQSEWRRRRCPSVRPLYADGGYQLRIRRLEDGKFPTGRKITVTGVRMTGIWVWLVLGGLDSMMDE

SEQ ID NO: 73052 - protein, 191 aa, Zea mays
  Coding DNA Sequence Number=SeqID_29677
MDRLTHRDVAHSCHFHDALDTLLHRAFNRHTWSIEYRCVVYQHRRRLYSDQWEATCLVRRLDDDLWGVAAFSEHYSISERDTVEVVMQDAARRVLSQYYSLFNEVANGLDLKYYPHRRLNNMVNVIAVLNTELDHTLDKLGKARPEIAELRAERAACHHQEGGSPAPVGIQHPYRLSPRGRYAYGTPDCRT

SEQ ID NO: 73053 - protein, 225 aa, Zea mays
  Coding DNA Sequence Number=SeqID_29678
  Gene Ontology: Mol. function=protein serine/threonine kinase activity; Biological process=protein amino acid phosphorylation
  Homolog annotation: Hit_ID=A3C7C2; Match level="QueryCoverage=49%, HitCoverage=16%, E-value=2e-13, Identity=46%"; Hit description =Putative uncharacterized protein
MRWLGLHRKRSGVDGKERIGVGGLEMGKESPRACGWQADVAREGDHLSRATPSTDDDAAAAPVPVDCSPKLKMVPHAKLKVGAPEVLLALEYLHVIRVVYRDLKTENVLVREDGHIMSPTLIFQVGYAVLSMLMRSSMSSDPKYLRPARLHPTHMLHAQALRPKEPKEQQHRQETQGRRAQAAASCPTSISRRRLGAELDEIPAIGLWHLPKDSSPTTPGCHTIS

SEQ ID NO: 73054 - protein, 124 aa, Zea mays
  Coding DNA Sequence Number=SeqID_29679
  Gene Ontology: Mol. function=phosphotransferase activity, for other substituted phosphate groups; Cellular component=membrane; Biological process=phospholipid biosynthetic process
  Homolog annotation: Hit_ID=A9PIT2; Match level="QueryCoverage=41%, HitCoverage=19%, E-value=3e-15, Identity=59%"; Hit description =Putative uncharacterized protein
  Pfam annotation: Domain name=CDP-OH_P_transf; Domain location=12-124; Score=-1.7; E_value=0.027; Accession=PF01066.12; Description=CDP -alcohol phosphatidyltransferase
MITLTGFMFLLTSAFLGFTFDAVDGKQARRTNSSSPLGELFDHECDVLACAVRPPVNIFYFKCNDFQVVGFTTSLPTAIEVEGTTRMVEEQTAMQILLVYRQMRLISSRKATLGTLVEPLRLTR

SEQ ID NO: 73055 - protein, 756 aa, Zea mays
  Coding DNA Sequence Number=SeqID_29680
  Gene Ontology: Mol. function=binding; Cellular component =intracellular; Biological process=RNA processing
  Homolog annotation: Hit_ID=Q10Q44; Match level="QueryCoverage=90%, HitCoverage=84%, E-value=0.0, Identity=73%"; Hit description=Pre -mRNA processing protein prp39, putative, expressed
MEQDQSVVVGSADSGAAAFGFATGNPPSLAVTGGSAVAPDGGAQAADASAYQAEHTALNGTVGDMGNYPSTGAAENGEAVPNETGEPVPELSYEEAVLSAEEARLWSVVTANSLDFNAWTALIEETEKNAEIMFACNYKLFVNLQLFAHGFDLGHIVMNNILKIRKVYDSFLAEFPLCFGYWKKYADHEARLDGVSKVIEVYERAVLAVTYSVDIWYNYCQFAISTYDDSDIIRRLFERGLAYVGTDYHSNILWDEYIKYEESLEAWSHLADIYTRVLEHPIQQLDRYFNCLKELASKHSLSEILTAEEASLYVVTSETTAQAPDGEAHPDDVDKLGQPEISSSTDAESLAKYVSMREEMYRKAKEYESKIIGFELAIRRPYFHVKPLDNPELENWHNYLDYIEKEEDINKVIKFYSEFWIRYVQCMEDKRSLDLANNALARATHVFVKKQPEIHLFSARFKELNGDIFGARAEYQHLYSDLCPGFLEAIVKHSNMEHRLGDKELSCSVYEKVIAAEKGKEQSQLLPTLLIQYSRFLFLAIRDLEKAREILTVLHEQLNLTKPVLEAVIHLESIFPCEKRIEFLDSLVEKFVTPESSQGELASLVDKEEISSIFLEFLDLFGDAKSIRKASTRHTTLFSCKRSILPSKKRKADDAVVSDRDKFAKTGSVQSATGTDPNASNPPVWPATSETSGHQWGASYAQQAAYPAYGTYDYSHQMPQPAPQTAAYGAYPPTYSVQHNSNCSGDRKRDSTQLTV

SEQ ID NO: 73056 - protein, 279 aa, Zea mays
  Coding DNA Sequence Number=SeqID_29681
  Subcellular localization annotation: CTP_CleavageSite=26; ConfidenceScore=5.11e-01
MSKNTRDTRFIPRFGHTTKVPYFLVEAPTKSRVFFNPNPPFADHKGQAHTLIFAQMSSPGLGEVEAPPRSRSSLSSKAEVESEPLGRARRRPSAEARAESEPWGRAKRGSSSSGAEPESEPWGRAKRSSSSSGAEPESEPWGRVMRSSSSSGAEPESEPWGRAKRSSSSSGAEPESEPWGRAKRSSSSSGAEPESEPWGRAKRSSSSFGAEPESEPWGRAKRSFLWRLRPDLAAVSLTLSSGTAVGAAQAALSSCQAGQWSGEVTTVTSALSTEGRASG

SEQ ID NO: 73057 - protein, 125 aa, Zea mays
  Coding DNA Sequence Number=SeqID_29682
MNKTPALKVSLQTEFRFHLCRYEQPHTIGGPAEQQKADGWLAAARSNNDDDDFCSKGPNSSSDDLRADAAAIGPSSTSSLERQGRAEGRRVGGTNFHEVAFLQRQGGRIASVPHPGARKVERRDA

SEQ ID NO: 73058 - protein, 155 aa, Zea mays
  Coding DNA Sequence Number=SeqID_29683
  Gene Ontology: Mol. function=RNA binding; Biological process=response to stress
  Homolog annotation: Hit_ID=A3A2F0; Match level="QueryCoverage=37%, HitCoverage=8%, E-value=2e-18, Identity=74%"; Hit description =Putative uncharacterized protein
MRSLCFISAPALTLVSSKGQGVACAITILMLSHVSIGKESLKVRDHIYSWKAAWVYAHHAWLICFSSSSSWKRLLALIQQWEVSWDDTLDPAVSYKIGQVVDAKVIHLDYNNSRIFLSLKDVKVMVETTLGKEELKEAVLMCTSTNRARFHKLRE

SEQ ID NO: 73059 - protein, 70 aa, Zea mays
  Coding DNA Sequence Number=SeqID_29684
MESPTNSESLRDAQMRLTSRFHLTTQEREYKRDAKVDAKSAWTVRGYCSPIYRHGSQPMQNYINALYIYQ

SEQ ID NO: 73060 - protein, 80 aa, Zea mays
  Coding DNA Sequence Number=SeqID_29685
MEVADGVKTADWRGGHGLLAEAVRCESQSARTREAGAWLGHVVQRVREATRVLASVCGPRGGVMVCLCTVEAIELPGVLN

SEQ ID NO: 73061 - protein, 48 aa, Zea mays
  Coding DNA Sequence Number=SeqID_29686
  Gene Ontology: Mol. function=binding
  Homolog annotation: Hit_ID=Q10CF3; Match level="QueryCoverage=93%, HitCoverage=13%, E-value=3e-11, Identity=73%"; Hit description=Cell differentiation protein rcd1, putative, expressed
MPFVNALVALYLYPFLNTVYKTREYEFLRLTSLGVIGALVKVPDTVYL

SEQ ID NO: 73062 - protein, 221 aa, Zea mays
  Coding DNA Sequence Number=SeqID_29687
  Gene Ontology: Mol. function=hydrolase activity, acting on acid anhydrides, catalyzing transmembrane movement of substances; Cellular component=integral to membrane; Biological process=calcium ion transport
  Homolog annotation: Hit_ID=A7PVP2; Match level="QueryCoverage=56%, HitCoverage=56%, E-value=1e-36, Identity=55%"; Hit description =Chromosome chr9 scaffold_33, whole genome shotgun sequence
  Pfam annotation: Domain name=Cation_ATPase_C; Domain location=35-157; Score=-32.3; E_value=0.017; Accession=PF00689.12; Description=Cation transporting ATPase, C-terminus
MSNDPKFLVDNIVSNTYILCFLNLETFLPILFYCREPLVTNIMWRNLFVQALYQVAILLIFDFDGVRILRLQNESRSDAEKIFNEFNARKPEEKNVFKGVTKNHLFMGIIGITTVFQILIIQFLGKFFKIVRLGWRLWLVSVAIGLDEVLYTIVPASETGGPSGAAKAEGRGTGERELGSQVKVPDRTKPAREGEAGEGAHVAVHGRQHQGPRQKGLKLEE

SEQ ID NO: 73063 - protein, 79 aa, Zea mays
  Coding DNA Sequence Number=SeqID_29688
MANLTSQCDVRRSRTGDAYGSLRRGSRETGRLTAGNEGGVDGRRARAMELGDRRDGGVDGQRARATELGDRATELAELA

SEQ ID NO: 73064 - protein, 497 aa, Zea mays
  Coding DNA Sequence Number=SeqID_29689
  Pfam annotation: Domain name=Transposase_28; Domain location=307-484; Score=-60.2; E_value=0.038; Accession=PF04195.3; Description=Putative gypsy type transposon
MAKHGRLMGVTGVGRILFAGAYGGQSAAWWRVPAAVMPPAPHREVRDPSGALSVLTEVLDPARRFGPCIQGSGTFPWGSGPTVDTMEYIVFPGHVVALEPSTWWGHVLFATRLKIVAWTPNLHTVVTAPRVRDWAVGFGGGEEAHYRRRWRAPHVAVRLLRTRRPTPKEYDSWARAPMSEAGSLLSAEMKRRITACGGVFLTRRFAFSAHRGRHPRSMTRGPGPRARGWAAVFGGDEEAHYLRRWRAPHAAVRLLRTRRPTPKEYDSWARAPMPEVGPLLSAEMKTRITTGSGVLLTQRFAFSAHGGRRPRTVMALLDPPERLQPEVALNLVRNPLEWGVPAFAGRICAGAFPHGDLTAGEFVLFVSNLPSGLALLISSFFVLLLEELGLQPQHFTPCFILQAAIIAYLCKVSMGATLLPASSSSIRRKGLPPPTVTAGPTIEDATQEVVQDVAEMAAARFQRDPTDAELDVSRLDTSIPKRVGNSPQEAASTGTWT

SEQ ID NO: 73065 - protein, 126 aa, Zea mays
  Coding DNA Sequence Number=SeqID_29690
  Homolog annotation: Hit_ID=Q8LH63; Match level="QueryCoverage=41%, HitCoverage=2%, E-value=3e-07, Identity=44%"; Hit description =Putatitive retrotransposon Cinful-1
MALDPIGRGYPNGWLRCRYSGQQQGKEEKEPEGGLRRGVTASPVRVGCTKVLRRLSTTKLWPLGKGSLCKAPNTWIFETWDHLKDNILPEDHVSAEHIVSLSKRYTVVEGDFYRCGANVIFMRCIT

SEQ ID NO: 73066 - protein, 45 aa, Zea mays
  Coding DNA Sequence Number=SeqID_29691
MSVVGVMAASSGEQWHRELGAAGLGTTRAGEGFARPRTVELRIFI

SEQ ID NO: 73067 - protein, 146 aa, Zea mays
  Coding DNA Sequence Number=SeqID_29692
  Gene Ontology: Mol. function=DNA binding; Cellular component=nucleus; Biological process=regulation of transcription
  Homolog annotation: Hit_ID=Q6ZI39; Match level="QueryCoverage=77%, HitCoverage=15%, E-value=5e-20, Identity=49%"; Hit description=Myb -family transcription factor-like protein
MAAAAPAAGKGKRKRHLSEDDVCLLQRYNPGTILTALQEVAQHAEGRIIDWRAVVAKSATGITSAREYQMLWRYLAYHHDLNESIEAGDLPLGDDSDLELELEPNPSETKEALSEASALAKVSLHVWKPYCRMVIPILERMIPNPV

SEQ ID NO: 73068 - protein, 159 aa, Zea mays
  Coding DNA Sequence Number=SeqID_29693
MGKNNKRKREPTPPSEEFGDSEYSEEEFSSESEGSPAPIPLRESSDDSDDSQGLAAEVWTYIRAVERSGLEGSDESEYSSDEDSNGGGEDEDDNDDDDDEDGGEGDGDGSGRGGGDGSKDDDGSGGAATGVAAAGAAPGVAAAAAATGPVARCHWSFRY

SEQ ID NO: 73069 - protein, 218 aa, Zea mays
  Coding DNA Sequence Number=SeqID_29694
MTDMWLPAKGNWLLGSIGGITTADELENTGAPPHHSAIILKVARAACYHSALPPRRRFRVQSLGITSKMPTSPSYHSALPPRRRFRVQSLGITSKMPTSPSYHSALPPRRRFRVQSLGITSKMPTSPSYHSALPPRRRFRAQSLGITSKMPTSPSYHSTLPPRHRFRVQSLGITSKMPTSPSSQSALPPKRRFRVQLLGVASKTPMSPSSRSALPLKS

SEQ ID NO: 73070 - protein, 340 aa, Zea mays
  Coding DNA Sequence Number=SeqID_29695
  Subcellular localization annotation: CTP_CleavageSite=37; ConfidenceScore=5.29e-01
MGDARSTSALSLGERNSVGVGTFQPSFGFKDFHQSAPAASPRRWSPETVTTSSWVGRSKSGCDLGPTLSFKDVHHPRWGGGRTEPELYLPRGFVGQPLLHRSRERALTGPARGADFDNAGLADCGRRPPRRVGLVGLAPGAPSCREGGCRVVRTGGPPKMSRAARAAFVFWGGPAFAPAPPRRVGLFVPVGCLNRFTKRELPRVKVTSEPRPGVAVLARTEAELARKEDLVGRSLAGSSVSGTDAGVDLPRPRAGLMSSGDSWPRPRGDQPSRLLGPDSRRRPWRRWPGRGDDIVLQSGDPRTASPSEARSDLAEGVVDAEGAAAPFNRQDPSLRDRIIL

SEQ ID NO: 73071 - protein, 69 aa, Zea mays
  Coding DNA Sequence Number=SeqID_29696
MALCQAGHAGHRAPRGGATAAPAELQAAGREHGEEGRASRGSPRAGAGERPSRESRGRRATLGRGTAAR

SEQ ID NO: 73072 - protein, 204 aa, Zea mays
  Coding DNA Sequence Number=SeqID_29697
MGDIRRLSASSLEERNSVGVGTFQPSFGFKDFHQPARLYPPPPRRRSPKTVTTSPWVGRSKPGCDLGPTLSFKDVHHPRRGGGQAEPELYLPRGFVGHPLLRRSRERALAGPAGGSDFDNAGPVDGRRRLPQRVGLVGLAPSAPSCRKAAAAPCAWEDRPRCHALLGRRSCSGAVLPLHRYGASCREVGALLVRGDPSGDLPAG

SEQ ID NO: 73073 - protein, 207 aa, Zea mays
  Coding DNA Sequence Number=SeqID_29698
MAGSSSPGRGPLPLRPTPPLSSTALGIEKTDPRIELTRFDSGAAPGVTAPDGQTWPAAHILVISDERQPEERETPIPAHGAADGQVLAQQTTDQAKDGGKKSFEVPSAREKVKEAEEPKAKGEEEGLQSQGQGSSVWHTGLSGGAPDSVRCARLNSGELAALGNSPAAYGYNSPDCPVCTGLSGEPTVGRANGRPRDLRGTRGRTNG

SEQ ID NO: 73074 - protein, 249 aa, Zea mays
  Coding DNA Sequence Number=SeqID_29699
  Gene Ontology: Mol. function=protein disulfide oxidoreductase activity; Biological process=cell redox homeostasis
  Homolog annotation: Hit_ID=Q6ATX0; Match level="QueryCoverage=99%, HitCoverage=100%, E-value=1e-65, Identity=54%"; Hit description =Putative uncharacterized protein P0015C02.6
  Pfam annotation: Domain name=Glutaredoxin; Domain location=100-169; Score=59.6; E_value=1.1e-14; Accession=PF00462.15; Description =Glutaredoxin
  Subcellular localization annotation: CTP_CleavageSite=65; ConfidenceScore=5.47e-01
MWPSWVKTRSSDDSAVGAAASTSTAVGACPRLSIPNPCLKDLRSLLSPDSSASPAPRVFHRLRVAASALRVLRAIQHPASQSPAGGKEPAPGACGGGRVVLYFTSLRVVRGTYEDCRAVRAILRGLRAAVDERDLAMDPGYLPELASLLPHAPRGRVALPQVFVGGRHVGGAEEVRRLHEAGELRRIVAPASSGGSCARCGAQRYVLCAACHGSHKRYSLKGGGGFRSCAECNENGLVRCPACCVVPAS

SEQ ID NO: 73075 - protein, 121 aa, Zea mays
  Coding DNA Sequence Number=SeqID_29700
MDSPKGNPQAGDVVTTRPWPSSGGTYSHNLPEAIRGAGHAVMTHPRPSASGIYSHDWPKANLRQDSHICPRCSVVPISGAFSGQVLLPVQRRYRWKGDETSTSSCVSTADGREGSGSGDPW

SEQ ID NO: 73076 - protein, 139 aa, Zea mays
  Coding DNA Sequence Number=SeqID_29701
MGKNNKRKREPTPPSEEFGDSEYSEEEFSSEPEGSPAPVSPPASSDDSDDSQGIAAEVWTYIRAVERAGLEGSDESECSSDEEDSDGGDEGEDDDDDDDDDGGDDSGRGGGDGGRDSTKGDSSRGSTMGGGGGRGRASG

SEQ ID NO: 73077 - protein, 202 aa, Zea mays
  Coding DNA Sequence Number=SeqID_29702
  Homolog annotation: Hit_ID=A2GBN7; Match level="QueryCoverage=74%, HitCoverage=33%, E-value=1e-09, Identity=34%"; Hit description =Putative uncharacterized protein
  Subcellular localization annotation: CTP_CleavageSite=72; ConfidenceScore=5.56e-01
MPTPTFNHSALPLKRRPRAQSLGITSKMPTPTFNHSALPLKRRPRAQSLGITSKMPTPTFNHSALPLKRRPRAQSLGITSKMPTPTFNYSALPLKRRPRAQSLGITSKMPTPTFNHSVLPLKRQPRAQSLGITSKMPTPTFYHSALPLKRWSYVRLLSVASKTLMSIFTSLGVVTTISKESVQHSAKTMTSHQKEEINDRLH

SEQ ID NO: 73078 - protein, 51 aa, Zea mays
  Coding DNA Sequence Number=SeqID_29703
MLDEAAGWDDFVMGLRPATRGDEGEAGEGIERKGGRLRLRPNICPPRDQFD

SEQ ID NO: 73079 - protein, 73 aa, Zea mays
  Coding DNA Sequence Number=SeqID_29704
MPRAPVALRPCPGSPCACPDNEQLVESEGVAGGDEDDGYDYAYGTGCPRCNHCSGEDEVVEEDFQEFQEYDEF

SEQ ID NO: 73080 - protein, 309 aa, Zea mays
  Coding DNA Sequence Number=SeqID_29705
MTKVMLAEGVQDSENGSEFTGETLLNHVFEDLRKPKAPINSNSSFIYGLLAGHNSSVLTLMLTDSSFSLQQEIESVRSCSPVLPLEAPPAPPLSAPAAGGDPDDGGGDSSLSHITNLSADQEPEGWVARPITRDATRGRGVYPDRLEATCLVHRLENSLQGVEVCSEHYSISERDSAEAAMQDVARRALSHYCSVLGGVADGLNLKYYPRRPSGSTRGMIVSPVGEDNPRLSSTDNLAVVLNTELDHALDELSRARAEIAQLWAERAEHRHLEDGSLAPVGTQHPYRSPRRGHHAYGDPDCRTKINLEP

SEQ ID NO: 73081 - protein, 307 aa, Zea mays
  Coding DNA Sequence Number=SeqID_29706
  Homolog annotation: Hit_ID=A2YGC2; Match level="QueryCoverage=40%, HitCoverage=53%, E-value=2e-09, Identity=32%"; Hit description =Putative uncharacterized protein
MESHDLRAERESRLVGGNENDGLALTMVMMAHLRHTARKSIIPFLPSCLAERPLRRQVTGQSSHLERLHHRLREEQERRRQEQEQQGSSFSLQQEIESVRSCSPMLPLEAPPAQPLSTPAAGVAAGGDPDDGGGDSRSSHDTDLSADQEPERMGCSSHHFATLLAGVTFTMRSTPCYIGHLTNHSHGVYPDRWEATCLVHRPENSLRGVEICSEHYSISERDSAEAAMQDATQRALSHYCSVLGGVADGLNLKYYPRRPSGSTGGVIVSPVGEDNSRLSSTVNLAVVLNTELDHALDELSRARAEIA

SEQ ID NO: 73082 - protein, 86 aa, Zea mays
  Coding DNA Sequence Number=SeqID_29707
  Homolog annotation: Hit_ID=A2WWL4; Match level="QueryCoverage=47%, HitCoverage=39%, E-value=7e-09, Identity=56%"; Hit description =Putative uncharacterized protein
METATKVMASGLLLLLLVNVGFAVPVHGSEDDDDCWVEDRVDYVVCVRTGRCRSICREHSYVDGRCQWGFPNLLPYCECLRSNCTS

SEQ ID NO: 73083 - protein, 146 aa, Zea mays
  Coding DNA Sequence Number=SeqID_29708
MGKNNKRKREPTPPSEDFGDSEYSEEEFSSKSEGSPAPIPLRESSDDSDDSQGLAAEVWTYIRAVERSGLEGSDESEYSSDEEDSSEEDGGGDDEDDDDDDEGGGGGDGDDSGRGGNSGSKDDDGGDSRGGSDGGGSSRGSNRASG

SEQ ID NO: 73084 - protein, 243 aa, Zea mays
  Coding DNA Sequence Number=SeqID_29709
MNENGNLQDRIGIQMGQVKMVEIKEAAEKGRNGKTEAAEKERSVNHGLMGILSRHSNPMANPPRTEFPRGKNPDGHKVEKFGLGDDRHVVTCERQLAVGVDWRNHAADELEAFLLGAISILPASRVGGELQRGFGSEEARTRARKAETAKSAALMGYSRARYRFKKRPVSTWRRLAVTSKTPTSSTSYSAAISKNVETMLELFTYYSKEINFTKKGGKRNDSRTLSYEYQRATITEKPTSFLH

SEQ ID NO: 73085 - protein, 734 aa, Zea mays
  Coding DNA Sequence Number=SeqID_29710
  Subcellular localization annotation: CTP_CleavageSite=49; ConfidenceScore=5.39e-01
MGGQERALGSRKLKGAAAPSASTTPSARRLGWSPRGLGQLSPKDISPARGLGRSTPASVPLTDDPARLRPTKSSFRANSASVRADTATPGFGSSKSGRGVPLTKQEKPQTARPTEPRDFLRPRDTDTSLVTFARGDSRLVKRNDNDPRSGWPNCSSDGLRVDAAATLPSPTPTLEGRGQGPSALRQIPTQILPDEWGTDPRVEAPYRCKGRTAPEHERRPGSARHLGRSSRAHGATTAFAAGGGTGSQAGEPNALRLTTPTVDQPRVVEVRPSRRASERPLLRTLKGRLTHETAREVELRLSPASTPARMMNILEAEGGTKIAAWLASPHPGDGGHRLGRPPPSWAESSPTRSKVLPLRRGGWVPHVMQAGPGQKKLDRRARCMQPPSGYEHSSAFAQTGGRKGGQPCRQHATAPSGRAPLTSNASSMGAHAHASCNRRAGCYVQATAPPLAPLPRLLDCGTSTATRGDPAHDPAAPAWRDGQYGQKWAGSNGGGRRARAAVMSSAKLTSHPGAGPGKGDTPKRILLREGNRLRATLLIRGLKAGPSEGFNSRLRARGLHTHYWLALEGFTAASDIERGMTLGDRVRQITHRYFWARLWASSRPLTNGGTGVHSDYPPAAHWRHHVRRPPRATWRFPPSSLRKGDAGAYVKKSSLSLIVLSPCAEARGCSRKPGSGQTVDSVNIPARELGTRPCTRATASSHEGTTRPAEALREALRPRGSQTTPPRPRGLHPA

SEQ ID NO: 73086 - protein, 128 aa, Zea mays
  Coding DNA Sequence Number=SeqID_29711
MVTSGLMVGESEPGCGLCPSLSLKDFHHQGWGGECAELSSIRPEVSAAAVRPPEQKSSSSPLLGQVTARHSSAFRCSTGLPPSEWGCSYLVGRSLAVSSVSGADAKVDQPRPRVGLAPLEAGWPRPQG

SEQ ID NO: 73087 - protein, 326 aa, Zea mays
  Coding DNA Sequence Number=SeqID_29712
  Gene Ontology: Mol. function=transcription factor activity; Cellular component=nucleus; Biological process=regulation of transcription, DNA-dependent
  Homolog annotation: Hit_ID=A5JV32; Match level="QueryCoverage=82%, HitCoverage=81%, E-value=1e-45, Identity=45%"; Hit description =Dehydration-responsive element binding protein 5
  Pfam annotation: Domain name=AP2; Domain location=92-143; Score=79.4; E_value=1.1e-20; Accession=PF00847.11; Description=AP2 domain
  Subcellular localization annotation: CTP_CleavageSite=29; ConfidenceScore=5.09e-01
MTPPPPDQQQLQQMISFGSSQQPRQEFVAAAAATPLFPPQLVAPEVQQQMLLRYWSEALNLSPRGFRGGAVPLPPARLYQQLLLRASSGPPKLYRGVRQRHWGKWVAEIRLPRNRTRLWLGTFDTAEDAAMAYDREAFKLRGDNARLNFPDLFLGKGRVGGSGRTSAAASCSSSAPPTPDDSHMKQAAQQQQRVRDGEQPCSGEAKPLLPETETERADNSEPKPNPELQSADHQGDGTTAMFQPSGGVWGPADEAWFSAWGPGSSVWDYDMDNAHGLFLQSRFASEATSMDYVPSTPEVPAVGTAVASLSPPPPPPRSPTYMKEKD

SEQ ID NO: 73088 - protein, 129 aa, Zea mays
  Coding DNA Sequence Number=SeqID_29713
  Subcellular localization annotation: CTP_CleavageSite=7; ConfidenceScore=5.32e-01
MGFTPIPAVTEPPKSLGPPTVVLVQRTSDNPVGAPDHLTSSVSESLTFPRAFYPSRRHYKSSEMRKCGSIYNNLLLLKKIQRKVIKFKEGNAGIVLALNSYHLMHQASEKDLKRNKEVANAPGLALFYW

SEQ ID NO: 73089 - protein, 51 aa, Zea mays
  Coding DNA Sequence Number=SeqID_29714
  Subcellular localization annotation: CTP_CleavageSite=38; ConfidenceScore=5.14e-01
MGGGLLAAASALRSSLPLFGPPEQKSSSSPLPERATARLSAFQDRGVPKPT

SEQ ID NO: 73090 - protein, 546 aa, Zea mays
  Coding DNA Sequence Number=SeqID_29715
MKILEAERWLKGTNSHRVAFPPTTRRKDCGYPPSGGLEGGKARCIREREDMVAFQGGHPPFKGDSPYLRPQPSGAESSPTRSKVLPLRRGGWVPHVMQAGLEQKKPNRRARCVQPPSGSQAALHFCPDQRAKGRAALQAACNRAKWAHFSDFQHAQHGGPGPRVMQPARRMLHASNCTATYATTAPPRLRNRYRDSRRPSARPSSASLARRSMRPKMGRRRSERRYAFAIMTASKKGPGKGDTLKRILPREGTRLRASLLIRGSKAGPSEGFNSRLRARGLQTHYWSEVRRPAPRKGSTTASGYSGSAPTTDQGGNDFVTESHQREASSPRTPSTGDRVRQITRSSSETPCSAPTEDNMALSPLLLAERRRRGRLGGCSRKPGSGQTVDSVNIPARELGTRPYTRAMASSHEGTTRPAKALREALRPRRSQTTPPRPRGLHPAGALARTHQNKTQPRKAGPLAKKCDESLQASANTPFEARGLLSGTIIRGTLKAPNSQLSDADRQSGPAAGAIGSSAPPDPGLGLGLSPGRRRTPLRPTQGSDSG

SEQ ID NO: 73091 - protein, 108 aa, Zea mays
  Coding DNA Sequence Number=SeqID_29716
MACRRARPKRAGGRPKSGEGDLGLLVKFYRVRGHGKLHRPLADLTEALARLGGDWSGLATAAEALKAWRAVVRRDRGDFRTCSREFGITLIFGSPGFEFRKTENVVDL

SEQ ID NO: 73092 - protein, 235 aa, Zea mays
  Coding DNA Sequence Number=SeqID_29717
MEANEDVDIEGGEEPATSVDTAGSGRPPSPESSVASVSHHLSIMVVETISVTPRQLPTRSSSVLSLHCSQGQMTHLMQMCGCEWWNPNSRYSMELVLRSLKSGSPPSSFADPQGLGGTIFLPCSQRIERWNGGSSRQLSGDTTYQPGLWTESSTSFWHSLRATGQCCSMPRLFNDLCQYAGYHADTDEKKRDRFMRGLSTKLCDRLNTVRANSYNELVTWLSPRRTALQLDRQKR

SEQ ID NO: 73093 - protein, 84 aa, Zea mays
  Coding DNA Sequence Number=SeqID_29718
MVGTSAVTARRPVGVSEALYAKALVLLATKPHSQTAACLEVEEYRLLTPGSLEDMVAGVTWPSTLPPGWTVEWDPASAEEEHEE

SEQ ID NO: 73094 - protein, 222 aa, Zea mays
  Coding DNA Sequence Number=SeqID_29719
MKQTIGNKGLQIVRRDGGERPRVTRRNNGHPVGHHQAEEVAAKRTRDRERGYFKGILLREGSGPRALLLIRGSKAGPSEGFDSRLRALGLRALLLIRGSKAGPSEGFDSRLRPLGLRAHYWSEVRRLEPWRGSTAASDHSGSAPTTDQGFVGWPPKGSTAASEHAERGMTLGSGAALANPAPAKPLTASTYQPENLEPDYAPGLRPVRMREQPDRTKHHERH

SEQ ID NO: 73095 - protein, 91 aa, Zea mays
  Coding DNA Sequence Number=SeqID_29720
MYYPDCLQKSERREKQPGAQFYSPKGSAADPEIGQDLNNPRATSAEKKGMTGGLAVSVTVSFPGRGYDAIEGNSNERAPHGSVPTEKAKGE

SEQ ID NO: 73096 - protein, 131 aa, Zea mays
  Coding DNA Sequence Number=SeqID_29721
MQYNGSSSLISCEKQMIRIEFFYPCKIRAHRLGVQCLTDPDCRRVVTALVPTITGMGDHVSGRVRGKVCGQVHSGTRLTDLPYFSVMHKPGLAFQSSGRQVLWCRLWCWIWGYLLSSSLLRHEDILSVSKD

SEQ ID NO: 73097 - protein, 707 aa, Zea mays
  Coding DNA Sequence Number=SeqID_29722
MNKTSAFKMPSQTELRSRPHGYGQPPRRGSPWSDKLWVNHQQTNSSPSPAWLEDVSASGLEGDCHHQKLEEEVVRRPAQEVEPRLASLPASARMANTLNTEGGIGVTARPAPSRRSQTAVRDARNRPAVTSDPPPLPRPTGERGGQPCRRHATAPTGRTSPTPDTPAWRPRPTRRATGTPDAACKQLPHLRHHRASSIAEPTPRLEATQRATQRRQPDVAANAAKGGPAVMTVAGAREQRSRRQPSSRPIRGQRESPLSRREDNAPVIRSSNGPRTRNGSPASYSPHRINSAAGQAVLLAGKAGDASPSPKQPRQKRDQERGIPRKGSFPVKEPGSEPPYWLAPEGFTVAPDAEPGMTRDPAPAKSLTASTYQPENLGPDRAPGLRPVRMRETTRLAKALRKALRPRRSETTPPRPRGLHPAGALARTHRNRTQPRKAGPLAKKCDKSLQASANTPFEARGLLSGTIIRGTLKTPNSQLVTPISIKLQRPDGARTRAKAPEDDELRSARPRARTRAKALEDDELRSARPRARTRAKAPEDDEPRSARPRAKAPEDDELRSARPRARTRAKAPEDDELRFARPRGSDSASAMEDRLDPGFGGASTSPNLGHRPATSTGSAIITLPRADSGRRKQDRATSARTQPFQQLSLRQAPLLLRQPRHHASRVPRSLRLPHWHGLLREGWPRGDEDGDRRSLGAARFPHPRGRL

SEQ ID NO: 73098 - protein, 68 aa, Zea mays
  Coding DNA Sequence Number=SeqID_29723
  Subcellular localization annotation: CTP_CleavageSite=31; ConfidenceScore=5.44e-01
MASLSSSRSHGWRPSPSSTSGRISAQRHSFLSMAGAQEASSHGRPGPDALPGAGELLSPLLSPGRIGP

SEQ ID NO: 73099 - protein, 459 aa, Zea mays
  Coding DNA Sequence Number=SeqID_29724
MGSTRVAFVLLLLEERDLVGVGALRPSLGFKDFHHAARLHSLTNASRIFIILAVAEGGLSRGLPPRGPATRFFLRHPGERALTGLAEGENFDNAGPVGRKRRQLQRAWLAGSAGFVAASCRCLLPLDPGVAVYPLHGQLLRRRCRSVREDLSGDLPMQARAAVVCWRSACAQVAAVVGAEVVVARGGFSADETVGATCGRTSGSLALMACPRPSSGDAGEGLLTAAFTLRSSLLLFSRPRRRSLSLLNLRPLYDELEPEAMVSAWIEAESAREEASSAQEQVASRAEEVQQRRLRLGQVIRERDQPWSHAVEAVSRAEVLGGQLAEAMERPAEVSARGGTLAETLAAMAQARCWRPPSRWRSFRPYRRSRPSQIPPKVEMTPRVLLLPLSMSEPAGTVCLYKITYPSESYFSRKVMSEDPAIGALEKRERRSGKRLFPRKILTQRGFPPSSPRGRVGLC

SEQ ID NO: 73100 - protein, 327 aa, Zea mays
  Coding DNA Sequence Number=SeqID_29725
  Homolog annotation: Hit_ID=Q6QP51; Match level="QueryCoverage=61%, HitCoverage=93%, E-value=1e-35, Identity=48%"; Hit description =Putative growth-regulating factor 1
MGAHPFGFVASSMEAQAHTSWTGKGDILEGILLCKGSGPRALLLIRGSKAGPSEGFNSRPEHSGFKLITDQRFEGWPLGRVRQPPQSTRAPLPLLIRGSKAGPSEGFDSRPRACRARDDSRYVRYMAEARATLPRSDFVTESHQREASSPRTLSNGSGSGKSPAEADGRDSGQGFVYSRDAISPRPSPASGGNSSPRRIHASPEGLLKQRENSVTRPARTAVPHTRVRLTTAKFSPLAQQETPPRPTLGLGLGRWSPPRPTPGLGLNLGLGRWYPPHPTPGLGLNLNLGGIASSPDPGLGLRRSLRLTRPWARTDRATGIHHYPTPS

SEQ ID NO: 73101 - protein, 156 aa, Zea mays
  Coding DNA Sequence Number=SeqID_29726
  Subcellular localization annotation: CTP_CleavageSite=53; ConfidenceScore=5.53e-01
MTTVVLSPLRKQGYVSKLPAAPTAVLLQGSGAPPTATLPRTQGSSTSPTATLACTQGSDTSLPDTLAHSYTPIVHLDPLLASIKGSCWCDDMTMSSEVTTSHERDAEANSDEWWRLRSSHDVVLASFGGGLKATSAMAWRLLEARPDILERWWREA

SEQ ID NO: 73102 - protein, 115 aa, Zea mays
  Coding DNA Sequence Number=SeqID_29727
MVSPVSCKRVIRVDVRALFVGGRLGAQRHAQKYLRQLARRLLDAWAWASKLACQKSEKRVHLAWLRAACMAACPFRPLVWAKGRALERVGEDLARGVWGRTFSRKKFDAEGVSPF

SEQ ID NO: 73103 - protein, 158 aa, Zea mays
  Coding DNA Sequence Number=SeqID_29728
MASERLQSNMNSTGVFLLRGPSAEKKAPNSNLNNLEKKLSFAADLLWLSKHTYHVIGRYNWKGEYMVCVKANHIMSSSTCPSLYVLQQHDQLQEGEQAWTTSSTTSTPFAGTNDFESRMTQNKEGENDEYMDVFYMVNAQSIIESQAQREFKSSLFAN

SEQ ID NO: 73104 - protein, 368 aa, Zea mays
  Coding DNA Sequence Number=SeqID_29729
  Homolog annotation: Hit_ID=Q6QP54; Match level="QueryCoverage=14%, HitCoverage=19%, E-value=2e-08, Identity=59%"; Hit description =Putative kinase
MDYTVVSGNDARLRLRCEVDARRVPRWGAGAVDSLDSRRGAASCLAMPAPSPPSAGKVMGQTWMSLFRRVGKMSSIPPPVGGLTAAIVVVARRRKEYHVVAAVVGHELKTPETEHRPGLKRLLETTHLELDGKLFVNTQQAPTWRANCRRFDPGGSLDRRVNCRRVSQPRWVGARRSTKGGKQQKGNPRPPCCPAPSPRSGEAVTPPRSRLSPSPGVGRGGDRRPRSRLSPSPGGRARRSPSSEVEAESEPWGRARQSPSSKVKAEFEPWGRAWRSPSSKVKAESEPWGRARRSPSSGVEVEPEPWGRARRSFLWCPRLDLAVVSLTLSSRTAGGAAQATLFSCQVGQWSGEVTAVTLALSTEERASG

SEQ ID NO: 73105 - protein, 148 aa, Zea mays
  Coding DNA Sequence Number=SeqID_29730
  Gene Ontology: Mol. function=carboxyl- or carbamoyltransferase activity; Cellular component=ornithine carbamoyltransferase complex; Biological process=amino acid metabolic process
  Homolog annotation: Hit_ID=Q8SA97; Match level="QueryCoverage=29%, HitCoverage=8%, E-value=8e-10, Identity=66%"; Hit description =Ornithine carbamoyltransferase
MEQRPGLKRLLKTTHLELNGKLFVNTQQAPTWRANCRHFDPGGSLDRRPKLAWGRVMMYPRGAVGPSPRSSEAETSPEAEAGVGRGRDSSEVEVEAEPWGRARRRPPSEAEVEAEPWGRTRRRPPSEAEVEAEPWCRARQRPPSEAEA

SEQ ID NO: 73106 - protein, 86 aa, Zea mays
  Coding DNA Sequence Number=SeqID_29731
MASLPSVPCDTRQRINLCRVPPGTLGKEPAREGPHVRFFAECYVRHSAKCASLPSVRDITLGKEPIPVPRSWFFAEYYGPDTRQKI

SEQ ID NO: 73107 - protein, 56 aa, Zea mays
  Coding DNA Sequence Number=SeqID_29732
MAKPTTPQVPLINQLRASHTTLMVWIIERVVDGKGVGHASSCQWTGSYEGWALGLD

SEQ ID NO: 73108 - protein, 322 aa, Zea mays
  Coding DNA Sequence Number=SeqID_29733
  Homolog annotation: Hit_ID=A2X0H0; Match level="QueryCoverage=18%, HitCoverage=13%, E-value=3e-07, Identity=46%"; Hit description =Putative uncharacterized protein
MSRGTRRNIIRSHEEYLSEELVVQSSNHKTYAPYHVDPSSEEDQLDMENNDEIIAPASDFDPTSTGHPCDIDGDAEPNIEGHFDPNFKLNSYQTVGGSGDPLSAATNAHNASKRKRVYVEPQSQEYEMHDRDTLSYTMGEQTDDDGFQDLQSSYKRNYAAEKMNAARIREGNLLRADRVATAHKAKPREFQIENRVDNKRANASKGMNKDATSKCSQQINYQKVGGLELGKEFYMLCVGLTSVPDEPLIRPYDNFQVIGDVGKNPIAWPSSCVCSFTLLNKLQRVSANHIDLARLEPIECKVYWNGAFTGHLNWFKRRVDCN

SEQ ID NO: 73109 - protein, 50 aa, Zea mays
  Coding DNA Sequence Number=SeqID_29734
  Subcellular localization annotation: CTP_CleavageSite=15; ConfidenceScore=5.11e-01
MASCSPSNSRTDRMREASNPSTSGARTSNQTVRRVESNDERQFEVFRGRK

SEQ ID NO: 73110 - protein, 70 aa, Zea mays
  Coding DNA Sequence Number=SeqID_29735
MEVNGVIAVVGVWGKLWKQDCTVRKVEFEYGYRDVVNGTERDCESGIGTERLRPIDFLERNGSGSEENIP

SEQ ID NO: 73111 - protein, 168 aa, Zea mays
  Coding DNA Sequence Number=SeqID_29736
  Gene Ontology: Mol. function=phospholipase D activity; Biological process=lipid catabolic process
  Homolog annotation: Hit_ID=A2Y3P2; Match level="QueryCoverage=57%, HitCoverage=9%, E-value=5e-20, Identity=60%"; Hit description =Putative uncharacterized protein
MERLPPPAGSRHGHHRYTRMPRQADLEGEAAPADQEREPERRPEVLAASASASLRVPDAARVFDELPRASIVAVSRPDAGDITPMLLSYTIEVHYKQNSKSRGYVGRRGAYYCIKKEKGIRTLNEARHSHHFDYKETRALFTRKVDHNLNLTLTAHEGKETINALCSS

SEQ ID NO: 73112 - protein, 194 aa, Zea mays
  Coding DNA Sequence Number=SeqID_29737
  Subcellular localization annotation: CTP_CleavageSite=34; ConfidenceScore=5.14e-01
EKLSEPSSSLTRPRTRSTTFQPPSPTQSPPAAIPAAELRPLPVGSPLPNPLPAELGLPLESPAPARAKPTLPWTENQATGGKPPSSSPATGPSPSLGRFATPSGRDAVPPRSRWQVGPQQRRHPRGRAVSPSLMGRRWAMEDSLAIRTSYCSEVEGFPHLFNKNTPTWRKRLQALSGGDPIENDPVGVSRQGGP

SEQ ID NO: 73113 - protein, 148 aa, Zea mays
  Coding DNA Sequence Number=SeqID_29738
  Gene Ontology: Mol. function=phospholipase D activity; Cellular component=brush border membrane; Biological process=lipid catabolic process
  Homolog annotation: Hit_ID=Q7F0T4; Match level="QueryCoverage=81%, HitCoverage=10%, E-value=4e-55, Identity=84%"; Hit description =Putative phospholipase D-like protein
KVSSGGRTIKLRATSSSRVKDWVTAINAARQPPEGWCYPHRFGSFAPPRGLLEDGSMVQWFVDGQAAFKAIASSIEEAKSEIFITGWWLCPELYLRRPFQHHGSSRLDALLEARAKQGVQDFTTCMSLSFLAFYLPRMMIHLRFETIE

SEQ ID NO: 73114 - protein, 62 aa, Zea mays
  Coding DNA Sequence Number=SeqID_29739
MEEVKGKCAFGPFLSILVIKCQHKCLNVNLCPWIDKLQITSKANRLFRSGAPDCPVVHRTVS

SEQ ID NO: 73115 - protein, 105 aa, Zea mays
  Coding DNA Sequence Number=SeqID_29740
  Gene Ontology: Mol. function=metal ion binding; Cellular component =integral to membrane; Biological process=ubiquitin cycle
  Homolog annotation: Hit_ID=Q5KQB3; Match level="QueryCoverage=69%, HitCoverage=28%, E-value=5e-26, Identity=72%"; Hit description =Putative uncharacterized protein OSJNOa0153K02.1
  Pfam annotation: Domain name=PHD; Domain location=37-79; Score=-6.7; E_value=0.08; Accession=PF00628.20; Description=PHD-finger
  Pfam annotation: Domain name=zf-C3HC4; Domain location=35-76; Score =22.1; E_value=0.00028; Accession=PF00097.16; Description=Zinc finger, C3HC4 type (RING finger)
  Pfam module annotation: Pfam domain module=PHD::zf-C3HC4; Domain location=37-79::35-76
KDHGPQPVDDDVASALPVYVYSSSAGGEGGKAPECAVCILELRDGDSARLLPRCGHRFHADCVGAWLRLHATCPLCRASVVAPRAVAAADGSSRDAKDDGADCLV

SEQ ID NO: 73116 - protein, 388 aa, Zea mays
  Coding DNA Sequence Number=SeqID_29741
  Gene Ontology: Mol. function=catalytic activity; Cellular component =integral to membrane; Biological process=metabolic process
  Homolog annotation: Hit_ID=A2Y3P2; Match level="QueryCoverage=78%, HitCoverage=28%, E-value=1e-138, Identity=77%"; Hit description =Putative uncharacterized protein
  Pfam annotation: Domain name=PLDc; Domain location=93-120; Score =45.1; E_value=2.5e-10; Accession=PF00614.13; Description =Phospholipase D. Active site motif
MEPPASAALPKEERKGFNSLVILIAWELWKHRNAFVFKGFGREWAWYCIYILLYKEVALALKINSLYSKQRLLNIHENVKVLRYPDHFSSGVYLWSHHEKIVIVDNQVCYIGGLDLCFGRYDSPEHKVADSPPEMWPGKDYYNPRESEPNSWEDTMKDELDRDKYPRMPWHDVQCALYGPPCRDVARHFVQRWNYAKVAYILVRNKALNEQAIPLLMPHYHMVIPHYKGRSKETNDEAEGKQYNDKDVDIGKPVLTSRTSCQDVPLLLPQELEPRELSSSDLRVNDLDINHSDRLNKKNFNQPLLNRKAKLDSSHQDLPMRSFVDNLSSLEPSSVRRFDSSKDDRDHIDKNGGKCRSEQLVLITDMTVSVNMSVSVSTCTLQYILSKY

SEQ ID NO: 73117 - protein, 147 aa, Zea mays
  Coding DNA Sequence Number=SeqID_29742
MGKNNKRKREPTPPSEEFGDSEYSEEEFSSEPEGSPAPVSPPASSDDSDDSQGIAAEVWTYIRAVERAGLEGLDESEYSSDEEDSDGGDEGEDDDDDDDDDGSDDSGRGGGDDSGRGGGDGGRDNTKGDSSRGSTKGGGGGRGRASG

SEQ ID NO: 73118 - protein, 202 aa, Zea mays
  Coding DNA Sequence Number=SeqID_29743
  Homolog annotation: Hit_ID=A2GBN7; Match level="QueryCoverage=74%, HitCoverage=33%, E-value=1e-09, Identity=34%"; Hit description =Putative uncharacterized protein
  Subcellular localization annotation: CTP_CleavageSite=72; ConfidenceScore=5.56e-01
MPTPTFNHSALPLKRRPRAQSLGITSKMPTPTFNHSALPLKRRPRAQSLGITSKMPTPTFNHSALPLKRRPRAQSLGITSKMPTPTFNYSALPLKRRPRAQSLGITSKMPTPTFNHSVLPLKRQPRAQSLGITSKMPTPTFYHSALPLKRWSYVRLLSVTSKTLMSIFTSLGVVTTISKESVQHSAKAMTSHQKEGINDRLH

SEQ ID NO: 73119 - protein, 243 aa, Zea mays
  Coding DNA Sequence Number=SeqID_29744
MNAVVTLHLPVCLYSAAAFENKSPTAVADAHAVEGMEENDVPAYHAAVDYHGVHVGCAAQVDIFGVEGQRHVGPLRLHDWAGDDDVVVASVVVPLLSLRVEVDAGPPSDHVNDSAIRLISEVFLLWCLRVIWVVDVWLMRVQRQERRLYDLYLLVVLVCVVRWMLSGAVVVWLWEVVLICVRDNSWVVGWLRPRHPVPGGLRFRAVPRWVRAVFAVKQAVKSARLLCPSSTPTTHAIATALGG

SEQ ID NO: 73120 - protein, 246 aa, Zea mays
  Coding DNA Sequence Number=SeqID_29745
  Gene Ontology: Mol. function=aspartic-type endopeptidase activity; Cellular component=chromatin; Biological process=RNA-dependent DNA replication
  Homolog annotation: Hit_ID=Q8S6J3; Match level="QueryCoverage=50%, HitCoverage=9%, E-value=3e-09, Identity=30%"; Hit description =Putative retroelement
  Pfam annotation: Domain name=zf-CCHC; Domain location=146-163; Score =22.1; E_value=0.00069; Accession=PF00098.14; Description=Zinc knuckle
MEFAQRSLRSGSPPSSFADPQGLGGTIFLLCSQMTERTVLQYAQAFNDLCQYAGYHADTDEKKRDRFRRGLSTKLRDRLNTVRANSYNELVNMAISQEDCITARQAEKKWKTPVAGPLAQPQRFRIVSDTQNRGPQQQQGRWANDNRCFTCGNTRHYAKNCPRNQQGQNVNQNQGKRQKLQVRQGRLNFTTMADIPEGAPVMTGDICPPQAPDLWVDLERSTFWIARLWNSLGAPEVHPMGVAPDL

SEQ ID NO: 73121 - protein, 171 aa, Zea mays
  Coding DNA Sequence Number=SeqID_29746
MEAERTDLRRQLAEERREANKAIADAHAAQAEAKVARVEGSLARQRAEELEARFNALRSRVDKVESSMRAEVERTHAQFVDAYHELGAWTADFEVPGQEAGLRFLEWLQEELLVLPTIVTGFMSFASLVTCEGAMNALSREGCMHYKVFDQADNNFEREIFKVEDLGGGTV

SEQ ID NO: 73122 - protein, 150 aa, Zea mays
  Coding DNA Sequence Number=SeqID_29747
MARDLKQGSGECEGLRPWREQATPGGLGKGRRPLSPTRRITDFGTDNSVDDYLVGEGQLAVVLPPVVTTSPTVVVGAKGAARDPWATFCTSREISSAAAAKDVAGSMSQRLREASQQLSQQLKQAADFTDLIASGALTTDVAAEVERLRA

SEQ ID NO: 73123 - protein, 134 aa, Zea mays
  Coding DNA Sequence Number=SeqID_29748
MEDTSLQVGPKLDWRLARRFRAFADQLRFHILSQLLRPFAFELSAPLCIHALLLSAAVVAMASLVHPKRFQSEGALNLVRNLLGWSASVFAGRIRAGATPLDDLAVGEFVLFVSYLSCGLALPILPFFLLLLED

SEQ ID NO: 73124 - protein, 96 aa, Zea mays
  Coding DNA Sequence Number=SeqID_29749
  Subcellular localization annotation: CTP_CleavageSite=63; ConfidenceScore=5.51e-01
MQGHSVPTHINRPHRFPGNRSGFTALAYNAPLTPTGRRAVTALVPTITGMGDLVSGRVRGYVCGQVHSGFNNIMLKRTELRSNLGFLSHAGLLVGF

SEQ ID NO: 73125 - protein, 57 aa, Zea mays
  Coding DNA Sequence Number=SeqID_29750
MENHPGKQCYHKDASTILFGKPYTSHELSPLVENLDAIECGVVGVFERELGLHLFPK

SEQ ID NO: 73126 - protein, 243 aa, Zea mays
  Coding DNA Sequence Number=SeqID_29751
  Gene Ontology: Mol. function=methyltransferase activity; Cellular component=cytoplasmic vesicle membrane; Biological process=metabolic process
  Homolog annotation: Hit_ID=A2YX29; Match level="QueryCoverage=98%, HitCoverage=98%, E-value=1e-89, Identity=64%"; Hit description =Putative uncharacterized protein
  Pfam annotation: Domain name=Methyltransf_11; Domain location=54-156; Score=25.6; E_value=0.00019; Accession=PF08241.3; Description =Methyltransferase domain
  Pfam annotation: Domain name=Methyltransf_12; Domain location=54-154; Score=16.6; E_value=0.014; Accession=PF08242.3; Description =Methyltransferase domain
  Pfam annotation: Domain name=TPMT; Domain location=14-199; Score= -78.8; E_value=0.038; Accession=PF05724.2; Description=Thiopurine S -methyltransferase (TPMT)
  Pfam module annotation: Pfam domain module=Methyltransf _11::Methyltransf_12::TPMT; Domain location=54-156::54-154::14-199
MTGGGPAAASQAYGEAWYWDERYRKEAGPFDWYQKYPALAPLLRLYLAPHQRLLLVGCGNSVFGENMIDDGYQDVVNIDISSVYIPHNLIPCISLDWQDMKMDVKNMSDFESGSFDAVIDKGTLDSLMCGQNSQENATKMLEEVNRILKENGVYMLITYGDPSYRLRLLKDMEKWTVKLHVIERWEKSSNQNKWELTKPLPLEDHSTSLAALLGPKPDVHYIYVCVKGNGGASVDSKAGEAAN

SEQ ID NO: 73127 - protein, 401 aa, Zea mays
  Coding DNA Sequence Number=SeqID_29752
  Gene Ontology: Mol. function=oxysterol binding; Cellular component =cytosol; Biological process=steroid metabolic process
  Homolog annotation: Hit_ID=Q84Z91; Match level="QueryCoverage=88%, HitCoverage=87%, E-value=1e-120, Identity=61%"; Hit description =Oxysterol-binding protein-like
  Pfam annotation: Domain name=Oxysterol_BP; Domain location=3-391; Score=-8.1; E_value=1.1e-08; Accession=PF01237.9; Description =Oxysterol-binding protein
MTESEGEAEAARAAVLTPPLSLGAGGLAGELRPANLGQRVLSLFRNVRPGSDLSHFQLPATFNLPKSQLQLYGEAVYCGGEDMLARCARGADSLQRMCAVVAWSISTTRPPIFGFAPYNPVLGETHHVSTSAGLNVLLEQVSHRPPVTALHATHARGEVELVWCQSPAPRFHGASVEAAVRGARELRLPRHAETYAVGCPGLVIRLLPSPGCEWAGDVRVSCAESGLEATLSYRRSRRSFLGLGGGDARCVRGRVFRSAAPDDTLCEVDGFWDRQVSLRDVATGEVSVLYDARQTIADLATPVVQDRKVGDDRTPGVSASESAVVWAEVSAAILNKDWEAARQAKRRVEETARRLAKERNERGEVWTPSHFSLWQNKHGDWECWPLEDSVPPAPIVVPSPL

SEQ ID NO: 73128 - protein, 270 aa, Zea mays
  Coding DNA Sequence Number=SeqID_29753
MTVADAREQRARRRPSSRPIRGQRESSLSRCEDNAPVIRSSNGSHTRNGCPANHSPRCINSAAGQVAFLAAATGDASPSSKQPHQKRLAPEGFNSRLRSRGPYTHYWLAPEGFTVASDAERGMTRGDRVRQITRRYFWACLWAPSRPLTNGARTSTRITRLQLTGDTMFGAHRGGSGAALANPAPAEPLTASTYQPENLGLDRISPYERLDHASPKPSLGQGQPTPKGARTRAKPRKTANSASPDPRLGLGLSPGRRRTPLRPTKGSDSG

SEQ ID NO: 73129 - protein, 180 aa, Zea mays
  Coding DNA Sequence Number=SeqID_29754
MGEPAVFLPHRWRNATPWELVPFSHRSASRIFIMQPGRTPPPAVTQDGDLQLDGGGKRAGLRPLPLPQPQGFSSPGLGRGVCRVEVGPRVGGGPLLHSVIEGRSDCRPWRWHLQRAWLSDVSGFGAARGAGVCHGSRKRFFRRRDSQGWPRTDLQLYGLLPVLASRVLAWAGASWQQHPP

SEQ ID NO: 73130 - protein, 63 aa, Zea mays
  Coding DNA Sequence Number=SeqID_29755
MATSRTTRPIALTPRRDSRRLWQGKRATLRLRHKDRIKKGTEKGGYPEKGSFSVKETCPEPPY

SEQ ID NO: 73131 - protein, 181 aa, Zea mays
  Coding DNA Sequence Number=SeqID_29756
  Subcellular localization annotation: CTP_CleavageSite=44; ConfidenceScore=5.28e-01
MGEGLMAAASALRSSLLLFGPSEQKSLSLPLLERATASRSSVFCCSAGPPIESLGSVGLAVRGFSCLVKGTPRPPFDEPKPGVAVSAWTEAELVRKEDLVGQSLAGSSTGGTVAGIELPRPRAGLMSSGDDWPRPRGDRPSRIPGEDLGSDGPGVVTLSSFRVEILRLRRCPRLGQTSPKV

SEQ ID NO: 73132 - protein, 67 aa, Zea mays
  Coding DNA Sequence Number=SeqID_29757
MGTVELKVKNVGTVELNIKNLWRQNVSIKVSAVPIVANYAKLCLAVLDLAANWATVLHILVCLPTFL

SEQ ID NO: 73133 - protein, 342 aa, Zea mays
  Coding DNA Sequence Number=SeqID_29758
  Homolog annotation: Hit_ID=A2XFR6; Match level="QueryCoverage=47%, HitCoverage=46%, E-value=1e-07, Identity=29%"; Hit description =Putative uncharacterized protein
  Subcellular localization annotation: CTP_CleavageSite=37; ConfidenceScore=5.18e-01
MRVKWDALSQLIRGTRGVVALSSCRQRGPGTVLALPRLSAEMARLRHTARKVGDFLSCRLDLRSVLCAAPCPEVESVRRRSSVPQLEAPPAPPRDAPAARGGPGGDPDDDDSDHSTESSEPQEAEGWVARPVTRDAGRGCHFHDALDTLLHQAFDWHTWSIEYRCVVYQHSRGRYPDRWEATCLVRRPEDDLRGAEAVSEHYSISERDTAEVAMQDAAWRAVSQYCSLFGGVADGLNLRYYPHRPTGNTESVVVSPVGEDNPRLSSTVNLVAVLNTELDHSLDELSRARTEIAELRAELAERRHQEGGSPAPVGTQHPYRSPPRGHHTYGSPACKTRIDLDP

SEQ ID NO: 73134 - protein, 109 aa, Zea mays
  Coding DNA Sequence Number=SeqID_29759
MVSTSSCKNFRFFEQPSEKLCPVYGRLLKEGARLKRVLEKKTLDKLTDQPGNLIPLDRARVPDLSVSGDNSDLVEVDPHDPTTTSDPEAPMQSLNQLPMVTDLADARSA

SEQ ID NO: 73135 - protein, 158 aa, Zea mays
  Coding DNA Sequence Number=SeqID_29760
MGKKGSRLGGKRVGRCREGPAAPHPSKASNSRGAMGGEEPSSLLQPLARGRKKGAAGLCEKFWAPWRNAGRALGPGRPWLLASCAPAMERKKWRWAEIRPEVEEGLGRHPGERLEERDAMAASLAPCLLLAAVGAREEEGREDACVGWKKEREKCCGG

SEQ ID NO: 73136 - protein, 227 aa, Zea mays
  Coding DNA Sequence Number=SeqID_29761
  Homolog annotation: Hit_ID=A2YGC2; Match level="QueryCoverage=53%, HitCoverage=53%, E-value=3e-08, Identity=34%"; Hit description =Putative uncharacterized protein
MASEAKRHLGKYDMPTHTITLHYQNVIIQTHAYNMTSSMDVLDILIWLVLDALHHRRGLYPDQWEATCLVHRLDDDLRGAKAFSEHYYITERDTAEAAMQDAARWALSQYCSLFSLVADGLDLKYYPRRSTDSAGGVIVSPIVEGNPRLNSMVNLPAMLNIELDHALDELGKARAEVAELRAECAARQYLDGGSPTLVGIQHPYRSPPRGRFDYGTPHYRIQIDLDP

SEQ ID NO: 73137 - protein, 147 aa, Zea mays
  Coding DNA Sequence Number=SeqID_29762
MAARWGGSRESTARQGWPNLRRTGSHMGEGAYVQEANKEPRPWGELTCSSLDPEKCPTRYGARGGVAVQRRPAEAEAALGKKGRTPWLLADLPARHHGEEGLPALACVTEPGSWKKMAEEEEGCGGWEKLRGGSEKLPSARGEGSYL

SEQ ID NO: 73138 - protein, 68 aa, Zea mays
  Coding DNA Sequence Number=SeqID_29763
MFPSSYRTHLHPKSPTSELEFLVFPKSLSAVKNYTLPWLAFHRSAHVLFVPVLASLYAGDARQPTQLR

SEQ ID NO: 73139 - protein, 116 aa, Zea mays
  Coding DNA Sequence Number=SeqID_29764
MAGEPQIPTSCPELRVTRKSSLYRVGAHLDRNKPDVDVAEVAVPVGARLRTEAARQELGKHHRRERWARGTPPPCAASTAVNPAPGNGNQTTHDGYRPEGAHWTERGFLHWQRAAT

SEQ ID NO: 73140 - protein, 99 aa, Zea mays
  Coding DNA Sequence Number=SeqID_29765
MSGVSKILLRFNGLGRTESPSEVTGRVDPLPTMIDEGQAEFGGRKRDVTSVKCRMIGRARVDHRVGHSWRMKGDRAERVCQRLLVPSTYPRCPGSQRRR

SEQ ID NO: 73141 - protein, 141 aa, Zea mays
  Coding DNA Sequence Number=SeqID_29766
  Subcellular localization annotation: CTP_CleavageSite=57; ConfidenceScore=5.27e-01
MKLWKETSRSSKTTTSSRCGLAATPSRLPVKAAVIYVSFSHFDLFFSYPQNTHKYVLSSVIQNSTSSDIKIARIFFLFVLRLRTGNDLRDQADLASASTRGQAVSLAARSRRFESSFILARVELNLVTEDSYGTLSNLGSS

SEQ ID NO: 73142 - protein, 43 aa, Zea mays
  Coding DNA Sequence Number=SeqID_29767
MLMVFAQKFADEDMMVNLMDASLVIPPVIFLWKDVHVSLYFDE

SEQ ID NO: 73143 - protein, 160 aa, Zea mays
  Coding DNA Sequence Number=SeqID_29768
  Subcellular localization annotation: CTP_CleavageSite=45; ConfidenceScore=5.27e-01
MDPLVSPSRRGIQQDGADTRTPLDSLKPLASLTTLTFTRGPQNAVARRVRKFGPPSSTGRFLGDLAEVWGAGASPGQVGHGWNFALADRATDDLELLVGAARNTVGHTSSSLGPSAPTACARIELGSGDAPPRPGGRRRQNRPWMAELGWSVGLAIFCQD

SEQ ID NO: 73144 - protein, 135 aa, Zea mays
  Coding DNA Sequence Number=SeqID_29769
MGKSKKGRGSSPRSGDKRKREPTPPSEDFDDSEYSEEEFSSESEGSPAPVSPPASSDDSDDSQGIVAEVWTYIRAVERSGLEGSDESEYTSDSSEEGSGSDGGDDDDDRGDGGGGGDSGRGGDGGGSKGSNKASG

SEQ ID NO: 73145 - protein, 96 aa, Zea mays
  Coding DNA Sequence Number=SeqID_29770
MAGDRRAANAGELICAGRKAWGYDGQLLELSPGEDLLPRSAIRSLVSANRNGGDDHGTDSSAARRGEPRIMFRKMTGGITRLASMEFSIISSSASF

SEQ ID NO: 73146 - protein, 114 aa, Zea mays
  Coding DNA Sequence Number=SeqID_29771
MSKVTCSLRALGATPNDRGSSILPTGKVPACYAAVDYHGIDVRGAAQINVPGIEGSRICAATASIPGLSLWCHYHGLGRDIPDSEWFLRLGADWLCCAPIVDYGCPARSLAAKA

SEQ ID NO: 73147 - protein, 192 aa, Zea mays
  Coding DNA Sequence Number=SeqID_29772
MEIVLREAAIGDSNPQRDLDHDCDLGGEPTNRRAPSRRNRGAEHRAGGANFMSTCITIVVPPLLVSGARLFTIQDRVLEGINVFDKGWEESKFQHLAPTIRATKNNPRWPPKQASSKAAPSVDEAAKATLLAEKKGKALADNTPQEAFEDEVVSKRQCQEHPTPEGTLRTCTPEAYRKYPLQASLHQRAKTQ

SEQ ID NO: 73148 - protein, 347 aa, Zea mays
  Coding DNA Sequence Number=SeqID_29773
  Gene Ontology: Mol. function=aspartic-type endopeptidase activity; Biological process=DNA integration
  Homolog annotation: Hit_ID=Q8S479; Match level="QueryCoverage=87%, HitCoverage=17%, E-value=1e-08, Identity=24%"; Hit description =Putative pol protein
  Pfam annotation: Domain name=zf-CCHC; Domain location=59-76; Score =20.2; E_value=0.0013; Accession=PF00098.14; Description=Zinc knuckle
MHLHVMKGRVKRRLPLQVPQVKKRKKKKVMIMKIINHAHHPLRTKKQSDASERKKQRKRGCFACVEKGHFRDNCPTMAEPKKERSKGKALTSVRTWDDSSSDDEPPRTRSHWSSSRSSRSSHKCLMARGNKSIPSSSDESSSDDEGEGKPSVDELAEAVKFFQDVCTKQKAQLKTLKNKLISSQNDYKGLLEKFETFANLNSELSTKIELLESSAPSTATDDGLIKKNEKLKAKLASSQEVIENLLGTPEVSLIEIPEIIKKDASTSCFDLIDDSNSCNQVLVENIVVETCSDEVAKENEQLRQEVARLGKALYDKKGKPKQIRPPQDNTTTGVNKPMEGEIVICRL

SEQ ID NO: 73149 - protein, 129 aa, Zea mays
  Coding DNA Sequence Number=SeqID_29774
MDTWRGGAMAGEPQIPTSCLELRVTRKSSRYRVEAHLDRNEPDIDVAEVAVPVGARLRTEAARQELGKHQCAHHHRRERWAHGTPPPCAASTAVNPAPGNGNQMAHDGYRPEGAHWTERGFLHWQRAAT

SEQ ID NO: 73150 - protein, 128 aa, Zea mays
  Coding DNA Sequence Number=SeqID_29775
MECGSLRIFRVCLVYSSMRLGDPFIAPRQLGAVESNPGRQFLPSVGWRTGQSGVPPDRHCSVSGADCFPKLAQPTVEDLEPLAHRTLSGAHQTVQCPHQTVGSATHHARIARPTVGSPDSPVHHRTVW

SEQ ID NO: 73151 - protein, 144 aa, Zea mays
  Coding DNA Sequence Number=SeqID_29776
MGKNNKRKREPTPPSEEFGDSEYSEEEFSSESEGSPAPIPLHESSDDSDDSQGLAAEVWTYIRAVERSGLEGSDESEFSSEEEDSDGGEGEEDDDDDDDDDDDGGDDNGDGGGSGGGDGGGDGSKGGTRGGSSVGSTGGGGGSG

SEQ ID NO: 73152 - protein, 52 aa, Zea mays
  Coding DNA Sequence Number=SeqID_29777
MAPKRKTVNSSAAVIPVIDPNSQLSFAEHSAAERQDLSGISVSRAGRLNPGY

SEQ ID NO: 73153 - protein, 94 aa, Zea mays
  Coding DNA Sequence Number=SeqID_29778
MEGLAAEVWTYIRAVERSGLEGSDESEFSSEEEDSDGGEGEEDDDDDDDDDDDGGDDNGDGGGSGGGDGGGDGSKGGTRGGSSVGSTGGGGGSG

SEQ ID NO: 73154 - protein, 298 aa, Zea mays
  Coding DNA Sequence Number=SeqID_29779
  Subcellular localization annotation: CTP_CleavageSite=79; ConfidenceScore=5.17e-01
MARARAYKTLPDFDCTLPRTLKPHRSLARHCLPVRSVSAAAQSLCHRRPANRAIPNPVQPSEKTVHTSVKLPERGIGVCFAGEASPRSPVLSTPPEYVDRVIHSTILRFLVHMVPTLPREAHRALGLNQFAVVWPVHSPPTRTPACARGPGNSGHPRLQAVPRRDRQSLPEPTPPFAGPPSPPVILNENLSLKDCNLADGEYILVPEQGAAQEVAQDPAPEPAPEDLSATALEGKPRIDCAHRCRNCLEPQLLDYRNPIEMNNSSLEEMVAGVTWPSILPPGWTVEWDPASAEEEHEE

SEQ ID NO: 73155 - protein, 429 aa, Zea mays
  Coding DNA Sequence Number=SeqID_29780
MEAEKTDLRRQLAEERREANKAIADAQAAQAEAKVARSEGSLVCQRAEELEARFNDLCSRVDKAKSSTRVKVERTHAQFMDAYRELGARTTDFEVPGQEAGLHFLEWLQEELLVLPTIMTGFMSFASLVTCEGAMNALSREGCKHCEVFDQADDNFEREIFKVEDPVVKQSVGELFDRMWGLHGREAVRERSDRAIEQMGQTKSVEDLVGRDSALAQGQEGRSGARLRMPVKAPRRPLRSLRPGEDPTLAPAPTSEGALKVLGFGPAHATATDNAIFVAASTVAADDDLFGSVSKCFESDDSGSSIVWTEESSDEDLDYFAALDVATAETSPRVVGAEDLPGASTGCRRRRAVAKRRLSELSRSNKRHCGEMESGRLRVDGTGKRELLSSPAGASVGEGELRNLFEGEELRIMLFNYREMGIIPKVEPM

SEQ ID NO: 73156 - protein, 159 aa, Zea mays
  Coding DNA Sequence Number=SeqID_29781
MGVWPELRGAHGGGFAAILLGSEGDAEADKVGKQRRGRIGNGDGSADWGPHGSDQEDVLVHTGESQEWKGIGPRQRESAQLEVQIPAEAASRELLTTLSNKLGALVVSPAEATTSAAGSLTSGGDHLSTEWPPLHRWLTSDGGRLSAREEVLALVLLRE

SEQ ID NO: 73157 - protein, 79 aa, Zea mays
  Coding DNA Sequence Number=SeqID_29782
MPRSAAGGSVGGGTKAIQAKEPDMWQLTAPAAGWPRVAEVCLLRKAGEHPSPPNASGRSGKVTPPLTPIPCLLGAVAED

SEQ ID NO: 73158 - protein, 240 aa, Zea mays
  Coding DNA Sequence Number=SeqID_29783
  Subcellular localization annotation: CTP_CleavageSite=36; ConfidenceScore=5.21e-01
MARARAYKTLPDFDCTLPRTLKPHRSLARHRLPVCSVSAAAQSLCHRRPANRAIPNPVQPSEKTVHTSVKLPERGIGVCFAGEASPRSPELSTPPEYVDRVIHSTILRFLVHTVPTLPREAHRALGLNQFAVVWPIHSPPMRTPACARGPGDSGHPRRQAVPRRDRQSFPEPTPPFAGPPSPPVILNENLSLKDCNLADGEYILVPEQGAAQEVAQDPAPEPAPEDLSATALEGKPRFYA

SEQ ID NO: 73159 - protein, 147 aa, Zea mays
  Coding DNA Sequence Number=SeqID_29784
MREHRTPVRTTRTPDYGPGLPEDVPPVHPTDRRCALSAFNASCPFRWQATPEPSWHKKIAPVANFSSSKYYFRDTSGPTCRGLALLAVLELALLGKLIQRGSDSNKMKGGPRQSFCFRWCSEIDGGWSEGWRLRLRPNICPPRDQFD

SEQ ID NO: 73160 - protein, 41 aa, Zea mays
  Coding DNA Sequence Number=SeqID_29785
MDVLMIRNLGENQQGLEKGQGISLRGEVLRESWVITNGAVV

SEQ ID NO: 73161 - protein, 111 aa, Zea mays
  Coding DNA Sequence Number=SeqID_29786
MTRRGNCSLMKWKRRGRATREGKSHCTGYAIAVAAKKDECRGSLLRRVGSPSPARTALSARYRRASLAIASATNVCNASKALFGRALAPLKIALAPASLKDELLCRSRVFF

SEQ ID NO: 73162 - protein, 154 aa, Zea mays
  Coding DNA Sequence Number=SeqID_29787
MWGTKNPERKERRSKREILRKETPKTPKFFKFLSKDFFSQRFENGKRQKKVWKKEGRGFLGLEKEVQIGVQCWGGERPGRPVCQSDWQTDTQTDRRLVKVDQHRLNRPGGAVEPPLTAPGDLFASLTGRLQIRGQRGQRPAELPLRTSSTGLDQ

SEQ ID NO: 73163 - protein, 517 aa, Zea mays
  Coding DNA Sequence Number=SeqID_29788
  Gene Ontology: Mol. function=oxidoreductase activity, acting on the CH-OH group of donors, NAD or NADP as acceptor; Cellular component =integral to membrane; Biological process=isoprenoid biosynthetic process
  Homolog annotation: Hit_ID=Q42466; Match level="QueryCoverage=65%, HitCoverage=59%, E-value=1e-117, Identity=68%"; Hit description=3 -hydroxy-3-methylglutaryl-CoA reductase
  Pfam annotation: Domain name=HMG-CoA_red; Domain location=164-413; Score=14.0; E_value=5.3e-24; Accession=PF00368.9; Description =Hydroxymethylglutaryl-coenzyme A reductase
MEVRRRVLPPHGSAPRRQQATGGEGQRVRVQAGDALPLPIWHTNLIFSALFAAPLVYLMRRWREKIRASTPLHVVSLTEIFAICGLVASLIYLLSFFGIAFMQSIVSNSDDEEDFIIDSRHGQARAPPPPAPAAPCALLGSPPAVPEKMPEEDEEIVAVVVAGKIPSYVLETRLGDCRRAAGIRREVLRKITGREMDGLPLDGFEYASILGLCCELPVGFVQLPVGVAGPLLLDGHRLYVPMATTEGCLVASTNRGCKAIAESGGASSVVLKDGMTRARAVRFPSVRRVAELKAFLEDPANFDTLAMVFNRSAGRFLLAIRYSDSYSQSNLFGMQYSRKRYFVLEDAALRCFKSAPSTKGEFAPSSKGELSYVSSTNQNLSFGVDLQEIRLMGVLQIIAIAYLLTVLCLIWIRGDEDVEYGYDLLKRYRYQLNAASTRHKMGPFLLMRPLGARPLLTPILQRGGRGGRAGGGGGSRSRAAMASSAGGVLSSLGKNESYLCANKVDLESLDIQLDNRR

SEQ ID NO: 73164 - protein, 262 aa, Zea mays
  Coding DNA Sequence Number=SeqID_29789
MPTVPIDSPFASRPHRLGIQCSTDPGCRRAVTALAGELVGDEESGLSRAQLTNQTGQRASPGIKEGVCARNYRMAHRSAQSTRAGGWPKSGEVDLRLLVKFCQVRGLGKLHGPMAELTKALARLGGDWSGLATVAKALAAMAGGKELAGAKEGRLAGDDDSQGLAAEVWTYIRAVERAGLEGSDESKYSSNEENSSDSSEEGGDDDGGDGDDDGGDGDGGGDGGKGGDGGGKGGSGDGGDGSKGSSRGSSKGSSKGSNKASG

SEQ ID NO: 73165 - protein, 219 aa, Zea mays
  Coding DNA Sequence Number=SeqID_29790
  Subcellular localization annotation: CTP_CleavageSite=59; ConfidenceScore=5.24e-01
MTFPVDVAVCALGRATWARFRALGSGGAEFAVFRVLARVRALGSGGAEFAVFRVLARVRALGSGGAEFAVFRVLARVRALGSGGAEFAVFRPESEPWGRAERSSPSPGQARVRALGSGGAEFAVFRVLARVRALGSGGAEFAVFRVLARVRALGSGGAEFTVFRVLARVRALGSGGAEFAVAPLARPSCLSDSLCRVALQSEWRRRRCPSVRLASGAAE

SEQ ID NO: 73166 - protein, 67 aa, Zea mays
  Coding DNA Sequence Number=SeqID_29791
GGSAGELEYWASSAGAEREALRGRRWRRGSHGLEAKGAGMTGEGKAQPAACVGELAADGDQQPGPTR

SEQ ID NO: 73167 - protein, 86 aa, Zea mays
  Coding DNA Sequence Number=SeqID_29792
MGKPGPSLLMLLLCRVTTLVPTIIGMGDHVSGHVRGKVYGQVHSGWGRQILDGRLWCWLLDYLLSNSLLRNEDVFPVSEITVYQMQ

SEQ ID NO: 73168 - protein, 105 aa, Zea mays
  Coding DNA Sequence Number=SeqID_29793
MVVTPWVRYLSQEYVPMITWAANTTAPPLAHISVYLSVEYNYTSALAKVGSRMMRLQIQGCVNSKGILFTIYRHGTQPVRNYNYAPHKGLQQRPKHLWTRGSFYF

SEQ ID NO: 73169 - protein, 70 aa, Zea mays
  Coding DNA Sequence Number=SeqID_29794
MGKSKKGGSSSHHSGDKWKREPTPPSEDFGDSEYSEEEFSSEFEGSSVHASPPASFDDSDCGRTTRIIPA

SEQ ID NO: 73170 - protein, 154 aa, Zea mays
  Coding DNA Sequence Number=SeqID_29795
  Subcellular localization annotation: CTP_CleavageSite=19; ConfidenceScore=5.07e-01
MTTAVLSPLRKQGNVSKIPAAPTAVLLQGSSTSPTATIPHCNLADGEYVLIPEQGTVQEEDQEQAPEAAIEDLPAAPAIEGKPRYGGYKCGHCTAAAGVSGALYAKAVRPGRERGIDGDGMIQDMVDSVTWPTTLPPGWTVEWDVAPAGEEHEE

SEQ ID NO: 73171 - protein, 202 aa, Zea mays
  Coding DNA Sequence Number=SeqID_29796
QILDGRLWCWLLDYLLSNSLLRNEDAGGLVGSERFGLLTAASFNPRAQGASRGVKDATRARNQRKTHRGARSTHTCGWVKSGDVDPVSPTRSRAAVGTPCAERSSVNLRSGGVESERGCMVKASVGFIGAGVGVGAGPSAEACSGVARGYLVHVSSKGRYALAWEICGRQDGSVGTVHPETKHVSTHVKWSWLRFKLFQGVP

SEQ ID NO: 73172 - protein, 102 aa, Zea mays
  Coding DNA Sequence Number=SeqID_29797
MGSKTLSTECTFVSLTRLRKKTLKDMLAFGNQDKNGFTPTESTYTPPSSLLPRRVHTTLAISPLPLHGGLSGIGLTEAKLTHDEAYGQLKGPRSAGLHQLGP

SEQ ID NO: 73173 - protein, 108 aa, Zea mays
  Coding DNA Sequence Number=SeqID_29798
MLVDYTMVLNGPSVSVEGPMQQAPPRAPCCGSNCHRRCRLRLHLRQGLLQQPGCPMVMQGASLAEVQGKVASQTPPPTEARGKSPAAPDPGVSAPAPRASDDAVSPGG

SEQ ID NO: 73174 - protein, 129 aa, Zea mays
  Coding DNA Sequence Number=SeqID_29799
MQDATRRALSQYCSLFSGVADSLELKYYPCSSTGSAGGVIISPVSEGNPRLNSMVNLVVVLNTKLDHSLDELGKARAEIAELHAERAARHYQDGGSPAPIGIQHPYRSPPHGLFSYGTRDCRTQIDLES

SEQ ID NO: 73175 - protein, 127 aa, Zea mays
  Coding DNA Sequence Number=SeqID_29800
MVKRNWRKRGTRKVTYPKTMLGAAWHEARGLQLARRRRIVAATSSDLRKGEVERGPGRGVEERGNHREFPVRQAQAKLTVVKALAEVQRRRQNDEATTGGLRLGECEGRESAKVRQGRDEGVRGVFT

SEQ ID NO: 73176 - protein, 74 aa, Zea mays
  Coding DNA Sequence Number=SeqID_29801
MKSEYSSDEEDSDGGDEGEDDDDDDDDDGGDGDGSGKGGGDGSKGSNRGGSSRGSTRGGSNSGGSGGGSNRASG

SEQ ID NO: 73177 - protein, 43 aa, Zea mays
  Coding DNA Sequence Number=SeqID_29802
MTTDRPLELLHMDLFGPIPYISIGGRKITYPRDFKRILETGSK

SEQ ID NO: 73178 - protein, 128 aa, Zea mays
  Coding DNA Sequence Number=SeqID_29803
MVLNEAARDAWSQPPPNGNQVAKAGGPWRRGGEAEPTTERRLRGTTASTDGATMGRATAPWTPLRDQRPLSKLGAWRRPPGAVGAAGGRAAPLSPVVEVRMGMAREGRVVEHRGGCGGLGVHGELLEK

SEQ ID NO: 73179 - protein, 258 aa, Zea mays
  Coding DNA Sequence Number=SeqID_29804
  Homolog annotation: Hit_ID=Q2QNA4; Match level="QueryCoverage=89%, HitCoverage=96%, E-value=2e-84, Identity=66%"; Hit description =Expressed protein
MALVADCSAYELQMELPDERVQVDALERHLLAGLSSNDYDGSFEDEVLYDASFAEMEDNFVKYQIAQWTLLSLLLIVAWGVGVLMLLYLPIGVYVCRRDFRSRKLYLTPHAVIYKVNKPFAFPCFGVSKKEKYWILPSISDVVVEQDYLQSIFGVYSIRIENISVRKPPSCDVKITGVAHPHDFRKAVVVHLLNTRNQKTSSDDQQSTNLNYAASSSEASLGDLMLEKLDEVEISVKVVSLIVKDNIKASEGIITSDS

SEQ ID NO: 73180 - protein, 268 aa, Zea mays
  Coding DNA Sequence Number=SeqID_29805
  Gene Ontology: Mol. function=oxidoreductase activity; Cellular component=membrane; Biological process=electron transport
  Homolog annotation: Hit_ID=P0ABK0; Match level="QueryCoverage=71%, HitCoverage=36%, E-value=1e-102, Identity=98%"; Hit description =Cytochrome d ubiquinol oxidase subunit 1
  Pfam annotation: Domain name=Bac_Ubq_Cox; Domain location=2-245; Score=17.6; E_value=3.6e-18; Accession=PF01654.8; Description =Bacterial Cytochrome Ubiquinol Oxidase
MNPATKWATCRKAKLAAIEAEWETQPAPAAFTLFGIPDQEEETNKFAIQIPYALGIIATRSVDTPVIGLKELMVQHEERIRNGMKAYSLLEQLRSGSTDQAVRDQFNSMKKDLGYGLLLKRYTPNVADATEAQIQQATKDSIPRVAPLYFAFRIMVACGFLLLAIIALSFWSVIRNRIGEKKWLLRAALYGIPLPWIAVEAHSATFIDRIAILAAASVSGFPLGLLGENPNKASPRATHTGKRKMREVNGPAQRHPYWAKARGREVDS

SEQ ID NO: 73181 - protein, 152 aa, Zea mays
  Coding DNA Sequence Number=SeqID_29806
MGKNNKRKREPTPPSEEFGDSEYSEEEFSSEPEGSPAPVSPPASSDDSDDSQGIAAEVWTYIRAVERAGLEGSDESEYSSDEEDSDGGDEGEDDDDDDDDDDDGDGSGRGGGDGSRDSTKGGSSRDSTKGSSRGSTKGGGRGRAVARRHWSS

SEQ ID NO: 73182 - protein, 131 aa, Zea mays
  Coding DNA Sequence Number=SeqID_29807
  Homolog annotation: Hit_ID=Q6ERZ8; Match level="QueryCoverage=33%, HitCoverage=8%, E-value=2e-07, Identity=52%"; Hit description =Transposase-like
MVRRHGPDFDWRHEPVDPSVVYASGGGKAHGRYTLFDRFIDSSSLMQQQGMTTNIPPPPQWSQFASTPALPPQFNTPPTHKPAPGDRVTPEAGGSGSDPTAGTGFVNSLFAFPPPSGDSGQSSNHPSGGYL

SEQ ID NO: 73183 - protein, 76 aa, Zea mays
  Coding DNA Sequence Number=SeqID_29808
MPNQEPLFHVNQSKHEQQINLSNKGFTKYILKSIMIKTIESFKKNSEIQTLSQRSGMFTLIPSSNPNGPIDKNVPN

SEQ ID NO: 73184 - protein, 134 aa, Zea mays
  Coding DNA Sequence Number=SeqID_29809
  Homolog annotation: Hit_ID=Q7XBD3; Match level="QueryCoverage=20%, HitCoverage=5%, E-value=6e-08, Identity=96%"; Hit description=Zeon1 gag protein
MIKGLRPGPTAQYFARKPPQTLEKLLQKWMSASELTMTSDKEGRKLTDFLRWLGASEGESTLGMSDQSIAPVRMMTKEASFRGHSTPHSLQDSSKAPSSRQLQGAEAPGASEEDMGINPGKFIAYSMVKTRATL

SEQ ID NO: 73185 - protein, 200 aa, Zea mays
  Coding DNA Sequence Number=SeqID_29810
MAARWGAHGHGGKWSCAGTAAGRKMNRALEKKSGRWELLPRERVGAGGAVPLLAKGRKGAGREWAEGGAMDGGSWKSRRHGLCTSCSKGVGQRARGAMGSSSRGRAGAVRGGAGHLNEQPWGTKEGERQPWRCSAREKKGRAGHGAEASLGEKRRPAQAKAEAWSAQEKLGRRELVGRYPAAAVERKGELLLPWEDSCAR

SEQ ID NO: 73186 - protein, 200 aa, Zea mays
  Coding DNA Sequence Number=SeqID_29811
MAARWGAHGHGGKWSCAGTAAGRKMNRALEKKSGRWELLPRERVGAGGAVPLLAKGRKGAGREWAEGGAMDGGSWKSGRHGLCTSCSKGVGQRAGGAMGSSSRGRAGAVRGGAGHLNEQPWGTKEGERQPWRWSAREKKGRAGHGAEASLGEKRRPAQAKAEAWSAQEKSGRRELVGRYPAAAVERKGELLLPWEDSCAR

SEQ ID NO: 73187 - protein, 311 aa, Zea mays
  Coding DNA Sequence Number=SeqID_29812
  Pfam annotation: Domain name=SlyX; Domain location=201-268; Score= -8.1; E_value=0.055; Accession=PF04102.3; Description=SlyX
MNSPTPASGGDSRFSSDFLSRDGFPSILWEVLNSAGYPTPPLYMVQLYEEHRVPRCRVWLTLEAHPLQPGWRSLDSKTIGLRTDDTVEAAAMKTLTTFCGYHPLEMVMHPLGLFPAEKKDDPMWCNRVSHVKDVWAMYPDLVGRVTVQCMSALYRLQVLQSDAMALLANTAQTAKLTLDSREDFVVDLSTELVEKDLQVERLSQRITTLEQQVEIRDNTIDVLENQLHDVQRELEEANDHLDMHHLEMEANEAGSEGEEAIEELGPAPGANGANDILSFELASPTLSSMVEASISDPQQWQLTRSFEHAAT

SEQ ID NO: 73188 - protein, 272 aa, Zea mays
  Coding DNA Sequence Number=SeqID_29813
MAVMGSTSEKMYLCQVRKQQIFVAFVPRWCLMKKTRIEGSGGNMPPRTRKTARKSTGPIGVPHHQPASRHEESSSGSNDPIGDLEAQVEQLRTELRHRNSVWVEGGQRINELRTNIRHLQDELAEQDLTLDWAVNSRSIAWDREAKARARVEKLSTAVDNLQVYCNTLHEEVHELYSRRHPDVSADPVGMGAGPSGTAGEALGGELDLFKPPPSMNLADDETRPPLFIKAEDPLKADEWVRVIEQNLPDIKSHGTDLNWRFMSTTFQKECSI

SEQ ID NO: 73189 - protein, 266 aa, Zea mays
  Coding DNA Sequence Number=SeqID_29814
MGSKTLSTECTFASLTRQNKRLSRICWLLGIKVHANREHRYTTVWPLAMEEENLHVFDALCARQSTPAPDPAPRRAAPVSPVCACAYKAHSGVDHTPPHALNLTGAQTHQRLPVHGVSAATRTPATIDRPTKPFSNPVRPSERTEHTSVKLPERGIEVCFAGEASPRSPDSLRPPAKRRPDCNLADGEYVLVLEQGAAQEVAPDPAPEPAPEDLPTTALEGKPRNPVEMNTSSLEDMVAGVTWPSILPPGWTVEWDPTSAEEEHEE

SEQ ID NO: 73190 - protein, 278 aa, Zea mays
  Coding DNA Sequence Number=SeqID_29815
MTSHGSSDEGNAQSHTDGLAREGFPRILWEVLQRAGYTTPPQYAVQLFEKHQVPRCRPGWRSLDSESFGYKAEDTIEAIALHGLTTFCGFHPLELSTHPIGLFPAEKEEDPMWKDRVEHAKDIWAIYPGQTAHLTVRCMNALYRLHVMRGEAMSHLMALLEATKIPLDNREELVVDLSTEILEKDLQVEQLSNEIQELEELVGTRENTIEVLEDQLINTQQQLAEANQHLDMHHQEIQDMEANEDVDIEGGEEPASSLDTAGSGRPPTPESSVASFAH

SEQ ID NO: 73191 - protein, 394 aa, Zea mays
  Coding DNA Sequence Number=SeqID_29816
  Homolog annotation: Hit_ID=A3BUU4; Match level="QueryCoverage=79%, HitCoverage=36%, E-value=2e-44, Identity=42%"; Hit description =Putative uncharacterized protein
  Pfam annotation: Domain name=UVR; Domain location=305-340; Score =21.7; E_value=0.0017; Accession=PF02151.10; Description=UvrBuvrC motif
MASRDDGWGGGEDGSSLFEGMVLFAPEPTAAEDSVPAPAPAPAPAEDSVPVPAAVPELPSAARHDADAASSVPPPLDEDLFSDLTLFAPPQEPLSLEQTPPPLLPQGEDRSHAALAPAPLAPTPGLSRQPSTSSLRKKKRAVRIGYARSPQPAPPSPPATVPASAAAAAISASTIAFLDASPYPAATRTLDQLPDRQLDVHVNGYEAHAEAVDVDTNSPHVVEAVDVDTNSPRVEEEEAKEDDDGKEDEDAGVAALGVKERLGLLRSQISGKLDSIQQRAAAVAAKRRLLAGRRRKVAEEATSVASRHKDLERELEVACEAEDFERAESISDSLAALEKEKDGLLTALRDAELDYDSVDSELQEVLESRIAAEEEAAILLEQFAKFLPCNTILV

SEQ ID NO: 73192 - protein, 401 aa, Zea mays
  Coding DNA Sequence Number=SeqID_29817
MNKTPAFIVPLQMELRFHLRRYEQPHSMWGPVEQRKIDQRCAVARSGSGDDDDFCSGGSNSGSDDLRVDATARRPPPVPKLVRQGWAEGRRVGGRPVGGPGYLVGGRTSSSCRGGSRRRERLRSHSGPRARHAAAAGATDDNRPSPRSLREGAGHRPRRGRSQLGTLPSSALPSWAESSPTHSKVLPYGAGAGSHTSCKPAQSRRSQTAARGAYNRPAVTSDSPLLPRPTGERGGQPCRRHATAPSGRTSPTPNTPSMEAQATSHATGAPNASCMQQHRHLRHYRASSTAEPIPRLEATQRMTQQRQPGAAVNAAKNGPAIMAVAGGQEQRPRHQPSSRPVRGQRENPLSRREDNAPVIRSSNGSHTRNDRPANHSPRRINSAAGQAAPLAGEAGDASPSP

SEQ ID NO: 73193 - protein, 966 aa, Zea mays
  Coding DNA Sequence Number=SeqID_29818
  Gene Ontology: Mol. function=metal ion binding; Cellular component =cytoplasm; Biological process=regulation of transcription, DNA -dependent
  Homolog annotation: Hit_ID=A2YX04; Match level="QueryCoverage=97%, HitCoverage=91%, E-value=0.0, Identity=58%"; Hit description =Squamosa promoter-binding-like protein 15
  Pfam annotation: Domain name=SBP; Domain location=164-245; Score =68.9; E_value=1.7e-17; Accession=PF03110.5; Description=SBP domain
MQREVGPQVAPPLFLHQIQPMPPHAAAAAKKRGHPWPAAGAAEAGAGNWNPRLWDWDSRALTARPSSDALRLAGGQPQPAAEAQRQGAGALNLQLGLQEDSTTPMDASPTAPAAAAAASPPASAAAGQEPVVRPSKRVRSGSPGGAGGGPGGGGTANGGASYPMCQVDDCRADLTSAKDYHRRHKVCETHSKTTKAVVGNQAQRFCQQCSSNVGKVPSIPPIPDKQNLVEIISKINSLNNATSPAKSPSPEVVVLNTSQEQREQGHDSVDKTTNGIDKQTVPSTMDLLGVFSTGFATSTPVTNTSQSQGSSDSSGNNKSKSHSTEPATVVNSHDISTQDFPAAGFMRSNSTQESRPHIYKQTEHETRPYLSLQLFGSSEEDIPPKMDSLNKYLSSESSNPLDERSPSSSPPITRKFFPIHSVDEEVRHPHITDFGEDATMGEVSTSQAWCAPPLDLFKDLERPLENGSPPNPGYQSCYVSTSCSDHSPSTSNSDGQDRTGRIIFKLFGKEPSTIPGNLRDDIVNWLKHSPTEMEGYIRPGCLVLSMYLSMPAIAWDELEENLLQRVNSLVQSSDLDFWRKGRFLVRTGSKLVSYKAGMTRLSKSWRTWNTPELTFVSPIAVVGGQKISLILKGRNLSIPGTQIHCTSTGKYISKEVLCSAYPGTIYDDSGVETFDLPGQPDFILGRCFIEVENRFRGNSFPVIVASSSVCQELRSLEVELEDSQVLDVSSDGQIHDCRQSKTRVQVLHFLNELGWLFQRASACTLSTRPDVSDLDLTQFSITRFKYLLLFSSERDWCSLTKTLLDILAKRSLVSEELSKETMEMLAEIHLLNRAVKRKSRRMVHLLVQFVVLCLDNSKVYPFLPNFPGPGGLTPLHLAASIENAEDIVDALTDDPQQSALDEDGQSPETYAKLRNHNSYNELVAQKLVDMKNSQAEIHVRLRTLSAFGCPARSTVAAANHCCSCNP

SEQ ID NO: 73194 - protein, 317 aa, Zea mays
  Coding DNA Sequence Number=SeqID_29819
  Gene Ontology: Mol. function=heat shock protein binding; Cellular component=nucleus; Biological process=protein folding
  Homolog annotation: Hit_ID=Q7F1J8; Match level="QueryCoverage=100%, HitCoverage=79%, E-value=1e-137, Identity=76%"; Hit description=DnaJ protein family-like
  Pfam annotation: Domain name=DnaJ; Domain location=6-68; Score=129.4; E_value=1e-35; Accession=PF00226.22; Description=DnaJ domain
MVKDTRYYDVLGVDPSATESEIKKAYYVKARLVHPDKNPNDPQAAEKFQELGEAYQVLSDPTQRQAYDSHGKDGISTELFEEYIGQLAMASMASLDNFGEDEQIDARKLQERMQAVQKDREEKLAETLKNRLHIYVQGNKAEFIQHAEAEVSKLRNAVLSVCTLCAFRAILLICSFPAYGVVMLNTIGYVYSRQAAKELAKKVMFLGVPFIAEWFRDKGHFIKSQVTAATGAIALMQLQDNLTKYMSAEGQYTEEELEMYMENHKKVMVDSLWKLNVADIEATLSHVCQMVLQDSSARKEELRLRAKGLKTLGRIFQ

SEQ ID NO: 73195 - protein, 96 aa, Zea mays
  Coding DNA Sequence Number=SeqID_29820
MAESGLATVAEGSGCLASGAELAGAKCWTWGVRTLEGYSWYDRSGSISTSGSAMISVGNRTHFFSWDTWNTLWMAHIFGGSFNLYAEREIGFNLFL

SEQ ID NO: 73196 - protein, 479 aa, Zea mays
  Coding DNA Sequence Number=SeqID_29821
  Gene Ontology: Mol. function=protein dimerization activity; Cellular component=extracellular region
  Homolog annotation: Hit_ID=A2YVL8; Match level="QueryCoverage=18%, HitCoverage=40%, E-value=9e-36, Identity=79%"; Hit description =Putative uncharacterized protein
  Pfam annotation: Domain name=zf-C2HC_plant; Domain location=249-304; Score=39.3; E_value=1.4e-08; Accession=PF07567.3; Description =Protein of unknown function, DUF1544
MSMRRLNAIPNCYESCCDAQDGEAYTTKDSGDHWRLEIEGSGKVWKRDQKVRLRHVDTGGYLHSHNKKYNRLGGGQQEVCGVREKRAENIWLTAEGVYLPVNGSNKSDDLETTGNSQSTNRRLGLPLLCTSPSRFPAPHLHTAPPLAASSPSYARRLQASPLHDAPPLAALQPHLSTAPLLCTPSQQSSGESCPPSPALIATYAAPLHALTASSGEMKDASADRPQGESRSQQPYGLAKDPKRKAKPKDPTWNYSYWPDLNKKDVVKCILCGKIVYACVRRLKQHLVGGHGDVAKCPKATSTISKEMSDYLKKNAREKPIELDHDKEGDKDDDVEVLGEGESRASHSIVQPSSITTQKRRLSAEARQNNQHTLKSSKSIASMLHKAPEDVVRERHSKVNTQTTLQRKSKEEKERTYMYVVDFIYECGLQPNVINSRAFEIMLEVVGQYGPGYVKPSYHDVRVSLLEKAKKSVDEIKKDS

SEQ ID NO: 73197 - protein, 152 aa, Zea mays
  Coding DNA Sequence Number=SeqID_29822
MRGWALGFVSRGSPGAGRRGGSMTSERSDPAMEDLYQRVTPSVVVTDLGPPDNQIPPPNMVKPQGEQSDPERQYLRGSTAAPPCVHGGPMSSPASLVYGGISLVMTMARGKAGPDFILRQSPRSRRPWPRISPTPLPEIPGGSTGFGCNEAS

SEQ ID NO: 73198 - protein, 199 aa, Zea mays
  Coding DNA Sequence Number=SeqID_29823
MGPGPHARDWAVGFGGGEETHYRRRWRAPHAAVRLLRTRKPTPKECDSWARAPVLEAGPLLSVVCVGRDLLRRIRASVGESFFKKGIPLIVVVILITRSALSLLSSPRSSAVVASMALLDPLERLQPEVALYLVRNLLGWGAPAFVGRIYVGASVHGDLTSGEFMLFVFNLPSGLVLPILPFFCWRCTTSWGRRSCTGA

SEQ ID NO: 73199 - protein, 119 aa, Zea mays
  Coding DNA Sequence Number=SeqID_29824
  Homolog annotation: Hit_ID=O48967; Match level="QueryCoverage=99%, HitCoverage=21%, E-value=2e-25, Identity=54%"; Hit description =Putative uncharacterized protein
  Subcellular localization annotation: CTP_CleavageSite=58; ConfidenceScore=5.53e-01
MKQWRDNVDRLLGMAHSGSTRSRPRSSRRQHKASASVRSPSVRGAQTNDLWAELNRMRAGEDAQVSLERAREHRQNFEGRDYARVSLERARERRQNIEGRNLDQDFTAVAPQTPVGARF

SEQ ID NO: 73200 - protein, 143 aa, Zea mays
  Coding DNA Sequence Number=SeqID_29825
MLVDYTMVLDRPGVSVEGPTQQGIESVAEVTPASSVTSDGSSDPSLRLRLLQKLRAMAQTSTGVVIVSVSVRGASLAEVQGKAATQTPPPAEVRGKSPAAPAPTPGVGAPAPRAGDDAVSPGDGTDLAPCDAGDAPPGEKAKR

SEQ ID NO: 73201 - protein, 28 aa, Zea mays
  Coding DNA Sequence Number=SeqID_29826
MGTTWGGVVCKARVLTERYSGKSLSPLK

SEQ ID NO: 73202 - protein, 72 aa, Zea mays
  Coding DNA Sequence Number=SeqID_29827
MAGSGLATVAEGSGCLAGGAELVGAKCWTWGVSRAISGQGQRVVASPMCQCQKAEFRGHHFKGWFGDFGKFK

SEQ ID NO: 73203 - protein, 147 aa, Zea mays
  Coding DNA Sequence Number=SeqID_29828
MAAEDDSFGSVSKCFESDDSRSSIVWTKESLDKDLDYFVALDVAAAETSPRVMGAEDLSGASTGCRRRRAVAKRRVSELSRSDRRHRGDMEGGRLRVDGAGKRELLSSPAGASVGEEELQNLFEGEELRIMLFNYRGMGIIPKVEPM

SEQ ID NO: 73204 - protein, 115 aa, Zea mays
  Coding DNA Sequence Number=SeqID_29829
MGKNNKRKREPTPPSEDFGDSEYSEEEFSSESEGSPAPISPPASFDDSDDSQGIAAEVWTYIWAVERSGLEGSDESEGGNGGSRSDNGGSRGGDGGSSGGSGGGGSSKGSNKASG

SEQ ID NO: 73205 - protein, 273 aa, Zea mays
  Coding DNA Sequence Number=SeqID_29830
MTSHESSEDGNALSHTDGLAREGFPRILWEVLQGAGYTTPPQYAVQQFEKHRVPRCRVRMTLEPHPLQPGWRSLDSESFGYRAEDTIEAIALHGLTTFCGFHPLELATHPIGLFPAEREDNPMWKDRVEHAKDIWAIYPGQTAHLTVRCMNALYRLQVMRGEAMSHLMALLEATKITLDNREELVLSTDIQELEELVGTRENTIEVLEDQLINTQQQLAEANEHLDMHHQEIQDLEANEDVDIEGGEEPASSVDTAGSGRPPSPESSVASFAH

SEQ ID NO: 73206 - protein, 342 aa, Zea mays
  Coding DNA Sequence Number=SeqID_29831
MPSLGGRKVRSSAFPLDVRGRDLAVVVREAEDGAVHIVGRYVPRTEALWSWDIRGSNDWLNRVFELNNLPYGGYPGDDAVDRRGKRLVALMGTCAALGGRMSSPELRESSARMLEVTRGRWPKNVPIPRATGEDFFTSRMARDLKAADFPDRVASGVPDCGRGCRSRESPGAACGMLSGTSRLRKAKTAGWRRKWPPWRPRRRTSGASWQRRGGRQTRPSLKRRLRERRPKVARAEGSLASQRGEELEARFNALRSRVDKAEASMRSEVERTHAYAPPEAVEVNPVPPSDADEGSSTVLVPTVAGEDPSSAPTPTGEDALRVVAEPAAEDPTAAAGPSQVAE

SEQ ID NO: 73207 - protein, 63 aa, Zea mays
  Coding DNA Sequence Number=SeqID_29832
MGQSPEYEVYFRKTYPTKYKTLKDMLALRESRSVTKSSYPRSYGDLNRLYSAEDLQSHDICST

SEQ ID NO: 73208 - protein, 300 aa, Zea mays
  Coding DNA Sequence Number=SeqID_29833
MTSHVPTDGGNVHSHTDGLAREGFPRILWEVLQGAGYATPPQYTVQLFEEHRVPCCRVSMTLEPHPLQPGWCSLDSESFGFKAEDTVEFMALHVLTTFCGFHPLELSTHPISLFPAEKEDDPMWKDRVEHAKDVWALYPGHTAHLTVRCMSAMYRVQALRGEAMSQLMGLVESTKITLDNRDDLVVDLSTELEEKDLQVEQMANQIQELKDQVEARENTIKVLEDQLQTTQQQLEEANQHLDLHHQEIEDMQAEGADEDVDIEGGEEPEPASSLDTAGSGRPPSPESSVASFAHLISESG

SEQ ID NO: 73209 - protein, 59 aa, Zea mays
  Coding DNA Sequence Number=SeqID_29834
MTAIGVSEALYAKAVSPVLLTGNRWEQLMFSGGYGCWSDLAVYLATGLDSRVGPYLSMG

SEQ ID NO: 73210 - protein, 181 aa, Zea mays
  Coding DNA Sequence Number=SeqID_29835
  Gene Ontology: Mol. function=binding; Cellular component=cytoplasm; Biological process=regulation of phosphoprotein phosphatase activity
  Homolog annotation: Hit_ID=A7Q1D7; Match level="QueryCoverage=100%, HitCoverage=25%, E-value=2e-69, Identity=65%"; Hit description =Chromosome chr10 scaffold_43, whole genome shotgun sequence
MFWRMTGLSAASPVDTILDKENFTLEELLDEDEIIQECKALNSRLINFLRDKSQVEQLLHYILEEVPEDAERKRSFKFPFIACEIFTCEIDVILRTLVEDEELMDLLFSFVKPDHPHSTLLSGYFSKVVICLMLRKTAPLMSYVQGHPKIVVQLVDLIGITSIMEWLENTDVREMTAVKFA

SEQ ID NO: 73211 - protein, 127 aa, Zea mays
  Coding DNA Sequence Number=SeqID_29836
  Homolog annotation: Hit_ID=A2Y842; Match level="QueryCoverage=50%, HitCoverage=28%, E-value=4e-10, Identity=39%"; Hit description =Putative uncharacterized protein
  Pfam annotation: Domain name=HSP20; Domain location=30-97; Score= -18.2; E_value=0.084; Accession=PF00011.12; Description=Hsp20alpha crystallin family
MASCEPKGSAKGARGAPEACAVADIDPKLELYDGANTYVIRLNLPGFKKEDFKVQLNSGGWLTTANLDGVAGRFDGTVLYLTVPKQPVCETDMVMARPLIEAKEECAAAPARAVRECEPNGPCRPMC

SEQ ID NO: 73212 - protein, 302 aa, Zea mays
  Coding DNA Sequence Number=SeqID_29837
  Gene Ontology: Mol. function=phosphoprotein phosphatase activity; Cellular component=cytoplasm; Biological process=protein amino acid dephosphorylation
  Homolog annotation: Hit_ID=Q5DAL5; Match level="QueryCoverage=18%, HitCoverage=17%, E-value=2e-14, Identity=64%"; Hit description =Serine/threonine protein phosphatase
MDPAAVKFLLDEIGRLFDEQNAKWDARFSQWNAKREPEPYLGDEVEAEEVAASDLREARDLEREEVEHAKLHEDRSQGAADAGREVALAARLLAADACAARIVDVAAPFDSYVPAYAAQFDGFNLDHAAFLGNGANSGLMGSAFFKEREEARRCMPSQDKLVIDLDPPDNIETSLSESAFHDVPGANYMEALTTCSTPGLTERAMDELIRMAQAGERLWVNTGGREVLHVDTYDSIFAKPGGSFLGPDDRGVSGTFDADVTADFLHAQELDIMCRAHQVVEDGYKYFPDHQFVTFFTAPNYR

SEQ ID NO: 73213 - protein, 421 aa, Zea mays
  Coding DNA Sequence Number=SeqID_29838
  Gene Ontology: Mol. function=methyltransferase activity; Cellular component=nucleus; Biological process=activation of protein kinase C
  Homolog annotation: Hit_ID=Q69VD4; Match level="QueryCoverage=46%, HitCoverage=39%, E-value=4e-69, Identity=62%"; Hit description=PPR -repeat protein-like
MVFTWTVRNFFRVTGLYNQHDRGVVWLIVAPDCYFIQHNERVHMIFYGFDLLSLQHFQGHFIEADMFAPWDGQELTQFRFSGLPIYWQQSHGLNSLLFFRKLKYSSSVEIFCGAQFSFPNILLPKSWSQELATNIERHLLPEMLEVANGYIFHELHLMLASIGVTHMISCGKYLIWIIGLLTPWDPGRVVFDLKFVMLWLEALTLFQDMQLQRVEPDKFFVITLLTCYANIGAFDQFEWVHWYAEDRNMKIDAVCGTTLMEMCSKCGHVDKSLQILVQMQGKDAAAWTDIICDLTTNGQASKALELFEEQPRSKTKPNGITFPGVLSACCHGGLVDEGQRHFQAMKEVYQIEMRIKHYSCLVNLLGHAGHQDEEAATSNSTAQIPCTFERCLQFSWDPGGSNAIHRLEGKSIFKKGRMLEN

SEQ ID NO: 73214 - protein, 171 aa, Zea mays
  Coding DNA Sequence Number=SeqID_29839
  Gene Ontology: Mol. function=sequence-specific DNA binding; Cellular component=nucleus; Biological process=regulation of transcription, DNA-dependent
  Homolog annotation: Hit_ID=Q94D31; Match level="QueryCoverage=100%, HitCoverage=52%, E-value=1e-14, Identity=30%"; Hit description=WRKY transcription factor 61-like
  Pfam annotation: Domain name=WRKY; Domain location=1-61; Score=46.3; E_value=1.1e-10; Accession=PF03106.6; Description=WRKY DNA -binding domain
MSDGCQWRKYGQKVAATRARAPTTAARPGAPDCPVRMKVQLCARDTAVLVAMYDGVHNHPLTPTPPRRWRRPPYSRRPRHATRQALLLPPLTALPPAPQRYSFSGAAVAISGPPTAASSQYNVVVPMANIMMKAVADPSFRTAVMVAVASYLGEQCGGRNVDDILTLAPPC

SEQ ID NO: 73215 - protein, 529 aa, Zea mays
  Coding DNA Sequence Number=SeqID_29840
  Homolog annotation: Hit_ID=A2ZUT9; Match level="QueryCoverage=81%, HitCoverage=51%, E-value=1e-146, Identity=63%"; Hit description =Putative uncharacterized protein
  Pfam annotation: Domain name=SAPS; Domain location=6-237; Score= -42.2; E_value=1.6e-12; Accession=PF04499.6; Description=SIT4 phosphatase-associated protein
MAVDWQEGQHLRLLWQPQHAGSLLQTLQVPRRAAARKRMCLTGFKCYCGATFCGVHVGTFGFQASGRDTIVWPTVNNLDDLTDVIVEFISVLLTIGSETAEKELRRQSAIKRSIDLFFEYPYNNFLHHHVENIIVACLEGKRPEVVEHVLHECDIVGKILVSERFSSLSTESNGPTVPSEGKTPPRIGNVGHMTRIANKLIQLGNSNNTIQAHLQENNDWVEWQTNVLVKRNEVENVYHWACGRPTSLHDRGRDSDDDDFRDRDYDVAALANNLSQAFRYGIYSNDDIEEAQGSLERDDEDVYFDDESAEVVISSLRLGDDQDSSLFTNSNWFTFDGERGIDDRLSASVPSSSPNSLETSLEAEEADDGKVIGTEDEMETVYLGNGSAEEVKDVAECNEQPNCCTEDERLKNTEGIERHPDVSNHYTDICTNEAASAAAESSAPSVEIVAKKTVDEPSEAERTVDEPAESSLDSSVSIPLPAPVNGSEPANSEASSEQVAHDTDVQQPVKEAPDEDVNAKKTDVAKASE

SEQ ID NO: 73216 - protein, 422 aa, Zea mays
  Coding DNA Sequence Number=SeqID_29841
  Homolog annotation: Hit_ID=A2YPA3; Match level="QueryCoverage=66%, HitCoverage=17%, E-value=2e-91, Identity=61%"; Hit description =Putative uncharacterized protein
RDRRTRREPITVVDLEVDASQEEEILAAANANCSQWPAPEIDLLERTSNERIYAEMFLPSIGWSSPSRIQPLLAAINSCKIPEFSYDLSWLNHGSHMGKQIQDQKKLLEECLARYLTESARLLDESQVVTEVNVMVQNCVGLELRDSSYYLAPRWVAIFHRIYNWRLAKLSTGKFSEAYVLTQHLYQAPAAAGSNGTTQGLTANTASSDAVDHIMMPAVSTGITLDEIIEISCDLDVVDAQPVTLPPRLPVHVHEEPQALADNNDVHGVDEMYIPRRVELGEVMPIDTDDKLSRLRVELGEVMPIETDDKLSRGADDLKSVLHLEDVAAIGYGAAMPPVALPDKEAGYLGDYRRSIMVPDEAGAVTSALDVARGPPDTGGGCCLGAAAKLMIVETFDTQIGRSHVPYPDDMFPLQRTGIHLV

SEQ ID NO: 73217 - protein, 254 aa, Zea mays
  Coding DNA Sequence Number=SeqID_29842
  Gene Ontology: Mol. function=nucleotide diphosphatase activity; Cellular component=chromatin silencing complex; Biological process =metabolic process
  Homolog annotation: Hit_ID=Q42974; Match level="QueryCoverage=55%, HitCoverage=29%, E-value=3e-63, Identity=81%"; Hit description =Nucleotide pyrophosphatase precursor
  Pfam annotation: Domain name=SIR2; Domain location=107-236; Score= -47.7; E_value=1.1e-06; Accession=PF02146.8; Description=Sir2 family
MLGRLIAGLEARGMFEDVNIILVGDHGMVGTCDRKLVFLEELAPWIELKSDWVLSMTPLLAIRPPDGVSPDEVVAKMNEGLGSGKVKNGEYLKMYLKEELPTCLHYSESYRIPPIIGLIGEGYKIEMKRSKRNECGGAHGRAQPNAAHYALASLERIGRVHSMVTQNVDRMHHRAGGNPFELHGSVYEVICLECGTSISRESFQEEVKNLNPKEGPCDLIAPLDLPHFYSLSTVYQLVTQFGRIPVYHTFCGGF

SEQ ID NO: 73218 - protein, 58 aa, Zea mays
  Coding DNA Sequence Number=SeqID_29843
MDILQASMDQSDKGANHVCLSARDHLKLSQRKPKGFGTKGPNIQSGDCTAEMSALGLD

SEQ ID NO: 73219 - protein, 160 aa, Zea mays
  Coding DNA Sequence Number=SeqID_29844
MHEQALGDMLMDGWSAAMRRQQHAGVEDFLFLKYTEYMDVRVIRVPISIVTGVFSVPNFRFRCFRNTDIVSVSGVIVSDFVSDKKYKNDNGSSVYRPFSNVFIPTEGYLIGQTQPATTPAPAQTLLTGILSSLYTRGALRRRMCATGSPWIYPCVKVKFS

SEQ ID NO: 73220 - protein, 170 aa, Zea mays
  Coding DNA Sequence Number=SeqID_29845
  Gene Ontology: Mol. function=zinc ion binding; Cellular component =nucleus; Biological process=regulation of transcription from RNA polymerase II promoter
  Homolog annotation: Hit_ID=A2X4T0; Match level="QueryCoverage=45%, HitCoverage=10%, E-value=2e-28, Identity=78%"; Hit description =Putative uncharacterized protein
  Pfam annotation: Domain name=Myb_DNA-binding; Domain location=9-54; Score=44.1; E_value=5e-10; Accession=PF00249.22; Description=Myb -like DNA-binding domain
MKDGLDTDGDRWTNQETLLLLKGIEKFNDNWNHIAGHVRTKSKAQCIHHFIRLPVADGLLENIEVPEASLPSGMQSSGFLHSDSNVHHKQRVNVRYTTTSDEATTPQEGDGVLTLIYYDMDLRECTWGIVDVKINRQQSSKGKPLSKKQREWRLQTAFESLKLVRLYSEC

SEQ ID NO: 73221 - protein, 53 aa, Zea mays
  Coding DNA Sequence Number=SeqID_29846
MAAPPTTRPVALTPRRDRRHLWQEKRATLRLRRRNRAKKGTEKGGYPEKDPSP

SEQ ID NO: 73222 - protein, 337 aa, Zea mays
  Coding DNA Sequence Number=SeqID_29847
  Subcellular localization annotation: CTP_CleavageSite=4; ConfidenceScore=5.36e-01
MSSRSLMHRVFPPSKPPDGGYPPSFRLIFGGTQLRGSWYLSAIVRLQGFSSCSPAAPLHRRSPKMVTSSLMVRGSEPGCGLCPSLSLKDFHHQGWGGDCTVPGSRTRVASEPLAAPASATAAGRGSSAGEIAKAGHGPTSSSTAFCPSLPHEFGHGRGPPGSSIRPEVSAAAVRPPGAEVVVVAAAGAGDGAPFVGLLLLRRPTPIEWGYSPVDYLNRFTKHESPRVKVTSEPGRSLAGPTPELTSRGLGSGWRPWKMVGQGPRGDRPSRLLGPDSRRRPWRRWPGRGDDVVLRSGSLRTASPSEARSNLAEVVVDAEGAAAPFQRQDPSLQDQIVL

SEQ ID NO: 73223 - protein, 434 aa, Zea mays
  Coding DNA Sequence Number=SeqID_29848
  Gene Ontology: Mol. function=calcium ion binding; Cellular component =late endosome membrane; Biological process=protein transport
  Homolog annotation: Hit_ID=A3AXB1; Match level="QueryCoverage=19%, HitCoverage=7%, E-value=7e-11, Identity=70%"; Hit description =Putative uncharacterized protein
MALPVDVAGLCPRSGDVEAPPKPRSSLSSMAEAESEPLGRARRRSSAEARAVSEPWVGRSGVRRLPGLSPSPSPWSGGAKFAVFRPESEPWVGRSGVRRLPGLSPSPSPRSGGAEFAVFRVLARVRALGRAERSSPSSGAEPESEPWVGRSGVRRLPGLSPSPSPRSGGASYGAFGKAWLPISITVKWHCSRSGAGGAVLLSDRSVERRSDGGYFGSAGGRVPLQLYADGGYQLRIRRLEGFPHHKLRRRRLFLPFFALRFRTRLRRLELPRLKEKDPSTSTGATTPALEMSKRYAEVSRLLMAGGGRMSGVVNPSQLICSPRKGAAFANRFSMFSIRFSQIWDNLGRYYAPNPDDDLVTGYDDRDVVVENLRKLCVHRVANAFGLPWIWANRGRYCAPNPDGDLVTGYDDRDVLVENLHKLYVHRVANAFGLP

SEQ ID NO: 73224 - protein, 161 aa, Zea mays
  Coding DNA Sequence Number=SeqID_29849
MAQSSVSVGDETFAPRSHITFSTLDFLATLTGELCLANPDMHPGARRRRDTSRGMPPPLSGASTNLPPTAKRWEEGMPLSALAAIVGRQPAFVLDLLEDDSSCGSTEFNSDSDEGMGRACFVARPLQNDNGQGRNKEAPNEEEEYQRQGHILACEASLRQK

SEQ ID NO: 73225 - protein, 92 aa, Zea mays
  Coding DNA Sequence Number=SeqID_29850
MDVLMIRYLGEDQQGLGKGQDVEEEQQGRPQQEGISLRGEVIRVSRVITQRSRGVVIARNRSLGALDHQRRDLHSIKLSYLTEDRAASTISP

SEQ ID NO: 73226 - protein, 151 aa, Zea mays
  Coding DNA Sequence Number=SeqID_29851
MGKSKKGGSSSHHSGDKRKREPTPPSEDFGDSEYSEEEFSSESEGSPVHASPPVSSDDSDDSQGIAAEVWTYIRAVERAGLEGSDESEVSSNEGNSSDSSEEGSDGDDDGEGNGDDGGDGDGDGDGSKGDGKGGNGSGSSKGGSGSGKASG

SEQ ID NO: 73227 - protein, 187 aa, Zea mays
  Coding DNA Sequence Number=SeqID_29852
  Subcellular localization annotation: CTP_CleavageSite=37; ConfidenceScore=5.08e-01
MQAACNRAKWTHFSDSRHASMEAQAHASRNRHARCCMQATASPAPPPRLLDCGTNTATRGDPARDPAAPARRGGQRGQRRAGSNDGGRRAGAAVASSAKLTSHPGAAREPPLTGPGKGDTPKGILPREGTRLRASLLIRGSKAGPPKGSTVASDRVGPTPTTGQRFEGRPPEGFHGRLRLLGLRAHY

SEQ ID NO: 73228 - protein, 261 aa, Zea mays
  Coding DNA Sequence Number=SeqID_29853
MSFGSVNQQHRRGLLYSARRSCGRGKYRGHPYEHLAEVDEDGCLEDGVGREVLMLKPELLQQQQEEGRDRQRQPVGDVGGEQHELPGSKIAKGDGAGADSSGKPWRAPPKQVAHQVERLLRLKTVRMTKRSHGLCGGVWNRGARRQRGAGDWERMRKGCVLDFGCGKSEPSRAIAHLLGAATEDKRLCSGNEASHAWPDETTRRGAEGQSAAETDMAVDMTEGGLTAGVSAYALKRRTNHRSYHVEAKYKLWPHLQARILP

SEQ ID NO: 73229 - protein, 235 aa, Zea mays
  Coding DNA Sequence Number=SeqID_29854
  Subcellular localization annotation: CTP_CleavageSite=91; ConfidenceScore=5.02e-01
MAHRGASVLWPRRHHHHLGQQQQQQQQERRSPRFQGYWKVQGPKAPSSTAPKVAPPSPDTRPTGGSGSQQQESAESGAGGPPPAAAKIAPVASHAPAGDLAVAAPAPGDVAEVEEVLAGGSAPTPDTRGDAGGASSSNPPPAPEEMEVVFGRRLRPGAEQEAAPVPLPRMTSHAHQVLSDTGAAILREWEALEAKHQCLSDWRTQLEERTRTVSQQFISERSQLERDRKEYKGDL

SEQ ID NO: 73230 - protein, 163 aa, Zea mays
  Coding DNA Sequence Number=SeqID_29855
MGKSKKGSSSSHHSGDKRKREPTPPLEDFGDSEYSEEEFSSESEGSPVHASPPALSDDSDDSQGIAAEVWTYIRAIERAGLEGSDESEYSSDEENSSDSSEEGGGGDGGDGDDDGGDGDGGDGDDDGGDGGGKGGSGNGGDGSKGSSRGSNKGSNKGSNRASG

SEQ ID NO: 73231 - protein, 167 aa, Zea mays
  Coding DNA Sequence Number=SeqID_29856
MNKNRNLQNGIGIQMGQIQVIEIKETAKERRNGKSKAADEKRNINDGFVGVFCWNSDPTIDPPRIELLRRKNSDGYKMEKVGFKDDRHMVTCEGQLTVGIDRRNDCGRRTLGFPLGRHLNLAGEQSEGNIAREQRRPGCRKAKTRAQNAEACDSAVHMGFSRTKCHF

SEQ ID NO: 73232 - protein, 198 aa, Zea mays
  Coding DNA Sequence Number=SeqID_29857
  Gene Ontology: Biological process=transcription
  Homolog annotation: Hit_ID=Q5Z6G3; Match level="QueryCoverage=25%, HitCoverage=12%, E-value=4e-12, Identity=72%"; Hit description =Putative RNA polymerase I, II and III 16.5 kDa subunit
  Pfam annotation: Domain name=RNA_pol_Rpb8; Domain location=89-188; Score=-41.7; E_value=0.0057; Accession=PF03870.6; Description=RNA polymerase Rpb8
  Subcellular localization annotation: CTP_CleavageSite=55; ConfidenceScore=5.20e-01
MWRLLVSSSTPRALPLPRPIPSCPDSGSDQGAGSVDAQTQAASSARVLASRQHPRLQHVWNLSCLQRNISLRIQPEDKLNVQFIAKSISNLIVNLSVDEKENVTQIEMCMQLDVATEVYSMRVGDTFNMVLALTLNLDGSSDTGYYTQAWKKKLLLTIMNTSCMIKLEKKRPYSLERIFNTLRSGSRKTQVSDVVVGF

SEQ ID NO: 73233 - protein, 113 aa, Zea mays
  Coding DNA Sequence Number=SeqID_29858
MGTLSGGSFVEYPRWHSAKVDSLPSAVGQTLGKGKEGIEIEMAMGKYPPGISTTYPYPRQKITSPGHPYTLVGIDLPPYPYPRGYGSPIGSPVPTKIKHLSKYYIIQISSISI

SEQ ID NO: 73234 - protein, 146 aa, Zea mays
  Coding DNA Sequence Number=SeqID_29859
MGRSTIGGASQSTLRQNMLAQEDKPMDGWRQQAEYEKKRDEYYASLQAQNQALLSQLAQQAGVPMPTYGMPPPDFALPMPMLAPPPPPPPPSQFPMGFQTPPASVAAPGDGSGQDDTTHSWVNNLFNTQSPAGGGDYSNHPDDGYD

SEQ ID NO: 73235 - protein, 121 aa, Zea mays
  Coding DNA Sequence Number=SeqID_29860
  Gene Ontology: Mol. function=molecular_function; Cellular component =integral to membrane; Biological process=response to unfolded protein
  Homolog annotation: Hit_ID=A5C166; Match level="QueryCoverage=96%, HitCoverage=74%, E-value=2e-56, Identity=81%"; Hit description =Putative uncharacterized protein
  Pfam annotation: Domain name=ORMDL; Domain location=14-120; Score =152.1; E_value=1.6e-42; Accession=PF04061.5; Description=ORMDL family
MAKLYVQAFPPADLNKNTEWFMYPGVWTTYIIIVFFSWLLVLSVFGCTPGTAWTVVNLFHFAITYHFFHWKKGTPFADDQGMYNTLTWWEQMDNGKQLTRNRKFLIVVPVVLIWLSSVNIE

SEQ ID NO: 73236 - protein, 55 aa, Zea mays
  Coding DNA Sequence Number=SeqID_29861
MDIASTYQRGYERGGLWILMVQQLQCSATKNQAHGYKGEIKENGKRQIKRVASVA

SEQ ID NO: 73237 - protein, 359 aa, Zea mays
  Coding DNA Sequence Number=SeqID_29862
  Gene Ontology: Mol. function=zinc ion binding; Cellular component =nucleus; Biological process=regulation of transcription
  Homolog annotation: Hit_ID=Q8RVK0; Match level="QueryCoverage=74%, HitCoverage=63%, E-value=4e-83, Identity=56%"; Hit description=Dof zinc finger protein
  Pfam annotation: Domain name=CbtB; Domain location=117-168; Score= -11.5; E_value=0.016; Accession=PF09489.1; Description=Probable cobalt transporter subunit (
  Pfam annotation: Domain name=zf-Dof; Domain location=59-121; Score =140.6; E_value=4.3e-39; Accession=PF02701.6; Description=Dof domain, zinc finger
  Pfam module annotation: Pfam domain module=CbtB::zf-Dof; Domain location=117-168::59-121
  Subcellular localization annotation: CTP_CleavageSite=43; ConfidenceScore=5.18e-01
MEEMLMAGNANLNQNPNPPPAAPSAPGAQRAGAPAAVAAAPPSAGATGGAGPERRARPQKEKALNCPRCNSTNTKFCYYNNYSLQQPRYFCKTCRRYWTEGGSLRNVPVGGGSRKNKRSSSAVSSAAAAAAASTSAAMSGTVPVGLAAKNPKLMHEGAHDLNLAFPHHNGRALQPPEFPAFPSLESSSVCNPGAAMLGNGAAGRGMGALSGLELLRSTGCYVPLQHFQLGMPAEYAAAGFSLGEFRVPPPPQSQSVFGFSLDTHGTGGVGGAGGYSAGLQESAAGRMLFPFEDLKPAVSAAGGGASNGADHHHYEHSKDQAAGDGGGASGVTGGHEAPAGFWSNSMIGNGSSNGGGGSW

SEQ ID NO: 73238 - protein, 114 aa, Zea mays
  Coding DNA Sequence Number=SeqID_29863
MAVAWQTDTVVEAAETAVRTADDQVTSCIQDPKLSDNFSHRSEPPQEAPGPHVTVGGRAQMGSRSWTPVCHRDPDQGQSDAATRSPNVATWPMARYVSQQADLDTRLWHEASLY

SEQ ID NO: 73239 - protein, 165 aa, Zea mays
  Coding DNA Sequence Number=SeqID_29864
MEGHKSFQCKAMIGDKQRRKLKQKPSSKISNTYIKKVNKKDATPYLIKKKKNGKVIAIKANKQANKGNGAKRIWVPKEIISTMKSTKKVWIPKGNLLPSELVKILDPNFPPMTKICVSIYLLSSLPSLPSITFVMYFCLKSCILVHRMRRELDQGNEDATPQKKT

SEQ ID NO: 73240 - protein, 113 aa, Zea mays
  Coding DNA Sequence Number=SeqID_29865
MPTWIHHGGRMLYPCYDGDSICRCGGSLIVASKVCGGRSFYIPNARPRTQSNPTDPPKSRILLGFGARFNEEDAWNARPTTQQPKARQACVQGSQVGPTGRPRRTARSSPGGG

SEQ ID NO: 73241 - protein, 102 aa, Zea mays
  Coding DNA Sequence Number=SeqID_29866
MPMWIHHGGRMLYPYYDGDSICRCGGSLIVASKVCGGRSFYIPNARPRTQSNPTDPPKSRILLGFGARFNEEDAWNARPTTQQPKARQACVQGSQVGPTGRS

SEQ ID NO: 73242 - protein, 139 aa, Zea mays
  Coding DNA Sequence Number=SeqID_29867
MTLGTSVTWPRLGLRSRGTLGHFRDQRERFVMESHRREAPSPRTLSNGSGSSKSPAEQTVKTDKHGFKSRPRLPRDAISSHPSPASGRNSSPRQIHASTEGLFRHRAHPRLARSQAQPDFVVQRPRPNRLTNRPYCMHI

SEQ ID NO: 73243 - protein, 121 aa, Zea mays
  Coding DNA Sequence Number=SeqID_29868
MAFCRFLMLVVGPTAHAGLVAAAGSQHLAMRCQYVYVTAIFTHILIPKLVARWERGKKNTSVLPSPRCACARIQIPNPYHCMVAGAARPPSPSKQRTNQTTCHCRSASGDEHYRKLVKERG

SEQ ID NO: 73244 - protein, 108 aa, Zea mays
  Coding DNA Sequence Number=SeqID_29869
MNVCELTLAVSHPPQVKNRYRWMRRLEDAVILGRNRELRLARPQASASASASGEGLRFARPQASASALASGGVTSSPDLGLGLRRSLRLARPRAQTDRATGDTLLPYP

SEQ ID NO: 73245 - protein, 117 aa, Zea mays
  Coding DNA Sequence Number=SeqID_29870
MPTWIHHGGRMLYPCYDGDSICRCGGSLIVASKVCGGRSFYIPNARPRTQSNPTDPPKSRILLGFGARFNEEDAWNARPTTQQPKARQACVQGSQVGPTGRSQAHSAQLPWRRLSST

SEQ ID NO: 73246 - protein, 773 aa, Zea mays
  Coding DNA Sequence Number=SeqID_29871
  Gene Ontology: Mol. function=methyltransferase activity; Cellular component=nucleolus; Biological process=positive regulation of cell proliferation
  Homolog annotation: Hit_ID=Q6Z5K9; Match level="QueryCoverage=73%, HitCoverage=79%, E-value=0.0, Identity=70%"; Hit description =Putative proliferating cell nuclear protein P120
  Pfam annotation: Domain name=Nol1_Nop2_Fmu; Domain location=299-592; Score=333.3; E_value=4.3e-97; Accession=PF01189.8; Description =NOL1NOP2sun family
MEGCAKVGRSDRHHGRKVVEGRAAKRAPKKQKVLESSDDSDTEQQQQLQEEDSDLDVSSDSDAEELSGSDAEADELSGSDADADGGSTRGDDMDDDDDDEDGESDDDSLADDFLAGSDEGSALSPQGFNELRTKVLSKISRRHRTQPVRNYNYALTKDYNYDSDPYGLKKGGDSGLESDGSDDLEAKSRAIDEQKLKAEEDAEEELQTNIRSESDEFRLPTTEELEEEAHRPPNLPNLKRRISEIVRVLSNFSKLRQKDVPRKDYINQLKTDVMSYYGYNDFLVEALIEMFPAVELVELLEAFEKRPPECLRTNTLKSRRRDLAAALIPRGFNLDPIGKWSKVGLVVYDSTISAGATTEYMAGHYMKQGASSFLPVMALAPQEKERIVDMAAMLSYTMTNIRIDYSLIYRAAPGGIIYANEFNEKRLHGLMGNIHRMGVTNTIICNYDGKELPKVLGMNSVDRVLLDAPCTGTGTIWKDLQIKTSKDIEDIRNCAFVQKQLLLAAIDLVDANSKTGGYIVYSTCSIMIPENEAVIDYALKKRNVKLVPCGLDFGRPGFIRYREHRFHTSLEKTRRFYPHVNNMDGFFVAKLKKLSNTIPVTSEQPKASEGAAEKADGEDEKVISNEQETAVPGKDEKTVQMINHKKSKVTNKRTSVTKEAGGHKREPNRSGKHLNKNKDTDTKEVDGPESTETNGDGKEEQREQTKQTSHKRKIDSVKTKKSGPVSFSGVQEKNQVSGKKTKRKWQFKLRRDWEAEKKGTKRSKTSDISVSGN

SEQ ID NO: 73247 - protein, 139 aa, Zea mays
  Coding DNA Sequence Number=SeqID_29872
  Subcellular localization annotation: CTP_CleavageSite=42; ConfidenceScore=5.85e-01
MASSSVLAVPSIPLPLPGAYKRTRPSPVPSTPAPTISSAFPRANRASAAALPRRSGEPRSSLPSEEGSDPPEFIAPEEGQEPDPSEINLLCQESFDEGKSILPLMHYLPISLYHCLSLEYGMGIELHGEHERARINNHL

SEQ ID NO: 73248 - protein, 234 aa, Zea mays
  Coding DNA Sequence Number=SeqID_29873
MPHNICKEGLRSDTSCDGTSQVIRPTYSCPCLTDIRHPVDVPKSLDKFGIFPNLTRNVSPVLQTLQNIGDKEMRKRLHKLTFIKKVSRKVIKFKEGNAKIVLSSNSYHLMQQASEIDFKNIKGGGKCTGACLRSQIADKPSTFYLFANQSPRRRSRAEILRRASVPVDWGNDKVLRATDMKLATLIISPQPNCIQDQLRSSGHGDRGQGGKIVVFPAMGGGLVQLGGSKSFRRA

SEQ ID NO: 73249 - protein, 196 aa, Zea mays
  Coding DNA Sequence Number=SeqID_29874
MQIITEDLLLEPPETESDVIRTEISDDIPLASDPVGQEITRAVSHASSTLEGGLVRGNTLALDVAGQGRLAPVDTVEGASASEGVAEDNLAPEGGAEDHPAPKGAELGCSSAASMDVHVGSPSVQSEELVVMSPPTALVGLVTLEASDPDVGNPPPAVRAEVSLSDAHSIVSACWGPSSSEGPQKRNLTVFSKYGL

SEQ ID NO: 73250 - protein, 63 aa, Zea mays
  Coding DNA Sequence Number=SeqID_29875
MTTVMTPSSHPPVPTSEHKHRSRHRRKLGESEDPPQPGRAATVRDVGLGKEIWAVGFGVNGCD

SEQ ID NO: 73251 - protein, 152 aa, Zea mays
  Coding DNA Sequence Number=SeqID_29876
MTPLQDGEGIAGITVQSIQIVMGIEKCSPLLLQAIRALNIETKARNRSIRNSKENLPCEPSSLNQVERSRSSGSERCPRMQKLGSDQPDSGHTFPQHRNTIESELERLLNFFTFYFGGIRIDFSCFALYFGGIWLCIAFGTTFEQKTYTALP

SEQ ID NO: 73252 - protein, 116 aa, Zea mays
  Coding DNA Sequence Number=SeqID_29877
MSVVFKNKITLSPGVVFRFGTISYIADIKGRLESLPISEDKPTMQGRNLPNMMPGDGETDTKMYGDIMKPENGTRRNPYLGTKLQKWEKLLMNEYTEKDATPAIAITDRLKNENGN

SEQ ID NO: 73253 - protein, 171 aa, Zea mays
  Coding DNA Sequence Number=SeqID_29878
MRRGRRGRGWPCRADGKRKRPPSPPSEEFGDSEYSEEVSSEFDRSPAPSSLVASSEDSDDSIGLSVAARAYQRSMDNSMGLSVAARAYRRSIERAGLCGSDDSEEVSLEEMEDSSDSEEWSGGEGDGSEGDGSSGDDGGKGSNDDGGEDGKGDGKGDGTSDGKTNCIMPLA

SEQ ID NO: 73254 - protein, 97 aa, Zea mays
  Coding DNA Sequence Number=SeqID_29879
MMLSGGKDQTERQGGWEMKMPAEKNQRRERIGMARRQEKIRKQMICCCARKSHLAGKELGDFSRFSSAAPRDNHEDISCAITHFGASVQSNYPEHPI

SEQ ID NO: 73255 - protein, 86 aa, Zea mays
  Coding DNA Sequence Number=SeqID_29880
MELLSKSYPTKEKTLKGMLVIWESRISRRVIKIKEGKTLKQQPHRDGQGRGWSLETDWGRERRPARKGDELGRGTRLRLCAGTPGS

SEQ ID NO: 73256 - protein, 64 aa, Zea mays
  Coding DNA Sequence Number=SeqID_29881
MWKDRVEHAKDIWAIYSDTDEKKRDRFRRGLNTKLRDRLNTVRANSYNELVNMAISQEDCITAR

SEQ ID NO: 73257 - protein, 50 aa, Zea mays
  Coding DNA Sequence Number=SeqID_29882
MAARLTVLHNLGLSSPTGGGATSPSGWTDRSRDGEADAPRDGKWTSFMWG

SEQ ID NO: 73258 - protein, 124 aa, Zea mays
  Coding DNA Sequence Number=SeqID_29883
  Subcellular localization annotation: CTP_CleavageSite=46; ConfidenceScore=5.15e-01
MCKGPETTFVAYSVNTANLAIAKMGFRFVGSTPTSTRKLEAGLKIVSAAFGICFELLIFGIIILHTTKPYKGTEVTVPRYYFVKRLDFAFNVFEAAAKTQTHVPKLFQRLLQLRIFDSFGVTPL

SEQ ID NO: 73259 - protein, 218 aa, Zea mays
  Coding DNA Sequence Number=SeqID_29884
MNIRPAFKVPLQTELRFHLRGNDNDPRSGWPNCSSDGLRADAAATLPSPTPTLEGRGQGPSALRQIPTQILPDEWGTDLRVEASYRCKVRTTPERERRPGSARHLGRSSRAHGATTAFAAGGGTGSQAGESDAPRLTTPAVDQPRVVEVRPSRRASERPLPRTMKERLTHETAREVELRLSPASTPARMMNILEAEGGTKIAAWLASPHPGAGGHRLG

SEQ ID NO: 73260 - protein, 244 aa, Zea mays
  Coding DNA Sequence Number=SeqID_29885
  Subcellular localization annotation: CTP_CleavageSite=28; ConfidenceScore=5.21e-01
MQAACNRTKGAHPFDSDAPSMGAQAHTSCNRRTGYYVRNGPVGGRKQRSSRLQAHVPSWDSERALSHGDRRHLWQAKQATLHLRHNDRVKKGTGKGDTPKGILLHEGSGPRAPLLIRGSKSGPSKGFDSRLRALGLRALLLIRGSKAGPSEGFDSRLRPLGLRAHYLSAFRDRGVPGPTSECRRVPQPRWVGARPSAKGGRKVAGDRRERGGNPAAFVFVPRPGRVYNGGVAECYVSSGGELAP

SEQ ID NO: 73261 - protein, 148 aa, Zea mays
  Coding DNA Sequence Number=SeqID_29886
  Homolog annotation: Hit_ID=Q6QP51; Match level="QueryCoverage=32%, HitCoverage=21%, E-value=1e-12, Identity=70%"; Hit description =Putative growth-regulating factor 1
  Subcellular localization annotation: CTP_CleavageSite=39; ConfidenceScore=5.26e-01
MAVAGGRKQRSRRQPSSRPLMGQRENPLPRREDGAPVFRSSNGSRTRNGRPANHSSRRINSAAGQAAPLAGEAGTGKGGYPERDPSPRRKRAPSPPVDQRFEGWPLGGVQQPPQSARALRPLLVRGSKAGPPEGFNGRLRPLGLRAHY

SEQ ID NO: 73262 - protein, 177 aa, Zea mays
  Coding DNA Sequence Number=SeqID_29887
MVRERRTQTNTMSKNTRDTRFIPRFNHTTKVPYFLVEVPTKSRVSFNPNPPFADHKDLKWERQEVCEREWEVFLRLEMEFCACSAVGKSVGGVYKGDPKASGCWGNLTEIRLNRFQIRLNRIPPVGFRFTGGLSQRLDRTQIRLNRFEIRFNRFQIRLNRIQNLVEPDFQKSAHDFS

SEQ ID NO: 73263 - protein, 184 aa, Zea mays
  Coding DNA Sequence Number=SeqID_29888
  Pfam annotation: Domain name=zf-GRF; Domain location=52-103; Score =13.2; E_value=0.00077; Accession=PF06839.3; Description=GRF zinc finger
MASLLQLPIDAPRFVRPAVPQPSAHPCYPDCPCPVLALYGVSIGRYGSMLLTRCPECERLEPLVRLISKRSENGNFGREFVKCESKPRLGKKKCKFFMWMDDYIKMVEGIGFTSSLGEMMASNFGDERVATIRADVTANWDMFTAELKKMSNNLSDLKKMFGVLYASMIFIALLFFIMNYGCKH

SEQ ID NO: 73264 - protein, 197 aa, Zea mays
  Coding DNA Sequence Number=SeqID_29889
MSHARRKEVFTSRTGDRNILGSSTPGNLQHSRRRLPELGRRHPSPRAAHVPINSIAKLSETPNPPTAVPIFLFLVVGAASYEGPSSVTATGLFRGGPQRQPQDSRRMASDSARRPYSGGRWIHGYPNSAGPPSSAHNAPQSAQAHLPLHARMRLDPGHADPERRPDFAQVDRPGRASGEGILRPTPSHAPRATLCNR

SEQ ID NO: 73265 - protein, 463 aa, Zea mays
  Coding DNA Sequence Number=SeqID_29890
MEKDRQDAAQKRRAIVRIGDPLREAKKARGSAKAAAPGSSKPVPAAKLADPGYIKASARSDVGQLAVVPPPVATTSSTVVVGAKGVARDSWATFCESDKILSAAAAKDVAGSMSQQLRQASQQLSQQLKQTADFADHVASGALTADFATKVESLRAQHVDAVREKSAAESKNRRLSEKEELGVLPTIVTGFMSFASLVTCEGAMNALSREGCRHYEVFDQADENFKREIFKVEDPVLKQSAGALFDRMWGPHDRETVRERSDRAIDQMAHAEDVEDLGGLDGAPPEAAEVDPVPPTDADESPSATPAQIAADEDPAPAPAPTCEDASKTVVEAATKDPATVAEPSQVPMFGPAQATTTDNTDFAAETPIVVPANDNVSGYVSECFESDSESGSSFPWTEESSDEGLDYFVALDVAAVEPSPRVVGSEGLPGEGELRNLFEGEELRIMLFNYREMGIIPKVEPL

SEQ ID NO: 73266 - protein, 49 aa, Zea mays
  Coding DNA Sequence Number=SeqID_29891
MGNRARSWRRERNGELAIEKFGPTFKESSGIYTSVDSNSRKRYGCDVSD

SEQ ID NO: 73267 - protein, 156 aa, Zea mays
  Coding DNA Sequence Number=SeqID_29892
MKPLCRVPAVGFRQRLTVVSFGTAADSPLPRAPFAECLTLGKLGFAECRPVPSVQHSVKGLFAERLTLPMALCLCCSVPLLLRGLSSGRFALSLPPATLLPDVCLPVLCAPRFGHRGKRLRCPMAASRCYIPHAPRAPRSRGPALSMPPAGKEQHI

SEQ ID NO: 73268 - protein, 91 aa, Zea mays
  Coding DNA Sequence Number=SeqID_29893
MDHDQYLLQHGQSVLDPHEDDDDDGACFNSIYVYFTNCNQIAPDNKMAKTFDVVSAHGHQLKMATFLFYANKTIIKASHTSLQGSQYHPSL

SEQ ID NO: 73269 - protein, 171 aa, Zea mays
  Coding DNA Sequence Number=SeqID_29894
  Subcellular localization annotation: CTP_CleavageSite=56; ConfidenceScore=5.50e-01
MGAIQVKAPSTQGTRSRLARAQPRAKAADPGGFTSRPRENSAACTAPTAVPLDRVRLTAAKSSLGRHRKLRPPDPRARAQPRRRTTVSASPDPMARTSTSEDGLRLTRPQGSDSTLTLDDGLRLARPQGSDSTSTSDDGLRLARPQGSDSASTSDDGLHLARPQGSDSAST

SEQ ID NO: 73270 - protein, 85 aa, Zea mays
  Coding DNA Sequence Number=SeqID_29895
MSGEQTKREMVTDEKPEASGRKNEEQTPSKEAGDKHKEKSTGSIKSHRKGDKKKKKMKKAQVGDGDYGSDEAAQIRHFNPKQTNL

SEQ ID NO: 73271 - protein, 187 aa, Zea mays
  Coding DNA Sequence Number=SeqID_29896
MERRPARFGHELLSRDVVKSLGQNLCPERHRGWVPMAAHGFVAMHHPDERFGVPWPFFSHGAPNGVHRAILRISLTRHRGLFTEKRVGRRWWHLFSRPLSTLTVVTVDMTISVSGSQRFWRIGVLTRRSHRATTPYGERGADMTLRSGPRTSATRWSAGVLCGPRGGGMEMGWWVRNGPVDRFGRGV

SEQ ID NO: 73272 - protein, 360 aa, Zea mays
  Coding DNA Sequence Number=SeqID_29897
  Homolog annotation: Hit_ID=Q6J9V9; Match level="QueryCoverage=25%, HitCoverage=31%, E-value=5e-30, Identity=70%"; Hit description =Putative uncharacterized protein
  Subcellular localization annotation: CTP_CleavageSite=62; ConfidenceScore=5.70e-01
MTSLKPASSGAPDMSGGTPDSPADGRRFASVMMTASKKAGPSKGFNSRPRTWRVRDDPGYVRYMAKARATLPRYPKTFLRPAGMICNGIPPKGGAEPSDPIEWVRVQQITCSLVRNKVSASPDPRPREKVSALLDPGLSLGLRRSPTSANRLGVENLGKREGVRTLRERWPPSLTLLQSEPTHISAQCCGCRVAVGVASHPAKMLVILSRYGVAVPRIHIRSASCLTRGREALPSRPPPVSSPVRWANGNDGEGASLGVISTPCPFAARARRCRSPEHRRGAVRGSQRRSTELAPAAWTHLDGLLVRAWKLGQAMSADAISRVAWKGSSRATPTTREGASAVARHGAEALASLGGRATGH

SEQ ID NO: 73273 - protein, 30 aa, Zea mays
  Coding DNA Sequence Number=SeqID_29898
MALCTSPVLTKCYDWGNLIEAPNVQLDRIF

SEQ ID NO: 73274 - protein, 45 aa, Zea mays
  Coding DNA Sequence Number=SeqID_29899
MSICAAHPMPMPWNILGIVQVPKGINILTSDVGHSSTYKYPRIVP

SEQ ID NO: 73275 - protein, 50 aa, Zea mays
  Coding DNA Sequence Number=SeqID_29900
MGSRHSACSAEAGCRGSFVLLFSHPPAGRGKEEGVEVDLQEFQDVDEFED

SEQ ID NO: 73276 - protein, 200 aa, Zea mays
  Coding DNA Sequence Number=SeqID_29901
MATARGCSRPAAVRRGPSLPCRVRGGDLRRVLAGASGGRLRANHVMGALGGSFGEEEQSLGDRDARTPEKSGMRWRAGLAAWAWASAPPARELGHCVRAGQGGGEGAAAGLGALLRCGWAAGRGNGLGRGACERSCAERVACTGVGQRGRWAAGVELGQRRGAGPPGASWATRSIGLRREEAWRAGGVGKARDGLMLETD

SEQ ID NO: 73277 - protein, 136 aa, Zea mays
  Coding DNA Sequence Number=SeqID_29902
MGKSNKRKREPTPPSEDFGNSEYSEEEFSSESEGSPAPVSPPASSDDSDDSQGLAAEVWTYIRVVERSGLEGSDESEYSSDEEDSSEEGGGGDGGDDDDDGGDDDDDGDDDSRGGDGGSKGGNGGSSSKGSNKASG

SEQ ID NO: 73278 - protein, 159 aa, Zea mays
  Coding DNA Sequence Number=SeqID_29903
MRALFPHVAYQLPMGRTYDKSVGWHSDANSASPEATLSLGANSASPEPDLGYLLLANPAEDHSFNCGAHVYESWSGLGDGLGRTSACPEPSFGLDINNEKASDVTVYCRADVLLKGHLPYRVLCQPLRHGQPPCQGLGYVIKPLVLTSALSRNRADISQ

SEQ ID NO: 73279 - protein, 848 aa, Zea mays
  Coding DNA Sequence Number=SeqID_29904
  Gene Ontology: Mol. function=hydrolase activity, acting on glycosyl bonds; Cellular component=beta-galactosidase complex; Biological process=carbohydrate metabolic process
  Homolog annotation: Hit_ID=Q10NX8; Match level="QueryCoverage=96%, HitCoverage=96%, E-value=0.0, Identity=85%"; Hit description=Beta -galactosidase 6 precursor
  Pfam annotation: Domain name=Gal_Lectin; Domain location=770-847; Score=126.2; E_value=9.5e-35; Accession=PF02140.9; Description =Galactose binding lectin domain
  Pfam annotation: Domain name=Glyco_hydro_35; Domain location=36-338; Score=607.5; E_value=1.2e-179; Accession=PF01301.10; Description =Glycosyl hydrolases family 35
  Pfam module annotation: Pfam domain module=Gal_Lectin::Glyco_hydro _35; Domain location=770-847::36-338
MAGTARILPAAAAALLLLLCIAGGARAANVTYDHRALVIDGVRRVLVSGSIHYPRSTPDMWPGLIQKAKDGGLDVIETYVFWDIHEPYDFEGRKDLAAFVKTVADAGLYVHLRIGPYVCAEWNYGGFPLWLHFIPGIKFRTDNEPFKAEMQRFTAKVVDTMKGAGLYASQGGPIILSQIENEYGNIDSAYGAPGKAYMRWAAGMAVSLDTGVPWVMCQQADAPDPLINTCNGFYCDQFTPNSAAKPKMWTENWSGWFLSFGGAVPYRPVEDLAFAVARFYQRGGTFQNYYMYHGGTNLDRSSGGPFIATSYDYDAPIDEYGLVRQPKWGHLRDVHKAIKLCEPALIATDPSYTSLGPNVEAAVYKVGSVCAAFLANIDGQSDKTVTFNGKMYRLPAWSVSILPDCKNVVLNTAQINSQTTGSEMRYLESSNVASDGSFVTPELAVSDWSYAIEPVGITKDNALTKAGLMEQINTTADASDFLWYSTSITVKGDEPYLNGSQSNLAVNSLGHVLQVYINGKIAGSAQGSASSSLISWQKPIELVPGKNKIDLLSATVGLSNYGAFFDLVGAGITGPVKLSGLNGALDLSSAEWTYQIGLRGEDLHLYDPSEASPEWVSANAYPINHPLIWYKTKFTPPAGDDPVAIDFTGMGKGEAWVNGQSIGRYWPTNLAPQSGCVNSCNYRGAYSSSKCLKKCGQPSQTLYHVPRSFLQPGSNDLVLFEHFGGDPSKISFVMRQTGSVCAQVSEAHPAQIDSWSSQQPMQRYGPALRLECPKEGQVISSVKFASFGTPSGTCGSYSHGECSSTQALSIVQEACIGVSSCSVPVSSNYFGNPCTGVTKSLAVEAACS

SEQ ID NO: 73280 - protein, 59 aa, Zea mays
  Coding DNA Sequence Number=SeqID_29905
MGARAHQPGRGEGLTVLATTERERDSTGAGRRGGANFARGGLGRPVHGTVAGFRDGEAA

SEQ ID NO: 73281 - protein, 38 aa, Zea mays
  Coding DNA Sequence Number=SeqID_29906
MDEQSANQEQSQEAVSVWGTGLSGGAPDSVRVVHRNSV

SEQ ID NO: 73282 - protein, 56 aa, Zea mays
  Coding DNA Sequence Number=SeqID_29907
MAVGVSEVFYAKAVSPDLLTGNRWGRLMLLGGHGCWSDLAVHLATGMDCRVGPSLV

SEQ ID NO: 73283 - protein, 270 aa, Zea mays
  Coding DNA Sequence Number=SeqID_29908
MPLIKVYHNDSDPYGLKGHSIFKSVRPFIFGYVMDLRRRSMVPTGTEKGDTPKGILLCEGSGPRALLLIRGSKASPSGGFDSRLRALGLRAHYWSEVRRLAPRKGSTAASGHSGSAPTTNQGFEGWPPKGSIAASEHAERWMTLGTSDTWPRLGLRSRGSGAALANPTPAEPLTASTYQPENSEPDYAPGLRPVKAPSTQGTRSRLARAQPRTGTVDPSGFMPRPRASSSNGRTFDSPEAQLRQASRRSNLGQIALPTDRIAGAFNARIA

SEQ ID NO: 73284 - protein, 168 aa, Zea mays
  Coding DNA Sequence Number=SeqID_29909
MAMMVSTSEKMCLCQDRLDVGLMIEDPLTGRMPRHGGCVSQRPYVRLHLLAYVTCSRPRGSIGSPPGRGAEAYTTRSGHVSAPDRRLALIKARVFSIPESRDPTVSSLDPTQRGLDPILGVRFAPEEVLDLTRRPGLYIQGFGTSARASGPAGDAQSGHAAVPDLPRW

SEQ ID NO: 73285 - protein, 349 aa, Zea mays
  Coding DNA Sequence Number=SeqID_29910
  Homolog annotation: Hit_ID=Q6J9V9; Match level="QueryCoverage=30%, HitCoverage=43%, E-value=6e-12, Identity=40%"; Hit description =Putative uncharacterized protein
MQAACNHAKWTRFSDSRHASMEAQAHASRNRHAGCCMQATAPPLAPPPRLLDCGTNTAGGSSGHVVSQAHVPSGGSKRTPSHGVKIMRLTGGASGRSSGRRFAFAVITAPKKGWPPEGFNSRLISRGPYTHYWSEVRRPAPRRVPRPPQATRALRPLLIRGSKVGPRRVHSRLRRRARDDQGYVRYITKARAALPRYPRTFPRSEGGIEPSDPVARGPGPADHPQVLLGVPLGPKPTPNERGTDVHSDYPLAAHRRHHVRRPSRATWRFPPSSLRKGDAGAYVKKPSLSLIALSPCAEARGLLSQTRLRPNPLTASTYQPENLGPDRTPGLRPVRMREQPDQPKHYARH

SEQ ID NO: 73286 - protein, 246 aa, Zea mays
  Coding DNA Sequence Number=SeqID_29911
MGDTRRLFASSLEERNSVGVAPGWGEASRAVIPDPALSIEGVRHPRWGGERGEPGLYLLRGSVGHLFFQLLVVAIALQPCGRDILQPCRGRRTVATQLGCNIPPSPSHSRRGRQQGPAASPVDYLNRFTKHESPRVKVTSEPGCPLAGPTPELVSRGLGSGWRPWEMVGRGPRGNRPSRLLGPDSRRSPWQRLSGRDDDVVLQSGDPWTASPSEARSDLAEGVVDAEGATAPFQRQDPSLQDQSVL

SEQ ID NO: 73287 - protein, 53 aa, Zea mays
  Coding DNA Sequence Number=SeqID_29912
MVGTSAVTARRQSGSLRHCSLEDMVAGVTWPSILPPGWTVEWDPASAEEEHEE

SEQ ID NO: 73288 - protein, 537 aa, Zea mays
  Coding DNA Sequence Number=SeqID_29913
  Gene Ontology: Mol. function=amylo-alpha-1,6-glucosidase activity; Cellular component=membrane; Biological process=carbohydrate metabolic process
  Homolog annotation: Hit_ID=Q5JKX1; Match level="QueryCoverage=99%, HitCoverage=76%, E-value=0.0, Identity=70%"; Hit description=Early -responsive to dehydration protein-like
  Pfam annotation: Domain name=DUF221; Domain location=120-534; Score =343.1; E_value=4.8e-100; Accession=PF02714.6; Description=Domain of unknown function DUF221
EYREITMRRIEHLKHHYKRYDQYTVLVRGIPTCPDHGAYGCYVDHFFSKHYRTYRSYQIVHDIGNIEALQKLASSIEKRIQRKRETSKCSLLGRIWSKFTSDATGIHNHEEKLKNVQDTIRLLQCENMLKQKEVPVAFVSFKSRLEAAQAAETQQLANPLSLVTTYAPEPTDTIWKNLSIPFWRMATYRLGVFAAAVLLTVFFTIPVTAVQGIAQFEKMKRWFPPARAVQLIPGLNSVVTGYLPGMILNGFIYLVPSAMLGMASFEGCVASSQREIRACDMVFYFLLGNVFFLSVLSGSLLDQIGESFTHPKNIPNRLASAVSAQSDFFITYILTNGMSGFSLEVLQFGLLIWQFLKARSIGHSEEPYLYGFPYFRVVPVVSIAILIGVVYAVVAPLLLPILLVYFLLGYAVYINQMEDVYEITYDTCGQYWPKIHHYIFLSIALMQVTMIGLFGLKSKPGASLATVPLLVLNILFNEYCKARFLPTFRHRPVQAANELDEAEGTTEGDVDDAICAYRPPWMRPTNLESSSVEPLNV

SEQ ID NO: 73289 - protein, 67 aa, Zea mays
  Coding DNA Sequence Number=SeqID_29914
MAHQSYGVHREMCSIVGVRLRARIRARYRLEKLGSVAPGALLTGESSRTGYGRRRAQPPEEEDPPRV

SEQ ID NO: 73290 - protein, 144 aa, Zea mays
  Coding DNA Sequence Number=SeqID_29915
  Gene Ontology: Cellular component=membrane
  Homolog annotation: Hit_ID=A2WZ42; Match level="QueryCoverage=100%, HitCoverage=20%, E-value=3e-51, Identity=72%"; Hit description =Putative uncharacterized protein
MDAEGLLASAAINLGLALVALSLFSLLKKQPGNAPVYRPRRMATGDLRADGGFLPLGHGRLTPSFRWIGAAFRLSEDDVLRRHGLDALVIVRLFKFGINCFSVCSIVGLLVLAPTNYTSEGRAEIRRSNSMELFTVTNVTRGSN

SEQ ID NO: 73291 - protein, 274 aa, Zea mays
  Coding DNA Sequence Number=SeqID_29916
  Gene Ontology: Mol. function=oxidoreductase activity
  Homolog annotation: Hit_ID=Q336L9; Match level="QueryCoverage=49%, HitCoverage=87%, E-value=4e-51, Identity=73%"; Hit description =Expressed protein
  Pfam annotation: Domain name=DUF1715; Domain location=58-132; Score= -25.7; E_value=0.077; Accession=PF08215.3; Description=Eukaryotic domain of unknown function (DUF17
MSELSVEAAPSSIEVQVPKQANGGDVAAAELDDVWEDVSGSPRHADTLDREWIHRQSQFQKMGYRDGVTEGQKDSAQEGFNVGFRQSVNVGYKWGLVRGVGSALASLPDSLKEKLVPDVQRRGKLQDLHRSVQEISADDAVQMFHESICQSNRPSDGSGSHVTSTSDGATESNRMKSLSKDLVLLLRECSDIKWSSCGSIVSVINPPRRKCLYKPQPSGSKHSGSFLPYDWLAANRNQCTDGPVRACATKVLFPPFTCMRGDGTGEDLYQTRRA

SEQ ID NO: 73292 - protein, 299 aa, Zea mays
  Coding DNA Sequence Number=SeqID_29917
  Gene Ontology: Mol. function=transferase activity; Cellular component= cytoplasm; Biological process=auxin mediated signaling pathway
  Homolog annotation: Hit_ID=A2WZ33; Match level="QueryCoverage=62%, HitCoverage=86%, E-value=3e-55, Identity=60%"; Hit description =Putative uncharacterized protein
  Pfam annotation: Domain name=GST_C; Domain location=134-233; Score =20.7; E_value=0.00068; Accession=PF00043.16; Description=Glutathione S-transferase, C-terminal domain
  Pfam annotation: Domain name=GST_N; Domain location=57-121; Score =43.1; E_value=1e-09; Accession=PF02798.11; Description=Glutathione S- transferase, N-terminal domain
  Pfam module annotation: Pfam domain module=GST_C::GST_N; Domain location=134-233::57-121
MARGLIGFLERSGTPGCLSERRPREGRQARQGQRKGRDPVHRVMWRPSSVIIFEGPKELRSQEFRPFVHRAEAALRIKGVPYEFIQEDLLENNPIHKKVPVLLHGDRAVCESLVIVKYVAPPPQRPRRPRCRSFLGSIPSAGRRPLVLSFLTEGELREGFLQETKKNLALLEAQLDGKRFFGGDSVGYLDIALSGLSRWIAVFEEMTGMSLVGDEDDDFPALRRWAKEYTSNKAVKQCLPSMEDLKAHFCAKTGSSASHIFLPKDIVTYTPTKDLLACPAITPLTIISASRNNRSSLAE

SEQ ID NO: 73293 - protein, 361 aa, Zea mays
  Coding DNA Sequence Number=SeqID_29918
MGAVAPWLEHGKGTRFTYHGAAAALNRTPLSPVAHPGRGKLRANPLSFPSRHGEEELEQGLPSTAAALGFSLLYSYHDGTRISFSVSAMARPRSAQYGILLRFSGVRFKEDDDPAKAAHRQRQRRLVYEVRPPSGVRISNAAKGYLSVESQPTVTHLTAESLSSQPQTPGWRSKAGAAAQAWARWRHGWSMVKEPDLLTAVQQRHSTGLPCHRSPTQDATSRGYGSTAAHGSYAWRYWYVRDGGKVTSEHGFAQANPWSFPSRHGEEELEQGLPSTAAALGFSLLYSYHDGTRISFSISAMARPRSARYGILLRFSGVRFKEDDDPAKAAHRQRQRRLVYEVRPPSGVRMSASQACPWAHG

SEQ ID NO: 73294 - protein, 83 aa, Zea mays
  Coding DNA Sequence Number=SeqID_29919
  Subcellular localization annotation: CTP_CleavageSite=54; ConfidenceScore=5.02e-01
MKLWKETSRSSKTMTSSRRGLAATPSRLPVKAVVIYVSFPHFDLLHLFSNEVFTCDDKWKNSHTKERKFSFFFFYKMGVTPGF

SEQ ID NO: 73295 - protein, 137 aa, Zea mays
  Coding DNA Sequence Number=SeqID_29920
  Subcellular localization annotation: CTP_CleavageSite=23; ConfidenceScore=5.09e-01
MASDPYNRRNGVNPVARHSVVFRAQTTSVKIFPLARSTTPLDCGWYTEAKTGLVPMEEQKSLKSWLSNYLSLSTMSSDGTPKRQTMFCQKNFLAVFDVIVDTALASIHLVKYSIATKVNLRFPWVVGNGPTISSPRR

SEQ ID NO: 73296 - protein, 263 aa, Zea mays
  Coding DNA Sequence Number=SeqID_29921
MGKKKAIQATRTQMNTKISLSQVTKCLEWFWTLESVGACSPEQVDPTGEWRECLRSSTGNGNSSVNLLPQGYCTGVFIGTRVPTVLKQGRLCPQEPRVSSEYSPKRRLQTVITEKAITDEARNTLIPATLWGRYSGLNPTWASRHDEDVRLADIVRVFPPSCNGEEQRAAAESSREVLIRPASLASLVKRGDEGIERRVVSSPSPQHLPSAGPVRLSHLVSKTSLDGGDAALARSGPAGVFEVTFDGRGTVGLRVSQSVAPCI

SEQ ID NO: 73297 - protein, 132 aa, Zea mays
  Coding DNA Sequence Number=SeqID_29922
MERDRLRVDRFGKRELLSSPIGTSIGEGDLRNLFEGEELRIILFNYRELGIIPKKCSKSSPEGITSLYALGDAFDLTMNVPSHFGSSLPRDSVWVVWTSLGLSLIFVEGLWGEDVVSVDEVFGRWFVDIRNR

SEQ ID NO: 73298 - protein, 231 aa, Zea mays
  Coding DNA Sequence Number=SeqID_29923
MATSSSDFSASFVSHSSSCEPTPEWDPIPAYEKQAPLHWDAEGWDFEVASESDGDLADWDDLQFLVDGELDSDTSTDWSWTYDGESLDVESFDNDDGLMSGHWMGIGSSDDEDDNDENDDDNNDYGSSDEDSDDNGDDDGDDDGGASQCDEMPPSKRRRLLHGSLFCSCIRLPNLAPSFTDSCSPDKPTQYNLRGKRTAPTQYNLRQKRAKTTPTASSYVHNLSCFLYPLF

SEQ ID NO: 73299 - protein, 36 aa, Zea mays
  Coding DNA Sequence Number=SeqID_29924
MQLLALVATSAELAAGVPWMASRCTITVRLRIPRKL

SEQ ID NO: 73300 - protein, 113 aa, Zea mays
  Coding DNA Sequence Number=SeqID_29925
  Homolog annotation: Hit_ID=Q5ZE15; Match level="QueryCoverage=31%, HitCoverage=10%, E-value=5e-07, Identity=61%"; Hit description =Mitogen-activated protein kinase kinase-like
MQCVEGLLQLHYRGVAHLDVKPDNILANSRGEIKMGDCMTAGRAGMTGRLECRDSPEGEEPEPAATLGLNRSHQKLTVGQCTGQIRSRRRRHARVGPVALTQVQFVSRGPTCH

SEQ ID NO: 73301 - protein, 109 aa, Zea mays
  Coding DNA Sequence Number=SeqID_29926
  Subcellular localization annotation: CTP_CleavageSite=30; ConfidenceScore=5.27e-01
MVRTSLANLPLPRLPPSGFCATDQLDGVIRARPRVPLTIFVTSSSSLPSYAREPKQAQRRDKHTSREGKATTGDSRRWVISTLGVGSWGAVFVYESRLRLQFVLDTTVG

SEQ ID NO: 73302 - protein, 525 aa, Zea mays
  Coding DNA Sequence Number=SeqID_29927
  Gene Ontology: Mol. function=inositol or phosphatidylinositol phosphatase activity; Cellular component=intracellular; Biological process=abscisic acid mediated signaling
  Homolog annotation: Hit_ID=A2XZN2; Match level="QueryCoverage=92%, HitCoverage=91%, E-value=1e-117, Identity=48%"; Hit description =Putative uncharacterized protein
  Pfam annotation: Domain name=Exo_endo_phos; Domain location=65-484; Score=137.0; E_value=5.4e-38; Accession=PF03372.14; Description =EndonucleaseExonucleasephosphatase family
MHGRQSSWPKAKTAVKRWLNLKSHSDCIDGSFGLGLVESSADVYGGSPSPPAPSSSRRHPKELSIFVGTWNVGGRAAHGGLDLSNWLADDGLGGGSSSPHIYVLGFQEIVPLNAGNVLGTEDKGPARKWLDLIRRALNHPPAASPSRSSSRWRRSPWRDTHRLRKGGRVSFSDLLAAEEDGSRRPSTASSEPDDGSEASTPSPGPSSSSEEEPACAAASRRPRGGRHRDRYRLAASKQMVGILLCVWVRADLLPRVTRVRASCVGRGVMGYMGNKGSVSVSLTLRPGVGGGRGASLCFVCTHLASGDRDGDGARRNGDVAEILRRTRFARRGAPGRTACGTRAAPVTILEHDNVIWLGDLNYRLVAPAGRGGGGGTRTWELVERHDWAALLERDQLRAEQKAGRVFAGWEEGRIGFPPTYKFVAGSDAYAMTSLVDDGSLSRERKKRTPAWCDRILWRGEGVEQRWYARGESCFSDHRPVAALFSVRLGGGDYDGAERAVGAGRRDDGDDDILLGNYDRTHKLSF

SEQ ID NO: 73303 - protein, 111 aa, Zea mays
  Coding DNA Sequence Number=SeqID_29928
MAGGIELAGAKERGLAGEGFELGIKVNIPDLWLKSIALACIWVGPKRRYEGLLGFHVVAKVLLPPESKHEKLIFSLPNLFSSSPPSRPSSPSIGSSPSSLDTTGTWRQTGR

SEQ ID NO: 73304 - protein, 157 aa, Zea mays
  Coding DNA Sequence Number=SeqID_29929
NRGGRKGGGAYRRLDCSGEVVEDEGEVSRITTGGSRDAREDMSARDWTETHWIARSTRGGGRPKSGEVDLGPPVKSGRVRGLGKLHGLLAELAEALACLEDGWSGLATMAEALAAMAGGIELAGAKERGLAGEEIWSQEIRSVSLPKPEANPRFCRV

SEQ ID NO: 73305 - protein, 873 aa, Zea mays
  Coding DNA Sequence Number=SeqID_29930
MPSHGGKLVRSPAFALDLQSRDPAAFVREAEEGAVRIVGRYVPRIEGQRSWDIRGSNDRLNRVFELNRLPYNGYPGQDDVDRRGKKPVVESGDDPAPVAAPSSKKRKLGTVVGGLGVSDGFARELMRTCAAPGGRMSSPELRESSARMLRVTGGWWPRNVPIPHAAGEDLFTCRMVREWKVFPYGRNIAAVVSAVMDKDCQGAAQKRQAVVRLHEARPKRQRGAAKATAPGGGHPPKAAVPASSRAPEPAAAAGGSKAAKAAPASGRVTEAVKSARGLPPPGKCVADFATDISVDDYLVGSDEGQLIVVPSAAATMAAAVMPKAKGGAPSAGGEMTALAAVRDEAGAVSRRLEEMKEALSQAADFAGRAASGALTAVVSAEVERLRTQHADAVREKSAADSKCRKLADKVAVLEGEKSGLRRQLVEERREANEALAKAQAALAEANLARAEGNLARERAAQLEERLNALQSRVERTEAATRAEAERTRKQLVDSYHELGARTGDFEVPDRELGLRCLEWVHEELQALPTIVEGFMSYASLVTCEGAMNALSREGCRHFEVLDQADEDFERDIYKVEDPIVKESAGAIYDRMWGPHGREVVRERAETARAQAARSERVDDFGALNSALLDPKSNPAEAVSEAALGPPPETAEGTPDAPAAAAAGGGPPLETAESVPDAPAAAAAGKGPPPTAVSRVEDPATVALEATAEAPTTAGSSQVQDFGPAHATATTNFLAASTVDGVNKSDGSTSKFSDFGDSGSSVEWTEESSDEDLDYFAALDVAAAEASPHAADTEDVPGPSTGRRRRRAVAKRRVSGAEGGRLRVSRASRQELLSLPAAASTGEGELRSLFAGEELRIMLFNYREMGIIPKVEPM

SEQ ID NO: 73306 - protein, 131 aa, Zea mays
  Coding DNA Sequence Number=SeqID_29931
MAADEGGVTTATTYYTPGEGTMAPTKVGGTDRVGHAGHRRKNRGRLEMIGMNLTARAHQESSKGRPVGIPVRTSPKVLSSAPETKVETTTTKYNALDNRVRGTTNIRTNRGTALRPVKGLVVNNRIVKEAP

SEQ ID NO: 73307 - protein, 151 aa, Zea mays
  Coding DNA Sequence Number=SeqID_29932
METTIDGHQWREVDCGVDEPNTFEDDPQDTFEQDGSYNPNHPDQHQLHPSTTASSHVPVVVEEINVDLPRIRVENGVILEDSSEEFLPTPTPLAESLAFAAGSSSSAPPAPAVQAHDPGGDDPDDFGDDDEDDEEEKEEEENMNEEVNNEQ

SEQ ID NO: 73308 - protein, 136 aa, Zea mays
  Coding DNA Sequence Number=SeqID_29933
MGLPGLGDWPGRNQGDLAGSDMGLTPAQEHQRALHTARSAGVAKQRRRRKGSMRRRWRSSDCTGGTPMSVDWTQQGGKGHTEGCPEQLTVRQSSPWHWTGHERDDDHVTGRGRRRGGGGALCTRGQSEREGERVGQ

SEQ ID NO: 73309 - protein, 141 aa, Zea mays
  Coding DNA Sequence Number=SeqID_29934
MMLVDYTTVLDRTSVSIESLTQQGIESVVEVTPASSVMSDGSSDPSLRLIRVLRAVARTATDVIVVSVSVRGKAASQTPLPAEARGKSPAAPAPGVGAPAPHAGDDAVSPGDWTDLTSCDAVDAPPGEKAKRGSQTYVQCT

SEQ ID NO: 73310 - protein, 142 aa, Zea mays
  Coding DNA Sequence Number=SeqID_29935
MGDYTRGVQKLPRELHDSTSPRGFCNCIKYKFKWGISSNSQGRLNANKYLLEISLRLIVGGSRIKWEITHEASRNCRENFMTPPEFLLSISLFKQLASTKELGFWLMFKAILGTARAATTGAGVSIAKAHHPCGCCSRIAQC

SEQ ID NO: 73311 - protein, 124 aa, Zea mays
  Coding DNA Sequence Number=SeqID_29936
MQDAARRALSQYCSLFSGVADGLDLKYYPCRSTGSAGGVIVSPVGEGNPRLSSMVNLAPCSTQSWTTPLTSWMSKNRRRGARRAQPEQQAHQEEAAPQQHLPPPPPMTIEQMFMMQTQAVQAIG

SEQ ID NO: 73312 - protein, 185 aa, Zea mays
  Coding DNA Sequence Number=SeqID_29937
  Homolog annotation: Hit_ID=Q6J9V9; Match level="QueryCoverage=70%, HitCoverage=45%, E-value=1e-60, Identity=88%"; Hit description =Putative uncharacterized protein
MRCAVFSVYSFGLRKQKQKASANGRGKRHLWQAKWVSFHLRHDDRVKKGTEKGDISKRILLSEGNGPQALLLIRGSKVAPCGVRQPPQSTQAPSPLLIRGSKAGPSEGFDSRPRARRVRDDPGYVRCMAEARATLPRYPRTFPRPAGTICNGIPPEGGTEPLDPIKWVRVQQITCRYFWSAPLGH

SEQ ID NO: 73313 - protein, 152 aa, Zea mays
  Coding DNA Sequence Number=SeqID_29938
MPIKQPRPYLPACSQVLPKPEITGICPEHAAPPPAKLSEPRPLWPAPSSRVQAAPTPRLASPLAREAFQVLEHGRTSPEARDHPRRTSIARLRAWTELSGRIPRRRRASPPAHADWPTPTIPNGDPHIIVIPETSPTSSTTSLEQPRRRVWN

SEQ ID NO: 73314 - protein, 124 aa, Zea mays
  Coding DNA Sequence Number=SeqID_29939
MEKQKSLKSWLSNCLPLSTVSSDGTPKRQTIFCQKNFWVVFDVMVETALASIHLVKYSTATKVYLREYVLGTCSQMLQEQGNIENVNRLSPSSYEALFPLGYNDFRTKMYLQFEGNESTSVTQK

SEQ ID NO: 73315 - protein, 138 aa, Zea mays
  Coding DNA Sequence Number=SeqID_29940
  Subcellular localization annotation: CTP_CleavageSite=9; ConfidenceScore=5.27e-01
MVAPPPPPSAGKVTGQTRMPLFRHVGKASSIPPPAGGLTAAIVVVTRRRKEYHVVAAVEGHELKTPKTEHRPGLERLMETTHLELDGKLFVNTQQAPTWHANYRRFDPGGVPGLTSKLLLRVLAQMGRRETEHKGGKQ

SEQ ID NO: 73316 - protein, 223 aa, Zea mays
  Coding DNA Sequence Number=SeqID_29941
MWRAEHRGGWRPDGGSRPWGKWSCAGTAAAGRKMNRALEKIWASMGVAAARESRSRGRRAIAGRGRKGAGSWEGVGRGRHHGCWRRRAGKGSALEEADGAGEDEPPEQIGMSRHGVKRPCSLHAASWNGEREQRRPTGAQGVWTSWLLAELPAMGSREEGTCAMGSGHRASSQGSKGADQEPAGERCHKGGSHERPLLRGEGADALVFNRVGEGGKRRAGLGG

SEQ ID NO: 73317 - protein, 90 aa, Zea mays
  Coding DNA Sequence Number=SeqID_29942
  Subcellular localization annotation: CTP_CleavageSite=26; ConfidenceScore=5.26e-01
MGSLPGSEIQAPSATFAAPAHARTVRPSGRESKPLYQVADRPALGRGPSAPLQRAPSPVLVIVIGARKAVYILLATPLGTRCLDLLKIGP

SEQ ID NO: 73318 - protein, 143 aa, Zea mays
  Coding DNA Sequence Number=SeqID_29943
MDTHRRPHFDDTNFSYYNARIACYQEAVDLGVWRVTRDGMKPPKNLKKPTTREEKEINLNSKGKKKAPTLSSSSDEEEEEESDDDEDNQPSTSSSEDEETIRRVGKVTMMPNQRERRRSRKFANQRSTIFSLTLTGKRKEKRG

SEQ ID NO: 73319 - protein, 234 aa, Zea mays
  Coding DNA Sequence Number=SeqID_29944
MNEPTGIRDATTNGTPVPPSAGTNDPTPWGRPAEPQKADGRLTAARPDYGNSGSALLRSCPRPRRRSRGEDKHTGAVARGAGDGSDPVGDEDFSSRLRISADGRGHQPPGRSPLKSSQMSGAPASVQGRHPSAKAGPPQNTNAALMARGTLGGPPVHTMRRPPSGRRGRRKPGRRLRHAGGDDARRRSAPRYRSPRRPQGQRTPLPPSATGKGDPRTHAEGRAPAQRGFRPSGG

SEQ ID NO: 73320 - protein, 140 aa, Zea mays
  Coding DNA Sequence Number=SeqID_29945
MPVDWGYGRVLRAADMKLGSGHGGRKHGGYMVVFPATRELLVQFNGSASIVDARECLNKGAEDTDRRGRGMGEQQHDGASTGVGRRAAERHGRGKSKLGRSRAQGKKSAMGEPSELERAAARKKKGAGTGYLKTPRAVTR

SEQ ID NO: 73321 - protein, 174 aa, Zea mays
  Coding DNA Sequence Number=SeqID_29946
MNKNGNLQNGIGIQMGQIQAIEIKETVEERRNGKSKAEDEKRNVNDGFVGVFCRNSDPTADPPRTEFLRRKNSDGYEMEKVGFRDNKHVVTCERQLTVGIDRRNDSDRRTLSLPLGRHLNLAGKRSRSNIAREQRRPGCRKAKLGHRMQRQAIVQYIWGFPGPDAISKKRPVIT

SEQ ID NO: 73322 - protein, 159 aa, Zea mays
  Coding DNA Sequence Number=SeqID_29947
MGKSKKGGSSSHHSGNNRKRELTPPSEDFGDLEYSEEEFSSESEGSPVHASPPASSDDSDDFQGIAAEVWTYIRGVECAGLEGSNESEYSSDEENSSDSSEEGGGDGDGGDDEGDGDGGGDGSGKGGSGNAGDGKQGQQQGQQQGQQQGQWLGATGFKC

SEQ ID NO: 73323 - protein, 110 aa, Zea mays
  Coding DNA Sequence Number=SeqID_29948
MVVFPATRELLVQFNGSASIVDARECLNKGAEDTDRRGRGMGEQQHDGASTGVGRRAAERHGRGKSKLGRSRAQGKKSAMGEPSELERAAARKKKGAGTGYLKTPRAVTR

SEQ ID NO: 73324 - protein, 190 aa, Zea mays
  Coding DNA Sequence Number=SeqID_29949
MNKALEKIWASMGVAAARESRSRGRRAIAGRGRKGAGSWEGVGRGRHHGCWRRRAGKGSALEEADGAGEDEPPEQIGMSRHGGKRPCSLRAASWNGEREQRRPTGAQGVWTSWLLAELPAMGSREEGTCAMGSGHRASSQGSKGADQEPAGERCHKGGSHERPLLRGEGADALVFNRVGEGGKRRAGLGG

SEQ ID NO: 73325 - protein, 107 aa, Zea mays
  Coding DNA Sequence Number=SeqID_29950
  Subcellular localization annotation: CTP_CleavageSite=40; ConfidenceScore=5.36e-01
MALIGFAQLDTNNNFFDTTCAQGSFSRFRGQAMGVYKLCRCNFKAEITNGEKSSNMAKPGPRYSLLVLSRGSNNPLDRLSRWQDEGQVTPSTNHPKEYLQKLCHKQG

SEQ ID NO: 73326 - protein, 156 aa, Zea mays
  Coding DNA Sequence Number=SeqID_29951
MVTTSSMVGRSKPGCGLCPALSFKDLHHPCCGGGRAEAEFYLPHGPAGHLFLQHSGEKALTGLAEGADFDNVGPAGRKRRELQHAWLAGSAGSGAASDATSHRWGGAWLSAHWMKAKSHHQPIILRSTCKNCATSKAEYTNTQLDLPGVRSLLLYL

SEQ ID NO: 73327 - protein, 109 aa, Zea mays
  Coding DNA Sequence Number=SeqID_29952
  Subcellular localization annotation: CTP_CleavageSite=73; ConfidenceScore=5.42e-01
MALPPFLLAERRRRGENNVARPSPTVVPLARVRLTTAKSSLRRNRKLRLARPLGLGLRRRSPPRPTLGLGLTLSLERWPLPRPTPGLGLTLGPRKVVSASPDPRARPQP

SEQ ID NO: 73328 - protein, 38 aa, Zea mays
  Coding DNA Sequence Number=SeqID_29953
MAVSPHLAAIRPCARPSTCGVNRSVQRATTSCIIVVVA

SEQ ID NO: 73329 - protein, 111 aa, Zea mays
  Coding DNA Sequence Number=SeqID_29954
MDHISEEYNNEDEEDNPIQMEEVSASPDPRARPHPQPRKVASASPDPRARPHPWHRKVVSASPDPRARPQPRPREESRPRPTSASGGVSASPDLGLGPTAPRRIHHYPTPS

SEQ ID NO: 73330 - protein, 167 aa, Zea mays
  Coding DNA Sequence Number=SeqID_29955
MDDGGSLRLLFCGAEGRSRDLGGIAPAAVNGKKGRRKQQGREEMGVLSAGRKKLLLGAPSLGELGHGCPAQGRPERRAKNLGVHSRRDGARAHGRRRAGGVGCPARDGEETSRELRGEQQLKEMERRCRALAGAEMALGKKAMLPCALELGEGWAAMGGEEAPNAQP

SEQ ID NO: 73331 - protein, 130 aa, Zea mays
  Coding DNA Sequence Number=SeqID_29956
  Subcellular localization annotation: CTP_CleavageSite=60; ConfidenceScore=5.31e-01
MGNLPIHPPLGDIQKVQLLFRQGRQYTCKLSTAVLSSSTRARALASRSQEMEQMGFAPIPAMTEPPKSLGPPTVVLVHRTSDNHAGAPDHLTSLVSELFTLSKSVSPVTQILQHIGGTSMRKQLQQLILY

SEQ ID NO: 73332 - protein, 34 aa, Zea mays
  Coding DNA Sequence Number=SeqID_29957
MAADFPPAGGGIDDFFPARWKINFQACPILSPVK

SEQ ID NO: 73333 - protein, 341 aa, Zea mays
  Coding DNA Sequence Number=SeqID_29958
  Homolog annotation: Hit_ID=A2YGC2; Match level="QueryCoverage=40%, HitCoverage=62%, E-value=1e-07, Identity=27%"; Hit description =Putative uncharacterized protein
MARLRHTARKSVIPFLPSRLAERPLHRPVAGQSSHLERLHHRLHEEQERRRQEQQGSSFSLQQEIESVRSCSPVLPLEAPPAPPLGAPASGVAAGVAAGGDPDDGGGDDSSSHDTDFSADHEPEGCVARPVARDAARGCHFHDALDTLLRRALNRRTWSIEYRCVVYQHSRGVYPDRWEATCLVRRPENSLQGAEACSEHYSISERDSAEAAMQDVARRALSHYCSVLGGVADGLDLKYYPHRPSGSTGGVIVSPVGEDNPRLSSIVNLAAVLNTELDHALDELSRARAEIALLRAERAERRHLDDGSLAPVGTQHPYRSPRRGRQPYGNPDCKTKINLEP

SEQ ID NO: 73334 - protein, 61 aa, Zea mays
  Coding DNA Sequence Number=SeqID_29959
MTKVDACRRWSKRVHRRNRNDILLQVYLRLEGSDFDSSPKGPCPVTPRDPQTPQNATKLHL

SEQ ID NO: 73335 - protein, 153 aa, Zea mays
  Coding DNA Sequence Number=SeqID_29960
  Subcellular localization annotation: CTP_CleavageSite=82; ConfidenceScore=5.20e-01
MARLSCTAPSWRDCIVACTRSRSADARSRSSRTLPPRLSGSGVADGLDLKYYPRRSIDSAGGVIVSPVGEGNPRLSSMVNLVAVLNTELDHALDELGKVRAEVAELRAECAARHYLDGGSPAPIGIQHPYRSPPRGRFDYGTSDCRTRIDLDP

SEQ ID NO: 73336 - protein, 24 aa, Zea mays
  Coding DNA Sequence Number=SeqID_29961
MGIFGQQLGNDFVYNSFGHVNNFS

SEQ ID NO: 73337 - protein, 18 aa, Zea mays
  Coding DNA Sequence Number=SeqID_29962
METSVRWWLLVGDGAKGQ

SEQ ID NO: 73338 - protein, 42 aa, Zea mays
  Coding DNA Sequence Number=SeqID_29963
MQEACNHTMVVHPFGFIASGPGKGIFRKGSFSAKEVGPEPSY

SEQ ID NO: 73339 - protein, 366 aa, Zea mays
  Coding DNA Sequence Number=SeqID_29964
  Homolog annotation: Hit_ID=Q8H6I5; Match level="QueryCoverage=35%, HitCoverage=14%, E-value=7e-08, Identity=32%"; Hit description =Putative RIRE2 orf3
MTTSSVVGRSKPGYGLCPALSFKDLHHPCCGGGRAEPGFYLPHGPAGCLFLQHSGERALTGLAEGANFANAGPVGRKRRQLQRAWLAGSAGSVAASDAASCRLIRAWPSVHLRGDCCAARTRGSSKTSYAIWAVFVFLDCLVLTPARCLHAEVAAVVGAEVVVARGGFSADETVGVTRVQTSGSLALMACPRPSGRRRAIRSLLSCGPSGVEVVHTRGSGIGVPFVMNLRPLCDEMKPEAAVSAWTEVELAQKEASLAREHVASLAEEVQRRRLELGQIVRKQDQPRSHAAEAVIRAEVLGGQLAEATERPGKIPPPVSLSEAGPGSAEGGNVARDPAIKAVEKRERRSSKRLFRENFDAEGVPPF

SEQ ID NO: 73340 - protein, 155 aa, Zea mays
  Coding DNA Sequence Number=SeqID_29965
  Homolog annotation: Hit_ID=A2X449; Match level="QueryCoverage=68%, HitCoverage=74%, E-value=3e-12, Identity=41%"; Hit description =Putative uncharacterized protein
MGLCLSVALWKEKLYGADGGSSRSVRGRVVVHKVAGVEGGDCEYGILGGDDADAVGVEQKAAPAMGVGSGGVDGAAAALSGGTPLRPIWQRRVLMGVKCQLPRFSGDDTVRRERPAGEACCGDLSAKGPALVFVISKRWQFCRCDIHVWLYVRHC

SEQ ID NO: 73341 - protein, 27 aa, Zea mays
  Coding DNA Sequence Number=SeqID_29966
GALLYNSPDCPVSQRSNGYLRQMSTMQ

SEQ ID NO: 73342 - protein, 103 aa, Zea mays
  Coding DNA Sequence Number=SeqID_29967
MWVGPCGVFFLAWAACRSCAWERIPQGSSFLYISCFPASAWPWYDGRWTSGWERQYANSPRLGRGYRGKGVAMAKGVVSRGGLHGVRKEKNTSWLEKKTGKGR

SEQ ID NO: 73343 - protein, 103 aa, Zea mays
  Coding DNA Sequence Number=SeqID_29968
MWVGPCGVFFLAWAACRSCAWERSPQGSSFLYISCFPASAWPWYDGRWTSGWERQYANSPRLGRGYRGKGVAMAKGVVSRGGLHGVRKEKNTSWLEKKTGKGR

SEQ ID NO: 73344 - protein, 636 aa, Zea mays
  Coding DNA Sequence Number=SeqID_29969
  Homolog annotation: Hit_ID=Q6JAD6; Match level="QueryCoverage=88%, HitCoverage=88%, E-value=1e-150, Identity=60%"; Hit description =Putative uncharacterized protein
TLPACEPSPVLPGFPPVVRQVRMSRTKNVSAPGGGDDEDPRRPFRQVKGKTVHLEQQEGCKKRCMDRAARAAAAAAAVAQVKLGDQLQTPSDQIAYHVRRLASRPRSSTTTTTSASTPPPTLPAPVTPVAPSTTSTTPASTAPPPAPVSAPPIPPARFRERDETEVGPLAADPRLFDLQRATAAWIALRVHRLLDLPVFLLAAGADSEVHLTYLPSILTLLTTSGRYVEEWVRVFYATVWIDPDHHWMRFRFEREDVTITASQIPELFGFHESSTRLHSLCYGTSDPPRHPHDGVAPGAAHVAALFRPPFSDGSRRSPIDFTTAAKFLFQLMRRTLLPRMGYREATTHIQLWLLGALVSHSEFDVVDFLICEIEDTVLDGMRARRQLPYAHYLCHIFAQLIRPPQFQGTLEASRLVFGSYRPAPEDPVPASAPVFDSQAEDDAAVDDDDDDDDDFGIPPPPPPPMPPRSHDHEAGSSSATPAAPPAIDPTLASILQTLTQQQAHLDRQDSFQQQLLQDRAESRAFMALMLQHSGVSVPPVQSTPPPRLQAPVVPVIQSGPPLPSVGPSSSPLRAVTLAFTSLLLQCGLSPSQYQLQLLQQILDPRLTLTPRQCSLCCLDRDRMRPRRLLPLQMYRF

SEQ ID NO: 73345 - protein, 106 aa, Zea mays
  Coding DNA Sequence Number=SeqID_29970
  Homolog annotation: Hit_ID=A3BZE5; Match level="QueryCoverage=84%, HitCoverage=23%, E-value=9e-28, Identity=67%"; Hit description =Putative uncharacterized protein
MSCSDHQKDRLSFPWDKRKSPNNISSLGANKWKMLTDVAWRIGTKGMESTFLKGGSALTMKTIYESLANRLTGKLLKEAANYKIKKELVKQLGYYLHSTEYQEYNI

SEQ ID NO: 73346 - protein, 321 aa, Zea mays
  Coding DNA Sequence Number=SeqID_29971
MNALSCEGCRHFEAFDQADEDFERDIYKVEDPVVKESAGALYDRMWGLYGREVVRERAEAAMAQALRGERVDDLGALNSTLPDPEPTPAEAALGVALEPTPEAAPTPAAAGEDLPPKVGEGAPDVPAAAVPSAGDPAAEAVETTAGTAAEPAAEAPAASGPSQVQDFGPAHATATAKFLAALTAEGGNECGGSGSEFSEFSDVAYSGSSVEWTESSEEDLDYFAALDVAAAETSPHAAGAQDMPGPSTGRRRRRAVAKRRVSTEEGSRLRVSRAGRQELLSLSAAASTGEGELRSLFAGEELRIMLFNYREMGIIPKVEPM

SEQ ID NO: 73347 - protein, 168 aa, Zea mays
  Coding DNA Sequence Number=SeqID_29972
MGKNNKRKREPTPPSEDFGELEYSEEEFSSEFEGSPAPIPLHESSDDSDDSQGLAVEVWTYIRAVERSGLEGSDESEYSSDEEDSSEGGGGDGDDDDDGGGGGNDGDGGDDGDGGGRAASRMATAAAVGAATGAAAAEAATGPVARCHWGDGRAIIVNICAFEIASEW

SEQ ID NO: 73348 - protein, 293 aa, Zea mays
  Coding DNA Sequence Number=SeqID_29973
MWQHAKESFAQMNVNGNLQNGIGIQMGQVKTIEIKEAAEKGRNGKTETVEKKRNVNYRLMGILCRDSDPMTNPPRTELPRGKDPDGHEVEKVGLGDNRHVVTCERQLTVGVDWGITAADELKAFLLGAISTLLANRAGAELQRGFGSRKARTRARKGEAAKSTVLMGYSRVRCRFQKPQSAPGSYFQNTSVPRCHPAVTSKTPVCHIITRLLPSTWPAQPVLTRQLPLKRRCHRVTRQLPLKRRCHPVTRQLPLKHRCRQVTRQLPLKRRCRRVTRQLPLKRRCHFQSLGGYL

SEQ ID NO: 73349 - protein, 200 aa, Zea mays
  Coding DNA Sequence Number=SeqID_29974
  Gene Ontology: Mol. function=protein dimerization activity
  Homolog annotation: Hit_ID=A2ZLQ7; Match level="QueryCoverage=50%, HitCoverage=15%, E-value=4e-24, Identity=50%"; Hit description =Putative uncharacterized protein
MCIDSALNQIQGMVQYFEAYRNEGFPSSLIISKGIADEMGLEASFPVKRRALRKKQFDEIDMAITSLKTRFEELMVFKDIFGFLLRSTILKSLNDIELEECWSEGRNSTLRSKSPLLSRCSDRDKAGTDTLRFDRHQTKTGDEGIPQCGLVQLRGPRAFWPIVTGPAWPPRITGLICKGIPVITVCNPALWEYSGNSLGS

SEQ ID NO: 73350 - protein, 259 aa, Zea mays
  Coding DNA Sequence Number=SeqID_29975
  Subcellular localization annotation: CTP_CleavageSite=47; ConfidenceScore=5.56e-01
MAPCLAAPSTRRSLLPRSLLPALPGPSVPPPAVASLLPRSLLRRWLPCSTGQGNVFISVQVMCLYLFSHSQFINNDLRIVPADEDGPSQSINNGSSAAPINLEEGAATNNGTGDANTSENVDVRQQVPPPPPVTAGTLKGKCALGPFLSILVIECQHKCLNVNLCSWMDKVQIKSKERSLNKTQYHKRSNTEMTQWFIPWFGQHQRLPTPRCGVPTDKGCNQPFSSGPKTNLNTTVFCFSFQYPVCEESPQLGVSRPYT

SEQ ID NO: 73351 - protein, 195 aa, Zea mays
  Coding DNA Sequence Number=SeqID_29976
  Gene Ontology: Mol. function=histone-lysine N-methyltransferase activity; Cellular component=nucleus; Biological process =multicellular organismal development
  Homolog annotation: Hit_ID=A2Y3H8; Match level="QueryCoverage=100%, HitCoverage=100%, E-value=2e-64, Identity=63%"; Hit description =Putative uncharacterized protein
  Pfam annotation: Domain name=DUF260; Domain location=6-106; Score =242.1; E_value=1.3e-69; Accession=PF03195.5; Description=Protein of unknown function DUF260
MGGGSPCASCKLLRRRCTKDCIFAPFFPADDPHKFAIVHRVFGASNVSKMLQELPVQQRGDAVSSLVYEANARMRDPVYGCVGAISFLQNQVSQLQMQLAVAQAEILCIQMQRRDDGAGPDVDVVVPPPSLVAAAAAAGASHHHQMTVEMQQQAMATDDDVDAFLMQNAGAGAIPPQLMCYGGAASALKRESLWT

SEQ ID NO: 73352 - protein, 117 aa, Zea mays
  Coding DNA Sequence Number=SeqID_29977
MAKRVNVLVPRDLWPYSVVTMEDLRNLIDGAEVPCHQLGSLRIGFVMPGSVVVIAPKLSSSKLGGRALALLDRDAFQEILDLARYMMPLGDVERFGACPSVGGSTYHFLLEDMLELS

SEQ ID NO: 73353 - protein, 140 aa, Zea mays
  Coding DNA Sequence Number=SeqID_29978
MSGVHRTVSGAPVSPEEQRSDMPNLEGDRAPDYLVRHSIEGRNCLSVGMGNPLGTRNPHGYGFGQNFIPVMGMGFLADVFFLRGYGFGCLGAIKGTPRRMKEYTKHTLSILDHSHSDFAHSFDILSDLSSVLVVNFVILI

SEQ ID NO: 73354 - protein, 125 aa, Zea mays
  Coding DNA Sequence Number=SeqID_29979
METSSEPFTVQGFEGWPLDRVQQLPQNEQSGMNVRTSIHDRGSGNTLEGFEGWPLGGVRQPPQNIESGMNVGWPLGRVRQPPQNVESGMNVEARGLPLHLDCDQVVCRINRPTKSTKENIKTSKE

SEQ ID NO: 73355 - protein, 62 aa, Zea mays
  Coding DNA Sequence Number=SeqID_29980
  Subcellular localization annotation: CTP_CleavageSite=6; ConfidenceScore=5.19e-01
MALFARAGYILASSCCASCTSITKRKCSKHSSLWPSFQMSTGHMMIEVFAKVFYGDPAKEAL

SEQ ID NO: 73356 - protein, 633 aa, Zea mays
  Coding DNA Sequence Number=SeqID_29981
MRRGLDVLLVSWKLSGNTRTHKDLEWFGPPEREASCRRDDEYRAPLGLGALFVNRVDMRAVCWGLHDVMGLASCIARWLMSWATSHAVAAGLCLSGKRREGPGRVPAPDPYSSRGPPRSGTLLRPGPYSEGPGAFPRDPAYLLGSSGLVRTGVWCPTVEKRVPLIQGTDSGPRACLRGGCETAVFCGSPEKTWHWRERRCDFPHPMGCAGVLWGIRVRVAPSGDLTAGELALMVVLSVLSSSCSCWRSATPWGGMTTSLVVERSELGCGLPPALSFKDVHHPCWGGGQAELGSAFRMGWWPASSSIIRGRRAFTSLGLAEEANFGYAGPANCRCHRPPRARFPGLDGLGAAFDAASYYLVGVWLPVHYTGDGRAVRRSATSTASPAPAATPGGAYKTSYARGGGGRVLGWSCPHSRSEDGSEDLFARTGAVAIRRYGTGAQVGAVVGEAPHCRGGCLRWRDCQCHLSPGLRLFGFNGLVVAPCRKTGARTFSQWQVAAAVGAEVVASAGEPLGASYPAALLVWRLDLLRLDTSVSEKVVNNSREAASSRAVERAGPWYGTRLSGYTGFGPPHETNAKRPHRLQTTPWNGVPFSGAGPQAVGPPNFRIGGPKLQAWLLNSDVVMSEQIEVVWVG

SEQ ID NO: 73357 - protein, 170 aa, Zea mays
  Coding DNA Sequence Number=SeqID_29982
MAPGEVVELGGCRNNSLAADNAPGVALDGVRDVCAAGKLLVEGMMSTVHRSARAHYLSTDWTGAPSAGRRVLSAINAGAARRYGPCVMHNPLASVTGHKPRGSSGDLAKARTLLGGTWGLPEGLGMPSWELRTYLPMWRGRVPFSVWHGGVARVQRLHAVEEGTPDSGYR

SEQ ID NO: 73358 - protein, 356 aa, Zea mays
  Coding DNA Sequence Number=SeqID_29983
MGTEHGVSGELQAGPTRSEAAVEPLGGPAFEPLISRGGSEPSSFTGKDPFRGEASPASPARSAACPAAELMRWGEWLAGRLLRVREPFEERITGALSSRRERGFSCRPRMGREPGRRRDRCSRPPATVITAGPLSAALTVAPGWRCWVHPARWLRDAWAWASMLACWESGKRVHLARLHAACMAARPFRPLVWAEVGGLFPAAPLHRRSPKMVTSSLMVGESEPGCGLSPSLSLKDFHHQGRGGDCSVPGFRTRVASEPLAAPASATAAGRGSSAGAIAKAGHGPTSNSTAFYPSLPYEFWHGRGPPGSSIRPEVSAAAVRPPGAEVVVVAAAGAGDGAPFVGLPLLRRPSLMEWG

SEQ ID NO: 73359 - protein, 120 aa, Zea mays
  Coding DNA Sequence Number=SeqID_29984
  Homolog annotation: Hit_ID=A3CEA1; Match level="QueryCoverage=89%, HitCoverage=5%, E-value=2e-13, Identity=45%"; Hit description =Putative uncharacterized protein
MALGDLMASRFGHSSSSPSPSLAPVPPLPHHHHNHHQNHVADDLPVASGPEPKNGLEVPEVEKPASEAYLPQVVVLCDYRHEGIDEATTAALSTSGLVSNWRPKDRVMDVMQFADAVPSA

SEQ ID NO: 73360 - protein, 120 aa, Zea mays
  Coding DNA Sequence Number=SeqID_29985
  Gene Ontology: Mol. function=signal transducer activity; Cellular component=nucleus; Biological process=regulation of transcription, DNA-dependent
  Homolog annotation: Hit_ID=Q5Z8K3; Match level="QueryCoverage=74%, HitCoverage=14%, E-value=1e-22, Identity=60%"; Hit description =Adagio-like protein 1
MEWDSESDGAGSVGVDEQEEEQEEERGGEGGGVDAGGMFTLAIEGMLRASGPCGLVVTNALEPDCPIIYANRGFEEATGYRVEEFLGRNWSVPPYIPYMLPFHIRHAASFIWLQGLLCAT

SEQ ID NO: 73361 - protein, 640 aa, Zea mays
  Coding DNA Sequence Number=SeqID_29986
  Gene Ontology: Mol. function=nucleic acid binding
  Homolog annotation: Hit_ID=A2Y9N4; Match level="QueryCoverage=57%, HitCoverage=16%, E-value=2e-16, Identity=25%"; Hit description =Putative uncharacterized protein
  Pfam annotation: Domain name=zf-CCHC; Domain location=149-166; Score =9.9; E_value=0.048; Accession=PF00098.14; Description=Zinc knuckle
  Pfam annotation: Domain name=zf-CCHC; Domain location=168-185; Score =17.3; E_value=0.0036; Accession=PF00098.14; Description=Zinc knuckle
  Pfam module annotation: Pfam domain module=zf-CCHC::zf-CCHC; Domain location=149-166::168-185
  Subcellular localization annotation: CTP_CleavageSite=94; ConfidenceScore=5.78e-01
MSNMSSPPDPTPPPDPNPSPSSTSHHSPSTVATPAPATTPLPCPLGFCASQVGRSKFQRWDDNASGSSSGGTVHSYKEALLSSSGATSQELDVNTSTVARPKLCDKERRLRRREVLGAGRQEDGWQVVKSRKQFRCASARIGTIVNLRGKCFNCFSPNHLVASCRCPPRCFRCFKLGHQASCCPSIQAGPQKLKTPGRLRDLLDIVSSYPRGTGSAAPPKKRSVWVRISPAPHTFDRKTDQPSPMLNNCAPAVDQRSFRNKRKRRSKSKRGKGPAEAAGTGACVDSPPSSSEAHYTQSRMECHNTSPPTVVGSRVLTFTDEMAREEINLRKAMFVTIAGTRPVVQGSEVLDEVARSFGVCIDKMSIHHSSPEDFLLFLPDEETASRIFNGGRLFTGPRFCLLFKRWSRFSHVSLSRMSHLVDVQTSGIPEHAWSCSTVEAILEDSCHIVEVHSDTLLKKDLSSFTVRAWCFDFKKLQRQMTLHIILRAAAPLQQKTAAFDRCRDAVLHHVILHMLLQNCCPPHKDHMTYSIILPLRLVRRLVGKFSHPRPGTKLKELDPPKGLSEQVRKLILGVDVACMDAPFCQKQSRMKWYLTRMCLLRSMNTGFLANARADWLSTRSSTAPTSLPRRSPSRRVSQSA

SEQ ID NO: 73362 - protein, 254 aa, Zea mays
  Coding DNA Sequence Number=SeqID_29987
MIWERMREPSGAPPQSHLGNAGAESSEHADGNHGWERRQGPDRHADNRGAGEHKRSDSVAVLLRVDLDTVTKDRVRDLIKAHKCALEKLTVVKGDAHTVGRHHTRGGGKGSEERSWKCEGVALTGKVAPPRRIGSMPEVPALVKADTKKRGRDGLAGRVSGKGDGNMSGKRQKSKGATCSLGEPDIRGNRWEEARGRYTLKVPYAGVHAGKGWCDWEGEQGVAGDRGALGTEEHGRKGELVLELERRKGFFEVK

SEQ ID NO: 73363 - protein, 191 aa, Zea mays
  Coding DNA Sequence Number=SeqID_29988
  Gene Ontology: Mol. function=binding; Cellular component=TORC1 complex; Biological process=embryonic development ending in seed dormancy
  Homolog annotation: Hit_ID=A3CEA1; Match level="QueryCoverage=87%, HitCoverage=8%, E-value=2e-78, Identity=87%"; Hit description =Putative uncharacterized protein
  Pfam annotation: Domain name=WD40; Domain location=147-185; Score =5.2; E_value=7.2; Accession=PF00400.23; Description=WD domain, G -beta repeat
  Pfam annotation: Domain name=WD40; Domain location=6-46; Score=4.8; E_ value=8.1; Accession=PF00400.23; Description=WD domain, G-beta repeat
  Pfam annotation: Domain name=WD40; Domain location=99-137; Score =18.5; E_value=0.025; Accession=PF00400.23; Description=WD domain, G -beta repeat
  Pfam module annotation: Pfam domain module=WD40::WD40::WD40; Domain location=147-185::6-46::99-137
MVLPGPLYLNILVAPNIIHNLLSSTSQVRSGHFAAGFADGSVRIYDVRSPDRFVYVARPHAPRTEKVVSIGFQPGFDPYKIVSASQAGDIQFLDVRRAAEPYLTIEAHRGSLTALVVHRYAPVVASGSAKQMIKVFSLGGEQLTIIGYLPSFMGQRIGSVNCLSFHPYKSLLAAGAGDNALVSIYAEENYK

SEQ ID NO: 73364 - protein, 1003 aa, Zea mays
  Coding DNA Sequence Number=SeqID_29989
  Gene Ontology: Mol. function=binding; Cellular component=TORC1 complex; Biological process=embryonic development ending in seed dormancy
  Homolog annotation: Hit_ID=Q6RUS5; Match level="QueryCoverage=92%, HitCoverage=85%, E-value=0.0, Identity=77%"; Hit description =Transducin/WD-40 repeat protein
  Pfam annotation: Domain name=HEAT; Domain location=448-485; Score =6.3; E_value=3.1; Accession=PF02985.13; Description=HEAT repeat
  Pfam annotation: Domain name=HEAT; Domain location=588-619; Score =13.9; E_value=0.23; Accession=PF02985.13; Description=HEAT repeat
  Pfam annotation: Domain name=HEAT; Domain location=634-669; Score =12.1; E_value=0.43; Accession=PF02985.13; Description=HEAT repeat
  Pfam module annotation: Pfam domain module=HEAT::HEAT::HEAT; Domain location=448-485::588-619::634-669
MESGWVVFMVGIGPASWTLVPALYSGVQGVQGCQPLVDGVQGLSHWITWMEDMVTKTGCGALVLCLNISVDPPDVIKISPCARMECWIDPFSMAPPKALESIGKTLHSQYERLQPKARYKLQLDPTVEEVKKLSNTCRKYAREERVLFHYNGHGVPKPTSNGEIWVFNKSYTQYIPLSITDLDSWLKTPSIYVFDCSAAGIIVKAFLERLDWSSTSSASSQKDFILLAACEAHQTLPQSAEFPADVFTACLTTPIKMALHWFCKRTSLHGPLDRSLIDQIPGRQNDRKTLLGELNWIFTAITDTIAWNVLPRDLFQRLFRQDLLVAGLFRNFLLAERIMRSANCSPVSYPLLPPTHQHHMWDAWDMAAEICLSKLPQLIADPNTEFQPSPFFMEQLMAFEVWLDHGSKDKKPPELLPIVLQVLLSQPHRSRVLVLLGRFLDMGPWAVDLALSVGIFPCVLKLLQSSAMDIRQNLVFIWTKILSLDKSCQVELVKDGGHAYFIKFLDSLDAFPEQRAMAAFVIAVIVDGYRMGQEACMNAGLMDVCLRHLQPENSHAQTEPLLLQWLCLCLGKLWEDFPEAQLLGLQTNGPEIVICLLSEPQPEVRAAAVFALGNLLDTTSNSHDDGSDDDEKVKAEINVVRSLLQISSDGSPLVRSEVAIALTRFALGHNKHLKSVASEYWKPQPNSLLKSLPSLANISNPSNVYSPNNILQGRIGPVLRVASDSGAAGRDGRISTSNPIATSSIMHGSPESDDSSQHSDSGILLRGNASNGGFSYTRSRPVDNVIYSQFISTMYSVSKDPDPTIATIGRRALSLIGVEQVVMKNTRFNSGGSHRGETSASNFGMARSSSWRDMKSGPSNAEPLPQSTIYNWSCVQFSRPVLTVSDDNEETNARREEREQIALDYITKCQRSCDGNVRIWKNFAQKGGEKLVTALSSVQGHRAAGRSIVIDWQQQSGYLYASGDMSSILVWDLDKEQLLSTIQSTADTAISSLAIYCTLSLKK

SEQ ID NO: 73365 - protein, 548 aa, Zea mays
  Coding DNA Sequence Number=SeqID_29990
  Gene Ontology: Mol. function=mannosyl-oligosaccharide 1,2-alpha -mannosidase activity; Cellular component=membrane; Biological process=protein transport
  Homolog annotation: Hit_ID=A3C802; Match level="QueryCoverage=93%, HitCoverage=40%, E-value=0.0, Identity=86%"; Hit description =Putative uncharacterized protein
  Pfam annotation: Domain name=EGF_CA; Domain location=492-533; Score =14.8; E_value=0.0056; Accession=PF07645.6; Description=Calcium binding EGF domain
  Pfam annotation: Domain name=PA; Domain location=57-168; Score=92.3; E_value=1.6e-24; Accession=PF02225.13; Description=PA domain
  Pfam module annotation: Pfam domain module=EGF_CA::PA; Domain location=492-533::57-168
MGSRFASAALRLLVCAALLLGCCHGRFVVEKNSLKVTAPDDLKGTYECAIGNFGVPQYGGTMVGFVAYPKANRKACKSFDDFDISYKAKPGAFPTFLLVDRGDCYFAKKAWNAQKAGAAAILVADDKDEPLITMDNPEESGNTDYLENITIPSALITKSFGDKLKKVIDNGDMVSVNLDWREALPHPDERVEYEFWTNSNDECGLKCDSQIDFVKSFKGAAQVLEKKGYTEFTPHYITWYCPEAFILSKQCKSQCINHGRYCAPDPEQDFSKGYDGKDVVVQNLRQVCVFKVAKEHKKPWLWWDYVTDFAIRCPMKEKKYTKECADGVIKSLGLDHKAIDKCIGDPDADEENPVLKAEQDAQASKLDKGAVLKALCAGFKETTEPAVCLSEDIQTNECLENNGGCWQDKAANITACKDTFRGRVCECPIVKGVKFVGDGYSHCEASGSGRCEINNGGCWKDTKNGRTYSACNDDGCKCPDGFKGDGRHKCEDIDECKERTVCQCKECKCKNTWGSYECGCSGGLLYMKEHDTCISMCNPHTRTLSAYY

SEQ ID NO: 73366 - protein, 399 aa, Zea mays
  Coding DNA Sequence Number=SeqID_29991
  Gene Ontology: Mol. function=catalytic activity; Cellular component =protein serine/threonine phosphatase complex; Biological process =protein amino acid dephosphorylation
  Homolog annotation: Hit_ID=Q6YTI2; Match level="QueryCoverage=92%, HitCoverage=85%, E-value=1e-175, Identity=83%"; Hit description =Putative calmodulin-binding protein phosphatase
  Pfam annotation: Domain name=PP2C; Domain location=49-302; Score =72.7; E_value=1.2e-18; Accession=PF00481.12; Description=Protein phosphatase 2C
  Subcellular localization annotation: CTP_CleavageSite=35; ConfidenceScore=5.21e-01
MSSRSGSTGGGSTGGGSSAGGGGAVPLAVLLRREVASERTASERPELHWGLFSQAKKGEDFTFLKPECERVPDVPSSSFSAFGLFDGHNGNGAAIYTKENLLNNILSAVPADLNREDWLAALPRALVAAFVKTDKDFQTKARSSGTTVTFVIIDGLVITVASVGDSRCVLQAEGSIYHLSSDHRFDASKEEVDRVTECGGDVGRLNVVGGAEIGPLRCWPGGLCLSRSIGDQDVGEFIVPVPLVKQVKLSTAGGRLIIASDGVWDVLSPEVAFNCSRELPPVPAAEQIVKTAVQSKGLRDDTTCIVVDIIVEKNNSSMPLAKRQPGIGVFKNMFGKKKSSDSSSHSHSDREYMDPDNVEEIFEDGLDSEYPVRNMFKLFICAICQVELKPNQDSSRNSG

SEQ ID NO: 73367 - protein, 106 aa, Zea mays
  Coding DNA Sequence Number=SeqID_29992
  Gene Ontology: Mol. function=monooxygenase activity; Biological process=electron transport
  Homolog annotation: Hit_ID=A3AID7; Match level="QueryCoverage=70%, HitCoverage=19%, E-value=4e-23, Identity=64%"; Hit description =Putative uncharacterized protein
MGPRPRVCLFDYESVRQVLFNKFGHFFKDDAHPTILAMLDKGLVLVEGTDWVRHRRVVNPAFAMDKLKCSSQISPPVGDTFSEMHSFMAGFVSFYIWRRWSAVLSH

SEQ ID NO: 73368 - protein, 144 aa, Zea mays
  Coding DNA Sequence Number=SeqID_29993
  Gene Ontology: Mol. function=protein binding; Cellular component =spliceosome; Biological process=mitotic spindle organization and biogenesis
  Homolog annotation: Hit_ID=A2YVP2; Match level="QueryCoverage=50%, HitCoverage=70%, E-value=1e-34, Identity=94%"; Hit description =Putative uncharacterized protein
  Pfam annotation: Domain name=SF3b10; Domain location=69-144; Score =167.4; E_value=3.9e-47; Accession=PF07189.2; Description=Splicing factor 3B subunit 10 (SF3b10)
MSVAEDCSYFKKCGVLPGLVGVSDVFTLFSLCSLWLNWILVFTVHSIARFADILRTIFLTQFTILKASDRFNINSQLEHLQAKYVGTGHADLSRFEWAVNIQRDSYASYIGHYPMLAYFAIAENESIGRERYNFMQYYTEGSTA

SEQ ID NO: 73369 - protein, 246 aa, Zea mays
  Coding DNA Sequence Number=SeqID_29994
  Gene Ontology: Cellular component=integral to membrane
  Homolog annotation: Hit_ID=Q6Z8Q8; Match level="QueryCoverage=100%, HitCoverage=100%, E-value=3e-57, Identity=48%"; Hit description =Putative senescence-associated protein
  Pfam annotation: Domain name=Tetraspannin; Domain location=5-213; Score=147.1; E_value=5e-41; Accession=PF00335.11; Description =Tetraspanin family
MAIRMSNNVIGALNLVTLLLSVPILVSGIWLRSRADGTECDHLLSTPAIALGAVLMAVAVAGLAGACFRATWLLWLYLLAMLVFIVALLCFTVFAFAVTNRGAGEAVSGVGYREYRLGDYSTWLRRHVESRKDWARIRSCLADAHVCRRLEERERESKDAAGSGSARPVPGRVRVLQAAHELQLHSCKAGVVDALKRDWKRAAIVNVVILSFIVVVYSVGCCAFKNSRRDNYAYHSGRGWKRGGDA

SEQ ID NO: 73370 - protein, 57 aa, Zea mays
  Coding DNA Sequence Number=SeqID_29995
MEIDEEEEAGLHCKMSPLWWLGSTTKVLEWPPIAVKDVYTLEYPVYPQNIPMRRGYR

SEQ ID NO: 73371 - protein, 329 aa, Zea mays
  Coding DNA Sequence Number=SeqID_29996
SQMEVCCQTNFCQNEVGFPKLLRACTVRLRIRSQPEYDGREFIEHGTEKCVVTVYIGSSPNHVEWSVTAAGHRFGTTCQVVARKALRALCQIYEEEVVDTLLRFFPPFQRDRPVWMTRMHALEGQQLLEDDPTVVYLTAYLLTLDAQYDFLAWHHRQMIALAEYAEKRNRKLHVDLTTAQACVTALESREVIAVEALKQAKDEHIQKLIEAYLVTHNQQKKAWELPEGSIVLEGIPVSSKAMGKQEHPKSSQDPLPELFEPLTIKKIPAPSLEVKEEAVSTQPAPPPSEELQEPVPLEEEFDPVLPSQSPPEEDINLSFLLTHPGDVSD

SEQ ID NO: 73372 - protein, 195 aa, Zea mays
  Coding DNA Sequence Number=SeqID_29997
  Gene Ontology: Mol. function=catalytic activity
  Homolog annotation: Hit_ID=A7PRZ8; Match level="QueryCoverage=40%, HitCoverage=22%, E-value=2e-15, Identity=54%"; Hit description =Chromosome chr14 scaffold_27, whole genome shotgun sequence
MNPCFLHENPEHTPLARGTHVGVAHRRQEETWRLPVRPLETVLRDRMCRYVRQAPAQPPLGRGAERLLRAVHRQARGPHSRRQRRRLSGCSGHHIRRRHHHVVQLIVHLKPNLPRVAHPVVQRPGYYLTDEPGVHFVLQPSQELSVLGMSRAFDDYYIEDYGVILAPEVTQRRTDNNDQFVILATVGVAFMQACL

SEQ ID NO: 73373 - protein, 54 aa, Zea mays
  Coding DNA Sequence Number=SeqID_29998
  Subcellular localization annotation: CTP_CleavageSite=25; ConfidenceScore=5.23e-01
MASCHVGLGPTIKWRTGQSGAPRTRKAANQGFSARGPACALFTVRFNTHLVKSN

SEQ ID NO: 73374 - protein, 85 aa, Zea mays
  Coding DNA Sequence Number=SeqID_29999
MGRRETEHEGEKGDRQKGKPAAFVLSCAQVRRKERVQAILALNAPAIRSVGVAIWPRLLLGEDWASGEPKLCADGGYQLRLGVLG

SEQ ID NO: 73375 - protein, 163 aa, Zea mays
  Coding DNA Sequence Number=SeqID_30000
  Subcellular localization annotation: CTP_CleavageSite=14; ConfidenceScore=5.06e-01
MNRLGPKPAQVGPTAAESRPRPRARWRLCRKALEVLSNRKRVRLLFPGVTDISQKGPLVSVYSVFHVLDGVQARPCSGEQLRRPIKAKTGANLWLRPNPSPQERFPQLNCTIGGLGSSGHGNRADEFKNYAFPVMGGHTVQIDDLISITKLCKCLNKKAGDGG

SEQ ID NO: 73376 - protein, 297 aa, Zea mays
  Coding DNA Sequence Number=SeqID_30001
MACRQGAGDARTHIGAEDRLAPDDDFEFCILSSGGLAPVGDDAPGMCVADEVFYGGKLLPLRLSSADAAALLLLRSDSLDGAATASASASTTTSSGFSSRSVSRGSSSSSCCVSRSTSSNSARSDHAGPAGSGSSSSGKSASSAVPVPVPPRRSPSGSVFYAHPSPSPQRRSRTAAPAPPRRSTGSAPPVAWGVIRLGVVGAPEVYAPRPRAPASRSARFEQRRPADKKLALGLLGAGLVCSCSPDAVAPVGSAEVAATRRQRKKAEEKRSATEQSGKGTARRSRILEWLDDLSVSK

SEQ ID NO: 73377 - protein, 70 aa, Zea mays
  Coding DNA Sequence Number=SeqID_30002
MAKDIPCNMLDRRLFAAATSVRVGDEFGQQTGWQEGDGLIIRAVSYAPHAQNLDYIFLLNVASPDIFGLI

SEQ ID NO: 73378 - protein, 222 aa, Zea mays
  Coding DNA Sequence Number=SeqID_30003
MAHRTVRCTPDSPVPLPRHHCRWIPTVGASDLWARLGVRCTPNMYCLMSGAPELGVSLIPFQKLNHKLHVDLTTAQARVAALESREAIAVEALKQAKDEHVQKLMEAYLVTHNQRRALRIQEPAPSNPVQPRRAEDPQILKGHPVSTRGEKKAWELPEGAIVLEGIPVFPQTMNKQEHPESSQDPPPELFEPLTMKKIPAPSLEVKEEAASTPPALPPSEEL

SEQ ID NO: 73379 - protein, 85 aa, Zea mays
  Coding DNA Sequence Number=SeqID_30004
  Subcellular localization annotation: CTP_CleavageSite=26; ConfidenceScore=5.29e-01
MTGVTGSTTGVSGAMAGDTGSTAVVTAAMAGVQSSQAIIAEAEFTSPSGEAVAKRTSAVAAKQISGPTATGKVGNSRNSYPISFF

SEQ ID NO: 73380 - protein, 279 aa, Zea mays
  Coding DNA Sequence Number=SeqID_30005
  Homolog annotation: Hit_ID=A2Z9N5; Match level="QueryCoverage=90%, HitCoverage=88%, E-value=1e-44, Identity=46%"; Hit description =Putative uncharacterized protein
  Pfam annotation: Domain name=DUF623; Domain location=182-241; Score =73.3; E_value=8.3e-19; Accession=PF04844.4; Description=Protein of unknown function, DUF623
MRLLMSRRRGAGGGLCIRKKARGFMCGCGGTKAISISDGSDKSPTATPQTAASTTPLTGMSVTTTTTTTTKPTRGGGGGGYRPAAAPSTTEAPSLFSSSSLYADTTDDGPSSMESTPSLSALLRQLGELERSVRFLHSAGAGAEEEADAGKLQGSGGRRQRRAVGEGGSGRVEESVAVVKESANPLGDFRRSMLQMIVEKEIVDGAGLRELLHRFLSLNSPQHHHLILRAFAEIWEEVFAGHERTPDDDFLVSHHHHRNKKHHLATRGGVVLESSGLLS

SEQ ID NO: 73381 - protein, 372 aa, Zea mays
  Coding DNA Sequence Number=SeqID_30006
  Gene Ontology: Cellular component=chloroplast
  Homolog annotation: Hit_ID=Q10J01; Match level="QueryCoverage=84%, HitCoverage=85%, E-value=1e-115, Identity=71%"; Hit description =Expressed protein
  Pfam annotation: Domain name=DUF1230; Domain location=91-255; Score =264.1; E_value=2.8e-76; Accession=PF06799.2; Description=Protein of unknown function (DUF1230)
MLLRLKIVVGVHSVVLPVPVPGGYGHGACYAAVEPCWRRSRRPALAAAGGLVARRPRQSATVVMALKEEPEGSSRRGFAGGGPSWDPGLEIQVPFEQRPVNEYSALKDSALYSWAELSPGSFFLRLGGLCLVTFTVLAAPIAAASFNPGKDPLKFVLAAGIGTLLLVSLAVLRIYLGWSYVGDRLLSAVVPYEETGWYDGQMWVKPPEVLARDRLLGSYKVLTQILLAPRPQTKHTSFVVKPVVNLLKQTLVGTGALLVGAVSLFAFAAPVEDFLHALSQPPSSATASSKPSLRCAAVTYSRVPTVHGEHMLQAKLFAWKEELLRLPVEVMQDDDLAAAAAEAADGRPVYCRDRYYRALAGGQYCRWDDLLN

SEQ ID NO: 73382 - protein, 159 aa, Zea mays
  Coding DNA Sequence Number=SeqID_30007
  Gene Ontology: Mol. function=metal ion binding
  Homolog annotation: Hit_ID=Q5N7K2; Match level="QueryCoverage=60%, HitCoverage=7%, E-value=1e-32, Identity=73%"; Hit description=Zinc finger protein-like
MATPTPMPGSEGTLVAVMPRSPSPTPAEAGTSATETPVLIFLYFHKAIRAELEALHGVAVLLATERTGDVAALAERCRFFFSIYKHHCDRDLRPLFLCFWPFSPVTSCWAGGLDPRSPLRLHSTSYIPFPPLPSSRRRHPSRHNRGGAGPNKPAGLEGR

SEQ ID NO: 73383 - protein, 64 aa, Zea mays
  Coding DNA Sequence Number=SeqID_30008
MPRSSLSLTSLHRVVASLLTDVMSKFRINSLLCDERDIKEEVADEDMMLNSMDASLVIPPVIFL

SEQ ID NO: 73384 - protein, 202 aa, Zea mays
  Coding DNA Sequence Number=SeqID_30009
MHPFEVANRCVIDGTQFLSGTIIRGTLKTPNSQLPRARAADPGGSTSRPRPPSSDEHTSGSPEDLHSEGRRHHHARAIAARVSSKNPARAGGSAGHPEASASCPPKTSARLEASADQLRRRALLTDDPARLRPTKSSFRANSASVRADTATPDFGSSKSGRGVPLTKQEKPRTARPTEPRDSYASGIRIPHSSPLHEATHAW

SEQ ID NO: 73385 - protein, 451 aa, Zea mays
  Coding DNA Sequence Number=SeqID_30010
  Gene Ontology: Mol. function=transcription factor activity; Cellular component=nucleus; Biological process=regulation of transcription, DNA-dependent
  Homolog annotation: Hit_ID=A3RL57; Match level="QueryCoverage=66%, HitCoverage=67%, E-value=2e-60, Identity=55%"; Hit description=EREB
  Pfam annotation: Domain name=AP2; Domain location=147-198; Score =72.5; E_value=1.4e-18; Accession=PF00847.11; Description=AP2 domain
  Pfam annotation: Domain name=PBD; Domain location=107-151; Score =33.2; E_value=9.5e-07; Accession=PF00786.19; Description=P21-Rho -binding domain
  Pfam module annotation: Pfam domain module=AP2::PBD; Domain location =147-198::107-151
  Subcellular localization annotation: CTP_CleavageSite=46; ConfidenceScore=5.38e-01
MVLSAEIRFGHQIPYPTTTLTPTRRRKKRKRKTRRSSRGWRAEEMDEATVSSPLMLPATKARGGVSVVEMVMGALRRSLMLCSSSASAGVREPEQEEEWVTPPGGMQIGGPTDVRHASHVTFDRFIGFLDLPADLEPDVPRPVPSASFLHGIRRRPWGKWAAEIRDPSKGVRVWLGTYSTAEEAARAYDAEARRIRGKKAKVNFRDEAAAAGAQKPTATATTPTACASAARLGPPPPKFRADEVFGNMNGGNNDLFMIMFTFSDSSSKVVRVEPGEGAAGFLPAVEVLDDEPLLPGSKRSAANMMLLSDQSSDSYGSCDLGWDWDDDTMTSDYASVFAPAAPSNVVPAWYTQGGPVSKRTRSSYGYGVAMLQQGDGAQAMPGGFDPETNYQYQPLPYVVESSPSDGVSTHDMDCLQMMRAGDVPQDGASSGGGGGGDIWSLDELLMAAVAY

SEQ ID NO: 73386 - protein, 80 aa, Zea mays
  Coding DNA Sequence Number=SeqID_30011
  Subcellular localization annotation: CTP_CleavageSite=46; ConfidenceScore=5.34e-01
MIPSPTHAVQRRGQLAAAQPSSHRPPPEAVAVATDPNSPASSKLLSAGTRRQQPSAPMPGGWIVSVYLISKHTPTGILIT

SEQ ID NO: 73387 - protein, 290 aa, Zea mays
  Coding DNA Sequence Number=SeqID_30012
  Homolog annotation: Hit_ID=Q5N9R6; Match level="QueryCoverage=83%, HitCoverage=27%, E-value=7e-57, Identity=48%"; Hit description =Transducin family protein / WD-40 repeat family protein-like
  Pfam annotation: Domain name=WD40; Domain location=132-182; Score =4.4; E_value=9.2; Accession=PF00400.23; Description=WD domain, G -beta repeat
  Pfam annotation: Domain name=WD40; Domain location=200-245; Score =34.6; E_value=3.6e-07; Accession=PF00400.23; Description=WD domain, G-beta repeat
  Pfam module annotation: Pfam domain module=WD40::WD40; Domain location=132-182::200-245
MSIFPYSRTQLRLMDPVDWLDFVTGSWTEKNKASKDVRADRCCAADRLAKRGLDHPERVGGFIYDGNEVDLDASKDADFSMEPCSKSKKKSLKKTVKPRDEVVAVNGRNSTGNVKASLSSNEQNKSLPLITAKQYACRAAHLSSLVVSWSPVVSLSDRTSCLLRHWCILAVGSKSGNISFWKLYKPEYYTIDAGVVTSDPMLIGVLHAHESWVNAITWQVLSAGSSKSSLLLATGCSDGSVKIWLGNIEGLNQCAIGEEVPFVLVAEVAANLSAPVSSISLGIPARSQHE

SEQ ID NO: 73388 - protein, 259 aa, Zea mays
  Coding DNA Sequence Number=SeqID_30013
  Gene Ontology: Mol. function=catalytic activity; Cellular component =cytoplasm; Biological process=cellular metabolic process
  Homolog annotation: Hit_ID=A7NYA0; Match level="QueryCoverage=98%, HitCoverage=95%, E-value=4e-69, Identity=48%"; Hit description =Chromosome chr6 scaffold_3, whole genome shotgun sequence
  Pfam annotation: Domain name=3Beta_HSD; Domain location=7-214; Score=- 131.5; E_value=0.038; Accession=PF01073.10; Description=3-beta hydroxysteroid dehydrogenaseisomerase family
  Pfam annotation: Domain name=DapB_N; Domain location=6-109; Score= -39.4; E_value=0.099; Accession=PF01113.11; Description =Dihydrodipicolinate reductase, N-terminus
  Pfam annotation: Domain name=Epimerase; Domain location=6-187; Score =19.0; E_value=1.4e-08; Accession=PF01370.12; Description=NAD dependent epimerasedehydratase family
  Pfam annotation: Domain name=NAD_binding_4; Domain location=8-171; Score=-76.7; E_value=0.00082; Accession=PF07993.3; Description=Male sterility protein
  Pfam annotation: Domain name=RmlD_sub_bind; Domain location=4-255; Score=-186.2; E_value=0.067; Accession=PF04321.8; Description=RmlD substrate binding domain
  Pfam annotation: Domain name=adh_short; Domain location=4-155; Score=- 58.7; E_value=0.09; Accession=PF00106.16; Description=short chain dehydrogenase
  Pfam module annotation: Pfam domain module=3Beta_HSD::DapB _N::Epimerase::NAD_binding_4::RmlD_sub_bind::adh_short; Domain location=7-214::6-109::6-187::8-171::4-255::4-155
MAGETVLVTGASGFIGSTLVRLLLGRGYNVHAGVLNPDDGAETEHLLAMAAGAGAGEGRLRIFRGDLLDDAARGCSGVFHLASPCTVDPVSDPQVWYPVSKTLAEKAAWRFAEENGLDVVVVNPMSVLGQIIPPTINSSMSVLLRLLQGCTEEYKDIWMGVVHVEDVALAHLLVFENPSASGRHICAESISHLSDFAAKLAELYPNNKVPKFPKDTQPGLVRAEAGVASKKLVELGLQFSPLEKIIRDAVESLKTKGCN

SEQ ID NO: 73389 - protein, 411 aa, Zea mays
  Coding DNA Sequence Number=SeqID_30014
MPNLEELQLLMDYEGYCLEAVSGFFKLIPLPVLQRLFVRLHIDHKREGEGSCGCSASSWISPLSSSSWCIGEGVERGKHYRVPAQGRRYPEPSTHEVHPGKPFDGDDAEHMQWIYSEIGNDASQFVGPLVLNLLIKCIDPRTYCAIMRILAHLYYVLCTNILCFFLFRCDGEIDVELKHVRDAVAKKGQALHEEQDMVKKVALATLDILSVGASRSGLSSSRATAAASHGLALATVASSSPRSAAPAPSPSNCRQRQRGRPSALRSPNRPPRQVKLDQVCYCTRWIKNNNFWACSAGVYLETSCNYLHMSMFVCLLKSLAKSIRHFCPEGALLLLCPDCFSSPSVNPVPQVNRKSSWVIAVSDSSTHRASNASDSCVSLPPFSWASLVSNEVHWRFAIYVPWHRTGTYLVS

SEQ ID NO: 73390 - protein, 106 aa, Zea mays
  Coding DNA Sequence Number=SeqID_30015
  Homolog annotation: Hit_ID=Q10EW2; Match level="QueryCoverage=79%, HitCoverage=15%, E-value=1e-25, Identity=70%"; Hit description=Auxin- regulated protein, putative, expressed
MRRPGSTIRWSNSVRLKSPKLIFRILKEEDVGARACLKLRPVSVLMQLITCGSLSVKDHGNAGVVQMCKPRFPNLRLLPSPLISRTMMMGELDCLSENPKLMGIKL

SEQ ID NO: 73391 - protein, 88 aa, Zea mays
  Coding DNA Sequence Number=SeqID_30016
MSHGTVDLWGSDRQLGSPPMTSVVIRADQRQDSRPENEEESEVTEEKTPPPSESQAGNCFYFDICGSEPDSPVNEGKPRCMQPLSLCF

SEQ ID NO: 73392 - protein, 153 aa, Zea mays
  Coding DNA Sequence Number=SeqID_30017
MNALSREGCRHFEVFNQADEDFERDIYKVEDPVVKESAGAIYDRMWGPHGREVVRERAETARAQAARGEWVDDFGALNSALPDPEPTPAEAVSGVALEPTPEAAEDAPEAPASAAAGEDLPPKVAEGAPDAPAAAAPSAEGSRFWACARNRYY

SEQ ID NO: 73393 - protein, 736 aa, Zea mays
  Coding DNA Sequence Number=SeqID_30018
  Homolog annotation: Hit_ID=Q6J9V9; Match level="QueryCoverage=7%, HitCoverage=28%, E-value=1e-09, Identity=51%"; Hit description =Putative uncharacterized protein
  Pfam annotation: Domain name=Extensin_2; Domain location=333-713; Score=-135.3; E_value=0.053; Accession=PF04554.4; Description =Extensin-like region
MAPPVDVIGPWCPRLGDVEALLRSRSSLSSEVEVESEPLGRARQRPSAEARAQSEPWGRAKRSSSSSGAEPESEPWVGRSGVRRLLGLSLSPSPGVGRSGVRRLPGAEPESEPWGRAKRSSSSSGAEPESEPWGRAKRSSSSSGAEPESEPWGRAKRSFLWRLRPGLAAISLTLSSGTAVGAAQSALSSCQTGQWSGEATFALNAPTIWSVGVAIWPRLLLGEDWASGEPKLYADGGYQLRIRSLEGTPNYGPRQQGRRRLWRAKRASFHLHHDDRVKKGTVKGDIAKGILLREGSEPRALLLIRGSKAGPSEGFDSHPRALGLRDDSGYVRYMAEARAALPRSRPRLPRDAISPRPSLASGENSSPGRIHASPEGLLKQRAHPRLARSPARAGFVVKQPWPNRLTNRPYRRRIQCKDRLTPYPDTRASDGKVEPSSASSATGSSASPDLRPRPQKEVSASPDPRARPQPRPRKEVSASPDPRARPQPRPQKVVSASPDPRAQPQPRPREESRPRPTSASASGEGNKTGVPSGLAPVTSNDGSPRAPMTMVVLSPLRKQGDGPPGVERKVGPLAKKCGKASKRVPTFPLRLGGYYRVPYIGVPPTLLNTAGFVVKQPWPNRLTNRLYRSHFALSLTDLTGKQCRSPAPTVVPPARVRLTIAKFSLKLNRRSPPRPTPMLGLNLGLGRRSPPRPTPGLDLNLGLGRWSPPRPTPGLGLNLGLGRNRVLARPRPRPQG

SEQ ID NO: 73394 - protein, 414 aa, Zea mays
  Coding DNA Sequence Number=SeqID_30019
MDSESPLDPYDVNITRGGPPSIDGHSASLTPFVHDVAAQICYQEVESHLTASDDGDRSDIREADVRAPAPDDRLLVSLDGICQEGSCLISTDSDAATDVRIRQIKGDTGARAPRVIALESYAVAADVNTDSPLCQIEEDDPASLPSLESPWSQYTRRDGSGHPNAYGAVDILVPVKCVLHEPPHSGYDSSLDDDPKSPVTYFDAPLNRAIGCVGHALVATAALRNSVVGIAGHGLLAWVVAAGSKLATCSNTTTTTSTSVEPLLPSHHDGGRSSDSVWTGMQSTELDGEFSPASAFDQFHCVPTKKTDMLLSYYLPKPLAVSEEEKAVQEKFKEMVNECIDLLVCIPAEKRRPLFLVFSELYLRWSAEWGCAKWWMALQIIEKLEIVRKMVSSACDGTPLGSETVFARKNQGRG

SEQ ID NO: 73395 - protein, 293 aa, Zea mays
  Coding DNA Sequence Number=SeqID_30020
  Gene Ontology: Mol. function=catalytic activity; Cellular component =cytoplasm; Biological process=metabolic process
  Homolog annotation: Hit_ID=Q9XHH0; Match level="QueryCoverage=47%, HitCoverage=65%, E-value=6e-67, Identity=94%"; Hit description =Acetoacetyl CoA thiolase
  Pfam annotation: Domain name=Thiolase_C; Domain location=191-291; Score=134.3; E_value=3.6e-37; Accession=PF02803.9; Description =Thiolase, C-terminal domain
  Pfam annotation: Domain name=Thiolase_N; Domain location=22-184; Score=-144.6; E_value=0.0017; Accession=PF00108.14; Description =Thiolase, N-terminal domain
  Pfam module annotation: Pfam domain module=Thiolase_C::Thiolase_N; Domain location=191-291::22-184
MPEHCGDGAGPGSDGRCGRDAVHAAHGVRGGGPAVVGRRRGEELFHRGNLSSDSVGGLTLALPHEGHVPQTCLSRRVLRAGSGEGGDSVSRVGNRWRRRLVDDRMWIDDQRRGGVGGGGSFGPLTPTGTAPATAARAEAALAAFDPVKLKKLRPSFKENCGTVTAGNASSISDGAAALALVSGQKAQELGLQVLARIKGYADAAQAPELFTTTPALAIPKAITNAGLESSHVDFYEINEAFSAVALANQKLLGIPSEKTNVHGGAVSLGHPLGCSGARILVVLELQLNDDANV

SEQ ID NO: 73396 - protein, 238 aa, Zea mays
  Coding DNA Sequence Number=SeqID_30021
  Subcellular localization annotation: CTP_CleavageSite=45; ConfidenceScore=5.68e-01
MSGPPPTTTSPPSSSTPPPVASTPALASPARADPHPISRSPGGCRSRSFRGGHHRLPLHQFSTARVHVPNHPSVAATCIADATGIGPVPPSRLDSPTQRCCGTMPAYSSVAHAAIAFPYSIIRHGYGGTPVHDAFAANTDCDIRRSHPSEMPVPLPHLHATITIANSIVCPLINDGAEIHDGNVSFTNPVVHRPMPMPQQQHCDDVFYGGVDGIRASMSQEVRRQMLEAALVAVDPGT

SEQ ID NO: 73397 - protein, 147 aa, Zea mays
  Coding DNA Sequence Number=SeqID_30022
MLVDYNNGPTQQGIKSVVEVTPTSGVTSDGSRDPSLRLRLLRELRAVARTATGVVIVSISVKVSSSSRDALRWCRGHLLAKVQGKAVSQTPPPAEARGKSPAAPAPAPSVGAPAPRAGDDTVSPSDWTDLAPCDAVDAPLSEKAKMG

SEQ ID NO: 73398 - protein, 62 aa, Zea mays
  Coding DNA Sequence Number=SeqID_30023
MTFLYQTPISLKFSEFREGKNEEESEVTEEKTSPPSESQAENCFYFDICGSEPDSPVNEGKP

SEQ ID NO: 73399 - protein, 90 aa, Zea mays
  Coding DNA Sequence Number=SeqID_30024
  Gene Ontology: Mol. function=catalytic activity
  Homolog annotation: Hit_ID=Q6ZKL8; Match level="QueryCoverage=62%, HitCoverage=10%, E-value=7e-09, Identity=52%"; Hit description =Putative uncharacterized protein OJ1118_A06.15
MATGGAHKGRDVKERKEKVEGRIIGNGVGNLACMFTRQGKKGTNQDAMVVWEDNSKDGLAMEQATSPSGMEAAVGRALEPPPVPETMESH

SEQ ID NO: 73400 - protein, 83 aa, Zea mays
  Coding DNA Sequence Number=SeqID_30025
MIKNSRTYAIVIRKIQWTLDYFCTTVKIVTTLEYQNCNLADGEYVLIPEQGVAQEEVQEPAPELATEDLLAAPAFEGKPRFYA

SEQ ID NO: 73401 - protein, 94 aa, Zea mays
  Coding DNA Sequence Number=SeqID_30026
  Subcellular localization annotation: CTP_CleavageSite=28; ConfidenceScore=5.16e-01
MAARVSRSTFTDGRARVADGSRPHRRCRAQLNRSASYGKVLGSRWRLASLAGHGRGRDYGELATVARLRRRRQVARRSPELRAGSGKLGAVRRG

SEQ ID NO: 73402 - protein, 105 aa, Zea mays
  Coding DNA Sequence Number=SeqID_30027
MASRICQKSATPVFGPKGFLRPRVARPSPWPLTESRMTPIQVGDDDKYITPIQTMDGLTTRASARKLNHQLTLGAMDVLMIRNFGDDHEELGKGQGVKEKQQGRP

SEQ ID NO: 73403 - protein, 261 aa, Zea mays
  Coding DNA Sequence Number=SeqID_30028
  Subcellular localization annotation: CTP_CleavageSite=37; ConfidenceScore=5.24e-01
MGTAGQSAAGTDIAVGVTEGGLAVITSANTRRRRAIRQSSFGPTCSTRPHHVDGSEAATWPEKMIYSKVSTVGPDPHGKVLDPCIYKSRTPGMVQDLHVGKPNLSDGIRTPLYGVLAAHSGIPGLWDREYLGLNQVQAGVQSRHVSRPYHVCFRSPPRRRPDAATWPTTRDVSQWAEPDVRPLGRATFAFIADKARRLSIPLADGDQTIPQAACMSIPLADDTAGAFRHPAREFPLQQAPTRYTAQQPNRWCRSTKTESER

SEQ ID NO: 73404 - protein, 68 aa, Zea mays
  Coding DNA Sequence Number=SeqID_30029
MSSLGQSIHNNPNGIMVPGGIGQSYDKVHANVFPFPRWVHGELGKVSFIQYLRSELRVLGNNQSISKP

SEQ ID NO: 73405 - protein, 71 aa, Zea mays
  Coding DNA Sequence Number=SeqID_30030
MKYNGSSSLISCEKQTIQIEFLSLQVTALVPTITGMGDHVSGRVRGYVCGQVHLGTRLTNLPYFSDLITLC

SEQ ID NO: 73406 - protein, 253 aa, Zea mays
  Coding DNA Sequence Number=SeqID_30031
  Gene Ontology: Mol. function=endopeptidase activity; Cellular component=proteasome regulatory particle; Biological process =proteolysis
  Homolog annotation: Hit_ID=A3BJ58; Match level="QueryCoverage=94%, HitCoverage=41%, E-value=1e-100, Identity=71%"; Hit description =Methionine aminopeptidase
  Pfam annotation: Domain name=SAC3_GANP; Domain location=48-223; Score= 66.1; E_value=1.2e-16; Accession=PF03399.7; Description=SAC3GANP family
MDPKMTEVTQMFARFKAAYTRNDLDACVTLLSQLKVHLTKFPSLPPSFEQTPKAVEELKLASKMALGLMGTFMSMLLFLSVKLEDQDAFERDFCQLKPYYMDTCGIIPPSPEEYPILGLNLLRLLVQNRIAEFHTELELLPVKALEHPCIKHAVELEQSFMEGAYNRVLSARQAVPHETYVYFMDLLAKTVRDEIAGCSEKGYDSLSEHPEWELKNGAVFFQKAKESQPYKEIPSLQLINQTLSYARELERIV

SEQ ID NO: 73407 - protein, 115 aa, Zea mays
  Coding DNA Sequence Number=SeqID_30032
MKEKSTEELLPTVRATKMLVHFVQQLGPPANLPSCPTEVEHYWGPSSSEGPQKRNLTIFPKYDLWTDILGFMVKADMMRSLIVTKVVVALTLCGRELWLNRRKLFPLWEKAVQSS

SEQ ID NO: 73408 - protein, 173 aa, Zea mays
  Coding DNA Sequence Number=SeqID_30033
  Subcellular localization annotation: CTP_CleavageSite=66; ConfidenceScore=5.37e-01
MNVDEGEWFGGHVTTRFGRGSCTSPASRGTGAVVGGRRGTNSSEAPRTPVTTVMNSGEQESERSVREREFGEERGREFDHIYRERRGSVGVIIAAIDGVHHWERAWAGLSARWGFVARRGIGSRLGASVLRAVEAAGRAGSAGWSRTRGLGGWRWVRGRDRDRDRVLAALGFL

SEQ ID NO: 73409 - protein, 51 aa, Zea mays
  Coding DNA Sequence Number=SeqID_30034
MTKTKTISNYICTFGLAEGLFEVPFHNKLGEGVSRTFDTPLDYSFCGLSSS

SEQ ID NO: 73410 - protein, 311 aa, Zea mays
  Coding DNA Sequence Number=SeqID_30035
  Subcellular localization annotation: CTP_CleavageSite=51; ConfidenceScore=5.23e-01
MAANAAKGGPAVMTVADAREQRARRQPSSRPIRGQRESPLSWCEDNAPVIRSSSGSRTPNGCPANYSPRRINSAAGQVALLARATGDASPSPKQPHQKRLAPEGFTVAPDAERGMTRAHRRHHVRCPSRRLGGCSRKPGSGRTVDSVNIPARELGPRPYTRATASSHEGTTRPAEALRKALRPRRSETTPPRPRGLHPVGALARTHRNQMQPRKAGPLAKKCDESLQASANTPFEARGLLSGTIIRGTLKTPNSQLVTAISIKLQRPDGARTRAKPRKTANSAPPDLGLGLGLSPGRRRTPLRPTQGSDSG

SEQ ID NO: 73411 - protein, 251 aa, Zea mays
  Coding DNA Sequence Number=SeqID_30036
  Subcellular localization annotation: CTP_CleavageSite=45; ConfidenceScore=5.13e-01
MQPGRTPPPAVTQDGDLRLDGGGKRAGLRPLPLPRPQGFSSSRPRWRMRRVGGLPPWGSVALFFPGRLGENDILQLHGDFLQPCRERRAAVTQPGRSTTSFVRMTVAPAASSLGARVVIAVAGLGGGGPPVGPRSFRGLPNLVGLFVPMGTGPEFRLRRHFECRSGWHPREMVGRGPRGDRPSRLLGSDSRRSPRQRLPERGDDVVLRSGEPRTASPPEARSGLAGGVVDAEGVAALFQRQDPSLQGQSVL

SEQ ID NO: 73412 - protein, 152 aa, Zea mays
  Coding DNA Sequence Number=SeqID_30037
  Homolog annotation: Hit_ID=A3AJE1; Match level="QueryCoverage=31%, HitCoverage=27%, E-value=1e-07, Identity=52%"; Hit description =Putative uncharacterized protein
MALFSQSLLSLGAPDCPVVHRTVRWCTGQCPVRQAGSSKLAALGNSPATYDYNSPDCPVCTGLSGALRYVPPVIDAYLGAKIYGAESLWKFRKGPLTGTAFDPLPLPSGVPVPMCFCGDPCKVDKSEDHDTYRQRYWMCANFAFNQLLFNVG

SEQ ID NO: 73413 - protein, 262 aa, Zea mays
  Coding DNA Sequence Number=SeqID_30038
  Gene Ontology: Mol. function=small conjugating protein ligase activity; Cellular component=intracellular; Biological process =regulation of protein metabolic process
  Homolog annotation: Hit_ID=Q5NAX2; Match level="QueryCoverage=76%, HitCoverage=52%, E-value=6e-65, Identity=62%"; Hit description =Ubiquitin-conjugating enzyme-like
  Pfam annotation: Domain name=UQ_con; Domain location=20-154; Score= -13.2; E_value=0.00031; Accession=PF00179.17; Description=Ubiquitin -conjugating enzyme
MAGSMVDRATSDMLISPDWAKNMEICDICNRDPGIIIPPWNRFLAMPGGNVGGTVWLCSMLLAPVKVYYHSGRLRLNPNLYESGKVCLSLLNTWWGKGCEKWGKSSSTMLQVLVSIQGLVLNDRPYFNEPGYKNSAETTGGERCSLAYNQTAFVRSCKTMLYSLRKPPMHFETLVLWHFHEHERAILDACRAYMSGTVVGSSAGTGSNRRYVHDKCFAEFHKSLMLYTEHLRAEFAANRRRVMELETEDEIVPSIAASVKSC

SEQ ID NO: 73414 - protein, 203 aa, Zea mays
  Coding DNA Sequence Number=SeqID_30039
  Gene Ontology: Mol. function=nucleic acid binding
  Homolog annotation: Hit_ID=A2X2U6; Match level="QueryCoverage=53%, HitCoverage=23%, E-value=1e-25, Identity=54%"; Hit description =Putative uncharacterized protein
MTPGRKTTAKSTKPTEVPLTEYEKLRAENLMRNNQKLQRLGVTTLASILNHTSAKSKVDTREKSGSFYEVQEGALEATIDPNGKRNRSMGRELDRISRGLCTNIPIHIAEGKIRPEAPMQAAKLASEGGIILRQQMSILRHWKEYKKDKSIVTNYIGKVAAQFTMDTNNNAIKAACADLLKGGQRQMRYQLKKNISMGYQQIK

SEQ ID NO: 73415 - protein, 425 aa, Zea mays
  Coding DNA Sequence Number=SeqID_30040
  Gene Ontology: Mol. function=nucleic acid binding; Cellular component= nucleus; Biological process=chromatin modification
  Homolog annotation: Hit_ID=Q94BR5; Match level="QueryCoverage=91%, HitCoverage=38%, E-value=4e-83, Identity=45%"; Hit description =Putative DNA-binding protein
  Pfam annotation: Domain name=SNF2_N; Domain location=78-425; Score =37.2; E_value=6.7e-11; Accession=PF00176.14; Description=SNF2 family N-terminal domain
MGLCNVASRSSALMSTSTSDLPSPNAIFCDIKVEYDVEQKLFSSDERAVYEEALKHITQETKEEYLPKGVMSVLLLKHQKIALAWMLSKENCSHCPGGILADDQGVGKTISTIALIQKEMVKQSRFMTAGSYSTKFVPNSDYDNGSDVVISMDKKEPKDEPLNELDGSARLHVASSLKLCDSKPNTATDKAEPKKKARVRYSASNLRLKTRPAAGTVVVCPASVLKQWANELFVKVMEDNKLSVLVYHGSSRTIDPNELATYDVVVTTYMTVANEVPKENSNDERKKCEMDGICPEISIGSKRKKQSKPKKKNKPSNSEGGPLAMVLWFRVVLDEAQTIKNYRTKVSRACCGLRAQRRWCLSGTPIQNKIDDLYSYFCFLKYEPYSKFSNFKYMIKHQITRDSVRGYKKLQAILKIIVLRRTKGK

SEQ ID NO: 73416 - protein, 485 aa, Zea mays
  Coding DNA Sequence Number=SeqID_30041
  Homolog annotation: Hit_ID=Q6J9V9; Match level="QueryCoverage=13%, HitCoverage=33%, E-value=5e-08, Identity=46%"; Hit description =Putative uncharacterized protein
  Subcellular localization annotation: CTP_CleavageSite=23; ConfidenceScore=5.22e-01
MVAFQGGHPPFKGDSPYLRPQPSWAESSPTRSKVLPLRRGGWVPHVLQTGPEQKKPNRRARCMQPPSGYGHSSTFAQTSGRKGGQPCRRHATTPSGRAPPTSNAPSMGPHAHASCNRRAGRYVQATAPPLAPLPRLLDCGTSTTTRGNPAYDLAVPARRDGQYGQKWAGSNGGGRRAGAAVTGSERRFAFAMMTASKKGPGKGDTPKRILLREGNRLRASLLIRGSKAGPSEGFNSRLRARGLHTHYWSEVRRPAPRKGSTAASGYSGSAPTTDQGDEHTSGSPEAQSSPRSNPGQIAMPTDQIAGAFNAKGSDSGSAPEDGELRSARPRARTRAQPRKTANSAPPDPGLGLGLSPGRRRTPLRPTQGSDLGSAPEDGKLRSARPQGLDSGTAPEDGKLRSARPQGSDSALASADGLCLARPRDSDSTSATEDRLDLDLGGASTSPNLGCGPTMSTGGAIITLPQADSGYGEQDRRPIWLAPSDK

SEQ ID NO: 73417 - protein, 960 aa, Zea mays
  Coding DNA Sequence Number=SeqID_30042
MTSYGGQPSVEVFAKYYCLHWQKRMIGDEVAQFGSCTFTPKTGKTTMQVVELVPCARNKWGNWNEFWFYVAEGTVENHEGLPVSEMCSHFYSAYPPFEVAEEDADEGALRCAAGLSSGRDLVEEFVAYGVWPLAHGWALGEVCPRQMPFHGGRVVRSPAFVLNLQSRDPAAFVHEAEDGAVRLVGRYVPRTEGQRSWDIRGSNDRLNRVFELNQLPYDGYPGQDDVDRRGKKPVVETRDDPASAAAPSSKKRKLGTAMGGLGVSDGFARELMRTCAAPGGRMSSPELRESSARMLRVTGGCWPRNVPIPRAAGEDFFTSRMVCEWSVFPYGRNIAAVVSAVMDKDRQGAAQKRQAVVRLHEARPKRQWGAAKAAAPSGGKPPLAAKSGVPASSKAPEAAAGAGGSKSTKAVPPSGRVSEVAKAARELPSSGKHVADFATDISVEDYLGGSDEGQLAIVAPAAATMAAAVVPKAKGDALSAGGEMSALAAVRDEAGAASCRLKEVADFANRTASGGPHGQLCLSKSRDFGRNMRTPSVKNRPPTVEANLARAKGNLAREHAEQLQERLIALESRVERAEAATRAEAERTRKQLMDSYHKLGARTGDFEVPDRESGLRCLEWVQEELQALPTIVEGFMSYASLVTSEGAMNALSREGCRHFEVFNQADEDFERDIYKVEDPVVKESVGAVYDRMWGPHGCEVVRERTETARAQVTFGVCLAFAGCGLCVGADPGGGRVRGRPGAAPETAEGAPDTSASAAAGGDLPPETAEGAPDAPAAATPSAEDPATVAAEATAEATVEASQVQDFGPAHATATTKFLAASTVDGGNECDGSASEFSDFADSGSSVEWTEESSEEDLDYFAALDVAAVEASPHAADTEDVPGPSAGRRRRRAVAKRRVSGAEGGQLRVSRAGRQELLSLPAAVSTGEGELRSLFAGLYDEVVCPRLSMPAVGDLFSNALN

SEQ ID NO: 73418 - protein, 122 aa, Zea mays
  Coding DNA Sequence Number=SeqID_30043
MPGEAADVAAAPSPPDLSSAPASTPAGAVADSPAEPPVTADVGMVEAPPPVVIPDLPVLDHEERVVVVAEVGDRRPATLAEERPSTSTAVVPDASAAGGPDASVEGRAESWPVLGSSGLIPT

SEQ ID NO: 73419 - protein, 506 aa, Zea mays
  Coding DNA Sequence Number=SeqID_30044
  Gene Ontology: Mol. function=ATP binding; Biological process=apoptosis
  Homolog annotation: Hit_ID=Q7F1U5; Match level="QueryCoverage=98%, HitCoverage=84%, E-value=6e-78, Identity=36%"; Hit description =Putative uncharacterized protein OJ1119_A04.111
  Pfam annotation: Domain name=NACHT; Domain location=197-341; Score= -40.7; E_value=0.09; Accession=PF05729.3; Description=NACHT domain
  Pfam annotation: Domain name=NB-ARC; Domain location=150-436; Score= -82.3; E_value=5.1e-05; Accession=PF00931.13; Description=NB-ARC domain
  Pfam module annotation: Pfam domain module=NACHT::NB-ARC; Domain location=197-341::150-436
MEIFLSAVLGELASRSINLLISRRSARPTALDVGDSLQSALLRAQVIVDEAMGRHIANQAMLQQLDMLRDAMHRACYVLDTSRCQSHDEEDAEDQVVNHSLSLQKLTSLKGISFASNRKTPPLLEQLQESLQNLSSMILDARELVVFFRSYPPRLYSQPYSMHLLLGNCMFGFQMETELVINFLLHAEPPPGSEELDVLPIIGPSKVGKTTLVAHVCRNQRVRDHFSGILLLHDHDFADDGDDDISTTFGQRCATKLQLRMPDSNKDGRLLVVVDLVGDLGEAAWNVLYSTCKQRSMASRSKIILTSRSDKIVKFGTRPALRLSYVSSEAFWYFFKTITFGSTDPKVHPRLLHLAMDIAKMLDRSLIGANITACLLRENFDVHYWSKVRTFLRGLVQKHISKFGVHPAHLLEQDRPLQVGRMATTLEDLVFFYECQRSSQEEVPEMRFQDVMYGNVKAVGKFKALGWRSQIPPYYSYVISCQIIGQETARATKRKRSVRNRTNSFA

SEQ ID NO: 73420 - protein, 159 aa, Zea mays
  Coding DNA Sequence Number=SeqID_30045
  Homolog annotation: Hit_ID=Q6J9V9; Match level="QueryCoverage=49%, HitCoverage=27%, E-value=9e-31, Identity=87%"; Hit description =Putative uncharacterized protein
  Subcellular localization annotation: CTP_CleavageSite=78; ConfidenceScore=5.23e-01
MVVGSVLSHGAPDSPVRHWTLSGAPATSADRWGSTVGALTYGASGLSGAAPDRSCRLSGQATPPAGEAGTRLTAIMMTASKKGPGKGIFRKRILLSEGNGPRALLLIRGLKVAPFGVLQPPQSTRAPSPLLIRGSKDDPSEGFDSRPRACRVRDDHESS

SEQ ID NO: 73421 - protein, 294 aa, Zea mays
  Coding DNA Sequence Number=SeqID_30046
  Homolog annotation: Hit_ID=Q461D5; Match level="QueryCoverage=100%, HitCoverage=63%, E-value=1e-126, Identity=81%"; Hit description =Stress inducible protein coi6.1
MSRCFPYPPPGYVRNPVAVAEPESTAKLLKEKEKAEKKKEKRSDRKDPKQCETSKHSKHSHKKRKLEDVIKAEQGPKRVPKESVEQLEKSGLSEEHGAPSFVHTIRDSPESSQDSGKRRKVVLSSPSQPKNGFYSSQLDFTGNILRFKIKSSQDPQSAVLEKPRVLEQPLVQQMGSGSSLSGKQNSSHHKMNVRSTSGQRRVNGDSQAVQKCLITESPAKTMHRLVPQPAAKDTHPVDPQSAVKVPVGRSGLPLKFSGSVDPSPARVMRRFDPPPVKMMSQRVHHPASMVSQKV

SEQ ID NO: 73422 - protein, 111 aa, Zea mays
  Coding DNA Sequence Number=SeqID_30047
MSRAFDDYYIKDCGVILAPEGIAAKVWTYIRAVERSGLVGSDESEYSSDEEDSSEEDGGGDGEGDDDDDDGGDGGDDGGRGSRGGNGGSRGGSSRGSSGGGSSKGSNKASG

SEQ ID NO: 73423 - protein, 204 aa, Zea mays
  Coding DNA Sequence Number=SeqID_30048
  Gene Ontology: Mol. function=kinase activity; Cellular component =ornithine carbamoyltransferase complex; Biological process=amino acid metabolic process
  Homolog annotation: Hit_ID=Q6QP54; Match level="QueryCoverage=72%, HitCoverage=39%, E-value=1e-09, Identity=47%"; Hit description =Putative kinase
MGQREMEHKGENSKGNRGSCCPAPRADALARGRSEPKVGRGGDSSEVEAESKPWGRARRRPSSEVEVESKPWGRARRRPSSEVEVESEPWGRARRRPSSEVKVESEPWGRARRRPSSEVVVESEPWGRARQRPTSEVEVESEPWGRARQRFLWRLRPDLVAVSLTLAGGTAVGAAQAALFSCQVSQWRGEVTAVTSALSTEECA

SEQ ID NO: 73424 - protein, 161 aa, Zea mays
  Coding DNA Sequence Number=SeqID_30049
  Subcellular localization annotation: CTP_CleavageSite=69; ConfidenceScore=5.21e-01
MNIHRHSRCHYKRNLRLARPQGSNSTSTSDDGLRLTRPQGSNSTSTSDDGLRLARPQARTQPRPRTTVSASPDPGLGLNLDLGRRSPPRSTPGLGLNLDLGRRSPPRPTPGLGLNLDLGRRSPPRSTPGLGLSLDLGGVTTSPDLGLGPTTLQGGPSLPYP

SEQ ID NO: 73425 - protein, 149 aa, Zea mays
  Coding DNA Sequence Number=SeqID_30050
MNVNGNLQNGIKIQMGQIKTIEIKEAAEKGRNQKSKTVEKKRNINHRFMGILCRNSDPVANPPRTELPRGKNPDGHEMEKRMNSRPFSWAPSQLYWRIERELNCREDLEAGKQELGHGKQRRLKAQYMRDIPESDTVSKSAQSAPGVYF

SEQ ID NO: 73426 - protein, 144 aa, Zea mays
  Coding DNA Sequence Number=SeqID_30051
MGKNNKRKREPTPPSEDFGDSEYSEEEFSSESKGSPAPVSPPASSDDSDDSQGISAEVWSYIRAVERSGLEGSDESEYSSDEEDSPEEDGEGDDDDDNDDGGDADDDGDGGGRGGNGGSRGGDGGSSRGSGGSGSSKGSNKASG

SEQ ID NO: 73427 - protein, 36 aa, Zea mays
  Coding DNA Sequence Number=SeqID_30052
MGSGHSTCSVEAGYRGKEEGVEADLQEFQDFDEFED

SEQ ID NO: 73428 - protein, 92 aa, Zea mays
  Coding DNA Sequence Number=SeqID_30053
MDESVRNVFTSLLGLVIVSHLSPKESGRFSIQQLETQLEEERREHHEMEARMMAEREARLADHQRMAEMFQYMQSLWRRTGLRSATSIVPCS

SEQ ID NO: 73429 - protein, 93 aa, Zea mays
  Coding DNA Sequence Number=SeqID_30054
MHLNPAGSSASPDPKPRPQPRPREKDFTSPDLNLGLGGVVTLPDPGPRPQPRPWEKDSASPDLNLGLGGVAASPDLGLVSATLLGIHHYPTLS

SEQ ID NO: 73430 - protein, 188 aa, Zea mays
  Coding DNA Sequence Number=SeqID_30055
MTTSLVVERSEPGCGLPLPLASRMFIIRAGEEGEPSWGPAFRMGWRPASSSSVRGRRAFASLAEEVNFGYAGPADCRCRRPPRAWFPSLDGLNVASDAASCRLVGAWLSIHRTSDGRAVRSEDGSEDLFTHAGWPPFAGTALVRRWPLSSVLRWSPPLVRLPTAEVVASAGKTEDGGEDLFTAAYVLR

SEQ ID NO: 73431 - protein, 223 aa, Zea mays
  Coding DNA Sequence Number=SeqID_30056
  Gene Ontology: Mol. function=nucleic acid binding
  Homolog annotation: Hit_ID=A3BRS0; Match level="QueryCoverage=91%, HitCoverage=64%, E-value=3e-12, Identity=29%"; Hit description =Putative uncharacterized protein
MRIKNKFDESKHDGSFCASTSFGPCETNPLKEEEESGRWRPNDESTSPKGLSSHFDSHICCVANENDSESTNKDEEDERSFMQLYAHLSLEDKAVMLKLLKRAREQSEARQMLEDILSIKMLSFDELTKEHEELKCSHVDLVQSKTSFELEFLGTKDDTCQELKEENERLKMSLTQLKGKCTAQPSQDNRDHMVKKIDTGTTVACTKSLEENVKNLRIAKRKE

SEQ ID NO: 73432 - protein, 226 aa, Zea mays
  Coding DNA Sequence Number=SeqID_30057
  Gene Ontology: Mol. function=ATPase activity, coupled to transmembrane movement of ions, phosphorylative mechanism; Cellular component=integral to membrane; Biological process=phospholipid transport
  Homolog annotation: Hit_ID=A2YW15; Match level="QueryCoverage=19%, HitCoverage=4%, E-value=4e-11, Identity=77%"; Hit description =Putative uncharacterized protein
  Subcellular localization annotation: CTP_CleavageSite=64; ConfidenceScore=5.40e-01
MTAIAAKSSQGPPYTDHSPTALAPFGTTYSTSKYYLESSVVNKSLITPVNPTSTWGPLIFIFAVSATKEAWDDYNSGCSQYYFGETEALQPSRLRLVVLSYISYNCPFYSEAKLNWCCGYFVGTPLILNWLSHYPTDVKNYIRPGCVILTIYLQCMHHSSNLKAPTLTYTMLTPPPSITHSRKVAEDLCHTLLIRCRCSVSQSPGWAAISGAERLKFDDKAVKQPE

SEQ ID NO: 73433 - protein, 60 aa, Zea mays
  Coding DNA Sequence Number=SeqID_30058
METEAGAKELIAGSRRYLYGNRKVCCKRGFEKSLMKMLSHLPEIRSSIVHTPTIRGKKLG

SEQ ID NO: 73434 - protein, 176 aa, Zea mays
  Coding DNA Sequence Number=SeqID_30059
  Subcellular localization annotation: CTP_CleavageSite=8; ConfidenceScore=5.24e-01
MARARPTSAGLAMAALAVWLPGAGAFPGSAGASPGGLGAALYGARPPARASSQPARARDGLNGGMVPALRQPPRGPARTWHAATTNPTQRRHAALALQPGGAPVRAQPQCSNRRRGSVAPARAQRPPVKVLAIVTKEIRTALRADNVLNFSGNETQRMERMTASVCIPEIITLIYK

SEQ ID NO: 73435 - protein, 88 aa, Zea mays
  Coding DNA Sequence Number=SeqID_30060
  Subcellular localization annotation: CTP_CleavageSite=41; ConfidenceScore=5.13e-01
MSLASPANYVAGSAKELMRRDGRFVGRLLRVRRPFEERGTSASFLRHGRGLSRCFRKRWMITSLVVGRGKPGCDLRPALSFKDLCHPS

SEQ ID NO: 73436 - protein, 98 aa, Zea mays
  Coding DNA Sequence Number=SeqID_30061
  Homolog annotation: Hit_ID=Q6J9V9; Match level="QueryCoverage=88%, HitCoverage=43%, E-value=4e-09, Identity=39%"; Hit description =Putative uncharacterized protein
MTASKKGPGKGDTPKRILPREGTRPRASLLIRGSKAGPPEGFDSRLRSRGPYTHYWSEVRRPAPRKVSGTIIRGTLKAPNSQLVTPISMKLQRPDGCD

SEQ ID NO: 73437 - protein, 269 aa, Zea mays
  Coding DNA Sequence Number=SeqID_30062
  Subcellular localization annotation: CTP_CleavageSite=31; ConfidenceScore=5.12e-01
MAPRMLCDDGGSPLPYGSKRTALLEKVGRARTRTRTGARLEPLAPSPAWTLVTPYCKRTRPGRETNTKAAGFPPLSRRSPAASLSPLRARPRARPIWAGARGDIHSSAQGPPRSRNADKRVPRPPQATRAPRPLLIRGSKAGPRRVHNRLRRRARDDHGYVRYITKAQAALPSSPETPCSTPIEGNMALSPLLLAERRRRGICKKAESVPDRPLALCRGSGAALANPAPAEPLTASTYQPENLGPDRTPGLRPARMRERPDQLKRYARH

SEQ ID NO: 73438 - protein, 295 aa, Zea mays
  Coding DNA Sequence Number=SeqID_30063
  Gene Ontology: Mol. function=carboxyl- or carbamoyltransferase activity; Cellular component=ornithine carbamoyltransferase complex; Biological process=amino acid metabolic process
  Homolog annotation: Hit_ID=Q8SA97; Match level="QueryCoverage=38%, HitCoverage=21%, E-value=2e-18, Identity=49%"; Hit description =Ornithine carbamoyltransferase
  Subcellular localization annotation: CTP_CleavageSite=33; ConfidenceScore=5.22e-01
MNFLNFALGITGRVQNVTLVILRHGSLALNKVRQVLRGALSLTLSPLWKLSAFRDRGVPEPTSECRRVPQPRSVEREGELEGGRARRPETGVREVGIPRPSCSSRAQVGCKERIQVYNGGVMITPPIDVAGLRPRLGDVEAPPKPRSSLPSVAEVGSEPQVRVRRRSPAGAGAESEPWGRAKRSSSSSGAEPKSEPWVGRGGDRRLLGLSPSPSPGSGEAEVVVFRDLARVRALGRAEFAVFRDLARVRALGRAEFAVFRDLARVRALGRVEFAVFRVLARVRALGRAEFAVFWD

SEQ ID NO: 73439 - protein, 197 aa, Zea mays
  Coding DNA Sequence Number=SeqID_30064
MMVTRDRERGIPRKGSFPEKEPGSEPPTDQRIPPEGGIEPSDPVARGLGLADHPQRLGGCSRKPGSGRTVDSVNIPARELGTRPYTWAMASSHEGTTRPVEALREAVRPRRSETTPPRPRGLHPAGALARTHRNKMQPRKAGPLAKRCDESLQASANTPFEARGLLSGTIIRGTLKAPNSQLVTPISMKLQRPDGCD

SEQ ID NO: 73440 - protein, 148 aa, Zea mays
  Coding DNA Sequence Number=SeqID_30065
MTFYPLRSKRIKLTSVKEKSLGLLTQNFVKLFFTMEFHACVKCLFYPNRTHNGHTISGLLYPYYSIRPPPRAVQSAAGGALHDVLLGRAVMGDGADEEEAHNRFHRGRDRRQVEGGRPHAYQDEELPGLAGYGECVVSIAPPSLLADL

SEQ ID NO: 73441 - protein, 280 aa, Zea mays
  Coding DNA Sequence Number=SeqID_30066
MAVMGSTSGKDVPLPGLLTEDPLTGHMPRHGNAQQILYEGAGVISPLGADTLQGSDTRRRLRCEDNARHVPRGSASVVDSLWCDSRQGAASCVAMVAPSPPPPARRVAGTIGVLLFRRREMLSPSSPPPGESKTVVVVVPRGEEYHVIAAVKGHELETPEAEHRPGLKRLLKTPHLELNGKAFVNTQQAPTWRANCRRFGPGGSLDRRVKLSLRAPAQMGWRAMEHKRWDKPCIILHQGAARSRGYKHVARGKEREREPIRSLLPPREPPSRMALVLPFI

SEQ ID NO: 73442 - protein, 206 aa, Zea mays
  Coding DNA Sequence Number=SeqID_30067
  Pfam annotation: Domain name=F-box; Domain location=32-79; Score =18.2; E_value=0.031; Accession=PF00646.24; Description=F-box domain
MGSPLRLTTPMQIAAEDSDSGSSSSFVPPARDYTQDLPDEILALVFASLSPTDRNACSLTCSTPPRTTASPSTPVPRWCQAKTNNKSRSTTEFGLGRNRKLRLARPQAPASGGGLRLARPPDSTSTSVSGGIMSSPDPDLGLKRSLRLARPWARTNRANRGYIITLSLASSGYKERDRCPIWLTPATGNDGAPRATMTLVALSPLL

SEQ ID NO: 73443 - protein, 124 aa, Zea mays
  Coding DNA Sequence Number=SeqID_30068
MAAHRTVRCAHRQQPSPMTTIWLVAINTTPTGYFKVSPIHPPLGDFQVAPTPVIDTQAEDTTFHQFETQGATVPDDDDDDFGVPPPPLPPRTHDHEVVSSSGAAPAAPPAIDPALAAILQTLTR

SEQ ID NO: 73444 - protein, 131 aa, Zea mays
  Coding DNA Sequence Number=SeqID_30069
MAANLSTLTGARIAIVAEAENGKMSSFSAPSLGPIVDSFLSEEDEAGGAAARAPPQGPDDREKDAMARLQRELAELEEKKAAQEQRAADSLARVKAIRDGSRMGKLIVCSKDAAPTHPVVAALFFDGASST

SEQ ID NO: 73445 - protein, 144 aa, Zea mays
  Coding DNA Sequence Number=SeqID_30070
MTNSKILDIHDFVKKVSAGLLTASCGRGRHDRSCFRGQSVLYSYTGLIAHCFRGQSERLLPYGVAVTPLLVLNSYNLCYSIYRPCWSKGYIRPCQREILVLIGLQLTIPIILRRSIAYFLCNNKNVSAFELLKPSKITEFLTQA

SEQ ID NO: 73446 - protein, 122 aa, Zea mays
  Coding DNA Sequence Number=SeqID_30071
MAEERQPPRGCAPPATARRRQDRQCHRAGNKERELPGSKIAEGEGTLPMYSLESPLHFNPIRAMIERWDASSVYAGGSAAADGARASARGSGILLLGLGRGRKPFAVGSTIGRFGLNLGVAK

SEQ ID NO: 73447 - protein, 25 aa, Zea mays
  Coding DNA Sequence Number=SeqID_30072
MAQREARGKEVDIYTQAGGPGMLFL

SEQ ID NO: 73448 - protein, 92 aa, Zea mays
  Coding DNA Sequence Number=SeqID_30073
MAQREARGKEVGIYTQAGGPVAIGFAAMFASEPEIVCRVCYASRERADHLGPPISGRTGRARNPVDIDRWPLDVGARHCWAARGDFSGGPNS

SEQ ID NO: 73449 - protein, 491 aa, Zea mays
  Coding DNA Sequence Number=SeqID_30074
  Gene Ontology: Mol. function=hydrolase activity, hydrolyzing O -glycosyl compounds; Cellular component=integral to membrane; Biological process=peroxisome organization and biogenesis
  Homolog annotation: Hit_ID=A2YHX0; Match level="QueryCoverage=91%, HitCoverage=91%, E-value=0.0, Identity=75%"; Hit description =Putative uncharacterized protein
  Pfam annotation: Domain name=Aa_trans; Domain location=37-479; Score =464.8; E_value=1.2e-136; Accession=PF01490.9; Description =Transmembrane amino acid transporter protein
MVSERQQAAGKVAAFNLTEAGFGDGSDLLDDDGRERRTGTLVTASAHIITAVIGSGVLSLAWAIAQLGWVIGPVVLLAFSAITWFCSSLLADCYRAPPGPGQGKRNYTYGQAVRSYLGESKYRLCSLAQYVNLVGVTIGYTITTAISMGAIKRSNCFHSRGHGADCEASNTTNMIIFAGIQILLSQLPNFHKLWWLSIVAAVMSLAYSSIGLGLSIAKIAGKLMHGSYCGVHVKTSLTGAAVGVDVTAAEKVWKTFQSLGDIAFAYTYSNVLIEIQDTLRSSPPENVVMKKASFIGVSTTTAFYMLCGVLGYAAFGSDAPGNFLTGFGFYDPFWLIDVGNVCIAVHLVGAYQVFCQPIYQFVEAWARGRWPDCAFLHAELAVVAGSSFTASPFRLVWRTAYVVLTALVATVFPFFNDFLGLIGAVSFWPLTVYFPIQMYMAQAKTRRFSPAWTWMNVLSYACLFVSLLAAAGSVQGLVKDLKGYKPLFKVS

SEQ ID NO: 73450 - protein, 244 aa, Zea mays
  Coding DNA Sequence Number=SeqID_30075
MAERRENGTEAQGDGRHGLFGLCVWAENEGTPRSPGRGYAPQVSSAEPRTPSRPSRGRSAPYRAQLRLALLAAWPAVRLRWRMSCLGPVTAWRTPAAVRPTPGARVPSLVRASCACCVEKCLRAATRPTGSRARYTLPSSSSPPGVRLVGSRAPAAFASCRRRPMAGGTEDTSLALLVSDVAHAEGRRRVGVTRPRIGPPERTTSSPARRLRAEAGAGPSARTCYLVDPASSHMLVSKIKPCMC

SEQ ID NO: 73451 - protein, 263 aa, Zea mays
  Coding DNA Sequence Number=SeqID_30076
  Homolog annotation: Hit_ID=A2YHW7; Match level="QueryCoverage=98%, HitCoverage=56%, E-value=2e-62, Identity=53%"; Hit description =Putative uncharacterized protein
  Pfam annotation: Domain name=DUF1005; Domain location=88-263; Score =249.7; E_value=6.4e-72; Accession=PF06219.3; Description=Protein of unknown function (DUF1005)
IRSQTPEGLPVKGRHRDNPIYLAQIFPAQQHTTLPSRSVQSDSGAVGPRNWLAKLWSERERERAGKERKGWSVTVHDLSGSPVALASMVTPFVASPGTDRVGRSNPGGWLILRRRVDGTWTPWGRLECWRDRGGSAGDAQLGYRFELVPDHNSNVTGSGVCVAESGVPAARGGRFAIDLTTAGSPGRGSGELSRHALWPPGGFVMSAAVQGEGRRGRPSVEIGVAHVGCAEDAAAFVALAAAVDLSMDACRLFSCKLRRELSA

SEQ ID NO: 73452 - protein, 375 aa, Zea mays
  Coding DNA Sequence Number=SeqID_30077
  Gene Ontology: Mol. function=metal ion binding
  Homolog annotation: Hit_ID=Q6ZLM2; Match level="QueryCoverage=40%, HitCoverage=24%, E-value=8e-25, Identity=46%"; Hit description =Putative uncharacterized protein OJ1118_D07.2
MAGIGEAAGTKEREHIYPPIMMKGGSKKEVAGAAAVVAILLVLQLMAAPPTAMAARSPRGAVPDGSLATTPKSANRSTRLYHERRHDEHDVRTVREREDRARSHAQSALLRRRLTRRSGQAPDSAAYYNYTEMKLHPRTIPLLLLRRLLGLPDLDRSVKIPPAVKACILDDAVARDIGVGQPLSNGRSSLLRSRVGGERFLWACCSGSSSTTAGTSGIILTWHIATCILEVRHPYQCGGGGCQEQLNRHKIAATHLSRYCAYLMAWYPDLLPDHEEWSTALYETVKDDARRALAGCSAGCAAVLGPEAEYVSRPVIQSLSVYSRHEGLRKGVVLGKQLVELMEGEETAWMVLAEFWSEMILYVAASDIALHGVVS

SEQ ID NO: 73453 - protein, 243 aa, Zea mays
  Coding DNA Sequence Number=SeqID_30078
MEKEENKRKRKRNTIPGWANNLNSAHLTNLTRAAHLAGLPHARALALTGRWAMVGGAHRWVDRVADRLGLLVSVLFPNATESREIAAARRGAWRRPFPPPRSELRKLNRSSRDPFSPHLPSSHERLPQKPPPPLFRPRKNRVEISGTQGATRQRGIPRRKHFSAAGRTAPEVDYVKTPLKLEGLTEASRISLRGQAQLKRCCHRGSRLSLEFTRLSPLQSGCATQAGWARSPSSASASTSAVS

SEQ ID NO: 73454 - protein, 262 aa, Zea mays
  Coding DNA Sequence Number=SeqID_30079
MVGQVSDSLQIALLQSLVGMLASRSHLRLDQREAWEHSASDLLVARTMQGKFDTIEGNFIVVQSRLEELEKGVELEELSEGYCDAWSYSNFAGMVKATKPFAQKLCVVSPKRRSGSVPGMLGGLAYGCYLFVPAIGGRSSCNFLYPVFYSSSCGGLKPAMQGARGAVGDGGRGCGSWRDSPKGRFPSMVRRPVLALPGAMACGVRPQRVDDEAADQFWASSRVPIKALTPGYGGYGAGDDLGSRHNTAEGLAGLGCGTGRSR

SEQ ID NO: 73455 - protein, 181 aa, Zea mays
  Coding DNA Sequence Number=SeqID_30080
MDKMLEHLGDKISAIIKSPNYEIIIVEGRYNYGAFDRLITNYHKRNDKHNAAKHKYIFNKDTGMHEYTFGKHKFRWRFNNETLKYNYLKKSNTQEHAFLSTLRHLNNDYGDDYTSSSNDESKCKIEEKLNELCFFVDSVNEGFYTMAHGDEVGSGNSDDNSNDSRSKATDEAFSHARDLIL

SEQ ID NO: 73456 - protein, 103 aa, Zea mays
  Coding DNA Sequence Number=SeqID_30081
MAAAAKYTVRRRLGTDARGRSAAVARERRPLLGIWMRPPSIGGGFGGGDNACTFGGGVSDLKKYRMCYRIPLQLYFYRQTRIIQVQDGLQDTVAISLSFAFVP

SEQ ID NO: 73457 - protein, 312 aa, Zea mays
  Coding DNA Sequence Number=SeqID_30082
MARVVCTLRGKRLEGGVSVLSVGLSKVRWTRTTVGGPNDLGGFVTSGIGAKPISSDIMKHFKQNFQYLSKKISFILTLPLSGNTLLVRLGNGVQYIGGWGSTKVDSVIMHASWLKIMLINFPPYGDMSRTRKTARKSTRPIGVPHNQLAPRHEGSSSGNNDPIGDLEAQVEQLRTELCHRNRMWAEDGQRINELAADVRRLQDELSKRDLAVDWAVNSRSIAWDREAKARARVTELSAALDNLQVYCNTLHEEVHVLYSSLHPDVPADPVAMGFGPSGTTGVSPGDWTDLTSCDAGDAPLVEKAKRGSQTYV

SEQ ID NO: 73458 - protein, 179 aa, Zea mays
  Coding DNA Sequence Number=SeqID_30083
MNFEVKKVKKGIATKEKDRLQGIGDELQSSREECFSKATQCSERLNNIFALVGASFPLSLDGVRKPSVEASNWGMRFFSDVWNVGREELALEVAKKNREKVERAMQKAVAIRKAQRIKELKALFPLGYNDLRTKVMKDVPSSSWYLSINHTWKTLLNYVFEDLRRTKAANSSPSQYQFV

SEQ ID NO: 73459 - protein, 81 aa, Zea mays
  Coding DNA Sequence Number=SeqID_30084
MQQRRFASAKHEMRQKIVSRMPSRSAMQERDPKKKNLPSVEDGQGAEDDSHGVIVNQHRTPYMAQQLSAFLTRLCTAGFPT

SEQ ID NO: 73460 - protein, 165 aa, Zea mays
  Coding DNA Sequence Number=SeqID_30085
MGKGQGPLVTTSGAMGGNTRKQASSEVELVRASLGMESVVGDDHELGVARSPQHRVVGSSEPDHLEREGFLSEVGWSSEADGQIELSKGQDALPRDDPVKGRRTGLDHGRIDLQEPEGLGVDDVEAASSVHEDLGEPDVADDGIDNERVLFPGSARSRGGRLGRR

SEQ ID NO: 73461 - protein, 155 aa, Zea mays
  Coding DNA Sequence Number=SeqID_30086
  Homolog annotation: Hit_ID=Q6QP51; Match level="QueryCoverage=25%, HitCoverage=18%, E-value=3e-12, Identity=82%"; Hit description =Putative growth-regulating factor 1
  Subcellular localization annotation: CTP_CleavageSite=66; ConfidenceScore=5.02e-01
MTLYVSGTVIRGTPNTPKHGCRQGRSDRSHFSLPLTDLTGKQRRLPRSDCCATRQGEADNSQVQPQAQQEAPPRPTLGLGLGRWSPPRPTPGLGLNLGLGRWSPPRPTPGLGLNLGLGGIASSPDPGLGLRRSLRLARPWARTDRATEDTSLPYP

SEQ ID NO: 73462 - protein, 173 aa, Zea mays
  Coding DNA Sequence Number=SeqID_30087
  Homolog annotation: Hit_ID=Q6QP51; Match level="QueryCoverage=23%, HitCoverage=18%, E-value=2e-11, Identity=82%"; Hit description =Putative growth-regulating factor 1
MTLGTSVTWPRLGLRSRGTLGHFRDQQERFCNGIPPEGRIEPSDPIERVRVRQITCSRQGRSDRSHFALPLTDLTRKQRRLPRSDCCATRQGEADNYQVQPQAQQEAPSCPTLGLSLGRWSPPRPTLGLGLNLGLGGIASSPDPGLSLRRSLRLARPWARTDCATEDTSLPYP

SEQ ID NO: 73463 - protein, 451 aa, Zea mays
  Coding DNA Sequence Number=SeqID_30088
MMTTSSVVGRSKPGCGLCPALSFKDLHHPCCGGGRAEPGPASAWASDALLPPASGEEDILQLCGGGILQPCGGRRTAAAWPGCSIPSSARATVAGCTGGSHNTSYAARAVLVFWDGPVLVLVARTGVRTCRCALERPSLAGAVLVGRWPLSSVLRWWLPLERLPTAAVAAFAGETVSATCAPGLRLFGFNGWFSSPARGREGLSAAAFSLRPSLQLSCRLRRRSLSLLQWLAASHLEFVIPQGLWCGCCSHPREWNRSSVCNGTLSAGVTSEVSVSQRRRSPSAWSALPLKASLSQFENLRPLCDELELEAAVSAWTEAESAQKEASSAQEQVVSRAEEVQQRRLRLGQVICERDQPRSYAAETVSRAEVLGGQLAVATERPAEVSARVGTLEETLAAMAQARCWRPPSRWRSFRPCRLPRPGQIPPKVETMPRVLLLPLSMSDPTGTICL

SEQ ID NO: 73464 - protein, 41 aa, Zea mays
  Coding DNA Sequence Number=SeqID_30089
MWDQTRVLTGCEWWPGRSEILANAKDSSHNLRFAVDPGQQN

SEQ ID NO: 73465 - protein, 319 aa, Zea mays
  Coding DNA Sequence Number=SeqID_30090
MGAPLIRDTMITDDDEVNFVFNGDDYDYGFCTVMMSNYPLGEVAPPSAQGAGASTPGAGTAGLFLLTSAGGRVCEALLPCAPLEASPAPPLGTLAAGVAAGGDPNNGDDDGSSLSHNTDLLEEQEPKGWVAQPITRDVARGCHFHDALDTLLRRALDWQTWSIEYHYVDGLRGAEVSSEHYSISEGDSAEAAMQDVTRRALSQYYLLLGGVADCLDLKYYIRRPYGSTGGVVVSPIGEDNPRLSSTVNLSAMLNTELDHALDELSRACDEIAQLQAERSEHRHLDDGSPAPVGTQHPYRLPRRGHHVYGNPDCRTRINL

SEQ ID NO: 73466 - protein, 185 aa, Zea mays
  Coding DNA Sequence Number=SeqID_30091
MVYLRKTGVTLGKALYDKKGKAKQIQPPQDNTTAGVNKPVEGETMIFRLCHKEGHTSYQCKAKTGDKQKAANKISNTYINKVDKKAATPYLIKKKKNGKVIAIKANKQANKGKGVKRIWVPKEIISTMKRTRRFGSQERSGKSEGLRGIWRVGKIGMYIMGCIILDQVYCQVVSQYFGPKFPTYD

SEQ ID NO: 73467 - protein, 112 aa, Zea mays
  Coding DNA Sequence Number=SeqID_30092
MTRKKRKEMEDQKRKIGGPQPGSNSHPRFSGNPPQQFKQSVTEPPKVLGPPKDVLVLRTLDGHAETAELNRFITYNNMGLKTLSTECTFASLTRQRKKTLKDMLAFGQKSLL

SEQ ID NO: 73468 - protein, 268 aa, Zea mays
  Coding DNA Sequence Number=SeqID_30093
MRIKLKMMKMKIKRMSHLKRRTMIKEEMKLIKTRKMIRVKDCHTQESTKQFKEITPVDDALRDSDWVLAMQEELNNFTRNEMARLRHTARKSVIPFLPSRLAERPLRRPVAGQSSHLERLHHRLREEQERRRQEQQSSSFSLHQEIESVRSCSPVLPLEPPPAPPLGVPASGVAAGGDPDDGDGDDSSSHDTDFSANLEPEGWVARPITRDAARGCHFHDALDTLLHRAFDRHTWSVEYRCVVYQHSRGVYPDRWEATCLVRCPENSL

SEQ ID NO: 73469 - protein, 239 aa, Zea mays
  Coding DNA Sequence Number=SeqID_30094
MAHMLDIHWVTGMDTGYSYPRKNIRGYLIISITIPADIKFHHTHIQWIIIRGYLPIPVPIAIPSHGSVHRKRRRDGRYGQKWAGSNGGGTGKGDTPKGILLREGSGPRALLLIRGSKAGPSEGFDSRLRALGFRAHYWSEVRRLAPQKGSTAVSGHSGSAPTTDQGFVGWPPKGSTTASEHAERGMTLGSGAALAKSAPAKPLTASTYQPENSEPDYAPGLRPVRMREQPDRPRHHEKR

SEQ ID NO: 73470 - protein, 191 aa, Zea mays
  Coding DNA Sequence Number=SeqID_30095
  Homolog annotation: Hit_ID=Q84JT2; Match level="QueryCoverage=89%, HitCoverage=94%, E-value=5e-26, Identity=45%"; Hit description =Putative uncharacterized protein OSJNBb0096M04.140
  Pfam annotation: Domain name=PBD; Domain location=131-171; Score =18.5; E_value=0.0011; Accession=PF00786.19; Description=P21-Rho -binding domain
MKDRRGSSSVGGGERFAVFPFSMGCMSQSAVSVADPGDKKAQGDPSSTAAATVAREQSAAGAGSSEEGAGEAMTKEKAVASSAAAATATAPGLVAAGVSRLMKGIRSLSQMFAGEDGGEDEDDEEEEREMVIGYPTDVQHVGHIGWDGHNSKAGAAAAAMAGMVNAFSLPSSLSLRHLDMAMDRAVAHASA

SEQ ID NO: 73471 - protein, 222 aa, Zea mays
  Coding DNA Sequence Number=SeqID_30096
  Homolog annotation: Hit_ID=Q6ZHH2; Match level="QueryCoverage=72%, HitCoverage=50%, E-value=5e-30, Identity=50%"; Hit description =Tyrosine specific protein phosphatase-like
MAASPTLSTSASTHDGSGIVVRARLADSGIEQPQPHIVGTIRSADVWIHGLQVWIQLNIPQIWCPLAGAWCDIQHEEGRRRHWIFEAERWWLLEHGTLPQTDVLADALAGKLDNSGCSLSELKRKVRSLQSQYAKAVKKGAPPSKDQDRRLFDLCKNVWPSVSNTKASANGGAGREPDEMCELYPYLVEEVRALQRPHPGLFKREFGMIDDSKACALDERTT

SEQ ID NO: 73472 - protein, 164 aa, Zea mays
  Coding DNA Sequence Number=SeqID_30097
  Gene Ontology: Mol. function=nucleotide binding; Cellular component =membrane; Biological process=intracellular protein transport across a membrane
  Homolog annotation: Hit_ID=Q657P0; Match level="QueryCoverage=51%, HitCoverage=8%, E-value=7e-27, Identity=70%"; Hit description =Preprotein translocase secA subunit
  Subcellular localization annotation: CTP_CleavageSite=15; ConfidenceScore=5.34e-01
MQVFHLVNCSKSVLDCSQVSSLGTTNVCFLMSNNRVVNPIDGVIVSKKQMPPRKTWKMNESLFPCELSKENLSSVKDTVEMVVKEWGEKSLTELEAEERLSYSCEKVIADDDSHVDLKIQSYLSEILKCQVIPKSHQAQRKVYWIPFNLYITFLGFTSGLIWRK

SEQ ID NO: 73473 - protein, 175 aa, Zea mays
  Coding DNA Sequence Number=SeqID_30098
  Gene Ontology: Mol. function=protein transporter activity; Cellular component=nuclear pore; Biological process=protein import into nucleus, docking
  Homolog annotation: Hit_ID=Q9ZWR5; Match level="QueryCoverage=88%, HitCoverage=17%, E-value=2e-54, Identity=68%"; Hit description =Importin-beta1
MVGAKGDEEPVALQAVEFWSAICDEEISLQDEHEGSEDGNSAIHFRFIEKALPLLVPLLLETLLKQEEDQDQDDNAWNISLSGGTCPGLISRTVGDAVVPLVMPFVETNITKPDWHCRGAASFAFGSILEGPYVGKLAPLVQAGLDFLLNTMNDANSQTLLRPPISGFVLLLMKH

SEQ ID NO: 73474 - protein, 113 aa, Zea mays
  Coding DNA Sequence Number=SeqID_30099
SSGRRFAFAVITATKKAPSLLTDQGFEGWPPEGFNSRLRSRGPYTHYWLELTGDTMFGAHRGGSGAALANPAPAKPLTASTYQPENLGPDRTPGLRPVRMREQPDQPKHYARH

SEQ ID NO: 73475 - protein, 123 aa, Zea mays
  Coding DNA Sequence Number=SeqID_30100
  Gene Ontology: Mol. function=carboxyl- or carbamoyltransferase activity; Cellular component=ornithine carbamoyltransferase complex; Biological process=amino acid metabolic process
  Homolog annotation: Hit_ID=Q8SA97; Match level="QueryCoverage=73%, HitCoverage=21%, E-value=1e-09, Identity=42%"; Hit description =Ornithine carbamoyltransferase
MALPVDVAGLRPRLGDVEAPPKPRSSLSSMAEAESEPLGRARRRSFGRGQGGVRALGSGEADPSPSPGSSGAEFAVFRDLARVRALGRAELPKAGQWSGEVTAVTSALPGGARQDKGVRSPLH

SEQ ID NO: 73476 - protein, 793 aa, Zea mays
  Coding DNA Sequence Number=SeqID_30101
  Homolog annotation: Hit_ID=Q84SN9; Match level="QueryCoverage=89%, HitCoverage=85%, E-value=1e-104, Identity=43%"; Hit description =Putative uncharacterized protein OSJNBb0043P23.6
MSRCFPFPPPRYEKTVRPDAQLASQQQQLDKEKHKEKKHKKDKKDKDRKEGKEKKDKDRSRDKHKDKKDRKEKHKDEKKDKSKDKNRESGEGIQRNDEALHGQKVGESSRGSEEIKDLKFREELVRGVQDEKGAASQTIENYAVSNDRNRKGFIASPAMETERSAHNKVHIQSGNASRKTEGFIQQSINANRQKNGTSVQHSESFTTSARRTAGGFPPAPTTEDKFKAARLSSSNEAAPRKEGVGQRISNISISLQKRTENTNKDVAKKEVGTSSPLPPNPANAMHKGNGKVGRPMDNTQGSMQRFGSPSTSSATWGMDRGAPRSSIPSPSITIRRPNGMVRPAENLSVSAKKPDAGGLSPAMGKEKEQGGRLLQANISTDQKLAAESRSASAKKPDAGGLSPAMGKEKEQGGRLLQANISTDQKLAAESRSVSAKKPDAGGLSPAMGKEKEQGGRLLQGNISTDQKLGAENRSVSAKKPDAGGLSPAMGKEKEQGGRLLQANISTDQKLVMSKPPAVEKAADGRAERMEKVRDGAPDIAKKEDKKSDRHEKKKRKEKDKHKEKKKEKEAKKEKREHNHKEHNKTRENSISYPIDSLNLKHSVPPLAPPVDDGKSVVPDENLKKRKNHETNGYLQNNLDMRPTKLPRPALPSNRVENGTASHVAAPLSSVKQEAINIEKAERLHKEEKVNGNQQGQQRGPVDPVAAYENGTSSRKPPHPDCKYLSQIYSIPEAPQMMELPGQEGEDWLFDKGGTQPRKPASSAPEADGVPQVWAQALKIDHADVIALPYVIPF

SEQ ID NO: 73477 - protein, 96 aa, Zea mays
  Coding DNA Sequence Number=SeqID_30102
MAADFWSGVQAILILILFALQLQKDGGFDICYSLGPWAVITSMHIDQNCAAITPNQLHYRSQPPGSQHCLFDFPRSTPTAKGVVHEAIYLCHTSYL

SEQ ID NO: 73478 - protein, 86 aa, Zea mays
  Coding DNA Sequence Number=SeqID_30103
  Subcellular localization annotation: CTP_CleavageSite=28; ConfidenceScore=5.79e-01
MAMAWSVRQVKAPSTQGTQSRLARAQPRAKTADPGGFTSRPRVSSSNGRTFDSPEAQLGQASRRSNLGQIATPTNRIAGAFNARIV

SEQ ID NO: 73479 - protein, 92 aa, Zea mays
  Coding DNA Sequence Number=SeqID_30104
MESHDLRAEWESRLVGGYEIDGSGYDYGAGATDEEGQLEESGAAFTSALISSGTTTQGLLIKIRPARMALSMALSRWALRVMEVSLATLAAN

SEQ ID NO: 73480 - protein, 153 aa, Zea mays
  Coding DNA Sequence Number=SeqID_30105
MGKNNKRKREPTPPSEDFGDSEYSEEEFSSESEGSPAPIPLRESSDDSDDSQGLAAEVWTYIRAIERSGLEGSDESEYSSDEEDSSEGGGGDGDDDDDDDDDDGGGGGNDGDDGDDGDDGDGGGSGSSKDGDGGSSRGSNRGGSGRGSNRASG

SEQ ID NO: 73481 - protein, 72 aa, Zea mays
  Coding DNA Sequence Number=SeqID_30106
MSTETRHLDQIELLSVRRLLFDHLFFSCGGCETARIIKINKNMAGKVSDQGHNLPAMSSCSATSTNQADSSG

SEQ ID NO: 73482 - protein, 152 aa, Zea mays
  Coding DNA Sequence Number=SeqID_30107
MENRFRTIRELGSKGKRSNPLVLEEFMWENEWVEENNEADGDSSIWHVVDEALGATHALQGRNLPRLAAAGAASSSRPQRTYVRTRKRSRNAATQDIGEDDSDAQEDSNATTDAEEQQEQPLEATRDIDQDESESGGGKAAANAFCLDADLL

SEQ ID NO: 73483 - protein, 149 aa, Zea mays
  Coding DNA Sequence Number=SeqID_30108
MYLHTQNHIKHQQVLPKKFSGKQGVLDWAQYFLKDQGLNHNFPKTQYSHSMDCSRWRSIQRQGAYLLPQSELGDALPHPRRRPDRAPDHRRPDDHWCTEPNYGDGPSTDRSTFVYQRNENSDNSGKALTDDKPAMAPTTAYRLRGVAVS

SEQ ID NO: 73484 - protein, 241 aa, Zea mays
  Coding DNA Sequence Number=SeqID_30109
  Homolog annotation: Hit_ID=Q67VK7; Match level="QueryCoverage=86%, HitCoverage=76%, E-value=1e-27, Identity=38%"; Hit description =Putative uncharacterized protein P0505A04.40
MANSTDVPLPDMAAHDDGGLATVIITASDSQQGGAEIKLELSVGKTRTDEEVRSNALTGPRLAFGDAVVEDSGSRTSSGAKYYVGKCGHGGEKDSSMNCNFRSRKPLPKVYFDGHIPFAADYLSPRPETRSQEQLEEVDRDSSSSRMQAGPSRNRVKLEGSTSVTALSIPNPQRLRTLPSKHPRNSNAGSKKELRDTVVHRTLRKINEDWKEKMLEASDEVLKFLNKDYHGSPHKRGHVHN

SEQ ID NO: 73485 - protein, 68 aa, Zea mays
  Coding DNA Sequence Number=SeqID_30110
MDRPTLCADRPVRHKEGITPALRSQTVRAAVEGTARRSETVQSLRLAIPNVRGTYPYKTSKGERSNEE

SEQ ID NO: 73486 - protein, 99 aa, Zea mays
  Coding DNA Sequence Number=SeqID_30111
MSSTPTTMLKGKCALGPFLSILVIECQHKWSCVNLCQMMDKVKINIKEKSIWERDGFVQPKTVQSGSTGLSGGALDSVRCAGLALANWLLSGFVGGVRL

SEQ ID NO: 73487 - protein, 158 aa, Zea mays
  Coding DNA Sequence Number=SeqID_30112
MGKHVPSLLMLLLSRGRVPLDCPTRWQDGRPSHSSNHVLQRTCKNYATSKAEYTNTQLDIPSYNGSSSLISCEKQTIRIEFLSLQGIRTLILIPISSHGSRIPMDPCPQTNHQYDIKWVTSCHCNLSYKFEVDTDSDTTCAKLSKISFKRALYTIAMI

SEQ ID NO: 73488 - protein, 209 aa, Zea mays
  Coding DNA Sequence Number=SeqID_30113
MTTVPIDSPFAFRPHRLGIQCSTDPGCRRAVTALAGMLIGGEETGLVTAREFNPMGQGGPQDAREDMSARNWAETHWIAWSTRDGGRPKPGEVDLGPPVKSGQVRGLGKLHGLLAELAEALVRPEDGWSGLATMAEALAAMASGIELAGAKGKWLAGEGECRPKWGAPRGGFIGTARMCSREFGTTLIFGSPGFEFRKTENTDDLWEEV

SEQ ID NO: 73489 - protein, 153 aa, Zea mays
  Coding DNA Sequence Number=SeqID_30114
  Subcellular localization annotation: CTP_CleavageSite=54; ConfidenceScore=5.23e-01
MTTVPIDSPFASRPHRLGIQCSTDPGCRRAVTALVPTIASMGDPVSGRMRDKVRAGFNQAGMLVGGEETGLVITAREFNQMGQGGPRDAREDMSARNWVETHWIARSTRGGGRPKSGEVDLGPPVKSGRVRGLGKLHGLLAELAEALARPEDG

SEQ ID NO: 73490 - protein, 293 aa, Zea mays
  Coding DNA Sequence Number=SeqID_30115
MLQGPPLRRGGWVPHVMQTGSEQKKPKRRAWCTQPPSGYKRPPTFAQTNGQKEWAAMQATCNRAKWTRFSDSQRASMEAQAHASRNRRAGCCMQATAPPLAPPSRLFGCGTNAATRGDPAAPAWRDGQCGRKRSGRRFAFAVITAPKKGPGKGDTPKRILPCEGTGLRAPPTDQRFEDWPSEGFNSRLRSRGPYTHYWSEAGPRRVHSRLRRRARDDQGYVRYITKARAALPSSPETPCSVPIEGNMAHSPPSSLRKGDVGAYEKKPSMSLIALSPCAEARGLLSQTRLQPNR

SEQ ID NO: 73491 - protein, 97 aa, Zea mays
  Coding DNA Sequence Number=SeqID_30116
  Subcellular localization annotation: CTP_CleavageSite=29; ConfidenceScore=5.22e-01
MMLVDYTTVLDGPSVSVEGPTQQGVKSVVEMTPASGVTSDGSSNPSLRLRLLREIHVVAQTATGVVAVSVRVSSSSRDALWWCRGASLAEVQGKAAP

SEQ ID NO: 73492 - protein, 192 aa, Zea mays
  Coding DNA Sequence Number=SeqID_30117
MAQTRVGSGPHLVLIKVRVLFVPESWDPARPTPKEHDSWARTPVLEAGPLVLAEVKRHTTGEVARSSRGGSPSRMAVHLLHTRRPTPKEYDSRARAPVSKAGALLLVEMKRHDGSLLAWQFAFFTHGDRRPRSMTRGPGPPCQRLGRHGARQAKFPAIGRILLKNGFPRVQQSCSSLAAPFRPRVLCALLPP

SEQ ID NO: 73493 - protein, 79 aa, Zea mays
  Coding DNA Sequence Number=SeqID_30118
MAGGGWPRWPKLWRQRRAELSSPELWESGWPVRVSAGRRERYGARKSGLSPYPNPRQIPGFVMSRARVPMPSSGTRQRG

SEQ ID NO: 73494 - protein, 65 aa, Zea mays
  Coding DNA Sequence Number=SeqID_30119
MDSDDEGFQRVEVEQIIHHNAQVTMVVLSSLNQEEYDKIDDEQEIGSTNQKRDDDVLAEPVMAMF

SEQ ID NO: 73495 - protein, 167 aa, Zea mays
  Coding DNA Sequence Number=SeqID_30120
MVGRSEPGCDLGPALSFKDLHHPCWGGGQAEPELYLPRGFVGQLLPQYSRERALTGLAGGVDFDNEGPIGGARRQLQRARLAGLAPSAPSRRKGGCRAACTGGPPKTSRAARAAFVFWGYPAFAPVRRLRAEVAAAGEVPIADRITATIRASGLRLFVLVLAPRAES

SEQ ID NO: 73496 - protein, 365 aa, Zea mays
  Coding DNA Sequence Number=SeqID_30121
  Subcellular localization annotation: CTP_CleavageSite=37; ConfidenceScore=5.11e-01
MGQSAAGEGATVDAAKNGPAVMAVAGGKKQRSHRQPSSRHLVEQRENPLSRREDDAPVFRSLNGSRTRNGCLVNHSPRRINSAAGQAGPGKGDTSKGILLREGNGPRAPLLIRGSKAGPSEGFNSRLRALGLRAHYWSEVRGPAPRKGSTAASGHSGSAPTTDQGFVGWPTKGLGLGLSPGRRRTLHRPTPGLGLGLSHGRRQTPHRPTPGLGLGLSPGRRRTPHRPTPGLGLGLSPEDDELHIARPQGSDSGSAPEDDGLRFTRPQGSDSGSAPEDDELRFARPQGSDSALASADGLRLARPRGSDSTSASEDRLDLDLEGASTSPNPGLGPTTSQEAPSLPYPKLTQATGNKTGVPSGSLRQT

SEQ ID NO: 73497 - protein, 81 aa, Zea mays
  Coding DNA Sequence Number=SeqID_30122
MVRADRTRDNGQGPRKNDLTNYWALGPFVRLFTSLVDPGDIYPPQAPDLWVDLEVINSKIQGFWTSLGAPEVHPMGVAPDL

SEQ ID NO: 73498 - protein, 128 aa, Zea mays
  Coding DNA Sequence Number=SeqID_30123
  Homolog annotation: Hit_ID=A0EVH4; Match level="QueryCoverage=55%, HitCoverage=8%, E-value=2e-08, Identity=43%"; Hit description=Opie3 gag protein
MTNIIKMEVIEGELGLFAMKRRESPQDMYNRLKTLMNQWDSYCSSSDYVCFKCGNNDDQEQDKKIDNDELNDKIVRLSECHASSSTLEYVSICNKCKDIGVDVCIANVDIIADLNDKMAILNAQVKNS

SEQ ID NO: 73499 - protein, 363 aa, Zea mays
  Coding DNA Sequence Number=SeqID_30124
  Gene Ontology: Mol. function=protein dimerization activity; Biological process=RNA-dependent DNA replication
  Homolog annotation: Hit_ID=A8QW53; Match level="QueryCoverage=99%, HitCoverage=100%, E-value=2e-95, Identity=52%"; Hit description=O -methyltransferase 3
  Pfam annotation: Domain name=Dimerisation; Domain location=31-80; Score=35.3; E_value=2.2e-07; Accession=PF08100.2; Description =Dimerisation domain
  Pfam annotation: Domain name=Methyltransf_2; Domain location=99-339; Score=242.8; E_value=7.6e-70; Accession=PF00891.9; Description=O -methyltransferase
  Pfam module annotation: Pfam domain module=Dimerisation::Methyltransf_ 2; Domain location=31-80::99-339
MALIMQESSSHDLLQAHDELLHHSLCFAKSLALAVALDLRIPDAIHHHGAGGATLLQILAETALHPSKLRALRRLMRVLTVTGIFSVEQPPAGGGDNSTVHTSDDEAVVVYRLTAASRFLVSDEVSTATLAPFVSLALQPIAACPHALGISAWFRQEQHEPSPYGLAFRQTPTIWEHADDVNALLNKGMAADSRFLMPIVLRECGETFRGIDSLVDVGGGHGGAAAAIAAAFPHLKCSVLDLPHVVAGAPSDGNVHFVAGNMFESIPPATAVFLKKTLHDWGDDECVKILKNCKQAISPRDAGGKSNIKHQETQVMFDLYMMAVNGVERDEQEWKKIFIEAGFKDYKILPVIGDVSVIIEVYP

SEQ ID NO: 73500 - protein, 120 aa, Zea mays
  Coding DNA Sequence Number=SeqID_30125
MQELMVQQNEILRQLAQRQPPPQHYGGGDHHQRLLAAATYQEFLSTQPPLFTRAEDPLDADVWLRYAGYHADTYEKKRDRFRRGLSTKLRDRLNIVRANTYNELVNMAISQEDCITAHQA

SEQ ID NO: 73501 - protein, 301 aa, Zea mays
  Coding DNA Sequence Number=SeqID_30126
MAIPDGHPDRLPIVLAHPIRLLLTIHVIAPPPLHPHRLPIIAAHPLLSDRPQPSPPPLHRLFTAARASPHPGPSSGAGYTTPPQYMVQLFEKHRDTIEAIALQGLTTFCGFHPLELSTHPIGLFPAEKEDDPMWKDRVEHAKDIWALYPGQTAHLMVRCMDALYRLQVMRGEAMSHLMALLEATKITLDNREELVVELHTERVEKDLQVEQMTNEIQELEELVGTRENTIEVLKDQLINTQQQLAEANQHLDMHHQEIQDMEANEDVDIEGGEEPERASSLDTAGSGRPPSPESSVASFAH

SEQ ID NO: 73502 - protein, 225 aa, Zea mays
  Coding DNA Sequence Number=SeqID_30127
  Gene Ontology: Mol. function=binding; Cellular component=integral to membrane; Biological process=transport
  Homolog annotation: Hit_ID=O80414; Match level="QueryCoverage=25%, HitCoverage=15%, E-value=8e-20, Identity=79%"; Hit description =Mitochondrial phosphate transporter
MLMAYRNVDGPGGRLNPIQLCRGQPNATRGCAKCVGDSTLRTDLATGRTQGRHNRLLDSGALAGDEKQGHGLFAAEKARACDGEGGSLRGKPVKRARRSEHLVGVWSGLSLTIGSPDQQPTSYCLLGAPRPAKGTSSARSFAATGAAARLHASAPAPAAAGAGGAVPFSIQAPNEKIGMYSPAFYAACTAGGIASCGLTHMAVTPLDLVKCNMQVSGQRPRSVSP

SEQ ID NO: 73503 - protein, 65 aa, Zea mays
  Coding DNA Sequence Number=SeqID_30128
  Homolog annotation: Hit_ID=Q8S474; Match level="QueryCoverage=50%, HitCoverage=4%, E-value=5e-08, Identity=81%"; Hit description =Putative pol protein
MTNGPSQGGRELVPPSGVLPQPKHQVAHLEVSGPDPSGVVASRGLLALVLGEPYSRSVGKTASAP

SEQ ID NO: 73504 - protein, 139 aa, Zea mays
  Coding DNA Sequence Number=SeqID_30129
  Subcellular localization annotation: CTP_CleavageSite=11; ConfidenceScore=5.01e-01
MSDPADRTSLSAQKTFCRNGFSGFLGYVDNESRGRARVHVRTTPHIGGPAGQQNANRWLTAARSGSSDDELRSERPNSSSDDLRADAAAIRPSPTSPLEGRGQAEGRRVEGQSAGGANYLVGGETSSGCLGGRWHRKQR

SEQ ID NO: 73505 - protein, 406 aa, Zea mays
  Coding DNA Sequence Number=SeqID_30130
  Homolog annotation: Hit_ID=Q6QP51; Match level="QueryCoverage=37%, HitCoverage=73%, E-value=2e-15, Identity=38%"; Hit description =Putative growth-regulating factor 1
  Subcellular localization annotation: CTP_CleavageSite=60; ConfidenceScore=5.32e-01
MVAIQGGHPPFKGDSPHLRPQSSRTESSPTRSKVLPLRHGGWVPCVMQAGPGQKEPKPPRAERTTAQRLQALLHFRPDQRVKGRTTMQAACNRTRGAHPFDFNASSMEAQAHTSCGRKQQSSRQQAHAPSWDNERTLSHGVKTTRPCSVPRMARARTTAAPRTTRPVALPLRQDRRHLWQAKQATLHLRHNDRVKKGTGKGDTPKGILLREGSGPRAPLLIRGSKAGPSEGFNSRLKALGLHAHYYRLRARRARDDPGYVRYITKARAMLPRLGGCSRKPSSGQTVDSVNIPARELGTRLCTQATPRPNRIGSDSPTTQKTTDSASPDPRARTEPGPRKTVSASPDPRAQTQPRPRKTVSASPDPGVGLSLDLGKRTRPRPRRSLRLARPRARTDRVTGGPSLPYP

SEQ ID NO: 73506 - protein, 585 aa, Zea mays
  Coding DNA Sequence Number=SeqID_30131
  Gene Ontology: Mol. function=cysteine-type peptidase activity; Biological process=proteolysis
  Homolog annotation: Hit_ID=Q5NKP7; Match level="QueryCoverage=94%, HitCoverage=81%, E-value=1e-111, Identity=55%"; Hit description =Putative uncharacterized protein 9C20.3c
MKNVDRPPSNPKRIIIQSTQECFSVDIPRAPAGTVRPETRRAADEDDDFMPSSKKRNLDDSPGKVLKKVVTKRRKAVPPPRQQKLNVRCNPQDVLVSIQILNDRQQQAIARRGFSSILDMRLDALGSRSHLAWLMEKLDPNDMTIRAGPGKELKITKDTVHLILGLPNAGGGTALGIDEAVVANNLRAELGLSKEDFGVTALQDRLRKGSDDDLSIRCFFLILFNRLLFPTASWGITNHEVLLTEQMDRFHQIDWCQLIFNDLCQAAKKWHNRSVTNVSTTIYGCSIVILHKTRTNAFDVPRPDPSGQHSIHIELPLIRDLISSKLNQLPSRHRMGFIEKLSHFDAEVGKACSVIKQNLQQIVEKQFNLSDVFGELIDEVLRAEAGDNEDAYDVQKTTSKSDDHLPQTAESCPDEADIDLLVHTNITKQNKTPTTSVGKHGDGGKNMPTNTNVTPKATPHMDPDAPIFDATPQIKCFIQCVIDDAKNQHTSMSSNSLVLDVNVGSILNFEEQERHSRNPQPFDESVLHTLLDNSLPETDELDQYKAIMVPMGNTSEIRSLALHYITFHPKNKALPLLQDIQRFKV

SEQ ID NO: 73507 - protein, 292 aa, Zea mays
  Coding DNA Sequence Number=SeqID_30132
MRAAGGSNLALPGSRALRRRGRGRCAQAEDGVTAPSLSMRARAGRGLPAPDRARGSWPPALTGVAHDRCSHHRRRPSRPHACPARGCARAPSRGRARKPGGRAREPGGRTLASAAKAAPASRKAARSSQRLRSRPRLLVGGCALLGACSPEPPDAVPRAAVVGSHACVPGCHAHAPSGPRTPAWSGPCVPGCHQRTPPRGRVVGAMKPPRPGRRAAWGSAIAAPPWLAPGPGRGQAPTGPGRHTVAGAGRAQAAHAPPEAARGRAPSGQDHRVKAGDSRARPPEHGSRHQVG

SEQ ID NO: 73508 - protein, 190 aa, Zea mays
  Coding DNA Sequence Number=SeqID_30133
  Gene Ontology: Mol. function=kinase activity; Cellular component =ornithine carbamoyltransferase complex; Biological process=amino acid metabolic process
  Homolog annotation: Hit_ID=Q6QP54; Match level="QueryCoverage=40%, HitCoverage=36%, E-value=8e-18, Identity=56%"; Hit description =Putative kinase
MALPVDVAGLRPRSGDVEAPPKPRSSLSSMAEAEPEPLGRARRRSFGRGQGGVRALGSGEADPSPSPESGGAEFAVFRSEPWVGRSGVRRLPGPSPSPSPGSGGAEFAVFRGLARVRALGRAERSSPSSGPSPSSSPGSGGAEFAVFWGLARVRALGRGGAEFAIFRGLSPESEPWVGRSGVSYGAFGRA

SEQ ID NO: 73509 - protein, 305 aa, Zea mays
  Coding DNA Sequence Number=SeqID_30134
MQPGCTPPPVVTQDGDLQLDGGGKRAGLRPLPLPQPQGFSSPRLGRGVCRVGVGPCVGGGPLLHSVMGGRGGCRPWRWQLQRARLSDASGFGAARGAGVCHGSWKRFFRRRDSQGWPRTDLQLYGLLPVLALRVLAWAGPPGSSICPEVSAAAVRPPGAEVVVVAAAGAGDGAPLVGLPLLRRPSPMEWGYSPVDYLNRFTKHESPRVKVTSEHEQRQSWLENENLVGRSLTGLSVGGADAGVDQPRPRIGLAPLEDGWPRPQGSPWTASPSEAGSDLAEGVVDAEGATAPFQREDPSLQDQIVL

SEQ ID NO: 73510 - protein, 224 aa, Zea mays
  Coding DNA Sequence Number=SeqID_30135
  Gene Ontology: Mol. function=oxidoreductase activity; Cellular component=cellular_component; Biological process=metabolic process
  Homolog annotation: Hit_ID=A3ACG3; Match level="QueryCoverage=59%, HitCoverage=53%, E-value=3e-49, Identity=62%"; Hit description =Putative uncharacterized protein
  Pfam annotation: Domain name=ADH_zinc_N; Domain location=27-133; Score=18.2; E_value=2.3e-05; Accession=PF00107.17; Description=Zinc -binding dehydrogenase
MRRPGSTIRWSNSVRLNSPKLIVLSVGGVVLLIHGGSSGIGTFAIQIAKYLGIKVFVTAGVDVIRDNIGGSYLQRNLNNLGVDGRLFIIGFQGGIAAEVNLQAVLARRLTIQATGLRNRSLAKKAEIVSEVEKNVWPAVAAGKVKPMIYKTFPLCEAAEAHRLMEASTHIGKILLLPLHLWRLRSYSRRSQFKNICNFCDSLHGCCTVLDWIFYPEKLSCQLDP

SEQ ID NO: 73511 - protein, 129 aa, Zea mays
  Coding DNA Sequence Number=SeqID_30136
MSRWRLRLGRTLVKTKKFRNLKQDAGPSTLLLGDGPMSTILEDDVRGCDDARVGDCVLDKDEEEEEVPLIRKNSRRSRSSDIPMQALSALVSLQGLSISDFDHALEEIIPENLLSEPAEVDNSIIHLEV

SEQ ID NO: 73512 - protein, 292 aa, Zea mays
  Coding DNA Sequence Number=SeqID_30137
  Subcellular localization annotation: CTP_CleavageSite=62; ConfidenceScore=5.48e-01
MKTMRSTSTNKIRVAQRKRVWVLTHSPPRFTLFPPRGPAAPPRPTPQRAAERPRDHNAPPAVAQVAREQPRGPFACLAQRRPLALDCRRGRSSLRHFPPPSLSAQQRPQCSPLSLAELCVAHARGSPSRRTSPGCLGNWLLLQPSEHFASTEEIPPMTSSIQCLSPSPALAAGAAAWRSSPSAARGAGARPRLDAASLRGGSAWLACATARRSAWHAPGAASYAPGAAACARHGAAHALAVTAVRHSSFSPRVLSSRYCHRRAAGSTSLSSSPSYALVVVLVSRTYPHPTCA

SEQ ID NO: 73513 - protein, 99 aa, Zea mays
  Coding DNA Sequence Number=SeqID_30138
MVGAVGVRCDPGHTEGTTAIIGDTRTLGMRITGELTIATLGIRRWSSSLPPHRHLPWAAYLDILASDCQSRLGEIGCPSRSCDSPESVRRGLGGGTTGS

SEQ ID NO: 73514 - protein, 147 aa, Zea mays
  Coding DNA Sequence Number=SeqID_30139
MTLRYHNTDRRTSWVDDGKGPRGRGRKGLQDRARTPSTVRECETEQLGCRSHPTAGARARVHALVGRAAEGKWAGGGKYGDGPNRGSWPKSGRFELQNFKLDAQTNSNMMQVDLFFSGLELIDSRFSVYYWGWEICLLGQDESLRSW

SEQ ID NO: 73515 - protein, 99 aa, Zea mays
  Coding DNA Sequence Number=SeqID_30140
MVGAVGVRCDPGHTEGTTGIIGDTRTLGMRITGELTIGTVGIRRRSSSPPLHRHLPWAAYLDILASDCQSRLGEIGCPSRSCDSPELVRRGLGGGTTGS

SEQ ID NO: 73516 - protein, 675 aa, Zea mays
  Coding DNA Sequence Number=SeqID_30141
  Homolog annotation: Hit_ID=Q6JAD6; Match level="QueryCoverage=96%, HitCoverage=96%, E-value=1e-143, Identity=55%"; Hit description =Putative uncharacterized protein
  Pfam annotation: Domain name=NODP; Domain location=24-91; Score=-0.9; E_value=0.087; Accession=PF07684.3; Description=NOTCH protein
MPRTKNVSAPGGGDDEDPRRPFRQVKGKTVHLEQQEGRKKRCMDRAARAAAAAAAAAAQAELGDQPQTPSDQIAYRVRRLASRPRSSTHTTASTPPPTLPAPVTPVAPSTTTAIPATSTTPASTAPPPAPASAPPIPPPRFRERDETEVRPIAADPRLFDLQRATAAQVRRFRYVPVESWLPTQRDPTAVDLFSTRIQESFFRAQLSAQIALRVHRLLDLPTFLLAAGADSEAHLTYLPGLLTLLTTSGRYVEEWVRVFYATVWIDPDHHWMKFRFEREDVTITASQIRQHFGFPESTTRLHILCYDTSDPPRRPHGGVALGTAHVAALFRPPFSDGSRRSPADFTTAAKYLFELIRRTLLPRMGYREATTHIQLWLLGALLIQPPQFQGTLEALRLVFGSYRPAPEAPVPASAPVFDSQAEDAALQQFEAQDAAVDDDDDDDDFGVPPPPPPPMPPRSHDHEAGSSSATPAAPPAIDPAIASILQFLTQQQAHLAAEQTRLSERMLSMFQTIQDRQDSLQQQLLQDRAESRAFMALMLHHSGVSVPPVQSAPPPPLQAPVVPVIQSGPPVPSIGPSSSPLRPVTLAFTSPVLSSVYPQPPVPPASAVTTPAVAVSVTTSVPAAPAARPQYESVPAPASTADPGSETDSDPPPAFALLPRPRPDAPPPPPPASDV

SEQ ID NO: 73517 - protein, 332 aa, Zea mays
  Coding DNA Sequence Number=SeqID_30142
  Homolog annotation: Hit_ID=Q651A1; Match level="QueryCoverage=98%, HitCoverage=58%, E-value=7e-89, Identity=49%"; Hit description =Putative uncharacterized protein B1331F11.20
MASAKLLYIVVVDEDASSFRYTRSLLHSTLQLMGCKRRHAFEPQGVRCSMSSRGDQQGLGDTATSARVRRYEVAEATPTTSSRQFQFELYKRRTTVLLPRDLFLDLVLDLDALALYKFVAPNQRTDLMLACRDDYANYGCLAIGRDSICLIAIAIGECLDPVAVAEAKARSKVKKRSGVSSNSNIDYAKSGALTEKVDGKSIGKKQMAIEGYKAQSEMMGLMRKHPSIIPFMIYISNESKHTESNIRTIQEYLCSRADKYLVPKVNNTNVDQSVASIHATVFSCLRRRGNGDKLYDPEANTVAIINEEYKNQCVANSMSSKGMFKLIQRLGS

SEQ ID NO: 73518 - protein, 434 aa, Zea mays
  Coding DNA Sequence Number=SeqID_30143
  Gene Ontology: Mol. function=cysteine-type peptidase activity; Biological process=proteolysis
  Homolog annotation: Hit_ID=Q8S456; Match level="QueryCoverage=91%, HitCoverage=48%, E-value=0.0, Identity=83%"; Hit description =Putative uncharacterized protein 163K15.6
MKSVDRRPSNPKRLTIESSQEVFSIDISRRTRSSSSAHQDDIPQNQEQNEPQPAPIHRFRRKALACRLKRKPPAPSTLSDDDFMDAPSLKRQFRSASPSPSEQISAKKIKVPSPQVPSVKRSPKSNIITKKNSPKQKTPRKSQKLNIRCIPYDVIVSSWIMTDRQRDAVARLGFSSIFDLRTDALESRSLIRWLMDKLDPHDMTIRPGAGKELKITKYTVRLILGLPCAGGGRKFTDWYGEVDAAAKLRRDLNVGKEEFDVVKLQDKIVLGNDDELSIRCFFLILFNRLLFPSASWGITNNEVLMTLNMARMADIDWCQLVYTDLCDAATRWHKRNKTNITATIYGCSLIVLIYYLDHLHHPASPDNKYGTPRIKFFDNETIRELARGDRRPPVKLVNHSAMQSFVAVQKRVTSLLQNGLFLPFSTYMCHVSSI

SEQ ID NO: 73519 - protein, 155 aa, Zea mays
  Coding DNA Sequence Number=SeqID_30144
MAFILIYIPIWLYLENEEESEVTEEKTPPPPLESRARTWLYFDNCESEPDSPMNEGKPRRADRGPFNWSHASSWHTLESLFLSRVRKRQIFVAFAPRWYQMRKNKTEVREDSVLHLGSFAYSLSGGVCASLGLYNITTLHSLLVWSVIKQLKLAF

SEQ ID NO: 73520 - protein, 535 aa, Zea mays
  Coding DNA Sequence Number=SeqID_30145
  Gene Ontology: Cellular component=nucleus; Biological process =regulation of transcription, DNA-dependent
  Homolog annotation: Hit_ID=Q9LWV8; Match level="QueryCoverage=70%, HitCoverage=51%, E-value=3e-86, Identity=48%"; Hit description =Putative SEU1 protein
  Pfam annotation: Domain name=IQ; Domain location=34-54; Score=27.6; E_ value=4.6e-05; Accession=PF00612.18; Description=IQ calmodulin -binding motif
  Subcellular localization annotation: CTP_CleavageSite=41; ConfidenceScore=5.11e-01
MQATLQKVEQGLLQIKAAVQHGQHQLALSARLRTSAAVGIQAAARGFLARQKVREMRRQMLEAALVTVDLDTRGRDLTLSDGHQQWHQAAISKCEHDTCPAGDGLQLYSSGDREGTHLVINKGTLFSATTFRYRSPRGRLRWLLLRPIPDSVFEHPLCGSSRVNNLLQVAQKFQAVVSESGSAGISNNDAQTICNMFVNASRQLAKNLEHHTLNEHGLSKRYISEVVNHMKDLIEFSHKSKLGPKESLNSYSKTTAKFENMHDSRQAMAAANLANNQSNTKLMGVKQETSTSANNQTPGAGAIGNNNLPIAAPLNTYQNMLRSSGASTISLQQEASSVFKGPTAMHNGMQLEAARSFLGPNQVQFQHHPPSSSFQQQQQNSFHGFGVNPQYQQHVLNQLLQEVKNSNNRSKAQQPPLDAPPPNASGGGLAPGVATPNVIAATGEQGQHVNNSSSNHNGTVKGAAGTGPSNVINNSTASMASARNSSFKSVSSSPAAAGNAVSSKVDDSFHQLEDLDDMIANELVESGLFGAGHGW

SEQ ID NO: 73521 - protein, 119 aa, Zea mays
  Coding DNA Sequence Number=SeqID_30146
MSPRELRARTHRGPVSLCGGPDPTVLPGMYYPSSPCGALRPAHVVGSDFHDGPKKTWHWRKRRCDFSAPGNRCADCMTCGAGPRVGPPVAAKLRGRTTAGRLYASCVAVRLFDRWLRRR

SEQ ID NO: 73522 - protein, 262 aa, Zea mays
  Coding DNA Sequence Number=SeqID_30147
  Gene Ontology: Mol. function=metal ion binding
  Homolog annotation: Hit_ID=Q84K08; Match level="QueryCoverage=85%, HitCoverage=94%, E-value=1e-37, Identity=39%"; Hit description=Zinc -finger protein
  Pfam annotation: Domain name=zf-C3HC4; Domain location=208-243; Score= 15.7; E_value=0.0015; Accession=PF00097.16; Description=Zinc finger, C3HC4 type (RING finger)
MACRQTGSRLSRCGGRLIMATVGQSGALRRVTVHYASSPTRGAVVEVSLDDLDDELLQFVLADLLPGQEYHAQSSTAAAAAAASSRRNPGTDDAQIASDFEYATKLQQEMEGLSVDDDGDGISCVPSPSDSDDGHDHQNEEDEEEEDGNGGGDDDDDPDNMTYEQRQALVESVGSEDRGLSDELISYLQPWKYKASGFFSRKTNHDDCPICLSTFRNRETMITLPCMHHYHAACVTKWLRVNKLYRKRRVAAAKALASTNQA

SEQ ID NO: 73523 - protein, 146 aa, Zea mays
  Coding DNA Sequence Number=SeqID_30148
MVISLVLTMNNSEVQVHQTDRSISLHDIPKAGVNAPAQTSRKICSDWTLPEGHWSTFRNCHVIVEEKNNFTGLSFQRTNWQVSEEDPAETEKREASWNSENGKIAGKILLWIGEIKLGDSQAGKYKSVNNDVSLSIHGIIFKKRRQ

SEQ ID NO: 73524 - protein, 787 aa, Zea mays
  Coding DNA Sequence Number=SeqID_30149
  Gene Ontology: Mol. function=oligopeptide transporter activity; Cellular component=integral to membrane; Biological process =oligopeptide transport
  Homolog annotation: Hit_ID=A2Y8R5; Match level="QueryCoverage=92%, HitCoverage=94%, E-value=0.0, Identity=79%"; Hit description =Putative uncharacterized protein
  Pfam annotation: Domain name=OPT; Domain location=75-750; Score =533.4; E_value=2.6e-157; Accession=PF03169.6; Description=OPT oligopeptide transporter protein
MASSPPPPRQEEDQQREEGHHHGDGGDDDQITTPLLVEAATTSSPSPSEGDDPENSPIEQVALTVPVGDDPSTPVLTFRMWVLGTASCALLSFLNQFFWYRKEPLTITAISAQIAVVPLGRLMAAALPARAVLRGTRWEFSLNPGPFSVKEHVLVTIFANSGAGTVYAIHVITAVRVFYGKHITFFVSLLVVLTTQVLGFGWAGIFRRYLVEPAAMWWPSNLVQVSLFRALHEKERRVKGGMTRNQFFLVAFVCSFAYYVFPGYLFQMLTSLSWLCWAFPRSVVAQQLGSGLSGLGVGAVGLDWSTISSYLGSPLASPWFATANVAAGFVLIMYVITPAAYYWLGLYGARSFPIFSDGLFTAAGQTYNISSIVDSNFRFDTEAYERNGPLYLSTFFAVTYGVGFASLTATVVHVFLFHGSEIWQLSRSAFQEKKVDVHTRLMRRYRQVPEWWFICILVANVAVTIFACEYYIEQLQLPWWGVLLACAIAFFFTLPIGIITATTNQLGEVINWSMHARTHADSRPEHHHRIHHGVPVPGPSRRQHVLQGVRLHQHDAGAGLPARLQAGPLHEDPAEDHVHGAGGGDADRGARVHRDGVVAHGQRPPTSAARSCSPPTAPGRAPWTTCSTTRPSSGGLIGPRRIFGDLGTYSAVNWFFLGGAVAPLLVWLAHRVFPSQSWILLVNMPVLIGSTGMMPPATAVNYTTWIIAGFLSGYVVYRYRRHWWERHNYLLSGALDAGLAFMAVLIYLCLGLENVGLNWWGNDLDGCPLASCPTAKGIVVEGCPVYT

SEQ ID NO: 73525 - protein, 67 aa, Zea mays
  Coding DNA Sequence Number=SeqID_30150
  Homolog annotation: Hit_ID=Q5VS45; Match level="QueryCoverage=49%, HitCoverage=56%, E-value=1e-07, Identity=75%"; Hit description =Putative uncharacterized protein P0425F02.23
MIYRNWSLLSSTVVIWGGVATAGLAGIFLLGGKVTDIADRTDGVLFDSGDDGVGEIAQDDVQDASVL

SEQ ID NO: 73526 - protein, 157 aa, Zea mays
  Coding DNA Sequence Number=SeqID_30151
  Homolog annotation: Hit_ID=O48967; Match level="QueryCoverage=100%, HitCoverage=35%, E-value=2e-28, Identity=44%"; Hit description =Putative uncharacterized protein
MVQIVEHRDLIPEDFLMEEEAASSMPQSSNRPATARELLRNPLSSTASSGAMRQWHEDVDRLLGMAHSGSARPRPRSFRRQREASVSVHSPSVRGARTNDLRTELNRRRAGEDARICLERDDDLRAEHNRWRAGEDAQISLERARERRQNFEGRNLD

SEQ ID NO: 73527 - protein, 102 aa, Zea mays
  Coding DNA Sequence Number=SeqID_30152
MDKSMLDDLDGLPEEDKSMLDDLDALQLLLLRPPVCIEFATLTCDFINEGSSRTRAGPPDLLPTIDFQQIVPKPSHHQKIVDEYNLLLASQLETQRGGVNTC

SEQ ID NO: 73528 - protein, 61 aa, Zea mays
  Coding DNA Sequence Number=SeqID_30153
MSAVVQALEPLLGFDDDVPMAPLGHAGPVVLFVAAAAKEKKERAPKEGHPRPPAQATVALK

SEQ ID NO: 73529 - protein, 157 aa, Zea mays
  Coding DNA Sequence Number=SeqID_30154
MGKNNKRKREPTPPSEEFGDSEYSEEEFSSESEGSLAPVPLRESSDPRGSRRRSRRTSGPSSAPGSRARMSRSTPRMRRTRTAAARTRTTTTTTTTMATVTMAAVAAAGAAAAAARTVMAAAAGAATGAAAAGAAPGVAAAAAATGPVARCHWFFRY

SEQ ID NO: 73530 - protein, 189 aa, Zea mays
  Coding DNA Sequence Number=SeqID_30155
MTDMWLPAKGNWLLRSIGGITAADELEVFLLGAISILPASRVGGEWQRGFGSGKARTRARKAKAAKSAALMGYSRARYRFKKCPVITRRLFPKPQRATWSPGSYLRNTGAPPHHSAIILEVARAACYHSVLPPKRRFRVQSLDITSKMPTSPSNQSALPPKRRFRVQSLSIASKMPTSPPSHSVLPLKR

SEQ ID NO: 73531 - protein, 164 aa, Zea mays
  Coding DNA Sequence Number=SeqID_30156
MQPGCTPPPAVTQDGDLRLDGGGKRAGLRPLPLPQPQGFSLPGLGRGVCRVEVGPRVGGGPLLHSVIGGKGGHRPWRWQLHRAWLSDASGFGAARGAGVRHGSLKSIRPEVSAAAVRPPGAEVVVVAAAGAAGLSVSGTDAGVDQPRPRTGLAPLEDGQPRPLG

SEQ ID NO: 73532 - protein, 134 aa, Zea mays
  Coding DNA Sequence Number=SeqID_30157
MTTSLVVERSEPGCSLPLPSASRMVIIRAGEEGEPSWGPAFRMGWRPASSYSIRGRRAFTSLAEEANFGYAGSAGCRRRQLPRVWFLGLGGFGAASGAASCCLGGCGCPSTAWATVATCAGLPHPRLLSRRRPH

SEQ ID NO: 73533 - protein, 80 aa, Zea mays
  Coding DNA Sequence Number=SeqID_30158
MAMMGSTSENMYLCQGFETPPASVAAPRDVSGQDDALTSWVNNIFNTRVQLEEVAITPTNQVKDMCDSFSNVFGLELCQC

SEQ ID NO: 73534 - protein, 73 aa, Zea mays
  Coding DNA Sequence Number=SeqID_30159
  Homolog annotation: Hit_ID=Q7XBD2; Match level="QueryCoverage=41%, HitCoverage=1%, E-value=1e-07, Identity=86%"; Hit description =Retrotransposon Opie-2
MCDHRNYRNKINHLPRQWCIPQLKTMNMYLKKRGRIKGEHKKNRVEEALQDMNWVLAIQEELNNFKRNEVWSL

SEQ ID NO: 73535 - protein, 35 aa, Zea mays
  Coding DNA Sequence Number=SeqID_30160
MASAHIFLLSKGRDERAELVVAFHLQQFKTCLVFE

SEQ ID NO: 73536 - protein, 76 aa, Zea mays
  Coding DNA Sequence Number=SeqID_30161
MHSPLVPFGSPLIPGPPIGSNDHHAIAPHLTPDDGTVLDGAIVGDTSPGPPVSNTRSDSCYTLFDIWQSRWDTPNW

SEQ ID NO: 73537 - protein, 126 aa, Zea mays
  Coding DNA Sequence Number=SeqID_30162
  Subcellular localization annotation: CTP_CleavageSite=76; ConfidenceScore=5.08e-01
MARAYKAPRDLDRTSPHALDLTGVQTHRRLPVHGVSAVARSPCHRRPASKAFPSPVQPSEKTAHTSVKLPERGIKVCFAGEASSRSPDSTRPPASVDRVILYSIPRFLVHTASTSPREAHCAIGLN

SEQ ID NO: 73538 - protein, 236 aa, Zea mays
  Coding DNA Sequence Number=SeqID_30163
  Gene Ontology: Mol. function=translation initiation factor activity; Biological process=cellular metabolic process
  Homolog annotation: Hit_ID=Q10LK9; Match level="QueryCoverage=80%, HitCoverage=76%, E-value=7e-51, Identity=60%"; Hit description =Eukaryotic translation initiation factor 2B family protein, putative, expressed
  Pfam annotation: Domain name=DUF567; Domain location=31-228; Score =113.9; E_value=4.8e-31; Accession=PF04525.3; Description=Protein of unknown function (DUF567)
  Subcellular localization annotation: CTP_CleavageSite=38; ConfidenceScore=5.05e-01
MVRVHSASSQGLGALGAAGARPVAPPPPDHQPAAARPRRSEQAEVFTIWMKSLVLNGSGCTVYDSAGSIVYRVDNYGARRAADVCLMDVAGNVVLQILKKKKLGFGRRWEGYRCADQEQQQQERQRPWLKVVRAWAWRGPSRCTCDCELGGLGLGGDSTSTTAVRYRMDDGRIAPARGARIVDGATGLAVAEVKRKTTAEGVALGADVLTLAVEPGVDRSVIMGLVLVHGLINRAM

SEQ ID NO: 73539 - protein, 106 aa, Zea mays
  Coding DNA Sequence Number=SeqID_30164
  Subcellular localization annotation: CTP_CleavageSite=36; ConfidenceScore=5.48e-01
MDLRKHQGLHAMDVQSASQTGSQVARGVRGRFNRPRGAVQPVLACLTRLQIFEVAWESPNLWTTLRSLYHPLFELRYEEIALTFVVGFWRIRVEKDPALCGLLNGE

SEQ ID NO: 73540 - protein, 100 aa, Zea mays
  Coding DNA Sequence Number=SeqID_30165
  Subcellular localization annotation: CTP_CleavageSite=35; ConfidenceScore=5.38e-01
MAGIGSKALAVVAVLAAVVLSVASAAEAPAPSPVSAAAGASAPFAAALVASSAAFLFAAILCYLAVIVSDDSVWLLLIHYCSLSVPFEICVVLNLVFLCA

SEQ ID NO: 73541 - protein, 273 aa, Zea mays
  Coding DNA Sequence Number=SeqID_30166
  Gene Ontology: Biological process=vesicle docking during exocytosis
  Homolog annotation: Hit_ID=A7PI06; Match level="QueryCoverage=89%, HitCoverage=67%, E-value=6e-11, Identity=83%"; Hit description =Chromosome chr13 scaffold_17, whole genome shotgun sequence
MWSPTDISYIFSGYAPLSIRLVQHAVRSGWRSIEELLKLLPGPHLDLKRFYVVPKCIAEILNLFDSKRRLFLWAGSERLTGGKCKVNSHHLNEFFILWSEVQKIQLDPGAEDIITWKFTADHRYTVKSAYMARFLGLIWEEIAIWVAIEDLKSSSWELSPMLIHWSEKLAVLPGCNRKGLRMLLILVNWIIWRKRNARTFDRRVGHRSLVLVVFIGGVTFAEIAALRFLSAQEGMGYDFLVATTKTNPSLWVFLFGCEFVFGQQLDDKANHAC

SEQ ID NO: 73542 - protein, 127 aa, Zea mays
  Coding DNA Sequence Number=SeqID_30167
MDLNLKVVASPSSNSHHGPQHELKVVFAPVSRRGEGADVGAGATVTRSRHGLLGHAVARSSMEEAEWISGGGLEQRRAPHTGGDWLEQRPLQQPRAGAEGRRSRGGTAACWRRAAESAQPRAREGTT

SEQ ID NO: 73543 - protein, 94 aa, Zea mays
  Coding DNA Sequence Number=SeqID_30168
MTHEVMSQVSTYETSKRCGLSSRRPARRSLGQGKDYEHEDHFGNNQKDEMSSTKRKIAEELISYILGGLDEEHNPMVSASVACVEHVTVAEATS

SEQ ID NO: 73544 - protein, 67 aa, Zea mays
  Coding DNA Sequence Number=SeqID_30169
MIHKQEVIENVLRLLVLLSLTNAGLPKKNFDYMSCTACGTVATTCAPVATAGSSRSEQAQSFMSIIG

SEQ ID NO: 73545 - protein, 499 aa, Zea mays
  Coding DNA Sequence Number=SeqID_30170
  Homolog annotation: Hit_ID=Q6QP51; Match level="QueryCoverage=15%, HitCoverage=43%, E-value=4e-10, Identity=50%"; Hit description =Putative growth-regulating factor 1
  Subcellular localization annotation: CTP_CleavageSite=24; ConfidenceScore=5.38e-01
MAAQGAGRAVSSSLAKSLGLQKPKRQAGSGAKNCHQTLSRAPSLPTDQRFEGWPLEGFQQPPQIAGSKAGPRRVHSRLRCRARDDQGYVRYITKARAALPSSPETPCLAPIEGNMALSPSSLRKGDAGAVNISARELGPRPYTRATASSHEGTTRPAEALRKALRPRRSETTPPRPRGLHPAGALARTHRNKMQPRKAGPLAKKCDESLQVSANTPFEARGLLSGTIIRGTLKTPNSQLVTPISIKLQRPDGARTRAKSRKTANSAPPDPGLGLGLRPGRRRTPLRPTQGSDSGSAPEDDELRFARPQGSDSALASAELPPPRPTQGLGLGLGHGRQTRPRLRRSLHVAQPRAQANHEDVSKDPTAPTAVPPPGFVAPPTATTSHQLGAKFSPAATSACDEFAADDSPDSSVNYSCTSSSSPESGLFMRTSLTHRTLSGAPPDSPLAAEQQRVDEQKMRRVAEYREEKEKKLERARRAEDAMEENPDAFRKGKWPRCTE

SEQ ID NO: 73546 - protein, 74 aa, Zea mays
  Coding DNA Sequence Number=SeqID_30171
MQDRGMSTIKDVVKASIVTGKGENANQGRDRQNLQGVKEGGAVNDEIDEALSPNMDGNEETSKDRFNVSRKARE

SEQ ID NO: 73547 - protein, 316 aa, Zea mays
  Coding DNA Sequence Number=SeqID_30172
  Gene Ontology: Mol. function=protein binding; Cellular component=late endosome membrane; Biological process=vesicle docking during exocytosis
  Homolog annotation: Hit_ID=A7PI05; Match level="QueryCoverage=80%, HitCoverage=59%, E-value=2e-87, Identity=62%"; Hit description =Chromosome chr13 scaffold_17, whole genome shotgun sequence
MAQIPNLDNAPLNLAALREQSQKDLFGILKNIRGKKCLVIDPKLAGTLSLVVQTSLLKEYGAEVRILSPEPLQTECPKIVYLVRSQLRFMKFIASQIKNDEPKGLQREYFLYFVPRRTVACEKILEEEKVHQKLTFGEYPLYLVPLDDDVLSLELDHSLQECLIEGDTSSIWHVAKAIHKLEFAFGVIPNVRAKGVASTKAAELLNSMQLEDPVNMDDMGIPEINTVILLDREVDMVTPMCSQLTYEGLLDESLCTGSTVPPQKPEPEQWHLESSFTLARSASIVGHLVWLWRLELFGARARAGGEPHQKGALLQY

SEQ ID NO: 73548 - protein, 107 aa, Zea mays
  Coding DNA Sequence Number=SeqID_30173
  Gene Ontology: Biological process=vesicle docking during exocytosis
  Homolog annotation: Hit_ID=A7PI05; Match level="QueryCoverage=76%, HitCoverage=15%, E-value=1e-18, Identity=62%"; Hit description =Chromosome chr13 scaffold_17, whole genome shotgun sequence
MAHEFNFSMLQINNGSVEVDASIIGAQQDGKKVKVPLNSRSAFLKLISVAPSYQVDKLYKEIRDLNFEVVVQVLRQKATSIQQDYAEVKSTNHCSKARMQMLSYCVF

SEQ ID NO: 73549 - protein, 55 aa, Zea mays
  Coding DNA Sequence Number=SeqID_30174
MARDITCVFLLQKLQVYTLVPSLLREEAIEEKGTSVTIKLPQLKTDTSTTYLQVH

SEQ ID NO: 73550 - protein, 37 aa, Zea mays
  Coding DNA Sequence Number=SeqID_30175
MAGGIKLAGAKERWLAGEGFELGIKVNIPDLWLKEKP

SEQ ID NO: 73551 - protein, 83 aa, Zea mays
  Coding DNA Sequence Number=SeqID_30176
MAGGIKLVGAKERWLAGEGETLGDTGVSQPSPLKGISSRDSGQSPPGVKRRVRLIGKRVVIVIIRAKLLFECHSLCNFRRKSF

SEQ ID NO: 73552 - protein, 100 aa, Zea mays
  Coding DNA Sequence Number=SeqID_30177
MYYACGYCKNGSSCRFFHGVPEDDAAEREMAVMRAKALAAAPPTQQQQLMASAYPFSPSPKGGVSLSFLIQQHQQQQSETQRAAAAGMLLGGKDICSEFR

SEQ ID NO: 73553 - protein, 218 aa, Zea mays
  Coding DNA Sequence Number=SeqID_30178
  Gene Ontology: Mol. function=RNA binding
  Homolog annotation: Hit_ID=O82762; Match level="QueryCoverage=60%, HitCoverage=19%, E-value=2e-25, Identity=53%"; Hit description =Putative uncharacterized protein At2g25970
  Pfam annotation: Domain name=KH_1; Domain location=18-80; Score=41.3; E_value=3.5e-09; Accession=PF00013.20; Description=KH domain
MGPLSHNYLLRAAHLSNPLMVDIRVGVIIRKAGETIRYIQLQSGAKIQVTRDHEAELGALTRQVELSGKPEQISKAEQLIKEVLAEADVGSSGAGSGGQKYNATQQGAETFQMKIANNKVYTLFYLDKGGTDYWEGGETIKSMQTNSGARIQSSISDSGLSQDAKQCRNLKFLHTEGCLSITKASLRALVQYAKRLESLTLGSYPQIEQHAIFSLLMN

SEQ ID NO: 73554 - protein, 401 aa, Zea mays
  Coding DNA Sequence Number=SeqID_30179
  Gene Ontology: Mol. function=helicase activity
  Homolog annotation: Hit_ID=A3ASR7; Match level="QueryCoverage=79%, HitCoverage=22%, E-value=4e-58, Identity=42%"; Hit description =Putative uncharacterized protein
MDPFNNNDVRPPLRELSSNTLEDDCPDVAIGDGSIIDCTIPCGITLGGCDDARQRKRERERTRYAMMSAENKNELKRRRQSSKNENVVHHERSKDENYNKCAPITKDVDMDKMTQSPRRQRHEHHVSSGERQSLISCQNQKFQSAIRRNFATATRDHGMEGESTSPCPVTAPHSDIMTEGADVGMQRQITPNVTTNDADEGVLFVENHDEDVLFEDDDEEDGYLFAGQDGESIEDIEIDETQDAFTVNPDVPDLYDKVYSNIPEETHLLSTVADCDYCKAKKFQYEPPGFCCRNGQIDLAPFETPPQLRRLWECSDADARHFRDNIRFFNGHFSFTSLYCCLDSMTTNMDCGIYTFRAHGMMYHNVRSFGREVGAEHKHLELYFYDDDPNLEHRYRKCEST

SEQ ID NO: 73555 - protein, 255 aa, Zea mays
  Coding DNA Sequence Number=SeqID_30180
  Gene Ontology: Mol. function=metal ion binding; Cellular component =clathrin coat of trans-Golgi network vesicle; Biological process =intracellular protein transport
  Homolog annotation: Hit_ID=Q67UX1; Match level="QueryCoverage=51%, HitCoverage=19%, E-value=6e-23, Identity=48%"; Hit description =Putative RING-H2 finger protein RHG1a
MVLVALERIEQQAELTYDQLLMLEANLFFGAFASYDRHRDMRMDIDDMSYEHYSELPDIKCAIVNTHVIEPQKLLALEERIGSVSTALSEEQFTKCLKRSIYSQVALEVNKSTVDDMKCSICQHYSELPDIKRAIVNTHVIEPQAAKEYSEQLGVDACIKLFEQFKSYEGLYFFLGSYLSSRTQISISSMDLLGVFPTGLATSTPETNTSQSQGSSDSSGNNKSKSHSTEPVLYSYKKERKVNQNVLPGLRTEIQ

SEQ ID NO: 73556 - protein, 345 aa, Zea mays
  Coding DNA Sequence Number=SeqID_30181
  Gene Ontology: Mol. function=iron-sulfur cluster binding; Cellular component=integral to membrane; Biological process=cell death
  Homolog annotation: Hit_ID=Q94CH1; Match level="QueryCoverage=15%, HitCoverage=10%, E-value=2e-23, Identity=96%"; Hit description=Seven transmembrane protein Mlo4
MDIVMEEGNVDVGNIAEPSYEVVARSGCSAQLSTNDTDEHELESEDSKVSVGNAAKQSHDVVGVGIDCIFNHAKVSTEADLGPQPGNWRLVKPQTGATKVEEIHSKNHPVSLLVIEHSPFLAEVRETNSYIFQRKETKRTGVNISYMLIQLLELNSEAANRMWLAALLLDRSVACRLRVELMEQKEVDLKVLLGLHFMPQSTTGPEISPAAVPELMSKPTEAVPPAGSMVRSGTELGHVVCIYVFESLTLFGFTGHACLLRFISEICVPSSLFTSRFYICSESDYQDLLRNTDANQTTLDRNMFGGQRLHVCGEVLVTQMSCSQPIEVNGTGSGAHCSLIAWVGT

SEQ ID NO: 73557 - protein, 104 aa, Zea mays
  Coding DNA Sequence Number=SeqID_30182
MRSRGSGVDLGGLVNGRGELGEEVEAEQRAIHVEQHRRGGSAVPGAETAVAPMEGGSRRGPPAPDAGRTKQEGELADLGKLQEVSERGTDSDAAPYSDIIQRTH

SEQ ID NO: 73558 - protein, 394 aa, Zea mays
  Coding DNA Sequence Number=SeqID_30183
  Gene Ontology: Mol. function=aspartic-type endopeptidase activity; Biological process=DNA integration
  Homolog annotation: Hit_ID=Q8SBB2; Match level="QueryCoverage=98%, HitCoverage=27%, E-value=1e-14, Identity=23%"; Hit description =Putative copia-type pol polyprotein
  Pfam annotation: Domain name=zf-CCHC; Domain location=160-177; Score =14.3; E_value=0.01; Accession=PF00098.14; Description=Zinc knuckle
MKDNELVRDMYSRLNLIINELNSIGINKLGDADIVRKIISLLPQQKYGSIITILHNMEDLSTMTPIIVIGKIVAFEMSQKMCLEEEPTSSRLYAFACDERKGKKKAPTPSSSSEEEEEEVESDDDEYNQPSSSEDEETIRRVGKVEDLLFNIDREKQRKRGCFTCGENGHFKDNYSTMAEPTKRSKGNAPTSVKTLDDSSSEEEPPRMRSHRSSSHSSRSSRKCLMAIGIMTIPSSIDDSSSDDEGEGNPSVDDLAEAIKFFQDVCTKQKAQLKTLKNKLIISQNDYKATNDGLIKKNEKLKAKLASSQEAIENLLGKKEILSIHNNELTTKLENIGNTPGASLVEIPEIIKKDASTSCFDLIDNSNPCNQVLVENIVVETCSNDVAMENEQLK

SEQ ID NO: 73559 - protein, 251 aa, Zea mays
  Coding DNA Sequence Number=SeqID_30184
  Gene Ontology: Mol. function=protein kinase activity; Biological process=protein amino acid phosphorylation
  Homolog annotation: Hit_ID=Q7XCT8; Match level="QueryCoverage=27%, HitCoverage=20%, E-value=4e-15, Identity=64%"; Hit description =Protein kinase domain containing protein, expressed
  Subcellular localization annotation: CTP_CleavageSite=50; ConfidenceScore=5.21e-01
MTSCFKIFTKHTTIAKGGPTSQGHRYCSGVLLMHHGDAMSKLVRPVGESSASEATSTSTADRRARSNSELHGRWGSAIQRRPRRDKPERDLEGRGKGRQSAAMERNLEGAARVHGELGVEHREMGARTGDGSSAGQGATLGTPGENRRARLYRTTSIRGGLRPGRLAHSTVVSAATMASMRQLLRVQVEAIMGGFTSCCARTVYLASLTGPLATVKVHNSSERLHLVFHQELDALLCVCHPHIVHLLAFYH

SEQ ID NO: 73560 - protein, 178 aa, Zea mays
  Coding DNA Sequence Number=SeqID_30185
MNNKAKGEEEEAVVREEEEARRKPFLTVPELKREEEEVVVRELMREEEEVVENSVACPAPTAVPLDRVRLTAAKSSLGRHGKLRLARPRARTQPRPRKTDSASPDPRARTEPRPRKTVIASPDPRAQTRPRPRRSLRLARPRARTRHVTGKAIITLPLASSGYGEQDRRPIWLAPVNK

SEQ ID NO: 73561 - protein, 148 aa, Zea mays
  Coding DNA Sequence Number=SeqID_30186
MTASKKAGPSEGFDRRLRALGLRAHYWLAPEGFDSRLRARRARDDPGYVRYITKARATLPSAAQSCAGANKWSHVVSRWVPDAFARAGTLTLRFTLAYLANNVGVESLSPSVGGPRPDPHDSDPTAQDTTRPIRAGLVDMEMEGIHRR

SEQ ID NO: 73562 - protein, 194 aa, Zea mays
  Coding DNA Sequence Number=SeqID_30187
  Homolog annotation: Hit_ID=A2WK87; Match level="QueryCoverage=65%, HitCoverage=21%, E-value=4e-23, Identity=53%"; Hit description =Putative uncharacterized protein
  Subcellular localization annotation: CTP_CleavageSite=32; ConfidenceScore=5.30e-01
MVGAPAPLGRVRSSPHIHVCVAASLFSSLPVKASTTPDLALQSNRKPGGVFDAVVGVWDPTAHPGGPGGYLSPTTVEKRSQERHRALQQQLASRVADLDDTQIAAATGATYSDDDDSVEATAPCQEGLVKKPKKPKVKKPKVTVAEATVLIDAENLVAHLFEISASYMNQQDIQLMWFADYFGRAFAAVGAPNA

SEQ ID NO: 73563 - protein, 90 aa, Zea mays
  Coding DNA Sequence Number=SeqID_30188
MTASKKAGPSEGFDRRLRALGLRAHYWLAPEGFDSRLRARRARDDPGYVRYITKARATLPSAAQSCAGANKWSHVVSRWVPDAFARAGTL

SEQ ID NO: 73564 - protein, 113 aa, Zea mays
  Coding DNA Sequence Number=SeqID_30189
MARARAYKAPRVLDRTPPHTLDLTGSQIHRRLPVHGRVLGRPIPCHRRLDNRTLPNPVRPSEETEHTSVKLLERGIGVCFAGEASPWSPDSTRPPASVDRPLRHPVKLTVPLD

SEQ ID NO: 73565 - protein, 56 aa, Zea mays
  Coding DNA Sequence Number=SeqID_30190
MAVGVSEALYAKAVSPDLLTGNRWGQLMFLGGHGCWSDLTVHLATGLDCRVGPRLG

SEQ ID NO: 73566 - protein, 135 aa, Zea mays
  Coding DNA Sequence Number=SeqID_30191
MDPSPHMLCIRFCPQNRMVRTIQTTRINTNYIPPPRQVPVYPMVVEEIPVDLPRIRVENGVILEDSSEEFLPTPTPLAESLAFVAGSSASAPPAPAIQAPAPGGDDPNDSGDDDEDDDEEEEVEENINDEANEEQ

SEQ ID NO: 73567 - protein, 141 aa, Zea mays
  Coding DNA Sequence Number=SeqID_30192
  Homolog annotation: Hit_ID=Q2R6H5; Match level="QueryCoverage=84%, HitCoverage=9%, E-value=1e-07, Identity=33%"; Hit description =Retrotransposon protein, putative, Ty3-gypsy subclass
  Pfam annotation: Domain name=Retrotrans_gag; Domain location=2-86; Score=5.6; E_value=0.015; Accession=PF03732.8; Description =Retrotransposon gag protein
MEFAHRSLRSDDREVDWREFKAAFRGHHIPAGIMDQKLNEFLALTQGNRTVLHTKLRDRLNTVRANSYNELVNMAISQEDCITARQAENKRKTPVAGPSAQPQRFRIVSDTQNRGPQQKQGRWVIRPQQQQQAPNHTQFLA

SEQ ID NO: 73568 - protein, 183 aa, Zea mays
  Coding DNA Sequence Number=SeqID_30193
  Gene Ontology: Mol. function=protein-tyrosine kinase activity; Biological process=protein amino acid phosphorylation
  Homolog annotation: Hit_ID=Q00GA5; Match level="QueryCoverage=43%, HitCoverage=22%, E-value=4e-25, Identity=69%"; Hit description =Putative Pti1-like kinase
  Subcellular localization annotation: CTP_CleavageSite=70; ConfidenceScore=5.04e-01
MAKMEAVEVDEIQAKTTSPFHPRRYLTTLGSLFPSMAPFNSPSGRLRNKGREKYKSSCNLLNAKPGNGLNANSDPAKPPSIEVPALSLDELREKTDDFGSKALVGKGSYGRVYYVVLENEQHVAVKKLDTLADPEPDNEFLAQEEKVLQVHNLDLLLIGCKESKLLLMLQKVLNIFMRRFNLP

SEQ ID NO: 73569 - protein, 287 aa, Zea mays
  Coding DNA Sequence Number=SeqID_30194
  Homolog annotation: Hit_ID=Q6JAD6; Match level="QueryCoverage=100%, HitCoverage=59%, E-value=1e-111, Identity=73%"; Hit description =Putative uncharacterized protein
MVRTKNVSLSGGGNDEDPPRHFRQVKGKTVYIEQQEDKKKRPQRDPAAAPLFSTRTQESFFRAQLTDQIALQAHRLLDLPAFLLATGADSEAHLTYLPSLLSLLTASGRYIEEWVRVFYATVWIDPDHQWMRFCFELEDVTLHASQIRQLFGFPELTTRLHSQCYGTLDPPYRPHGGVAPATAHFTTLFRPPFTDGSRRSPADFTPAAKFLYELMRRTLLSRMGYREATTHIQLWLLGALISHSEFNVVDFLICEIEDTVLDGLRARRQLSYAHYLYHIFAQLIRPP

SEQ ID NO: 73570 - protein, 214 aa, Zea mays
  Coding DNA Sequence Number=SeqID_30195
  Gene Ontology: Mol. function=diacylglycerol kinase activity; Biological process=activation of protein kinase C
  Homolog annotation: Hit_ID=Q7XCS9; Match level="QueryCoverage=21%, HitCoverage=6%, E-value=6e-18, Identity=93%"; Hit description =Sphingosine kinase, putative, expressed
MSAHPSLSLCEQQHAGEDLCPRRAPVEVVEHVAEVTEKLAADAASSMPENGSLHKVAVEVECVAEAMDKDAHKVEAVNDKSTYLRHQFNLTSTDAVISPLWLVQIGPDQIEALYQYAIQMTLELIQFDAMFDPYVKCRSPPKILVILNPRSGHGRSSKVFHGKVEPIFKDFLAMSLLRLGMCLSTFTSSFYFQKVPFLNGQLKKILTKKNASSN

SEQ ID NO: 73571 - protein, 195 aa, Zea mays
  Coding DNA Sequence Number=SeqID_30196
MGRRETEHEGGKERRRQAKGETRGLRVVLRLGRPWVGRGGGSSEVEVESVFRGRGRVRALGRARRRPLSETKAESEPWGRARRSSSSSGAEAESEPWGSGEAEFRMTLEAGEGDCQPHSVEWHSSRSDAGDAVFLSGRLLERRSDCGHFGSVDRRAKVRIRCQTTLALNVPAIRSVGREIWPRLVVGEDRASGET

SEQ ID NO: 73572 - protein, 493 aa, Zea mays
  Coding DNA Sequence Number=SeqID_30197
  Gene Ontology: Mol. function=cysteine-type peptidase activity; Biological process=proteolysis
  Homolog annotation: Hit_ID=Q8S456; Match level="QueryCoverage=82%, HitCoverage=59%, E-value=1e-165, Identity=64%"; Hit description =Putative uncharacterized protein 163K15.6
MRSVDRPPTNPKRLTIESSQEKLNIRCIPYDVIVSTWIMSDRQRDAVARLGFSSIFDLRTDALESRSLIRWLMDKLDPHDMTIRPGASKELKITRETVRLILGLPCAGGGREFTDWYGEVDAAAKLRHDLKNCKEEFDVVKLQDKIVLGNDDELSIRCFFLILFNRLLFPSASWGITNNEVLMTSNMARMTDIDWCQLVYTDLCDAATRWHKRNKTNITATIYGCSLIVLIYYLDHLHHPASPDNKYDVTILIAANSCNWALYSFVAVQKHVMSLHQNGLFLTFSTYMCHHRPMFDAHDKEVDKYCDSLQLSHQMIVLKQIELSEIFGEMIDEVLRAATQRDTQQEVCDDIYPPTTSMPPTNAPVSTPPVPTPDNQQHDQEIHVPTDDIKVSEQEGQNIVKHDTPVSGAPQFDKTSLTEATTELVARDISSKSAVAEPPHVSREECARKLFKFIFLGQLDPSMSIIDFGGFGGFVLDVVQSFGPNKCLENLFM

SEQ ID NO: 73573 - protein, 521 aa, Zea mays
  Coding DNA Sequence Number=SeqID_30198
  Gene Ontology: Mol. function=helicase activity; Biological process =RNA-dependent DNA replication
  Homolog annotation: Hit_ID=Q6AUV2; Match level="QueryCoverage=62%, HitCoverage=22%, E-value=3e-26, Identity=25%"; Hit description =Putative uncharacterized protein OSJNBa0091B22.10
MYFKLDYLELLGKALALESGSNARRLKELSWIGAALDWSDGNRLASRLGRKERRRDRWGFLLFGAGLSLLIARRRFWKPGNGGDVAGLTTERGTPIHAEIAAALAVDKGSLIEIEKVYELKRFRVTPSRNYFKPIDNNFMIQFTLYTQAKVVKDPPQVFPRYIYKLTCFENIEDNIDNRTYLIVVLGMLTQINPPHLIGYNNSTIIRDIFIKNTSDMSLKITLWGNQASSFSISDVYNQSNNQPIVILLVGFLAKRFKGQPYLSSTTASSWYFNPGIPEAQTYYNSQKATDALLLSHALCKIANGGTHLALGATNLHLKLDITAHHVAAQILTLDKLSFIATDGTCEAEFFCFDSIARKIVGKPCDNLVTAVTTSQGPPAALAAIVCLKFTLAVAINMSAYSVTNRVFSILSILTNHGRQAFIPSNMPSHPQQELDTQDEIPSLPTTQDSPATSMAKLSTCSNERNEGDDQHISELNNEELSSPPKRYLLIVHLSRAPSLLDHECFPIDMNPIKSTITFGP

SEQ ID NO: 73574 - protein, 126 aa, Zea mays
  Coding DNA Sequence Number=SeqID_30199
MQVGGSRLSLTDAILAKGSAITLKNDEEQGNEESGKEKFKVWWPCCYIPSFRKQRSAQKQQKLITNSPWDLPFLLLSSSLQTPIEIAATDGEPRRRAAPWRGEENGGAARVLGGHDCKGLRRKKMR

SEQ ID NO: 73575 - protein, 70 aa, Zea mays
  Coding DNA Sequence Number=SeqID_30200
MEASRRGGRDAGRKRPGWGGGTGRRVGTLTRFGVCDDAASSPALEPTASSSVGAGDVAATLSSSPAAGRS

SEQ ID NO: 73576 - protein, 91 aa, Zea mays
  Coding DNA Sequence Number=SeqID_30201
MDKKNTVDASNSKGTAKMTALQRLMKEEAELKKQLEASKLRGEELKAREKNFAPELVRMMNADFEGIGLEELKIYHDMLVEIWSMIDDQLN

SEQ ID NO: 73577 - protein, 341 aa, Zea mays
  Coding DNA Sequence Number=SeqID_30202
MQAACNRTKGAHPFNFDASSMEAQAHTSWTGKGDTPEGILLREGNGPRAPLLIRGSKAGPSEGFNSRLRALGLRAHYWSEVRRPAPRKGSTAASGHSGFAPTTDQGFVGWPSKGSQPPQTQTKSGRGRHRKLRLARPPGLGLGLGPGRRRTPPCPTPGLGLGLGPGRRRSPSGPTLGLGLGLGPGRRRTPPRPTPGLGLSPGLSRRSLPRPTQGLGLGLNLGRQTRPRPRRSLRLALPRARTDHVTGGAIITLPLASSGYGEQDRRPIWLAPVKQIMMTPPCSMTTVALSPLTEARRRQQGLDSPDGCPSTRLQRSSDGHDITQTGCQNLSGCHDGMYLGH

SEQ ID NO: 73578 - protein, 123 aa, Zea mays
  Coding DNA Sequence Number=SeqID_30203
MRLRGLASRLGIKSRDGNGYPLPETQWVFALLGYGFGSISLPMGLLMGSNGNPTVGMGNPLGTRNPHGYEFGQNFIPVMGMSFLAGVFFLRGYGFGQVIPSGFLPIAISNQEGISRNHLLLKF

SEQ ID NO: 73579 - protein, 66 aa, Zea mays
  Coding DNA Sequence Number=SeqID_30204
MEGDRAPDSYSDCSVVHQTVRCTTRQKDHLFTPPLGALTIAITSDIWSGNAKEDYLSVVAHYVSKD

SEQ ID NO: 73580 - protein, 208 aa, Zea mays
  Coding DNA Sequence Number=SeqID_30205
MGPTVADPDGPRSRADGPDMCRSAGLLPICVCSSFKRLEFVGATYIWGNRSRSERSQICRPLSNDFVVPVHFEVSQELRLCFLDQLLLALLEQKLFFSRQGFPCRCDDIAGGKPQSYLLNRPLRADLIGLDVFSPAESPKSMLTLFWSAKHSTRTVAVPSAQGRTVRAQGPDGPRPGARRGSALCARADCPRPGAGRSAAWCAARAPA

SEQ ID NO: 73581 - protein, 209 aa, Zea mays
  Coding DNA Sequence Number=SeqID_30206
MDAQYDVTQEWLDRVKIARKGLRGTKRRNRRTIKGDPKRSLPVRLANRSLGAVRGGSTAPPGRFNRCWSTLTSLRSVCASVCQSDWQTGCQLWFYIEFFVDSLLLELLAPRRLGVSYVDPRAIDLAMRIAERMFLKMKEDEAKKSIEEEENDRWRPNDESTSSQGSSFKSTSHMCFVANGSDSESESEDEDEHESDSEDENDLQKFSLN

SEQ ID NO: 73582 - protein, 60 aa, Zea mays
  Coding DNA Sequence Number=SeqID_30207
MNKNTRDTRFIPRFGHTTKVPYFLVEAPTKSRERKPQLNCPEASSAGVWSKRFTAEVEFS

SEQ ID NO: 73583 - protein, 52 aa, Zea mays
  Coding DNA Sequence Number=SeqID_30208
MTQLFEFYKAEDSERLFDDDEEDGYDYAYGNGKEEGVEVDLQEFKDFDEFED

SEQ ID NO: 73584 - protein, 52 aa, Zea mays
  Coding DNA Sequence Number=SeqID_30209
MTQLFEFYKAEDSEHLFDDDEEDGYDYAYGNGKEEGVEVDLQEFQDFDEFED

SEQ ID NO: 73585 - protein, 256 aa, Zea mays
  Coding DNA Sequence Number=SeqID_30210
  Homolog annotation: Hit_ID=A7R375; Match level="QueryCoverage=44%, HitCoverage=24%, E-value=1e-06, Identity=34%"; Hit description =Chromosome undetermined scaffold_489, whole genome shotgun sequence
MAYFFSGFVNLPLKWPSSSGFGPLEEKGSPGSDPAAAERQPLSLKLSSVAWRRNIVKSCFWGPSEAEGPQQAAIKNVREKCNVEITKDNIMSRNKTFDKHHTIINGMLETSGFGWDWNKNKISVDSDSVWEAYVAEVSVFYCYTIINVCMKNKEANGYKHKTILYWDLTSLVFGKDHANGEATKTLADGARDMSKEEGTGKDLTSSTTSGSLKRQRSSDSFTSMMPEKLDKFTEAIRDEAPKGPTSKDFFSTLEDI

SEQ ID NO: 73586 - protein, 152 aa, Zea mays
  Coding DNA Sequence Number=SeqID_30211
  Subcellular localization annotation: CTP_CleavageSite=16; ConfidenceScore=5.29e-01
MRAPPSLSFCLICFSRATTPSPSLPPLSLPPRTLGDPVTVIAGFLDPQGRLRLLLDQREEWERSTSDILEARSETAEARTRVVSIQNAYENLVGAVRRDTKLATLTHLESANTNSHLRILGRGKAVAEARVVALEEELNGRTKKDEKLLATL

SEQ ID NO: 73587 - protein, 91 aa, Zea mays
  Coding DNA Sequence Number=SeqID_30212
MQRKLGVAEGDFLVVQRRSEELEREWLLLSKVVNVMQGRFGVLPSPESESFISRLEGFAGGIELKELSKGYYDAWSDSDFVGMVKTTEPFA

SEQ ID NO: 73588 - protein, 168 aa, Zea mays
  Coding DNA Sequence Number=SeqID_30213
MQARSSRLPSCVGYHVCCIRTDRITYIVASWGWAGMNFSAGRTPREGASKAAYKILKDLLDCFPREIATIMRGIFPRGDPFNLKWDQPKGRALTGGDSEQQHSDVVASSAMFAVMQLYNSSERNLGMVNGSIALAQNKLYQAQEVHAAELAQVQAELALVTLQKDEVV

SEQ ID NO: 73589 - protein, 87 aa, Zea mays
  Coding DNA Sequence Number=SeqID_30214
  Subcellular localization annotation: CTP_CleavageSite=37; ConfidenceScore=5.17e-01
MAKSVPNELGVPSDSDQNHNVKASTKNTKVGAGPKLCAGELRHVSRKRNRLKRKRLFRPRWVTIESLANVKGMGVILHGLRLVPINR

SEQ ID NO: 73590 - protein, 92 aa, Zea mays
  Coding DNA Sequence Number=SeqID_30215
MEYTISLPFIFWLHRLFFGVSALTFRCCSGGEGGGCGHDDEAEVPDLSASRDNSDLSEDDPCDPTTTSKPEAPMQSLNQLPVVTDLADARSA

SEQ ID NO: 73591 - protein, 66 aa, Zea mays
  Coding DNA Sequence Number=SeqID_30216
MASRERKKPRPRRSSGARGREEAGRGYQEAEARAEGEVTDGASGMGARSRAQPHGWCFLNGEVLIR

SEQ ID NO: 73592 - protein, 57 aa, Zea mays
  Coding DNA Sequence Number=SeqID_30217
MVGTSAVTARRQSGSVRHCTPRRYLLNLLDGVTWPSSLPPGQMAERVIASAGEDLEE

SEQ ID NO: 73593 - protein, 91 aa, Zea mays
  Coding DNA Sequence Number=SeqID_30218
MAIGRLLSHGAPDSPTTVAREVSVAPLAHRTLSDDLPDSPVNYSGAPLEFLEGSEFSFKFPGALDTVRWHTRQSGAPDQVRLSEKCKLCDI

SEQ ID NO: 73594 - protein, 139 aa, Zea mays
  Coding DNA Sequence Number=SeqID_30219
MTREASPRGHSAAHNLRGNNKAPSGRQLQGAEAPGASEEDLGINPRKFIAYSMVKTRVTLQECVESPFRSRRRSLKPKQDLHTASCHSPYIPEYLAIHRLPGHNSHPHHHYNRPILEASQKGANTLSSNVKSGRNLKLA

SEQ ID NO: 73595 - protein, 459 aa, Zea mays
  Coding DNA Sequence Number=SeqID_30220
  Gene Ontology: Mol. function=binding
  Homolog annotation: Hit_ID=A3C4C6; Match level="QueryCoverage=96%, HitCoverage=43%, E-value=1e-151, Identity=65%"; Hit description =Putative uncharacterized protein
  Pfam annotation: Domain name=PUF; Domain location=153-187; Score=3.5; E_value=4.8; Accession=PF00806.10; Description=Pumilio-family RNA binding repeat
  Pfam annotation: Domain name=PUF; Domain location=237-271; Score=3.0; E_value=5.5; Accession=PF00806.10; Description=Pumilio-family RNA binding repeat
  Pfam annotation: Domain name=PUF; Domain location=411-445; Score =20.0; E_value=0.0087; Accession=PF00806.10; Description=Pumilio -family RNA binding repeat
  Pfam module annotation: Pfam domain module=PUF::PUF::PUF; Domain location=153-187::237-271::411-445
MVCVGSKAIRPKGSTINGLGDGALDDSSHKKRTRKDTSEKHGKGGHSSSKGPSVGKPRHVKDRKQRKDDGKKGKGRRKDHHSGSSVMVNPRTKNLNNQDAVPSSDTSKPVQNVLRKRVDPETAKYFMEISNLFDNKEIDFEERSTICANALEETRGKEHELATDAVISHTLQVLIEGCELEQLCTFLRNCIDYFSVIAVDKNGSHVAEAALKSLATHLEDEASRAMIEGILNKICKVIAVDAVTVMSSCYGSHVLRTLLCLCKGVPSDSLQDFHTTKRSSVLAERLSCGTNQSSRHVPKNFENGFSGMFRSFVREMLHNAKADIATLRVDKNSSLVLQTALKLSSGDDNELHHIISILLGYDEYKTVQTRDYSEKMDEIVTLLEESAYSHLLEVIVEVAPDELRNGMLARSLKGALFAISSHHCGNYVVQAFISSTKTSDQHLLLSTEYSGDNLGWGGL

SEQ ID NO: 73596 - protein, 238 aa, Zea mays
  Coding DNA Sequence Number=SeqID_30221
MAEFKRQELPYSYLRTFCTGFDVSEDAAYSETRQRGSRISILKETRIPENGNQGRTTWKEKKGRNTWWVLVAGEETDEGLGTWRRVAAAKAFHTVLAEIYRIISKKPLSSEESGLGSVGASVRPAREEEEEQRMRPAREEEEQRQEEDWSVSVQVQLARQRGKEEDESRRHGIWGHAMERRAEQWRLAVAAMLAVRLCLGEGRGRRKTASGRAVADDNWVVDLWWPGLLAEPWAAHEL

SEQ ID NO: 73597 - protein, 90 aa, Zea mays
  Coding DNA Sequence Number=SeqID_30222
MAVGRLLSHGAPDSPTTVAREVVVAPLAHRTLSGDSLDSPVNYSGVPLEFLEGSEFNFKCPGAPDTVRWHTGQSGAPDQGAFGLSFALFV

SEQ ID NO: 73598 - protein, 67 aa, Zea mays
  Coding DNA Sequence Number=SeqID_30223
MEYNGSSSLISCEKQTIRIKFLSLQVTALVPTITGMGDHVSGRVRGKVYCQVQSGFNNIMLKEEKLN

SEQ ID NO: 73599 - protein, 174 aa, Zea mays
  Coding DNA Sequence Number=SeqID_30224
MPSAVATRTNAPRPTPSYSKRARDSSETWEGELTEDGGGHRADHDGLRVCGGVESTATNSGAAGGLSSEIRLRPPSTRPKGAPGFLTPSTVVGLRGVMDKEGKDAMAAAALSLHRTDWNAWPGFSVNDAPAMRGEFVGGRGGAVLASLAHMPENKKVTGVRGNSADVWDPQIGR

SEQ ID NO: 73600 - protein, 92 aa, Zea mays
  Coding DNA Sequence Number=SeqID_30225
MGLQNNLLGLVNCITFESQRIRTLQKGSPWWDVPSLLHGKDNRTFAVVDSASASGVSAASLLRRVFVATSSVSSLLLISDGVHLGLVTVLSV

SEQ ID NO: 73601 - protein, 80 aa, Zea mays
  Coding DNA Sequence Number=SeqID_30226
MAEVSVSRIGNPTRLDTTTPSCTGDDHRPDLPLTRGPDAQMVVWPPLFFLFSLLTVTVAHRMRVELRGRVGGDAFVVDRG

SEQ ID NO: 73602 - protein, 108 aa, Zea mays
  Coding DNA Sequence Number=SeqID_30227
MARTRKTARKSTGPLGVPRHQLAPRHEESSSGSNDPIGDLEAKVEQLGQSYVTGIGYGRRTANMPSRTLAEAIAANPPPVPPTLAEAIAALVNATADNTRFLREMAGN

SEQ ID NO: 73603 - protein, 139 aa, Zea mays
  Coding DNA Sequence Number=SeqID_30228
MGYNKDVHTINSTHTVAYKWDQATQGGFTWAHHLNNAWVATEAFVLHAPGLWQLVRPLPFLALMGTDKAVACFVNTLCLRAFAPSVFVFLRFSFVMIHPYPVIVKAGGGMTNQHAGQSETINHRRGKARALEKEIADMQ

SEQ ID NO: 73604 - protein, 354 aa, Zea mays
  Coding DNA Sequence Number=SeqID_30229
MKRIVRSGCHVGLLLGPKLAVCEKRLIVCIEGAPAKCSVNCLNAFGGFTALDTEHTIVDKMSGIKPGLTTSTTIYGAPIFDQYCDKDLGGNAMELIQRGPIGIERMNLCSTTFARLTKPDHDDDLCCTGILDIQFARRLPSADNEPVFNGESSSSTTAPPRFPLDLEQVVDDLVGTETFQFSHDLLFFHASVDNVCLNDTVTDRESTLQSPRLEYECVRVSKVTAQGRLKELNSLLAATTKTTSCSTPASTPAPVYGFGSVCGDGGVARVEVRASPGVYDRYTEPGFHVFILPLFRGEQAKEEEVPVNTSSKCSMRVLNHGAYSVPNLPVVCIVGGSNFPSLRGFEAIDYQSKR

SEQ ID NO: 73605 - protein, 427 aa, Zea mays
  Coding DNA Sequence Number=SeqID_30230
  Gene Ontology: Mol. function=transferase activity, transferring glycosyl groups; Cellular component=cytoplasm; Biological process =carbohydrate metabolic process
  Homolog annotation: Hit_ID=Q9LKJ3; Match level="QueryCoverage=62%, HitCoverage=33%, E-value=1e-120, Identity=75%"; Hit description =Alpha-glucan phosphorylase, H isozyme
  Pfam annotation: Domain name=HSP20; Domain location=325-426; Score =73.6; E_value=6.5e-19; Accession=PF00011.12; Description=Hsp20alpha crystallin family
  Pfam annotation: Domain name=Phosphorylase; Domain location=84-427; Score=-194.6; E_value=1.4e-19; Accession=PF00343.11; Description =Carbohydrate phosphorylase
  Pfam module annotation: Pfam domain module=HSP20::Phosphorylase; Domain location=325-426::84-427
MPEIKCGAAEKVKPAASPEAEKPADIAGNISYHAQYSPHFSPFAFGPEQAFYATAESVRDHLIQGRALTNAVGNLGITGAYAEAVKKFGYELEALAGQSKVNNSPDISSKEKDAALGNGGLGRLASCFLDSMATLNLPAWGYGLRYRYGLFKQHIAKEGQEEVAEDWLDKFSPWEIPRHDVVFPVRFFGHVEILPDGSRKLVGGEVLKALAYDVPIPGYKTKNAISLRLWEAKATAEDFNLFQFNDGQYESAAQLHARAQQICAVLYPGDATEEGKLLRLKQQFFLCSASLQCWPINVYIYTRSVCGVELELYASTFQKNPHGTGARLNGDGVAVRSVFGLDGEDHREGDQRRPKEAAEAHERSKEDKGDKWHRVERSSGQFVRRFRLPENAKTEEVRAALENGVLTVTVPKAEVKKPEVKSIQISG

SEQ ID NO: 73606 - protein, 341 aa, Zea mays
  Coding DNA Sequence Number=SeqID_30231
  Homolog annotation: Hit_ID=A2YGC2; Match level="QueryCoverage=58%, HitCoverage=88%, E-value=4e-10, Identity=28%"; Hit description =Putative uncharacterized protein
  Subcellular localization annotation: CTP_CleavageSite=56; ConfidenceScore=5.13e-01
MAALRTIDPYSYLDLKVLSKVGHLDQLYVICLSQKVVSLFFMFTFWSRSSTLTLVLTMSFVDGLYQREVESERPPSPAPQPEKPPTPPQGIPATGGDPDRDGDDDDAGGSSSHGMERSEELEPEGWIARPITHDAARGCHFHDALDTLLRRAFDRHTWSIEYRCVVYQHRRGLYPNQWEATCSVRRPDDDLRGAEAFSEHYSITERDTAETALQDAARWALSQYCSLFSGVADGLDLKYYPRCSTGSAGGVIVSPVGEGNPRLSSMVNLAVVLNTELDHALDELGKVWAEVVELRAECTARHYLDGGSLAPVGIQHPYHSPPRGHFDYGTLDCRTRIDLDP

SEQ ID NO: 73607 - protein, 491 aa, Zea mays
  Coding DNA Sequence Number=SeqID_30232
  Gene Ontology: Mol. function=protein serine/threonine kinase activity; Cellular component=plasma membrane; Biological process =protein amino acid phosphorylation
  Homolog annotation: Hit_ID=A2YKH9; Match level="QueryCoverage=100%, HitCoverage=100%, E-value=0.0, Identity=75%"; Hit description =Putative uncharacterized protein
  Pfam annotation: Domain name=Kdo; Domain location=15-246; Score= -81.8; E_value=0.037; Accession=PF06293.5; Description=Lipopolysacchar ide kinase (Kdo)
  Pfam annotation: Domain name=Pkinase; Domain location=52-291; Score =217.9; E_value=2.4e-62; Accession=PF00069.16; Description=Protein kinase domain
  Pfam annotation: Domain name=Pkinase_Tyr; Domain location=52-289; Score=-49.0; E_value=2.1e-09; Accession=PF07714.8; Description =Protein tyrosine kinase
  Pfam annotation: Domain name=efhand; Domain location=338-366; Score =33.3; E_value=9e-07; Accession=PF00036.23; Description=EF hand
  Pfam annotation: Domain name=efhand; Domain location=375-403; Score =22.6; E_value=0.0014; Accession=PF00036.23; Description=EF hand
  Pfam annotation: Domain name=efhand; Domain location=417-445; Score =24.3; E_value=0.00045; Accession=PF00036.23; Description=EF hand
  Pfam annotation: Domain name=efhand; Domain location=447-475; Score =28.8; E_value=2e-05; Accession=PF00036.23; Description=EF hand
  Pfam module annotation: Pfam domain module=Kdo::Pkinase::Pkinase _Tyr::efhand::efhand::efhand::efhand; Domain location=15-246::52 -291::52-289::338-366::375-403::417-445::447-475
MGLCSSSTAARAASDPGAAAAGDAAAAKKGRGIVACGKRTDFGYDKDFEVRYSLGKLLGHGQFGYTFAAVDRASTERVAVKRIDKNKMVLPVAVEDVKREVKILKALQGHENVVHFYNAFEDDNYVYIVMELCEGGELLDRILAKKDSRYSEKDAAVVVRQMLKVAAECHLHGLVHRDMKPENFLFKSKKEDSPLKATDFGLSDFIKPGRQFRDIVGSAYYVAPEVLKRRRPFWDKTEDGIFKEVLKKKPDFRRKPWSNITSSAKDFVQKLLVKDPRARLTAAQALSHDWVREGGKASEIPLDISVLHNMRQFVKYSRFKQFALRALASTLNSEEMSDLRDQFNAIDVDKNGTISLEELKQALAKDVPWRLKGPRVLEIIEAIDSNTDGLVDFEEFVAATLHVHQLVEHDTEKWKSLSQAAFDKFDVDRDGYITPDELRMHTGMKGSIDPLLEEADIDKDGKISLDEFRRLLKTASMSARNVQTPRGVRKS

SEQ ID NO: 73608 - protein, 487 aa, Zea mays
  Coding DNA Sequence Number=SeqID_30233
  Gene Ontology: Mol. function=zinc ion binding
  Homolog annotation: Hit_ID=Q10PC5; Match level="QueryCoverage=95%, HitCoverage=66%, E-value=1e-176, Identity=64%"; Hit description =Tropomyosin, putative, expressed
  Pfam annotation: Domain name=DUF1423; Domain location=261-487; Score =78.5; E_value=2.2e-20; Accession=PF07227.2; Description=Protein of unknown function (DUF1423)
  Pfam annotation: Domain name=PHD; Domain location=408-470; Score =13.0; E_value=0.0004; Accession=PF00628.20; Description=PHD-finger
  Pfam module annotation: Pfam domain module=DUF1423::PHD; Domain location=261-487::408-470
  Subcellular localization annotation: CTP_CleavageSite=62; ConfidenceScore=5.03e-01
MASRTPRRPPLPKRSTILVPMFGDSDGSKDTSAAVPGSNPSEPPFPSRELTLSSYLCDKALPAAAGPSSSPNPEAAAGPAEEAAANAKLCVERDMLHLTAPKRGDPPGDDSSVVGASQQPSSSLLPQSQLASFLQVDGDLRCVSAAAASARSACRARAAPRRIYSANTGRTRSINSDDLSYSYSVFSHNPSCSLTHNSTDIYTAGEGTNGSVHSRFNFRPMGDGSVAFASAQLKEGTASFFPMELPARAAAALSASGSFDGSRGGMHSSRPDRILREIVSDSMLAMAQVLQDFPCETLEVLRETVRSMVDAPEKRDKLSSLPRKLERRSDLTAEVLGRANKTQLEILVAIKTGMATFVTGKGRVSVSELVEMFLKTRCRNMNCKSAVPVDDCECKICSTKKGFCSACMCPVCQKFDCAANTCSWVGCDVCSHWCHAACALEKNLIRPGPTLKGAMGTTEMQFQCLGCNHASEMFGFVKEVFNCCAEN

SEQ ID NO: 73609 - protein, 323 aa, Zea mays
  Coding DNA Sequence Number=SeqID_30234
MDEEKVDVGNIVNPSFEVMAGSGCSAQILSKCSDTHELDNNDGENIKASVGNVVEQSLDVAAVGSDLVHVSAKADVGEQPNVTPLTSLDVQNESTQISSDVDTLEQIEQDNLDTLIRICEHNKPKKLNVARVLPKDYTCTTEDLQLIEYIKSLLGKKVVVNIDTAWLNRYDMECLFHGDLQLTGEASTSILYNIKYISLYLSYYIVLSAYIHSIRDEEHILHREGGKVFLESTFISSLLKRDGDPKILLNCKEDTLENRVDNYLQADMVFIPINIENFHWYLAIVNAKKMRVSCGLWMVNYMKYWIGSSLSNNITQVDELHFI

SEQ ID NO: 73610 - protein, 662 aa, Zea mays
  Coding DNA Sequence Number=SeqID_30235
  Gene Ontology: Mol. function=helicase activity; Cellular component =chromatin; Biological process=viral genome replication
  Homolog annotation: Hit_ID=Q8LML8; Match level="QueryCoverage=100%, HitCoverage=48%, E-value=0.0, Identity=64%"; Hit description =Putative DNA helicase homolog
  Pfam annotation: Domain name=DUF889; Domain location=472-662; Score =274.2; E_value=2.6e-79; Accession=PF05970.5; Description=Eukaryotic protein of unknown function (DUF889)
GKDSYPIYRRRDDGQKVRVRGHDLDNRWVVPYNPTLLRMYDCHFNVEVCSSIKAVKYIYKYIHKGRDRASVTVIDVDGGQSINEIENFRDSRWVSPQEALWRIYSFDLHGISPPVLQLQLHLPGMHLVSYNINDDMRQVLNKDNIDKSMLTEYFRANQLFDWASNYLYREFPEVARWWPGAKKWTARQQRMQVGRIVSAHPAEGERYYLRVLLNHVRGATSFESLRTYDGNKLFATILVFCEPTNVVGLWNKHLEAMSDDFCRTHSNSHVVEQLVLLDIRDMLQTMGKDIRLFPLPVIKDEHDNMADVVREIFEEMNIPEDPEAEFVVSSLNHEQRHAYDVILSSVENISGGVFFVDGPGGTGKTFLYKALLATVRCSGKIAIATATSGVATSIMPGGRTAHSRFKIPLNIKEGDVCSFTKQSGTAKMLRRSSLILWDEATMTRRQAIEALDKSMRDIMDRPHLPFGGKTVVFGGDFRQVLPVVRKGTRAQIINSMLRRSSLWDSMQHLRLVRNMRAQSDQWFSDYLLCIGNGIEETCNDDNVRLPDEICIPYTGEDDDVDRLIEEIFPSLETNMHNRDYITSRAILSTKNENVDKINMRFIDRFLGQEMVYHSFDVAVDDPNNNYPPEFLNSLTPSGLPPHILKLKVNCPVILLRNLDPPN

SEQ ID NO: 73611 - protein, 58 aa, Zea mays
  Coding DNA Sequence Number=SeqID_30236
MAVMGSTSEKMYLYQTKYQNKITRNGSGEMVRVACILRGKRLDSGVSVLSVGVNLIWS

SEQ ID NO: 73612 - protein, 297 aa, Zea mays
  Coding DNA Sequence Number=SeqID_30237
MSAFRDWGVPKPTSECAACPSPDGSSAWASAKGGSEVAGDGRERGGNPAAFVFVPRPGRGAIIAYLAELARWDTGLVLCGPSRLGVGPSPSPWVGRGGGRSAEARAESKPWGRAERSSSSSGAEPESEPWVGRSGVRRLPGLSPSPSPGSGRAEFAVFRVLARVRALGRAERSSSSSGAEPESEPWVGRSGVHRLPGLSPSPSPGSGGAEFAVFRVLARVRALGRAERSSPSSGSKPESEPWVGRSGVRRLPGLSPSPSPGSGRSGVRHLLGLSPSPNPGSGGASYGAFGRAWLPLR

SEQ ID NO: 73613 - protein, 84 aa, Zea mays
  Coding DNA Sequence Number=SeqID_30238
  Subcellular localization annotation: CTP_CleavageSite=54; ConfidenceScore=5.41e-01
MVVSIATIAQEKVKLWKETSRSSKTTTSSRRGRQTLNKNRKRCSLHRRGRSAARGRMVHDLAQDWRSLPDGRTIRAYRPDDPRL

SEQ ID NO: 73614 - protein, 365 aa, Zea mays
  Coding DNA Sequence Number=SeqID_30239
  Subcellular localization annotation: CTP_CleavageSite=37; ConfidenceScore=5.06e-01
MQAACNRAKWTRFSDSRHASMEAQAHASCNRRTGCCMQATVPPVPPPRLLDCGTNTARGSSGHVVSQAHVPSGDSKRTPPHGVKTTRPSGGRRFAFAETTAPKKGPGKRDTPKGILPREGTRLRASLLIRGSKAGPSKGSTAASDRVGPTPTTGVRRLAPEGFTVASDAERGMTRGDRVRQITRRYFWACLWAPSRPPTNGARTSTRITRLQLTGVTMFGAHRGLGGCSRKPGSGQTVDSVNIPARELGPRPYTRATACSHEGTTRPAEALRKALRPRRSETTPPRPRGLHPAGALACTHRNKMQPRKAGPLAKKCDESLQASANTPFEARGLLSGTIIRGTLKTPNSQLVTPISIKLQRPDGCD

SEQ ID NO: 73615 - protein, 67 aa, Zea mays
  Coding DNA Sequence Number=SeqID_30240
MSRAFDDYYIKDCGVILAPEVMQKRIDNSDQFVILATVRPYAAVETREQLVDQTPAWHTGHCPMHPD

SEQ ID NO: 73616 - protein, 67 aa, Zea mays
  Coding DNA Sequence Number=SeqID_30241
MAAAARGLAGLGAELREGRREGLILSKALKAQKKAEDGRCQVALGNLRSEVITLRNEALKKTKYYSP

SEQ ID NO: 73617 - protein, 283 aa, Zea mays
  Coding DNA Sequence Number=SeqID_30242
  Gene Ontology: Mol. function=transferase activity, transferring glycosyl groups; Cellular component=intracellular; Biological process=protein amino acid ADP-ribosylation
  Homolog annotation: Hit_ID=Q9ZSV1; Match level="QueryCoverage=29%, HitCoverage=8%, E-value=2e-35, Identity=95%"; Hit description=Poly [ADP-ribose] polymerase 1 (EC 2.4.2.30) (PARP-1) (ADPRT 1) (NAD(+) ADP-ribosyltransferase 1)
  Pfam annotation: Domain name=PARP_reg; Domain location=141-273; Score= 17.9; E_value=1.6e-05; Accession=PF02877.5; Description=Poly(ADP -ribose) polymerase, regulatory domain
MRGGEAIETLPTQVGRDGPVQRLQRARTTPASTTIDYRHLVITSNGVSGEGGGGGGDKHILVRRQPTIIVTTTIAPTLGLGTASRQRSRRKGGGGGTRRWGGEDCGRRAWSRRRRGAVAGLSAGMKGWRRAEGRVTHPTLQIRNRTSVQLPFHLLSSTSPGNCHFLVEGTEAAMMEFEINMSEMPLGKLSKENIEKGFEALTEIQNLLKDTADQALAVRESLIVAASNRFFTLIPSIHPHIIRDEDDLMIKMILPILPLKKSKYNAPISNLVNQKYATQLLQN

SEQ ID NO: 73618 - protein, 85 aa, Zea mays
  Coding DNA Sequence Number=SeqID_30243
  Gene Ontology: Mol. function=transferase activity, transferring glycosyl groups; Cellular component=intracellular; Biological process=protein amino acid ADP-ribosylation
  Homolog annotation: Hit_ID=Q9ZSV1; Match level="QueryCoverage=56%, HitCoverage=4%, E-value=5e-21, Identity=100%"; Hit description=Poly [ADP-ribose] polymerase 1 (EC 2.4.2.30) (PARP-1) (ADPRT 1) (NAD(+) ADP-ribosyltransferase 1)
  Pfam annotation: Domain name=zf-PARP; Domain location=11-77; Score =21.0; E_value=8.2e-06; Accession=PF00645.9; Description=Poly(ADP -ribose) polymerase and DNA-Ligase Zn-finger region
MAAPPKAWKAEYAKSGRASCKSCRSPIAKDQLRLGKMVQASQFDGFMPAVLSGFCGWYLECRLDWISGRRFGAICYEKPVGLMLC

SEQ ID NO: 73619 - protein, 726 aa, Zea mays
  Coding DNA Sequence Number=SeqID_30244
  Gene Ontology: Mol. function=transferase activity, transferring glycosyl groups; Cellular component=intracellular; Biological process=protein amino acid ADP-ribosylation
  Homolog annotation: Hit_ID=Q9ZSV1; Match level="QueryCoverage=81%, HitCoverage=60%, E-value=0.0, Identity=97%"; Hit description=Poly [ADP-ribose] polymerase 1 (EC 2.4.2.30) (PARP-1) (ADPRT 1) (NAD(+) ADP-ribosyltransferase 1)
  Pfam annotation: Domain name=BRCT; Domain location=343-421; Score =35.3; E_value=2.3e-07; Accession=PF00533.17; Description=BRCA1 C Terminus (BRCT) domain
  Pfam annotation: Domain name=PADR1; Domain location=241-294; Score =109.1; E_value=1.3e-29; Accession=PF08063.3; Description=PADR1 (NUC008) domain
  Pfam annotation: Domain name=WGR; Domain location=471-559; Score =157.1; E_value=4.8e-44; Accession=PF05406.6; Description=WGR domain
  Pfam annotation: Domain name=zf-PARP; Domain location=65-139; Score =58.0; E_value=3.2e-14; Accession=PF00645.9; Description=Poly(ADP -ribose) polymerase and DNA-Ligase Zn-finger region
  Pfam module annotation: Pfam domain module=BRCT::PADR1::WGR::zf-PARP; Domain location=343-421::241-294::471-559::65-139
MPVSFYLLGIDRRHFNLIRNAISVDDVEGIDALRWDDQEKIRNYVGSASAGTSSTAAPPEKCTIEIAPSARTSCRRCSEKITKGSVRLSAKLESEGPKGIPWYHANCFFEVSPSATVEKFSGWDTLSDEDKRTMLDLVKKDVGNNEQNKGSKRKKSENDIDSYKSARLDESTSEGTVRNKGQLVDPRGSNTSSADIQLKLKEQSDTLWKLKDGLKTHVSAAELRDMLEANGQDTSGPERHLLDRCADGMLFGALGPCPVCANGMYYYNGQYQCSGNVSEWSKCTYSATEPVRVKKKWQIPHGTKNDYLMKWFKSQKVKKPERVLPPMSPEKSGSKATQRTSLLSSKGLDKLRFSVVGQSKEAANEWIEKLKLAGANFYARVVKDIDCLIACGELDNENAEVRKARRLKIPIVREGYIGECVKKNKMLPFDLYKLENALESSKGSTVTVKVKGRSAVHESSGLQDTAHILEDGKSIYNATLNMSDLALGVNSYYVLQIIEQDDGSECYVFRKWGRVGSEKIGGQKLEEMSKTEAIKEFKRLFLEKTGNSWEAWECKTNFRKQPGRFYPLDVDYGVKKAPKRKDISEMKSSLAPQLLELMKMLFNVETYRCILASFFNVMLAHISNVAPPGDALCRDLGNVSKTKMEGLEVKEVDNTSFKLWYTGTTTNRNEGVLIDKSLKNGVVDVGRQGDTIILVKLVVGDLVLNVITAYAPQVGHDESAKRGRLR

SEQ ID NO: 73620 - protein, 166 aa, Zea mays
  Coding DNA Sequence Number=SeqID_30245
MGSLMLGAGRGRQERGHLASSYSSGSGRLDTGIVPKALPCSLDYKLVTILAHICDAPGSALRNGCDSCPSGSTGGVIVSPVGEDNPRLSSTVNLAAVLNTELDHALDELSRARAEIALLRAERAERRHLDDGSPAPIGTQHPYRSPRRGRQSYSNPDCKTKIDLAP

SEQ ID NO: 73621 - protein, 302 aa, Zea mays
  Coding DNA Sequence Number=SeqID_30246
  Subcellular localization annotation: CTP_CleavageSite=43; ConfidenceScore=5.59e-01
MVVSIATTAQEKVKLWKETSRSSKTTTSSRRGLAATPSRLPVKAAMARLRHTARKSVIPFLPSRLAERPLRRPVAGQSSHLERLHHRLHEEQERRRQEQQGSSFLLQQEIESVRSCSPMLPLEAHPAPPLGAPASGVAAGGDPDDGGGDDSSSHDTDFSADHEPEGWVARPITHDAARGCHFHDALDTLLRRALNRHTWSIEYRCVVYQHSRGVYPDRWEVTCLVRRPENSLQGAEVCSEHYSISERDSAEAAMQDVARRALSHYCSVLGGVADGLDLKYYPSCCNTINSSSENTLVYIINS

SEQ ID NO: 73622 - protein, 184 aa, Zea mays
  Coding DNA Sequence Number=SeqID_30247
MPYGLKICKLIILHRDPGVEIGLVLDIVDEINLIDTFFCYLGGNARLFDDYRDEDYYVLPRKFSIVARVEVKFPIEPRYRDRQHFILSDINGAKIEAMTSSYETVKHFNNLLHEKHVFKMHNVDFSISMGEHQFRHISGPMELYLTRQTVVEPYTVPFQMPPFPKHIFLSLADIAELPNRQIGL

SEQ ID NO: 73623 - protein, 166 aa, Zea mays
  Coding DNA Sequence Number=SeqID_30248
  Gene Ontology: Mol. function=ion channel activity; Cellular component= integral to membrane; Biological process=ion transport
  Homolog annotation: Hit_ID=Q6ZHE3; Match level="QueryCoverage=25%, HitCoverage=5%, E-value=2e-19, Identity=90%"; Hit description =Putative cyclic nucleotide-binding transporter 1
MKSKCVVWSYSGQVPKNEHLMMSGPLGQCDNPDCVNCPPACKNRRHFQRGLQVQERFEEWTQSLKPVPVIVRCRIIRAKTPEVCHRKYLHLLNVPNKSLLVFTLFSFQALNQYTLTLDDSAFDSISAVNLTAINKKKEAAKPADFHDPARESFEAELDRILRVQEQ

SEQ ID NO: 73624 - protein, 114 aa, Zea mays
  Coding DNA Sequence Number=SeqID_30249
  Gene Ontology: Mol. function=receptor activity
  Homolog annotation: Hit_ID=Q8S486; Match level="QueryCoverage=26%, HitCoverage=13%, E-value=1e-11, Identity=93%"; Hit description =Putative S-receptor kinase
  Subcellular localization annotation: CTP_CleavageSite=60; ConfidenceScore=5.07e-01
MPGSATVAIQPRPPSVTAPWWRKRWRHPQGLQREPAPVRHRHPPPPTIVGFHRRSSSLVPASSPMTRGHDGRYSIYINASLSHAYYLYILSLFLLGVKFTVKRQKRALFSILSK

SEQ ID NO: 73625 - protein, 118 aa, Zea mays
  Coding DNA Sequence Number=SeqID_30250
  Gene Ontology: Mol. function=metalloendopeptidase activity; Cellular component=integral to membrane; Biological process=proteolysis
  Homolog annotation: Hit_ID=A2XIU5; Match level="QueryCoverage=45%, HitCoverage=15%, E-value=1e-17, Identity=75%"; Hit description =Putative uncharacterized protein
MAQRHISLSPVRSLRRAPAFLSRFAPDDPDLLRNRPVPDRLLVVSAGVTANLTVGVPVQAQLPGVLVPEVRPGSAMDAVQAVDRALTEARPTSPARSRVGGLAMDAEDTEAGGRVMKM

SEQ ID NO: 73626 - protein, 219 aa, Zea mays
  Coding DNA Sequence Number=SeqID_30251
MSSPELRESSALMLKVTGGRWPRNVPIPQAAGSSRRVVETSGVREGWGPTSRGQNGAGKREGYRPGSSMPPPGASGSSAPLPAMPTQERRPPSPSCAAETVVGGAEVSMDISVEDYLVGRVAMFDAHTRRGPTGLESGQLAVVPAPAAASPVAVATGAKGSSQDPWSRFCASGEIASAAAAKDVASSVAQQLKHAAASGALTSEFTAERRRFKRRIERL

SEQ ID NO: 73627 - protein, 102 aa, Zea mays
  Coding DNA Sequence Number=SeqID_30252
MAAHTMSVRGACGGRRGGEGRGGHGDGQSQRRWAPATGGPAVSWHRRNNFQPYYGTRHLLHVTFHGKIASLKRVRLAGESPHPRNWDPHAEPDHVAGYGGGA

SEQ ID NO: 73628 - protein, 572 aa, Zea mays
  Coding DNA Sequence Number=SeqID_30253
  Gene Ontology: Mol. function=nucleoside-triphosphatase activity; Cellular component=cell soma; Biological process=regulation of transcription, DNA-dependent
  Homolog annotation: Hit_ID=A7PAY3; Match level="QueryCoverage=98%, HitCoverage=58%, E-value=1e-163, Identity=57%"; Hit description =Chromosome chr16 scaffold_10, whole genome shotgun sequence
  Pfam annotation: Domain name=DEAD; Domain location=264-487; Score= -38.7; E_value=0.032; Accession=PF00270.20; Description=DEADDEAH box helicase
  Pfam annotation: Domain name=ResIII; Domain location=260-465; Score= -24.7; E_value=0.0056; Accession=PF04851.6; Description=Type III restriction enzyme, res subunit
  Pfam module annotation: Pfam domain module=DEAD::ResIII; Domain location=264-487::260-465
MARSAEHRTAARRSTAPVLHTTLGVSLEKTRLMQARIDGFVQQMTGLLRLERDAELELAQDHEVSAAGTVMDGMPKKPVVAHGQAQEDGDTICNLRVISSSTGLTGQHLVLFRAEGSHRLPATRLSPGDTVCVRACDSQGEVAASTPCLQASVHNLGEDGRSITVAFRSRRGGEPAFSRFPGKFARIDRIQALADAVTYERNCEALMALQKRGLQKRNASIGVVATLFGDKEDATKPERNSLTDRRGPEAPDGGSLETHSHSFDTSQSRALALALDKERPVLVIQGPPGTGKTRLLSYLVARVVRRGERVLVTAPSNAAVDNMAESLSASGLKNIVRVGNPSRISPSVAPMSLGQIVATRLEKLTREFETRRSALRKDLKRRVQDGGDGSSVRQQLKRLGKDYRKEKKEAVREVLANAEVVLSTNTGAADPLVRGTGGCFDLVIIDEAGQAIEPSCWIPMLQGKRCILAGDHRQLAPVVLSREAMEGGLGMSLLERASSLHDGLLATTLTTQYRMHESIASWASKEMYDGLLRSFPSVASRLLVNYPSVKFSSQDNWSKYCPLVPFSIHVRD

SEQ ID NO: 73629 - protein, 220 aa, Zea mays
  Coding DNA Sequence Number=SeqID_30254
  Gene Ontology: Mol. function=nucleoside-triphosphatase activity
  Homolog annotation: Hit_ID=A3AAI3; Match level="QueryCoverage=94%, HitCoverage=21%, E-value=7e-23, Identity=38%"; Hit description =Putative uncharacterized protein
MSPHHRHFTSQFSSSYYAPVRPQRRRELKLLPLPDYSPTSCYHSGHLRLVSPAVPYERALSALVGRHSYPTSSHGGRDDNAIVETKESRRRPRKGKKTAPNQGVRAPSSSELSTRTAQSGDPLGRKELGQHVVHWLKQGMRQMASEFASSDQPETQGNKAFLWSDGGHAAHAGFVAQAQAHLSATPMPKGQDALCRTASAHYPTLFDNFQRELRDVLLRR

SEQ ID NO: 73630 - protein, 266 aa, Zea mays
  Coding DNA Sequence Number=SeqID_30255
MCQGPHSIADKCLNQIASATQVGSVPEGPFVLVILRHLKSRERHITSWREARQVFDITRRHIEPKISPVAPLVPDTRDYLHDFREVFPVLGVKAIILGEDLHRRLPAVGSNRPDILRQRNHGVRRQLVDLHFEPSQHLRHEAMCREAKAGDKKASKTTNSPSGLGISSAPETRPTPSPKYPSRCISSTRTEDILEVPNSTVWPGCSSITAKSLKVSSDDGTTDDALAADEEEDIGTYRRRRRTVCLMRGRFPKQESKEGRRAIYKC

SEQ ID NO: 73631 - protein, 53 aa, Zea mays
  Coding DNA Sequence Number=SeqID_30256
MVGTSAVTARRQPGSVEHCTMQDVVDGVTWPTTLPPGWTVKWDVAPAGEEHEE

SEQ ID NO: 73632 - protein, 269 aa, Zea mays
  Coding DNA Sequence Number=SeqID_30257
MVCPRLQNYPGKPLSSYHELLKGSGATSTRCACVHQEKTGSRRKRLHNSEELRRGLGLLSGNQGWGAKRKPKKLPKNDPSDQVPRRASQRGRADDQVPHRTSPRGGVGDHVPCASKSVRRTRQSSPPPSKSTRWSGQPSPLPSKSTTAEQAYEVEQTTKPPPIKSKALSQSRKHTLTTTVRDARSPSNKTHTHSPVRDDLSAGASTVASKAEATRQEAMSNELVHTHERTTSSPQWRRGTVQCQSSPGLTPWVLPCITTRTSATSPPQG

SEQ ID NO: 73633 - protein, 226 aa, Zea mays
  Coding DNA Sequence Number=SeqID_30258
MGWLWHHRLAHVGMKNLLLELTLSSKKANKDHTWALGLNEDAPWQDVAAGLRQSAESCEGCLCPLCLRRTSGCSEGLERRVASLPSPQHLPSEGPVRQSHLVPKTSLDGGDAALARSGSAGVFDVTVDGRRTVGLRVSRSVAACRIAGFPKSRALPIKGGGGGAVWTLPSALRKNPSRPPSCCSFSSAAPFARRRSGSSEADRPPPTTVRSNAILFFLRRRHVAGL

SEQ ID NO: 73634 - protein, 114 aa, Zea mays
  Coding DNA Sequence Number=SeqID_30259
MGFVDRFGKVSRERVIMGLFYRSFSALGLGPLCACEWPGELCLARPQASASEEDLRLARPPGLGLSLGLERSHNLARAQPRPQEKSPPRSTWASDRLRYRGYIITLLLVSCLRL

SEQ ID NO: 73635 - protein, 130 aa, Zea mays
  Coding DNA Sequence Number=SeqID_30260
  Homolog annotation: Hit_ID=Q6J9V9; Match level="QueryCoverage=30%, HitCoverage=13%, E-value=1e-07, Identity=71%"; Hit description =Putative uncharacterized protein
MAEARATLLRYPRTFSRPAGTICNGIPPEGGIGALGPYRMGPGPANHLQDKTESRSPTSLASGATGSSASPNLKPRPQKKISASPDPRASASGGVTTSPEPSLGLRRSLRLAQPGPRTDYVTGDTSLPYS

SEQ ID NO: 73636 - protein, 32 aa, Zea mays
  Coding DNA Sequence Number=SeqID_30261
GNEIDGSGYDYGTGEDEAVEGDFQEFQDYDEF

SEQ ID NO: 73637 - protein, 673 aa, Zea mays
  Coding DNA Sequence Number=SeqID_30262
MRRKNGGHPPSRGLEDGKTRPAQSGRSQTAAHGAHDRPAVTSDPPLLPRPTGERGRQPCRRHATAPGGRTSPTPDTPAWKTRPTRHATGAPDAAYKQLHRHLRHHRASSIAEPTPRLEATQRTTRQRQPGATVNVAKGGPAVMAVAGGREQRSRRQPSSRPIREQQENPLSRREDDAPVIRPSNGSRTRNGRPTNHSPRRINSAAGQAAQERQATLRLRRNNRTKKRLALRGVQQPPQIAWAIHPLLVRGSKAGPPKGSTTASGYPGSAPITDQGIPPEGGIEPSDPVARGPGLADHPQLIGDTMFGAHRGLGGCSRKPGSGQTVDSVNIPARELGPRPYTRATASSHEGTTRPAEALREALRPRRSENTPPRPRGLHPAGALARTHRNKMQPRKAGPLAKKCDESLQTSVNTPFEARGLLSGTIIRGTLKTPNSQLVTPISIKLLRPDGARIRAQSQKTTNSASPDPRARTPPWPPPNDLRLARPRGSASATEYRLDLSFGGASTSPDLGRGPATSTGGTIITLPRAASGRGRQQGLDRSNSCPSAKHRRSSDGHNITPAGCQDLSGCHIGMALLERVGRARTRTRQALPWGRSLPSPAWTLVTPTASAPDLGAGRTRRPRDSHHSHAGLRPPRSSPPFVLAHALDPSGLGHAALTRRPEGPRSRNADNIQN

SEQ ID NO: 73638 - protein, 35 aa, Zea mays
  Coding DNA Sequence Number=SeqID_30263
MPCYELLLLPALYGCIGSRAAVIGAQVFRKLSPVK

SEQ ID NO: 73639 - protein, 59 aa, Zea mays
  Coding DNA Sequence Number=SeqID_30264
MAEHDQETSSTHEMAWTCGVWCHGGHQYFHGDTELEIKGERNGAMDNCTFIRIAWPLGS

SEQ ID NO: 73640 - protein, 633 aa, Zea mays
  Coding DNA Sequence Number=SeqID_30265
  Gene Ontology: Mol. function=serine-type peptidase activity; Cellular component=lysosome; Biological process=proteolysis
  Homolog annotation: Hit_ID=A7PP87; Match level="QueryCoverage=67%, HitCoverage=81%, E-value=1e-125, Identity=52%"; Hit description =Chromosome chr8 scaffold_23, whole genome shotgun sequence
  Pfam annotation: Domain name=Abhydrolase_1; Domain location=130-467; Score=-11.2; E_value=0.042; Accession=PF00561.11; Description =alphabeta hydrolase fold
  Pfam annotation: Domain name=Peptidase_S28; Domain location=68-512; Score=222.9; E_value=7.3e-64; Accession=PF05577.3; Description =Serine carboxypeptidase S28
  Pfam annotation: Domain name=Peptidase_S37; Domain location=41-559; Score=-178.8; E_value=0.072; Accession=PF05576.2; Description=PS-10 peptidase S37
  Pfam module annotation: Pfam domain module=Abhydrolase_1::Peptidase _S28::Peptidase_S37; Domain location=130-467::68-512::41-559
MERVVIAAVFLLLFSCQPSEAGRVVVRRPPPTLARRQRHYTSPRAGGDGGGGVSVPPAVQYETRWYTQRLDHFNSAPASYATFQQRYLVNDTFWGGPTAPIFLYAGNEGDVDLFTNNTGFMWESAPRFRALLVFVEHRYYGESMPFGGTRAAAFRDARTKGYLTVTQALADYASFVLSLKANLSAPAAPVVVFGGSYGGMLAAWMRLKYPHIVMGAVASSAPILSFYGIVDPYAFYDRITDDFKSESKHCYDVLRKSWDVLDDALATKEGQAQLRRTFTMCNGSSVQDIPSLLESAVVYAAMTDYPTPSGFLTPLPAYPVRAMCRAIDASRAESAEASSGAANDGNSNSTAQLTLSQVRDAMDVYYNHTGAAACFRAEEDDDPHGMYDGWNWQACTEVMVMAYGIRDGGVLQPSPFNFTDVVDSCRNYTGLPPRPFWIETEFGGFDIGNVLKKSASNIVFFNGLRDPWSTGGVLKSISDSIIALVEPKDNYLVSTGVSSGAESGGVVGASTVRSDSGGCRDAVRWPAGWQAELGASCGIAGWQAELDACCRRVLLAVAAAGTWKRSSARAAGCRRGWNLEAEGLGGRKRKAAAERVSGLGPRRLGSSAARARRTAGKSGRHRRTMDGRLSGRQ

SEQ ID NO: 73641 - protein, 295 aa, Zea mays
  Coding DNA Sequence Number=SeqID_30266
MEKDRQDASQKRRAFTRVRDPRREVKMARGIAKSAAPGTSKPPLGAKSAAPGPSKPLPVVPVPEQRPASPRRTAETEVGGVEVSMDISVDDFLVGGVPMFDAHIGRGLVGSEAGQLAVVPALVAAGLVAVAKGYAQDPLAKFCASGEIASAATAKDVVGSVTQQLKHEELEVLPSIVTGLMSFASLITCGGAMNALSRDGCRHFEVFDRSDEDFDCEIFQVEDAVLKQSAGALYDRMWGPHGRDTVRERSDRAMEQMVNDEEVEDLGSLESANPLAEGVRAGTEEQPALPTGSDI

SEQ ID NO: 73642 - protein, 317 aa, Zea mays
  Coding DNA Sequence Number=SeqID_30267
  Gene Ontology: Mol. function=kinase activity
  Homolog annotation: Hit_ID=Q6S563; Match level="QueryCoverage=23%, HitCoverage=24%, E-value=3e-21, Identity=63%"; Hit description =Putative ribokinase
MAAMFVSPYDLEAQAFQRTIEFEEELAEEFSGGTTNARNKETTSDDEDEVLLASPYWQDKDKQKDLSVPGAGFNLHGIISSCCEPYMIVYIELEEKALVDQLEKLVQLILLFYLEERWEIEDLALGLASQTVLGAATMVSQTGKHPGQLKGQKDWREKRDEFKKKVSIVELNHILNEVNTHILPSHNDLTPITTIAGGSVANTIRGLLAGFGISTGMSFSGVDLTSLRAKKGHTAQTDSSSYNVGDEEYCGYDYILVGQLSEVRISNFVTHQLLFLTPLSACFYKTYAILNWVVPLARQGRYDEIADSKLSDKRQVL

SEQ ID NO: 73643 - protein, 222 aa, Zea mays
  Coding DNA Sequence Number=SeqID_30268
  Homolog annotation: Hit_ID=Q7XBD4; Match level="QueryCoverage=72%, HitCoverage=16%, E-value=2e-07, Identity=27%"; Hit description =Cinful1 polyprotein
MSSSSFAASASSADPSSEDTLSDLVATELQPGHTVEFGTLRISSVHVQEMQQLGYFGEAKYVWAVASYGGQPFVEVFAKNYCLHWQKKKIGDKIAQFGSCTFTPRTGKTSAEVVEIVPSARNKWGNWWDFWFYVSCGEVEGLPGLPAAIMCSHCYVAFPQFEVAEDDENEGALWYAARMSSGRDLVEEFIGYGVWPLAHGWVLGVSVPPPDADLSDQLVTNL

SEQ ID NO: 73644 - protein, 688 aa, Zea mays
  Coding DNA Sequence Number=SeqID_30269
  Gene Ontology: Mol. function=hydrolase activity; Cellular component =intracellular; Biological process=RNA processing
  Homolog annotation: Hit_ID=A3A0G5; Match level="QueryCoverage=90%, HitCoverage=96%, E-value=0.0, Identity=73%"; Hit description =Putative uncharacterized protein
  Pfam annotation: Domain name=Metallophos; Domain location=81-301; Score=40.9; E_value=4.6e-09; Accession=PF00149.19; Description =Calcineurin-like phosphoesterase
MRVGGLPDWGVGRDDQTNPESQSRSAPGGPRLAACAFAMESRGKRILPFLLVIIAAAAAPSAMPRDEREVVVVSGAPDGVVWVAQLSDLHFSVHHPERAYDFRRYVGPALAMVNPDLVLITGDLTDGKSKDLLTMKQNEVEWVEYESTMKEIIENSKLPRRIFYDMRGNHDSFGVPASGEDYDFYSKYSINAKLRRQGRVQSITLENSGRKHLFVGFDSTMEIGLRGPTNLFGHPTDKQMIELDQALSQWNTDFDKVPVTKIAFGHFPLSFSALTESGKSIKDVFLKQSLAAYLCGHLHTRFGKNLKRYYHRAVQEPSLSEHYYQHNMHQGDAFQGNKENCSEEASHVEEFWEWEMGDWRKSRSMRILAIDDGYVSYTDIDFRLGSKSIIILPTFPLDSRFMQRASAFRDFKCHVMGASSFDTVRALVFSKHEIVSVSVKIYDSRPGTLEIVFDSEMKRVDSNETRGNMYLIPWNWRAFEDSSPSRYWLQIEVMDITGDTSVSQLRPFSVNGLLARVNWTWKEFFVIVFIPWLFGHPITEDGSLTYMTHKGWILKGPSSSNEVVHAGIPDVMVIVLPHLCFVLVPTIVILAAMAAERTAYREHYLSRSGKKKDDYRKSRRQIEHENFWNGRWISKFLCLLCVVVLCKHWKLCRALVKAYAMNPLLHAPVLFFFVPLLMVFAIYKTRSI

SEQ ID NO: 73645 - protein, 190 aa, Zea mays
  Coding DNA Sequence Number=SeqID_30270
  Homolog annotation: Hit_ID=Q10IY6; Match level="QueryCoverage=26%, HitCoverage=5%, E-value=4e-07, Identity=57%"; Hit description =Pentatricopeptide, putative, expressed
MAQFGGEVMVSVPAKLVLFEDLCMNLFEIYLKILQVDPLSHQVKVCEFGLAKILGGVEIFRKMKVACIRDTVSTTVGSLSQFLAHSRLMKLMWLLIQKISTLKQQDRVEKGIFSSYADVEKLLQALSKEEEEVVRVFLVTFCANVLLNFYVKLDPLATTCRLLVGIPERNMVSFVMLMQGYNTHADMHRA

SEQ ID NO: 73646 - protein, 77 aa, Zea mays
  Coding DNA Sequence Number=SeqID_30271
MVEETTSMIEAAYAGEDDVARSRALSHDKSELFRRFERLVQVRRELLEGKCDLGKFVDEVCLILKFGMDTAKCAATL

SEQ ID NO: 73647 - protein, 242 aa, Zea mays
  Coding DNA Sequence Number=SeqID_30272
  Homolog annotation: Hit_ID=Q6J9V9; Match level="QueryCoverage=26%, HitCoverage=32%, E-value=1e-07, Identity=45%"; Hit description =Putative uncharacterized protein
MAERYQLPRSCVPPTTRWKDCGCPPSGGSEGGKTRCIREREDTVAFQGGHPPFKGDSPYLRPQPSWAESSPTRSKVLPLRRGGWAPRVMQTGPGQKKPNRRAQCMQPPSGYKRSSTFAQTSGGSERRFAFAIRTASKKGPRKGDTPKRILLREGNRPRASLLIRGSKAGPSEGFNSRLRARGLRTHYWSEVRRPAPRKGSTAASGHSGSAPTTDQGGNDLVTESHQREASSPRTPSKGDRVR

SEQ ID NO: 73648 - protein, 113 aa, Zea mays
  Coding DNA Sequence Number=SeqID_30273
MAPAVGAEAEAAREVPVADGITATIRASGLRAGGGEPLVSLLLLRRPTLIEWGYSPVDYLNRFTKHESPRVKVTSESGDPWTASPSEARSDLAEGVTAPFQRQDPSLQDQSVL

SEQ ID NO: 73649 - protein, 267 aa, Zea mays
  Coding DNA Sequence Number=SeqID_30274
MTLPVDVAGLCPRRGDVGAPPKPRLSLSSVAEAESEPWGRARREVVWPRPGWSPSPGGRARRSFVVFRVLARVRALGSGGAEFAVFRVLARVRALGSGRSGVRRLPGLSPSPSPGVGRSGVRRLPGLSPSPSPGVGRSGVRRLLGLSPSPSPGVGRSGVSSSSGPLQLYADGGYQLRIRRLEGAPNFNSMALHIAVIKANMSEVSILGIARAGMLSTGRSGFTVEGRARRAIPSYQVVDSARKRHGQLPDGSRKPTTQPKIPANGEK

SEQ ID NO: 73650 - protein, 57 aa, Zea mays; identical to SEQ ID NO: 44951
  Coding DNA Sequence Number=SeqID_30275

SEQ ID NO: 73651 - protein, 83 aa, Zea mays
  Coding DNA Sequence Number=SeqID_30276
  Subcellular localization annotation: CTP_CleavageSite=37; ConfidenceScore=5.11e-01
MAVGVGTSNIANTRTHGNVDLAAADGRRSTKSNSAVEAANSAVEVEVEGRGRCHLATETPSSLTFLTCYSAVAFAKEEIRTIK

SEQ ID NO: 73652 - protein, 122 aa, Zea mays
  Coding DNA Sequence Number=SeqID_30277
MASHDVNRSPRMMIHIRSLDFSLNDEGEVVRASEARPPLPRNHDTTARASRGPRFDYTPKVPIRFGNLDFIINQGVIGPDQCSCDLLRSRGNMKKRAITGRAPRDGSCQRSQVSEAHHVADD

SEQ ID NO: 73653 - protein, 70 aa, Zea mays
  Coding DNA Sequence Number=SeqID_30278
MAQCSALTILFGKPYTSRSPIHPPLGTMLSERMMREGEALLVEANRRNHITERWHHGLLNAQNQPSVVVK

SEQ ID NO: 73654 - protein, 75 aa, Zea mays
  Coding DNA Sequence Number=SeqID_30279
MASPPPFDLCGDLNDDDIDEPVTTVPKDRRLPAATPTMNGLNDHLLRFTCRLQRPAQNPNPSPNPPPSPPPDSTL

SEQ ID NO: 73655 - protein, 63 aa, Zea mays
  Coding DNA Sequence Number=SeqID_30280
MKLWKETSRSSKITTSSRCGLAATPSRLPVKAAFIYVSFPHFDLLTEEEDSISFEDIIVVRRR

SEQ ID NO: 73656 - protein, 198 aa, Zea mays
  Coding DNA Sequence Number=SeqID_30281
MDSWVSSVGTVNPWQIRQEQSSRGGRTLIDIVQAVGVMWLPAKGNWLLGSIGGITTADELEFFLLGAISILSASRVEGELQRGFGSQKARTRAWKAEAAKSTALMGYSRARYRFKKCPVSTRRLFPKHCCATWSPGGYFQNTVTSKAPTPTTSYSAAISESISLMPKSFTYCLKGISFTNEQDNHQGEANIILSLEGR

SEQ ID NO: 73657 - protein, 209 aa, Zea mays
  Coding DNA Sequence Number=SeqID_30282
  Gene Ontology: Mol. function=ATP-dependent helicase activity; Cellular component=endoplasmic reticulum membrane; Biological process=vesicle-mediated transport
  Homolog annotation: Hit_ID=A2YPI3; Match level="QueryCoverage=68%, HitCoverage=12%, E-value=4e-56, Identity=73%"; Hit description =Putative uncharacterized protein
MDVELLFERSLPTTLQFSTCAQFGDRAKSVTDNADAQFLIDNGDDFFNNPQSSEASLAEESVSTNGQQIEQEVSGDAVPSDPSIDKSIQHALVVRDYKGAVNQCLASNRMADALVIAHAGGSALWENTRNHYLKNSISPYLKVVSAMVGNDLMSFVSTWPLSSWKETHAHLWTYPLVSQHGRRLGVAPDHVVSSNTAGTVGAASPTDNH

SEQ ID NO: 73658 - protein, 66 aa, Zea mays
  Coding DNA Sequence Number=SeqID_30283
MHLLRTSAGGDWIGWVVDCSPASHGQGRILGWSRWAHRRHGSAKACGGAASGWQGKKKPLHRPSWD

SEQ ID NO: 73659 - protein, 99 aa, Zea mays
  Coding DNA Sequence Number=SeqID_30284
  Subcellular localization annotation: CTP_CleavageSite=60; ConfidenceScore=5.29e-01
MRSPIPVMVGTSAVTARRPVGVSGALYAKAVSPDLLPGNRWGRLINSASAFGNQTTQPNSCMSRGSLEEMVAGITWPTTLPPGWTVEWDPASAEVEHEE

SEQ ID NO: 73660 - protein, 67 aa, Zea mays
  Coding DNA Sequence Number=SeqID_30285
MKLLERGIELCLTGDARIKVTGLHPTAGERRPSSTVSSDLGQNYSVRKHKEYEGWRRAEAMRRGASA

SEQ ID NO: 73661 - protein, 124 aa, Zea mays
  Coding DNA Sequence Number=SeqID_30286
MGKSKKGGSSSHHSGDKRKRKPTPPSKDFGDSEYSEEEFSSESEGSLVPASPPASSDDSDDSQGIAIEVWTYIRAVERAGLEGSDESEVSLDEEDSSASSEEGGDDGDGDGGDGGGGDGDGDGG

SEQ ID NO: 73662 - protein, 93 aa, Zea mays
  Coding DNA Sequence Number=SeqID_30287
MAVMGSTSEKMYLCQDLVDVGLLIEDPLTGHMPHHGFHILVPPMCCNVCVTGETLLGKVKNTDTELVNGRPRYSGKASAQMGRSFLGGIFVKT

SEQ ID NO: 73663 - protein, 146 aa, Zea mays
  Coding DNA Sequence Number=SeqID_30288
MPTFISKPKPPVIVYVILKNICSPDSYCVLSGVHQTGIVGCPPLRTQCQYLIQCQTLRQRMRHSISLRLRAQPFPMMMMMILGSRLRLLCLHAHMIMRLGVPVLPLLPLLPLTLVAILQSLTQQQAHLAVAQQQMSERMLSMSQTI

SEQ ID NO: 73664 - protein, 120 aa, Zea mays
  Coding DNA Sequence Number=SeqID_30289
  Subcellular localization annotation: CTP_CleavageSite=63; ConfidenceScore=5.03e-01
MATPGVLQRRRIKVTGLHPTAGERRPSSTDLLKPTPPFVGDSLAAGTFRLRSKLQCEEAQRIRRMAQSRSYAQGSFGVIIEKGTDLKGKRLFGTRWIIIELLANVKGMGVILHGLSRAYK

SEQ ID NO: 73665 - protein, 356 aa, Zea mays
  Coding DNA Sequence Number=SeqID_30290
MEPPPVPALVLAIDEFAANIEGESGEEDAEESKDSRVPTSSAMARAVESSPVQRLLRSAQVVPALGDRARVLGHQRRRQPGNDEEAVGHLLRQFGILVRAGGVIEGSLTSSSVDESCVAIRGTTSTLVRACSGVEATAAESSEEDAVVLRVFGIPAIQKALFRGTGRRRIIRLDAGSNRSLSDWDGGDFGSGRRRHGRHVRWARDHVSVSRLPYHDGRLGRIAGLGNLLHNDRCRPSPLWWNALREGRLNDKARSGAGRTGRRRLKGLPGCQVGLAMASLAEGKRKITAETYEWKARTKTFRDTYPLRAMIHRAWGEVSWIPAPGTAAEVRFAGNFGATLALDTRGADCPGTVTVT

SEQ ID NO: 73666 - protein, 291 aa, Zea mays
  Coding DNA Sequence Number=SeqID_30291
  Homolog annotation: Hit_ID=A2XFR6; Match level="QueryCoverage=49%, HitCoverage=41%, E-value=1e-29, Identity=47%"; Hit description =Putative uncharacterized protein
MGTYSWLRCVEMDLSTHMVCARFYALELGVTEVMVRTLQTIRVNTSYAPPPRQISVYLVVVEEVPMNLPHIRVENEVILEDNSEEQLSTPTPLTESLAFAARSSTSAPPAPAIQAPAPRGDDLDDSGTRMTTITRTKKNKSTRDRGFKTLSAHESLTPLSTYAASVTDAARRTLWSHSHTYRQQLHDTNFRHLPLRLSGGSQTSIVLGEASEDRLNTLAGVVADLNTDLDSATLDLSRVHLELEDAHAMIAALEAQLQGRDPPEAQVPAMALSPPRKRLRYGEPGSVTRLL

SEQ ID NO: 73667 - protein, 246 aa, Zea mays
  Coding DNA Sequence Number=SeqID_30292
  Subcellular localization annotation: CTP_CleavageSite=70; ConfidenceScore=5.10e-01
MEETHLHVFDASCPRQSTLTRAPACPAPRPSQASAMARAHAYKALPGFGCTLPRTLKPRRSLARRRLPVRSVSAAAQSLCHHRPANRAFPNSVQPSEKTVHTSVKLPERGIGVCFAGEASPRSPELSTPPEYVDRVIHSTILRFLVHTVTMLPREAHRALGLNQFTVVWPVHSPPTRTPACARDPGDSGHPRRQAVPRRDRQSLPEPAPPFAGPPSPPEVAPDPAPEPAPEDLSATALEGKPRFYA

SEQ ID NO: 73668 - protein, 115 aa, Zea mays
  Coding DNA Sequence Number=SeqID_30293
MEETNRHVFDAVCRARARPRTSRAAPEPSQRPAIPNPVQPSEKTVHVSAKLPERGIEVCFAGEAGLRSPDFTRPPATVDRGSLEDMVAGVTWPSTLPPGWTVEWDPASVEEEHEE

SEQ ID NO: 73669 - protein, 223 aa, Zea mays
  Coding DNA Sequence Number=SeqID_30294
MAIRPEFIDSMFSGQDGAGALDQSDEAPNCLITSNDRLTIQNDNLEQHCSGSSGTPYRHYPGSVLPPELGVTEVVSEMVRTIQTTRTNTNYIPPPRQVPVYPVVVEEIPVDLPRIRVDNGVILEDCSEEFLPTPTLLVESLAFLAGLSSLTPPAPVVQAPTPGGDDPNDSGDDDDEEEEEEEKEKENINEEANGEHQDHYVGLCPVTEHYTSMFETGHFPNLL

SEQ ID NO: 73670 - protein, 252 aa, Zea mays
  Coding DNA Sequence Number=SeqID_30295
MGAIKSRLGPLKGHDLASPEPALGQGQPTPEDSRLARGPSQATDTPSARLRPSLRQEATLAKSPQRSTVSQERLMQRVRLTAAKSGLRRHRKLCLARPRARTRAQPRKTTNSASPDPGLGLGLSPRRRRTPPRPTPGLGLGLSPGRRRTPPRPTQGSDSGSAPEDDELRLARPQGSDSSSAPEDDELRLARPQGSDSALASADGLRLARPRGSDSTSASEDRLDLDLGGASASPNPGLVPTTSQKGPSLPYP

SEQ ID NO: 73671 - protein, 634 aa, Zea mays
  Coding DNA Sequence Number=SeqID_30296
  Gene Ontology: Mol. function=receptor activity; Cellular component =mitochondrion; Biological process=protein amino acid phosphorylation
  Homolog annotation: Hit_ID=Q5TKI6; Match level="QueryCoverage=100%, HitCoverage=100%, E-value=0.0, Identity=65%"; Hit description =Putative uncharacterized protein OSJNBb0048I21.11
  Pfam annotation: Domain name=DUF668; Domain location=377-462; Score =169.3; E_value=9.9e-48; Accession=PF05003.3; Description=Protein of unknown function (DUF668)
MGGLCSKVSAVDKSPSDTALGRNQVADHEPGASLELEKPPVSRESAAPAKRLDEQLQSFSFLESVVPGVAFHAGANTGGEAGSRTSPQLTRSLSQRAGVGKAKAGAAKVSEVSSILGRASTAGLEKAVEVLDTLGSSMTSLNSSSGFVSSSAAKGNKISMLAFEVANTIVKGSNLMRSLSEPSIKHLKEVVLHSEGVENLISKDFDELLKMASADKREELEVFTREVVRFGNRCKDPQWHNLDRYFEKLASERTPQSYLKEKAESVMQKLVTCVQNTVELYHELHALDRFEHDCRLKQKEQDGLSSRGDNLDILKQELKVQSKHVKSLKKKSLWSKNLEEVMVKLVDIVHFLYLEIYNAFGRPDSEEPQEPAKHHNRLGPAGLALHYANIINQIDNLVSRSCAMPPNARDTLYHSLPPTIKSAFRSKLQSFEVKEELTASRIKAEMEKTLRWLVPFASNTNRSELNCKISGQMDMSRMETLYHADKEKTEALILELVVWLHHLISKSGNASGGVRSPIKSPVSSPTQKGAAITLLSGKTNNLPPILTQEDQDMLRGVKYRKFVPGISKSQEFDTKSSHSKHSRLSKSNSHSPASGSRKDLLPVRRSSMLPVIDFEIDRTKALDLIDRLDNLKVQ

SEQ ID NO: 73672 - protein, 246 aa, Zea mays
  Coding DNA Sequence Number=SeqID_30297
  Subcellular localization annotation: CTP_CleavageSite=70; ConfidenceScore=5.10e-01
MEETHLHVFDASCPRQSTLTRAPACPAPRPSQASAMARARAYKALPGFGCTLPRTLKPHLSLARRRLPVRSVSAAAQSLCHHTPANRAFPNSVQPSEKTVHTSVKLPERGIGVCFAGEASPRSPELSTPPEYVDRVIHSTILRFLVHTVTTLPREAHRALGLNQFAVVWPVHSPPTRTPACSRGPGDSGHPRRQVVPRRDRQSLPEPAPPFAGPLSPPEVAPDPAPEPAPEDLSATALEGKPRFYA

SEQ ID NO: 73673 - protein, 199 aa, Zea mays
  Coding DNA Sequence Number=SeqID_30298
MGAVRQIALPWGREVKLGIMTKKGHTIGARVDRGAPKDTEPGASDVPRVARMPSLTVLDGSQGAGSVTQLAPSARGEDEELQEIYLPHGGEDVYCPPEMDKAKSTIDASREASPIEMAKKLELALTTSSSSSSLVEAVSMVPTHLRLDLAMPLIDPDTPHPVLRNLKGRSGLEWRKATIGGKRGPEVVQIEPLVTLAFV

SEQ ID NO: 73674 - protein, 120 aa, Zea mays
  Coding DNA Sequence Number=SeqID_30299
MDDRAIVSLATFQSPPPSEVVGVIASAHCRERRHLEFDCADAKQRPNRPRQPRSWICLRGELNELGDKTEKSLRTDLHQFSALRQKLASDAELAEMVKAAEPFAQKLGVTMLDCAPLWMG

SEQ ID NO: 73675 - protein, 96 aa, Zea mays
  Coding DNA Sequence Number=SeqID_30300
MGLGVCGSLYRELDLPLVEECGDHEDDGFDYDYGNVFWYSFHLERPNGTIAEYVDVYSPLLYTPNPPPGCPCYNHCSEEDEVVEEDFQEFQEYNKF

SEQ ID NO: 73676 - protein, 82 aa, Zea mays
  Coding DNA Sequence Number=SeqID_30301
MGRMPGTMTPTPENADIACKDSPAKSDVCYTNWKGGAGYEAEMDRPMNAQLLHGCHWFVTLAGIEMTRWSHVTVADVESERA

SEQ ID NO: 73677 - protein, 263 aa, Zea mays
  Coding DNA Sequence Number=SeqID_30302
MAATAFAERIASGALTSEFASERRRLEGRIERLRTQHTEAVRDKSVAENKSHKFLEKLSVESELKSVRSYCEKTEASTRAEVERTHTLFVEAYRELGTQTSPFDKSVEEVGLRFLGWLKEELESLSSIVTGLMSYASLVTCERAANALSREGCRHFEVFDRASEDFDRGIFEVEDDVLKRSVGALYDRMWGPHGRGTVRERADRALAQMMNEEEVDDLTGLESSMTRMDGAEEARGEGLSAPQDGSGEDHAAVSAPAQVEEMR
